United States Patent Application Publication US 2014/0004565 A1 - sequence listing, part 65

SEQ ID NO: 1569086 - RNA, 19 nt, Artificial Sequence
  Description of Artificial Sequence: Synthetic oligonucleotide
gaaauccacuggagauuuc

SEQ ID NO: 1569087 - RNA, 19 nt, Artificial Sequence
  Description of Artificial Sequence: Synthetic oligonucleotide
gacccguccccaggagggg

SEQ ID NO: 1569088 - RNA, 19 nt, Artificial Sequence
  Description of Artificial Sequence: Synthetic oligonucleotide
cguugccggggaaagagac

SEQ ID NO: 1569089 - RNA, 19 nt, Artificial Sequence
  Description of Artificial Sequence: Synthetic oligonucleotide
uccuggcguacgucuucug

SEQ ID NO: 1569090 - RNA, 19 nt, Artificial Sequence
  Description of Artificial Sequence: Synthetic oligonucleotide
aggucucucccagugcgaa

SEQ ID NO: 1569091 - RNA, 19 nt, Artificial Sequence
  Description of Artificial Sequence: Synthetic oligonucleotide
guucgucaacucagcggcc

SEQ ID NO: 1569092 - RNA, 19 nt, Artificial Sequence
  Description of Artificial Sequence: Synthetic oligonucleotide
cagucuucggauucucccu

SEQ ID NO: 1569093 - RNA, 19 nt, Artificial Sequence
  Description of Artificial Sequence: Synthetic oligonucleotide
ggcgccguugugcugccug

SEQ ID NO: 1569094 - RNA, 19 nt, Artificial Sequence
  Description of Artificial Sequence: Synthetic oligonucleotide
agaccccaccccacggauc

SEQ ID NO: 1569095 - RNA, 19 nt, Artificial Sequence
  Description of Artificial Sequence: Synthetic oligonucleotide
ccuuagagcucgcagaccu

SEQ ID NO: 1569096 - RNA, 19 nt, Artificial Sequence
  Description of Artificial Sequence: Synthetic oligonucleotide
uggaggccggaagucacuu

SEQ ID NO: 1569097 - RNA, 19 nt, Artificial Sequence
  Description of Artificial Sequence: Synthetic oligonucleotide
ggaucuguuccucuaguuu

SEQ ID NO: 1569098 - RNA, 19 nt, Artificial Sequence
  Description of Artificial Sequence: Synthetic oligonucleotide
cagaccuaguucgucaacu

SEQ ID NO: 1569099 - RNA, 19 nt, Artificial Sequence
  Description of Artificial Sequence: Synthetic oligonucleotide
ccgaaaucuccagucaguc

SEQ ID NO: 1569100 - RNA, 19 nt, Artificial Sequence
  Description of Artificial Sequence: Synthetic oligonucleotide
cugaucucuccucuucacu

SEQ ID NO: 1569101 - RNA, 19 nt, Artificial Sequence
  Description of Artificial Sequence: Synthetic oligonucleotide
uuccguugccggggaaaga

SEQ ID NO: 1569102 - RNA, 19 nt, Artificial Sequence
  Description of Artificial Sequence: Synthetic oligonucleotide
accucccgguguccuccac

SEQ ID NO: 1569103 - RNA, 19 nt, Artificial Sequence
  Description of Artificial Sequence: Synthetic oligonucleotide
cagggacauagagcacuag

SEQ ID NO: 1569104 - RNA, 19 nt, Artificial Sequence
  Description of Artificial Sequence: Synthetic oligonucleotide
uacuuccguugccggggaa

SEQ ID NO: 1569105 - RNA, 19 nt, Artificial Sequence
  Description of Artificial Sequence: Synthetic oligonucleotide
ucccucacgcccggccucc

SEQ ID NO: 1569106 - RNA, 19 nt, Artificial Sequence
  Description of Artificial Sequence: Synthetic oligonucleotide
cauuuccuuagagcucgca

SEQ ID NO: 1569107 - RNA, 19 nt, Artificial Sequence
  Description of Artificial Sequence: Synthetic oligonucleotide
gcggccagagacccguccc

SEQ ID NO: 1569108 - RNA, 19 nt, Artificial Sequence
  Description of Artificial Sequence: Synthetic oligonucleotide
guucauagagacgcuggau

SEQ ID NO: 1569109 - RNA, 19 nt, Artificial Sequence
  Description of Artificial Sequence: Synthetic oligonucleotide
uccaggcgggcuucgcguu

SEQ ID NO: 1569110 - RNA, 19 nt, Artificial Sequence
  Description of Artificial Sequence: Synthetic oligonucleotide
ucccagugcgaaggaucug

SEQ ID NO: 1569111 - RNA, 19 nt, Artificial Sequence
  Description of Artificial Sequence: Synthetic oligonucleotide
cguacgucuucugucaauc

SEQ ID NO: 1569112 - RNA, 19 nt, Artificial Sequence
  Description of Artificial Sequence: Synthetic oligonucleotide
cuuagagcucgcagaccua

SEQ ID NO: 1569113 - RNA, 19 nt, Artificial Sequence
  Description of Artificial Sequence: Synthetic oligonucleotide
ggcaugugcggcuuuuccu

SEQ ID NO: 1569114 - RNA, 19 nt, Artificial Sequence
  Description of Artificial Sequence: Synthetic oligonucleotide
acuagccgagacagaggga

SEQ ID NO: 1569115 - RNA, 19 nt, Artificial Sequence
  Description of Artificial Sequence: Synthetic oligonucleotide
gggcacgcaccagucuucg

SEQ ID NO: 1569116 - RNA, 19 nt, Artificial Sequence
  Description of Artificial Sequence: Synthetic oligonucleotide
gcggccguacaaccggagc

SEQ ID NO: 1569117 - RNA, 19 nt, Artificial Sequence
  Description of Artificial Sequence: Synthetic oligonucleotide
ggggcgcucagaucccggc

SEQ ID NO: 1569118 - RNA, 19 nt, Artificial Sequence
  Description of Artificial Sequence: Synthetic oligonucleotide
ggugucauuggcucaucau

SEQ ID NO: 1569119 - RNA, 19 nt, Artificial Sequence
  Description of Artificial Sequence: Synthetic oligonucleotide
auucucccucggcgcgcuc

SEQ ID NO: 1569120 - RNA, 19 nt, Artificial Sequence
  Description of Artificial Sequence: Synthetic oligonucleotide
ggaucuccgcuugaagcuc

SEQ ID NO: 1569121 - RNA, 19 nt, Artificial Sequence
  Description of Artificial Sequence: Synthetic oligonucleotide
ggaccucccgguguccucc

SEQ ID NO: 1569122 - RNA, 19 nt, Artificial Sequence
  Description of Artificial Sequence: Synthetic oligonucleotide
gcagaccuaguucgucaac

SEQ ID NO: 1569123 - RNA, 19 nt, Artificial Sequence
  Description of Artificial Sequence: Synthetic oligonucleotide
cgcgcucggagcuggaaag

SEQ ID NO: 1569124 - RNA, 19 nt, Artificial Sequence
  Description of Artificial Sequence: Synthetic oligonucleotide
cccggcaaggacagacccc

SEQ ID NO: 1569125 - RNA, 19 nt, Artificial Sequence
  Description of Artificial Sequence: Synthetic oligonucleotide
ggcgcucagaucccggcaa

SEQ ID NO: 1569126 - RNA, 19 nt, Artificial Sequence
  Description of Artificial Sequence: Synthetic oligonucleotide
gcuucgcguuucuggcucc

SEQ ID NO: 1569127 - RNA, 19 nt, Artificial Sequence
  Description of Artificial Sequence: Synthetic oligonucleotide
cggaggaucggagcggagg

SEQ ID NO: 1569128 - RNA, 19 nt, Artificial Sequence
  Description of Artificial Sequence: Synthetic oligonucleotide
agcggccguacaaccggag

SEQ ID NO: 1569129 - RNA, 19 nt, Artificial Sequence
  Description of Artificial Sequence: Synthetic oligonucleotide
gagggaccucccggugucc

SEQ ID NO: 1569130 - RNA, 19 nt, Artificial Sequence
  Description of Artificial Sequence: Synthetic oligonucleotide
ggauucucccucggcgcgc

SEQ ID NO: 1569131 - RNA, 19 nt, Artificial Sequence
  Description of Artificial Sequence: Synthetic oligonucleotide
cacgcccggccuccucccg

SEQ ID NO: 1569132 - RNA, 19 nt, Artificial Sequence
  Description of Artificial Sequence: Synthetic oligonucleotide
gcgcucagaucccggcaag

SEQ ID NO: 1569133 - RNA, 19 nt, Artificial Sequence
  Description of Artificial Sequence: Synthetic oligonucleotide
cauuggccggcagcuccac

SEQ ID NO: 1569134 - RNA, 19 nt, Artificial Sequence
  Description of Artificial Sequence: Synthetic oligonucleotide
uggaucccucacgcccggc

SEQ ID NO: 1569135 - RNA, 19 nt, Artificial Sequence
  Description of Artificial Sequence: Synthetic oligonucleotide
cacgcaccagucuucggau

SEQ ID NO: 1569136 - RNA, 19 nt, Artificial Sequence
  Description of Artificial Sequence: Synthetic oligonucleotide
gauucucccucggcgcgcu

SEQ ID NO: 1569137 - RNA, 19 nt, Artificial Sequence
  Description of Artificial Sequence: Synthetic oligonucleotide
acugcgcugggagcuugaa

SEQ ID NO: 1569138 - RNA, 19 nt, Artificial Sequence
  Description of Artificial Sequence: Synthetic oligonucleotide
gcgcucggagcuggaaagg

SEQ ID NO: 1569139 - RNA, 19 nt, Artificial Sequence
  Description of Artificial Sequence: Synthetic oligonucleotide
guugccggggaaagagacu

SEQ ID NO: 1569140 - RNA, 19 nt, Artificial Sequence
  Description of Artificial Sequence: Synthetic oligonucleotide
ggaaccgcgcucggagcug

SEQ ID NO: 1569141 - RNA, 19 nt, Artificial Sequence
  Description of Artificial Sequence: Synthetic oligonucleotide
ggacccgcaggaaccgcgc

SEQ ID NO: 1569142 - RNA, 19 nt, Artificial Sequence
  Description of Artificial Sequence: Synthetic oligonucleotide
ccacggauccagauccaga

SEQ ID NO: 1569143 - RNA, 19 nt, Artificial Sequence
  Description of Artificial Sequence: Synthetic oligonucleotide
aucuccgcuugaagcucca

SEQ ID NO: 1569144 - RNA, 19 nt, Artificial Sequence
  Description of Artificial Sequence: Synthetic oligonucleotide
cuucagacagaggcgccgu

SEQ ID NO: 1569145 - RNA, 19 nt, Artificial Sequence
  Description of Artificial Sequence: Synthetic oligonucleotide
ccugccguucccggggacc

SEQ ID NO: 1569146 - RNA, 19 nt, Artificial Sequence
  Description of Artificial Sequence: Synthetic oligonucleotide
cccacggauccagauccag

SEQ ID NO: 1569147 - RNA, 19 nt, Artificial Sequence
  Description of Artificial Sequence: Synthetic oligonucleotide
cagggcacgcaccagucuu

SEQ ID NO: 1569148 - RNA, 19 nt, Artificial Sequence
  Description of Artificial Sequence: Synthetic oligonucleotide
gcgccguugugcugccugc

SEQ ID NO: 1569149 - RNA, 19 nt, Artificial Sequence
  Description of Artificial Sequence: Synthetic oligonucleotide
cggccuuacuagccgagac

SEQ ID NO: 1569150 - RNA, 19 nt, Artificial Sequence
  Description of Artificial Sequence: Synthetic oligonucleotide
gggcugagcuuccuggcgu

SEQ ID NO: 1569151 - RNA, 19 nt, Artificial Sequence
  Description of Artificial Sequence: Synthetic oligonucleotide
cagcggccguacaaccgga

SEQ ID NO: 1569152 - RNA, 19 nt, Artificial Sequence
  Description of Artificial Sequence: Synthetic oligonucleotide
cacugcgcugggagcuuga

SEQ ID NO: 1569153 - RNA, 19 nt, Artificial Sequence
  Description of Artificial Sequence: Synthetic oligonucleotide
cuggaggccggaagucacu

SEQ ID NO: 1569154 - RNA, 19 nt, Artificial Sequence
  Description of Artificial Sequence: Synthetic oligonucleotide
caucgcugcagggcacgca

SEQ ID NO: 1569155 - RNA, 19 nt, Artificial Sequence
  Description of Artificial Sequence: Synthetic oligonucleotide
ggcguacgucuucugucaa

SEQ ID NO: 1569156 - RNA, 19 nt, Artificial Sequence
  Description of Artificial Sequence: Synthetic oligonucleotide
aggcgggcuucgcguuucu

SEQ ID NO: 1569157 - RNA, 19 nt, Artificial Sequence
  Description of Artificial Sequence: Synthetic oligonucleotide
gccggaagucacuuccccu

SEQ ID NO: 1569158 - RNA, 19 nt, Artificial Sequence
  Description of Artificial Sequence: Synthetic oligonucleotide
ccuggacgggagucauuuc

SEQ ID NO: 1569159 - RNA, 19 nt, Artificial Sequence
  Description of Artificial Sequence: Synthetic oligonucleotide
agaucccggcaaggacaga

SEQ ID NO: 1569160 - RNA, 19 nt, Artificial Sequence
  Description of Artificial Sequence: Synthetic oligonucleotide
guaggcaugugcggcuuuu

SEQ ID NO: 1569161 - RNA, 19 nt, Artificial Sequence
  Description of Artificial Sequence: Synthetic oligonucleotide
cagaccccaccccacggau

SEQ ID NO: 1569162 - RNA, 19 nt, Artificial Sequence
  Description of Artificial Sequence: Synthetic oligonucleotide
cgcucagaucccggcaagg

SEQ ID NO: 1569163 - RNA, 19 nt, Artificial Sequence
  Description of Artificial Sequence: Synthetic oligonucleotide
accgcgcucggagcuggaa

SEQ ID NO: 1569164 - RNA, 19 nt, Artificial Sequence
  Description of Artificial Sequence: Synthetic oligonucleotide
aaccgcgcucggagcugga

SEQ ID NO: 1569165 - RNA, 19 nt, Artificial Sequence
  Description of Artificial Sequence: Synthetic oligonucleotide
uggccacgaccagcagaaa

SEQ ID NO: 1569166 - RNA, 19 nt, Artificial Sequence
  Description of Artificial Sequence: Synthetic oligonucleotide
cugcggccagagacccguc

SEQ ID NO: 1569167 - RNA, 19 nt, Artificial Sequence
  Description of Artificial Sequence: Synthetic oligonucleotide
ccucggccuuacuagccga

SEQ ID NO: 1569168 - RNA, 19 nt, Artificial Sequence
  Description of Artificial Sequence: Synthetic oligonucleotide
ccuggcguacgucuucugu

SEQ ID NO: 1569169 - RNA, 19 nt, Artificial Sequence
  Description of Artificial Sequence: Synthetic oligonucleotide
cccagugcgaaggaucugu

SEQ ID NO: 1569170 - RNA, 19 nt, Artificial Sequence
  Description of Artificial Sequence: Synthetic oligonucleotide
ccggaagucacuuccccuu

SEQ ID NO: 1569171 - RNA, 19 nt, Artificial Sequence
  Description of Artificial Sequence: Synthetic oligonucleotide
gccguacaaccggagcuaa

SEQ ID NO: 1569172 - RNA, 19 nt, Artificial Sequence
  Description of Artificial Sequence: Synthetic oligonucleotide
ccagaccagggcgccuccc

SEQ ID NO: 1569173 - RNA, 19 nt, Artificial Sequence
  Description of Artificial Sequence: Synthetic oligonucleotide
ggggacccgcaggaaccgc

SEQ ID NO: 1569174 - RNA, 19 nt, Artificial Sequence
  Description of Artificial Sequence: Synthetic oligonucleotide
ccggaggaucggagcggag

SEQ ID NO: 1569175 - RNA, 19 nt, Artificial Sequence
  Description of Artificial Sequence: Synthetic oligonucleotide
gggcuucgcguuucuggcu

SEQ ID NO: 1569176 - RNA, 19 nt, Artificial Sequence
  Description of Artificial Sequence: Synthetic oligonucleotide
ggccugcuuucucgcuuuc

SEQ ID NO: 1569177 - RNA, 19 nt, Artificial Sequence
  Description of Artificial Sequence: Synthetic oligonucleotide
cucugccaaaagacucauu

SEQ ID NO: 1569178 - RNA, 19 nt, Artificial Sequence
  Description of Artificial Sequence: Synthetic oligonucleotide
ggcgggcuucgcguuucug

SEQ ID NO: 1569179 - RNA, 19 nt, Artificial Sequence
  Description of Artificial Sequence: Synthetic oligonucleotide
guaccagaccagggcgccu

SEQ ID NO: 1569180 - RNA, 19 nt, Artificial Sequence
  Description of Artificial Sequence: Synthetic oligonucleotide
gcguacgucuucugucaau

SEQ ID NO: 1569181 - RNA, 19 nt, Artificial Sequence
  Description of Artificial Sequence: Synthetic oligonucleotide
cucucccagugcgaaggau

SEQ ID NO: 1569182 - RNA, 19 nt, Artificial Sequence
  Description of Artificial Sequence: Synthetic oligonucleotide
cuguaggcaugugcggcuu

SEQ ID NO: 1569183 - RNA, 19 nt, Artificial Sequence
  Description of Artificial Sequence: Synthetic oligonucleotide
gggccugcuuucucgcuuu

SEQ ID NO: 1569184 - RNA, 19 nt, Artificial Sequence
  Description of Artificial Sequence: Synthetic oligonucleotide
cguucccggggacccgcag

SEQ ID NO: 1569185 - RNA, 19 nt, Artificial Sequence
  Description of Artificial Sequence: Synthetic oligonucleotide
ccguacaaccggagcuaaa

SEQ ID NO: 1569186 - RNA, 19 nt, Artificial Sequence
  Description of Artificial Sequence: Synthetic oligonucleotide
ccgcgcucggagcuggaaa

SEQ ID NO: 1569187 - RNA, 19 nt, Artificial Sequence
  Description of Artificial Sequence: Synthetic oligonucleotide
cccggaggaucggagcgga

SEQ ID NO: 1569188 - RNA, 19 nt, Artificial Sequence
  Description of Artificial Sequence: Synthetic oligonucleotide
cucccucggcgcgcucguc

SEQ ID NO: 1569189 - RNA, 19 nt, Artificial Sequence
  Description of Artificial Sequence: Synthetic oligonucleotide
cgcccgcagcguugggagc

SEQ ID NO: 1569190 - RNA, 19 nt, Artificial Sequence
  Description of Artificial Sequence: Synthetic oligonucleotide
gcucgcagaccuaguucgu

SEQ ID NO: 1569191 - RNA, 19 nt, Artificial Sequence
  Description of Artificial Sequence: Synthetic oligonucleotide
ccccacggauccagaucca

SEQ ID NO: 1569192 - RNA, 19 nt, Artificial Sequence
  Description of Artificial Sequence: Synthetic oligonucleotide
gcccggccuccucccgacc

SEQ ID NO: 1569193 - RNA, 19 nt, Artificial Sequence
  Description of Artificial Sequence: Synthetic oligonucleotide
aggcgccguugugcugccu

SEQ ID NO: 1569194 - RNA, 19 nt, Artificial Sequence
  Description of Artificial Sequence: Synthetic oligonucleotide
gcuuccuggcguacgucuu

SEQ ID NO: 1569195 - RNA, 19 nt, Artificial Sequence
  Description of Artificial Sequence: Synthetic oligonucleotide
caccuggacgggagucauu

SEQ ID NO: 1569196 - RNA, 19 nt, Artificial Sequence
  Description of Artificial Sequence: Synthetic oligonucleotide
ccagugcgaaggaucuguu

SEQ ID NO: 1569197 - RNA, 19 nt, Artificial Sequence
  Description of Artificial Sequence: Synthetic oligonucleotide
ccaccccacggauccagau

SEQ ID NO: 1569198 - RNA, 19 nt, Artificial Sequence
  Description of Artificial Sequence: Synthetic oligonucleotide
ccggagcuaaagcccgccu

SEQ ID NO: 1569199 - RNA, 19 nt, Artificial Sequence
  Description of Artificial Sequence: Synthetic oligonucleotide
ccgaccuccuugccccucu

SEQ ID NO: 1569200 - RNA, 19 nt, Artificial Sequence
  Description of Artificial Sequence: Synthetic oligonucleotide
cgucgcccgcagcguuggg

SEQ ID NO: 1569201 - RNA, 19 nt, Artificial Sequence
  Description of Artificial Sequence: Synthetic oligonucleotide
ccguucccggggacccgca

SEQ ID NO: 1569202 - RNA, 19 nt, Artificial Sequence
  Description of Artificial Sequence: Synthetic oligonucleotide
cgcuuucacaucgcccucu

SEQ ID NO: 1569203 - RNA, 19 nt, Artificial Sequence
  Description of Artificial Sequence: Synthetic oligonucleotide
cgucaacucagcggccgua

SEQ ID NO: 1569204 - RNA, 19 nt, Artificial Sequence
  Description of Artificial Sequence: Synthetic oligonucleotide
ggcacugcgcugggagcuu

SEQ ID NO: 1569205 - RNA, 19 nt, Artificial Sequence
  Description of Artificial Sequence: Synthetic oligonucleotide
cgccguugugcugccugca

SEQ ID NO: 1569206 - RNA, 19 nt, Artificial Sequence
  Description of Artificial Sequence: Synthetic oligonucleotide
cggcgcgcucgucgcccgc

SEQ ID NO: 1569207 - RNA, 19 nt, Artificial Sequence
  Description of Artificial Sequence: Synthetic oligonucleotide
aaauacaccauccaggguc

SEQ ID NO: 1569208 - RNA, 19 nt, Artificial Sequence
  Description of Artificial Sequence: Synthetic oligonucleotide
accucagucacauugaucc

SEQ ID NO: 1569209 - RNA, 19 nt, Artificial Sequence
  Description of Artificial Sequence: Synthetic oligonucleotide
aauugguucgaccauggac

SEQ ID NO: 1569210 - RNA, 19 nt, Artificial Sequence
  Description of Artificial Sequence: Synthetic oligonucleotide
uaaucucacauccaggagg

SEQ ID NO: 1569211 - RNA, 19 nt, Artificial Sequence
  Description of Artificial Sequence: Synthetic oligonucleotide
ucggaaaaccucuugaggg

SEQ ID NO: 1569212 - RNA, 19 nt, Artificial Sequence
  Description of Artificial Sequence: Synthetic oligonucleotide
auugguucgaccauggacc

SEQ ID NO: 1569213 - RNA, 19 nt, Artificial Sequence
  Description of Artificial Sequence: Synthetic oligonucleotide
ucuguaaucucacauccag

SEQ ID NO: 1569214 - RNA, 19 nt, Artificial Sequence
  Description of Artificial Sequence: Synthetic oligonucleotide
ucuguuaucacuucuucca

SEQ ID NO: 1569215 - RNA, 19 nt, Artificial Sequence
  Description of Artificial Sequence: Synthetic oligonucleotide
uguaaucucacauccagga

SEQ ID NO: 1569216 - RNA, 19 nt, Artificial Sequence
  Description of Artificial Sequence: Synthetic oligonucleotide
acugacucguaccacaugg

SEQ ID NO: 1569217 - RNA, 19 nt, Artificial Sequence
  Description of Artificial Sequence: Synthetic oligonucleotide
uguaaccggaacuugagca

SEQ ID NO: 1569218 - RNA, 19 nt, Artificial Sequence
  Description of Artificial Sequence: Synthetic oligonucleotide
acugauuccacccgcaguc

SEQ ID NO: 1569219 - RNA, 19 nt, Artificial Sequence
  Description of Artificial Sequence: Synthetic oligonucleotide
aacucugccccauggaccg

SEQ ID NO: 1569220 - RNA, 19 nt, Artificial Sequence
  Description of Artificial Sequence: Synthetic oligonucleotide
agcuaucucauucugcagg

SEQ ID NO: 1569221 - RNA, 19 nt, Artificial Sequence
  Description of Artificial Sequence: Synthetic oligonucleotide
ucgaccauggaccaggcug

SEQ ID NO: 1569222 - RNA, 19 nt, Artificial Sequence
  Description of Artificial Sequence: Synthetic oligonucleotide
aagccaauugguucgacca

SEQ ID NO: 1569223 - RNA, 19 nt, Artificial Sequence
  Description of Artificial Sequence: Synthetic oligonucleotide
acuaggaguaccccaggcc

SEQ ID NO: 1569224 - RNA, 19 nt, Artificial Sequence
  Description of Artificial Sequence: Synthetic oligonucleotide
auugauccgguacucacuc

SEQ ID NO: 1569225 - RNA, 19 nt, Artificial Sequence
  Description of Artificial Sequence: Synthetic oligonucleotide
ucuuccuguaggaaguaag

SEQ ID NO: 1569226 - RNA, 19 nt, Artificial Sequence
  Description of Artificial Sequence: Synthetic oligonucleotide
auagucuacugcuuggcag

SEQ ID NO: 1569227 - RNA, 19 nt, Artificial Sequence
  Description of Artificial Sequence: Synthetic oligonucleotide
uugagcaggaaguagggcu

SEQ ID NO: 1569228 - RNA, 19 nt, Artificial Sequence
  Description of Artificial Sequence: Synthetic oligonucleotide
gauguaagugccuucguca

SEQ ID NO: 1569229 - RNA, 19 nt, Artificial Sequence
  Description of Artificial Sequence: Synthetic oligonucleotide
aaaccgcugaccuggcugg

SEQ ID NO: 1569230 - RNA, 19 nt, Artificial Sequence
  Description of Artificial Sequence: Synthetic oligonucleotide
uucauagucuacugcuugg

SEQ ID NO: 1569231 - RNA, 19 nt, Artificial Sequence
  Description of Artificial Sequence: Synthetic oligonucleotide
uagucuacugcuuggcagg

SEQ ID NO: 1569232 - RNA, 19 nt, Artificial Sequence
  Description of Artificial Sequence: Synthetic oligonucleotide
uguguccuaguccagaguc

SEQ ID NO: 1569233 - RNA, 19 nt, Artificial Sequence
  Description of Artificial Sequence: Synthetic oligonucleotide
cauacuggaccccuggagg

SEQ ID NO: 1569234 - RNA, 19 nt, Artificial Sequence
  Description of Artificial Sequence: Synthetic oligonucleotide
agauguaagugccuucguc

SEQ ID NO: 1569235 - RNA, 19 nt, Artificial Sequence
  Description of Artificial Sequence: Synthetic oligonucleotide
accaggacccugcucagcc

SEQ ID NO: 1569236 - RNA, 19 nt, Artificial Sequence
  Description of Artificial Sequence: Synthetic oligonucleotide
uguccagcuggcaugcagg

SEQ ID NO: 1569237 - RNA, 19 nt, Artificial Sequence
  Description of Artificial Sequence: Synthetic oligonucleotide
cuggaugccgcacuggacg

SEQ ID NO: 1569238 - RNA, 19 nt, Artificial Sequence
  Description of Artificial Sequence: Synthetic oligonucleotide
ugaacuugcccugugacuc

SEQ ID NO: 1569239 - RNA, 19 nt, Artificial Sequence
  Description of Artificial Sequence: Synthetic oligonucleotide
ugauccgguacucacucca

SEQ ID NO: 1569240 - RNA, 19 nt, Artificial Sequence
  Description of Artificial Sequence: Synthetic oligonucleotide
cacuccagaacucugcccc

SEQ ID NO: 1569241 - RNA, 19 nt, Artificial Sequence
  Description of Artificial Sequence: Synthetic oligonucleotide
ugacucucagcuccuggcg

SEQ ID NO: 1569242 - RNA, 19 nt, Artificial Sequence
  Description of Artificial Sequence: Synthetic oligonucleotide
acucguaccacauggggca

SEQ ID NO: 1569243 - RNA, 19 nt, Artificial Sequence
  Description of Artificial Sequence: Synthetic oligonucleotide
uguagccacggccaccagg

SEQ ID NO: 1569244 - RNA, 19 nt, Artificial Sequence
  Description of Artificial Sequence: Synthetic oligonucleotide
uacuguaaccggaacuuga

SEQ ID NO: 1569245 - RNA, 19 nt, Artificial Sequence
  Description of Artificial Sequence: Synthetic oligonucleotide
ugugacucucagcuccugg

SEQ ID NO: 1569246 - RNA, 19 nt, Artificial Sequence
  Description of Artificial Sequence: Synthetic oligonucleotide
ccaaauacaccauccaggg

SEQ ID NO: 1569247 - RNA, 19 nt, Artificial Sequence
  Description of Artificial Sequence: Synthetic oligonucleotide
caaucuguguccuagucca

SEQ ID NO: 1569248 - RNA, 19 nt, Artificial Sequence
  Description of Artificial Sequence: Synthetic oligonucleotide
agguacugauuccacccgc

SEQ ID NO: 1569249 - RNA, 19 nt, Artificial Sequence
  Description of Artificial Sequence: Synthetic oligonucleotide
auguaagugccuucgucag

SEQ ID NO: 1569250 - RNA, 19 nt, Artificial Sequence
  Description of Artificial Sequence: Synthetic oligonucleotide
ucuacugcuuggcaggaaa

SEQ ID NO: 1569251 - RNA, 19 nt, Artificial Sequence
  Description of Artificial Sequence: Synthetic oligonucleotide
ccuguaggaaguaagguag

SEQ ID NO: 1569252 - RNA, 19 nt, Artificial Sequence
  Description of Artificial Sequence: Synthetic oligonucleotide
acaucggaaaaccucuuga

SEQ ID NO: 1569253 - RNA, 19 nt, Artificial Sequence
  Description of Artificial Sequence: Synthetic oligonucleotide
guaaccggaacuugagcag

SEQ ID NO: 1569254 - RNA, 19 nt, Artificial Sequence
  Description of Artificial Sequence: Synthetic oligonucleotide
aaguacaggagaaguuuuc

SEQ ID NO: 1569255 - RNA, 19 nt, Artificial Sequence
  Description of Artificial Sequence: Synthetic oligonucleotide
caucggaaaaccucuugag

SEQ ID NO: 1569256 - RNA, 19 nt, Artificial Sequence
  Description of Artificial Sequence: Synthetic oligonucleotide
aguacuaggaguaccccag

SEQ ID NO: 1569257 - RNA, 19 nt, Artificial Sequence
  Description of Artificial Sequence: Synthetic oligonucleotide
ugcccuaugugucuuucug

SEQ ID NO: 1569258 - RNA, 19 nt, Artificial Sequence
  Description of Artificial Sequence: Synthetic oligonucleotide
cuguucuguccauuuagcc

SEQ ID NO: 1569259 - RNA, 19 nt, Artificial Sequence
  Description of Artificial Sequence: Synthetic oligonucleotide
caucccgaaaccaggacac

SEQ ID NO: 1569260 - RNA, 19 nt, Artificial Sequence
  Description of Artificial Sequence: Synthetic oligonucleotide
uaaccggaacuugagcagg

SEQ ID NO: 1569261 - RNA, 19 nt, Artificial Sequence
  Description of Artificial Sequence: Synthetic oligonucleotide
agacaccagggcuguagcc

SEQ ID NO: 1569262 - RNA, 19 nt, Artificial Sequence
  Description of Artificial Sequence: Synthetic oligonucleotide
gacucucagcuccuggcgg

SEQ ID NO: 1569263 - RNA, 19 nt, Artificial Sequence
  Description of Artificial Sequence: Synthetic oligonucleotide
guaggaaguaagguagcgg

SEQ ID NO: 1569264 - RNA, 19 nt, Artificial Sequence
  Description of Artificial Sequence: Synthetic oligonucleotide
guaaucucacauccaggag

SEQ ID NO: 1569265 - RNA, 19 nt, Artificial Sequence
  Description of Artificial Sequence: Synthetic oligonucleotide
uguccuaguccagagucag

SEQ ID NO: 1569266 - RNA, 19 nt, Artificial Sequence
  Description of Artificial Sequence: Synthetic oligonucleotide
aaguaagguagcggguggg

SEQ ID NO: 1569267 - RNA, 19 nt, Artificial Sequence
  Description of Artificial Sequence: Synthetic oligonucleotide
uacuaggaguaccccaggc

SEQ ID NO: 1569268 - RNA, 19 nt, Artificial Sequence
  Description of Artificial Sequence: Synthetic oligonucleotide
aguaagguagcgggugggc

SEQ ID NO: 1569269 - RNA, 19 nt, Artificial Sequence
  Description of Artificial Sequence: Synthetic oligonucleotide
ucuuccaagccaauugguu

SEQ ID NO: 1569270 - RNA, 19 nt, Artificial Sequence
  Description of Artificial Sequence: Synthetic oligonucleotide
aucagcuaucucauucugc

SEQ ID NO: 1569271 - RNA, 19 nt, Artificial Sequence
  Description of Artificial Sequence: Synthetic oligonucleotide
guagcgggugggcaaaccg

SEQ ID NO: 1569272 - RNA, 19 nt, Artificial Sequence
  Description of Artificial Sequence: Synthetic oligonucleotide
ucucggguaaccagguacu

SEQ ID NO: 1569273 - RNA, 19 nt, Artificial Sequence
  Description of Artificial Sequence: Synthetic oligonucleotide
guaaccagguacugauucc

SEQ ID NO: 1569274 - RNA, 19 nt, Artificial Sequence
  Description of Artificial Sequence: Synthetic oligonucleotide
ugcucuguaaucucacauc

SEQ ID NO: 1569275 - RNA, 19 nt, Artificial Sequence
  Description of Artificial Sequence: Synthetic oligonucleotide
caagccaauugguucgacc

SEQ ID NO: 1569276 - RNA, 19 nt, Artificial Sequence
  Description of Artificial Sequence: Synthetic oligonucleotide
acucacuccagaacucugc

SEQ ID NO: 1569277 - RNA, 19 nt, Artificial Sequence
  Description of Artificial Sequence: Synthetic oligonucleotide
ucacggaccugccaagcug

SEQ ID NO: 1569278 - RNA, 19 nt, Artificial Sequence
  Description of Artificial Sequence: Synthetic oligonucleotide
aauacaccauccagggucu

SEQ ID NO: 1569279 - RNA, 19 nt, Artificial Sequence
  Description of Artificial Sequence: Synthetic oligonucleotide
aggacacugggaucccagc

SEQ ID NO: 1569280 - RNA, 19 nt, Artificial Sequence
  Description of Artificial Sequence: Synthetic oligonucleotide
agaccaaucuguguccuag

SEQ ID NO: 1569281 - RNA, 19 nt, Artificial Sequence
  Description of Artificial Sequence: Synthetic oligonucleotide
caggaaguagggcugccgg

SEQ ID NO: 1569282 - RNA, 19 nt, Artificial Sequence
  Description of Artificial Sequence: Synthetic oligonucleotide
caaaccgcugaccuggcug

SEQ ID NO: 1569283 - RNA, 19 nt, Artificial Sequence
  Description of Artificial Sequence: Synthetic oligonucleotide
uaaccagguacugauucca

SEQ ID NO: 1569284 - RNA, 19 nt, Artificial Sequence
  Description of Artificial Sequence: Synthetic oligonucleotide
gucucggguaaccagguac

SEQ ID NO: 1569285 - RNA, 19 nt, Artificial Sequence
  Description of Artificial Sequence: Synthetic oligonucleotide
ugacuccccaucccgaaac

SEQ ID NO: 1569286 - RNA, 19 nt, Artificial Sequence
  Description of Artificial Sequence: Synthetic oligonucleotide
auggccaagguccugcgga

SEQ ID NO: 1569287 - RNA, 19 nt, Artificial Sequence
  Description of Artificial Sequence: Synthetic oligonucleotide
gaacuugagcaggaaguag

SEQ ID NO: 1569288 - RNA, 19 nt, Artificial Sequence
  Description of Artificial Sequence: Synthetic oligonucleotide
uccaggaggcacgugcugg

SEQ ID NO: 1569289 - RNA, 19 nt, Artificial Sequence
  Description of Artificial Sequence: Synthetic oligonucleotide
uaccuggcugucaucagcu

SEQ ID NO: 1569290 - RNA, 19 nt, Artificial Sequence
  Description of Artificial Sequence: Synthetic oligonucleotide
ucucacauccaggaggcac

SEQ ID NO: 1569291 - RNA, 19 nt, Artificial Sequence
  Description of Artificial Sequence: Synthetic oligonucleotide
gacucguaccacauggggc

SEQ ID NO: 1569292 - RNA, 19 nt, Artificial Sequence
  Description of Artificial Sequence: Synthetic oligonucleotide
agcugcccauacuggaccc

SEQ ID NO: 1569293 - RNA, 19 nt, Artificial Sequence
  Description of Artificial Sequence: Synthetic oligonucleotide
agcaucuguuaucacuucu

SEQ ID NO: 1569294 - RNA, 19 nt, Artificial Sequence
  Description of Artificial Sequence: Synthetic oligonucleotide
acucucagcuccuggcggg

SEQ ID NO: 1569295 - RNA, 19 nt, Artificial Sequence
  Description of Artificial Sequence: Synthetic oligonucleotide
gaaaccuccggacgagcug

SEQ ID NO: 1569296 - RNA, 19 nt, Artificial Sequence
  Description of Artificial Sequence: Synthetic oligonucleotide
agccacagcaucuguuauc

SEQ ID NO: 1569297 - RNA, 19 nt, Artificial Sequence
  Description of Artificial Sequence: Synthetic oligonucleotide
uccaaguacaggagaaguu

SEQ ID NO: 1569298 - RNA, 19 nt, Artificial Sequence
  Description of Artificial Sequence: Synthetic oligonucleotide
augaacuugcccugugacu

SEQ ID NO: 1569299 - RNA, 19 nt, Artificial Sequence
  Description of Artificial Sequence: Synthetic oligonucleotide
aguacaggagaaguuuuca

SEQ ID NO: 1569300 - RNA, 19 nt, Artificial Sequence
  Description of Artificial Sequence: Synthetic oligonucleotide
uggaugccgcacuggacgg

SEQ ID NO: 1569301 - RNA, 19 nt, Artificial Sequence
  Description of Artificial Sequence: Synthetic oligonucleotide
uggauccggacgcaagaug

SEQ ID NO: 1569302 - RNA, 19 nt, Artificial Sequence
  Description of Artificial Sequence: Synthetic oligonucleotide
gguauguccagcuggcaug

SEQ ID NO: 1569303 - RNA, 19 nt, Artificial Sequence
  Description of Artificial Sequence: Synthetic oligonucleotide
gcaggguauguccagcugg

SEQ ID NO: 1569304 - RNA, 19 nt, Artificial Sequence
  Description of Artificial Sequence: Synthetic oligonucleotide
guccacacgggccaagacc

SEQ ID NO: 1569305 - RNA, 19 nt, Artificial Sequence
  Description of Artificial Sequence: Synthetic oligonucleotide
auacuggaccccuggagga

SEQ ID NO: 1569306 - RNA, 19 nt, Artificial Sequence
  Description of Artificial Sequence: Synthetic oligonucleotide
cucacuccagaacucugcc

SEQ ID NO: 1569307 - RNA, 19 nt, Artificial Sequence
  Description of Artificial Sequence: Synthetic oligonucleotide
uuguguaccuggcugucau

SEQ ID NO: 1569308 - RNA, 19 nt, Artificial Sequence
  Description of Artificial Sequence: Synthetic oligonucleotide
agccuugacuccccauccc

SEQ ID NO: 1569309 - RNA, 19 nt, Artificial Sequence
  Description of Artificial Sequence: Synthetic oligonucleotide
uaagguagcgggugggcaa

SEQ ID NO: 1569310 - RNA, 19 nt, Artificial Sequence
  Description of Artificial Sequence: Synthetic oligonucleotide
gugacucucagcuccuggc

SEQ ID NO: 1569311 - RNA, 19 nt, Artificial Sequence
  Description of Artificial Sequence: Synthetic oligonucleotide
cuugcugcucuuuguguac

SEQ ID NO: 1569312 - RNA, 19 nt, Artificial Sequence
  Description of Artificial Sequence: Synthetic oligonucleotide
cugacucguaccacauggg

SEQ ID NO: 1569313 - RNA, 19 nt, Artificial Sequence
  Description of Artificial Sequence: Synthetic oligonucleotide
uacugcuuggcaggaaacc

SEQ ID NO: 1569314 - RNA, 19 nt, Artificial Sequence
  Description of Artificial Sequence: Synthetic oligonucleotide
acuguaaccggaacuugag

SEQ ID NO: 1569315 - RNA, 19 nt, Artificial Sequence
  Description of Artificial Sequence: Synthetic oligonucleotide
gucuggcagauguaagugc

SEQ ID NO: 1569316 - RNA, 19 nt, Artificial Sequence
  Description of Artificial Sequence: Synthetic oligonucleotide
cacuggacgguacuguaac

SEQ ID NO: 1569317 - RNA, 19 nt, Artificial Sequence
  Description of Artificial Sequence: Synthetic oligonucleotide
gccaagaccaaucuguguc

SEQ ID NO: 1569318 - RNA, 19 nt, Artificial Sequence
  Description of Artificial Sequence: Synthetic oligonucleotide
acgguacuguaaccggaac

SEQ ID NO: 1569319 - RNA, 19 nt, Artificial Sequence
  Description of Artificial Sequence: Synthetic oligonucleotide
gguucgaccauggaccagg

SEQ ID NO: 1569320 - RNA, 19 nt, Artificial Sequence
  Description of Artificial Sequence: Synthetic oligonucleotide
cacggaccugccaagcugc

SEQ ID NO: 1569321 - RNA, 19 nt, Artificial Sequence
  Description of Artificial Sequence: Synthetic oligonucleotide
caggguauguccagcuggc

SEQ ID NO: 1569322 - RNA, 19 nt, Artificial Sequence
  Description of Artificial Sequence: Synthetic oligonucleotide
uagcgggugggcaaaccgc

SEQ ID NO: 1569323 - RNA, 19 nt, Artificial Sequence
  Description of Artificial Sequence: Synthetic oligonucleotide
uugguucgaccauggacca

SEQ ID NO: 1569324 - RNA, 19 nt, Artificial Sequence
  Description of Artificial Sequence: Synthetic oligonucleotide
cugggguggauccggacgc

SEQ ID NO: 1569325 - RNA, 19 nt, Artificial Sequence
  Description of Artificial Sequence: Synthetic oligonucleotide
cacagcgucacggaccugc

SEQ ID NO: 1569326 - RNA, 19 nt, Artificial Sequence
  Description of Artificial Sequence: Synthetic oligonucleotide
cuguaaccggaacuugagc

SEQ ID NO: 1569327 - RNA, 19 nt, Artificial Sequence
  Description of Artificial Sequence: Synthetic oligonucleotide
uggaccgcacaucggaaaa

SEQ ID NO: 1569328 - RNA, 19 nt, Artificial Sequence
  Description of Artificial Sequence: Synthetic oligonucleotide
acuggaccccuggaggacc

SEQ ID NO: 1569329 - RNA, 19 nt, Artificial Sequence
  Description of Artificial Sequence: Synthetic oligonucleotide
uccggacgcaagaugcucu

SEQ ID NO: 1569330 - RNA, 19 nt, Artificial Sequence
  Description of Artificial Sequence: Synthetic oligonucleotide
aaccucuugaggguccugu

SEQ ID NO: 1569331 - RNA, 19 nt, Artificial Sequence
  Description of Artificial Sequence: Synthetic oligonucleotide
ggcaggaaaccuccggacg

SEQ ID NO: 1569332 - RNA, 19 nt, Artificial Sequence
  Description of Artificial Sequence: Synthetic oligonucleotide
gaccgcacaucggaaaacc

SEQ ID NO: 1569333 - RNA, 19 nt, Artificial Sequence
  Description of Artificial Sequence: Synthetic oligonucleotide
gaugcucuguaaucucaca

SEQ ID NO: 1569334 - RNA, 19 nt, Artificial Sequence
  Description of Artificial Sequence: Synthetic oligonucleotide
aucacuucuuccaagccaa

SEQ ID NO: 1569335 - RNA, 19 nt, Artificial Sequence
  Description of Artificial Sequence: Synthetic oligonucleotide
guacugauuccacccgcag

SEQ ID NO: 1569336 - RNA, 19 nt, Artificial Sequence
  Description of Artificial Sequence: Synthetic oligonucleotide
aaaaccucuugaggguccu

SEQ ID NO: 1569337 - RNA, 19 nt, Artificial Sequence
  Description of Artificial Sequence: Synthetic oligonucleotide
agcgucacggaccugccaa

SEQ ID NO: 1569338 - RNA, 19 nt, Artificial Sequence
  Description of Artificial Sequence: Synthetic oligonucleotide
ggauccggacgcaagaugc

SEQ ID NO: 1569339 - RNA, 19 nt, Artificial Sequence
  Description of Artificial Sequence: Synthetic oligonucleotide
acccugcucagcccugagc

SEQ ID NO: 1569340 - RNA, 19 nt, Artificial Sequence
  Description of Artificial Sequence: Synthetic oligonucleotide
caucagcuaucucauucug

SEQ ID NO: 1569341 - RNA, 19 nt, Artificial Sequence
  Description of Artificial Sequence: Synthetic oligonucleotide
agcauucacuccaggacag

SEQ ID NO: 1569342 - RNA, 19 nt, Artificial Sequence
  Description of Artificial Sequence: Synthetic oligonucleotide
gaaguagggcugccggcgc

SEQ ID NO: 1569343 - RNA, 19 nt, Artificial Sequence
  Description of Artificial Sequence: Synthetic oligonucleotide
ggaaguagggcugccggcg

SEQ ID NO: 1569344 - RNA, 19 nt, Artificial Sequence
  Description of Artificial Sequence: Synthetic oligonucleotide
uucgucagugcuguccaca

SEQ ID NO: 1569345 - RNA, 19 nt, Artificial Sequence
  Description of Artificial Sequence: Synthetic oligonucleotide
cacaucggaaaaccucuug

SEQ ID NO: 1569346 - RNA, 19 nt, Artificial Sequence
  Description of Artificial Sequence: Synthetic oligonucleotide
ucgucagugcuguccacac

SEQ ID NO: 1569347 - RNA, 19 nt, Artificial Sequence
  Description of Artificial Sequence: Synthetic oligonucleotide
aacuugcccugugacucuc

SEQ ID NO: 1569348 - RNA, 19 nt, Artificial Sequence
  Description of Artificial Sequence: Synthetic oligonucleotide
aagguccugcggaugaacu

SEQ ID NO: 1569349 - RNA, 19 nt, Artificial Sequence
  Description of Artificial Sequence: Synthetic oligonucleotide
cagcauucacuccaggaca

SEQ ID NO: 1569350 - RNA, 19 nt, Artificial Sequence
  Description of Artificial Sequence: Synthetic oligonucleotide
cagccuugacuccccaucc

SEQ ID NO: 1569351 - RNA, 19 nt, Artificial Sequence
  Description of Artificial Sequence: Synthetic oligonucleotide
ccaauugguucgaccaugg

SEQ ID NO: 1569352 - RNA, 19 nt, Artificial Sequence
  Description of Artificial Sequence: Synthetic oligonucleotide
cuggcaugcaggcgucucg

SEQ ID NO: 1569353 - RNA, 19 nt, Artificial Sequence
  Description of Artificial Sequence: Synthetic oligonucleotide
ccaaucuguguccuagucc

SEQ ID NO: 1569354 - RNA, 19 nt, Artificial Sequence
  Description of Artificial Sequence: Synthetic oligonucleotide
uuuguguaccuggcuguca

SEQ ID NO: 1569355 - RNA, 19 nt, Artificial Sequence
  Description of Artificial Sequence: Synthetic oligonucleotide
gaguaccccaggccucugg

SEQ ID NO: 1569356 - RNA, 19 nt, Artificial Sequence
  Description of Artificial Sequence: Synthetic oligonucleotide
aggaaaccuccggacgagc

SEQ ID NO: 1569357 - RNA, 19 nt, Artificial Sequence
  Description of Artificial Sequence: Synthetic oligonucleotide
cagucccugggguggaucc

SEQ ID NO: 1569358 - RNA, 19 nt, Artificial Sequence
  Description of Artificial Sequence: Synthetic oligonucleotide
ccagcauucacuccaggac

SEQ ID NO: 1569359 - RNA, 19 nt, Artificial Sequence
  Description of Artificial Sequence: Synthetic oligonucleotide
acgcaagaugcucuguaau

SEQ ID NO: 1569360 - RNA, 19 nt, Artificial Sequence
  Description of Artificial Sequence: Synthetic oligonucleotide
gacgcaagaugcucuguaa

SEQ ID NO: 1569361 - RNA, 19 nt, Artificial Sequence
  Description of Artificial Sequence: Synthetic oligonucleotide
uccagaacucugccccaug

SEQ ID NO: 1569362 - RNA, 19 nt, Artificial Sequence
  Description of Artificial Sequence: Synthetic oligonucleotide
guagccacggccaccagga

SEQ ID NO: 1569363 - RNA, 19 nt, Artificial Sequence
  Description of Artificial Sequence: Synthetic oligonucleotide
uugauccgguacucacucc

SEQ ID NO: 1569364 - RNA, 19 nt, Artificial Sequence
  Description of Artificial Sequence: Synthetic oligonucleotide
uggcugggacuccaaguac

SEQ ID NO: 1569365 - RNA, 19 nt, Artificial Sequence
  Description of Artificial Sequence: Synthetic oligonucleotide
cuaggaguaccccaggccu

SEQ ID NO: 1569366 - RNA, 19 nt, Artificial Sequence
  Description of Artificial Sequence: Synthetic oligonucleotide
uaggaguaccccaggccuc

SEQ ID NO: 1569367 - RNA, 19 nt, Artificial Sequence
  Description of Artificial Sequence: Synthetic oligonucleotide
uguccacacgggccaagac

SEQ ID NO: 1569368 - RNA, 19 nt, Artificial Sequence
  Description of Artificial Sequence: Synthetic oligonucleotide
cuugcccugugacucucag

SEQ ID NO: 1569369 - RNA, 19 nt, Artificial Sequence
  Description of Artificial Sequence: Synthetic oligonucleotide
uaagugccuucgucagugc

SEQ ID NO: 1569370 - RNA, 19 nt, Artificial Sequence
  Description of Artificial Sequence: Synthetic oligonucleotide
cauagucuacugcuuggca

SEQ ID NO: 1569371 - RNA, 19 nt, Artificial Sequence
  Description of Artificial Sequence: Synthetic oligonucleotide
caguacuaggaguacccca

SEQ ID NO: 1569372 - RNA, 19 nt, Artificial Sequence
  Description of Artificial Sequence: Synthetic oligonucleotide
ucggguaaccagguacuga

SEQ ID NO: 1569373 - RNA, 19 nt, Artificial Sequence
  Description of Artificial Sequence: Synthetic oligonucleotide
ccaagaccaaucugugucc

SEQ ID NO: 1569374 - RNA, 19 nt, Artificial Sequence
  Description of Artificial Sequence: Synthetic oligonucleotide
gacuccccaucccgaaacc

SEQ ID NO: 1569375 - RNA, 19 nt, Artificial Sequence
  Description of Artificial Sequence: Synthetic oligonucleotide
aggcgucucggguaaccag

SEQ ID NO: 1569376 - RNA, 19 nt, Artificial Sequence
  Description of Artificial Sequence: Synthetic oligonucleotide
auccggacgcaagaugcuc

SEQ ID NO: 1569377 - RNA, 19 nt, Artificial Sequence
  Description of Artificial Sequence: Synthetic oligonucleotide
uugacuccccaucccgaaa

SEQ ID NO: 1569378 - RNA, 19 nt, Artificial Sequence
  Description of Artificial Sequence: Synthetic oligonucleotide
cccgaaaccaggacacugg

SEQ ID NO: 1569379 - RNA, 19 nt, Artificial Sequence
  Description of Artificial Sequence: Synthetic oligonucleotide
guguaccuggcugucauca

SEQ ID NO: 1569380 - RNA, 19 nt, Artificial Sequence
  Description of Artificial Sequence: Synthetic oligonucleotide
uccagcuggcaugcaggcg

SEQ ID NO: 1569381 - RNA, 19 nt, Artificial Sequence
  Description of Artificial Sequence: Synthetic oligonucleotide
aagaccaaucuguguccua

SEQ ID NO: 1569382 - RNA, 19 nt, Artificial Sequence
  Description of Artificial Sequence: Synthetic oligonucleotide
acacgggccaagaccaauc

SEQ ID NO: 1569383 - RNA, 19 nt, Artificial Sequence
  Description of Artificial Sequence: Synthetic oligonucleotide
acgugcuggcacccagugg

SEQ ID NO: 1569384 - RNA, 19 nt, Artificial Sequence
  Description of Artificial Sequence: Synthetic oligonucleotide
cuggcacugacucguacca

SEQ ID NO: 1569385 - RNA, 19 nt, Artificial Sequence
  Description of Artificial Sequence: Synthetic oligonucleotide
auggaccgcacaucggaaa

SEQ ID NO: 1569386 - RNA, 19 nt, Artificial Sequence
  Description of Artificial Sequence: Synthetic oligonucleotide
gccuugacuccccaucccg

SEQ ID NO: 1569387 - RNA, 19 nt, Artificial Sequence
  Description of Artificial Sequence: Synthetic oligonucleotide
ggucuggcagauguaagug

SEQ ID NO: 1569388 - RNA, 19 nt, Artificial Sequence
  Description of Artificial Sequence: Synthetic oligonucleotide
cagagucaggucccuggag

SEQ ID NO: 1569389 - RNA, 19 nt, Artificial Sequence
  Description of Artificial Sequence: Synthetic oligonucleotide
aggcaggguauguccagcu

SEQ ID NO: 1569390 - RNA, 19 nt, Artificial Sequence
  Description of Artificial Sequence: Synthetic oligonucleotide
ggcgucucggguaaccagg

SEQ ID NO: 1569391 - RNA, 19 nt, Artificial Sequence
  Description of Artificial Sequence: Synthetic oligonucleotide
ccuggcacugacucguacc

SEQ ID NO: 1569392 - RNA, 19 nt, Artificial Sequence
  Description of Artificial Sequence: Synthetic oligonucleotide
ccagaacucugccccaugg

SEQ ID NO: 1569393 - RNA, 19 nt, Artificial Sequence
  Description of Artificial Sequence: Synthetic oligonucleotide
agccaauugguucgaccau

SEQ ID NO: 1569394 - RNA, 19 nt, Artificial Sequence
  Description of Artificial Sequence: Synthetic oligonucleotide
uugaggguccugugggcau

SEQ ID NO: 1569395 - RNA, 19 nt, Artificial Sequence
  Description of Artificial Sequence: Synthetic oligonucleotide
gguccugcggaugaacuug

SEQ ID NO: 1569396 - RNA, 19 nt, Artificial Sequence
  Description of Artificial Sequence: Synthetic oligonucleotide
caccucagucacauugauc

SEQ ID NO: 1569397 - RNA, 19 nt, Artificial Sequence
  Description of Artificial Sequence: Synthetic oligonucleotide
auggaccaggcuggaugcc

SEQ ID NO: 1569398 - RNA, 19 nt, Artificial Sequence
  Description of Artificial Sequence: Synthetic oligonucleotide
ccugggguggauccggacg

SEQ ID NO: 1569399 - RNA, 19 nt, Artificial Sequence
  Description of Artificial Sequence: Synthetic oligonucleotide
acgggccaagaccaaucug

SEQ ID NO: 1569400 - RNA, 19 nt, Artificial Sequence
  Description of Artificial Sequence: Synthetic oligonucleotide
ggcacugacucguaccaca

SEQ ID NO: 1569401 - RNA, 19 nt, Artificial Sequence
  Description of Artificial Sequence: Synthetic oligonucleotide
acuccagaacucugcccca

SEQ ID NO: 1569402 - RNA, 19 nt, Artificial Sequence
  Description of Artificial Sequence: Synthetic oligonucleotide
uucgaccauggaccaggcu

SEQ ID NO: 1569403 - RNA, 19 nt, Artificial Sequence
  Description of Artificial Sequence: Synthetic oligonucleotide
uggguucaccucagucaca

SEQ ID NO: 1569404 - RNA, 19 nt, Artificial Sequence
  Description of Artificial Sequence: Synthetic oligonucleotide
cacgugcuggcacccagug

SEQ ID NO: 1569405 - RNA, 19 nt, Artificial Sequence
  Description of Artificial Sequence: Synthetic oligonucleotide
aagguagcgggugggcaaa

SEQ ID NO: 1569406 - RNA, 19 nt, Artificial Sequence
  Description of Artificial Sequence: Synthetic oligonucleotide
gaaagcccagcuucagggu

SEQ ID NO: 1569407 - RNA, 19 nt, Artificial Sequence
  Description of Artificial Sequence: Synthetic oligonucleotide
agucaggucccuggagcag

SEQ ID NO: 1569408 - RNA, 19 nt, Artificial Sequence
  Description of Artificial Sequence: Synthetic oligonucleotide
gacacugggaucccagcau

SEQ ID NO: 1569409 - RNA, 19 nt, Artificial Sequence
  Description of Artificial Sequence: Synthetic oligonucleotide
ggaggcacgugcuggcacc

SEQ ID NO: 1569410 - RNA, 19 nt, Artificial Sequence
  Description of Artificial Sequence: Synthetic oligonucleotide
gacgguacuguaaccggaa

SEQ ID NO: 1569411 - RNA, 19 nt, Artificial Sequence
  Description of Artificial Sequence: Synthetic oligonucleotide
uccaagccaauugguucga

SEQ ID NO: 1569412 - RNA, 19 nt, Artificial Sequence
  Description of Artificial Sequence: Synthetic oligonucleotide
cuggaccccuggaggaccc

SEQ ID NO: 1569413 - RNA, 19 nt, Artificial Sequence
  Description of Artificial Sequence: Synthetic oligonucleotide
guaccccaggccucugggc

SEQ ID NO: 1569414 - RNA, 19 nt, Artificial Sequence
  Description of Artificial Sequence: Synthetic oligonucleotide
ugccgcacuggacgguacu

SEQ ID NO: 1569415 - RNA, 19 nt, Artificial Sequence
  Description of Artificial Sequence: Synthetic oligonucleotide
cugggacuccaaguacagg

SEQ ID NO: 1569416 - RNA, 19 nt, Artificial Sequence
  Description of Artificial Sequence: Synthetic oligonucleotide
gguggauccggacgcaaga

SEQ ID NO: 1569417 - RNA, 19 nt, Artificial Sequence
  Description of Artificial Sequence: Synthetic oligonucleotide
cuugaggguccugugggca

SEQ ID NO: 1569418 - RNA, 19 nt, Artificial Sequence
  Description of Artificial Sequence: Synthetic oligonucleotide
ccuggcggggucuucuucc

SEQ ID NO: 1569419 - RNA, 19 nt, Artificial Sequence
  Description of Artificial Sequence: Synthetic oligonucleotide
gccacagcaucuguuauca

SEQ ID NO: 1569420 - RNA, 19 nt, Artificial Sequence
  Description of Artificial Sequence: Synthetic oligonucleotide
cuugacuccccaucccgaa

SEQ ID NO: 1569421 - RNA, 19 nt, Artificial Sequence
  Description of Artificial Sequence: Synthetic oligonucleotide
ccgaaaccaggacacuggg

SEQ ID NO: 1569422 - RNA, 19 nt, Artificial Sequence
  Description of Artificial Sequence: Synthetic oligonucleotide
ccugcggaugaacuugccc

SEQ ID NO: 1569423 - RNA, 19 nt, Artificial Sequence
  Description of Artificial Sequence: Synthetic oligonucleotide
aaccgcugaccuggcuggg

SEQ ID NO: 1569424 - RNA, 19 nt, Artificial Sequence
  Description of Artificial Sequence: Synthetic oligonucleotide
auuccacccgcagucccug

SEQ ID NO: 1569425 - RNA, 19 nt, Artificial Sequence
  Description of Artificial Sequence: Synthetic oligonucleotide
gcccauacuggaccccugg

SEQ ID NO: 1569426 - RNA, 19 nt, Artificial Sequence
  Description of Artificial Sequence: Synthetic oligonucleotide
cauugauccgguacucacu

SEQ ID NO: 1569427 - RNA, 19 nt, Artificial Sequence
  Description of Artificial Sequence: Synthetic oligonucleotide
agguccugcggaugaacuu

SEQ ID NO: 1569428 - RNA, 19 nt, Artificial Sequence
  Description of Artificial Sequence: Synthetic oligonucleotide
aggaguaccccaggccucu

SEQ ID NO: 1569429 - RNA, 19 nt, Artificial Sequence
  Description of Artificial Sequence: Synthetic oligonucleotide
cagcaucuguuaucacuuc

SEQ ID NO: 1569430 - RNA, 19 nt, Artificial Sequence
  Description of Artificial Sequence: Synthetic oligonucleotide
ucacuucuuccaagccaau

SEQ ID NO: 1569431 - RNA, 19 nt, Artificial Sequence
  Description of Artificial Sequence: Synthetic oligonucleotide
gucccugggguggauccgg

SEQ ID NO: 1569432 - RNA, 19 nt, Artificial Sequence
  Description of Artificial Sequence: Synthetic oligonucleotide
cacugacucguaccacaug

SEQ ID NO: 1569433 - RNA, 19 nt, Artificial Sequence
  Description of Artificial Sequence: Synthetic oligonucleotide
augcaggcgucucggguaa

SEQ ID NO: 1569434 - RNA, 19 nt, Artificial Sequence
  Description of Artificial Sequence: Synthetic oligonucleotide
agucccugggguggauccg

SEQ ID NO: 1569435 - RNA, 19 nt, Artificial Sequence
  Description of Artificial Sequence: Synthetic oligonucleotide
gccaauugguucgaccaug

SEQ ID NO: 1569436 - RNA, 19 nt, Artificial Sequence
  Description of Artificial Sequence: Synthetic oligonucleotide
agucuacugcuuggcagga

SEQ ID NO: 1569437 - RNA, 19 nt, Artificial Sequence
  Description of Artificial Sequence: Synthetic oligonucleotide
ccucagucacauugauccg

SEQ ID NO: 1569438 - RNA, 19 nt, Artificial Sequence
  Description of Artificial Sequence: Synthetic oligonucleotide
ggcauggccaagguccugc

SEQ ID NO: 1569439 - RNA, 19 nt, Artificial Sequence
  Description of Artificial Sequence: Synthetic oligonucleotide
uggccaagguccugcggau

SEQ ID NO: 1569440 - RNA, 19 nt, Artificial Sequence
  Description of Artificial Sequence: Synthetic oligonucleotide
cagaacucugccccaugga

SEQ ID NO: 1569441 - RNA, 19 nt, Artificial Sequence
  Description of Artificial Sequence: Synthetic oligonucleotide
uccuggcggggucuucuuc

SEQ ID NO: 1569442 - RNA, 19 nt, Artificial Sequence
  Description of Artificial Sequence: Synthetic oligonucleotide
cgcaagaugcucuguaauc

SEQ ID NO: 1569443 - RNA, 19 nt, Artificial Sequence
  Description of Artificial Sequence: Synthetic oligonucleotide
gcaagaugcucuguaaucu

SEQ ID NO: 1569444 - RNA, 19 nt, Artificial Sequence
  Description of Artificial Sequence: Synthetic oligonucleotide
ccuaugugucuuucuguuc

SEQ ID NO: 1569445 - RNA, 19 nt, Artificial Sequence
  Description of Artificial Sequence: Synthetic oligonucleotide
ggaucccagcauucacucc

SEQ ID NO: 1569446 - RNA, 19 nt, Artificial Sequence
  Description of Artificial Sequence: Synthetic oligonucleotide
ucguaccacauggggcagc

SEQ ID NO: 1569447 - RNA, 19 nt, Artificial Sequence
  Description of Artificial Sequence: Synthetic oligonucleotide
ugguucgaccauggaccag

SEQ ID NO: 1569448 - RNA, 19 nt, Artificial Sequence
  Description of Artificial Sequence: Synthetic oligonucleotide
gguacucacuccagaacuc

SEQ ID NO: 1569449 - RNA, 19 nt, Artificial Sequence
  Description of Artificial Sequence: Synthetic oligonucleotide
cuucgucagugcuguccac

SEQ ID NO: 1569450 - RNA, 19 nt, Artificial Sequence
  Description of Artificial Sequence: Synthetic oligonucleotide
aaccuccggacgagcuggg

SEQ ID NO: 1569451 - RNA, 19 nt, Artificial Sequence
  Description of Artificial Sequence: Synthetic oligonucleotide
acccgcagucccuggggug

SEQ ID NO: 1569452 - RNA, 19 nt, Artificial Sequence
  Description of Artificial Sequence: Synthetic oligonucleotide
cucggguaaccagguacug

SEQ ID NO: 1569453 - RNA, 19 nt, Artificial Sequence
  Description of Artificial Sequence: Synthetic oligonucleotide
ccgcacaucggaaaaccuc

SEQ ID NO: 1569454 - RNA, 19 nt, Artificial Sequence
  Description of Artificial Sequence: Synthetic oligonucleotide
uggcggggucuucuuccug

SEQ ID NO: 1569455 - RNA, 19 nt, Artificial Sequence
  Description of Artificial Sequence: Synthetic oligonucleotide
cauggaccgcacaucggaa

SEQ ID NO: 1569456 - RNA, 19 nt, Artificial Sequence
  Description of Artificial Sequence: Synthetic oligonucleotide
gaggcacgugcuggcaccc

SEQ ID NO: 1569457 - RNA, 19 nt, Artificial Sequence
  Description of Artificial Sequence: Synthetic oligonucleotide
gccuucgucagugcugucc

SEQ ID NO: 1569458 - RNA, 19 nt, Artificial Sequence
  Description of Artificial Sequence: Synthetic oligonucleotide
agggcugccggcgccagga

SEQ ID NO: 1569459 - RNA, 19 nt, Artificial Sequence
  Description of Artificial Sequence: Synthetic oligonucleotide
acggaccugccaagcugcc

SEQ ID NO: 1569460 - RNA, 19 nt, Artificial Sequence
  Description of Artificial Sequence: Synthetic oligonucleotide
ccugccaagcugcccauac

SEQ ID NO: 1569461 - RNA, 19 nt, Artificial Sequence
  Description of Artificial Sequence: Synthetic oligonucleotide
gaacuugcccugugacucu

SEQ ID NO: 1569462 - RNA, 19 nt, Artificial Sequence
  Description of Artificial Sequence: Synthetic oligonucleotide
ggcacgugcuggcacccag

SEQ ID NO: 1569463 - RNA, 19 nt, Artificial Sequence
  Description of Artificial Sequence: Synthetic oligonucleotide
caauugguucgaccaugga

SEQ ID NO: 1569464 - RNA, 19 nt, Artificial Sequence
  Description of Artificial Sequence: Synthetic oligonucleotide
ggcaggguauguccagcug

SEQ ID NO: 1569465 - RNA, 19 nt, Artificial Sequence
  Description of Artificial Sequence: Synthetic oligonucleotide
ggcagauguaagugccuuc

SEQ ID NO: 1569466 - RNA, 19 nt, Artificial Sequence
  Description of Artificial Sequence: Synthetic oligonucleotide
aguagggcugccggcgcca

SEQ ID NO: 1569467 - RNA, 19 nt, Artificial Sequence
  Description of Artificial Sequence: Synthetic oligonucleotide
gguacugauuccacccgca

SEQ ID NO: 1569468 - RNA, 19 nt, Artificial Sequence
  Description of Artificial Sequence: Synthetic oligonucleotide
gaccccuggaggaccccag

SEQ ID NO: 1569469 - RNA, 19 nt, Artificial Sequence
  Description of Artificial Sequence: Synthetic oligonucleotide
guguccuaguccagaguca

SEQ ID NO: 1569470 - RNA, 19 nt, Artificial Sequence
  Description of Artificial Sequence: Synthetic oligonucleotide
ucccugggguggauccgga

SEQ ID NO: 1569471 - RNA, 19 nt, Artificial Sequence
  Description of Artificial Sequence: Synthetic oligonucleotide
accgcacaucggaaaaccu

SEQ ID NO: 1569472 - RNA, 19 nt, Artificial Sequence
  Description of Artificial Sequence: Synthetic oligonucleotide
ccauggaccgcacaucgga

SEQ ID NO: 1569473 - RNA, 19 nt, Artificial Sequence
  Description of Artificial Sequence: Synthetic oligonucleotide
guucgaccauggaccaggc

SEQ ID NO: 1569474 - RNA, 19 nt, Artificial Sequence
  Description of Artificial Sequence: Synthetic oligonucleotide
guacucacuccagaacucu

SEQ ID NO: 1569475 - RNA, 19 nt, Artificial Sequence
  Description of Artificial Sequence: Synthetic oligonucleotide
uggcacugacucguaccac

SEQ ID NO: 1569476 - RNA, 19 nt, Artificial Sequence
  Description of Artificial Sequence: Synthetic oligonucleotide
cucguaccacauggggcag

SEQ ID NO: 1569477 - RNA, 19 nt, Artificial Sequence
  Description of Artificial Sequence: Synthetic oligonucleotide
ccaucccgaaaccaggaca

SEQ ID NO: 1569478 - RNA, 19 nt, Artificial Sequence
  Description of Artificial Sequence: Synthetic oligonucleotide
gaugccgcacuggacggua

SEQ ID NO: 1569479 - RNA, 19 nt, Artificial Sequence
  Description of Artificial Sequence: Synthetic oligonucleotide
agguagcgggugggcaaac

SEQ ID NO: 1569480 - RNA, 19 nt, Artificial Sequence
  Description of Artificial Sequence: Synthetic oligonucleotide
gaccaaucuguguccuagu

SEQ ID NO: 1569481 - RNA, 19 nt, Artificial Sequence
  Description of Artificial Sequence: Synthetic oligonucleotide
ggcgccaggaggcagggua

SEQ ID NO: 1569482 - RNA, 19 nt, Artificial Sequence
  Description of Artificial Sequence: Synthetic oligonucleotide
ccaguacuaggaguacccc

SEQ ID NO: 1569483 - RNA, 19 nt, Artificial Sequence
  Description of Artificial Sequence: Synthetic oligonucleotide
ggacgcaagaugcucugua

SEQ ID NO: 1569484 - RNA, 19 nt, Artificial Sequence
  Description of Artificial Sequence: Synthetic oligonucleotide
ggcugggacuccaaguaca

SEQ ID NO: 1569485 - RNA, 19 nt, Artificial Sequence
  Description of Artificial Sequence: Synthetic oligonucleotide
cccagcauucacuccagga

SEQ ID NO: 1569486 - RNA, 19 nt, Artificial Sequence
  Description of Artificial Sequence: Synthetic oligonucleotide
acucugccccauggaccgc

SEQ ID NO: 1569487 - RNA, 19 nt, Artificial Sequence
  Description of Artificial Sequence: Synthetic oligonucleotide
caaauacaccauccagggu

SEQ ID NO: 1569488 - RNA, 19 nt, Artificial Sequence
  Description of Artificial Sequence: Synthetic oligonucleotide
ccgguacucacuccagaac

SEQ ID NO: 1569489 - RNA, 19 nt, Artificial Sequence
  Description of Artificial Sequence: Synthetic oligonucleotide
gcuggcacccaguggguuc

SEQ ID NO: 1569490 - RNA, 19 nt, Artificial Sequence
  Description of Artificial Sequence: Synthetic oligonucleotide
aguccagagucaggucccu

SEQ ID NO: 1569491 - RNA, 19 nt, Artificial Sequence
  Description of Artificial Sequence: Synthetic oligonucleotide
aggguauguccagcuggca

SEQ ID NO: 1569492 - RNA, 19 nt, Artificial Sequence
  Description of Artificial Sequence: Synthetic oligonucleotide
cauccaggaggcacgugcu

SEQ ID NO: 1569493 - RNA, 19 nt, Artificial Sequence
  Description of Artificial Sequence: Synthetic oligonucleotide
gucacggaccugccaagcu

SEQ ID NO: 1569494 - RNA, 19 nt, Artificial Sequence
  Description of Artificial Sequence: Synthetic oligonucleotide
ggggccaguacuaggagua

SEQ ID NO: 1569495 - RNA, 19 nt, Artificial Sequence
  Description of Artificial Sequence: Synthetic oligonucleotide
gucccuggcacugacucgu

SEQ ID NO: 1569496 - RNA, 19 nt, Artificial Sequence
  Description of Artificial Sequence: Synthetic oligonucleotide
ugggguggauccggacgca

SEQ ID NO: 1569497 - RNA, 19 nt, Artificial Sequence
  Description of Artificial Sequence: Synthetic oligonucleotide
accuccggacgagcugggg

SEQ ID NO: 1569498 - RNA, 19 nt, Artificial Sequence
  Description of Artificial Sequence: Synthetic oligonucleotide
augccgcacuggacgguac

SEQ ID NO: 1569499 - RNA, 19 nt, Artificial Sequence
  Description of Artificial Sequence: Synthetic oligonucleotide
ccuaguccagagucagguc

SEQ ID NO: 1569500 - RNA, 19 nt, Artificial Sequence
  Description of Artificial Sequence: Synthetic oligonucleotide
gguagcgggugggcaaacc

SEQ ID NO: 1569501 - RNA, 19 nt, Artificial Sequence
  Description of Artificial Sequence: Synthetic oligonucleotide
ggguggauccggacgcaag

SEQ ID NO: 1569502 - RNA, 19 nt, Artificial Sequence
  Description of Artificial Sequence: Synthetic oligonucleotide
gauccggacgcaagaugcu

SEQ ID NO: 1569503 - RNA, 19 nt, Artificial Sequence
  Description of Artificial Sequence: Synthetic oligonucleotide
cuggcacccaguggguuca

SEQ ID NO: 1569504 - RNA, 19 nt, Artificial Sequence
  Description of Artificial Sequence: Synthetic oligonucleotide
cccgcagucccuggggugg

SEQ ID NO: 1569505 - RNA, 19 nt, Artificial Sequence
  Description of Artificial Sequence: Synthetic oligonucleotide
ggagcagccuugacucccc

SEQ ID NO: 1569506 - RNA, 19 nt, Artificial Sequence
  Description of Artificial Sequence: Synthetic oligonucleotide
gcuuggcaggaaaccuccg

SEQ ID NO: 1569507 - RNA, 19 nt, Artificial Sequence
  Description of Artificial Sequence: Synthetic oligonucleotide
gggugggcaaaccgcugac

SEQ ID NO: 1569508 - RNA, 19 nt, Artificial Sequence
  Description of Artificial Sequence: Synthetic oligonucleotide
gcgucacggaccugccaag

SEQ ID NO: 1569509 - RNA, 19 nt, Artificial Sequence
  Description of Artificial Sequence: Synthetic oligonucleotide
ggguauguccagcuggcau

SEQ ID NO: 1569510 - RNA, 19 nt, Artificial Sequence
  Description of Artificial Sequence: Synthetic oligonucleotide
caagaccaaucuguguccu

SEQ ID NO: 1569511 - RNA, 19 nt, Artificial Sequence
  Description of Artificial Sequence: Synthetic oligonucleotide
cugugacucucagcuccug

SEQ ID NO: 1569512 - RNA, 19 nt, Artificial Sequence
  Description of Artificial Sequence: Synthetic oligonucleotide
ugcuggcacccaguggguu

SEQ ID NO: 1569513 - RNA, 19 nt, Artificial Sequence
  Description of Artificial Sequence: Synthetic oligonucleotide
ggaccgcacaucggaaaac

SEQ ID NO: 1569514 - RNA, 19 nt, Artificial Sequence
  Description of Artificial Sequence: Synthetic oligonucleotide
gcaggcgucucggguaacc

SEQ ID NO: 1569515 - RNA, 19 nt, Artificial Sequence
  Description of Artificial Sequence: Synthetic oligonucleotide
ccggacgcaagaugcucug

SEQ ID NO: 1569516 - RNA, 19 nt, Artificial Sequence
  Description of Artificial Sequence: Synthetic oligonucleotide
cacgggccaagaccaaucu

SEQ ID NO: 1569517 - RNA, 19 nt, Artificial Sequence
  Description of Artificial Sequence: Synthetic oligonucleotide
accgcugaccuggcuggga

SEQ ID NO: 1569518 - RNA, 19 nt, Artificial Sequence
  Description of Artificial Sequence: Synthetic oligonucleotide
caggacccugcucagcccu

SEQ ID NO: 1569519 - RNA, 19 nt, Artificial Sequence
  Description of Artificial Sequence: Synthetic oligonucleotide
gaccauggaccaggcugga

SEQ ID NO: 1569520 - RNA, 19 nt, Artificial Sequence
  Description of Artificial Sequence: Synthetic oligonucleotide
cccaucccgaaaccaggac

SEQ ID NO: 1569521 - RNA, 19 nt, Artificial Sequence
  Description of Artificial Sequence: Synthetic oligonucleotide
cagauguaagugccuucgu

SEQ ID NO: 1569522 - RNA, 19 nt, Artificial Sequence
  Description of Artificial Sequence: Synthetic oligonucleotide
ucccuggcacugacucgua

SEQ ID NO: 1569523 - RNA, 19 nt, Artificial Sequence
  Description of Artificial Sequence: Synthetic oligonucleotide
ccuugacuccccaucccga

SEQ ID NO: 1569524 - RNA, 19 nt, Artificial Sequence
  Description of Artificial Sequence: Synthetic oligonucleotide
caggcgucucggguaacca

SEQ ID NO: 1569525 - RNA, 19 nt, Artificial Sequence
  Description of Artificial Sequence: Synthetic oligonucleotide
gaagucccuggcacugacu

SEQ ID NO: 1569526 - RNA, 19 nt, Artificial Sequence
  Description of Artificial Sequence: Synthetic oligonucleotide
cucugccccauggaccgca

SEQ ID NO: 1569527 - RNA, 19 nt, Artificial Sequence
  Description of Artificial Sequence: Synthetic oligonucleotide
cagcccugagcagcugcug

SEQ ID NO: 1569528 - RNA, 19 nt, Artificial Sequence
  Description of Artificial Sequence: Synthetic oligonucleotide
acuugcccugugacucuca

SEQ ID NO: 1569529 - RNA, 19 nt, Artificial Sequence
  Description of Artificial Sequence: Synthetic oligonucleotide
cgcacaucggaaaaccucu

SEQ ID NO: 1569530 - RNA, 19 nt, Artificial Sequence
  Description of Artificial Sequence: Synthetic oligonucleotide
gcuggaugccgcacuggac

SEQ ID NO: 1569531 - RNA, 19 nt, Artificial Sequence
  Description of Artificial Sequence: Synthetic oligonucleotide
cacauccaggaggcacgug

SEQ ID NO: 1569532 - RNA, 19 nt, Artificial Sequence
  Description of Artificial Sequence: Synthetic oligonucleotide
ggaaaccuccggacgagcu

SEQ ID NO: 1569533 - RNA, 19 nt, Artificial Sequence
  Description of Artificial Sequence: Synthetic oligonucleotide
cuguguccuaguccagagu

SEQ ID NO: 1569534 - RNA, 19 nt, Artificial Sequence
  Description of Artificial Sequence: Synthetic oligonucleotide
ccgcugaccuggcugggac

SEQ ID NO: 1569535 - RNA, 19 nt, Artificial Sequence
  Description of Artificial Sequence: Synthetic oligonucleotide
gcccuaugugucuuucugu

SEQ ID NO: 1569536 - RNA, 19 nt, Artificial Sequence
  Description of Artificial Sequence: Synthetic oligonucleotide
ggccaagaccaaucugugu

SEQ ID NO: 1569537 - RNA, 19 nt, Artificial Sequence
  Description of Artificial Sequence: Synthetic oligonucleotide
cgguacucacuccagaacu

SEQ ID NO: 1569538 - RNA, 19 nt, Artificial Sequence
  Description of Artificial Sequence: Synthetic oligonucleotide
gcugcccauacuggacccc

SEQ ID NO: 1569539 - RNA, 19 nt, Artificial Sequence
  Description of Artificial Sequence: Synthetic oligonucleotide
gccggcgccaggaggcagg

SEQ ID NO: 1569540 - RNA, 19 nt, Artificial Sequence
  Description of Artificial Sequence: Synthetic oligonucleotide
ccaggaggcaggguauguc

SEQ ID NO: 1569541 - RNA, 19 nt, Artificial Sequence
  Description of Artificial Sequence: Synthetic oligonucleotide
cugcccuaugugucuuucu

SEQ ID NO: 1569542 - RNA, 19 nt, Artificial Sequence
  Description of Artificial Sequence: Synthetic oligonucleotide
ugcaggcgucucggguaac

SEQ ID NO: 1569543 - RNA, 19 nt, Artificial Sequence
  Description of Artificial Sequence: Synthetic oligonucleotide
ccacauggggcagcccagc

SEQ ID NO: 1569544 - RNA, 19 nt, Artificial Sequence
  Description of Artificial Sequence: Synthetic oligonucleotide
gcuggcaugcaggcgucuc

SEQ ID NO: 1569545 - RNA, 19 nt, Artificial Sequence
  Description of Artificial Sequence: Synthetic oligonucleotide
guggauccggacgcaagau

SEQ ID NO: 1569546 - RNA, 19 nt, Artificial Sequence
  Description of Artificial Sequence: Synthetic oligonucleotide
cagcgucacggaccugcca

SEQ ID NO: 1569547 - RNA, 19 nt, Artificial Sequence
  Description of Artificial Sequence: Synthetic oligonucleotide
caggaggcacgugcuggca

SEQ ID NO: 1569548 - RNA, 19 nt, Artificial Sequence
  Description of Artificial Sequence: Synthetic oligonucleotide
gucuacugcuuggcaggaa

SEQ ID NO: 1569549 - RNA, 19 nt, Artificial Sequence
  Description of Artificial Sequence: Synthetic oligonucleotide
cagucacauugauccggua

SEQ ID NO: 1569550 - RNA, 19 nt, Artificial Sequence
  Description of Artificial Sequence: Synthetic oligonucleotide
ugccuucgucagugcuguc

SEQ ID NO: 1569551 - RNA, 19 nt, Artificial Sequence
  Description of Artificial Sequence: Synthetic oligonucleotide
cgaaaccaggacacuggga

SEQ ID NO: 1569552 - RNA, 19 nt, Artificial Sequence
  Description of Artificial Sequence: Synthetic oligonucleotide
gggccaguacuaggaguac

SEQ ID NO: 1569553 - RNA, 19 nt, Artificial Sequence
  Description of Artificial Sequence: Synthetic oligonucleotide
ggaggaccccaggcuuggg

SEQ ID NO: 1569554 - RNA, 19 nt, Artificial Sequence
  Description of Artificial Sequence: Synthetic oligonucleotide
cccuaugugucuuucuguu

SEQ ID NO: 1569555 - RNA, 19 nt, Artificial Sequence
  Description of Artificial Sequence: Synthetic oligonucleotide
ccccaucccgaaaccagga

SEQ ID NO: 1569556 - RNA, 19 nt, Artificial Sequence
  Description of Artificial Sequence: Synthetic oligonucleotide
cugccaagcugcccauacu

SEQ ID NO: 1569557 - RNA, 19 nt, Artificial Sequence
  Description of Artificial Sequence: Synthetic oligonucleotide
gcacuggacgguacuguaa

SEQ ID NO: 1569558 - RNA, 19 nt, Artificial Sequence
  Description of Artificial Sequence: Synthetic oligonucleotide
cagccacagcaucuguuau

SEQ ID NO: 1569559 - RNA, 19 nt, Artificial Sequence
  Description of Artificial Sequence: Synthetic oligonucleotide
cuggcggggucuucuuccu

SEQ ID NO: 1569560 - RNA, 19 nt, Artificial Sequence
  Description of Artificial Sequence: Synthetic oligonucleotide
cugcccauacuggaccccu

SEQ ID NO: 1569561 - RNA, 19 nt, Artificial Sequence
  Description of Artificial Sequence: Synthetic oligonucleotide
cccuggcacugacucguac

SEQ ID NO: 1569562 - RNA, 19 nt, Artificial Sequence
  Description of Artificial Sequence: Synthetic oligonucleotide
aggcacgugcuggcaccca

SEQ ID NO: 1569563 - RNA, 19 nt, Artificial Sequence
  Description of Artificial Sequence: Synthetic oligonucleotide
ggcacccaguggguucacc

SEQ ID NO: 1569564 - RNA, 19 nt, Artificial Sequence
  Description of Artificial Sequence: Synthetic oligonucleotide
cccauacuggaccccugga

SEQ ID NO: 1569565 - RNA, 19 nt, Artificial Sequence
  Description of Artificial Sequence: Synthetic oligonucleotide
cgucacggaccugccaagc

SEQ ID NO: 1569566 - RNA, 19 nt, Artificial Sequence
  Description of Artificial Sequence: Synthetic oligonucleotide
cggguaaccagguacugau

SEQ ID NO: 1569567 - RNA, 19 nt, Artificial Sequence
  Description of Artificial Sequence: Synthetic oligonucleotide
gcccugugacucucagcuc

SEQ ID NO: 1569568 - RNA, 19 nt, Artificial Sequence
  Description of Artificial Sequence: Synthetic oligonucleotide
cugccccauggaccgcaca

SEQ ID NO: 1569569 - RNA, 19 nt, Artificial Sequence
  Description of Artificial Sequence: Synthetic oligonucleotide
ccaagccaauugguucgac

SEQ ID NO: 1569570 - RNA, 19 nt, Artificial Sequence
  Description of Artificial Sequence: Synthetic oligonucleotide
cacccgcagucccuggggu

SEQ ID NO: 1569571 - RNA, 19 nt, Artificial Sequence
  Description of Artificial Sequence: Synthetic oligonucleotide
gaccuggcugggacuccaa

SEQ ID NO: 1569572 - RNA, 19 nt, Artificial Sequence
  Description of Artificial Sequence: Synthetic oligonucleotide
gccccauggaccgcacauc

SEQ ID NO: 1569573 - RNA, 19 nt, Artificial Sequence
  Description of Artificial Sequence: Synthetic oligonucleotide
gcgggugggcaaaccgcug

SEQ ID NO: 1569574 - RNA, 19 nt, Artificial Sequence
  Description of Artificial Sequence: Synthetic oligonucleotide
cacacgggccaagaccaau

SEQ ID NO: 1569575 - RNA, 19 nt, Artificial Sequence
  Description of Artificial Sequence: Synthetic oligonucleotide
cuccagaacucugccccau

SEQ ID NO: 1569576 - RNA, 19 nt, Artificial Sequence
  Description of Artificial Sequence: Synthetic oligonucleotide
gcggggucuucuuccugua

SEQ ID NO: 1569577 - RNA, 19 nt, Artificial Sequence
  Description of Artificial Sequence: Synthetic oligonucleotide
gggguggauccggacgcaa

SEQ ID NO: 1569578 - RNA, 19 nt, Artificial Sequence
  Description of Artificial Sequence: Synthetic oligonucleotide
ccggcgccaggaggcaggg

SEQ ID NO: 1569579 - RNA, 19 nt, Artificial Sequence
  Description of Artificial Sequence: Synthetic oligonucleotide
ccaggcuggaugccgcacu

SEQ ID NO: 1569580 - RNA, 19 nt, Artificial Sequence
  Description of Artificial Sequence: Synthetic oligonucleotide
gugcuggcacccagugggu

SEQ ID NO: 1569581 - RNA, 19 nt, Artificial Sequence
  Description of Artificial Sequence: Synthetic oligonucleotide
gcggaugaacuugcccugu

SEQ ID NO: 1569582 - RNA, 19 nt, Artificial Sequence
  Description of Artificial Sequence: Synthetic oligonucleotide
cugccggcgccaggaggca

SEQ ID NO: 1569583 - RNA, 19 nt, Artificial Sequence
  Description of Artificial Sequence: Synthetic oligonucleotide
gcgucucggguaaccaggu

SEQ ID NO: 1569584 - RNA, 19 nt, Artificial Sequence
  Description of Artificial Sequence: Synthetic oligonucleotide
cacugcccuaugugucuuu

SEQ ID NO: 1569585 - RNA, 19 nt, Artificial Sequence
  Description of Artificial Sequence: Synthetic oligonucleotide
ggaugccgcacuggacggu

SEQ ID NO: 1569586 - RNA, 19 nt, Artificial Sequence
  Description of Artificial Sequence: Synthetic oligonucleotide
ccaagguccugcggaugaa

SEQ ID NO: 1569587 - RNA, 19 nt, Artificial Sequence
  Description of Artificial Sequence: Synthetic oligonucleotide
ggaagacaccagggcugua

SEQ ID NO: 1569588 - RNA, 19 nt, Artificial Sequence
  Description of Artificial Sequence: Synthetic oligonucleotide
cuccuggcggggucuucuu

SEQ ID NO: 1569589 - RNA, 19 nt, Artificial Sequence
  Description of Artificial Sequence: Synthetic oligonucleotide
gcacgugcuggcacccagu

SEQ ID NO: 1569590 - RNA, 19 nt, Artificial Sequence
  Description of Artificial Sequence: Synthetic oligonucleotide
gcacaucggaaaaccucuu

SEQ ID NO: 1569591 - RNA, 19 nt, Artificial Sequence
  Description of Artificial Sequence: Synthetic oligonucleotide
ccgcacuggacgguacugu

SEQ ID NO: 1569592 - RNA, 19 nt, Artificial Sequence
  Description of Artificial Sequence: Synthetic oligonucleotide
gcacagcgucacggaccug

SEQ ID NO: 1569593 - RNA, 19 nt, Artificial Sequence
  Description of Artificial Sequence: Synthetic oligonucleotide
gcgccaggaggcaggguau

SEQ ID NO: 1569594 - RNA, 19 nt, Artificial Sequence
  Description of Artificial Sequence: Synthetic oligonucleotide
cgucucggguaaccaggua

SEQ ID NO: 1569595 - RNA, 19 nt, Artificial Sequence
  Description of Artificial Sequence: Synthetic oligonucleotide
ccgcagucccuggggugga

SEQ ID NO: 1569596 - RNA, 19 nt, Artificial Sequence
  Description of Artificial Sequence: Synthetic oligonucleotide
ccacugcccuaugugucuu

SEQ ID NO: 1569597 - RNA, 19 nt, Artificial Sequence
  Description of Artificial Sequence: Synthetic oligonucleotide
cggacgcaagaugcucugu

SEQ ID NO: 1569598 - RNA, 19 nt, Artificial Sequence
  Description of Artificial Sequence: Synthetic oligonucleotide
aagucuauaaaacuguuca

SEQ ID NO: 1569599 - RNA, 19 nt, Artificial Sequence
  Description of Artificial Sequence: Synthetic oligonucleotide
ugucguuuaaaucagaaac

SEQ ID NO: 1569600 - RNA, 19 nt, Artificial Sequence
  Description of Artificial Sequence: Synthetic oligonucleotide
aguguuaugagacagucuc

SEQ ID NO: 1569601 - RNA, 19 nt, Artificial Sequence
  Description of Artificial Sequence: Synthetic oligonucleotide
aguaaaguuaguuagguca

SEQ ID NO: 1569602 - RNA, 19 nt, Artificial Sequence
  Description of Artificial Sequence: Synthetic oligonucleotide
gauacgaaguucaugaugg

SEQ ID NO: 1569603 - RNA, 19 nt, Artificial Sequence
  Description of Artificial Sequence: Synthetic oligonucleotide
uuuacuacugcaaccagag

SEQ ID NO: 1569604 - RNA, 19 nt, Artificial Sequence
  Description of Artificial Sequence: Synthetic oligonucleotide
aaacuguucacaaauuccc

SEQ ID NO: 1569605 - RNA, 19 nt, Artificial Sequence
  Description of Artificial Sequence: Synthetic oligonucleotide
uuaugagacagucucauca

SEQ ID NO: 1569606 - RNA, 19 nt, Artificial Sequence
  Description of Artificial Sequence: Synthetic oligonucleotide
ugaaauguugccuugucag

SEQ ID NO: 1569607 - RNA, 19 nt, Artificial Sequence
  Description of Artificial Sequence: Synthetic oligonucleotide
uguacgaagaacaugcuuc

SEQ ID NO: 1569608 - RNA, 19 nt, Artificial Sequence
  Description of Artificial Sequence: Synthetic oligonucleotide
aaaugcucaggacaaaaug

SEQ ID NO: 1569609 - RNA, 19 nt, Artificial Sequence
  Description of Artificial Sequence: Synthetic oligonucleotide
auguguacgaagaacaugc

SEQ ID NO: 1569610 - RNA, 19 nt, Artificial Sequence
  Description of Artificial Sequence: Synthetic oligonucleotide
uguuaggcaaggaaaaggc

SEQ ID NO: 1569611 - RNA, 19 nt, Artificial Sequence
  Description of Artificial Sequence: Synthetic oligonucleotide
cacuaguaaaguuaguuag

SEQ ID NO: 1569612 - RNA, 19 nt, Artificial Sequence
  Description of Artificial Sequence: Synthetic oligonucleotide
ucguuuaaaucagaaaccg

SEQ ID NO: 1569613 - RNA, 19 nt, Artificial Sequence
  Description of Artificial Sequence: Synthetic oligonucleotide
ugcauagacagcaucaaac

SEQ ID NO: 1569614 - RNA, 19 nt, Artificial Sequence
  Description of Artificial Sequence: Synthetic oligonucleotide
agucuaacugcucuggagg

SEQ ID NO: 1569615 - RNA, 19 nt, Artificial Sequence
  Description of Artificial Sequence: Synthetic oligonucleotide
uuaggcaaggaaaaggcac

SEQ ID NO: 1569616 - RNA, 19 nt, Artificial Sequence
  Description of Artificial Sequence: Synthetic oligonucleotide
uuuauugacaaggucaaac

SEQ ID NO: 1569617 - RNA, 19 nt, Artificial Sequence
  Description of Artificial Sequence: Synthetic oligonucleotide
uucugauuaauucuuugga

SEQ ID NO: 1569618 - RNA, 19 nt, Artificial Sequence
  Description of Artificial Sequence: Synthetic oligonucleotide
uucgcauaugcucucaacc

SEQ ID NO: 1569619 - RNA, 19 nt, Artificial Sequence
  Description of Artificial Sequence: Synthetic oligonucleotide
agugcguagaguuuuagcu

SEQ ID NO: 1569620 - RNA, 19 nt, Artificial Sequence
  Description of Artificial Sequence: Synthetic oligonucleotide
aguguuugucguuuaaauc

SEQ ID NO: 1569621 - RNA, 19 nt, Artificial Sequence
  Description of Artificial Sequence: Synthetic oligonucleotide
auaacugagauguuaggca

SEQ ID NO: 1569622 - RNA, 19 nt, Artificial Sequence
  Description of Artificial Sequence: Synthetic oligonucleotide
cauugcauuuucaaagucc

SEQ ID NO: 1569623 - RNA, 19 nt, Artificial Sequence
  Description of Artificial Sequence: Synthetic oligonucleotide
aaccuaaagaccugcagga

SEQ ID NO: 1569624 - RNA, 19 nt, Artificial Sequence
  Description of Artificial Sequence: Synthetic oligonucleotide
ugagaagucuaacugcucu

SEQ ID NO: 1569625 - RNA, 19 nt, Artificial Sequence
  Description of Artificial Sequence: Synthetic oligonucleotide
agcauuaacugcguggagc

SEQ ID NO: 1569626 - RNA, 19 nt, Artificial Sequence
  Description of Artificial Sequence: Synthetic oligonucleotide
aagucuaacugcucuggag

SEQ ID NO: 1569627 - RNA, 19 nt, Artificial Sequence
  Description of Artificial Sequence: Synthetic oligonucleotide
aaagucuauaaaacuguuc

SEQ ID NO: 1569628 - RNA, 19 nt, Artificial Sequence
  Description of Artificial Sequence: Synthetic oligonucleotide
aaugcucaggacaaaauga

SEQ ID NO: 1569629 - RNA, 19 nt, Artificial Sequence
  Description of Artificial Sequence: Synthetic oligonucleotide
uuuggcaaguugccaaggg

SEQ ID NO: 1569630 - RNA, 19 nt, Artificial Sequence
  Description of Artificial Sequence: Synthetic oligonucleotide
ugagauguuaggcaaggaa

SEQ ID NO: 1569631 - RNA, 19 nt, Artificial Sequence
  Description of Artificial Sequence: Synthetic oligonucleotide
cacauuacaggguccaucc

SEQ ID NO: 1569632 - RNA, 19 nt, Artificial Sequence
  Description of Artificial Sequence: Synthetic oligonucleotide
ucugauuaauucuuuggaa

SEQ ID NO: 1569633 - RNA, 19 nt, Artificial Sequence
  Description of Artificial Sequence: Synthetic oligonucleotide
uuugucguuuaaaucagaa

SEQ ID NO: 1569634 - RNA, 19 nt, Artificial Sequence
  Description of Artificial Sequence: Synthetic oligonucleotide
ugcuuuucuggauacgaag

SEQ ID NO: 1569635 - RNA, 19 nt, Artificial Sequence
  Description of Artificial Sequence: Synthetic oligonucleotide
acuguucacaaauucccuc

SEQ ID NO: 1569636 - RNA, 19 nt, Artificial Sequence
  Description of Artificial Sequence: Synthetic oligonucleotide
agaacauaguuccucugag

SEQ ID NO: 1569637 - RNA, 19 nt, Artificial Sequence
  Description of Artificial Sequence: Synthetic oligonucleotide
cuaaagaccugcaggagac

SEQ ID NO: 1569638 - RNA, 19 nt, Artificial Sequence
  Description of Artificial Sequence: Synthetic oligonucleotide
cauaacugagauguuaggc

SEQ ID NO: 1569639 - RNA, 19 nt, Artificial Sequence
  Description of Artificial Sequence: Synthetic oligonucleotide
uuaggcacauuacaggguc

SEQ ID NO: 1569640 - RNA, 19 nt, Artificial Sequence
  Description of Artificial Sequence: Synthetic oligonucleotide
ucauaacugagauguuagg

SEQ ID NO: 1569641 - RNA, 19 nt, Artificial Sequence
  Description of Artificial Sequence: Synthetic oligonucleotide
cuggauacgaaguucauga

SEQ ID NO: 1569642 - RNA, 19 nt, Artificial Sequence
  Description of Artificial Sequence: Synthetic oligonucleotide
uuaguuaggucauucccac

SEQ ID NO: 1569643 - RNA, 19 nt, Artificial Sequence
  Description of Artificial Sequence: Synthetic oligonucleotide
cacucuucagcauuaacug

SEQ ID NO: 1569644 - RNA, 19 nt, Artificial Sequence
  Description of Artificial Sequence: Synthetic oligonucleotide
aaagaccugcaggagacuc

SEQ ID NO: 1569645 - RNA, 19 nt, Artificial Sequence
  Description of Artificial Sequence: Synthetic oligonucleotide
acauaguuuugccuggcag

SEQ ID NO: 1569646 - RNA, 19 nt, Artificial Sequence
  Description of Artificial Sequence: Synthetic oligonucleotide
cuugcuuugaggguagugc

SEQ ID NO: 1569647 - RNA, 19 nt, Artificial Sequence
  Description of Artificial Sequence: Synthetic oligonucleotide
aauguugccuugucagaug

SEQ ID NO: 1569648 - RNA, 19 nt, Artificial Sequence
  Description of Artificial Sequence: Synthetic oligonucleotide
auguuaggcaaggaaaagg

SEQ ID NO: 1569649 - RNA, 19 nt, Artificial Sequence
  Description of Artificial Sequence: Synthetic oligonucleotide
agaacaugcuucugggcuc

SEQ ID NO: 1569650 - RNA, 19 nt, Artificial Sequence
  Description of Artificial Sequence: Synthetic oligonucleotide
uguccuuagacuccuggac

SEQ ID NO: 1569651 - RNA, 19 nt, Artificial Sequence
  Description of Artificial Sequence: Synthetic oligonucleotide
ucagaaaccggaacucaca

SEQ ID NO: 1569652 - RNA, 19 nt, Artificial Sequence
  Description of Artificial Sequence: Synthetic oligonucleotide
ucagcauuaacugcgugga

SEQ ID NO: 1569653 - RNA, 19 nt, Artificial Sequence
  Description of Artificial Sequence: Synthetic oligonucleotide
ugccaagggaauuccaugc

SEQ ID NO: 1569654 - RNA, 19 nt, Artificial Sequence
  Description of Artificial Sequence: Synthetic oligonucleotide
uaacugagauguuaggcaa

SEQ ID NO: 1569655 - RNA, 19 nt, Artificial Sequence
  Description of Artificial Sequence: Synthetic oligonucleotide
acacacccggcuuaggcac

SEQ ID NO: 1569656 - RNA, 19 nt, Artificial Sequence
  Description of Artificial Sequence: Synthetic oligonucleotide
gcuuaggcacauuacaggg

SEQ ID NO: 1569657 - RNA, 19 nt, Artificial Sequence
  Description of Artificial Sequence: Synthetic oligonucleotide
gauuccuacagcugggcca

SEQ ID NO: 1569658 - RNA, 19 nt, Artificial Sequence
  Description of Artificial Sequence: Synthetic oligonucleotide
uaugaucuccuuauacauc

SEQ ID NO: 1569659 - RNA, 19 nt, Artificial Sequence
  Description of Artificial Sequence: Synthetic oligonucleotide
aaauguugccuugucagau

SEQ ID NO: 1569660 - RNA, 19 nt, Artificial Sequence
  Description of Artificial Sequence: Synthetic oligonucleotide
ugcguagaguuuuagcuuc

SEQ ID NO: 1569661 - RNA, 19 nt, Artificial Sequence
  Description of Artificial Sequence: Synthetic oligonucleotide
auacgaaguucaugauggc

SEQ ID NO: 1569662 - RNA, 19 nt, Artificial Sequence
  Description of Artificial Sequence: Synthetic oligonucleotide
cugauuaauucuuuggaaa

SEQ ID NO: 1569663 - RNA, 19 nt, Artificial Sequence
  Description of Artificial Sequence: Synthetic oligonucleotide
gauguuaggcaaggaaaag

SEQ ID NO: 1569664 - RNA, 19 nt, Artificial Sequence
  Description of Artificial Sequence: Synthetic oligonucleotide
cugaauggaguaugaaaug

SEQ ID NO: 1569665 - RNA, 19 nt, Artificial Sequence
  Description of Artificial Sequence: Synthetic oligonucleotide
ucgcauaugcucucaaccu

SEQ ID NO: 1569666 - RNA, 19 nt, Artificial Sequence
  Description of Artificial Sequence: Synthetic oligonucleotide
acauaguuccucugagaag

SEQ ID NO: 1569667 - RNA, 19 nt, Artificial Sequence
  Description of Artificial Sequence: Synthetic oligonucleotide
aaucagaaaccggaacuca

SEQ ID NO: 1569668 - RNA, 19 nt, Artificial Sequence
  Description of Artificial Sequence: Synthetic oligonucleotide
gucuauaaaacuguucaca

SEQ ID NO: 1569669 - RNA, 19 nt, Artificial Sequence
  Description of Artificial Sequence: Synthetic oligonucleotide
ugaccgagguggcugaaug

SEQ ID NO: 1569670 - RNA, 19 nt, Artificial Sequence
  Description of Artificial Sequence: Synthetic oligonucleotide
uucgugaugccaucuucag

SEQ ID NO: 1569671 - RNA, 19 nt, Artificial Sequence
  Description of Artificial Sequence: Synthetic oligonucleotide
uuggcaaguugccaaggga

SEQ ID NO: 1569672 - RNA, 19 nt, Artificial Sequence
  Description of Artificial Sequence: Synthetic oligonucleotide
caguaugaucuccuuauac

SEQ ID NO: 1569673 - RNA, 19 nt, Artificial Sequence
  Description of Artificial Sequence: Synthetic oligonucleotide
uguuaugagacagucucau

SEQ ID NO: 1569674 - RNA, 19 nt, Artificial Sequence
  Description of Artificial Sequence: Synthetic oligonucleotide
ucaguguuaugagacaguc

SEQ ID NO: 1569675 - RNA, 19 nt, Artificial Sequence
  Description of Artificial Sequence: Synthetic oligonucleotide
gugacggcgauuccuacag

SEQ ID NO: 1569676 - RNA, 19 nt, Artificial Sequence
  Description of Artificial Sequence: Synthetic oligonucleotide
ugguucauugcauuuucaa

SEQ ID NO: 1569677 - RNA, 19 nt, Artificial Sequence
  Description of Artificial Sequence: Synthetic oligonucleotide
uaugagacagucucaucau

SEQ ID NO: 1569678 - RNA, 19 nt, Artificial Sequence
  Description of Artificial Sequence: Synthetic oligonucleotide
gagcccaucaucuuuggaa

SEQ ID NO: 1569679 - RNA, 19 nt, Artificial Sequence
  Description of Artificial Sequence: Synthetic oligonucleotide
ucggacaccagcaccgcgc

SEQ ID NO: 1569680 - RNA, 19 nt, Artificial Sequence
  Description of Artificial Sequence: Synthetic oligonucleotide
cgugaugccaucuucagag

SEQ ID NO: 1569681 - RNA, 19 nt, Artificial Sequence
  Description of Artificial Sequence: Synthetic oligonucleotide
uugucguuuaaaucagaaa

SEQ ID NO: 1569682 - RNA, 19 nt, Artificial Sequence
  Description of Artificial Sequence: Synthetic oligonucleotide
aucagaaaccggaacucac

SEQ ID NO: 1569683 - RNA, 19 nt, Artificial Sequence
  Description of Artificial Sequence: Synthetic oligonucleotide
gaaauguugccuugucaga

SEQ ID NO: 1569684 - RNA, 19 nt, Artificial Sequence
  Description of Artificial Sequence: Synthetic oligonucleotide
auccguggccugcuuauac

SEQ ID NO: 1569685 - RNA, 19 nt, Artificial Sequence
  Description of Artificial Sequence: Synthetic oligonucleotide
ggcuuaggcacauuacagg

SEQ ID NO: 1569686 - RNA, 19 nt, Artificial Sequence
  Description of Artificial Sequence: Synthetic oligonucleotide
ggacaccagauccacauag

SEQ ID NO: 1569687 - RNA, 19 nt, Artificial Sequence
  Description of Artificial Sequence: Synthetic oligonucleotide
aaaggcacacucaaguguu

SEQ ID NO: 1569688 - RNA, 19 nt, Artificial Sequence
  Description of Artificial Sequence: Synthetic oligonucleotide
ggauacgaaguucaugaug

SEQ ID NO: 1569689 - RNA, 19 nt, Artificial Sequence
  Description of Artificial Sequence: Synthetic oligonucleotide
ucuucagcauuaacugcgu

SEQ ID NO: 1569690 - RNA, 19 nt, Artificial Sequence
  Description of Artificial Sequence: Synthetic oligonucleotide
gguagugcacucuucagca

SEQ ID NO: 1569691 - RNA, 19 nt, Artificial Sequence
  Description of Artificial Sequence: Synthetic oligonucleotide
ugucaguaugaucuccuua

SEQ ID NO: 1569692 - RNA, 19 nt, Artificial Sequence
  Description of Artificial Sequence: Synthetic oligonucleotide
ugcuuauacagugcguaga

SEQ ID NO: 1569693 - RNA, 19 nt, Artificial Sequence
  Description of Artificial Sequence: Synthetic oligonucleotide
aauucucauggaauuuggu

SEQ ID NO: 1569694 - RNA, 19 nt, Artificial Sequence
  Description of Artificial Sequence: Synthetic oligonucleotide
gacuggcucucaucguugg

SEQ ID NO: 1569695 - RNA, 19 nt, Artificial Sequence
  Description of Artificial Sequence: Synthetic oligonucleotide
uucaagaguuucacuuggu

SEQ ID NO: 1569696 - RNA, 19 nt, Artificial Sequence
  Description of Artificial Sequence: Synthetic oligonucleotide
uugucaguguuaugagaca

SEQ ID NO: 1569697 - RNA, 19 nt, Artificial Sequence
  Description of Artificial Sequence: Synthetic oligonucleotide
aacuguucacaaauucccu

SEQ ID NO: 1569698 - RNA, 19 nt, Artificial Sequence
  Description of Artificial Sequence: Synthetic oligonucleotide
cugguuagccgccuccucc

SEQ ID NO: 1569699 - RNA, 19 nt, Artificial Sequence
  Description of Artificial Sequence: Synthetic oligonucleotide
ggaaccuaaagaccugcag

SEQ ID NO: 1569700 - RNA, 19 nt, Artificial Sequence
  Description of Artificial Sequence: Synthetic oligonucleotide
ucguuggucugcccaagug

SEQ ID NO: 1569701 - RNA, 19 nt, Artificial Sequence
  Description of Artificial Sequence: Synthetic oligonucleotide
uguguacgaagaacaugcu

SEQ ID NO: 1569702 - RNA, 19 nt, Artificial Sequence
  Description of Artificial Sequence: Synthetic oligonucleotide
gaccgagguggcugaaugg

SEQ ID NO: 1569703 - RNA, 19 nt, Artificial Sequence
  Description of Artificial Sequence: Synthetic oligonucleotide
aacugagauguuaggcaag

SEQ ID NO: 1569704 - RNA, 19 nt, Artificial Sequence
  Description of Artificial Sequence: Synthetic oligonucleotide
uuuggcgggccgauugagc

SEQ ID NO: 1569705 - RNA, 19 nt, Artificial Sequence
  Description of Artificial Sequence: Synthetic oligonucleotide
cacuugguuuccugggucc

SEQ ID NO: 1569706 - RNA, 19 nt, Artificial Sequence
  Description of Artificial Sequence: Synthetic oligonucleotide
auuuacuacugcaaccaga

SEQ ID NO: 1569707 - RNA, 19 nt, Artificial Sequence
  Description of Artificial Sequence: Synthetic oligonucleotide
auaugcucucaaccugguc

SEQ ID NO: 1569708 - RNA, 19 nt, Artificial Sequence
  Description of Artificial Sequence: Synthetic oligonucleotide
cauuuacuacugcaaccag

SEQ ID NO: 1569709 - RNA, 19 nt, Artificial Sequence
  Description of Artificial Sequence: Synthetic oligonucleotide
cauaguuccucugagaagu

SEQ ID NO: 1569710 - RNA, 19 nt, Artificial Sequence
  Description of Artificial Sequence: Synthetic oligonucleotide
cugcuuauacagugcguag

SEQ ID NO: 1569711 - RNA, 19 nt, Artificial Sequence
  Description of Artificial Sequence: Synthetic oligonucleotide
aagggugacggcgauuccu

SEQ ID NO: 1569712 - RNA, 19 nt, Artificial Sequence
  Description of Artificial Sequence: Synthetic oligonucleotide
ggcuagaggcuucagauga

SEQ ID NO: 1569713 - RNA, 19 nt, Artificial Sequence
  Description of Artificial Sequence: Synthetic oligonucleotide
uugcuuuucuggauacgaa

SEQ ID NO: 1569714 - RNA, 19 nt, Artificial Sequence
  Description of Artificial Sequence: Synthetic oligonucleotide
aggacucagacuggacacc

SEQ ID NO: 1569715 - RNA, 19 nt, Artificial Sequence
  Description of Artificial Sequence: Synthetic oligonucleotide
cagugcguagaguuuuagc

SEQ ID NO: 1569716 - RNA, 19 nt, Artificial Sequence
  Description of Artificial Sequence: Synthetic oligonucleotide
acccugguuagccgccucc

SEQ ID NO: 1569717 - RNA, 19 nt, Artificial Sequence
  Description of Artificial Sequence: Synthetic oligonucleotide
auguccuuagacuccugga

SEQ ID NO: 1569718 - RNA, 19 nt, Artificial Sequence
  Description of Artificial Sequence: Synthetic oligonucleotide
ucgugaugccaucuucaga

SEQ ID NO: 1569719 - RNA, 19 nt, Artificial Sequence
  Description of Artificial Sequence: Synthetic oligonucleotide
auuaacugcguggagcuuu

SEQ ID NO: 1569720 - RNA, 19 nt, Artificial Sequence
  Description of Artificial Sequence: Synthetic oligonucleotide
ugccgccauggcuaaaugc

SEQ ID NO: 1569721 - RNA, 19 nt, Artificial Sequence
  Description of Artificial Sequence: Synthetic oligonucleotide
cauuccucugacagccacc

SEQ ID NO: 1569722 - RNA, 19 nt, Artificial Sequence
  Description of Artificial Sequence: Synthetic oligonucleotide
ucccacugcaguaguaguc

SEQ ID NO: 1569723 - RNA, 19 nt, Artificial Sequence
  Description of Artificial Sequence: Synthetic oligonucleotide
ugggaaccuaaagaccugc

SEQ ID NO: 1569724 - RNA, 19 nt, Artificial Sequence
  Description of Artificial Sequence: Synthetic oligonucleotide
uggcucucaucguuggucu

SEQ ID NO: 1569725 - RNA, 19 nt, Artificial Sequence
  Description of Artificial Sequence: Synthetic oligonucleotide
cagaacauaguuccucuga

SEQ ID NO: 1569726 - RNA, 19 nt, Artificial Sequence
  Description of Artificial Sequence: Synthetic oligonucleotide
uaggcacauuacagggucc

SEQ ID NO: 1569727 - RNA, 19 nt, Artificial Sequence
  Description of Artificial Sequence: Synthetic oligonucleotide
gcuuucccuggcuagaggc

SEQ ID NO: 1569728 - RNA, 19 nt, Artificial Sequence
  Description of Artificial Sequence: Synthetic oligonucleotide
ucaguugccuuugcugagc

SEQ ID NO: 1569729 - RNA, 19 nt, Artificial Sequence
  Description of Artificial Sequence: Synthetic oligonucleotide
uggagcuuuuccuucucau

SEQ ID NO: 1569730 - RNA, 19 nt, Artificial Sequence
  Description of Artificial Sequence: Synthetic oligonucleotide
ucaucguuggucugcccaa

SEQ ID NO: 1569731 - RNA, 19 nt, Artificial Sequence
  Description of Artificial Sequence: Synthetic oligonucleotide
cacugcaguaguagucacc

SEQ ID NO: 1569732 - RNA, 19 nt, Artificial Sequence
  Description of Artificial Sequence: Synthetic oligonucleotide
caggacaaaaugagcucug

SEQ ID NO: 1569733 - RNA, 19 nt, Artificial Sequence
  Description of Artificial Sequence: Synthetic oligonucleotide
gaguaugaaauguugccuu

SEQ ID NO: 1569734 - RNA, 19 nt, Artificial Sequence
  Description of Artificial Sequence: Synthetic oligonucleotide
ggguagugcacucuucagc

SEQ ID NO: 1569735 - RNA, 19 nt, Artificial Sequence
  Description of Artificial Sequence: Synthetic oligonucleotide
ggccugcuuauacagugcg

SEQ ID NO: 1569736 - RNA, 19 nt, Artificial Sequence
  Description of Artificial Sequence: Synthetic oligonucleotide
uucccacugcaguaguagu

SEQ ID NO: 1569737 - RNA, 19 nt, Artificial Sequence
  Description of Artificial Sequence: Synthetic oligonucleotide
uccguggccugcuuauaca

SEQ ID NO: 1569738 - RNA, 19 nt, Artificial Sequence
  Description of Artificial Sequence: Synthetic oligonucleotide
ccuuauacaucucaaaugu

SEQ ID NO: 1569739 - RNA, 19 nt, Artificial Sequence
  Description of Artificial Sequence: Synthetic oligonucleotide
cauaguuuugccuggcagu

SEQ ID NO: 1569740 - RNA, 19 nt, Artificial Sequence
  Description of Artificial Sequence: Synthetic oligonucleotide
ugcguggagcuuuuccuuc

SEQ ID NO: 1569741 - RNA, 19 nt, Artificial Sequence
  Description of Artificial Sequence: Synthetic oligonucleotide
uuaacugcguggagcuuuu

SEQ ID NO: 1569742 - RNA, 19 nt, Artificial Sequence
  Description of Artificial Sequence: Synthetic oligonucleotide
cuaaaugcucaggacaaaa

SEQ ID NO: 1569743 - RNA, 19 nt, Artificial Sequence
  Description of Artificial Sequence: Synthetic oligonucleotide
uguugccuugucagaugca

SEQ ID NO: 1569744 - RNA, 19 nt, Artificial Sequence
  Description of Artificial Sequence: Synthetic oligonucleotide
cucaaccugguccagaccu

SEQ ID NO: 1569745 - RNA, 19 nt, Artificial Sequence
  Description of Artificial Sequence: Synthetic oligonucleotide
aacagccccagaaggguga

SEQ ID NO: 1569746 - RNA, 19 nt, Artificial Sequence
  Description of Artificial Sequence: Synthetic oligonucleotide
uggauacgaaguucaugau

SEQ ID NO: 1569747 - RNA, 19 nt, Artificial Sequence
  Description of Artificial Sequence: Synthetic oligonucleotide
gacggcgauuccuacagcu

SEQ ID NO: 1569748 - RNA, 19 nt, Artificial Sequence
  Description of Artificial Sequence: Synthetic oligonucleotide
accuaaagaccugcaggag

SEQ ID NO: 1569749 - RNA, 19 nt, Artificial Sequence
  Description of Artificial Sequence: Synthetic oligonucleotide
ggccauuuacuacugcaac

SEQ ID NO: 1569750 - RNA, 19 nt, Artificial Sequence
  Description of Artificial Sequence: Synthetic oligonucleotide
auacagugcguagaguuuu

SEQ ID NO: 1569751 - RNA, 19 nt, Artificial Sequence
  Description of Artificial Sequence: Synthetic oligonucleotide
caguugccuuugcugagcc

SEQ ID NO: 1569752 - RNA, 19 nt, Artificial Sequence
  Description of Artificial Sequence: Synthetic oligonucleotide
gcaaccagaggcuugggaa

SEQ ID NO: 1569753 - RNA, 19 nt, Artificial Sequence
  Description of Artificial Sequence: Synthetic oligonucleotide
uaguuccucugagaagucu

SEQ ID NO: 1569754 - RNA, 19 nt, Artificial Sequence
  Description of Artificial Sequence: Synthetic oligonucleotide
caucauaacugagauguua

SEQ ID NO: 1569755 - RNA, 19 nt, Artificial Sequence
  Description of Artificial Sequence: Synthetic oligonucleotide
accgagguggcugaaugga

SEQ ID NO: 1569756 - RNA, 19 nt, Artificial Sequence
  Description of Artificial Sequence: Synthetic oligonucleotide
ucuaacugcucuggagguc

SEQ ID NO: 1569757 - RNA, 19 nt, Artificial Sequence
  Description of Artificial Sequence: Synthetic oligonucleotide
guacgaagaacaugcuucu

SEQ ID NO: 1569758 - RNA, 19 nt, Artificial Sequence
  Description of Artificial Sequence: Synthetic oligonucleotide
cugggaaccuaaagaccug

SEQ ID NO: 1569759 - RNA, 19 nt, Artificial Sequence
  Description of Artificial Sequence: Synthetic oligonucleotide
ggaaagucuauaaaacugu

SEQ ID NO: 1569760 - RNA, 19 nt, Artificial Sequence
  Description of Artificial Sequence: Synthetic oligonucleotide
augagacagucucaucaua

SEQ ID NO: 1569761 - RNA, 19 nt, Artificial Sequence
  Description of Artificial Sequence: Synthetic oligonucleotide
aggcuucagaugaaggacu

SEQ ID NO: 1569762 - RNA, 19 nt, Artificial Sequence
  Description of Artificial Sequence: Synthetic oligonucleotide
acucaaguguuugucguuu

SEQ ID NO: 1569763 - RNA, 19 nt, Artificial Sequence
  Description of Artificial Sequence: Synthetic oligonucleotide
acagugcguagaguuuuag

SEQ ID NO: 1569764 - RNA, 19 nt, Artificial Sequence
  Description of Artificial Sequence: Synthetic oligonucleotide
cauuacaggguccauccgu

SEQ ID NO: 1569765 - RNA, 19 nt, Artificial Sequence
  Description of Artificial Sequence: Synthetic oligonucleotide
aggacaaaaugagcucuga

SEQ ID NO: 1569766 - RNA, 19 nt, Artificial Sequence
  Description of Artificial Sequence: Synthetic oligonucleotide
uacagugcguagaguuuua

SEQ ID NO: 1569767 - RNA, 19 nt, Artificial Sequence
  Description of Artificial Sequence: Synthetic oligonucleotide
gcugaauggaguaugaaau

SEQ ID NO: 1569768 - RNA, 19 nt, Artificial Sequence
  Description of Artificial Sequence: Synthetic oligonucleotide
aggcacauuacagggucca

SEQ ID NO: 1569769 - RNA, 19 nt, Artificial Sequence
  Description of Artificial Sequence: Synthetic oligonucleotide
gcacuaguaaaguuaguua

SEQ ID NO: 1569770 - RNA, 19 nt, Artificial Sequence
  Description of Artificial Sequence: Synthetic oligonucleotide
caccuugcuuugaggguag

SEQ ID NO: 1569771 - RNA, 19 nt, Artificial Sequence
  Description of Artificial Sequence: Synthetic oligonucleotide
uggugggagcuucgcauau

SEQ ID NO: 1569772 - RNA, 19 nt, Artificial Sequence
  Description of Artificial Sequence: Synthetic oligonucleotide
aucguuggucugcccaagu

SEQ ID NO: 1569773 - RNA, 19 nt, Artificial Sequence
  Description of Artificial Sequence: Synthetic oligonucleotide
guaaaguuaguuaggucau

SEQ ID NO: 1569774 - RNA, 19 nt, Artificial Sequence
  Description of Artificial Sequence: Synthetic oligonucleotide
ggccgauugagcaugaucu

SEQ ID NO: 1569775 - RNA, 19 nt, Artificial Sequence
  Description of Artificial Sequence: Synthetic oligonucleotide
cacagaacauaguuccucu

SEQ ID NO: 1569776 - RNA, 19 nt, Artificial Sequence
  Description of Artificial Sequence: Synthetic oligonucleotide
ugacggcgauuccuacagc

SEQ ID NO: 1569777 - RNA, 19 nt, Artificial Sequence
  Description of Artificial Sequence: Synthetic oligonucleotide
uccauccguggccugcuua

SEQ ID NO: 1569778 - RNA, 19 nt, Artificial Sequence
  Description of Artificial Sequence: Synthetic oligonucleotide
aucuucgugaugccaucuu

SEQ ID NO: 1569779 - RNA, 19 nt, Artificial Sequence
  Description of Artificial Sequence: Synthetic oligonucleotide
ccauuuacuacugcaacca

SEQ ID NO: 1569780 - RNA, 19 nt, Artificial Sequence
  Description of Artificial Sequence: Synthetic oligonucleotide
agucaccagcuccugugaa

SEQ ID NO: 1569781 - RNA, 19 nt, Artificial Sequence
  Description of Artificial Sequence: Synthetic oligonucleotide
ccuaaagaccugcaggaga

SEQ ID NO: 1569782 - RNA, 19 nt, Artificial Sequence
  Description of Artificial Sequence: Synthetic oligonucleotide
uggacaccagauccacaua

SEQ ID NO: 1569783 - RNA, 19 nt, Artificial Sequence
  Description of Artificial Sequence: Synthetic oligonucleotide
cagcauuaacugcguggag

SEQ ID NO: 1569784 - RNA, 19 nt, Artificial Sequence
  Description of Artificial Sequence: Synthetic oligonucleotide
ggcuaaaugcucaggacaa

SEQ ID NO: 1569785 - RNA, 19 nt, Artificial Sequence
  Description of Artificial Sequence: Synthetic oligonucleotide
cuaacugcucuggaggucu

SEQ ID NO: 1569786 - RNA, 19 nt, Artificial Sequence
  Description of Artificial Sequence: Synthetic oligonucleotide
accgcgcccgucucaaggu

SEQ ID NO: 1569787 - RNA, 19 nt, Artificial Sequence
  Description of Artificial Sequence: Synthetic oligonucleotide
gcacucuucagcauuaacu

SEQ ID NO: 1569788 - RNA, 19 nt, Artificial Sequence
  Description of Artificial Sequence: Synthetic oligonucleotide
ggaguaugaaauguugccu

SEQ ID NO: 1569789 - RNA, 19 nt, Artificial Sequence
  Description of Artificial Sequence: Synthetic oligonucleotide
ggcgauuccuacagcuggg

SEQ ID NO: 1569790 - RNA, 19 nt, Artificial Sequence
  Description of Artificial Sequence: Synthetic oligonucleotide
gcauuccucugacagccac

SEQ ID NO: 1569791 - RNA, 19 nt, Artificial Sequence
  Description of Artificial Sequence: Synthetic oligonucleotide
gaauuccaugcuucccacu

SEQ ID NO: 1569792 - RNA, 19 nt, Artificial Sequence
  Description of Artificial Sequence: Synthetic oligonucleotide
acgcuuucccuggcuagag

SEQ ID NO: 1569793 - RNA, 19 nt, Artificial Sequence
  Description of Artificial Sequence: Synthetic oligonucleotide
cggcuuaggcacauuacag

SEQ ID NO: 1569794 - RNA, 19 nt, Artificial Sequence
  Description of Artificial Sequence: Synthetic oligonucleotide
acggcgauuccuacagcug

SEQ ID NO: 1569795 - RNA, 19 nt, Artificial Sequence
  Description of Artificial Sequence: Synthetic oligonucleotide
caucguuggucugcccaag

SEQ ID NO: 1569796 - RNA, 19 nt, Artificial Sequence
  Description of Artificial Sequence: Synthetic oligonucleotide
guuuugccuggcaguuucc

SEQ ID NO: 1569797 - RNA, 19 nt, Artificial Sequence
  Description of Artificial Sequence: Synthetic oligonucleotide
guaugaaauguugccuugu

SEQ ID NO: 1569798 - RNA, 19 nt, Artificial Sequence
  Description of Artificial Sequence: Synthetic oligonucleotide
ggcuugggaaagucuauaa

SEQ ID NO: 1569799 - RNA, 19 nt, Artificial Sequence
  Description of Artificial Sequence: Synthetic oligonucleotide
ggugacggcgauuccuaca

SEQ ID NO: 1569800 - RNA, 19 nt, Artificial Sequence
  Description of Artificial Sequence: Synthetic oligonucleotide
cggcgauuccuacagcugg

SEQ ID NO: 1569801 - RNA, 19 nt, Artificial Sequence
  Description of Artificial Sequence: Synthetic oligonucleotide
ccuggcaguuuccuuuggc

SEQ ID NO: 1569802 - RNA, 19 nt, Artificial Sequence
  Description of Artificial Sequence: Synthetic oligonucleotide
guugccuugucagaugcau

SEQ ID NO: 1569803 - RNA, 19 nt, Artificial Sequence
  Description of Artificial Sequence: Synthetic oligonucleotide
guggcugaauggaguauga

SEQ ID NO: 1569804 - RNA, 19 nt, Artificial Sequence
  Description of Artificial Sequence: Synthetic oligonucleotide
guugccaagggaauuccau

SEQ ID NO: 1569805 - RNA, 19 nt, Artificial Sequence
  Description of Artificial Sequence: Synthetic oligonucleotide
guguacgaagaacaugcuu

SEQ ID NO: 1569806 - RNA, 19 nt, Artificial Sequence
  Description of Artificial Sequence: Synthetic oligonucleotide
gugcguagaguuuuagcuu

SEQ ID NO: 1569807 - RNA, 19 nt, Artificial Sequence
  Description of Artificial Sequence: Synthetic oligonucleotide
gggccgauugagcaugauc

SEQ ID NO: 1569808 - RNA, 19 nt, Artificial Sequence
  Description of Artificial Sequence: Synthetic oligonucleotide
gcuuuucuggauacgaagu

SEQ ID NO: 1569809 - RNA, 19 nt, Artificial Sequence
  Description of Artificial Sequence: Synthetic oligonucleotide
gaucuucgugaugccaucu

SEQ ID NO: 1569810 - RNA, 19 nt, Artificial Sequence
  Description of Artificial Sequence: Synthetic oligonucleotide
cuauggcugaguugucugu

SEQ ID NO: 1569811 - RNA, 19 nt, Artificial Sequence
  Description of Artificial Sequence: Synthetic oligonucleotide
gaacaugcuucugggcucu

SEQ ID NO: 1569812 - RNA, 19 nt, Artificial Sequence
  Description of Artificial Sequence: Synthetic oligonucleotide
cgcauaugcucucaaccug

SEQ ID NO: 1569813 - RNA, 19 nt, Artificial Sequence
  Description of Artificial Sequence: Synthetic oligonucleotide
accggaacucacagaacau

SEQ ID NO: 1569814 - RNA, 19 nt, Artificial Sequence
  Description of Artificial Sequence: Synthetic oligonucleotide
gacaccagauccacauagu

SEQ ID NO: 1569815 - RNA, 19 nt, Artificial Sequence
  Description of Artificial Sequence: Synthetic oligonucleotide
agcuucgcauaugcucuca

SEQ ID NO: 1569816 - RNA, 19 nt, Artificial Sequence
  Description of Artificial Sequence: Synthetic oligonucleotide
caccagauccacauaguuu

SEQ ID NO: 1569817 - RNA, 19 nt, Artificial Sequence
  Description of Artificial Sequence: Synthetic oligonucleotide
ccuggaccuucucaucagc

SEQ ID NO: 1569818 - RNA, 19 nt, Artificial Sequence
  Description of Artificial Sequence: Synthetic oligonucleotide
cucugaccgagguggcuga

SEQ ID NO: 1569819 - RNA, 19 nt, Artificial Sequence
  Description of Artificial Sequence: Synthetic oligonucleotide
gcacauuacaggguccauc

SEQ ID NO: 1569820 - RNA, 19 nt, Artificial Sequence
  Description of Artificial Sequence: Synthetic oligonucleotide
cuuucccuggcuagaggcu

SEQ ID NO: 1569821 - RNA, 19 nt, Artificial Sequence
  Description of Artificial Sequence: Synthetic oligonucleotide
ggacucagacuggacacca

SEQ ID NO: 1569822 - RNA, 19 nt, Artificial Sequence
  Description of Artificial Sequence: Synthetic oligonucleotide
cauaugcucucaaccuggu

SEQ ID NO: 1569823 - RNA, 19 nt, Artificial Sequence
  Description of Artificial Sequence: Synthetic oligonucleotide
gcaccugagccacugggaa

SEQ ID NO: 1569824 - RNA, 19 nt, Artificial Sequence
  Description of Artificial Sequence: Synthetic oligonucleotide
caccagcagcacuaguaaa

SEQ ID NO: 1569825 - RNA, 19 nt, Artificial Sequence
  Description of Artificial Sequence: Synthetic oligonucleotide
ggcuucagaugaaggacuc

SEQ ID NO: 1569826 - RNA, 19 nt, Artificial Sequence
  Description of Artificial Sequence: Synthetic oligonucleotide
ccgagguggcugaauggag

SEQ ID NO: 1569827 - RNA, 19 nt, Artificial Sequence
  Description of Artificial Sequence: Synthetic oligonucleotide
ccacgcuuucccuggcuag

SEQ ID NO: 1569828 - RNA, 19 nt, Artificial Sequence
  Description of Artificial Sequence: Synthetic oligonucleotide
ccagauccacauaguuuug

SEQ ID NO: 1569829 - RNA, 19 nt, Artificial Sequence
  Description of Artificial Sequence: Synthetic oligonucleotide
uggcgggccgauugagcau

SEQ ID NO: 1569830 - RNA, 19 nt, Artificial Sequence
  Description of Artificial Sequence: Synthetic oligonucleotide
cucauggaauuugguggga

SEQ ID NO: 1569831 - RNA, 19 nt, Artificial Sequence
  Description of Artificial Sequence: Synthetic oligonucleotide
cccggcuuaggcacauuac

SEQ ID NO: 1569832 - RNA, 19 nt, Artificial Sequence
  Description of Artificial Sequence: Synthetic oligonucleotide
ggcgggccgauugagcaug

SEQ ID NO: 1569833 - RNA, 19 nt, Artificial Sequence
  Description of Artificial Sequence: Synthetic oligonucleotide
cgauuccuacagcugggcc

SEQ ID NO: 1569834 - RNA, 19 nt, Artificial Sequence
  Description of Artificial Sequence: Synthetic oligonucleotide
cacgcuuucccuggcuaga

SEQ ID NO: 1569835 - RNA, 19 nt, Artificial Sequence
  Description of Artificial Sequence: Synthetic oligonucleotide
gcccgucucaaggucacug

SEQ ID NO: 1569836 - RNA, 19 nt, Artificial Sequence
  Description of Artificial Sequence: Synthetic oligonucleotide
gcgauuccuacagcugggc

SEQ ID NO: 1569837 - RNA, 19 nt, Artificial Sequence
  Description of Artificial Sequence: Synthetic oligonucleotide
agcaccgcgcccgucucaa

SEQ ID NO: 1569838 - RNA, 19 nt, Artificial Sequence
  Description of Artificial Sequence: Synthetic oligonucleotide
ucugaccgagguggcugaa

SEQ ID NO: 1569839 - RNA, 19 nt, Artificial Sequence
  Description of Artificial Sequence: Synthetic oligonucleotide
ggugggagcuucgcauaug

SEQ ID NO: 1569840 - RNA, 19 nt, Artificial Sequence
  Description of Artificial Sequence: Synthetic oligonucleotide
ccacauaguuuugccuggc

SEQ ID NO: 1569841 - RNA, 19 nt, Artificial Sequence
  Description of Artificial Sequence: Synthetic oligonucleotide
gcuuugaggguagugcacu

SEQ ID NO: 1569842 - RNA, 19 nt, Artificial Sequence
  Description of Artificial Sequence: Synthetic oligonucleotide
aggguccauccguggccug

SEQ ID NO: 1569843 - RNA, 19 nt, Artificial Sequence
  Description of Artificial Sequence: Synthetic oligonucleotide
ccuggcuagaggcuucaga

SEQ ID NO: 1569844 - RNA, 19 nt, Artificial Sequence
  Description of Artificial Sequence: Synthetic oligonucleotide
gggaaccuaaagaccugca

SEQ ID NO: 1569845 - RNA, 19 nt, Artificial Sequence
  Description of Artificial Sequence: Synthetic oligonucleotide
cacacccggcuuaggcaca

SEQ ID NO: 1569846 - RNA, 19 nt, Artificial Sequence
  Description of Artificial Sequence: Synthetic oligonucleotide
gugucaguaugaucuccuu

SEQ ID NO: 1569847 - RNA, 19 nt, Artificial Sequence
  Description of Artificial Sequence: Synthetic oligonucleotide
cacucaaguguuugucguu

SEQ ID NO: 1569848 - RNA, 19 nt, Artificial Sequence
  Description of Artificial Sequence: Synthetic oligonucleotide
gcuucgcauaugcucucaa

SEQ ID NO: 1569849 - RNA, 19 nt, Artificial Sequence
  Description of Artificial Sequence: Synthetic oligonucleotide
gcuaaaugcucaggacaaa

SEQ ID NO: 1569850 - RNA, 19 nt, Artificial Sequence
  Description of Artificial Sequence: Synthetic oligonucleotide
cacccugguuagccgccuc

SEQ ID NO: 1569851 - RNA, 19 nt, Artificial Sequence
  Description of Artificial Sequence: Synthetic oligonucleotide
acacccggcuuaggcacau

SEQ ID NO: 1569852 - RNA, 19 nt, Artificial Sequence
  Description of Artificial Sequence: Synthetic oligonucleotide
accuugcuuugaggguagu

SEQ ID NO: 1569853 - RNA, 19 nt, Artificial Sequence
  Description of Artificial Sequence: Synthetic oligonucleotide
gcuccacgcuuucccuggc

SEQ ID NO: 1569854 - RNA, 19 nt, Artificial Sequence
  Description of Artificial Sequence: Synthetic oligonucleotide
cggacaccagcaccgcgcc

SEQ ID NO: 1569855 - RNA, 19 nt, Artificial Sequence
  Description of Artificial Sequence: Synthetic oligonucleotide
gccccagaagggugacggc

SEQ ID NO: 1569856 - RNA, 19 nt, Artificial Sequence
  Description of Artificial Sequence: Synthetic oligonucleotide
cagcacuaguaaaguuagu

SEQ ID NO: 1569857 - RNA, 19 nt, Artificial Sequence
  Description of Artificial Sequence: Synthetic oligonucleotide
ccaccuugcuuugagggua

SEQ ID NO: 1569858 - RNA, 19 nt, Artificial Sequence
  Description of Artificial Sequence: Synthetic oligonucleotide
gcguagaguuuuagcuuca

SEQ ID NO: 1569859 - RNA, 19 nt, Artificial Sequence
  Description of Artificial Sequence: Synthetic oligonucleotide
guuagccgccuccuccauu

SEQ ID NO: 1569860 - RNA, 19 nt, Artificial Sequence
  Description of Artificial Sequence: Synthetic oligonucleotide
gugcacucuucagcauuaa

SEQ ID NO: 1569861 - RNA, 19 nt, Artificial Sequence
  Description of Artificial Sequence: Synthetic oligonucleotide
gcguggagcuuuuccuucu

SEQ ID NO: 1569862 - RNA, 19 nt, Artificial Sequence
  Description of Artificial Sequence: Synthetic oligonucleotide
caggguccauccguggccu

SEQ ID NO: 1569863 - RNA, 19 nt, Artificial Sequence
  Description of Artificial Sequence: Synthetic oligonucleotide
ccggaacucacagaacaua

SEQ ID NO: 1569864 - RNA, 19 nt, Artificial Sequence
  Description of Artificial Sequence: Synthetic oligonucleotide
cuacugcaaccagaggcuu

SEQ ID NO: 1569865 - RNA, 19 nt, Artificial Sequence
  Description of Artificial Sequence: Synthetic oligonucleotide
cuccacgcuuucccuggcu

SEQ ID NO: 1569866 - RNA, 19 nt, Artificial Sequence
  Description of Artificial Sequence: Synthetic oligonucleotide
cagcaccgcgcccgucuca

SEQ ID NO: 1569867 - RNA, 19 nt, Artificial Sequence
  Description of Artificial Sequence: Synthetic oligonucleotide
ccuacagcugggccauuua

SEQ ID NO: 1569868 - RNA, 19 nt, Artificial Sequence
  Description of Artificial Sequence: Synthetic oligonucleotide
cauccguggccugcuuaua

SEQ ID NO: 1569869 - RNA, 19 nt, Artificial Sequence
  Description of Artificial Sequence: Synthetic oligonucleotide
caagugcaccugagccacu

SEQ ID NO: 1569870 - RNA, 19 nt, Artificial Sequence
  Description of Artificial Sequence: Synthetic oligonucleotide
ccauccguggccugcuuau

SEQ ID NO: 1569871 - RNA, 19 nt, Artificial Sequence
  Description of Artificial Sequence: Synthetic oligonucleotide
cauuaacugcguggagcuu

SEQ ID NO: 1569872 - RNA, 19 nt, Artificial Sequence
  Description of Artificial Sequence: Synthetic oligonucleotide
gcaccgcgcccgucucaag

SEQ ID NO: 1569873 - RNA, 19 nt, Artificial Sequence
  Description of Artificial Sequence: Synthetic oligonucleotide
cugaccgagguggcugaau

SEQ ID NO: 1569874 - RNA, 19 nt, Artificial Sequence
  Description of Artificial Sequence: Synthetic oligonucleotide
gguuagccgccuccuccau

SEQ ID NO: 1569875 - RNA, 19 nt, Artificial Sequence
  Description of Artificial Sequence: Synthetic oligonucleotide
ccgcgcccgucucaagguc

SEQ ID NO: 1569876 - RNA, 19 nt, Artificial Sequence
  Description of Artificial Sequence: Synthetic oligonucleotide
ggcacauuacaggguccau

SEQ ID NO: 1569877 - RNA, 19 nt, Artificial Sequence
  Description of Artificial Sequence: Synthetic oligonucleotide
ggcucugaccgagguggcu

SEQ ID NO: 1569878 - RNA, 19 nt, Artificial Sequence
  Description of Artificial Sequence: Synthetic oligonucleotide
cccuggcuagaggcuucag

SEQ ID NO: 1569879 - RNA, 19 nt, Artificial Sequence
  Description of Artificial Sequence: Synthetic oligonucleotide
gcgggccgauugagcauga

SEQ ID NO: 1569880 - RNA, 19 nt, Artificial Sequence
  Description of Artificial Sequence: Synthetic oligonucleotide
cacccggcuuaggcacauu

SEQ ID NO: 1569881 - RNA, 19 nt, Artificial Sequence
  Description of Artificial Sequence: Synthetic oligonucleotide
cgcccgucucaaggucacu

SEQ ID NO: 1569882 - RNA, 19 nt, Artificial Sequence
  Description of Artificial Sequence: Synthetic oligonucleotide
cgggccgauugagcaugau

SEQ ID NO: 1569883 - RNA, 19 nt, Artificial Sequence
  Description of Artificial Sequence: Synthetic oligonucleotide
ucuuuuaagacaaagcuca

SEQ ID NO: 1569884 - RNA, 19 nt, Artificial Sequence
  Description of Artificial Sequence: Synthetic oligonucleotide
cuuaauagcauccuuaggc

SEQ ID NO: 1569885 - RNA, 19 nt, Artificial Sequence
  Description of Artificial Sequence: Synthetic oligonucleotide
guauauaaggggcagaggg

SEQ ID NO: 1569886 - RNA, 19 nt, Artificial Sequence
  Description of Artificial Sequence: Synthetic oligonucleotide
uaagacaaagcucagggcc

SEQ ID NO: 1569887 - RNA, 19 nt, Artificial Sequence
  Description of Artificial Sequence: Synthetic oligonucleotide
uuaggcaaguaaaaggagg

SEQ ID NO: 1569888 - RNA, 19 nt, Artificial Sequence
  Description of Artificial Sequence: Synthetic oligonucleotide
aaacuugcgaggaucaucc

SEQ ID NO: 1569889 - RNA, 19 nt, Artificial Sequence
  Description of Artificial Sequence: Synthetic oligonucleotide
cuuaaaucuuuauucagcc

SEQ ID NO: 1569890 - RNA, 19 nt, Artificial Sequence
  Description of Artificial Sequence: Synthetic oligonucleotide
ucuuaaaucuuuauucagc

SEQ ID NO: 1569891 - RNA, 19 nt, Artificial Sequence
  Description of Artificial Sequence: Synthetic oligonucleotide
ugaaccuugaugaagccug

SEQ ID NO: 1569892 - RNA, 19 nt, Artificial Sequence
  Description of Artificial Sequence: Synthetic oligonucleotide
gaaauugugcaguucaggc

SEQ ID NO: 1569893 - RNA, 19 nt, Artificial Sequence
  Description of Artificial Sequence: Synthetic oligonucleotide
gaugaugacugucacaccc

SEQ ID NO: 1569894 - RNA, 19 nt, Artificial Sequence
  Description of Artificial Sequence: Synthetic oligonucleotide
ucucuuaagcuuuucacag

SEQ ID NO: 1569895 - RNA, 19 nt, Artificial Sequence
  Description of Artificial Sequence: Synthetic oligonucleotide
uucaguugaggccacaaag

SEQ ID NO: 1569896 - RNA, 19 nt, Artificial Sequence
  Description of Artificial Sequence: Synthetic oligonucleotide
uccacuaccaugaacuugc

SEQ ID NO: 1569897 - RNA, 19 nt, Artificial Sequence
  Description of Artificial Sequence: Synthetic oligonucleotide
agucauucucuuuuaagac

SEQ ID NO: 1569898 - RNA, 19 nt, Artificial Sequence
  Description of Artificial Sequence: Synthetic oligonucleotide
uccuuaggcaaguaaaagg

SEQ ID NO: 1569899 - RNA, 19 nt, Artificial Sequence
  Description of Artificial Sequence: Synthetic oligonucleotide
aucuuuauucagccaaucc

SEQ ID NO: 1569900 - RNA, 19 nt, Artificial Sequence
  Description of Artificial Sequence: Synthetic oligonucleotide
aaguaaaaggaggugcggc

SEQ ID NO: 1569901 - RNA, 19 nt, Artificial Sequence
  Description of Artificial Sequence: Synthetic oligonucleotide
gaagccguagcuucaaggg

SEQ ID NO: 1569902 - RNA, 19 nt, Artificial Sequence
  Description of Artificial Sequence: Synthetic oligonucleotide
uuaagcuuuucacagcuga

SEQ ID NO: 1569903 - RNA, 19 nt, Artificial Sequence
  Description of Artificial Sequence: Synthetic oligonucleotide
uaggaaauugugcaguuca

SEQ ID NO: 1569904 - RNA, 19 nt, Artificial Sequence
  Description of Artificial Sequence: Synthetic oligonucleotide
aguaaaaggaggugcggcg

SEQ ID NO: 1569905 - RNA, 19 nt, Artificial Sequence
  Description of Artificial Sequence: Synthetic oligonucleotide
acauucauacacuucgauc

SEQ ID NO: 1569906 - RNA, 19 nt, Artificial Sequence
  Description of Artificial Sequence: Synthetic oligonucleotide
acaugcaagugcuuaauag

SEQ ID NO: 1569907 - RNA, 19 nt, Artificial Sequence
  Description of Artificial Sequence: Synthetic oligonucleotide
caugcaagugcuuaauagc

SEQ ID NO: 1569908 - RNA, 19 nt, Artificial Sequence
  Description of Artificial Sequence: Synthetic oligonucleotide
aagccguagcuucaagggc

SEQ ID NO: 1569909 - RNA, 19 nt, Artificial Sequence
  Description of Artificial Sequence: Synthetic oligonucleotide
uucgcauugccuauuuucc

SEQ ID NO: 1569910 - RNA, 19 nt, Artificial Sequence
  Description of Artificial Sequence: Synthetic oligonucleotide
uacgacccaguauauaagg

SEQ ID NO: 1569911 - RNA, 19 nt, Artificial Sequence
  Description of Artificial Sequence: Synthetic oligonucleotide
aaggcaucccaauucaccu

SEQ ID NO: 1569912 - RNA, 19 nt, Artificial Sequence
  Description of Artificial Sequence: Synthetic oligonucleotide
uguucgugacagaacaugc

SEQ ID NO: 1569913 - RNA, 19 nt, Artificial Sequence
  Description of Artificial Sequence: Synthetic oligonucleotide
gagucauucucuuuuaaga

SEQ ID NO: 1569914 - RNA, 19 nt, Artificial Sequence
  Description of Artificial Sequence: Synthetic oligonucleotide
aguacgacccaguauauaa

SEQ ID NO: 1569915 - RNA, 19 nt, Artificial Sequence
  Description of Artificial Sequence: Synthetic oligonucleotide
uauauaaggggcagaggga

SEQ ID NO: 1569916 - RNA, 19 nt, Artificial Sequence
  Description of Artificial Sequence: Synthetic oligonucleotide
agaagccguagcuucaagg

SEQ ID NO: 1569917 - RNA, 19 nt, Artificial Sequence
  Description of Artificial Sequence: Synthetic oligonucleotide
gucauuucgaaggaaggcg

SEQ ID NO: 1569918 - RNA, 19 nt, Artificial Sequence
  Description of Artificial Sequence: Synthetic oligonucleotide
uuuauucagccaauccucu

SEQ ID NO: 1569919 - RNA, 19 nt, Artificial Sequence
  Description of Artificial Sequence: Synthetic oligonucleotide
uccggaaguacacuuggcc

SEQ ID NO: 1569920 - RNA, 19 nt, Artificial Sequence
  Description of Artificial Sequence: Synthetic oligonucleotide
uuaagacaaagcucagggc

SEQ ID NO: 1569921 - RNA, 19 nt, Artificial Sequence
  Description of Artificial Sequence: Synthetic oligonucleotide
gaugcaaagccaugccccg

SEQ ID NO: 1569922 - RNA, 19 nt, Artificial Sequence
  Description of Artificial Sequence: Synthetic oligonucleotide
gaggcauucaguugaggcc

SEQ ID NO: 1569923 - RNA, 19 nt, Artificial Sequence
  Description of Artificial Sequence: Synthetic oligonucleotide
uucgaucaaaaguaucuga

SEQ ID NO: 1569924 - RNA, 19 nt, Artificial Sequence
  Description of Artificial Sequence: Synthetic oligonucleotide
aggcgucucagccucaccc

SEQ ID NO: 1569925 - RNA, 19 nt, Artificial Sequence
  Description of Artificial Sequence: Synthetic oligonucleotide
aggaucauccacuaccaug

SEQ ID NO: 1569926 - RNA, 19 nt, Artificial Sequence
  Description of Artificial Sequence: Synthetic oligonucleotide
aaagguugcuguugauuug

SEQ ID NO: 1569927 - RNA, 19 nt, Artificial Sequence
  Description of Artificial Sequence: Synthetic oligonucleotide
gaugcguaggaaauugugc

SEQ ID NO: 1569928 - RNA, 19 nt, Artificial Sequence
  Description of Artificial Sequence: Synthetic oligonucleotide
ucauuucgaaggaaggcgu

SEQ ID NO: 1569929 - RNA, 19 nt, Artificial Sequence
  Description of Artificial Sequence: Synthetic oligonucleotide
aucaaaaguaucugaggga

SEQ ID NO: 1569930 - RNA, 19 nt, Artificial Sequence
  Description of Artificial Sequence: Synthetic oligonucleotide
aaagagcgcaaacuugcga

SEQ ID NO: 1569931 - RNA, 19 nt, Artificial Sequence
  Description of Artificial Sequence: Synthetic oligonucleotide
augcguaggaaauugugca

SEQ ID NO: 1569932 - RNA, 19 nt, Artificial Sequence
  Description of Artificial Sequence: Synthetic oligonucleotide
gaaggcgguuucuugcugg

SEQ ID NO: 1569933 - RNA, 19 nt, Artificial Sequence
  Description of Artificial Sequence: Synthetic oligonucleotide
acuucgaucaaaaguaucu

SEQ ID NO: 1569934 - RNA, 19 nt, Artificial Sequence
  Description of Artificial Sequence: Synthetic oligonucleotide
ucgugacagaacaugcaag

SEQ ID NO: 1569935 - RNA, 19 nt, Artificial Sequence
  Description of Artificial Sequence: Synthetic oligonucleotide
uucgugacagaacaugcaa

SEQ ID NO: 1569936 - RNA, 19 nt, Artificial Sequence
  Description of Artificial Sequence: Synthetic oligonucleotide
cuucgcauugccuauuuuc

SEQ ID NO: 1569937 - RNA, 19 nt, Artificial Sequence
  Description of Artificial Sequence: Synthetic oligonucleotide
ugcaagaagccguagcuuc

SEQ ID NO: 1569938 - RNA, 19 nt, Artificial Sequence
  Description of Artificial Sequence: Synthetic oligonucleotide
aggacguaccaguuucagc

SEQ ID NO: 1569939 - RNA, 19 nt, Artificial Sequence
  Description of Artificial Sequence: Synthetic oligonucleotide
aggaaggcgucucagccuc

SEQ ID NO: 1569940 - RNA, 19 nt, Artificial Sequence
  Description of Artificial Sequence: Synthetic oligonucleotide
uuuaguagaggaccaccuc

SEQ ID NO: 1569941 - RNA, 19 nt, Artificial Sequence
  Description of Artificial Sequence: Synthetic oligonucleotide
aagaagugggucuggucca

SEQ ID NO: 1569942 - RNA, 19 nt, Artificial Sequence
  Description of Artificial Sequence: Synthetic oligonucleotide
ugaaccccugcaaacagaa

SEQ ID NO: 1569943 - RNA, 19 nt, Artificial Sequence
  Description of Artificial Sequence: Synthetic oligonucleotide
aagaaggcgguuucuugcu

SEQ ID NO: 1569944 - RNA, 19 nt, Artificial Sequence
  Description of Artificial Sequence: Synthetic oligonucleotide
cucaaugaccucacgugcc

SEQ ID NO: 1569945 - RNA, 19 nt, Artificial Sequence
  Description of Artificial Sequence: Synthetic oligonucleotide
gacaggacguaccaguuuc

SEQ ID NO: 1569946 - RNA, 19 nt, Artificial Sequence
  Description of Artificial Sequence: Synthetic oligonucleotide
ucugacaguuuccggaagu

SEQ ID NO: 1569947 - RNA, 19 nt, Artificial Sequence
  Description of Artificial Sequence: Synthetic oligonucleotide
gaaggcaucccaauucacc

SEQ ID NO: 1569948 - RNA, 19 nt, Artificial Sequence
  Description of Artificial Sequence: Synthetic oligonucleotide
uccacacacacacacuccu

SEQ ID NO: 1569949 - RNA, 19 nt, Artificial Sequence
  Description of Artificial Sequence: Synthetic oligonucleotide
gacccaguauauaaggggc

SEQ ID NO: 1569950 - RNA, 19 nt, Artificial Sequence
  Description of Artificial Sequence: Synthetic oligonucleotide
aggcucaugaaaagguugc

SEQ ID NO: 1569951 - RNA, 19 nt, Artificial Sequence
  Description of Artificial Sequence: Synthetic oligonucleotide
ugcguaggaaauugugcag

SEQ ID NO: 1569952 - RNA, 19 nt, Artificial Sequence
  Description of Artificial Sequence: Synthetic oligonucleotide
uguucgcucaaagagcgca

SEQ ID NO: 1569953 - RNA, 19 nt, Artificial Sequence
  Description of Artificial Sequence: Synthetic oligonucleotide
acaggcucguccugguccc

SEQ ID NO: 1569954 - RNA, 19 nt, Artificial Sequence
  Description of Artificial Sequence: Synthetic oligonucleotide
cucacacucacacggcacg

SEQ ID NO: 1569955 - RNA, 19 nt, Artificial Sequence
  Description of Artificial Sequence: Synthetic oligonucleotide
caguauauaaggggcagag

SEQ ID NO: 1569956 - RNA, 19 nt, Artificial Sequence
  Description of Artificial Sequence: Synthetic oligonucleotide
acugagacaggacguacca

SEQ ID NO: 1569957 - RNA, 19 nt, Artificial Sequence
  Description of Artificial Sequence: Synthetic oligonucleotide
ugcaggaugcguaggaaau

SEQ ID NO: 1569958 - RNA, 19 nt, Artificial Sequence
  Description of Artificial Sequence: Synthetic oligonucleotide
gagacucuggcuuuggcaa

SEQ ID NO: 1569959 - RNA, 19 nt, Artificial Sequence
  Description of Artificial Sequence: Synthetic oligonucleotide
aaucaagaagugggucugg

SEQ ID NO: 1569960 - RNA, 19 nt, Artificial Sequence
  Description of Artificial Sequence: Synthetic oligonucleotide
aguauauaaggggcagagg

SEQ ID NO: 1569961 - RNA, 19 nt, Artificial Sequence
  Description of Artificial Sequence: Synthetic oligonucleotide
gucccuuuaguagaggacc

SEQ ID NO: 1569962 - RNA, 19 nt, Artificial Sequence
  Description of Artificial Sequence: Synthetic oligonucleotide
caaagagcgcaaacuugcg

SEQ ID NO: 1569963 - RNA, 19 nt, Artificial Sequence
  Description of Artificial Sequence: Synthetic oligonucleotide
ugauuuggccauuguaauc

SEQ ID NO: 1569964 - RNA, 19 nt, Artificial Sequence
  Description of Artificial Sequence: Synthetic oligonucleotide
ucuggcggcaacgagagua

SEQ ID NO: 1569965 - RNA, 19 nt, Artificial Sequence
  Description of Artificial Sequence: Synthetic oligonucleotide
ucacacggcacgcccuucg

SEQ ID NO: 1569966 - RNA, 19 nt, Artificial Sequence
  Description of Artificial Sequence: Synthetic oligonucleotide
aacaugcaagugcuuaaua

SEQ ID NO: 1569967 - RNA, 19 nt, Artificial Sequence
  Description of Artificial Sequence: Synthetic oligonucleotide
gagggaugcaaagccaugc

SEQ ID NO: 1569968 - RNA, 19 nt, Artificial Sequence
  Description of Artificial Sequence: Synthetic oligonucleotide
cuuagaggaggcacugaac

SEQ ID NO: 1569969 - RNA, 19 nt, Artificial Sequence
  Description of Artificial Sequence: Synthetic oligonucleotide
auccuuaggcaaguaaaag

SEQ ID NO: 1569970 - RNA, 19 nt, Artificial Sequence
  Description of Artificial Sequence: Synthetic oligonucleotide
ggcaaguaaaaggaggugc

SEQ ID NO: 1569971 - RNA, 19 nt, Artificial Sequence
  Description of Artificial Sequence: Synthetic oligonucleotide
auauaaggggcagagggau

SEQ ID NO: 1569972 - RNA, 19 nt, Artificial Sequence
  Description of Artificial Sequence: Synthetic oligonucleotide
ugccccguuauauccacug

SEQ ID NO: 1569973 - RNA, 19 nt, Artificial Sequence
  Description of Artificial Sequence: Synthetic oligonucleotide
ugaaucuucuggcggcaac

SEQ ID NO: 1569974 - RNA, 19 nt, Artificial Sequence
  Description of Artificial Sequence: Synthetic oligonucleotide
aaggcgucucagccucacc

SEQ ID NO: 1569975 - RNA, 19 nt, Artificial Sequence
  Description of Artificial Sequence: Synthetic oligonucleotide
gcaaguaaaaggaggugcg

SEQ ID NO: 1569976 - RNA, 19 nt, Artificial Sequence
  Description of Artificial Sequence: Synthetic oligonucleotide
caaguaaaaggaggugcgg

SEQ ID NO: 1569977 - RNA, 19 nt, Artificial Sequence
  Description of Artificial Sequence: Synthetic oligonucleotide
ugcaagugcuuaauagcau

SEQ ID NO: 1569978 - RNA, 19 nt, Artificial Sequence
  Description of Artificial Sequence: Synthetic oligonucleotide
cugcggaccagcgaggucc

SEQ ID NO: 1569979 - RNA, 19 nt, Artificial Sequence
  Description of Artificial Sequence: Synthetic oligonucleotide
aaagccaugccccguuaua

SEQ ID NO: 1569980 - RNA, 19 nt, Artificial Sequence
  Description of Artificial Sequence: Synthetic oligonucleotide
aggucauuucgaaggaagg

SEQ ID NO: 1569981 - RNA, 19 nt, Artificial Sequence
  Description of Artificial Sequence: Synthetic oligonucleotide
cuucgaucaaaaguaucug

SEQ ID NO: 1569982 - RNA, 19 nt, Artificial Sequence
  Description of Artificial Sequence: Synthetic oligonucleotide
uggcaaucaagaagugggu

SEQ ID NO: 1569983 - RNA, 19 nt, Artificial Sequence
  Description of Artificial Sequence: Synthetic oligonucleotide
aguuuccggaaguacacuu

SEQ ID NO: 1569984 - RNA, 19 nt, Artificial Sequence
  Description of Artificial Sequence: Synthetic oligonucleotide
caaucaagaagugggucug

SEQ ID NO: 1569985 - RNA, 19 nt, Artificial Sequence
  Description of Artificial Sequence: Synthetic oligonucleotide
guaaaaggaggugcggcgc

SEQ ID NO: 1569986 - RNA, 19 nt, Artificial Sequence
  Description of Artificial Sequence: Synthetic oligonucleotide
ugaaggcaucccaauucac

SEQ ID NO: 1569987 - RNA, 19 nt, Artificial Sequence
  Description of Artificial Sequence: Synthetic oligonucleotide
aggcauucaguugaggcca

SEQ ID NO: 1569988 - RNA, 19 nt, Artificial Sequence
  Description of Artificial Sequence: Synthetic oligonucleotide
agaaccucguucugcuucu

SEQ ID NO: 1569989 - RNA, 19 nt, Artificial Sequence
  Description of Artificial Sequence: Synthetic oligonucleotide
acacacacacacuccucag

SEQ ID NO: 1569990 - RNA, 19 nt, Artificial Sequence
  Description of Artificial Sequence: Synthetic oligonucleotide
uuauucagccaauccucuc

SEQ ID NO: 1569991 - RNA, 19 nt, Artificial Sequence
  Description of Artificial Sequence: Synthetic oligonucleotide
ugucucccgcuguacaggc

SEQ ID NO: 1569992 - RNA, 19 nt, Artificial Sequence
  Description of Artificial Sequence: Synthetic oligonucleotide
ucaagaagugggucugguc

SEQ ID NO: 1569993 - RNA, 19 nt, Artificial Sequence
  Description of Artificial Sequence: Synthetic oligonucleotide
guguucgugacagaacaug

SEQ ID NO: 1569994 - RNA, 19 nt, Artificial Sequence
  Description of Artificial Sequence: Synthetic oligonucleotide
gcaacgagaguacuucugc

SEQ ID NO: 1569995 - RNA, 19 nt, Artificial Sequence
  Description of Artificial Sequence: Synthetic oligonucleotide
ggacguaccaguuucagcu

SEQ ID NO: 1569996 - RNA, 19 nt, Artificial Sequence
  Description of Artificial Sequence: Synthetic oligonucleotide
ugaugaugacugucacacc

SEQ ID NO: 1569997 - RNA, 19 nt, Artificial Sequence
  Description of Artificial Sequence: Synthetic oligonucleotide
ggaugcaaagccaugcccc

SEQ ID NO: 1569998 - RNA, 19 nt, Artificial Sequence
  Description of Artificial Sequence: Synthetic oligonucleotide
acgacccaguauauaaggg

SEQ ID NO: 1569999 - RNA, 19 nt, Artificial Sequence
  Description of Artificial Sequence: Synthetic oligonucleotide
aaaguaucugagggagacu

SEQ ID NO: 1570000 - RNA, 19 nt, Artificial Sequence
  Description of Artificial Sequence: Synthetic oligonucleotide
aaucuucuggcggcaacga

SEQ ID NO: 1570001 - RNA, 19 nt, Artificial Sequence
  Description of Artificial Sequence: Synthetic oligonucleotide
caccuccacacacacacac

SEQ ID NO: 1570002 - RNA, 19 nt, Artificial Sequence
  Description of Artificial Sequence: Synthetic oligonucleotide
ucgcauugccuauuuuccu

SEQ ID NO: 1570003 - RNA, 19 nt, Artificial Sequence
  Description of Artificial Sequence: Synthetic oligonucleotide
caaacuugcgaggaucauc

SEQ ID NO: 1570004 - RNA, 19 nt, Artificial Sequence
  Description of Artificial Sequence: Synthetic oligonucleotide
cacuucgaucaaaaguauc

SEQ ID NO: 1570005 - RNA, 19 nt, Artificial Sequence
  Description of Artificial Sequence: Synthetic oligonucleotide
uuccggaaguacacuuggc

SEQ ID NO: 1570006 - RNA, 19 nt, Artificial Sequence
  Description of Artificial Sequence: Synthetic oligonucleotide
gacguaccaguuucagcug

SEQ ID NO: 1570007 - RNA, 19 nt, Artificial Sequence
  Description of Artificial Sequence: Synthetic oligonucleotide
agcauccuuaggcaaguaa

SEQ ID NO: 1570008 - RNA, 19 nt, Artificial Sequence
  Description of Artificial Sequence: Synthetic oligonucleotide
cuccacacacacacacucc

SEQ ID NO: 1570009 - RNA, 19 nt, Artificial Sequence
  Description of Artificial Sequence: Synthetic oligonucleotide
ugugcuccgcccugggccc

SEQ ID NO: 1570010 - RNA, 19 nt, Artificial Sequence
  Description of Artificial Sequence: Synthetic oligonucleotide
uggccauuguaauccuuga

SEQ ID NO: 1570011 - RNA, 19 nt, Artificial Sequence
  Description of Artificial Sequence: Synthetic oligonucleotide
ugggucugguccagcaaca

SEQ ID NO: 1570012 - RNA, 19 nt, Artificial Sequence
  Description of Artificial Sequence: Synthetic oligonucleotide
aucugacaguuuccggaag

SEQ ID NO: 1570013 - RNA, 19 nt, Artificial Sequence
  Description of Artificial Sequence: Synthetic oligonucleotide
cauuucgaaggaaggcguc

SEQ ID NO: 1570014 - RNA, 19 nt, Artificial Sequence
  Description of Artificial Sequence: Synthetic oligonucleotide
aggugcggcgccucacagc

SEQ ID NO: 1570015 - RNA, 19 nt, Artificial Sequence
  Description of Artificial Sequence: Synthetic oligonucleotide
gugggucugguccagcaac

SEQ ID NO: 1570016 - RNA, 19 nt, Artificial Sequence
  Description of Artificial Sequence: Synthetic oligonucleotide
cauccuuaggcaaguaaaa

SEQ ID NO: 1570017 - RNA, 19 nt, Artificial Sequence
  Description of Artificial Sequence: Synthetic oligonucleotide
ucgcucaaagagcgcaaac

SEQ ID NO: 1570018 - RNA, 19 nt, Artificial Sequence
  Description of Artificial Sequence: Synthetic oligonucleotide
guacgacccaguauauaag

SEQ ID NO: 1570019 - RNA, 19 nt, Artificial Sequence
  Description of Artificial Sequence: Synthetic oligonucleotide
cuaggcccugcaagaagcc

SEQ ID NO: 1570020 - RNA, 19 nt, Artificial Sequence
  Description of Artificial Sequence: Synthetic oligonucleotide
cuuuaguagaggaccaccu

SEQ ID NO: 1570021 - RNA, 19 nt, Artificial Sequence
  Description of Artificial Sequence: Synthetic oligonucleotide
ugcugaaggcaucccaauu

SEQ ID NO: 1570022 - RNA, 19 nt, Artificial Sequence
  Description of Artificial Sequence: Synthetic oligonucleotide
auagcauccuuaggcaagu

SEQ ID NO: 1570023 - RNA, 19 nt, Artificial Sequence
  Description of Artificial Sequence: Synthetic oligonucleotide
cacacacacacacuccuca

SEQ ID NO: 1570024 - RNA, 19 nt, Artificial Sequence
  Description of Artificial Sequence: Synthetic oligonucleotide
ucagucccuuuaguagagg

SEQ ID NO: 1570025 - RNA, 19 nt, Artificial Sequence
  Description of Artificial Sequence: Synthetic oligonucleotide
agaaggcgguuucuugcug

SEQ ID NO: 1570026 - RNA, 19 nt, Artificial Sequence
  Description of Artificial Sequence: Synthetic oligonucleotide
caugcugaaggcaucccaa

SEQ ID NO: 1570027 - RNA, 19 nt, Artificial Sequence
  Description of Artificial Sequence: Synthetic oligonucleotide
gggaugcaaagccaugccc

SEQ ID NO: 1570028 - RNA, 19 nt, Artificial Sequence
  Description of Artificial Sequence: Synthetic oligonucleotide
gaucccugguccacugcgg

SEQ ID NO: 1570029 - RNA, 19 nt, Artificial Sequence
  Description of Artificial Sequence: Synthetic oligonucleotide
cgacccaguauauaagggg

SEQ ID NO: 1570030 - RNA, 19 nt, Artificial Sequence
  Description of Artificial Sequence: Synthetic oligonucleotide
caugccccguuauauccac

SEQ ID NO: 1570031 - RNA, 19 nt, Artificial Sequence
  Description of Artificial Sequence: Synthetic oligonucleotide
uucauacacuucgaucaaa

SEQ ID NO: 1570032 - RNA, 19 nt, Artificial Sequence
  Description of Artificial Sequence: Synthetic oligonucleotide
cacuaggcccugcaagaag

SEQ ID NO: 1570033 - RNA, 19 nt, Artificial Sequence
  Description of Artificial Sequence: Synthetic oligonucleotide
aaguacugcucgagcuccg

SEQ ID NO: 1570034 - RNA, 19 nt, Artificial Sequence
  Description of Artificial Sequence: Synthetic oligonucleotide
agccugagaaaggucaggu

SEQ ID NO: 1570035 - RNA, 19 nt, Artificial Sequence
  Description of Artificial Sequence: Synthetic oligonucleotide
ugggcucagucccuuuagu

SEQ ID NO: 1570036 - RNA, 19 nt, Artificial Sequence
  Description of Artificial Sequence: Synthetic oligonucleotide
acaggcgugcaaggcuucc

SEQ ID NO: 1570037 - RNA, 19 nt, Artificial Sequence
  Description of Artificial Sequence: Synthetic oligonucleotide
gcuacccagaguacgaccc

SEQ ID NO: 1570038 - RNA, 19 nt, Artificial Sequence
  Description of Artificial Sequence: Synthetic oligonucleotide
cccguuauauccacuggag

SEQ ID NO: 1570039 - RNA, 19 nt, Artificial Sequence
  Description of Artificial Sequence: Synthetic oligonucleotide
uggucgugcugcuccaggu

SEQ ID NO: 1570040 - RNA, 19 nt, Artificial Sequence
  Description of Artificial Sequence: Synthetic oligonucleotide
caaaaguaucugagggaga

SEQ ID NO: 1570041 - RNA, 19 nt, Artificial Sequence
  Description of Artificial Sequence: Synthetic oligonucleotide
ugcucagucucagccugag

SEQ ID NO: 1570042 - RNA, 19 nt, Artificial Sequence
  Description of Artificial Sequence: Synthetic oligonucleotide
ggaugcguaggaaauugug

SEQ ID NO: 1570043 - RNA, 19 nt, Artificial Sequence
  Description of Artificial Sequence: Synthetic oligonucleotide
cucguccuggucccggcgg

SEQ ID NO: 1570044 - RNA, 19 nt, Artificial Sequence
  Description of Artificial Sequence: Synthetic oligonucleotide
aggcaaguaaaaggaggug

SEQ ID NO: 1570045 - RNA, 19 nt, Artificial Sequence
  Description of Artificial Sequence: Synthetic oligonucleotide
aggcgugcaaggcuuccug

SEQ ID NO: 1570046 - RNA, 19 nt, Artificial Sequence
  Description of Artificial Sequence: Synthetic oligonucleotide
caacgagaguacuucugca

SEQ ID NO: 1570047 - RNA, 19 nt, Artificial Sequence
  Description of Artificial Sequence: Synthetic oligonucleotide
ugcgaggaucauccacuac

SEQ ID NO: 1570048 - RNA, 19 nt, Artificial Sequence
  Description of Artificial Sequence: Synthetic oligonucleotide
cuggcggcaacgagaguac

SEQ ID NO: 1570049 - RNA, 19 nt, Artificial Sequence
  Description of Artificial Sequence: Synthetic oligonucleotide
aucaagaagugggucuggu

SEQ ID NO: 1570050 - RNA, 19 nt, Artificial Sequence
  Description of Artificial Sequence: Synthetic oligonucleotide
gaggugcggcgccucacag

SEQ ID NO: 1570051 - RNA, 19 nt, Artificial Sequence
  Description of Artificial Sequence: Synthetic oligonucleotide
acgcccuucgcauugccua

SEQ ID NO: 1570052 - RNA, 19 nt, Artificial Sequence
  Description of Artificial Sequence: Synthetic oligonucleotide
caaugaccucacgugcccg

SEQ ID NO: 1570053 - RNA, 19 nt, Artificial Sequence
  Description of Artificial Sequence: Synthetic oligonucleotide
gcaaucaagaagugggucu

SEQ ID NO: 1570054 - RNA, 19 nt, Artificial Sequence
  Description of Artificial Sequence: Synthetic oligonucleotide
gggcguccuguaaagaagg

SEQ ID NO: 1570055 - RNA, 19 nt, Artificial Sequence
  Description of Artificial Sequence: Synthetic oligonucleotide
guucgugacagaacaugca

SEQ ID NO: 1570056 - RNA, 19 nt, Artificial Sequence
  Description of Artificial Sequence: Synthetic oligonucleotide
aucccugguccacugcggu

SEQ ID NO: 1570057 - RNA, 19 nt, Artificial Sequence
  Description of Artificial Sequence: Synthetic oligonucleotide
guugaggccacaaagcauu

SEQ ID NO: 1570058 - RNA, 19 nt, Artificial Sequence
  Description of Artificial Sequence: Synthetic oligonucleotide
cccugcaaacagaaccucg

SEQ ID NO: 1570059 - RNA, 19 nt, Artificial Sequence
  Description of Artificial Sequence: Synthetic oligonucleotide
augcugaaggcaucccaau

SEQ ID NO: 1570060 - RNA, 19 nt, Artificial Sequence
  Description of Artificial Sequence: Synthetic oligonucleotide
guaggaaauugugcaguuc

SEQ ID NO: 1570061 - RNA, 19 nt, Artificial Sequence
  Description of Artificial Sequence: Synthetic oligonucleotide
ccuuuaguagaggaccacc

SEQ ID NO: 1570062 - RNA, 19 nt, Artificial Sequence
  Description of Artificial Sequence: Synthetic oligonucleotide
ucaggcccugaugaugacu

SEQ ID NO: 1570063 - RNA, 19 nt, Artificial Sequence
  Description of Artificial Sequence: Synthetic oligonucleotide
caggacguaccaguuucag

SEQ ID NO: 1570064 - RNA, 19 nt, Artificial Sequence
  Description of Artificial Sequence: Synthetic oligonucleotide
gcucaugaaaagguugcug

SEQ ID NO: 1570065 - RNA, 19 nt, Artificial Sequence
  Description of Artificial Sequence: Synthetic oligonucleotide
agacaggacguaccaguuu

SEQ ID NO: 1570066 - RNA, 19 nt, Artificial Sequence
  Description of Artificial Sequence: Synthetic oligonucleotide
ccuccacacacacacacuc

SEQ ID NO: 1570067 - RNA, 19 nt, Artificial Sequence
  Description of Artificial Sequence: Synthetic oligonucleotide
ucacuaggcccugcaagaa

SEQ ID NO: 1570068 - RNA, 19 nt, Artificial Sequence
  Description of Artificial Sequence: Synthetic oligonucleotide
cacgggcccgcucacacuc

SEQ ID NO: 1570069 - RNA, 19 nt, Artificial Sequence
  Description of Artificial Sequence: Synthetic oligonucleotide
cuguucgcucaaagagcgc

SEQ ID NO: 1570070 - RNA, 19 nt, Artificial Sequence
  Description of Artificial Sequence: Synthetic oligonucleotide
agagggaugcaaagccaug

SEQ ID NO: 1570071 - RNA, 19 nt, Artificial Sequence
  Description of Artificial Sequence: Synthetic oligonucleotide
accucacgugcccguguuc

SEQ ID NO: 1570072 - RNA, 19 nt, Artificial Sequence
  Description of Artificial Sequence: Synthetic oligonucleotide
uggagucucuuaagcuuuu

SEQ ID NO: 1570073 - RNA, 19 nt, Artificial Sequence
  Description of Artificial Sequence: Synthetic oligonucleotide
ugcggucgcgggaagccuc

SEQ ID NO: 1570074 - RNA, 19 nt, Artificial Sequence
  Description of Artificial Sequence: Synthetic oligonucleotide
ccaauucaccuccccagag

SEQ ID NO: 1570075 - RNA, 19 nt, Artificial Sequence
  Description of Artificial Sequence: Synthetic oligonucleotide
gcacugaaccccugcaaac

SEQ ID NO: 1570076 - RNA, 19 nt, Artificial Sequence
  Description of Artificial Sequence: Synthetic oligonucleotide
agcgcaaacuugcgaggau

SEQ ID NO: 1570077 - RNA, 19 nt, Artificial Sequence
  Description of Artificial Sequence: Synthetic oligonucleotide
cugcaggaugcguaggaaa

SEQ ID NO: 1570078 - RNA, 19 nt, Artificial Sequence
  Description of Artificial Sequence: Synthetic oligonucleotide
cacugaaccccugcaaaca

SEQ ID NO: 1570079 - RNA, 19 nt, Artificial Sequence
  Description of Artificial Sequence: Synthetic oligonucleotide
ugacgcucuguucgcucaa

SEQ ID NO: 1570080 - RNA, 19 nt, Artificial Sequence
  Description of Artificial Sequence: Synthetic oligonucleotide
agaggaccaccuccacaca

SEQ ID NO: 1570081 - RNA, 19 nt, Artificial Sequence
  Description of Artificial Sequence: Synthetic oligonucleotide
ggcaacgagaguacuucug

SEQ ID NO: 1570082 - RNA, 19 nt, Artificial Sequence
  Description of Artificial Sequence: Synthetic oligonucleotide
uccgcgccgugaaguacug

SEQ ID NO: 1570083 - RNA, 19 nt, Artificial Sequence
  Description of Artificial Sequence: Synthetic oligonucleotide
ggcaaucaagaaguggguc

SEQ ID NO: 1570084 - RNA, 19 nt, Artificial Sequence
  Description of Artificial Sequence: Synthetic oligonucleotide
gaaggcgucucagccucac

SEQ ID NO: 1570085 - RNA, 19 nt, Artificial Sequence
  Description of Artificial Sequence: Synthetic oligonucleotide
cuucucacuaggcccugca

SEQ ID NO: 1570086 - RNA, 19 nt, Artificial Sequence
  Description of Artificial Sequence: Synthetic oligonucleotide
acacuucgaucaaaaguau

SEQ ID NO: 1570087 - RNA, 19 nt, Artificial Sequence
  Description of Artificial Sequence: Synthetic oligonucleotide
ggcccgcucacacucacac

SEQ ID NO: 1570088 - RNA, 19 nt, Artificial Sequence
  Description of Artificial Sequence: Synthetic oligonucleotide
acacggcacgcccuucgca

SEQ ID NO: 1570089 - RNA, 19 nt, Artificial Sequence
  Description of Artificial Sequence: Synthetic oligonucleotide
cagccucacccaucgcccc

SEQ ID NO: 1570090 - RNA, 19 nt, Artificial Sequence
  Description of Artificial Sequence: Synthetic oligonucleotide
cgugaaguacugcucgagc

SEQ ID NO: 1570091 - RNA, 19 nt, Artificial Sequence
  Description of Artificial Sequence: Synthetic oligonucleotide
cccaguauauaaggggcag

SEQ ID NO: 1570092 - RNA, 19 nt, Artificial Sequence
  Description of Artificial Sequence: Synthetic oligonucleotide
cacacggcacgcccuucgc

SEQ ID NO: 1570093 - RNA, 19 nt, Artificial Sequence
  Description of Artificial Sequence: Synthetic oligonucleotide
ccggaaguacacuuggcca

SEQ ID NO: 1570094 - RNA, 19 nt, Artificial Sequence
  Description of Artificial Sequence: Synthetic oligonucleotide
gaccagcgagguccgcgcc

SEQ ID NO: 1570095 - RNA, 19 nt, Artificial Sequence
  Description of Artificial Sequence: Synthetic oligonucleotide
guaccaguuucagcugaac

SEQ ID NO: 1570096 - RNA, 19 nt, Artificial Sequence
  Description of Artificial Sequence: Synthetic oligonucleotide
aggaggugcggcgccucac

SEQ ID NO: 1570097 - RNA, 19 nt, Artificial Sequence
  Description of Artificial Sequence: Synthetic oligonucleotide
cuucccgcugcaggaugcg

SEQ ID NO: 1570098 - RNA, 19 nt, Artificial Sequence
  Description of Artificial Sequence: Synthetic oligonucleotide
gccccguuauauccacugg

SEQ ID NO: 1570099 - RNA, 19 nt, Artificial Sequence
  Description of Artificial Sequence: Synthetic oligonucleotide
cauucaguugaggccacaa

SEQ ID NO: 1570100 - RNA, 19 nt, Artificial Sequence
  Description of Artificial Sequence: Synthetic oligonucleotide
caccccaaaggacaggcgu

SEQ ID NO: 1570101 - RNA, 19 nt, Artificial Sequence
  Description of Artificial Sequence: Synthetic oligonucleotide
gucucagccugagaaaggu

SEQ ID NO: 1570102 - RNA, 19 nt, Artificial Sequence
  Description of Artificial Sequence: Synthetic oligonucleotide
ggugcggcgccucacagcu

SEQ ID NO: 1570103 - RNA, 19 nt, Artificial Sequence
  Description of Artificial Sequence: Synthetic oligonucleotide
agccuggaacagcuaccca

SEQ ID NO: 1570104 - RNA, 19 nt, Artificial Sequence
  Description of Artificial Sequence: Synthetic oligonucleotide
augaccucacgugcccgug

SEQ ID NO: 1570105 - RNA, 19 nt, Artificial Sequence
  Description of Artificial Sequence: Synthetic oligonucleotide
gaaccccugcaaacagaac

SEQ ID NO: 1570106 - RNA, 19 nt, Artificial Sequence
  Description of Artificial Sequence: Synthetic oligonucleotide
caauucaccuccccagagu

SEQ ID NO: 1570107 - RNA, 19 nt, Artificial Sequence
  Description of Artificial Sequence: Synthetic oligonucleotide
acaggacguaccaguuuca

SEQ ID NO: 1570108 - RNA, 19 nt, Artificial Sequence
  Description of Artificial Sequence: Synthetic oligonucleotide
cgggaagccuccaaccacc

SEQ ID NO: 1570109 - RNA, 19 nt, Artificial Sequence
  Description of Artificial Sequence: Synthetic oligonucleotide
gcggcaacgagaguacuuc

SEQ ID NO: 1570110 - RNA, 19 nt, Artificial Sequence
  Description of Artificial Sequence: Synthetic oligonucleotide
cagcuacccagaguacgac

SEQ ID NO: 1570111 - RNA, 19 nt, Artificial Sequence
  Description of Artificial Sequence: Synthetic oligonucleotide
accuccacacacacacacu

SEQ ID NO: 1570112 - RNA, 19 nt, Artificial Sequence
  Description of Artificial Sequence: Synthetic oligonucleotide
agacaaagcucagggccuu

SEQ ID NO: 1570113 - RNA, 19 nt, Artificial Sequence
  Description of Artificial Sequence: Synthetic oligonucleotide
cucacccaucgccccgccc

SEQ ID NO: 1570114 - RNA, 19 nt, Artificial Sequence
  Description of Artificial Sequence: Synthetic oligonucleotide
ggucgugcugcuccagguc

SEQ ID NO: 1570115 - RNA, 19 nt, Artificial Sequence
  Description of Artificial Sequence: Synthetic oligonucleotide
caagaagccguagcuucaa

SEQ ID NO: 1570116 - RNA, 19 nt, Artificial Sequence
  Description of Artificial Sequence: Synthetic oligonucleotide
gcuguacaggcucguccug

SEQ ID NO: 1570117 - RNA, 19 nt, Artificial Sequence
  Description of Artificial Sequence: Synthetic oligonucleotide
cugcuccaggucauuucga

SEQ ID NO: 1570118 - RNA, 19 nt, Artificial Sequence
  Description of Artificial Sequence: Synthetic oligonucleotide
caucgccccgcccgauccc

SEQ ID NO: 1570119 - RNA, 19 nt, Artificial Sequence
  Description of Artificial Sequence: Synthetic oligonucleotide
ccaucgccccgcccgaucc

SEQ ID NO: 1570120 - RNA, 19 nt, Artificial Sequence
  Description of Artificial Sequence: Synthetic oligonucleotide
agguccgcgccgugaagua

SEQ ID NO: 1570121 - RNA, 19 nt, Artificial Sequence
  Description of Artificial Sequence: Synthetic oligonucleotide
agcgagguccgcgccguga

SEQ ID NO: 1570122 - RNA, 19 nt, Artificial Sequence
  Description of Artificial Sequence: Synthetic oligonucleotide
ccugcaagaagccguagcu

SEQ ID NO: 1570123 - RNA, 19 nt, Artificial Sequence
  Description of Artificial Sequence: Synthetic oligonucleotide
cacugcggucgcgggaagc

SEQ ID NO: 1570124 - RNA, 19 nt, Artificial Sequence
  Description of Artificial Sequence: Synthetic oligonucleotide
gcaagaagccguagcuuca

SEQ ID NO: 1570125 - RNA, 19 nt, Artificial Sequence
  Description of Artificial Sequence: Synthetic oligonucleotide
ggucaccccaaaggacagg

SEQ ID NO: 1570126 - RNA, 19 nt, Artificial Sequence
  Description of Artificial Sequence: Synthetic oligonucleotide
gggcucagucccuuuagua

SEQ ID NO: 1570127 - RNA, 19 nt, Artificial Sequence
  Description of Artificial Sequence: Synthetic oligonucleotide
guucgcucaaagagcgcaa

SEQ ID NO: 1570128 - RNA, 19 nt, Artificial Sequence
  Description of Artificial Sequence: Synthetic oligonucleotide
ccccguuauauccacugga

SEQ ID NO: 1570129 - RNA, 19 nt, Artificial Sequence
  Description of Artificial Sequence: Synthetic oligonucleotide
ccccaaaggacaggcgugc

SEQ ID NO: 1570130 - RNA, 19 nt, Artificial Sequence
  Description of Artificial Sequence: Synthetic oligonucleotide
ccugcaaacagaaccucgu

SEQ ID NO: 1570131 - RNA, 19 nt, Artificial Sequence
  Description of Artificial Sequence: Synthetic oligonucleotide
ggcgugcaaggcuuccuga

SEQ ID NO: 1570132 - RNA, 19 nt, Artificial Sequence
  Description of Artificial Sequence: Synthetic oligonucleotide
gcgcaaacuugcgaggauc

SEQ ID NO: 1570133 - RNA, 19 nt, Artificial Sequence
  Description of Artificial Sequence: Synthetic oligonucleotide
uggcggcaacgagaguacu

SEQ ID NO: 1570134 - RNA, 19 nt, Artificial Sequence
  Description of Artificial Sequence: Synthetic oligonucleotide
guccacugcggucgcggga

SEQ ID NO: 1570135 - RNA, 19 nt, Artificial Sequence
  Description of Artificial Sequence: Synthetic oligonucleotide
ugcuguugauuuggccauu

SEQ ID NO: 1570136 - RNA, 19 nt, Artificial Sequence
  Description of Artificial Sequence: Synthetic oligonucleotide
gcccgcucacacucacacg

SEQ ID NO: 1570137 - RNA, 19 nt, Artificial Sequence
  Description of Artificial Sequence: Synthetic oligonucleotide
ccgugaaguacugcucgag

SEQ ID NO: 1570138 - RNA, 19 nt, Artificial Sequence
  Description of Artificial Sequence: Synthetic oligonucleotide
gaggaggcacugaaccccu

SEQ ID NO: 1570139 - RNA, 19 nt, Artificial Sequence
  Description of Artificial Sequence: Synthetic oligonucleotide
ggaggugcggcgccucaca

SEQ ID NO: 1570140 - RNA, 19 nt, Artificial Sequence
  Description of Artificial Sequence: Synthetic oligonucleotide
ccacacacacacacuccuc

SEQ ID NO: 1570141 - RNA, 19 nt, Artificial Sequence
  Description of Artificial Sequence: Synthetic oligonucleotide
cgcaaacuugcgaggauca

SEQ ID NO: 1570142 - RNA, 19 nt, Artificial Sequence
  Description of Artificial Sequence: Synthetic oligonucleotide
aucgccccgcccgaucccu

SEQ ID NO: 1570143 - RNA, 19 nt, Artificial Sequence
  Description of Artificial Sequence: Synthetic oligonucleotide
acggcacgcccuucgcauu

SEQ ID NO: 1570144 - RNA, 19 nt, Artificial Sequence
  Description of Artificial Sequence: Synthetic oligonucleotide
gucaggugucucccgcugu

SEQ ID NO: 1570145 - RNA, 19 nt, Artificial Sequence
  Description of Artificial Sequence: Synthetic oligonucleotide
cacggcacgcccuucgcau

SEQ ID NO: 1570146 - RNA, 19 nt, Artificial Sequence
  Description of Artificial Sequence: Synthetic oligonucleotide
gcgugcaaggcuuccugaa

SEQ ID NO: 1570147 - RNA, 19 nt, Artificial Sequence
  Description of Artificial Sequence: Synthetic oligonucleotide
gcguaggaaauugugcagu

SEQ ID NO: 1570148 - RNA, 19 nt, Artificial Sequence
  Description of Artificial Sequence: Synthetic oligonucleotide
gacgcucuguucgcucaaa

SEQ ID NO: 1570149 - RNA, 19 nt, Artificial Sequence
  Description of Artificial Sequence: Synthetic oligonucleotide
ucccgcuguacaggcucgu

SEQ ID NO: 1570150 - RNA, 19 nt, Artificial Sequence
  Description of Artificial Sequence: Synthetic oligonucleotide
uagcauccuuaggcaagua

SEQ ID NO: 1570151 - RNA, 19 nt, Artificial Sequence
  Description of Artificial Sequence: Synthetic oligonucleotide
cccaauucaccuccccaga

SEQ ID NO: 1570152 - RNA, 19 nt, Artificial Sequence
  Description of Artificial Sequence: Synthetic oligonucleotide
cccgcccgaucccuggucc

SEQ ID NO: 1570153 - RNA, 19 nt, Artificial Sequence
  Description of Artificial Sequence: Synthetic oligonucleotide
cugguccacugcggucgcg

SEQ ID NO: 1570154 - RNA, 19 nt, Artificial Sequence
  Description of Artificial Sequence: Synthetic oligonucleotide
cccuuuaguagaggaccac

SEQ ID NO: 1570155 - RNA, 19 nt, Artificial Sequence
  Description of Artificial Sequence: Synthetic oligonucleotide
caaagccaugccccguuau

SEQ ID NO: 1570156 - RNA, 19 nt, Artificial Sequence
  Description of Artificial Sequence: Synthetic oligonucleotide
gccguagcuucaagggcug

SEQ ID NO: 1570157 - RNA, 19 nt, Artificial Sequence
  Description of Artificial Sequence: Synthetic oligonucleotide
cugaaucuucuggcggcaa

SEQ ID NO: 1570158 - RNA, 19 nt, Artificial Sequence
  Description of Artificial Sequence: Synthetic oligonucleotide
ccgggcguccuguaaagaa

SEQ ID NO: 1570159 - RNA, 19 nt, Artificial Sequence
  Description of Artificial Sequence: Synthetic oligonucleotide
guccgcgccgugaaguacu

SEQ ID NO: 1570160 - RNA, 19 nt, Artificial Sequence
  Description of Artificial Sequence: Synthetic oligonucleotide
cccgaucccugguccacug

SEQ ID NO: 1570161 - RNA, 19 nt, Artificial Sequence
  Description of Artificial Sequence: Synthetic oligonucleotide
ggcauucaguugaggccac

SEQ ID NO: 1570162 - RNA, 19 nt, Artificial Sequence
  Description of Artificial Sequence: Synthetic oligonucleotide
aggcgguuucuugcuggaa

SEQ ID NO: 1570163 - RNA, 19 nt, Artificial Sequence
  Description of Artificial Sequence: Synthetic oligonucleotide
augccccguuauauccacu

SEQ ID NO: 1570164 - RNA, 19 nt, Artificial Sequence
  Description of Artificial Sequence: Synthetic oligonucleotide
cacgcccuucgcauugccu

SEQ ID NO: 1570165 - RNA, 19 nt, Artificial Sequence
  Description of Artificial Sequence: Synthetic oligonucleotide
gguccgcgccgugaaguac

SEQ ID NO: 1570166 - RNA, 19 nt, Artificial Sequence
  Description of Artificial Sequence: Synthetic oligonucleotide
gcucagucucagccugaga

SEQ ID NO: 1570167 - RNA, 19 nt, Artificial Sequence
  Description of Artificial Sequence: Synthetic oligonucleotide
cucacgugcccguguucgu

SEQ ID NO: 1570168 - RNA, 19 nt, Artificial Sequence
  Description of Artificial Sequence: Synthetic oligonucleotide
gcaaagccaugccccguua

SEQ ID NO: 1570169 - RNA, 19 nt, Artificial Sequence
  Description of Artificial Sequence: Synthetic oligonucleotide
ggcacgcccuucgcauugc

SEQ ID NO: 1570170 - RNA, 19 nt, Artificial Sequence
  Description of Artificial Sequence: Synthetic oligonucleotide
gcgagguccgcgccgugaa

SEQ ID NO: 1570171 - RNA, 19 nt, Artificial Sequence
  Description of Artificial Sequence: Synthetic oligonucleotide
gccucacccaucgccccgc

SEQ ID NO: 1570172 - RNA, 19 nt, Artificial Sequence
  Description of Artificial Sequence: Synthetic oligonucleotide
gcggucgcgggaagccucc

SEQ ID NO: 1570173 - RNA, 19 nt, Artificial Sequence
  Description of Artificial Sequence: Synthetic oligonucleotide
cggaaguacacuuggccau

SEQ ID NO: 1570174 - RNA, 19 nt, Artificial Sequence
  Description of Artificial Sequence: Synthetic oligonucleotide
gccaauccucucaggucuc

SEQ ID NO: 1570175 - RNA, 19 nt, Artificial Sequence
  Description of Artificial Sequence: Synthetic oligonucleotide
gcgccgugaaguacugcuc

SEQ ID NO: 1570176 - RNA, 19 nt, Artificial Sequence
  Description of Artificial Sequence: Synthetic oligonucleotide
cgccgggcguccuguaaag

SEQ ID NO: 1570177 - RNA, 19 nt, Artificial Sequence
  Description of Artificial Sequence: Synthetic oligonucleotide
ccccugcaaacagaaccuc

SEQ ID NO: 1570178 - RNA, 19 nt, Artificial Sequence
  Description of Artificial Sequence: Synthetic oligonucleotide
gcauucaguugaggccaca

SEQ ID NO: 1570179 - RNA, 19 nt, Artificial Sequence
  Description of Artificial Sequence: Synthetic oligonucleotide
cgcgccgugaaguacugcu

SEQ ID NO: 1570180 - RNA, 19 nt, Artificial Sequence
  Description of Artificial Sequence: Synthetic oligonucleotide
gcccugcaagaagccguag

SEQ ID NO: 1570181 - RNA, 19 nt, Artificial Sequence
  Description of Artificial Sequence: Synthetic oligonucleotide
cgcuguacaggcucguccu

SEQ ID NO: 1570182 - RNA, 19 nt, Artificial Sequence
  Description of Artificial Sequence: Synthetic oligonucleotide
ccugcggaccagcgagguc

SEQ ID NO: 1570183 - RNA, 19 nt, Artificial Sequence
  Description of Artificial Sequence: Synthetic oligonucleotide
cugggccccgccgggcguc

SEQ ID NO: 1570184 - RNA, 19 nt, Artificial Sequence
  Description of Artificial Sequence: Synthetic oligonucleotide
cagcgagguccgcgccgug

SEQ ID NO: 1570185 - RNA, 19 nt, Artificial Sequence
  Description of Artificial Sequence: Synthetic oligonucleotide
cggcacgcccuucgcauug

SEQ ID NO: 1570186 - RNA, 19 nt, Artificial Sequence
  Description of Artificial Sequence: Synthetic oligonucleotide
gugcuccgcccugggcccc

SEQ ID NO: 1570187 - RNA, 19 nt, Artificial Sequence
  Description of Artificial Sequence: Synthetic oligonucleotide
ccaccuccacacacacaca

SEQ ID NO: 1570188 - RNA, 19 nt, Artificial Sequence
  Description of Artificial Sequence: Synthetic oligonucleotide
ccucacccaucgccccgcc

SEQ ID NO: 1570189 - RNA, 19 nt, Artificial Sequence
  Description of Artificial Sequence: Synthetic oligonucleotide
cccaucgccccgcccgauc

SEQ ID NO: 1570190 - RNA, 19 nt, Artificial Sequence
  Description of Artificial Sequence: Synthetic oligonucleotide
gcaggaugcguaggaaauu

SEQ ID NO: 1570191 - RNA, 19 nt, Artificial Sequence
  Description of Artificial Sequence: Synthetic oligonucleotide
gcaaacuugcgaggaucau

SEQ ID NO: 1570192 - RNA, 19 nt, Artificial Sequence
  Description of Artificial Sequence: Synthetic oligonucleotide
cgagguccgcgccgugaag

SEQ ID NO: 1570193 - RNA, 19 nt, Artificial Sequence
  Description of Artificial Sequence: Synthetic oligonucleotide
cgccccgcccgaucccugg

SEQ ID NO: 1570194 - RNA, 19 nt, Artificial Sequence
  Description of Artificial Sequence: Synthetic oligonucleotide
ggcggcaacgagaguacuu

SEQ ID NO: 1570195 - RNA, 19 nt, Artificial Sequence
  Description of Artificial Sequence: Synthetic oligonucleotide
acccaucgccccgcccgau

SEQ ID NO: 1570196 - RNA, 19 nt, Artificial Sequence
  Description of Artificial Sequence: Synthetic oligonucleotide
cccgcuguacaggcucguc

SEQ ID NO: 1570197 - RNA, 19 nt, Artificial Sequence
  Description of Artificial Sequence: Synthetic oligonucleotide
cggcgccucacagcugugc

SEQ ID NO: 1570198 - RNA, 19 nt, Artificial Sequence
  Description of Artificial Sequence: Synthetic oligonucleotide
ccgccgggcguccuguaaa

SEQ ID NO: 1570199 - RNA, 19 nt, Artificial Sequence
  Description of Artificial Sequence: Synthetic oligonucleotide
ccccgcccgaucccugguc

SEQ ID NO: 1570200 - RNA, 19 nt, Artificial Sequence
  Description of Artificial Sequence: Synthetic oligonucleotide
gccugcggaccagcgaggu

SEQ ID NO: 1570201 - RNA, 19 nt, Artificial Sequence
  Description of Artificial Sequence: Synthetic oligonucleotide
gggcccgcucacacucaca

SEQ ID NO: 1570202 - RNA, 19 nt, Artificial Sequence
  Description of Artificial Sequence: Synthetic oligonucleotide
ccgcgccgugaaguacugc

SEQ ID NO: 1570203 - RNA, 19 nt, Artificial Sequence
  Description of Artificial Sequence: Synthetic oligonucleotide
cgcccgaucccugguccac

SEQ ID NO: 1570204 - RNA, 19 nt, Artificial Sequence
  Description of Artificial Sequence: Synthetic oligonucleotide
cccuucgcauugccuauuu

SEQ ID NO: 1570205 - RNA, 19 nt, Artificial Sequence
  Description of Artificial Sequence: Synthetic oligonucleotide
gcggcgccucacagcugug

SEQ ID NO: 1570206 - RNA, 19 nt, Artificial Sequence
  Description of Artificial Sequence: Synthetic oligonucleotide
ccagcgagguccgcgccgu

SEQ ID NO: 1570207 - RNA, 19 nt, Artificial Sequence
  Description of Artificial Sequence: Synthetic oligonucleotide
cccgccgggcguccuguaa

SEQ ID NO: 1570208 - RNA, 19 nt, Artificial Sequence
  Description of Artificial Sequence: Synthetic oligonucleotide
gcccgaucccugguccacu

SEQ ID NO: 1570209 - RNA, 19 nt, Artificial Sequence
  Description of Artificial Sequence: Synthetic oligonucleotide
cgcccuucgcauugccuau

SEQ ID NO: 1570210 - RNA, 19 nt, Artificial Sequence
  Description of Artificial Sequence: Synthetic oligonucleotide
gccccgcccgaucccuggu

SEQ ID NO: 1570211 - RNA, 19 nt, Artificial Sequence
  Description of Artificial Sequence: Synthetic oligonucleotide
ccugggccccgccgggcgu

SEQ ID NO: 1570212 - RNA, 19 nt, Artificial Sequence
  Description of Artificial Sequence: Synthetic oligonucleotide
gccccgccgggcguccugu

SEQ ID NO: 1570213 - RNA, 19 nt, Artificial Sequence
  Description of Artificial Sequence: Synthetic oligonucleotide
cggucgcgggaagccucca

SEQ ID NO: 1570214 - RNA, 19 nt, Artificial Sequence
  Description of Artificial Sequence: Synthetic oligonucleotide
ccccgccgggcguccugua

SEQ ID NO: 1570215 - RNA, 19 nt, Artificial Sequence
  Description of Artificial Sequence: Synthetic oligonucleotide
caucuuaucacaaagaugg

SEQ ID NO: 1570216 - RNA, 19 nt, Artificial Sequence
  Description of Artificial Sequence: Synthetic oligonucleotide
uaaaaugugauacuuaaca

SEQ ID NO: 1570217 - RNA, 19 nt, Artificial Sequence
  Description of Artificial Sequence: Synthetic oligonucleotide
ucuugcuuaaccuagauug

SEQ ID NO: 1570218 - RNA, 19 nt, Artificial Sequence
  Description of Artificial Sequence: Synthetic oligonucleotide
auuaccaaugacuucauac

SEQ ID NO: 1570219 - RNA, 19 nt, Artificial Sequence
  Description of Artificial Sequence: Synthetic oligonucleotide
uuuagaucaaacaagucug

SEQ ID NO: 1570220 - RNA, 19 nt, Artificial Sequence
  Description of Artificial Sequence: Synthetic oligonucleotide
auagccaacucauucaucc

SEQ ID NO: 1570221 - RNA, 19 nt, Artificial Sequence
  Description of Artificial Sequence: Synthetic oligonucleotide
aacacaauugauuagguaa

SEQ ID NO: 1570222 - RNA, 19 nt, Artificial Sequence
  Description of Artificial Sequence: Synthetic oligonucleotide
uuauugacaaggcagaugu

SEQ ID NO: 1570223 - RNA, 19 nt, Artificial Sequence
  Description of Artificial Sequence: Synthetic oligonucleotide
aacucauucauccuaaaca

SEQ ID NO: 1570224 - RNA, 19 nt, Artificial Sequence
  Description of Artificial Sequence: Synthetic oligonucleotide
aaaauugccaucaauaggu

SEQ ID NO: 1570225 - RNA, 19 nt, Artificial Sequence
  Description of Artificial Sequence: Synthetic oligonucleotide
agguaacugauccagauac

SEQ ID NO: 1570226 - RNA, 19 nt, Artificial Sequence
  Description of Artificial Sequence: Synthetic oligonucleotide
gaaaucagguaacugaucc

SEQ ID NO: 1570227 - RNA, 19 nt, Artificial Sequence
  Description of Artificial Sequence: Synthetic oligonucleotide
uuaauacauguccagaagc

SEQ ID NO: 1570228 - RNA, 19 nt, Artificial Sequence
  Description of Artificial Sequence: Synthetic oligonucleotide
augaauaccacaaagaaca

SEQ ID NO: 1570229 - RNA, 19 nt, Artificial Sequence
  Description of Artificial Sequence: Synthetic oligonucleotide
ucauucauccuaaacacug

SEQ ID NO: 1570230 - RNA, 19 nt, Artificial Sequence
  Description of Artificial Sequence: Synthetic oligonucleotide
aacggaaucagccagccca

SEQ ID NO: 1570231 - RNA, 19 nt, Artificial Sequence
  Description of Artificial Sequence: Synthetic oligonucleotide
ugcacuuuagaucaaacaa

SEQ ID NO: 1570232 - RNA, 19 nt, Artificial Sequence
  Description of Artificial Sequence: Synthetic oligonucleotide
cugacaaaagcuuucggcg

SEQ ID NO: 1570233 - RNA, 19 nt, Artificial Sequence
  Description of Artificial Sequence: Synthetic oligonucleotide
uacucuuugauucuuggca

SEQ ID NO: 1570234 - RNA, 19 nt, Artificial Sequence
  Description of Artificial Sequence: Synthetic oligonucleotide
ugaugaauaccacaaagaa

SEQ ID NO: 1570235 - RNA, 19 nt, Artificial Sequence
  Description of Artificial Sequence: Synthetic oligonucleotide
aaaaugugauacuuaacaa

SEQ ID NO: 1570236 - RNA, 19 nt, Artificial Sequence
  Description of Artificial Sequence: Synthetic oligonucleotide
uauaccagcauugagcuga

SEQ ID NO: 1570237 - RNA, 19 nt, Artificial Sequence
  Description of Artificial Sequence: Synthetic oligonucleotide
ucuuauagccaacucauuc

SEQ ID NO: 1570238 - RNA, 19 nt, Artificial Sequence
  Description of Artificial Sequence: Synthetic oligonucleotide
uguaggggaaaucagguaa

SEQ ID NO: 1570239 - RNA, 19 nt, Artificial Sequence
  Description of Artificial Sequence: Synthetic oligonucleotide
gaaauugcuccauauacca

SEQ ID NO: 1570240 - RNA, 19 nt, Artificial Sequence
  Description of Artificial Sequence: Synthetic oligonucleotide
uauacaaagaaagugcaaa

SEQ ID NO: 1570241 - RNA, 19 nt, Artificial Sequence
  Description of Artificial Sequence: Synthetic oligonucleotide
uuguugauguauuuguagc

SEQ ID NO: 1570242 - RNA, 19 nt, Artificial Sequence
  Description of Artificial Sequence: Synthetic oligonucleotide
uaaaggcuaacaauggcac

SEQ ID NO: 1570243 - RNA, 19 nt, Artificial Sequence
  Description of Artificial Sequence: Synthetic oligonucleotide
aagaacacaggcauuauca

SEQ ID NO: 1570244 - RNA, 19 nt, Artificial Sequence
  Description of Artificial Sequence: Synthetic oligonucleotide
uuugaaaguaaaugcucag

SEQ ID NO: 1570245 - RNA, 19 nt, Artificial Sequence
  Description of Artificial Sequence: Synthetic oligonucleotide
aacgacgcgucuucugucc

SEQ ID NO: 1570246 - RNA, 19 nt, Artificial Sequence
  Description of Artificial Sequence: Synthetic oligonucleotide
uuuguaggggaaaucaggu

SEQ ID NO: 1570247 - RNA, 19 nt, Artificial Sequence
  Description of Artificial Sequence: Synthetic oligonucleotide
aacacuguauucacucucc

SEQ ID NO: 1570248 - RNA, 19 nt, Artificial Sequence
  Description of Artificial Sequence: Synthetic oligonucleotide
agaaauugcuccauauacc

SEQ ID NO: 1570249 - RNA, 19 nt, Artificial Sequence
  Description of Artificial Sequence: Synthetic oligonucleotide
uuggcaaaacauacugugg

SEQ ID NO: 1570250 - RNA, 19 nt, Artificial Sequence
  Description of Artificial Sequence: Synthetic oligonucleotide
ugacaaaagcuuucggcgg

SEQ ID NO: 1570251 - RNA, 19 nt, Artificial Sequence
  Description of Artificial Sequence: Synthetic oligonucleotide
augaauaguaauuaccaau

SEQ ID NO: 1570252 - RNA, 19 nt, Artificial Sequence
  Description of Artificial Sequence: Synthetic oligonucleotide
uuaccaaugacuucauacu

SEQ ID NO: 1570253 - RNA, 19 nt, Artificial Sequence
  Description of Artificial Sequence: Synthetic oligonucleotide
gaagaacggaaucagccag

SEQ ID NO: 1570254 - RNA, 19 nt, Artificial Sequence
  Description of Artificial Sequence: Synthetic oligonucleotide
acugaauguugacagcugg

SEQ ID NO: 1570255 - RNA, 19 nt, Artificial Sequence
  Description of Artificial Sequence: Synthetic oligonucleotide
uguagaaccggucgcugcg

SEQ ID NO: 1570256 - RNA, 19 nt, Artificial Sequence
  Description of Artificial Sequence: Synthetic oligonucleotide
ucugaaauacaaaccauua

SEQ ID NO: 1570257 - RNA, 19 nt, Artificial Sequence
  Description of Artificial Sequence: Synthetic oligonucleotide
acaaauuagaagcaugcaa

SEQ ID NO: 1570258 - RNA, 19 nt, Artificial Sequence
  Description of Artificial Sequence: Synthetic oligonucleotide
auagguuggcaaaacauac

SEQ ID NO: 1570259 - RNA, 19 nt, Artificial Sequence
  Description of Artificial Sequence: Synthetic oligonucleotide
acaauugauuagguaagcc

SEQ ID NO: 1570260 - RNA, 19 nt, Artificial Sequence
  Description of Artificial Sequence: Synthetic oligonucleotide
uuaaccuagauugucuuca

SEQ ID NO: 1570261 - RNA, 19 nt, Artificial Sequence
  Description of Artificial Sequence: Synthetic oligonucleotide
auggacaccaucgggaacc

SEQ ID NO: 1570262 - RNA, 19 nt, Artificial Sequence
  Description of Artificial Sequence: Synthetic oligonucleotide
uguugauguauuuguagca

SEQ ID NO: 1570263 - RNA, 19 nt, Artificial Sequence
  Description of Artificial Sequence: Synthetic oligonucleotide
aaacauacuguggcggcgc

SEQ ID NO: 1570264 - RNA, 19 nt, Artificial Sequence
  Description of Artificial Sequence: Synthetic oligonucleotide
auacucuuugauucuuggc

SEQ ID NO: 1570265 - RNA, 19 nt, Artificial Sequence
  Description of Artificial Sequence: Synthetic oligonucleotide
ucaguuaaaggcuaacaau

SEQ ID NO: 1570266 - RNA, 19 nt, Artificial Sequence
  Description of Artificial Sequence: Synthetic oligonucleotide
ucauagguuggcaaaacau

SEQ ID NO: 1570267 - RNA, 19 nt, Artificial Sequence
  Description of Artificial Sequence: Synthetic oligonucleotide
agguuuauugacaaggcag

SEQ ID NO: 1570268 - RNA, 19 nt, Artificial Sequence
  Description of Artificial Sequence: Synthetic oligonucleotide
acccagacgacucugcgac

SEQ ID NO: 1570269 - RNA, 19 nt, Artificial Sequence
  Description of Artificial Sequence: Synthetic oligonucleotide
uaccaaugacuucauacug

SEQ ID NO: 1570270 - RNA, 19 nt, Artificial Sequence
  Description of Artificial Sequence: Synthetic oligonucleotide
aaaacauacuguggcggcg

SEQ ID NO: 1570271 - RNA, 19 nt, Artificial Sequence
  Description of Artificial Sequence: Synthetic oligonucleotide
ugcuauuuauguuuucugu

SEQ ID NO: 1570272 - RNA, 19 nt, Artificial Sequence
  Description of Artificial Sequence: Synthetic oligonucleotide
agagguuuauuaaagcauc

SEQ ID NO: 1570273 - RNA, 19 nt, Artificial Sequence
  Description of Artificial Sequence: Synthetic oligonucleotide
auuagaagcaugcaaccau

SEQ ID NO: 1570274 - RNA, 19 nt, Artificial Sequence
  Description of Artificial Sequence: Synthetic oligonucleotide
uauaagguuuauugacaag

SEQ ID NO: 1570275 - RNA, 19 nt, Artificial Sequence
  Description of Artificial Sequence: Synthetic oligonucleotide
uucaccgccaucucauagg

SEQ ID NO: 1570276 - RNA, 19 nt, Artificial Sequence
  Description of Artificial Sequence: Synthetic oligonucleotide
aauuagaagcaugcaacca

SEQ ID NO: 1570277 - RNA, 19 nt, Artificial Sequence
  Description of Artificial Sequence: Synthetic oligonucleotide
accagcauugagcugauga

SEQ ID NO: 1570278 - RNA, 19 nt, Artificial Sequence
  Description of Artificial Sequence: Synthetic oligonucleotide
aauguacaaauuagaagca

SEQ ID NO: 1570279 - RNA, 19 nt, Artificial Sequence
  Description of Artificial Sequence: Synthetic oligonucleotide
gaagcaugcaaccauccuc

SEQ ID NO: 1570280 - RNA, 19 nt, Artificial Sequence
  Description of Artificial Sequence: Synthetic oligonucleotide
cuuuagaucaaacaagucu

SEQ ID NO: 1570281 - RNA, 19 nt, Artificial Sequence
  Description of Artificial Sequence: Synthetic oligonucleotide
aagacaagaagcugguaua

SEQ ID NO: 1570282 - RNA, 19 nt, Artificial Sequence
  Description of Artificial Sequence: Synthetic oligonucleotide
aaaucagguaacugaucca

SEQ ID NO: 1570283 - RNA, 19 nt, Artificial Sequence
  Description of Artificial Sequence: Synthetic oligonucleotide
gcaaaauugccaucaauag

SEQ ID NO: 1570284 - RNA, 19 nt, Artificial Sequence
  Description of Artificial Sequence: Synthetic oligonucleotide
cucguucucgcccaggucc

SEQ ID NO: 1570285 - RNA, 19 nt, Artificial Sequence
  Description of Artificial Sequence: Synthetic oligonucleotide
aaagucucuaaaaugugau

SEQ ID NO: 1570286 - RNA, 19 nt, Artificial Sequence
  Description of Artificial Sequence: Synthetic oligonucleotide
augacuucauacugaaugu

SEQ ID NO: 1570287 - RNA, 19 nt, Artificial Sequence
  Description of Artificial Sequence: Synthetic oligonucleotide
cuggcauggaguuuggaug

SEQ ID NO: 1570288 - RNA, 19 nt, Artificial Sequence
  Description of Artificial Sequence: Synthetic oligonucleotide
aagaacggaaucagccagc

SEQ ID NO: 1570289 - RNA, 19 nt, Artificial Sequence
  Description of Artificial Sequence: Synthetic oligonucleotide
uuagaagcaugcaaccauc

SEQ ID NO: 1570290 - RNA, 19 nt, Artificial Sequence
  Description of Artificial Sequence: Synthetic oligonucleotide
uuaguguuugaaaguaaau

SEQ ID NO: 1570291 - RNA, 19 nt, Artificial Sequence
  Description of Artificial Sequence: Synthetic oligonucleotide
cacggacaagucaaaaugc

SEQ ID NO: 1570292 - RNA, 19 nt, Artificial Sequence
  Description of Artificial Sequence: Synthetic oligonucleotide
ugcuuaaccuagauugucu

SEQ ID NO: 1570293 - RNA, 19 nt, Artificial Sequence
  Description of Artificial Sequence: Synthetic oligonucleotide
agucauggacaccaucggg

SEQ ID NO: 1570294 - RNA, 19 nt, Artificial Sequence
  Description of Artificial Sequence: Synthetic oligonucleotide
uccagaagcuccuuagugu

SEQ ID NO: 1570295 - RNA, 19 nt, Artificial Sequence
  Description of Artificial Sequence: Synthetic oligonucleotide
guugauguauuuguagcag

SEQ ID NO: 1570296 - RNA, 19 nt, Artificial Sequence
  Description of Artificial Sequence: Synthetic oligonucleotide
auugccaucaauagguuga

SEQ ID NO: 1570297 - RNA, 19 nt, Artificial Sequence
  Description of Artificial Sequence: Synthetic oligonucleotide
aaacgacgcgucuucuguc

SEQ ID NO: 1570298 - RNA, 19 nt, Artificial Sequence
  Description of Artificial Sequence: Synthetic oligonucleotide
aagccgguagcagaagaac

SEQ ID NO: 1570299 - RNA, 19 nt, Artificial Sequence
  Description of Artificial Sequence: Synthetic oligonucleotide
aaacacaauugauuaggua

SEQ ID NO: 1570300 - RNA, 19 nt, Artificial Sequence
  Description of Artificial Sequence: Synthetic oligonucleotide
accaucgggaaccucgcgg

SEQ ID NO: 1570301 - RNA, 19 nt, Artificial Sequence
  Description of Artificial Sequence: Synthetic oligonucleotide
auggccaccagacaacuga

SEQ ID NO: 1570302 - RNA, 19 nt, Artificial Sequence
  Description of Artificial Sequence: Synthetic oligonucleotide
aaagccaaacgacgcgucu

SEQ ID NO: 1570303 - RNA, 19 nt, Artificial Sequence
  Description of Artificial Sequence: Synthetic oligonucleotide
agaaaacccuuccccuccc

SEQ ID NO: 1570304 - RNA, 19 nt, Artificial Sequence
  Description of Artificial Sequence: Synthetic oligonucleotide
auacugaauguugacagcu

SEQ ID NO: 1570305 - RNA, 19 nt, Artificial Sequence
  Description of Artificial Sequence: Synthetic oligonucleotide
ugauguauuuguagcaguu

SEQ ID NO: 1570306 - RNA, 19 nt, Artificial Sequence
  Description of Artificial Sequence: Synthetic oligonucleotide
aagcaugcaaccauccucu

SEQ ID NO: 1570307 - RNA, 19 nt, Artificial Sequence
  Description of Artificial Sequence: Synthetic oligonucleotide
uccuaaacacuguauucac

SEQ ID NO: 1570308 - RNA, 19 nt, Artificial Sequence
  Description of Artificial Sequence: Synthetic oligonucleotide
acacaauugauuagguaag

SEQ ID NO: 1570309 - RNA, 19 nt, Artificial Sequence
  Description of Artificial Sequence: Synthetic oligonucleotide
gcugaugauaaacauaaga

SEQ ID NO: 1570310 - RNA, 19 nt, Artificial Sequence
  Description of Artificial Sequence: Synthetic oligonucleotide
caccaaacaucugaaauac

SEQ ID NO: 1570311 - RNA, 19 nt, Artificial Sequence
  Description of Artificial Sequence: Synthetic oligonucleotide
agcaaaauugccaucaaua

SEQ ID NO: 1570312 - RNA, 19 nt, Artificial Sequence
  Description of Artificial Sequence: Synthetic oligonucleotide
cauugagcugaugauaaac

SEQ ID NO: 1570313 - RNA, 19 nt, Artificial Sequence
  Description of Artificial Sequence: Synthetic oligonucleotide
uaccccucaguuaaaggcu

SEQ ID NO: 1570314 - RNA, 19 nt, Artificial Sequence
  Description of Artificial Sequence: Synthetic oligonucleotide
ugcggacauggcaacagcc

SEQ ID NO: 1570315 - RNA, 19 nt, Artificial Sequence
  Description of Artificial Sequence: Synthetic oligonucleotide
ccaaacacaauugauuagg

SEQ ID NO: 1570316 - RNA, 19 nt, Artificial Sequence
  Description of Artificial Sequence: Synthetic oligonucleotide
auccuaaacacuguauuca

SEQ ID NO: 1570317 - RNA, 19 nt, Artificial Sequence
  Description of Artificial Sequence: Synthetic oligonucleotide
uacaaauuagaagcaugca

SEQ ID NO: 1570318 - RNA, 19 nt, Artificial Sequence
  Description of Artificial Sequence: Synthetic oligonucleotide
cuuaguguuugaaaguaaa

SEQ ID NO: 1570319 - RNA, 19 nt, Artificial Sequence
  Description of Artificial Sequence: Synthetic oligonucleotide
aaagcuuucggcggcccag

SEQ ID NO: 1570320 - RNA, 19 nt, Artificial Sequence
  Description of Artificial Sequence: Synthetic oligonucleotide
agucaaaaugcuauuuaug

SEQ ID NO: 1570321 - RNA, 19 nt, Artificial Sequence
  Description of Artificial Sequence: Synthetic oligonucleotide
augaugaauaccacaaaga

SEQ ID NO: 1570322 - RNA, 19 nt, Artificial Sequence
  Description of Artificial Sequence: Synthetic oligonucleotide
uacacggcaaucuccggca

SEQ ID NO: 1570323 - RNA, 19 nt, Artificial Sequence
  Description of Artificial Sequence: Synthetic oligonucleotide
aaggcuaacaauggcacuu

SEQ ID NO: 1570324 - RNA, 19 nt, Artificial Sequence
  Description of Artificial Sequence: Synthetic oligonucleotide
ugcuccauauaccagcauu

SEQ ID NO: 1570325 - RNA, 19 nt, Artificial Sequence
  Description of Artificial Sequence: Synthetic oligonucleotide
aaauauggagaaaacccuu

SEQ ID NO: 1570326 - RNA, 19 nt, Artificial Sequence
  Description of Artificial Sequence: Synthetic oligonucleotide
uucacagagcuggaaacug

SEQ ID NO: 1570327 - RNA, 19 nt, Artificial Sequence
  Description of Artificial Sequence: Synthetic oligonucleotide
ggcaaaacauacuguggcg

SEQ ID NO: 1570328 - RNA, 19 nt, Artificial Sequence
  Description of Artificial Sequence: Synthetic oligonucleotide
ucucuaaaaugugauacuu

SEQ ID NO: 1570329 - RNA, 19 nt, Artificial Sequence
  Description of Artificial Sequence: Synthetic oligonucleotide
uguucuugcuuaaccuaga

SEQ ID NO: 1570330 - RNA, 19 nt, Artificial Sequence
  Description of Artificial Sequence: Synthetic oligonucleotide
cauauaccagcauugagcu

SEQ ID NO: 1570331 - RNA, 19 nt, Artificial Sequence
  Description of Artificial Sequence: Synthetic oligonucleotide
uccggcacguuucuguugu

SEQ ID NO: 1570332 - RNA, 19 nt, Artificial Sequence
  Description of Artificial Sequence: Synthetic oligonucleotide
aagucucuaaaaugugaua

SEQ ID NO: 1570333 - RNA, 19 nt, Artificial Sequence
  Description of Artificial Sequence: Synthetic oligonucleotide
gacucugcgacgcugucca

SEQ ID NO: 1570334 - RNA, 19 nt, Artificial Sequence
  Description of Artificial Sequence: Synthetic oligonucleotide
guaacugauccagauacuc

SEQ ID NO: 1570335 - RNA, 19 nt, Artificial Sequence
  Description of Artificial Sequence: Synthetic oligonucleotide
gaaacuauccagggcacca

SEQ ID NO: 1570336 - RNA, 19 nt, Artificial Sequence
  Description of Artificial Sequence: Synthetic oligonucleotide
uguauucacucuccugaaa

SEQ ID NO: 1570337 - RNA, 19 nt, Artificial Sequence
  Description of Artificial Sequence: Synthetic oligonucleotide
agugcacuuuagaucaaac

SEQ ID NO: 1570338 - RNA, 19 nt, Artificial Sequence
  Description of Artificial Sequence: Synthetic oligonucleotide
ggggaaaucagguaacuga

SEQ ID NO: 1570339 - RNA, 19 nt, Artificial Sequence
  Description of Artificial Sequence: Synthetic oligonucleotide
ucccugacaaaagcuuucg

SEQ ID NO: 1570340 - RNA, 19 nt, Artificial Sequence
  Description of Artificial Sequence: Synthetic oligonucleotide
caccgggugcuguagaacc

SEQ ID NO: 1570341 - RNA, 19 nt, Artificial Sequence
  Description of Artificial Sequence: Synthetic oligonucleotide
acuuuagaucaaacaaguc

SEQ ID NO: 1570342 - RNA, 19 nt, Artificial Sequence
  Description of Artificial Sequence: Synthetic oligonucleotide
aaaagcuuucggcggccca

SEQ ID NO: 1570343 - RNA, 19 nt, Artificial Sequence
  Description of Artificial Sequence: Synthetic oligonucleotide
gcaaaacauacuguggcgg

SEQ ID NO: 1570344 - RNA, 19 nt, Artificial Sequence
  Description of Artificial Sequence: Synthetic oligonucleotide
aagcaucuuaucacaaaga

SEQ ID NO: 1570345 - RNA, 19 nt, Artificial Sequence
  Description of Artificial Sequence: Synthetic oligonucleotide
uccuuaguguuugaaagua

SEQ ID NO: 1570346 - RNA, 19 nt, Artificial Sequence
  Description of Artificial Sequence: Synthetic oligonucleotide
agccaaacgacgcgucuuc

SEQ ID NO: 1570347 - RNA, 19 nt, Artificial Sequence
  Description of Artificial Sequence: Synthetic oligonucleotide
accugauaagaaauugcuc

SEQ ID NO: 1570348 - RNA, 19 nt, Artificial Sequence
  Description of Artificial Sequence: Synthetic oligonucleotide
uccacggacaagucaaaau

SEQ ID NO: 1570349 - RNA, 19 nt, Artificial Sequence
  Description of Artificial Sequence: Synthetic oligonucleotide
aggguacacggcaaucucc

SEQ ID NO: 1570350 - RNA, 19 nt, Artificial Sequence
  Description of Artificial Sequence: Synthetic oligonucleotide
caauugauuagguaagccu

SEQ ID NO: 1570351 - RNA, 19 nt, Artificial Sequence
  Description of Artificial Sequence: Synthetic oligonucleotide
gacaagaagcugguauaag

SEQ ID NO: 1570352 - RNA, 19 nt, Artificial Sequence
  Description of Artificial Sequence: Synthetic oligonucleotide
uggaugagucaccuccaca

SEQ ID NO: 1570353 - RNA, 19 nt, Artificial Sequence
  Description of Artificial Sequence: Synthetic oligonucleotide
gaucuuauagccaacucau

SEQ ID NO: 1570354 - RNA, 19 nt, Artificial Sequence
  Description of Artificial Sequence: Synthetic oligonucleotide
cauagguuggcaaaacaua

SEQ ID NO: 1570355 - RNA, 19 nt, Artificial Sequence
  Description of Artificial Sequence: Synthetic oligonucleotide
aaccggucgcugcggcucc

SEQ ID NO: 1570356 - RNA, 19 nt, Artificial Sequence
  Description of Artificial Sequence: Synthetic oligonucleotide
gcacuuuagaucaaacaag

SEQ ID NO: 1570357 - RNA, 19 nt, Artificial Sequence
  Description of Artificial Sequence: Synthetic oligonucleotide
ugcguugcagcuuucugua

SEQ ID NO: 1570358 - RNA, 19 nt, Artificial Sequence
  Description of Artificial Sequence: Synthetic oligonucleotide
uauagccaacucauucauc

SEQ ID NO: 1570359 - RNA, 19 nt, Artificial Sequence
  Description of Artificial Sequence: Synthetic oligonucleotide
cacaauugauuagguaagc

SEQ ID NO: 1570360 - RNA, 19 nt, Artificial Sequence
  Description of Artificial Sequence: Synthetic oligonucleotide
aauuaccaaugacuucaua

SEQ ID NO: 1570361 - RNA, 19 nt, Artificial Sequence
  Description of Artificial Sequence: Synthetic oligonucleotide
cacuuuagaucaaacaagu

SEQ ID NO: 1570362 - RNA, 19 nt, Artificial Sequence
  Description of Artificial Sequence: Synthetic oligonucleotide
gugcacuuuagaucaaaca

SEQ ID NO: 1570363 - RNA, 19 nt, Artificial Sequence
  Description of Artificial Sequence: Synthetic oligonucleotide
uguaccagguccccaggau

SEQ ID NO: 1570364 - RNA, 19 nt, Artificial Sequence
  Description of Artificial Sequence: Synthetic oligonucleotide
acuauccagggcaccaaac

SEQ ID NO: 1570365 - RNA, 19 nt, Artificial Sequence
  Description of Artificial Sequence: Synthetic oligonucleotide
ucacucuccugaaacuauc

SEQ ID NO: 1570366 - RNA, 19 nt, Artificial Sequence
  Description of Artificial Sequence: Synthetic oligonucleotide
aucuccggcacguuucugu

SEQ ID NO: 1570367 - RNA, 19 nt, Artificial Sequence
  Description of Artificial Sequence: Synthetic oligonucleotide
ugaaacuauccagggcacc

SEQ ID NO: 1570368 - RNA, 19 nt, Artificial Sequence
  Description of Artificial Sequence: Synthetic oligonucleotide
cuucaccgccaucucauag

SEQ ID NO: 1570369 - RNA, 19 nt, Artificial Sequence
  Description of Artificial Sequence: Synthetic oligonucleotide
aagcuuucggcggcccagc

SEQ ID NO: 1570370 - RNA, 19 nt, Artificial Sequence
  Description of Artificial Sequence: Synthetic oligonucleotide
acucuccugaaacuaucca

SEQ ID NO: 1570371 - RNA, 19 nt, Artificial Sequence
  Description of Artificial Sequence: Synthetic oligonucleotide
aucgggaaccucgcgggcc

SEQ ID NO: 1570372 - RNA, 19 nt, Artificial Sequence
  Description of Artificial Sequence: Synthetic oligonucleotide
ugcggcuccgcuugaaagu

SEQ ID NO: 1570373 - RNA, 19 nt, Artificial Sequence
  Description of Artificial Sequence: Synthetic oligonucleotide
uuggaugagucaccuccac

SEQ ID NO: 1570374 - RNA, 19 nt, Artificial Sequence
  Description of Artificial Sequence: Synthetic oligonucleotide
aucugaaauacaaaccauu

SEQ ID NO: 1570375 - RNA, 19 nt, Artificial Sequence
  Description of Artificial Sequence: Synthetic oligonucleotide
aaccuagauugucuucaaa

SEQ ID NO: 1570376 - RNA, 19 nt, Artificial Sequence
  Description of Artificial Sequence: Synthetic oligonucleotide
gguauaagguuuauugaca

SEQ ID NO: 1570377 - RNA, 19 nt, Artificial Sequence
  Description of Artificial Sequence: Synthetic oligonucleotide
ccacggacaagucaaaaug

SEQ ID NO: 1570378 - RNA, 19 nt, Artificial Sequence
  Description of Artificial Sequence: Synthetic oligonucleotide
ucgggcaucuucaccgcca

SEQ ID NO: 1570379 - RNA, 19 nt, Artificial Sequence
  Description of Artificial Sequence: Synthetic oligonucleotide
accaaugacuucauacuga

SEQ ID NO: 1570380 - RNA, 19 nt, Artificial Sequence
  Description of Artificial Sequence: Synthetic oligonucleotide
uugcuuaaccuagauuguc

SEQ ID NO: 1570381 - RNA, 19 nt, Artificial Sequence
  Description of Artificial Sequence: Synthetic oligonucleotide
gucauggacaccaucggga

SEQ ID NO: 1570382 - RNA, 19 nt, Artificial Sequence
  Description of Artificial Sequence: Synthetic oligonucleotide
agcuuucuguaaauaaaca

SEQ ID NO: 1570383 - RNA, 19 nt, Artificial Sequence
  Description of Artificial Sequence: Synthetic oligonucleotide
aaagccgguagcagaagaa

SEQ ID NO: 1570384 - RNA, 19 nt, Artificial Sequence
  Description of Artificial Sequence: Synthetic oligonucleotide
guaugugagagagcugaug

SEQ ID NO: 1570385 - RNA, 19 nt, Artificial Sequence
  Description of Artificial Sequence: Synthetic oligonucleotide
uuucgggcaucuucaccgc

SEQ ID NO: 1570386 - RNA, 19 nt, Artificial Sequence
  Description of Artificial Sequence: Synthetic oligonucleotide
uuguaggggaaaucaggua

SEQ ID NO: 1570387 - RNA, 19 nt, Artificial Sequence
  Description of Artificial Sequence: Synthetic oligonucleotide
auauaccagcauugagcug

SEQ ID NO: 1570388 - RNA, 19 nt, Artificial Sequence
  Description of Artificial Sequence: Synthetic oligonucleotide
ucguucucgcccagguccc

SEQ ID NO: 1570389 - RNA, 19 nt, Artificial Sequence
  Description of Artificial Sequence: Synthetic oligonucleotide
gguuuauugacaaggcaga

SEQ ID NO: 1570390 - RNA, 19 nt, Artificial Sequence
  Description of Artificial Sequence: Synthetic oligonucleotide
auguacaaauuagaagcau

SEQ ID NO: 1570391 - RNA, 19 nt, Artificial Sequence
  Description of Artificial Sequence: Synthetic oligonucleotide
ggaugaucgucccggugcg

SEQ ID NO: 1570392 - RNA, 19 nt, Artificial Sequence
  Description of Artificial Sequence: Synthetic oligonucleotide
gucgcugcggcuccgcuug

SEQ ID NO: 1570393 - RNA, 19 nt, Artificial Sequence
  Description of Artificial Sequence: Synthetic oligonucleotide
uagaaccggucgcugcggc

SEQ ID NO: 1570394 - RNA, 19 nt, Artificial Sequence
  Description of Artificial Sequence: Synthetic oligonucleotide
cugcggcuccgcuugaaag

SEQ ID NO: 1570395 - RNA, 19 nt, Artificial Sequence
  Description of Artificial Sequence: Synthetic oligonucleotide
agccaacucauucauccua

SEQ ID NO: 1570396 - RNA, 19 nt, Artificial Sequence
  Description of Artificial Sequence: Synthetic oligonucleotide
gcagauaaggaggcggagg

SEQ ID NO: 1570397 - RNA, 19 nt, Artificial Sequence
  Description of Artificial Sequence: Synthetic oligonucleotide
gcaaguaugugagagagcu

SEQ ID NO: 1570398 - RNA, 19 nt, Artificial Sequence
  Description of Artificial Sequence: Synthetic oligonucleotide
cucccuaccccucaguuaa

SEQ ID NO: 1570399 - RNA, 19 nt, Artificial Sequence
  Description of Artificial Sequence: Synthetic oligonucleotide
auugcuccauauaccagca

SEQ ID NO: 1570400 - RNA, 19 nt, Artificial Sequence
  Description of Artificial Sequence: Synthetic oligonucleotide
acaccaucgggaaccucgc

SEQ ID NO: 1570401 - RNA, 19 nt, Artificial Sequence
  Description of Artificial Sequence: Synthetic oligonucleotide
ggguacacggcaaucuccg

SEQ ID NO: 1570402 - RNA, 19 nt, Artificial Sequence
  Description of Artificial Sequence: Synthetic oligonucleotide
uggcaacagccgcagcacc

SEQ ID NO: 1570403 - RNA, 19 nt, Artificial Sequence
  Description of Artificial Sequence: Synthetic oligonucleotide
acggacaagucaaaaugcu

SEQ ID NO: 1570404 - RNA, 19 nt, Artificial Sequence
  Description of Artificial Sequence: Synthetic oligonucleotide
agacaagaagcugguauaa

SEQ ID NO: 1570405 - RNA, 19 nt, Artificial Sequence
  Description of Artificial Sequence: Synthetic oligonucleotide
caaguaugugagagagcug

SEQ ID NO: 1570406 - RNA, 19 nt, Artificial Sequence
  Description of Artificial Sequence: Synthetic oligonucleotide
uucgggcaucuucaccgcc

SEQ ID NO: 1570407 - RNA, 19 nt, Artificial Sequence
  Description of Artificial Sequence: Synthetic oligonucleotide
ugcuguagaaccggucgcu

SEQ ID NO: 1570408 - RNA, 19 nt, Artificial Sequence
  Description of Artificial Sequence: Synthetic oligonucleotide
agauacucuuugauucuug

SEQ ID NO: 1570409 - RNA, 19 nt, Artificial Sequence
  Description of Artificial Sequence: Synthetic oligonucleotide
ugauggccaccagacaacu

SEQ ID NO: 1570410 - RNA, 19 nt, Artificial Sequence
  Description of Artificial Sequence: Synthetic oligonucleotide
gugcuguagaaccggucgc

SEQ ID NO: 1570411 - RNA, 19 nt, Artificial Sequence
  Description of Artificial Sequence: Synthetic oligonucleotide
gcaucuuaucacaaagaug

SEQ ID NO: 1570412 - RNA, 19 nt, Artificial Sequence
  Description of Artificial Sequence: Synthetic oligonucleotide
uaggggaaaucagguaacu

SEQ ID NO: 1570413 - RNA, 19 nt, Artificial Sequence
  Description of Artificial Sequence: Synthetic oligonucleotide
aggggaaaucagguaacug

SEQ ID NO: 1570414 - RNA, 19 nt, Artificial Sequence
  Description of Artificial Sequence: Synthetic oligonucleotide
aaacuauccagggcaccaa

SEQ ID NO: 1570415 - RNA, 19 nt, Artificial Sequence
  Description of Artificial Sequence: Synthetic oligonucleotide
auugauuagguaagccuua

SEQ ID NO: 1570416 - RNA, 19 nt, Artificial Sequence
  Description of Artificial Sequence: Synthetic oligonucleotide
gaacggaaucagccagccc

SEQ ID NO: 1570417 - RNA, 19 nt, Artificial Sequence
  Description of Artificial Sequence: Synthetic oligonucleotide
ucaauagguugaccaccau

SEQ ID NO: 1570418 - RNA, 19 nt, Artificial Sequence
  Description of Artificial Sequence: Synthetic oligonucleotide
cagcgguuggacccagacg

SEQ ID NO: 1570419 - RNA, 19 nt, Artificial Sequence
  Description of Artificial Sequence: Synthetic oligonucleotide
ucgggaaccucgcgggccu

SEQ ID NO: 1570420 - RNA, 19 nt, Artificial Sequence
  Description of Artificial Sequence: Synthetic oligonucleotide
agguuuauuaaagcaucuu

SEQ ID NO: 1570421 - RNA, 19 nt, Artificial Sequence
  Description of Artificial Sequence: Synthetic oligonucleotide
guagaaccggucgcugcgg

SEQ ID NO: 1570422 - RNA, 19 nt, Artificial Sequence
  Description of Artificial Sequence: Synthetic oligonucleotide
gacccagacgacucugcga

SEQ ID NO: 1570423 - RNA, 19 nt, Artificial Sequence
  Description of Artificial Sequence: Synthetic oligonucleotide
aagccaaacgacgcgucuu

SEQ ID NO: 1570424 - RNA, 19 nt, Artificial Sequence
  Description of Artificial Sequence: Synthetic oligonucleotide
agcuuucggcggcccagcg

SEQ ID NO: 1570425 - RNA, 19 nt, Artificial Sequence
  Description of Artificial Sequence: Synthetic oligonucleotide
acggcaaucuccggcacgu

SEQ ID NO: 1570426 - RNA, 19 nt, Artificial Sequence
  Description of Artificial Sequence: Synthetic oligonucleotide
gaugaucgucccggugcgg

SEQ ID NO: 1570427 - RNA, 19 nt, Artificial Sequence
  Description of Artificial Sequence: Synthetic oligonucleotide
augaucgucccggugcgga

SEQ ID NO: 1570428 - RNA, 19 nt, Artificial Sequence
  Description of Artificial Sequence: Synthetic oligonucleotide
ggcacguuucuguuguuga

SEQ ID NO: 1570429 - RNA, 19 nt, Artificial Sequence
  Description of Artificial Sequence: Synthetic oligonucleotide
gcggacauggcaacagccg

SEQ ID NO: 1570430 - RNA, 19 nt, Artificial Sequence
  Description of Artificial Sequence: Synthetic oligonucleotide
ugaucgucccggugcggac

SEQ ID NO: 1570431 - RNA, 19 nt, Artificial Sequence
  Description of Artificial Sequence: Synthetic oligonucleotide
aagcuccuuaguguuugaa

SEQ ID NO: 1570432 - RNA, 19 nt, Artificial Sequence
  Description of Artificial Sequence: Synthetic oligonucleotide
gaaccggucgcugcggcuc

SEQ ID NO: 1570433 - RNA, 19 nt, Artificial Sequence
  Description of Artificial Sequence: Synthetic oligonucleotide
gacgcgucuucugucccgc

SEQ ID NO: 1570434 - RNA, 19 nt, Artificial Sequence
  Description of Artificial Sequence: Synthetic oligonucleotide
ggaguuuggaugagucacc

SEQ ID NO: 1570435 - RNA, 19 nt, Artificial Sequence
  Description of Artificial Sequence: Synthetic oligonucleotide
caaacgacgcgucuucugu

SEQ ID NO: 1570436 - RNA, 19 nt, Artificial Sequence
  Description of Artificial Sequence: Synthetic oligonucleotide
ucuccggcacguuucuguu

SEQ ID NO: 1570437 - RNA, 19 nt, Artificial Sequence
  Description of Artificial Sequence: Synthetic oligonucleotide
agaaccggucgcugcggcu

SEQ ID NO: 1570438 - RNA, 19 nt, Artificial Sequence
  Description of Artificial Sequence: Synthetic oligonucleotide
cuguauucacucuccugaa

SEQ ID NO: 1570439 - RNA, 19 nt, Artificial Sequence
  Description of Artificial Sequence: Synthetic oligonucleotide
ccaccauguaccagguccc

SEQ ID NO: 1570440 - RNA, 19 nt, Artificial Sequence
  Description of Artificial Sequence: Synthetic oligonucleotide
agcaccgggugcuguagaa

SEQ ID NO: 1570441 - RNA, 19 nt, Artificial Sequence
  Description of Artificial Sequence: Synthetic oligonucleotide
aaggcaggguacacggcaa

SEQ ID NO: 1570442 - RNA, 19 nt, Artificial Sequence
  Description of Artificial Sequence: Synthetic oligonucleotide
ggacaagucaaaaugcuau

SEQ ID NO: 1570443 - RNA, 19 nt, Artificial Sequence
  Description of Artificial Sequence: Synthetic oligonucleotide
cauucauccuaaacacugu

SEQ ID NO: 1570444 - RNA, 19 nt, Artificial Sequence
  Description of Artificial Sequence: Synthetic oligonucleotide
gaagcuccuuaguguuuga

SEQ ID NO: 1570445 - RNA, 19 nt, Artificial Sequence
  Description of Artificial Sequence: Synthetic oligonucleotide
gucugagggcccugcguug

SEQ ID NO: 1570446 - RNA, 19 nt, Artificial Sequence
  Description of Artificial Sequence: Synthetic oligonucleotide
gaguuuggaugagucaccu

SEQ ID NO: 1570447 - RNA, 19 nt, Artificial Sequence
  Description of Artificial Sequence: Synthetic oligonucleotide
agacgacucugcgacgcug

SEQ ID NO: 1570448 - RNA, 19 nt, Artificial Sequence
  Description of Artificial Sequence: Synthetic oligonucleotide
gcagaagaacggaaucagc

SEQ ID NO: 1570449 - RNA, 19 nt, Artificial Sequence
  Description of Artificial Sequence: Synthetic oligonucleotide
acgcgucuucugucccgcc

SEQ ID NO: 1570450 - RNA, 19 nt, Artificial Sequence
  Description of Artificial Sequence: Synthetic oligonucleotide
cugcguugcagcuuucugu

SEQ ID NO: 1570451 - RNA, 19 nt, Artificial Sequence
  Description of Artificial Sequence: Synthetic oligonucleotide
uugcuccauauaccagcau

SEQ ID NO: 1570452 - RNA, 19 nt, Artificial Sequence
  Description of Artificial Sequence: Synthetic oligonucleotide
caccaucgggaaccucgcg

SEQ ID NO: 1570453 - RNA, 19 nt, Artificial Sequence
  Description of Artificial Sequence: Synthetic oligonucleotide
accucgcgggccucguucu

SEQ ID NO: 1570454 - RNA, 19 nt, Artificial Sequence
  Description of Artificial Sequence: Synthetic oligonucleotide
ccagacgacucugcgacgc

SEQ ID NO: 1570455 - RNA, 19 nt, Artificial Sequence
  Description of Artificial Sequence: Synthetic oligonucleotide
uucggcggcccagcgguug

SEQ ID NO: 1570456 - RNA, 19 nt, Artificial Sequence
  Description of Artificial Sequence: Synthetic oligonucleotide
cuccggcacguuucuguug

SEQ ID NO: 1570457 - RNA, 19 nt, Artificial Sequence
  Description of Artificial Sequence: Synthetic oligonucleotide
caccauguaccaggucccc

SEQ ID NO: 1570458 - RNA, 19 nt, Artificial Sequence
  Description of Artificial Sequence: Synthetic oligonucleotide
accauguaccaggucccca

SEQ ID NO: 1570459 - RNA, 19 nt, Artificial Sequence
  Description of Artificial Sequence: Synthetic oligonucleotide
gaucgucccggugcggaca

SEQ ID NO: 1570460 - RNA, 19 nt, Artificial Sequence
  Description of Artificial Sequence: Synthetic oligonucleotide
ccaaacgacgcgucuucug

SEQ ID NO: 1570461 - RNA, 19 nt, Artificial Sequence
  Description of Artificial Sequence: Synthetic oligonucleotide
aguaugugagagagcugau

SEQ ID NO: 1570462 - RNA, 19 nt, Artificial Sequence
  Description of Artificial Sequence: Synthetic oligonucleotide
gguuggacccagacgacuc

SEQ ID NO: 1570463 - RNA, 19 nt, Artificial Sequence
  Description of Artificial Sequence: Synthetic oligonucleotide
ggcggcgcuucaaaggcag

SEQ ID NO: 1570464 - RNA, 19 nt, Artificial Sequence
  Description of Artificial Sequence: Synthetic oligonucleotide
guuuauugacaaggcagau

SEQ ID NO: 1570465 - RNA, 19 nt, Artificial Sequence
  Description of Artificial Sequence: Synthetic oligonucleotide
aucgucccggugcggacau

SEQ ID NO: 1570466 - RNA, 19 nt, Artificial Sequence
  Description of Artificial Sequence: Synthetic oligonucleotide
auacuguggcggcgcuuca

SEQ ID NO: 1570467 - RNA, 19 nt, Artificial Sequence
  Description of Artificial Sequence: Synthetic oligonucleotide
gcaugcaaccauccucuuc

SEQ ID NO: 1570468 - RNA, 19 nt, Artificial Sequence
  Description of Artificial Sequence: Synthetic oligonucleotide
agcugguauaagguuuauu

SEQ ID NO: 1570469 - RNA, 19 nt, Artificial Sequence
  Description of Artificial Sequence: Synthetic oligonucleotide
ggcaaguaugugagagagc

SEQ ID NO: 1570470 - RNA, 19 nt, Artificial Sequence
  Description of Artificial Sequence: Synthetic oligonucleotide
uacuguggcggcgcuucaa

SEQ ID NO: 1570471 - RNA, 19 nt, Artificial Sequence
  Description of Artificial Sequence: Synthetic oligonucleotide
ccagcgguuggacccagac

SEQ ID NO: 1570472 - RNA, 19 nt, Artificial Sequence
  Description of Artificial Sequence: Synthetic oligonucleotide
guuggacccagacgacucu

SEQ ID NO: 1570473 - RNA, 19 nt, Artificial Sequence
  Description of Artificial Sequence: Synthetic oligonucleotide
ccgccaucucauagguugg

SEQ ID NO: 1570474 - RNA, 19 nt, Artificial Sequence
  Description of Artificial Sequence: Synthetic oligonucleotide
agcaugcaaccauccucuu

SEQ ID NO: 1570475 - RNA, 19 nt, Artificial Sequence
  Description of Artificial Sequence: Synthetic oligonucleotide
cgcuguccaaagccaaacg

SEQ ID NO: 1570476 - RNA, 19 nt, Artificial Sequence
  Description of Artificial Sequence: Synthetic oligonucleotide
ccuuaguguuugaaaguaa

SEQ ID NO: 1570477 - RNA, 19 nt, Artificial Sequence
  Description of Artificial Sequence: Synthetic oligonucleotide
agguccccaggaugaucgu

SEQ ID NO: 1570478 - RNA, 19 nt, Artificial Sequence
  Description of Artificial Sequence: Synthetic oligonucleotide
gacgacucugcgacgcugu

SEQ ID NO: 1570479 - RNA, 19 nt, Artificial Sequence
  Description of Artificial Sequence: Synthetic oligonucleotide
gcuuaaccuagauugucuu

SEQ ID NO: 1570480 - RNA, 19 nt, Artificial Sequence
  Description of Artificial Sequence: Synthetic oligonucleotide
gcgggccucguucucgccc

SEQ ID NO: 1570481 - RNA, 19 nt, Artificial Sequence
  Description of Artificial Sequence: Synthetic oligonucleotide
gccaacucauucauccuaa

SEQ ID NO: 1570482 - RNA, 19 nt, Artificial Sequence
  Description of Artificial Sequence: Synthetic oligonucleotide
ggcauggaguuuggaugag

SEQ ID NO: 1570483 - RNA, 19 nt, Artificial Sequence
  Description of Artificial Sequence: Synthetic oligonucleotide
cccugccaacuccugugcg

SEQ ID NO: 1570484 - RNA, 19 nt, Artificial Sequence
  Description of Artificial Sequence: Synthetic oligonucleotide
cucugcgacgcuguccaaa

SEQ ID NO: 1570485 - RNA, 19 nt, Artificial Sequence
  Description of Artificial Sequence: Synthetic oligonucleotide
caaucuccggcacguuucu

SEQ ID NO: 1570486 - RNA, 19 nt, Artificial Sequence
  Description of Artificial Sequence: Synthetic oligonucleotide
ccagauacucuuugauucu

SEQ ID NO: 1570487 - RNA, 19 nt, Artificial Sequence
  Description of Artificial Sequence: Synthetic oligonucleotide
ccgggucccugccaacucc

SEQ ID NO: 1570488 - RNA, 19 nt, Artificial Sequence
  Description of Artificial Sequence: Synthetic oligonucleotide
auaccagcauugagcugau

SEQ ID NO: 1570489 - RNA, 19 nt, Artificial Sequence
  Description of Artificial Sequence: Synthetic oligonucleotide
cgucccggugcggacaugg

SEQ ID NO: 1570490 - RNA, 19 nt, Artificial Sequence
  Description of Artificial Sequence: Synthetic oligonucleotide
uuucggcggcccagcgguu

SEQ ID NO: 1570491 - RNA, 19 nt, Artificial Sequence
  Description of Artificial Sequence: Synthetic oligonucleotide
gcgacgcuguccaaagcca

SEQ ID NO: 1570492 - RNA, 19 nt, Artificial Sequence
  Description of Artificial Sequence: Synthetic oligonucleotide
cggcgcuucaaaggcaggg

SEQ ID NO: 1570493 - RNA, 19 nt, Artificial Sequence
  Description of Artificial Sequence: Synthetic oligonucleotide
ccagaagcuccuuaguguu

SEQ ID NO: 1570494 - RNA, 19 nt, Artificial Sequence
  Description of Artificial Sequence: Synthetic oligonucleotide
cguugcagcuuucuguaaa

SEQ ID NO: 1570495 - RNA, 19 nt, Artificial Sequence
  Description of Artificial Sequence: Synthetic oligonucleotide
cgacgcgucuucugucccg

SEQ ID NO: 1570496 - RNA, 19 nt, Artificial Sequence
  Description of Artificial Sequence: Synthetic oligonucleotide
gguccccaggaugaucguc

SEQ ID NO: 1570497 - RNA, 19 nt, Artificial Sequence
  Description of Artificial Sequence: Synthetic oligonucleotide
ucgcugcggcuccgcuuga

SEQ ID NO: 1570498 - RNA, 19 nt, Artificial Sequence
  Description of Artificial Sequence: Synthetic oligonucleotide
cgcgucuucugucccgccc

SEQ ID NO: 1570499 - RNA, 19 nt, Artificial Sequence
  Description of Artificial Sequence: Synthetic oligonucleotide
gucccggugcggacauggc

SEQ ID NO: 1570500 - RNA, 19 nt, Artificial Sequence
  Description of Artificial Sequence: Synthetic oligonucleotide
acucugcgacgcuguccaa

SEQ ID NO: 1570501 - RNA, 19 nt, Artificial Sequence
  Description of Artificial Sequence: Synthetic oligonucleotide
cagauacucuuugauucuu

SEQ ID NO: 1570502 - RNA, 19 nt, Artificial Sequence
  Description of Artificial Sequence: Synthetic oligonucleotide
gcaccgggugcuguagaac

SEQ ID NO: 1570503 - RNA, 19 nt, Artificial Sequence
  Description of Artificial Sequence: Synthetic oligonucleotide
ccggugcggacauggcaac

SEQ ID NO: 1570504 - RNA, 19 nt, Artificial Sequence
  Description of Artificial Sequence: Synthetic oligonucleotide
gcacguuucuguuguugau

SEQ ID NO: 1570505 - RNA, 19 nt, Artificial Sequence
  Description of Artificial Sequence: Synthetic oligonucleotide
ccagcccaccugauaagaa

SEQ ID NO: 1570506 - RNA, 19 nt, Artificial Sequence
  Description of Artificial Sequence: Synthetic oligonucleotide
ccgguagcagaagaacgga

SEQ ID NO: 1570507 - RNA, 19 nt, Artificial Sequence
  Description of Artificial Sequence: Synthetic oligonucleotide
ccaaagccaaacgacgcgu

SEQ ID NO: 1570508 - RNA, 19 nt, Artificial Sequence
  Description of Artificial Sequence: Synthetic oligonucleotide
ggcgcuucaaaggcagggu

SEQ ID NO: 1570509 - RNA, 19 nt, Artificial Sequence
  Description of Artificial Sequence: Synthetic oligonucleotide
gccucguucucgcccaggu

SEQ ID NO: 1570510 - RNA, 19 nt, Artificial Sequence
  Description of Artificial Sequence: Synthetic oligonucleotide
gcggcgcuucaaaggcagg

SEQ ID NO: 1570511 - RNA, 19 nt, Artificial Sequence
  Description of Artificial Sequence: Synthetic oligonucleotide
gcuccgcuugaaagucaug

SEQ ID NO: 1570512 - RNA, 19 nt, Artificial Sequence
  Description of Artificial Sequence: Synthetic oligonucleotide
ucgucccggugcggacaug

SEQ ID NO: 1570513 - RNA, 19 nt, Artificial Sequence
  Description of Artificial Sequence: Synthetic oligonucleotide
ccucccuaccccucaguua

SEQ ID NO: 1570514 - RNA, 19 nt, Artificial Sequence
  Description of Artificial Sequence: Synthetic oligonucleotide
gcguugcagcuuucuguaa

SEQ ID NO: 1570515 - RNA, 19 nt, Artificial Sequence
  Description of Artificial Sequence: Synthetic oligonucleotide
cagacgacucugcgacgcu

SEQ ID NO: 1570516 - RNA, 19 nt, Artificial Sequence
  Description of Artificial Sequence: Synthetic oligonucleotide
ggcccugcguugcagcuuu

SEQ ID NO: 1570517 - RNA, 19 nt, Artificial Sequence
  Description of Artificial Sequence: Synthetic oligonucleotide
cccgggucccugccaacuc

SEQ ID NO: 1570518 - RNA, 19 nt, Artificial Sequence
  Description of Artificial Sequence: Synthetic oligonucleotide
ggcuccgcuugaaagucau

SEQ ID NO: 1570519 - RNA, 19 nt, Artificial Sequence
  Description of Artificial Sequence: Synthetic oligonucleotide
gaaccucgcgggccucguu

SEQ ID NO: 1570520 - RNA, 19 nt, Artificial Sequence
  Description of Artificial Sequence: Synthetic oligonucleotide
cgacgcuguccaaagccaa

SEQ ID NO: 1570521 - RNA, 19 nt, Artificial Sequence
  Description of Artificial Sequence: Synthetic oligonucleotide
cggaaucagccagcccacc

SEQ ID NO: 1570522 - RNA, 19 nt, Artificial Sequence
  Description of Artificial Sequence: Synthetic oligonucleotide
gccaaacgacgcgucuucu

SEQ ID NO: 1570523 - RNA, 19 nt, Artificial Sequence
  Description of Artificial Sequence: Synthetic oligonucleotide
ccaggaugaucgucccggu

SEQ ID NO: 1570524 - RNA, 19 nt, Artificial Sequence
  Description of Artificial Sequence: Synthetic oligonucleotide
caccgccaucucauagguu

SEQ ID NO: 1570525 - RNA, 19 nt, Artificial Sequence
  Description of Artificial Sequence: Synthetic oligonucleotide
cgcgggccucguucucgcc

SEQ ID NO: 1570526 - RNA, 19 nt, Artificial Sequence
  Description of Artificial Sequence: Synthetic oligonucleotide
gcccgggucccugccaacu

SEQ ID NO: 1570527 - RNA, 19 nt, Artificial Sequence
  Description of Artificial Sequence: Synthetic oligonucleotide
cgggucccugccaacuccu

SEQ ID NO: 1570528 - RNA, 19 nt, Artificial Sequence
  Description of Artificial Sequence: Synthetic oligonucleotide
cccugcguugcagcuuucu

SEQ ID NO: 1570529 - RNA, 19 nt, Artificial Sequence
  Description of Artificial Sequence: Synthetic oligonucleotide
cgguuggacccagacgacu

SEQ ID NO: 1570530 - RNA, 19 nt, Artificial Sequence
  Description of Artificial Sequence: Synthetic oligonucleotide
cgggugcuguagaaccggu

SEQ ID NO: 1570531 - RNA, 19 nt, Artificial Sequence
  Description of Artificial Sequence: Synthetic oligonucleotide
gcccugcguugcagcuuuc

SEQ ID NO: 1570532 - RNA, 19 nt, Artificial Sequence
  Description of Artificial Sequence: Synthetic oligonucleotide
cgggaaccucgcgggccuc

SEQ ID NO: 1570533 - RNA, 19 nt, Artificial Sequence
  Description of Artificial Sequence: Synthetic oligonucleotide
ccggcacguuucuguuguu

SEQ ID NO: 1570534 - RNA, 19 nt, Artificial Sequence
  Description of Artificial Sequence: Synthetic oligonucleotide
ccgcagcaccgggugcugu

SEQ ID NO: 1570535 - RNA, 19 nt, Artificial Sequence
  Description of Artificial Sequence: Synthetic oligonucleotide
uauauaauaggaacaaucc

SEQ ID NO: 1570536 - RNA, 19 nt, Artificial Sequence
  Description of Artificial Sequence: Synthetic oligonucleotide
uuaaauagaaauccauggg

SEQ ID NO: 1570537 - RNA, 19 nt, Artificial Sequence
  Description of Artificial Sequence: Synthetic oligonucleotide
aauagaaauccaugggccc

SEQ ID NO: 1570538 - RNA, 19 nt, Artificial Sequence
  Description of Artificial Sequence: Synthetic oligonucleotide
ucuuuugaaagauacgugg

SEQ ID NO: 1570539 - RNA, 19 nt, Artificial Sequence
  Description of Artificial Sequence: Synthetic oligonucleotide
aaauagaaauccaugggcc

SEQ ID NO: 1570540 - RNA, 19 nt, Artificial Sequence
  Description of Artificial Sequence: Synthetic oligonucleotide
acaauacuccucuagaggc

SEQ ID NO: 1570541 - RNA, 19 nt, Artificial Sequence
  Description of Artificial Sequence: Synthetic oligonucleotide
uaaauagaaauccaugggc

SEQ ID NO: 1570542 - RNA, 19 nt, Artificial Sequence
  Description of Artificial Sequence: Synthetic oligonucleotide
aaggauaucaagcagggga

SEQ ID NO: 1570543 - RNA, 19 nt, Artificial Sequence
  Description of Artificial Sequence: Synthetic oligonucleotide
acuauugauucccagcacc

SEQ ID NO: 1570544 - RNA, 19 nt, Artificial Sequence
  Description of Artificial Sequence: Synthetic oligonucleotide
cuugugacuauccacaggg

SEQ ID NO: 1570545 - RNA, 19 nt, Artificial Sequence
  Description of Artificial Sequence: Synthetic oligonucleotide
aaagacaauacuccucuag

SEQ ID NO: 1570546 - RNA, 19 nt, Artificial Sequence
  Description of Artificial Sequence: Synthetic oligonucleotide
auuacaguguuucucagag

SEQ ID NO: 1570547 - RNA, 19 nt, Artificial Sequence
  Description of Artificial Sequence: Synthetic oligonucleotide
aauaggaacaauccuuucu

SEQ ID NO: 1570548 - RNA, 19 nt, Artificial Sequence
  Description of Artificial Sequence: Synthetic oligonucleotide
cuauauaauaggaacaauc

SEQ ID NO: 1570549 - RNA, 19 nt, Artificial Sequence
  Description of Artificial Sequence: Synthetic oligonucleotide
uauaauaggaacaauccuu

SEQ ID NO: 1570550 - RNA, 19 nt, Artificial Sequence
  Description of Artificial Sequence: Synthetic oligonucleotide
aaagaaagacaauacuccu

SEQ ID NO: 1570551 - RNA, 19 nt, Artificial Sequence
  Description of Artificial Sequence: Synthetic oligonucleotide
ugugacuauccacagggcg

SEQ ID NO: 1570552 - RNA, 19 nt, Artificial Sequence
  Description of Artificial Sequence: Synthetic oligonucleotide
uaaucuuauuguauggggc

SEQ ID NO: 1570553 - RNA, 19 nt, Artificial Sequence
  Description of Artificial Sequence: Synthetic oligonucleotide
aaucuuauuguauggggcu

SEQ ID NO: 1570554 - RNA, 19 nt, Artificial Sequence
  Description of Artificial Sequence: Synthetic oligonucleotide
aaagauacguggcauccag

SEQ ID NO: 1570555 - RNA, 19 nt, Artificial Sequence
  Description of Artificial Sequence: Synthetic oligonucleotide
cuaaucuuauuguaugggg

SEQ ID NO: 1570556 - RNA, 19 nt, Artificial Sequence
  Description of Artificial Sequence: Synthetic oligonucleotide
uuucucagaguaccgacgg

SEQ ID NO: 1570557 - RNA, 19 nt, Artificial Sequence
  Description of Artificial Sequence: Synthetic oligonucleotide
aagcugaugauacauggcu

SEQ ID NO: 1570558 - RNA, 19 nt, Artificial Sequence
  Description of Artificial Sequence: Synthetic oligonucleotide
aguaggacguuguugacag

SEQ ID NO: 1570559 - RNA, 19 nt, Artificial Sequence
  Description of Artificial Sequence: Synthetic oligonucleotide
ugguacucaagccugaugu

SEQ ID NO: 1570560 - RNA, 19 nt, Artificial Sequence
  Description of Artificial Sequence: Synthetic oligonucleotide
uuuaugugguucaagcugu

SEQ ID NO: 1570561 - RNA, 19 nt, Artificial Sequence
  Description of Artificial Sequence: Synthetic oligonucleotide
ugacuaaucuuauuguaug

SEQ ID NO: 1570562 - RNA, 19 nt, Artificial Sequence
  Description of Artificial Sequence: Synthetic oligonucleotide
uuuugaaagauacguggca

SEQ ID NO: 1570563 - RNA, 19 nt, Artificial Sequence
  Description of Artificial Sequence: Synthetic oligonucleotide
auacguggcauccaguggg

SEQ ID NO: 1570564 - RNA, 19 nt, Artificial Sequence
  Description of Artificial Sequence: Synthetic oligonucleotide
aagacaauacuccucuaga

SEQ ID NO: 1570565 - RNA, 19 nt, Artificial Sequence
  Description of Artificial Sequence: Synthetic oligonucleotide
gacuaaucuuauuguaugg

SEQ ID NO: 1570566 - RNA, 19 nt, Artificial Sequence
  Description of Artificial Sequence: Synthetic oligonucleotide
auaggaacaauccuuucug

SEQ ID NO: 1570567 - RNA, 19 nt, Artificial Sequence
  Description of Artificial Sequence: Synthetic oligonucleotide
cauauuucggagaaguuuc

SEQ ID NO: 1570568 - RNA, 19 nt, Artificial Sequence
  Description of Artificial Sequence: Synthetic oligonucleotide
uuucggagaaguuucauaa

SEQ ID NO: 1570569 - RNA, 19 nt, Artificial Sequence
  Description of Artificial Sequence: Synthetic oligonucleotide
aaacuaacuuugccaauag

SEQ ID NO: 1570570 - RNA, 19 nt, Artificial Sequence
  Description of Artificial Sequence: Synthetic oligonucleotide
uccuuuaugugguucaagc

SEQ ID NO: 1570571 - RNA, 19 nt, Artificial Sequence
  Description of Artificial Sequence: Synthetic oligonucleotide
cuuuugaaagauacguggc

SEQ ID NO: 1570572 - RNA, 19 nt, Artificial Sequence
  Description of Artificial Sequence: Synthetic oligonucleotide
uggaguaggacguuguuga

SEQ ID NO: 1570573 - RNA, 19 nt, Artificial Sequence
  Description of Artificial Sequence: Synthetic oligonucleotide
cagguaauaagacuguuug

SEQ ID NO: 1570574 - RNA, 19 nt, Artificial Sequence
  Description of Artificial Sequence: Synthetic oligonucleotide
caaucuuaguuuuagcuuc

SEQ ID NO: 1570575 - RNA, 19 nt, Artificial Sequence
  Description of Artificial Sequence: Synthetic oligonucleotide
auugugacuaucuuucacu

SEQ ID NO: 1570576 - RNA, 19 nt, Artificial Sequence
  Description of Artificial Sequence: Synthetic oligonucleotide
agauugcagaagcacacac

SEQ ID NO: 1570577 - RNA, 19 nt, Artificial Sequence
  Description of Artificial Sequence: Synthetic oligonucleotide
auagccgauaccuguuugc

SEQ ID NO: 1570578 - RNA, 19 nt, Artificial Sequence
  Description of Artificial Sequence: Synthetic oligonucleotide
ugucccuaacuucugaaug

SEQ ID NO: 1570579 - RNA, 19 nt, Artificial Sequence
  Description of Artificial Sequence: Synthetic oligonucleotide
cuuaaagacuucuugguca

SEQ ID NO: 1570580 - RNA, 19 nt, Artificial Sequence
  Description of Artificial Sequence: Synthetic oligonucleotide
agggacguuaaauagaaau

SEQ ID NO: 1570581 - RNA, 19 nt, Artificial Sequence
  Description of Artificial Sequence: Synthetic oligonucleotide
caugcguucaucuuuuaac

SEQ ID NO: 1570582 - RNA, 19 nt, Artificial Sequence
  Description of Artificial Sequence: Synthetic oligonucleotide
auagaaauccaugggcccc

SEQ ID NO: 1570583 - RNA, 19 nt, Artificial Sequence
  Description of Artificial Sequence: Synthetic oligonucleotide
aacagcuggguuuguauug

SEQ ID NO: 1570584 - RNA, 19 nt, Artificial Sequence
  Description of Artificial Sequence: Synthetic oligonucleotide
gacucucacgauuacagug

SEQ ID NO: 1570585 - RNA, 19 nt, Artificial Sequence
  Description of Artificial Sequence: Synthetic oligonucleotide
uuggucaacacccucggga

SEQ ID NO: 1570586 - RNA, 19 nt, Artificial Sequence
  Description of Artificial Sequence: Synthetic oligonucleotide
acuaaucuuauuguauggg

SEQ ID NO: 1570587 - RNA, 19 nt, Artificial Sequence
  Description of Artificial Sequence: Synthetic oligonucleotide
aauaagacuguuuguugau

SEQ ID NO: 1570588 - RNA, 19 nt, Artificial Sequence
  Description of Artificial Sequence: Synthetic oligonucleotide
ugacagggacguuaaauag

SEQ ID NO: 1570589 - RNA, 19 nt, Artificial Sequence
  Description of Artificial Sequence: Synthetic oligonucleotide
guaauaagacuguuuguug

SEQ ID NO: 1570590 - RNA, 19 nt, Artificial Sequence
  Description of Artificial Sequence: Synthetic oligonucleotide
caauaguuuauugggagcc

SEQ ID NO: 1570591 - RNA, 19 nt, Artificial Sequence
  Description of Artificial Sequence: Synthetic oligonucleotide
acacuauugauucccagca

SEQ ID NO: 1570592 - RNA, 19 nt, Artificial Sequence
  Description of Artificial Sequence: Synthetic oligonucleotide
guauuucuggggcuuaagg

SEQ ID NO: 1570593 - RNA, 19 nt, Artificial Sequence
  Description of Artificial Sequence: Synthetic oligonucleotide
uggggcuuaaggaaguagc

SEQ ID NO: 1570594 - RNA, 19 nt, Artificial Sequence
  Description of Artificial Sequence: Synthetic oligonucleotide
ucaaucuuaguuuuagcuu

SEQ ID NO: 1570595 - RNA, 19 nt, Artificial Sequence
  Description of Artificial Sequence: Synthetic oligonucleotide
aaugacgugggaaggaaug

SEQ ID NO: 1570596 - RNA, 19 nt, Artificial Sequence
  Description of Artificial Sequence: Synthetic oligonucleotide
uacucaagccugauguucc

SEQ ID NO: 1570597 - RNA, 19 nt, Artificial Sequence
  Description of Artificial Sequence: Synthetic oligonucleotide
gaacuacugguacucaagc

SEQ ID NO: 1570598 - RNA, 19 nt, Artificial Sequence
  Description of Artificial Sequence: Synthetic oligonucleotide
agauacguggcauccagug

SEQ ID NO: 1570599 - RNA, 19 nt, Artificial Sequence
  Description of Artificial Sequence: Synthetic oligonucleotide
aagacuguuuguugauuug

SEQ ID NO: 1570600 - RNA, 19 nt, Artificial Sequence
  Description of Artificial Sequence: Synthetic oligonucleotide
agugacgggagaguugucc

SEQ ID NO: 1570601 - RNA, 19 nt, Artificial Sequence
  Description of Artificial Sequence: Synthetic oligonucleotide
uaaaggucuucauugugac

SEQ ID NO: 1570602 - RNA, 19 nt, Artificial Sequence
  Description of Artificial Sequence: Synthetic oligonucleotide
gaaagguggaauccuugag

SEQ ID NO: 1570603 - RNA, 19 nt, Artificial Sequence
  Description of Artificial Sequence: Synthetic oligonucleotide
aaaacuucgcuugcuggag

SEQ ID NO: 1570604 - RNA, 19 nt, Artificial Sequence
  Description of Artificial Sequence: Synthetic oligonucleotide
acuuaaacuuccuuucccu

SEQ ID NO: 1570605 - RNA, 19 nt, Artificial Sequence
  Description of Artificial Sequence: Synthetic oligonucleotide
cuggguuuguauuggaaag

SEQ ID NO: 1570606 - RNA, 19 nt, Artificial Sequence
  Description of Artificial Sequence: Synthetic oligonucleotide
gauacguggcauccagugg

SEQ ID NO: 1570607 - RNA, 19 nt, Artificial Sequence
  Description of Artificial Sequence: Synthetic oligonucleotide
uauuggaaagguggaaucc

SEQ ID NO: 1570608 - RNA, 19 nt, Artificial Sequence
  Description of Artificial Sequence: Synthetic oligonucleotide
acgauuacaguguuucuca

SEQ ID NO: 1570609 - RNA, 19 nt, Artificial Sequence
  Description of Artificial Sequence: Synthetic oligonucleotide
uaguccuugauuagaggug

SEQ ID NO: 1570610 - RNA, 19 nt, Artificial Sequence
  Description of Artificial Sequence: Synthetic oligonucleotide
ucugaaugacgugggaagg

SEQ ID NO: 1570611 - RNA, 19 nt, Artificial Sequence
  Description of Artificial Sequence: Synthetic oligonucleotide
guuuggcagucuuauagcc

SEQ ID NO: 1570612 - RNA, 19 nt, Artificial Sequence
  Description of Artificial Sequence: Synthetic oligonucleotide
uaccauauuucggagaagu

SEQ ID NO: 1570613 - RNA, 19 nt, Artificial Sequence
  Description of Artificial Sequence: Synthetic oligonucleotide
accucaagacguuuggcag

SEQ ID NO: 1570614 - RNA, 19 nt, Artificial Sequence
  Description of Artificial Sequence: Synthetic oligonucleotide
uugacagggacguuaaaua

SEQ ID NO: 1570615 - RNA, 19 nt, Artificial Sequence
  Description of Artificial Sequence: Synthetic oligonucleotide
uccucuagaggcaugcagu

SEQ ID NO: 1570616 - RNA, 19 nt, Artificial Sequence
  Description of Artificial Sequence: Synthetic oligonucleotide
acugaaaucccuaauuccu

SEQ ID NO: 1570617 - RNA, 19 nt, Artificial Sequence
  Description of Artificial Sequence: Synthetic oligonucleotide
uuucagauugcagaagcac

SEQ ID NO: 1570618 - RNA, 19 nt, Artificial Sequence
  Description of Artificial Sequence: Synthetic oligonucleotide
ggacguuaaauagaaaucc

SEQ ID NO: 1570619 - RNA, 19 nt, Artificial Sequence
  Description of Artificial Sequence: Synthetic oligonucleotide
gaugggaagaacuacuggu

SEQ ID NO: 1570620 - RNA, 19 nt, Artificial Sequence
  Description of Artificial Sequence: Synthetic oligonucleotide
uggaugggaagaacuacug

SEQ ID NO: 1570621 - RNA, 19 nt, Artificial Sequence
  Description of Artificial Sequence: Synthetic oligonucleotide
aguagcuugcauuugcuuu

SEQ ID NO: 1570622 - RNA, 19 nt, Artificial Sequence
  Description of Artificial Sequence: Synthetic oligonucleotide
agacuguuuguugauuugg

SEQ ID NO: 1570623 - RNA, 19 nt, Artificial Sequence
  Description of Artificial Sequence: Synthetic oligonucleotide
agacauagccgauaccugu

SEQ ID NO: 1570624 - RNA, 19 nt, Artificial Sequence
  Description of Artificial Sequence: Synthetic oligonucleotide
gaugacuaaucuuauugua

SEQ ID NO: 1570625 - RNA, 19 nt, Artificial Sequence
  Description of Artificial Sequence: Synthetic oligonucleotide
gacguuguugacagggacg

SEQ ID NO: 1570626 - RNA, 19 nt, Artificial Sequence
  Description of Artificial Sequence: Synthetic oligonucleotide
cucacgauuacaguguuuc

SEQ ID NO: 1570627 - RNA, 19 nt, Artificial Sequence
  Description of Artificial Sequence: Synthetic oligonucleotide
uauuguauggggcuuccuu

SEQ ID NO: 1570628 - RNA, 19 nt, Artificial Sequence
  Description of Artificial Sequence: Synthetic oligonucleotide
ugccaauaguuuauuggga

SEQ ID NO: 1570629 - RNA, 19 nt, Artificial Sequence
  Description of Artificial Sequence: Synthetic oligonucleotide
uuauagccaauaccaggca

SEQ ID NO: 1570630 - RNA, 19 nt, Artificial Sequence
  Description of Artificial Sequence: Synthetic oligonucleotide
uuagaggugguagcuagug

SEQ ID NO: 1570631 - RNA, 19 nt, Artificial Sequence
  Description of Artificial Sequence: Synthetic oligonucleotide
uuauugggagccacuccag

SEQ ID NO: 1570632 - RNA, 19 nt, Artificial Sequence
  Description of Artificial Sequence: Synthetic oligonucleotide
aggaacaauccuuucugca

SEQ ID NO: 1570633 - RNA, 19 nt, Artificial Sequence
  Description of Artificial Sequence: Synthetic oligonucleotide
uguuugccaguagacacag

SEQ ID NO: 1570634 - RNA, 19 nt, Artificial Sequence
  Description of Artificial Sequence: Synthetic oligonucleotide
acaccagaaacuaacuuug

SEQ ID NO: 1570635 - RNA, 19 nt, Artificial Sequence
  Description of Artificial Sequence: Synthetic oligonucleotide
uugauuagaggugguagcu

SEQ ID NO: 1570636 - RNA, 19 nt, Artificial Sequence
  Description of Artificial Sequence: Synthetic oligonucleotide
agucauugcaucauaauuu

SEQ ID NO: 1570637 - RNA, 19 nt, Artificial Sequence
  Description of Artificial Sequence: Synthetic oligonucleotide
uggcauacucucuucaaaa

SEQ ID NO: 1570638 - RNA, 19 nt, Artificial Sequence
  Description of Artificial Sequence: Synthetic oligonucleotide
ugagcaacugaaaucccua

SEQ ID NO: 1570639 - RNA, 19 nt, Artificial Sequence
  Description of Artificial Sequence: Synthetic oligonucleotide
aauaguuuauugggagcca

SEQ ID NO: 1570640 - RNA, 19 nt, Artificial Sequence
  Description of Artificial Sequence: Synthetic oligonucleotide
gaaaggaucucuucuugaa

SEQ ID NO: 1570641 - RNA, 19 nt, Artificial Sequence
  Description of Artificial Sequence: Synthetic oligonucleotide
ugaaggacugagguggccc

SEQ ID NO: 1570642 - RNA, 19 nt, Artificial Sequence
  Description of Artificial Sequence: Synthetic oligonucleotide
gccaauaguuuauugggag

SEQ ID NO: 1570643 - RNA, 19 nt, Artificial Sequence
  Description of Artificial Sequence: Synthetic oligonucleotide
gugacuaucuuucacuuua

SEQ ID NO: 1570644 - RNA, 19 nt, Artificial Sequence
  Description of Artificial Sequence: Synthetic oligonucleotide
aucauggcauacucucuuc

SEQ ID NO: 1570645 - RNA, 19 nt, Artificial Sequence
  Description of Artificial Sequence: Synthetic oligonucleotide
ucgcagggagacauagccg

SEQ ID NO: 1570646 - RNA, 19 nt, Artificial Sequence
  Description of Artificial Sequence: Synthetic oligonucleotide
gauuacaguguuucucaga

SEQ ID NO: 1570647 - RNA, 19 nt, Artificial Sequence
  Description of Artificial Sequence: Synthetic oligonucleotide
cauugugacuaucuuucac

SEQ ID NO: 1570648 - RNA, 19 nt, Artificial Sequence
  Description of Artificial Sequence: Synthetic oligonucleotide
ugguucaagcuguggauga

SEQ ID NO: 1570649 - RNA, 19 nt, Artificial Sequence
  Description of Artificial Sequence: Synthetic oligonucleotide
uucagcuuccgaugaacac

SEQ ID NO: 1570650 - RNA, 19 nt, Artificial Sequence
  Description of Artificial Sequence: Synthetic oligonucleotide
gacgugggaaggaaugggg

SEQ ID NO: 1570651 - RNA, 19 nt, Artificial Sequence
  Description of Artificial Sequence: Synthetic oligonucleotide
gauggaugggaagaacuac

SEQ ID NO: 1570652 - RNA, 19 nt, Artificial Sequence
  Description of Artificial Sequence: Synthetic oligonucleotide
aggauaucaagcaggggag

SEQ ID NO: 1570653 - RNA, 19 nt, Artificial Sequence
  Description of Artificial Sequence: Synthetic oligonucleotide
agaucacgcacacuauuga

SEQ ID NO: 1570654 - RNA, 19 nt, Artificial Sequence
  Description of Artificial Sequence: Synthetic oligonucleotide
agaacuacugguacucaag

SEQ ID NO: 1570655 - RNA, 19 nt, Artificial Sequence
  Description of Artificial Sequence: Synthetic oligonucleotide
gucaacacccucgggaagg

SEQ ID NO: 1570656 - RNA, 19 nt, Artificial Sequence
  Description of Artificial Sequence: Synthetic oligonucleotide
uaugugguucaagcugugg

SEQ ID NO: 1570657 - RNA, 19 nt, Artificial Sequence
  Description of Artificial Sequence: Synthetic oligonucleotide
caugcaguggacaacuuaa

SEQ ID NO: 1570658 - RNA, 19 nt, Artificial Sequence
  Description of Artificial Sequence: Synthetic oligonucleotide
aucccuaauuccuuuucca

SEQ ID NO: 1570659 - RNA, 19 nt, Artificial Sequence
  Description of Artificial Sequence: Synthetic oligonucleotide
agauucuuuagguccccug

SEQ ID NO: 1570660 - RNA, 19 nt, Artificial Sequence
  Description of Artificial Sequence: Synthetic oligonucleotide
uaccuguuugccaguagac

SEQ ID NO: 1570661 - RNA, 19 nt, Artificial Sequence
  Description of Artificial Sequence: Synthetic oligonucleotide
auaauaggaacaauccuuu

SEQ ID NO: 1570662 - RNA, 19 nt, Artificial Sequence
  Description of Artificial Sequence: Synthetic oligonucleotide
gaaacuaacuuugccaaua

SEQ ID NO: 1570663 - RNA, 19 nt, Artificial Sequence
  Description of Artificial Sequence: Synthetic oligonucleotide
agguaauaagacuguuugu

SEQ ID NO: 1570664 - RNA, 19 nt, Artificial Sequence
  Description of Artificial Sequence: Synthetic oligonucleotide
aguuguucacucugcagau

SEQ ID NO: 1570665 - RNA, 19 nt, Artificial Sequence
  Description of Artificial Sequence: Synthetic oligonucleotide
aaacuucgcuugcuggagu

SEQ ID NO: 1570666 - RNA, 19 nt, Artificial Sequence
  Description of Artificial Sequence: Synthetic oligonucleotide
cacugagaagaguaaggug

SEQ ID NO: 1570667 - RNA, 19 nt, Artificial Sequence
  Description of Artificial Sequence: Synthetic oligonucleotide
ucaugcguucaucuuuuaa

SEQ ID NO: 1570668 - RNA, 19 nt, Artificial Sequence
  Description of Artificial Sequence: Synthetic oligonucleotide
uaaggauaucaagcagggg

SEQ ID NO: 1570669 - RNA, 19 nt, Artificial Sequence
  Description of Artificial Sequence: Synthetic oligonucleotide
ugucugcuugugacuaucc

SEQ ID NO: 1570670 - RNA, 19 nt, Artificial Sequence
  Description of Artificial Sequence: Synthetic oligonucleotide
aauggggcacuggcgacuc

SEQ ID NO: 1570671 - RNA, 19 nt, Artificial Sequence
  Description of Artificial Sequence: Synthetic oligonucleotide
cauugcaucauaauuuccu

SEQ ID NO: 1570672 - RNA, 19 nt, Artificial Sequence
  Description of Artificial Sequence: Synthetic oligonucleotide
gacguuaaauagaaaucca

SEQ ID NO: 1570673 - RNA, 19 nt, Artificial Sequence
  Description of Artificial Sequence: Synthetic oligonucleotide
agaguaaggugaaauggca

SEQ ID NO: 1570674 - RNA, 19 nt, Artificial Sequence
  Description of Artificial Sequence: Synthetic oligonucleotide
ucgggaagggccuggagaa

SEQ ID NO: 1570675 - RNA, 19 nt, Artificial Sequence
  Description of Artificial Sequence: Synthetic oligonucleotide
aguuucauaaggauaucaa

SEQ ID NO: 1570676 - RNA, 19 nt, Artificial Sequence
  Description of Artificial Sequence: Synthetic oligonucleotide
gauaucaagcaggggaguc

SEQ ID NO: 1570677 - RNA, 19 nt, Artificial Sequence
  Description of Artificial Sequence: Synthetic oligonucleotide
augauggaugggaagaacu

SEQ ID NO: 1570678 - RNA, 19 nt, Artificial Sequence
  Description of Artificial Sequence: Synthetic oligonucleotide
aaucuuaguuuuagcuuca

SEQ ID NO: 1570679 - RNA, 19 nt, Artificial Sequence
  Description of Artificial Sequence: Synthetic oligonucleotide
uguucacucugcagauuug

SEQ ID NO: 1570680 - RNA, 19 nt, Artificial Sequence
  Description of Artificial Sequence: Synthetic oligonucleotide
uuguugacagggacguuaa

SEQ ID NO: 1570681 - RNA, 19 nt, Artificial Sequence
  Description of Artificial Sequence: Synthetic oligonucleotide
guuccugguucgcagggag

SEQ ID NO: 1570682 - RNA, 19 nt, Artificial Sequence
  Description of Artificial Sequence: Synthetic oligonucleotide
gcuagugucugcuugugac

SEQ ID NO: 1570683 - RNA, 19 nt, Artificial Sequence
  Description of Artificial Sequence: Synthetic oligonucleotide
gagaaguuucauaaggaua

SEQ ID NO: 1570684 - RNA, 19 nt, Artificial Sequence
  Description of Artificial Sequence: Synthetic oligonucleotide
augacuaaucuuauuguau

SEQ ID NO: 1570685 - RNA, 19 nt, Artificial Sequence
  Description of Artificial Sequence: Synthetic oligonucleotide
ggaugggaagaacuacugg

SEQ ID NO: 1570686 - RNA, 19 nt, Artificial Sequence
  Description of Artificial Sequence: Synthetic oligonucleotide
uggucaacacccucgggaa

SEQ ID NO: 1570687 - RNA, 19 nt, Artificial Sequence
  Description of Artificial Sequence: Synthetic oligonucleotide
acgugggaaggaauggggc

SEQ ID NO: 1570688 - RNA, 19 nt, Artificial Sequence
  Description of Artificial Sequence: Synthetic oligonucleotide
augacgugggaaggaaugg

SEQ ID NO: 1570689 - RNA, 19 nt, Artificial Sequence
  Description of Artificial Sequence: Synthetic oligonucleotide
cuggagaaagucacuugug

SEQ ID NO: 1570690 - RNA, 19 nt, Artificial Sequence
  Description of Artificial Sequence: Synthetic oligonucleotide
ucucagaguaccgacggau

SEQ ID NO: 1570691 - RNA, 19 nt, Artificial Sequence
  Description of Artificial Sequence: Synthetic oligonucleotide
aguggacaacuuaaacuuc

SEQ ID NO: 1570692 - RNA, 19 nt, Artificial Sequence
  Description of Artificial Sequence: Synthetic oligonucleotide
agaggcaugcaguggacaa

SEQ ID NO: 1570693 - RNA, 19 nt, Artificial Sequence
  Description of Artificial Sequence: Synthetic oligonucleotide
gcguucaucuuuuaacuug

SEQ ID NO: 1570694 - RNA, 19 nt, Artificial Sequence
  Description of Artificial Sequence: Synthetic oligonucleotide
uugugacuauccacagggc

SEQ ID NO: 1570695 - RNA, 19 nt, Artificial Sequence
  Description of Artificial Sequence: Synthetic oligonucleotide
uccaauguuuugacugaaa

SEQ ID NO: 1570696 - RNA, 19 nt, Artificial Sequence
  Description of Artificial Sequence: Synthetic oligonucleotide
ggcauacucucuucaaaag

SEQ ID NO: 1570697 - RNA, 19 nt, Artificial Sequence
  Description of Artificial Sequence: Synthetic oligonucleotide
uucgcuugcuggaguagga

SEQ ID NO: 1570698 - RNA, 19 nt, Artificial Sequence
  Description of Artificial Sequence: Synthetic oligonucleotide
cuccucuagaggcaugcag

SEQ ID NO: 1570699 - RNA, 19 nt, Artificial Sequence
  Description of Artificial Sequence: Synthetic oligonucleotide
uggcaucuucacauuuacc

SEQ ID NO: 1570700 - RNA, 19 nt, Artificial Sequence
  Description of Artificial Sequence: Synthetic oligonucleotide
uguauggggcuuccuucca

SEQ ID NO: 1570701 - RNA, 19 nt, Artificial Sequence
  Description of Artificial Sequence: Synthetic oligonucleotide
ugaaugacgugggaaggaa

SEQ ID NO: 1570702 - RNA, 19 nt, Artificial Sequence
  Description of Artificial Sequence: Synthetic oligonucleotide
accgacggaugacuaaucu

SEQ ID NO: 1570703 - RNA, 19 nt, Artificial Sequence
  Description of Artificial Sequence: Synthetic oligonucleotide
aaagucacuugugucuuuu

SEQ ID NO: 1570704 - RNA, 19 nt, Artificial Sequence
  Description of Artificial Sequence: Synthetic oligonucleotide
aacuucgcuugcuggagua

SEQ ID NO: 1570705 - RNA, 19 nt, Artificial Sequence
  Description of Artificial Sequence: Synthetic oligonucleotide
acagggacguuaaauagaa

SEQ ID NO: 1570706 - RNA, 19 nt, Artificial Sequence
  Description of Artificial Sequence: Synthetic oligonucleotide
uagccgauaccuguuugcc

SEQ ID NO: 1570707 - RNA, 19 nt, Artificial Sequence
  Description of Artificial Sequence: Synthetic oligonucleotide
gacagggacguuaaauaga

SEQ ID NO: 1570708 - RNA, 19 nt, Artificial Sequence
  Description of Artificial Sequence: Synthetic oligonucleotide
ggagaaagucacuuguguc

SEQ ID NO: 1570709 - RNA, 19 nt, Artificial Sequence
  Description of Artificial Sequence: Synthetic oligonucleotide
cuucgcuugcuggaguagg

SEQ ID NO: 1570710 - RNA, 19 nt, Artificial Sequence
  Description of Artificial Sequence: Synthetic oligonucleotide
ugacuaucuuucacuuuaa

SEQ ID NO: 1570711 - RNA, 19 nt, Artificial Sequence
  Description of Artificial Sequence: Synthetic oligonucleotide
gagacauagccgauaccug

SEQ ID NO: 1570712 - RNA, 19 nt, Artificial Sequence
  Description of Artificial Sequence: Synthetic oligonucleotide
uuccuuuaugugguucaag

SEQ ID NO: 1570713 - RNA, 19 nt, Artificial Sequence
  Description of Artificial Sequence: Synthetic oligonucleotide
caccagaaacuaacuuugc

SEQ ID NO: 1570714 - RNA, 19 nt, Artificial Sequence
  Description of Artificial Sequence: Synthetic oligonucleotide
uuggaaagguggaauccuu

SEQ ID NO: 1570715 - RNA, 19 nt, Artificial Sequence
  Description of Artificial Sequence: Synthetic oligonucleotide
acucucacgauuacagugu

SEQ ID NO: 1570716 - RNA, 19 nt, Artificial Sequence
  Description of Artificial Sequence: Synthetic oligonucleotide
auaccaggcauuuccuuua

SEQ ID NO: 1570717 - RNA, 19 nt, Artificial Sequence
  Description of Artificial Sequence: Synthetic oligonucleotide
cauagccgauaccuguuug

SEQ ID NO: 1570718 - RNA, 19 nt, Artificial Sequence
  Description of Artificial Sequence: Synthetic oligonucleotide
uuagcagugcucagugcuu

SEQ ID NO: 1570719 - RNA, 19 nt, Artificial Sequence
  Description of Artificial Sequence: Synthetic oligonucleotide
gacugagguggcccugagg

SEQ ID NO: 1570720 - RNA, 19 nt, Artificial Sequence
  Description of Artificial Sequence: Synthetic oligonucleotide
uuguauuggaaagguggaa

SEQ ID NO: 1570721 - RNA, 19 nt, Artificial Sequence
  Description of Artificial Sequence: Synthetic oligonucleotide
caccucaagacguuuggca

SEQ ID NO: 1570722 - RNA, 19 nt, Artificial Sequence
  Description of Artificial Sequence: Synthetic oligonucleotide
acuauccacagggcgaugu

SEQ ID NO: 1570723 - RNA, 19 nt, Artificial Sequence
  Description of Artificial Sequence: Synthetic oligonucleotide
uuaccauauuucggagaag

SEQ ID NO: 1570724 - RNA, 19 nt, Artificial Sequence
  Description of Artificial Sequence: Synthetic oligonucleotide
aguaccgacggaugacuaa

SEQ ID NO: 1570725 - RNA, 19 nt, Artificial Sequence
  Description of Artificial Sequence: Synthetic oligonucleotide
uacugguacucaagccuga

SEQ ID NO: 1570726 - RNA, 19 nt, Artificial Sequence
  Description of Artificial Sequence: Synthetic oligonucleotide
guacucaagccugauguuc

SEQ ID NO: 1570727 - RNA, 19 nt, Artificial Sequence
  Description of Artificial Sequence: Synthetic oligonucleotide
caguggacaacuuaaacuu

SEQ ID NO: 1570728 - RNA, 19 nt, Artificial Sequence
  Description of Artificial Sequence: Synthetic oligonucleotide
ugugacuaucuuucacuuu

SEQ ID NO: 1570729 - RNA, 19 nt, Artificial Sequence
  Description of Artificial Sequence: Synthetic oligonucleotide
uucucagaguaccgacgga

SEQ ID NO: 1570730 - RNA, 19 nt, Artificial Sequence
  Description of Artificial Sequence: Synthetic oligonucleotide
cuggaguaggacguuguug

SEQ ID NO: 1570731 - RNA, 19 nt, Artificial Sequence
  Description of Artificial Sequence: Synthetic oligonucleotide
gcgacucucacgauuacag

SEQ ID NO: 1570732 - RNA, 19 nt, Artificial Sequence
  Description of Artificial Sequence: Synthetic oligonucleotide
agaguaccgacggaugacu

SEQ ID NO: 1570733 - RNA, 19 nt, Artificial Sequence
  Description of Artificial Sequence: Synthetic oligonucleotide
gagaaaaguuguucacucu

SEQ ID NO: 1570734 - RNA, 19 nt, Artificial Sequence
  Description of Artificial Sequence: Synthetic oligonucleotide
cuucagcuuccgaugaaca

SEQ ID NO: 1570735 - RNA, 19 nt, Artificial Sequence
  Description of Artificial Sequence: Synthetic oligonucleotide
guuguugacagggacguua

SEQ ID NO: 1570736 - RNA, 19 nt, Artificial Sequence
  Description of Artificial Sequence: Synthetic oligonucleotide
cacuauugauucccagcac

SEQ ID NO: 1570737 - RNA, 19 nt, Artificial Sequence
  Description of Artificial Sequence: Synthetic oligonucleotide
cuuggucaacacccucggg

SEQ ID NO: 1570738 - RNA, 19 nt, Artificial Sequence
  Description of Artificial Sequence: Synthetic oligonucleotide
gaguaggacguuguugaca

SEQ ID NO: 1570739 - RNA, 19 nt, Artificial Sequence
  Description of Artificial Sequence: Synthetic oligonucleotide
agacguuuggcagucuuau

SEQ ID NO: 1570740 - RNA, 19 nt, Artificial Sequence
  Description of Artificial Sequence: Synthetic oligonucleotide
uauuucggagaaguuucau

SEQ ID NO: 1570741 - RNA, 19 nt, Artificial Sequence
  Description of Artificial Sequence: Synthetic oligonucleotide
ggagacauagccgauaccu

SEQ ID NO: 1570742 - RNA, 19 nt, Artificial Sequence
  Description of Artificial Sequence: Synthetic oligonucleotide
caauacuccucuagaggca

SEQ ID NO: 1570743 - RNA, 19 nt, Artificial Sequence
  Description of Artificial Sequence: Synthetic oligonucleotide
ucaagcuguggaugagauc

SEQ ID NO: 1570744 - RNA, 19 nt, Artificial Sequence
  Description of Artificial Sequence: Synthetic oligonucleotide
gcaguggacaacuuaaacu

SEQ ID NO: 1570745 - RNA, 19 nt, Artificial Sequence
  Description of Artificial Sequence: Synthetic oligonucleotide
ugacuauccacagggcgau

SEQ ID NO: 1570746 - RNA, 19 nt, Artificial Sequence
  Description of Artificial Sequence: Synthetic oligonucleotide
gggacguuaaauagaaauc

SEQ ID NO: 1570747 - RNA, 19 nt, Artificial Sequence
  Description of Artificial Sequence: Synthetic oligonucleotide
gaaagauacguggcaucca

SEQ ID NO: 1570748 - RNA, 19 nt, Artificial Sequence
  Description of Artificial Sequence: Synthetic oligonucleotide
cuguuugccaguagacaca

SEQ ID NO: 1570749 - RNA, 19 nt, Artificial Sequence
  Description of Artificial Sequence: Synthetic oligonucleotide
cucaagacguuuggcaguc

SEQ ID NO: 1570750 - RNA, 19 nt, Artificial Sequence
  Description of Artificial Sequence: Synthetic oligonucleotide
gcuugugacuauccacagg

SEQ ID NO: 1570751 - RNA, 19 nt, Artificial Sequence
  Description of Artificial Sequence: Synthetic oligonucleotide
auagccaauaccaggcauu

SEQ ID NO: 1570752 - RNA, 19 nt, Artificial Sequence
  Description of Artificial Sequence: Synthetic oligonucleotide
cuauugauucccagcaccu

SEQ ID NO: 1570753 - RNA, 19 nt, Artificial Sequence
  Description of Artificial Sequence: Synthetic oligonucleotide
acagggcgauguuuggaga

SEQ ID NO: 1570754 - RNA, 19 nt, Artificial Sequence
  Description of Artificial Sequence: Synthetic oligonucleotide
uagaggcaugcaguggaca

SEQ ID NO: 1570755 - RNA, 19 nt, Artificial Sequence
  Description of Artificial Sequence: Synthetic oligonucleotide
cacgcacacuauugauucc

SEQ ID NO: 1570756 - RNA, 19 nt, Artificial Sequence
  Description of Artificial Sequence: Synthetic oligonucleotide
aagauacguggcauccagu

SEQ ID NO: 1570757 - RNA, 19 nt, Artificial Sequence
  Description of Artificial Sequence: Synthetic oligonucleotide
agccgauaccuguuugcca

SEQ ID NO: 1570758 - RNA, 19 nt, Artificial Sequence
  Description of Artificial Sequence: Synthetic oligonucleotide
guaaggugaaauggcaucu

SEQ ID NO: 1570759 - RNA, 19 nt, Artificial Sequence
  Description of Artificial Sequence: Synthetic oligonucleotide
auauuucggagaaguuuca

SEQ ID NO: 1570760 - RNA, 19 nt, Artificial Sequence
  Description of Artificial Sequence: Synthetic oligonucleotide
uuccaauguuuugacugaa

SEQ ID NO: 1570761 - RNA, 19 nt, Artificial Sequence
  Description of Artificial Sequence: Synthetic oligonucleotide
auaagacuguuuguugauu

SEQ ID NO: 1570762 - RNA, 19 nt, Artificial Sequence
  Description of Artificial Sequence: Synthetic oligonucleotide
ccuaacuucugaaugacgu

SEQ ID NO: 1570763 - RNA, 19 nt, Artificial Sequence
  Description of Artificial Sequence: Synthetic oligonucleotide
ggaugacuaaucuuauugu

SEQ ID NO: 1570764 - RNA, 19 nt, Artificial Sequence
  Description of Artificial Sequence: Synthetic oligonucleotide
acauagccgauaccuguuu

SEQ ID NO: 1570765 - RNA, 19 nt, Artificial Sequence
  Description of Artificial Sequence: Synthetic oligonucleotide
gaucacgcacacuauugau

SEQ ID NO: 1570766 - RNA, 19 nt, Artificial Sequence
  Description of Artificial Sequence: Synthetic oligonucleotide
cagcaccucaagacguuug

SEQ ID NO: 1570767 - RNA, 19 nt, Artificial Sequence
  Description of Artificial Sequence: Synthetic oligonucleotide
ggacguuguugacagggac

SEQ ID NO: 1570768 - RNA, 19 nt, Artificial Sequence
  Description of Artificial Sequence: Synthetic oligonucleotide
uagccaauaccaggcauuu

SEQ ID NO: 1570769 - RNA, 19 nt, Artificial Sequence
  Description of Artificial Sequence: Synthetic oligonucleotide
guugacagggacguuaaau

SEQ ID NO: 1570770 - RNA, 19 nt, Artificial Sequence
  Description of Artificial Sequence: Synthetic oligonucleotide
aggaaguagcuugcauuug

SEQ ID NO: 1570771 - RNA, 19 nt, Artificial Sequence
  Description of Artificial Sequence: Synthetic oligonucleotide
uguugacagggacguuaaa

SEQ ID NO: 1570772 - RNA, 19 nt, Artificial Sequence
  Description of Artificial Sequence: Synthetic oligonucleotide
uuauuguauggggcuuccu

SEQ ID NO: 1570773 - RNA, 19 nt, Artificial Sequence
  Description of Artificial Sequence: Synthetic oligonucleotide
aucacgcacacuauugauu

SEQ ID NO: 1570774 - RNA, 19 nt, Artificial Sequence
  Description of Artificial Sequence: Synthetic oligonucleotide
uaccgacggaugacuaauc

SEQ ID NO: 1570775 - RNA, 19 nt, Artificial Sequence
  Description of Artificial Sequence: Synthetic oligonucleotide
ucucacgauuacaguguuu

SEQ ID NO: 1570776 - RNA, 19 nt, Artificial Sequence
  Description of Artificial Sequence: Synthetic oligonucleotide
guaggacguuguugacagg

SEQ ID NO: 1570777 - RNA, 19 nt, Artificial Sequence
  Description of Artificial Sequence: Synthetic oligonucleotide
cacacacugagaagaguaa

SEQ ID NO: 1570778 - RNA, 19 nt, Artificial Sequence
  Description of Artificial Sequence: Synthetic oligonucleotide
acuucgcuugcuggaguag

SEQ ID NO: 1570779 - RNA, 19 nt, Artificial Sequence
  Description of Artificial Sequence: Synthetic oligonucleotide
ggagaaguuucauaaggau

SEQ ID NO: 1570780 - RNA, 19 nt, Artificial Sequence
  Description of Artificial Sequence: Synthetic oligonucleotide
uaaagacuucuuggucaac

SEQ ID NO: 1570781 - RNA, 19 nt, Artificial Sequence
  Description of Artificial Sequence: Synthetic oligonucleotide
cguuuggcagucuuauagc

SEQ ID NO: 1570782 - RNA, 19 nt, Artificial Sequence
  Description of Artificial Sequence: Synthetic oligonucleotide
uaccaggcauuuccuuuau

SEQ ID NO: 1570783 - RNA, 19 nt, Artificial Sequence
  Description of Artificial Sequence: Synthetic oligonucleotide
gaggcaugcaguggacaac

SEQ ID NO: 1570784 - RNA, 19 nt, Artificial Sequence
  Description of Artificial Sequence: Synthetic oligonucleotide
cugagcaacugaaaucccu

SEQ ID NO: 1570785 - RNA, 19 nt, Artificial Sequence
  Description of Artificial Sequence: Synthetic oligonucleotide
gccugauguuccugguucg

SEQ ID NO: 1570786 - RNA, 19 nt, Artificial Sequence
  Description of Artificial Sequence: Synthetic oligonucleotide
aucuuauuguauggggcuu

SEQ ID NO: 1570787 - RNA, 19 nt, Artificial Sequence
  Description of Artificial Sequence: Synthetic oligonucleotide
acggaugacuaaucuuauu

SEQ ID NO: 1570788 - RNA, 19 nt, Artificial Sequence
  Description of Artificial Sequence: Synthetic oligonucleotide
caguagacacaguauuucu

SEQ ID NO: 1570789 - RNA, 19 nt, Artificial Sequence
  Description of Artificial Sequence: Synthetic oligonucleotide
accaggcauuuccuuuaug

SEQ ID NO: 1570790 - RNA, 19 nt, Artificial Sequence
  Description of Artificial Sequence: Synthetic oligonucleotide
aggucuucauugugacuau

SEQ ID NO: 1570791 - RNA, 19 nt, Artificial Sequence
  Description of Artificial Sequence: Synthetic oligonucleotide
gaaguagcuugcauuugcu

SEQ ID NO: 1570792 - RNA, 19 nt, Artificial Sequence
  Description of Artificial Sequence: Synthetic oligonucleotide
uuuagguccccuggcucau

SEQ ID NO: 1570793 - RNA, 19 nt, Artificial Sequence
  Description of Artificial Sequence: Synthetic oligonucleotide
ccucuagaggcaugcagug

SEQ ID NO: 1570794 - RNA, 19 nt, Artificial Sequence
  Description of Artificial Sequence: Synthetic oligonucleotide
cugaaugacgugggaagga

SEQ ID NO: 1570795 - RNA, 19 nt, Artificial Sequence
  Description of Artificial Sequence: Synthetic oligonucleotide
gcuuucagguaauaagacu

SEQ ID NO: 1570796 - RNA, 19 nt, Artificial Sequence
  Description of Artificial Sequence: Synthetic oligonucleotide
ggaaguugcuuaaagacuu

SEQ ID NO: 1570797 - RNA, 19 nt, Artificial Sequence
  Description of Artificial Sequence: Synthetic oligonucleotide
gggcuuccuuccaucaugg

SEQ ID NO: 1570798 - RNA, 19 nt, Artificial Sequence
  Description of Artificial Sequence: Synthetic oligonucleotide
ggaaggaauggggcacugg

SEQ ID NO: 1570799 - RNA, 19 nt, Artificial Sequence
  Description of Artificial Sequence: Synthetic oligonucleotide
cugcagauuuggaaaugaa

SEQ ID NO: 1570800 - RNA, 19 nt, Artificial Sequence
  Description of Artificial Sequence: Synthetic oligonucleotide
ggucaacacccucgggaag

SEQ ID NO: 1570801 - RNA, 19 nt, Artificial Sequence
  Description of Artificial Sequence: Synthetic oligonucleotide
agccaauaccaggcauuuc

SEQ ID NO: 1570802 - RNA, 19 nt, Artificial Sequence
  Description of Artificial Sequence: Synthetic oligonucleotide
gaguaaggugaaauggcau

SEQ ID NO: 1570803 - RNA, 19 nt, Artificial Sequence
  Description of Artificial Sequence: Synthetic oligonucleotide
cuuaaacuuccuuucccuu

SEQ ID NO: 1570804 - RNA, 19 nt, Artificial Sequence
  Description of Artificial Sequence: Synthetic oligonucleotide
cagggcgauguuuggagaa

SEQ ID NO: 1570805 - RNA, 19 nt, Artificial Sequence
  Description of Artificial Sequence: Synthetic oligonucleotide
aggggagucauugcaucau

SEQ ID NO: 1570806 - RNA, 19 nt, Artificial Sequence
  Description of Artificial Sequence: Synthetic oligonucleotide
gguucaagcuguggaugag

SEQ ID NO: 1570807 - RNA, 19 nt, Artificial Sequence
  Description of Artificial Sequence: Synthetic oligonucleotide
uggggacuccucaguuccu

SEQ ID NO: 1570808 - RNA, 19 nt, Artificial Sequence
  Description of Artificial Sequence: Synthetic oligonucleotide
ggcgauguuuggagaaaag

SEQ ID NO: 1570809 - RNA, 19 nt, Artificial Sequence
  Description of Artificial Sequence: Synthetic oligonucleotide
agggagugacgggagaguu

SEQ ID NO: 1570810 - RNA, 19 nt, Artificial Sequence
  Description of Artificial Sequence: Synthetic oligonucleotide
gugucugcuugugacuauc

SEQ ID NO: 1570811 - RNA, 19 nt, Artificial Sequence
  Description of Artificial Sequence: Synthetic oligonucleotide
uggcgacucucacgauuac

SEQ ID NO: 1570812 - RNA, 19 nt, Artificial Sequence
  Description of Artificial Sequence: Synthetic oligonucleotide
gcacacacugagaagagua

SEQ ID NO: 1570813 - RNA, 19 nt, Artificial Sequence
  Description of Artificial Sequence: Synthetic oligonucleotide
ggaguaggacguuguugac

SEQ ID NO: 1570814 - RNA, 19 nt, Artificial Sequence
  Description of Artificial Sequence: Synthetic oligonucleotide
gacguuuggcagucuuaua

SEQ ID NO: 1570815 - RNA, 19 nt, Artificial Sequence
  Description of Artificial Sequence: Synthetic oligonucleotide
cagauugcagaagcacaca

SEQ ID NO: 1570816 - RNA, 19 nt, Artificial Sequence
  Description of Artificial Sequence: Synthetic oligonucleotide
accauauuucggagaaguu

SEQ ID NO: 1570817 - RNA, 19 nt, Artificial Sequence
  Description of Artificial Sequence: Synthetic oligonucleotide
ggaugcgcugagcaacuga

SEQ ID NO: 1570818 - RNA, 19 nt, Artificial Sequence
  Description of Artificial Sequence: Synthetic oligonucleotide
ggagugacgggagaguugu

SEQ ID NO: 1570819 - RNA, 19 nt, Artificial Sequence
  Description of Artificial Sequence: Synthetic oligonucleotide
ggucuggagaucacgcaca

SEQ ID NO: 1570820 - RNA, 19 nt, Artificial Sequence
  Description of Artificial Sequence: Synthetic oligonucleotide
gggagacauagccgauacc

SEQ ID NO: 1570821 - RNA, 19 nt, Artificial Sequence
  Description of Artificial Sequence: Synthetic oligonucleotide
cgacggaugacuaaucuua

SEQ ID NO: 1570822 - RNA, 19 nt, Artificial Sequence
  Description of Artificial Sequence: Synthetic oligonucleotide
ucaagacguuuggcagucu

SEQ ID NO: 1570823 - RNA, 19 nt, Artificial Sequence
  Description of Artificial Sequence: Synthetic oligonucleotide
cagcacagccagugagcug

SEQ ID NO: 1570824 - RNA, 19 nt, Artificial Sequence
  Description of Artificial Sequence: Synthetic oligonucleotide
acacccucgggaagggccu

SEQ ID NO: 1570825 - RNA, 19 nt, Artificial Sequence
  Description of Artificial Sequence: Synthetic oligonucleotide
ggagucauugcaucauaau

SEQ ID NO: 1570826 - RNA, 19 nt, Artificial Sequence
  Description of Artificial Sequence: Synthetic oligonucleotide
ugguucgcagggagacaua

SEQ ID NO: 1570827 - RNA, 19 nt, Artificial Sequence
  Description of Artificial Sequence: Synthetic oligonucleotide
ugacagcuuucagguaaua

SEQ ID NO: 1570828 - RNA, 19 nt, Artificial Sequence
  Description of Artificial Sequence: Synthetic oligonucleotide
ggguuuguauuggaaaggu

SEQ ID NO: 1570829 - RNA, 19 nt, Artificial Sequence
  Description of Artificial Sequence: Synthetic oligonucleotide
guaccgacggaugacuaau

SEQ ID NO: 1570830 - RNA, 19 nt, Artificial Sequence
  Description of Artificial Sequence: Synthetic oligonucleotide
gacuauccacagggcgaug

SEQ ID NO: 1570831 - RNA, 19 nt, Artificial Sequence
  Description of Artificial Sequence: Synthetic oligonucleotide
gaaugacgugggaaggaau

SEQ ID NO: 1570832 - RNA, 19 nt, Artificial Sequence
  Description of Artificial Sequence: Synthetic oligonucleotide
gacauagccgauaccuguu

SEQ ID NO: 1570833 - RNA, 19 nt, Artificial Sequence
  Description of Artificial Sequence: Synthetic oligonucleotide
gcgauguuuggagaaaagu

SEQ ID NO: 1570834 - RNA, 19 nt, Artificial Sequence
  Description of Artificial Sequence: Synthetic oligonucleotide
gcugagcaacugaaauccc

SEQ ID NO: 1570835 - RNA, 19 nt, Artificial Sequence
  Description of Artificial Sequence: Synthetic oligonucleotide
ccuuuaugugguucaagcu

SEQ ID NO: 1570836 - RNA, 19 nt, Artificial Sequence
  Description of Artificial Sequence: Synthetic oligonucleotide
cugucccuaacuucugaau

SEQ ID NO: 1570837 - RNA, 19 nt, Artificial Sequence
  Description of Artificial Sequence: Synthetic oligonucleotide
gaguaccgacggaugacua

SEQ ID NO: 1570838 - RNA, 19 nt, Artificial Sequence
  Description of Artificial Sequence: Synthetic oligonucleotide
gggagugacgggagaguug

SEQ ID NO: 1570839 - RNA, 19 nt, Artificial Sequence
  Description of Artificial Sequence: Synthetic oligonucleotide
cguggcauccaguggggac

SEQ ID NO: 1570840 - RNA, 19 nt, Artificial Sequence
  Description of Artificial Sequence: Synthetic oligonucleotide
cagcuuccgaugaacacuu

SEQ ID NO: 1570841 - RNA, 19 nt, Artificial Sequence
  Description of Artificial Sequence: Synthetic oligonucleotide
ggagaucacgcacacuauu

SEQ ID NO: 1570842 - RNA, 19 nt, Artificial Sequence
  Description of Artificial Sequence: Synthetic oligonucleotide
caagacguuuggcagucuu

SEQ ID NO: 1570843 - RNA, 19 nt, Artificial Sequence
  Description of Artificial Sequence: Synthetic oligonucleotide
gagggagugacgggagagu

SEQ ID NO: 1570844 - RNA, 19 nt, Artificial Sequence
  Description of Artificial Sequence: Synthetic oligonucleotide
ggcucaugcguucaucuuu

SEQ ID NO: 1570845 - RNA, 19 nt, Artificial Sequence
  Description of Artificial Sequence: Synthetic oligonucleotide
ggcagucuuauagccaaua

SEQ ID NO: 1570846 - RNA, 19 nt, Artificial Sequence
  Description of Artificial Sequence: Synthetic oligonucleotide
cagggacguuaaauagaaa

SEQ ID NO: 1570847 - RNA, 19 nt, Artificial Sequence
  Description of Artificial Sequence: Synthetic oligonucleotide
ggcgacucucacgauuaca

SEQ ID NO: 1570848 - RNA, 19 nt, Artificial Sequence
  Description of Artificial Sequence: Synthetic oligonucleotide
gguccccuggcucaugcgu

SEQ ID NO: 1570849 - RNA, 19 nt, Artificial Sequence
  Description of Artificial Sequence: Synthetic oligonucleotide
ccauauuucggagaaguuu

SEQ ID NO: 1570850 - RNA, 19 nt, Artificial Sequence
  Description of Artificial Sequence: Synthetic oligonucleotide
augcgcugagcaacugaaa

SEQ ID NO: 1570851 - RNA, 19 nt, Artificial Sequence
  Description of Artificial Sequence: Synthetic oligonucleotide
ggggagucauugcaucaua

SEQ ID NO: 1570852 - RNA, 19 nt, Artificial Sequence
  Description of Artificial Sequence: Synthetic oligonucleotide
gguacucaagccugauguu

SEQ ID NO: 1570853 - RNA, 19 nt, Artificial Sequence
  Description of Artificial Sequence: Synthetic oligonucleotide
cucaugcguucaucuuuua

SEQ ID NO: 1570854 - RNA, 19 nt, Artificial Sequence
  Description of Artificial Sequence: Synthetic oligonucleotide
ggauaucaagcaggggagu

SEQ ID NO: 1570855 - RNA, 19 nt, Artificial Sequence
  Description of Artificial Sequence: Synthetic oligonucleotide
cucucacgauuacaguguu

SEQ ID NO: 1570856 - RNA, 19 nt, Artificial Sequence
  Description of Artificial Sequence: Synthetic oligonucleotide
gagugacgggagaguuguc

SEQ ID NO: 1570857 - RNA, 19 nt, Artificial Sequence
  Description of Artificial Sequence: Synthetic oligonucleotide
cuauccacagggcgauguu

SEQ ID NO: 1570858 - RNA, 19 nt, Artificial Sequence
  Description of Artificial Sequence: Synthetic oligonucleotide
cgggagaguuguccucucc

SEQ ID NO: 1570859 - RNA, 19 nt, Artificial Sequence
  Description of Artificial Sequence: Synthetic oligonucleotide
gccaguagacacaguauuu

SEQ ID NO: 1570860 - RNA, 19 nt, Artificial Sequence
  Description of Artificial Sequence: Synthetic oligonucleotide
gggcuuaaggaaguagcuu

SEQ ID NO: 1570861 - RNA, 19 nt, Artificial Sequence
  Description of Artificial Sequence: Synthetic oligonucleotide
gcucaugcguucaucuuuu

SEQ ID NO: 1570862 - RNA, 19 nt, Artificial Sequence
  Description of Artificial Sequence: Synthetic oligonucleotide
ccacagggcgauguuugga

SEQ ID NO: 1570863 - RNA, 19 nt, Artificial Sequence
  Description of Artificial Sequence: Synthetic oligonucleotide
agcuuccgaugaacacuuu

SEQ ID NO: 1570864 - RNA, 19 nt, Artificial Sequence
  Description of Artificial Sequence: Synthetic oligonucleotide
ccgacggaugacuaaucuu

SEQ ID NO: 1570865 - RNA, 19 nt, Artificial Sequence
  Description of Artificial Sequence: Synthetic oligonucleotide
cgacucucacgauuacagu

SEQ ID NO: 1570866 - RNA, 19 nt, Artificial Sequence
  Description of Artificial Sequence: Synthetic oligonucleotide
cacuggcgacucucacgau

SEQ ID NO: 1570867 - RNA, 19 nt, Artificial Sequence
  Description of Artificial Sequence: Synthetic oligonucleotide
cccucgggaagggccugga

SEQ ID NO: 1570868 - RNA, 19 nt, Artificial Sequence
  Description of Artificial Sequence: Synthetic oligonucleotide
guugaaaucaauguaaugg

SEQ ID NO: 1570869 - RNA, 19 nt, Artificial Sequence
  Description of Artificial Sequence: Synthetic oligonucleotide
auugaugguaaucuguggc

SEQ ID NO: 1570870 - RNA, 19 nt, Artificial Sequence
  Description of Artificial Sequence: Synthetic oligonucleotide
gauauauuggcccuuguag

SEQ ID NO: 1570871 - RNA, 19 nt, Artificial Sequence
  Description of Artificial Sequence: Synthetic oligonucleotide
agugaggauauauuggccc

SEQ ID NO: 1570872 - RNA, 19 nt, Artificial Sequence
  Description of Artificial Sequence: Synthetic oligonucleotide
acuucgauaggauaggagg

SEQ ID NO: 1570873 - RNA, 19 nt, Artificial Sequence
  Description of Artificial Sequence: Synthetic oligonucleotide
ucugggaccaguaacuucg

SEQ ID NO: 1570874 - RNA, 19 nt, Artificial Sequence
  Description of Artificial Sequence: Synthetic oligonucleotide
agagugaggauauauuggc

SEQ ID NO: 1570875 - RNA, 19 nt, Artificial Sequence
  Description of Artificial Sequence: Synthetic oligonucleotide
aauuagauuuccucuuccg

SEQ ID NO: 1570876 - RNA, 19 nt, Artificial Sequence
  Description of Artificial Sequence: Synthetic oligonucleotide
agugcagacacuuggaguc

SEQ ID NO: 1570877 - RNA, 19 nt, Artificial Sequence
  Description of Artificial Sequence: Synthetic oligonucleotide
uacuuuagagaguucauag

SEQ ID NO: 1570878 - RNA, 19 nt, Artificial Sequence
  Description of Artificial Sequence: Synthetic oligonucleotide
aaaucaauguaauggacau

SEQ ID NO: 1570879 - RNA, 19 nt, Artificial Sequence
  Description of Artificial Sequence: Synthetic oligonucleotide
ucuuucuugauacuaguga

SEQ ID NO: 1570880 - RNA, 19 nt, Artificial Sequence
  Description of Artificial Sequence: Synthetic oligonucleotide
cucaauacacucuauauuc

SEQ ID NO: 1570881 - RNA, 19 nt, Artificial Sequence
  Description of Artificial Sequence: Synthetic oligonucleotide
aauucgcacagguagagga

SEQ ID NO: 1570882 - RNA, 19 nt, Artificial Sequence
  Description of Artificial Sequence: Synthetic oligonucleotide
aacucaaucagcagcuugc

SEQ ID NO: 1570883 - RNA, 19 nt, Artificial Sequence
  Description of Artificial Sequence: Synthetic oligonucleotide
aguacaaugucuugugguc

SEQ ID NO: 1570884 - RNA, 19 nt, Artificial Sequence
  Description of Artificial Sequence: Synthetic oligonucleotide
uugaaaucaauguaaugga

SEQ ID NO: 1570885 - RNA, 19 nt, Artificial Sequence
  Description of Artificial Sequence: Synthetic oligonucleotide
gucacauuuggucaagugg

SEQ ID NO: 1570886 - RNA, 19 nt, Artificial Sequence
  Description of Artificial Sequence: Synthetic oligonucleotide
uguaauggacauagaaaag

SEQ ID NO: 1570887 - RNA, 19 nt, Artificial Sequence
  Description of Artificial Sequence: Synthetic oligonucleotide
ucaugcguggugcugacgg

SEQ ID NO: 1570888 - RNA, 19 nt, Artificial Sequence
  Description of Artificial Sequence: Synthetic oligonucleotide
gcaaaauucgcacagguag

SEQ ID NO: 1570889 - RNA, 19 nt, Artificial Sequence
  Description of Artificial Sequence: Synthetic oligonucleotide
uuuaaguccagccucucgu

SEQ ID NO: 1570890 - RNA, 19 nt, Artificial Sequence
  Description of Artificial Sequence: Synthetic oligonucleotide
aguaacuucgauaggauag

SEQ ID NO: 1570891 - RNA, 19 nt, Artificial Sequence
  Description of Artificial Sequence: Synthetic oligonucleotide
agugauuucacugaucuca

SEQ ID NO: 1570892 - RNA, 19 nt, Artificial Sequence
  Description of Artificial Sequence: Synthetic oligonucleotide
auauuugaggcaaaauucg

SEQ ID NO: 1570893 - RNA, 19 nt, Artificial Sequence
  Description of Artificial Sequence: Synthetic oligonucleotide
uuuagagaguucauagcug

SEQ ID NO: 1570894 - RNA, 19 nt, Artificial Sequence
  Description of Artificial Sequence: Synthetic oligonucleotide
augagauugagauacugca

SEQ ID NO: 1570895 - RNA, 19 nt, Artificial Sequence
  Description of Artificial Sequence: Synthetic oligonucleotide
uuugaggcaaaauucgcac

SEQ ID NO: 1570896 - RNA, 19 nt, Artificial Sequence
  Description of Artificial Sequence: Synthetic oligonucleotide
guaauggacauagaaaagc

SEQ ID NO: 1570897 - RNA, 19 nt, Artificial Sequence
  Description of Artificial Sequence: Synthetic oligonucleotide
aauucgaaggagccguuug

SEQ ID NO: 1570898 - RNA, 19 nt, Artificial Sequence
  Description of Artificial Sequence: Synthetic oligonucleotide
uauuugaggcaaaauucgc

SEQ ID NO: 1570899 - RNA, 19 nt, Artificial Sequence
  Description of Artificial Sequence: Synthetic oligonucleotide
ugcgguaaauuucauugcc

SEQ ID NO: 1570900 - RNA, 19 nt, Artificial Sequence
  Description of Artificial Sequence: Synthetic oligonucleotide
agacacuugaggcuacggc

SEQ ID NO: 1570901 - RNA, 19 nt, Artificial Sequence
  Description of Artificial Sequence: Synthetic oligonucleotide
aaaauucgcacagguagag

SEQ ID NO: 1570902 - RNA, 19 nt, Artificial Sequence
  Description of Artificial Sequence: Synthetic oligonucleotide
uuagauuuccucuuccguc

SEQ ID NO: 1570903 - RNA, 19 nt, Artificial Sequence
  Description of Artificial Sequence: Synthetic oligonucleotide
auagaaaagcuuucggcca

SEQ ID NO: 1570904 - RNA, 19 nt, Artificial Sequence
  Description of Artificial Sequence: Synthetic oligonucleotide
auauauuggcccuuguagu

SEQ ID NO: 1570905 - RNA, 19 nt, Artificial Sequence
  Description of Artificial Sequence: Synthetic oligonucleotide
uugaugguaaucuguggcc

SEQ ID NO: 1570906 - RNA, 19 nt, Artificial Sequence
  Description of Artificial Sequence: Synthetic oligonucleotide
gaaaucaauguaauggaca

SEQ ID NO: 1570907 - RNA, 19 nt, Artificial Sequence
  Description of Artificial Sequence: Synthetic oligonucleotide
auaguacaaugucuugugg

SEQ ID NO: 1570908 - RNA, 19 nt, Artificial Sequence
  Description of Artificial Sequence: Synthetic oligonucleotide
ugucauaguacaaugucuu

SEQ ID NO: 1570909 - RNA, 19 nt, Artificial Sequence
  Description of Artificial Sequence: Synthetic oligonucleotide
cauaguacaaugucuugug

SEQ ID NO: 1570910 - RNA, 19 nt, Artificial Sequence
  Description of Artificial Sequence: Synthetic oligonucleotide
gacaaugucgucgugacuc

SEQ ID NO: 1570911 - RNA, 19 nt, Artificial Sequence
  Description of Artificial Sequence: Synthetic oligonucleotide
uguugaaaucaauguaaug

SEQ ID NO: 1570912 - RNA, 19 nt, Artificial Sequence
  Description of Artificial Sequence: Synthetic oligonucleotide
uuucaggcgagccggggcg

SEQ ID NO: 1570913 - RNA, 19 nt, Artificial Sequence
  Description of Artificial Sequence: Synthetic oligonucleotide
uugugaguaacucuuguuu

SEQ ID NO: 1570914 - RNA, 19 nt, Artificial Sequence
  Description of Artificial Sequence: Synthetic oligonucleotide
uaguacaaugucuuguggu

SEQ ID NO: 1570915 - RNA, 19 nt, Artificial Sequence
  Description of Artificial Sequence: Synthetic oligonucleotide
ucucuuucaggcgagccgg

SEQ ID NO: 1570916 - RNA, 19 nt, Artificial Sequence
  Description of Artificial Sequence: Synthetic oligonucleotide
uagaggacggguagugugg

SEQ ID NO: 1570917 - RNA, 19 nt, Artificial Sequence
  Description of Artificial Sequence: Synthetic oligonucleotide
uucuuucuugauacuagug

SEQ ID NO: 1570918 - RNA, 19 nt, Artificial Sequence
  Description of Artificial Sequence: Synthetic oligonucleotide
cacauuguaaucuucagua

SEQ ID NO: 1570919 - RNA, 19 nt, Artificial Sequence
  Description of Artificial Sequence: Synthetic oligonucleotide
auacuagugauuucacuga

SEQ ID NO: 1570920 - RNA, 19 nt, Artificial Sequence
  Description of Artificial Sequence: Synthetic oligonucleotide
uuguaguaauugaugagau

SEQ ID NO: 1570921 - RNA, 19 nt, Artificial Sequence
  Description of Artificial Sequence: Synthetic oligonucleotide
gaggccaagaucugacagg

SEQ ID NO: 1570922 - RNA, 19 nt, Artificial Sequence
  Description of Artificial Sequence: Synthetic oligonucleotide
aguaauugaugagauugag

SEQ ID NO: 1570923 - RNA, 19 nt, Artificial Sequence
  Description of Artificial Sequence: Synthetic oligonucleotide
uguggagaugacaucuucu

SEQ ID NO: 1570924 - RNA, 19 nt, Artificial Sequence
  Description of Artificial Sequence: Synthetic oligonucleotide
uuuuccguccaucaaucuc

SEQ ID NO: 1570925 - RNA, 19 nt, Artificial Sequence
  Description of Artificial Sequence: Synthetic oligonucleotide
acaaugucgucgugacucc

SEQ ID NO: 1570926 - RNA, 19 nt, Artificial Sequence
  Description of Artificial Sequence: Synthetic oligonucleotide
ugaggcuacggccauauuu

SEQ ID NO: 1570927 - RNA, 19 nt, Artificial Sequence
  Description of Artificial Sequence: Synthetic oligonucleotide
aggcaauuagauuuccucu

SEQ ID NO: 1570928 - RNA, 19 nt, Artificial Sequence
  Description of Artificial Sequence: Synthetic oligonucleotide
cauugaugguaaucugugg

SEQ ID NO: 1570929 - RNA, 19 nt, Artificial Sequence
  Description of Artificial Sequence: Synthetic oligonucleotide
ucgaggaagcacuuggcca

SEQ ID NO: 1570930 - RNA, 19 nt, Artificial Sequence
  Description of Artificial Sequence: Synthetic oligonucleotide
guaacuucgauaggauagg

SEQ ID NO: 1570931 - RNA, 19 nt, Artificial Sequence
  Description of Artificial Sequence: Synthetic oligonucleotide
agcucaauacacucuauau

SEQ ID NO: 1570932 - RNA, 19 nt, Artificial Sequence
  Description of Artificial Sequence: Synthetic oligonucleotide
gagcauagcccgcucaugc

SEQ ID NO: 1570933 - RNA, 19 nt, Artificial Sequence
  Description of Artificial Sequence: Synthetic oligonucleotide
uggugaaaccacuuccacc

SEQ ID NO: 1570934 - RNA, 19 nt, Artificial Sequence
  Description of Artificial Sequence: Synthetic oligonucleotide
cuuguaguaauugaugaga

SEQ ID NO: 1570935 - RNA, 19 nt, Artificial Sequence
  Description of Artificial Sequence: Synthetic oligonucleotide
uuguggucgaggaagcacu

SEQ ID NO: 1570936 - RNA, 19 nt, Artificial Sequence
  Description of Artificial Sequence: Synthetic oligonucleotide
ugauacuagugauuucacu

SEQ ID NO: 1570937 - RNA, 19 nt, Artificial Sequence
  Description of Artificial Sequence: Synthetic oligonucleotide
cuuagccucuuucuugggg

SEQ ID NO: 1570938 - RNA, 19 nt, Artificial Sequence
  Description of Artificial Sequence: Synthetic oligonucleotide
ugugaguaacucuuguuuu

SEQ ID NO: 1570939 - RNA, 19 nt, Artificial Sequence
  Description of Artificial Sequence: Synthetic oligonucleotide
ucgugagucacccauucau

SEQ ID NO: 1570940 - RNA, 19 nt, Artificial Sequence
  Description of Artificial Sequence: Synthetic oligonucleotide
aaauucgcacagguagagg

SEQ ID NO: 1570941 - RNA, 19 nt, Artificial Sequence
  Description of Artificial Sequence: Synthetic oligonucleotide
uucacgcucaggaucucag

SEQ ID NO: 1570942 - RNA, 19 nt, Artificial Sequence
  Description of Artificial Sequence: Synthetic oligonucleotide
gagccguuugagcauagcc

SEQ ID NO: 1570943 - RNA, 19 nt, Artificial Sequence
  Description of Artificial Sequence: Synthetic oligonucleotide
gaggcuacggccauauuug

SEQ ID NO: 1570944 - RNA, 19 nt, Artificial Sequence
  Description of Artificial Sequence: Synthetic oligonucleotide
accaguaacuucgauagga

SEQ ID NO: 1570945 - RNA, 19 nt, Artificial Sequence
  Description of Artificial Sequence: Synthetic oligonucleotide
uagaaaagcuuucggccac

SEQ ID NO: 1570946 - RNA, 19 nt, Artificial Sequence
  Description of Artificial Sequence: Synthetic oligonucleotide
acauuuggucaaguggcgc

SEQ ID NO: 1570947 - RNA, 19 nt, Artificial Sequence
  Description of Artificial Sequence: Synthetic oligonucleotide
uggacauagaaaagcuuuc

SEQ ID NO: 1570948 - RNA, 19 nt, Artificial Sequence
  Description of Artificial Sequence: Synthetic oligonucleotide
ucuacuuuagagaguucau

SEQ ID NO: 1570949 - RNA, 19 nt, Artificial Sequence
  Description of Artificial Sequence: Synthetic oligonucleotide
guagaggacggguagugug

SEQ ID NO: 1570950 - RNA, 19 nt, Artificial Sequence
  Description of Artificial Sequence: Synthetic oligonucleotide
uggucugggaccaguaacu

SEQ ID NO: 1570951 - RNA, 19 nt, Artificial Sequence
  Description of Artificial Sequence: Synthetic oligonucleotide
cagacacagguuuugugag

SEQ ID NO: 1570952 - RNA, 19 nt, Artificial Sequence
  Description of Artificial Sequence: Synthetic oligonucleotide
gaguucauagcugaacuca

SEQ ID NO: 1570953 - RNA, 19 nt, Artificial Sequence
  Description of Artificial Sequence: Synthetic oligonucleotide
uucgauaggauaggaggcc

SEQ ID NO: 1570954 - RNA, 19 nt, Artificial Sequence
  Description of Artificial Sequence: Synthetic oligonucleotide
cuuuagagaguucauagcu

SEQ ID NO: 1570955 - RNA, 19 nt, Artificial Sequence
  Description of Artificial Sequence: Synthetic oligonucleotide
uugcgguaaauuucauugc

SEQ ID NO: 1570956 - RNA, 19 nt, Artificial Sequence
  Description of Artificial Sequence: Synthetic oligonucleotide
accaagcugccagucaugc

SEQ ID NO: 1570957 - RNA, 19 nt, Artificial Sequence
  Description of Artificial Sequence: Synthetic oligonucleotide
aacuucgauaggauaggag

SEQ ID NO: 1570958 - RNA, 19 nt, Artificial Sequence
  Description of Artificial Sequence: Synthetic oligonucleotide
cuacggccauauuugaggc

SEQ ID NO: 1570959 - RNA, 19 nt, Artificial Sequence
  Description of Artificial Sequence: Synthetic oligonucleotide
cacauuuggucaaguggcg

SEQ ID NO: 1570960 - RNA, 19 nt, Artificial Sequence
  Description of Artificial Sequence: Synthetic oligonucleotide
agaaguaccauggcuugag

SEQ ID NO: 1570961 - RNA, 19 nt, Artificial Sequence
  Description of Artificial Sequence: Synthetic oligonucleotide
cuagugauuucacugaucu

SEQ ID NO: 1570962 - RNA, 19 nt, Artificial Sequence
  Description of Artificial Sequence: Synthetic oligonucleotide
ugaaaccacuuccaccuuc

SEQ ID NO: 1570963 - RNA, 19 nt, Artificial Sequence
  Description of Artificial Sequence: Synthetic oligonucleotide
gccguuugagcauagcccg

SEQ ID NO: 1570964 - RNA, 19 nt, Artificial Sequence
  Description of Artificial Sequence: Synthetic oligonucleotide
aggcaaaauucgcacaggu

SEQ ID NO: 1570965 - RNA, 19 nt, Artificial Sequence
  Description of Artificial Sequence: Synthetic oligonucleotide
acguuuguugaaaucaaug

SEQ ID NO: 1570966 - RNA, 19 nt, Artificial Sequence
  Description of Artificial Sequence: Synthetic oligonucleotide
aggggucuuagccucuuuc

SEQ ID NO: 1570967 - RNA, 19 nt, Artificial Sequence
  Description of Artificial Sequence: Synthetic oligonucleotide
gauaggauaggaggccaag

SEQ ID NO: 1570968 - RNA, 19 nt, Artificial Sequence
  Description of Artificial Sequence: Synthetic oligonucleotide
agucaauucgaaggagccg

SEQ ID NO: 1570969 - RNA, 19 nt, Artificial Sequence
  Description of Artificial Sequence: Synthetic oligonucleotide
auucugagggaaaacugag

SEQ ID NO: 1570970 - RNA, 19 nt, Artificial Sequence
  Description of Artificial Sequence: Synthetic oligonucleotide
ggaaguccguucuugguag

SEQ ID NO: 1570971 - RNA, 19 nt, Artificial Sequence
  Description of Artificial Sequence: Synthetic oligonucleotide
ugaugguaaucuguggccu

SEQ ID NO: 1570972 - RNA, 19 nt, Artificial Sequence
  Description of Artificial Sequence: Synthetic oligonucleotide
auggacauagaaaagcuuu

SEQ ID NO: 1570973 - RNA, 19 nt, Artificial Sequence
  Description of Artificial Sequence: Synthetic oligonucleotide
cugcccuacgggcugaucc

SEQ ID NO: 1570974 - RNA, 19 nt, Artificial Sequence
  Description of Artificial Sequence: Synthetic oligonucleotide
uacuagugauuucacugau

SEQ ID NO: 1570975 - RNA, 19 nt, Artificial Sequence
  Description of Artificial Sequence: Synthetic oligonucleotide
ucugcgcugauagggaggc

SEQ ID NO: 1570976 - RNA, 19 nt, Artificial Sequence
  Description of Artificial Sequence: Synthetic oligonucleotide
ucgaaggagccguuugagc

SEQ ID NO: 1570977 - RNA, 19 nt, Artificial Sequence
  Description of Artificial Sequence: Synthetic oligonucleotide
acggggagaaguaccaugg

SEQ ID NO: 1570978 - RNA, 19 nt, Artificial Sequence
  Description of Artificial Sequence: Synthetic oligonucleotide
gucgaggaagcacuuggcc

SEQ ID NO: 1570979 - RNA, 19 nt, Artificial Sequence
  Description of Artificial Sequence: Synthetic oligonucleotide
uccggucagacaccaagcu

SEQ ID NO: 1570980 - RNA, 19 nt, Artificial Sequence
  Description of Artificial Sequence: Synthetic oligonucleotide
ucaugcccauccacgaugu

SEQ ID NO: 1570981 - RNA, 19 nt, Artificial Sequence
  Description of Artificial Sequence: Synthetic oligonucleotide
uguaguaauugaugagauu

SEQ ID NO: 1570982 - RNA, 19 nt, Artificial Sequence
  Description of Artificial Sequence: Synthetic oligonucleotide
cagcccucgauuaucuccc

SEQ ID NO: 1570983 - RNA, 19 nt, Artificial Sequence
  Description of Artificial Sequence: Synthetic oligonucleotide
cagacguuuguugaaauca

SEQ ID NO: 1570984 - RNA, 19 nt, Artificial Sequence
  Description of Artificial Sequence: Synthetic oligonucleotide
gggagugaagugcagacac

SEQ ID NO: 1570985 - RNA, 19 nt, Artificial Sequence
  Description of Artificial Sequence: Synthetic oligonucleotide
caaaauucgcacagguaga

SEQ ID NO: 1570986 - RNA, 19 nt, Artificial Sequence
  Description of Artificial Sequence: Synthetic oligonucleotide
acugaucucauugauggua

SEQ ID NO: 1570987 - RNA, 19 nt, Artificial Sequence
  Description of Artificial Sequence: Synthetic oligonucleotide
cucaugcccauccacgaug

SEQ ID NO: 1570988 - RNA, 19 nt, Artificial Sequence
  Description of Artificial Sequence: Synthetic oligonucleotide
uauucuucauccgggugac

SEQ ID NO: 1570989 - RNA, 19 nt, Artificial Sequence
  Description of Artificial Sequence: Synthetic oligonucleotide
cugaacuguccugagaguc

SEQ ID NO: 1570990 - RNA, 19 nt, Artificial Sequence
  Description of Artificial Sequence: Synthetic oligonucleotide
ugauccauucugagggaaa

SEQ ID NO: 1570991 - RNA, 19 nt, Artificial Sequence
  Description of Artificial Sequence: Synthetic oligonucleotide
gucgucgugacuccgguca

SEQ ID NO: 1570992 - RNA, 19 nt, Artificial Sequence
  Description of Artificial Sequence: Synthetic oligonucleotide
gagugaggauauauuggcc

SEQ ID NO: 1570993 - RNA, 19 nt, Artificial Sequence
  Description of Artificial Sequence: Synthetic oligonucleotide
ggcagagucaggaugcagg

SEQ ID NO: 1570994 - RNA, 19 nt, Artificial Sequence
  Description of Artificial Sequence: Synthetic oligonucleotide
uugagcauagcccgcucau

SEQ ID NO: 1570995 - RNA, 19 nt, Artificial Sequence
  Description of Artificial Sequence: Synthetic oligonucleotide
ugacagagugaggauauau

SEQ ID NO: 1570996 - RNA, 19 nt, Artificial Sequence
  Description of Artificial Sequence: Synthetic oligonucleotide
gaugguaaucuguggccuc

SEQ ID NO: 1570997 - RNA, 19 nt, Artificial Sequence
  Description of Artificial Sequence: Synthetic oligonucleotide
acuagugauuucacugauc

SEQ ID NO: 1570998 - RNA, 19 nt, Artificial Sequence
  Description of Artificial Sequence: Synthetic oligonucleotide
agcacgggcaggcggcagc

SEQ ID NO: 1570999 - RNA, 19 nt, Artificial Sequence
  Description of Artificial Sequence: Synthetic oligonucleotide
cuuucaggcgagccggggc

SEQ ID NO: 1571000 - RNA, 19 nt, Artificial Sequence
  Description of Artificial Sequence: Synthetic oligonucleotide
uugcagucauacucuguca

SEQ ID NO: 1571001 - RNA, 19 nt, Artificial Sequence
  Description of Artificial Sequence: Synthetic oligonucleotide
aggaaguccguucuuggua

SEQ ID NO: 1571002 - RNA, 19 nt, Artificial Sequence
  Description of Artificial Sequence: Synthetic oligonucleotide
ggagaaguaccauggcuug

SEQ ID NO: 1571003 - RNA, 19 nt, Artificial Sequence
  Description of Artificial Sequence: Synthetic oligonucleotide
gaccaguaacuucgauagg

SEQ ID NO: 1571004 - RNA, 19 nt, Artificial Sequence
  Description of Artificial Sequence: Synthetic oligonucleotide
agccucucgugagucaccc

SEQ ID NO: 1571005 - RNA, 19 nt, Artificial Sequence
  Description of Artificial Sequence: Synthetic oligonucleotide
auucgcacagguagaggac

SEQ ID NO: 1571006 - RNA, 19 nt, Artificial Sequence
  Description of Artificial Sequence: Synthetic oligonucleotide
aagcuuucggccacugaug

SEQ ID NO: 1571007 - RNA, 19 nt, Artificial Sequence
  Description of Artificial Sequence: Synthetic oligonucleotide
cauggcuugaggcgaugcc

SEQ ID NO: 1571008 - RNA, 19 nt, Artificial Sequence
  Description of Artificial Sequence: Synthetic oligonucleotide
cuuguggucgaggaagcac

SEQ ID NO: 1571009 - RNA, 19 nt, Artificial Sequence
  Description of Artificial Sequence: Synthetic oligonucleotide
ucgauaggauaggaggcca

SEQ ID NO: 1571010 - RNA, 19 nt, Artificial Sequence
  Description of Artificial Sequence: Synthetic oligonucleotide
agucaugcguggugcugac

SEQ ID NO: 1571011 - RNA, 19 nt, Artificial Sequence
  Description of Artificial Sequence: Synthetic oligonucleotide
cucugcgcugauagggagg

SEQ ID NO: 1571012 - RNA, 19 nt, Artificial Sequence
  Description of Artificial Sequence: Synthetic oligonucleotide
uugaugagauugagauacu

SEQ ID NO: 1571013 - RNA, 19 nt, Artificial Sequence
  Description of Artificial Sequence: Synthetic oligonucleotide
cuccggucagacaccaagc

SEQ ID NO: 1571014 - RNA, 19 nt, Artificial Sequence
  Description of Artificial Sequence: Synthetic oligonucleotide
acucgcugggcacuggagu

SEQ ID NO: 1571015 - RNA, 19 nt, Artificial Sequence
  Description of Artificial Sequence: Synthetic oligonucleotide
uucauccgggugacaaugu

SEQ ID NO: 1571016 - RNA, 19 nt, Artificial Sequence
  Description of Artificial Sequence: Synthetic oligonucleotide
aguccguucuugguagggg

SEQ ID NO: 1571017 - RNA, 19 nt, Artificial Sequence
  Description of Artificial Sequence: Synthetic oligonucleotide
uaacuucgauaggauagga

SEQ ID NO: 1571018 - RNA, 19 nt, Artificial Sequence
  Description of Artificial Sequence: Synthetic oligonucleotide
ggagucaauucgaaggagc

SEQ ID NO: 1571019 - RNA, 19 nt, Artificial Sequence
  Description of Artificial Sequence: Synthetic oligonucleotide
gggucugugucauaguaca

SEQ ID NO: 1571020 - RNA, 19 nt, Artificial Sequence
  Description of Artificial Sequence: Synthetic oligonucleotide
ugacgguauuccaucugaa

SEQ ID NO: 1571021 - RNA, 19 nt, Artificial Sequence
  Description of Artificial Sequence: Synthetic oligonucleotide
cagucauacucugucauca

SEQ ID NO: 1571022 - RNA, 19 nt, Artificial Sequence
  Description of Artificial Sequence: Synthetic oligonucleotide
agacacagguuuugugagu

SEQ ID NO: 1571023 - RNA, 19 nt, Artificial Sequence
  Description of Artificial Sequence: Synthetic oligonucleotide
auuuggucaaguggcgcug

SEQ ID NO: 1571024 - RNA, 19 nt, Artificial Sequence
  Description of Artificial Sequence: Synthetic oligonucleotide
cugacgguauuccaucuga

SEQ ID NO: 1571025 - RNA, 19 nt, Artificial Sequence
  Description of Artificial Sequence: Synthetic oligonucleotide
aaucaauguaauggacaua

SEQ ID NO: 1571026 - RNA, 19 nt, Artificial Sequence
  Description of Artificial Sequence: Synthetic oligonucleotide
cugaucucauugaugguaa

SEQ ID NO: 1571027 - RNA, 19 nt, Artificial Sequence
  Description of Artificial Sequence: Synthetic oligonucleotide
ugccagucaugcguggugc

SEQ ID NO: 1571028 - RNA, 19 nt, Artificial Sequence
  Description of Artificial Sequence: Synthetic oligonucleotide
ccgaaggucacauuugguc

SEQ ID NO: 1571029 - RNA, 19 nt, Artificial Sequence
  Description of Artificial Sequence: Synthetic oligonucleotide
uccguccugguugugcugc

SEQ ID NO: 1571030 - RNA, 19 nt, Artificial Sequence
  Description of Artificial Sequence: Synthetic oligonucleotide
acggguaguguggugagcu

SEQ ID NO: 1571031 - RNA, 19 nt, Artificial Sequence
  Description of Artificial Sequence: Synthetic oligonucleotide
cuuugggagugaagugcag

SEQ ID NO: 1571032 - RNA, 19 nt, Artificial Sequence
  Description of Artificial Sequence: Synthetic oligonucleotide
cgugacuccggucagacac

SEQ ID NO: 1571033 - RNA, 19 nt, Artificial Sequence
  Description of Artificial Sequence: Synthetic oligonucleotide
ggucacauuuggucaagug

SEQ ID NO: 1571034 - RNA, 19 nt, Artificial Sequence
  Description of Artificial Sequence: Synthetic oligonucleotide
aagcccuugcagucauacu

SEQ ID NO: 1571035 - RNA, 19 nt, Artificial Sequence
  Description of Artificial Sequence: Synthetic oligonucleotide
ugacaaugucgucgugacu

SEQ ID NO: 1571036 - RNA, 19 nt, Artificial Sequence
  Description of Artificial Sequence: Synthetic oligonucleotide
ugcugacgguauuccaucu

SEQ ID NO: 1571037 - RNA, 19 nt, Artificial Sequence
  Description of Artificial Sequence: Synthetic oligonucleotide
ugcccuacgggcugaucca

SEQ ID NO: 1571038 - RNA, 19 nt, Artificial Sequence
  Description of Artificial Sequence: Synthetic oligonucleotide
uccguucuugguagggguc

SEQ ID NO: 1571039 - RNA, 19 nt, Artificial Sequence
  Description of Artificial Sequence: Synthetic oligonucleotide
gucaauucgaaggagccgu

SEQ ID NO: 1571040 - RNA, 19 nt, Artificial Sequence
  Description of Artificial Sequence: Synthetic oligonucleotide
uacggccauauuugaggca

SEQ ID NO: 1571041 - RNA, 19 nt, Artificial Sequence
  Description of Artificial Sequence: Synthetic oligonucleotide
uagugauuucacugaucuc

SEQ ID NO: 1571042 - RNA, 19 nt, Artificial Sequence
  Description of Artificial Sequence: Synthetic oligonucleotide
gauggucugggaccaguaa

SEQ ID NO: 1571043 - RNA, 19 nt, Artificial Sequence
  Description of Artificial Sequence: Synthetic oligonucleotide
ucgucgugacuccggucag

SEQ ID NO: 1571044 - RNA, 19 nt, Artificial Sequence
  Description of Artificial Sequence: Synthetic oligonucleotide
agguagaggacggguagug

SEQ ID NO: 1571045 - RNA, 19 nt, Artificial Sequence
  Description of Artificial Sequence: Synthetic oligonucleotide
cuugaggcgaugccggcca

SEQ ID NO: 1571046 - RNA, 19 nt, Artificial Sequence
  Description of Artificial Sequence: Synthetic oligonucleotide
guguggagaugacaucuuc

SEQ ID NO: 1571047 - RNA, 19 nt, Artificial Sequence
  Description of Artificial Sequence: Synthetic oligonucleotide
ugccggccaagcucaauac

SEQ ID NO: 1571048 - RNA, 19 nt, Artificial Sequence
  Description of Artificial Sequence: Synthetic oligonucleotide
uagccucugcgcugauagg

SEQ ID NO: 1571049 - RNA, 19 nt, Artificial Sequence
  Description of Artificial Sequence: Synthetic oligonucleotide
gaggcgaugccggccaagc

SEQ ID NO: 1571050 - RNA, 19 nt, Artificial Sequence
  Description of Artificial Sequence: Synthetic oligonucleotide
augguaaucuguggccucu

SEQ ID NO: 1571051 - RNA, 19 nt, Artificial Sequence
  Description of Artificial Sequence: Synthetic oligonucleotide
caauguggaagcccuugca

SEQ ID NO: 1571052 - RNA, 19 nt, Artificial Sequence
  Description of Artificial Sequence: Synthetic oligonucleotide
aguucauagcugaacucaa

SEQ ID NO: 1571053 - RNA, 19 nt, Artificial Sequence
  Description of Artificial Sequence: Synthetic oligonucleotide
ucuuguggguacggggaga

SEQ ID NO: 1571054 - RNA, 19 nt, Artificial Sequence
  Description of Artificial Sequence: Synthetic oligonucleotide
uuggucaaguggcgcugca

SEQ ID NO: 1571055 - RNA, 19 nt, Artificial Sequence
  Description of Artificial Sequence: Synthetic oligonucleotide
uggucaaguggcgcugcag

SEQ ID NO: 1571056 - RNA, 19 nt, Artificial Sequence
  Description of Artificial Sequence: Synthetic oligonucleotide
aggauauauuggcccuugu

SEQ ID NO: 1571057 - RNA, 19 nt, Artificial Sequence
  Description of Artificial Sequence: Synthetic oligonucleotide
augucgucgugacuccggu

SEQ ID NO: 1571058 - RNA, 19 nt, Artificial Sequence
  Description of Artificial Sequence: Synthetic oligonucleotide
augccggccaagcucaaua

SEQ ID NO: 1571059 - RNA, 19 nt, Artificial Sequence
  Description of Artificial Sequence: Synthetic oligonucleotide
agcuugccauagccucugc

SEQ ID NO: 1571060 - RNA, 19 nt, Artificial Sequence
  Description of Artificial Sequence: Synthetic oligonucleotide
ucaauucgaaggagccguu

SEQ ID NO: 1571061 - RNA, 19 nt, Artificial Sequence
  Description of Artificial Sequence: Synthetic oligonucleotide
agaucugacaggggcuucu

SEQ ID NO: 1571062 - RNA, 19 nt, Artificial Sequence
  Description of Artificial Sequence: Synthetic oligonucleotide
ucuuguggucgaggaagca

SEQ ID NO: 1571063 - RNA, 19 nt, Artificial Sequence
  Description of Artificial Sequence: Synthetic oligonucleotide
ccggccaagcucaauacac

SEQ ID NO: 1571064 - RNA, 19 nt, Artificial Sequence
  Description of Artificial Sequence: Synthetic oligonucleotide
ugcguggugcugacgguau

SEQ ID NO: 1571065 - RNA, 19 nt, Artificial Sequence
  Description of Artificial Sequence: Synthetic oligonucleotide
ugguugcgccgcagcacgg

SEQ ID NO: 1571066 - RNA, 19 nt, Artificial Sequence
  Description of Artificial Sequence: Synthetic oligonucleotide
cucuuucaggcgagccggg

SEQ ID NO: 1571067 - RNA, 19 nt, Artificial Sequence
  Description of Artificial Sequence: Synthetic oligonucleotide
guaccauggcuugaggcga

SEQ ID NO: 1571068 - RNA, 19 nt, Artificial Sequence
  Description of Artificial Sequence: Synthetic oligonucleotide
uguggucgaggaagcacuu

SEQ ID NO: 1571069 - RNA, 19 nt, Artificial Sequence
  Description of Artificial Sequence: Synthetic oligonucleotide
ccgggugacaaugucgucg

SEQ ID NO: 1571070 - RNA, 19 nt, Artificial Sequence
  Description of Artificial Sequence: Synthetic oligonucleotide
ugacuccggucagacacca

SEQ ID NO: 1571071 - RNA, 19 nt, Artificial Sequence
  Description of Artificial Sequence: Synthetic oligonucleotide
caaugucgucgugacuccg

SEQ ID NO: 1571072 - RNA, 19 nt, Artificial Sequence
  Description of Artificial Sequence: Synthetic oligonucleotide
agacguuuguugaaaucaa

SEQ ID NO: 1571073 - RNA, 19 nt, Artificial Sequence
  Description of Artificial Sequence: Synthetic oligonucleotide
uggggaacuguaucuucuu

SEQ ID NO: 1571074 - RNA, 19 nt, Artificial Sequence
  Description of Artificial Sequence: Synthetic oligonucleotide
cugccagucaugcguggug

SEQ ID NO: 1571075 - RNA, 19 nt, Artificial Sequence
  Description of Artificial Sequence: Synthetic oligonucleotide
ggauauauuggcccuugua

SEQ ID NO: 1571076 - RNA, 19 nt, Artificial Sequence
  Description of Artificial Sequence: Synthetic oligonucleotide
gucugggaccaguaacuuc

SEQ ID NO: 1571077 - RNA, 19 nt, Artificial Sequence
  Description of Artificial Sequence: Synthetic oligonucleotide
cauagcccgcucaugccca

SEQ ID NO: 1571078 - RNA, 19 nt, Artificial Sequence
  Description of Artificial Sequence: Synthetic oligonucleotide
cuacuuuagagaguucaua

SEQ ID NO: 1571079 - RNA, 19 nt, Artificial Sequence
  Description of Artificial Sequence: Synthetic oligonucleotide
ugaggauauauuggcccuu

SEQ ID NO: 1571080 - RNA, 19 nt, Artificial Sequence
  Description of Artificial Sequence: Synthetic oligonucleotide
aggcuacggccauauuuga

SEQ ID NO: 1571081 - RNA, 19 nt, Artificial Sequence
  Description of Artificial Sequence: Synthetic oligonucleotide
gggaccaguaacuucgaua

SEQ ID NO: 1571082 - RNA, 19 nt, Artificial Sequence
  Description of Artificial Sequence: Synthetic oligonucleotide
uugcgccgcagcacgggca

SEQ ID NO: 1571083 - RNA, 19 nt, Artificial Sequence
  Description of Artificial Sequence: Synthetic oligonucleotide
agaaaagcuuucggccacu

SEQ ID NO: 1571084 - RNA, 19 nt, Artificial Sequence
  Description of Artificial Sequence: Synthetic oligonucleotide
guugcgccgcagcacgggc

SEQ ID NO: 1571085 - RNA, 19 nt, Artificial Sequence
  Description of Artificial Sequence: Synthetic oligonucleotide
gagaaguaccauggcuuga

SEQ ID NO: 1571086 - RNA, 19 nt, Artificial Sequence
  Description of Artificial Sequence: Synthetic oligonucleotide
aaggagccguuugagcaua

SEQ ID NO: 1571087 - RNA, 19 nt, Artificial Sequence
  Description of Artificial Sequence: Synthetic oligonucleotide
gaaggagccguuugagcau

SEQ ID NO: 1571088 - RNA, 19 nt, Artificial Sequence
  Description of Artificial Sequence: Synthetic oligonucleotide
caccucucuuucaggcgag

SEQ ID NO: 1571089 - RNA, 19 nt, Artificial Sequence
  Description of Artificial Sequence: Synthetic oligonucleotide
gaggacggguaguguggug

SEQ ID NO: 1571090 - RNA, 19 nt, Artificial Sequence
  Description of Artificial Sequence: Synthetic oligonucleotide
cugugucauaguacaaugu

SEQ ID NO: 1571091 - RNA, 19 nt, Artificial Sequence
  Description of Artificial Sequence: Synthetic oligonucleotide
guuugagcauagcccgcuc

SEQ ID NO: 1571092 - RNA, 19 nt, Artificial Sequence
  Description of Artificial Sequence: Synthetic oligonucleotide
gugccgaaggucacauuug

SEQ ID NO: 1571093 - RNA, 19 nt, Artificial Sequence
  Description of Artificial Sequence: Synthetic oligonucleotide
ugaggcgaugccggccaag

SEQ ID NO: 1571094 - RNA, 19 nt, Artificial Sequence
  Description of Artificial Sequence: Synthetic oligonucleotide
cgaaggucacauuugguca

SEQ ID NO: 1571095 - RNA, 19 nt, Artificial Sequence
  Description of Artificial Sequence: Synthetic oligonucleotide
uaccauggcuugaggcgau

SEQ ID NO: 1571096 - RNA, 19 nt, Artificial Sequence
  Description of Artificial Sequence: Synthetic oligonucleotide
caaucagcagcuugccaua

SEQ ID NO: 1571097 - RNA, 19 nt, Artificial Sequence
  Description of Artificial Sequence: Synthetic oligonucleotide
gcugacgguauuccaucug

SEQ ID NO: 1571098 - RNA, 19 nt, Artificial Sequence
  Description of Artificial Sequence: Synthetic oligonucleotide
gacagagugaggauauauu

SEQ ID NO: 1571099 - RNA, 19 nt, Artificial Sequence
  Description of Artificial Sequence: Synthetic oligonucleotide
cacagguagaggacgggua

SEQ ID NO: 1571100 - RNA, 19 nt, Artificial Sequence
  Description of Artificial Sequence: Synthetic oligonucleotide
ucgcugggcacuggaguug

SEQ ID NO: 1571101 - RNA, 19 nt, Artificial Sequence
  Description of Artificial Sequence: Synthetic oligonucleotide
uccccgcucucugacuuca

SEQ ID NO: 1571102 - RNA, 19 nt, Artificial Sequence
  Description of Artificial Sequence: Synthetic oligonucleotide
ucgugacuccggucagaca

SEQ ID NO: 1571103 - RNA, 19 nt, Artificial Sequence
  Description of Artificial Sequence: Synthetic oligonucleotide
ccagacguuuguugaaauc

SEQ ID NO: 1571104 - RNA, 19 nt, Artificial Sequence
  Description of Artificial Sequence: Synthetic oligonucleotide
ggguacggggagaaguacc

SEQ ID NO: 1571105 - RNA, 19 nt, Artificial Sequence
  Description of Artificial Sequence: Synthetic oligonucleotide
ucauugccuggagggugcc

SEQ ID NO: 1571106 - RNA, 19 nt, Artificial Sequence
  Description of Artificial Sequence: Synthetic oligonucleotide
ugucgucgugacuccgguc

SEQ ID NO: 1571107 - RNA, 19 nt, Artificial Sequence
  Description of Artificial Sequence: Synthetic oligonucleotide
aggcagagucaggaugcag

SEQ ID NO: 1571108 - RNA, 19 nt, Artificial Sequence
  Description of Artificial Sequence: Synthetic oligonucleotide
cuggagggugccgaagguc

SEQ ID NO: 1571109 - RNA, 19 nt, Artificial Sequence
  Description of Artificial Sequence: Synthetic oligonucleotide
gugacuccggucagacacc

SEQ ID NO: 1571110 - RNA, 19 nt, Artificial Sequence
  Description of Artificial Sequence: Synthetic oligonucleotide
cguuuguugaaaucaaugu

SEQ ID NO: 1571111 - RNA, 19 nt, Artificial Sequence
  Description of Artificial Sequence: Synthetic oligonucleotide
ccuacgggcugauccauuc

SEQ ID NO: 1571112 - RNA, 19 nt, Artificial Sequence
  Description of Artificial Sequence: Synthetic oligonucleotide
ggcuacggccauauuugag

SEQ ID NO: 1571113 - RNA, 19 nt, Artificial Sequence
  Description of Artificial Sequence: Synthetic oligonucleotide
gcucaauacacucuauauu

SEQ ID NO: 1571114 - RNA, 19 nt, Artificial Sequence
  Description of Artificial Sequence: Synthetic oligonucleotide
ggggagaaguaccauggcu

SEQ ID NO: 1571115 - RNA, 19 nt, Artificial Sequence
  Description of Artificial Sequence: Synthetic oligonucleotide
cagucaugcguggugcuga

SEQ ID NO: 1571116 - RNA, 19 nt, Artificial Sequence
  Description of Artificial Sequence: Synthetic oligonucleotide
cuuguggguacggggagaa

SEQ ID NO: 1571117 - RNA, 19 nt, Artificial Sequence
  Description of Artificial Sequence: Synthetic oligonucleotide
guccguucuugguaggggu

SEQ ID NO: 1571118 - RNA, 19 nt, Artificial Sequence
  Description of Artificial Sequence: Synthetic oligonucleotide
ggggcugacucgcugggca

SEQ ID NO: 1571119 - RNA, 19 nt, Artificial Sequence
  Description of Artificial Sequence: Synthetic oligonucleotide
gucaugcguggugcugacg

SEQ ID NO: 1571120 - RNA, 19 nt, Artificial Sequence
  Description of Artificial Sequence: Synthetic oligonucleotide
ggcgcugcagacacuugag

SEQ ID NO: 1571121 - RNA, 19 nt, Artificial Sequence
  Description of Artificial Sequence: Synthetic oligonucleotide
gacguuuguugaaaucaau

SEQ ID NO: 1571122 - RNA, 19 nt, Artificial Sequence
  Description of Artificial Sequence: Synthetic oligonucleotide
acgggcugauccauucuga

SEQ ID NO: 1571123 - RNA, 19 nt, Artificial Sequence
  Description of Artificial Sequence: Synthetic oligonucleotide
guggucgaggaagcacuug

SEQ ID NO: 1571124 - RNA, 19 nt, Artificial Sequence
  Description of Artificial Sequence: Synthetic oligonucleotide
gcucuuguggguacgggga

SEQ ID NO: 1571125 - RNA, 19 nt, Artificial Sequence
  Description of Artificial Sequence: Synthetic oligonucleotide
ccaagcucaauacacucua

SEQ ID NO: 1571126 - RNA, 19 nt, Artificial Sequence
  Description of Artificial Sequence: Synthetic oligonucleotide
ggggucugugucauaguac

SEQ ID NO: 1571127 - RNA, 19 nt, Artificial Sequence
  Description of Artificial Sequence: Synthetic oligonucleotide
cucgugagucacccauuca

SEQ ID NO: 1571128 - RNA, 19 nt, Artificial Sequence
  Description of Artificial Sequence: Synthetic oligonucleotide
guggaagcccuugcaguca

SEQ ID NO: 1571129 - RNA, 19 nt, Artificial Sequence
  Description of Artificial Sequence: Synthetic oligonucleotide
ugguaaucuguggccucuc

SEQ ID NO: 1571130 - RNA, 19 nt, Artificial Sequence
  Description of Artificial Sequence: Synthetic oligonucleotide
uccgggugacaaugucguc

SEQ ID NO: 1571131 - RNA, 19 nt, Artificial Sequence
  Description of Artificial Sequence: Synthetic oligonucleotide
ccucugcgcugauagggag

SEQ ID NO: 1571132 - RNA, 19 nt, Artificial Sequence
  Description of Artificial Sequence: Synthetic oligonucleotide
gugcccuugcgguaaauuu

SEQ ID NO: 1571133 - RNA, 19 nt, Artificial Sequence
  Description of Artificial Sequence: Synthetic oligonucleotide
cgugagucacccauucauc

SEQ ID NO: 1571134 - RNA, 19 nt, Artificial Sequence
  Description of Artificial Sequence: Synthetic oligonucleotide
gguugcgccgcagcacggg

SEQ ID NO: 1571135 - RNA, 19 nt, Artificial Sequence
  Description of Artificial Sequence: Synthetic oligonucleotide
uugccuggagggugccgaa

SEQ ID NO: 1571136 - RNA, 19 nt, Artificial Sequence
  Description of Artificial Sequence: Synthetic oligonucleotide
uugaggcgaugccggccaa

SEQ ID NO: 1571137 - RNA, 19 nt, Artificial Sequence
  Description of Artificial Sequence: Synthetic oligonucleotide
caagauggucugggaccag

SEQ ID NO: 1571138 - RNA, 19 nt, Artificial Sequence
  Description of Artificial Sequence: Synthetic oligonucleotide
acugcccuacgggcugauc

SEQ ID NO: 1571139 - RNA, 19 nt, Artificial Sequence
  Description of Artificial Sequence: Synthetic oligonucleotide
gcccuugcgguaaauuuca

SEQ ID NO: 1571140 - RNA, 19 nt, Artificial Sequence
  Description of Artificial Sequence: Synthetic oligonucleotide
augcguggugcugacggua

SEQ ID NO: 1571141 - RNA, 19 nt, Artificial Sequence
  Description of Artificial Sequence: Synthetic oligonucleotide
uaggggucuuagccucuuu

SEQ ID NO: 1571142 - RNA, 19 nt, Artificial Sequence
  Description of Artificial Sequence: Synthetic oligonucleotide
caggaaguccguucuuggu

SEQ ID NO: 1571143 - RNA, 19 nt, Artificial Sequence
  Description of Artificial Sequence: Synthetic oligonucleotide
guggguacggggagaagua

SEQ ID NO: 1571144 - RNA, 19 nt, Artificial Sequence
  Description of Artificial Sequence: Synthetic oligonucleotide
aggcggcagcccucgauua

SEQ ID NO: 1571145 - RNA, 19 nt, Artificial Sequence
  Description of Artificial Sequence: Synthetic oligonucleotide
auagcccgcucaugcccau

SEQ ID NO: 1571146 - RNA, 19 nt, Artificial Sequence
  Description of Artificial Sequence: Synthetic oligonucleotide
aggggccacucaucuucgu

SEQ ID NO: 1571147 - RNA, 19 nt, Artificial Sequence
  Description of Artificial Sequence: Synthetic oligonucleotide
ccguuugagcauagcccgc

SEQ ID NO: 1571148 - RNA, 19 nt, Artificial Sequence
  Description of Artificial Sequence: Synthetic oligonucleotide
ggcuugaggcgaugccggc

SEQ ID NO: 1571149 - RNA, 19 nt, Artificial Sequence
  Description of Artificial Sequence: Synthetic oligonucleotide
cuugaggcuacggccauau

SEQ ID NO: 1571150 - RNA, 19 nt, Artificial Sequence
  Description of Artificial Sequence: Synthetic oligonucleotide
uugaggcuacggccauauu

SEQ ID NO: 1571151 - RNA, 19 nt, Artificial Sequence
  Description of Artificial Sequence: Synthetic oligonucleotide
guugcuggugaaaccacuu

SEQ ID NO: 1571152 - RNA, 19 nt, Artificial Sequence
  Description of Artificial Sequence: Synthetic oligonucleotide
gcgaugccggccaagcuca

SEQ ID NO: 1571153 - RNA, 19 nt, Artificial Sequence
  Description of Artificial Sequence: Synthetic oligonucleotide
cgggcugauccauucugag

SEQ ID NO: 1571154 - RNA, 19 nt, Artificial Sequence
  Description of Artificial Sequence: Synthetic oligonucleotide
cuuccguuuccaccucucu

SEQ ID NO: 1571155 - RNA, 19 nt, Artificial Sequence
  Description of Artificial Sequence: Synthetic oligonucleotide
caugcccauccacgauguc

SEQ ID NO: 1571156 - RNA, 19 nt, Artificial Sequence
  Description of Artificial Sequence: Synthetic oligonucleotide
ggugcugacgguauuccau

SEQ ID NO: 1571157 - RNA, 19 nt, Artificial Sequence
  Description of Artificial Sequence: Synthetic oligonucleotide
ggagccguuugagcauagc

SEQ ID NO: 1571158 - RNA, 19 nt, Artificial Sequence
  Description of Artificial Sequence: Synthetic oligonucleotide
ggccauauuugaggcaaaa

SEQ ID NO: 1571159 - RNA, 19 nt, Artificial Sequence
  Description of Artificial Sequence: Synthetic oligonucleotide
auuggcccuuguaguaauu

SEQ ID NO: 1571160 - RNA, 19 nt, Artificial Sequence
  Description of Artificial Sequence: Synthetic oligonucleotide
gccggccaagcucaauaca

SEQ ID NO: 1571161 - RNA, 19 nt, Artificial Sequence
  Description of Artificial Sequence: Synthetic oligonucleotide
caccuuccguuuccaccuc

SEQ ID NO: 1571162 - RNA, 19 nt, Artificial Sequence
  Description of Artificial Sequence: Synthetic oligonucleotide
gcuuucggccacugauguc

SEQ ID NO: 1571163 - RNA, 19 nt, Artificial Sequence
  Description of Artificial Sequence: Synthetic oligonucleotide
gcgguaaauuucauugccu

SEQ ID NO: 1571164 - RNA, 19 nt, Artificial Sequence
  Description of Artificial Sequence: Synthetic oligonucleotide
acccauucauccagacguu

SEQ ID NO: 1571165 - RNA, 19 nt, Artificial Sequence
  Description of Artificial Sequence: Synthetic oligonucleotide
auggugcccuugcgguaaa

SEQ ID NO: 1571166 - RNA, 19 nt, Artificial Sequence
  Description of Artificial Sequence: Synthetic oligonucleotide
ccucuccccgcucucugac

SEQ ID NO: 1571167 - RNA, 19 nt, Artificial Sequence
  Description of Artificial Sequence: Synthetic oligonucleotide
gugcccaggcaauuagauu

SEQ ID NO: 1571168 - RNA, 19 nt, Artificial Sequence
  Description of Artificial Sequence: Synthetic oligonucleotide
cuacgggcugauccauucu

SEQ ID NO: 1571169 - RNA, 19 nt, Artificial Sequence
  Description of Artificial Sequence: Synthetic oligonucleotide
caugcguggugcugacggu

SEQ ID NO: 1571170 - RNA, 19 nt, Artificial Sequence
  Description of Artificial Sequence: Synthetic oligonucleotide
ccaguaacuucgauaggau

SEQ ID NO: 1571171 - RNA, 19 nt, Artificial Sequence
  Description of Artificial Sequence: Synthetic oligonucleotide
ccugagaguccucaucagu

SEQ ID NO: 1571172 - RNA, 19 nt, Artificial Sequence
  Description of Artificial Sequence: Synthetic oligonucleotide
gcccaggcaauuagauuuc

SEQ ID NO: 1571173 - RNA, 19 nt, Artificial Sequence
  Description of Artificial Sequence: Synthetic oligonucleotide
gguagaggacggguagugu

SEQ ID NO: 1571174 - RNA, 19 nt, Artificial Sequence
  Description of Artificial Sequence: Synthetic oligonucleotide
ccucucgugagucacccau

SEQ ID NO: 1571175 - RNA, 19 nt, Artificial Sequence
  Description of Artificial Sequence: Synthetic oligonucleotide
uggugcccuugcgguaaau

SEQ ID NO: 1571176 - RNA, 19 nt, Artificial Sequence
  Description of Artificial Sequence: Synthetic oligonucleotide
uagcccgcucaugcccauc

SEQ ID NO: 1571177 - RNA, 19 nt, Artificial Sequence
  Description of Artificial Sequence: Synthetic oligonucleotide
cugacagagugaggauaua

SEQ ID NO: 1571178 - RNA, 19 nt, Artificial Sequence
  Description of Artificial Sequence: Synthetic oligonucleotide
cgcucaugcccauccacga

SEQ ID NO: 1571179 - RNA, 19 nt, Artificial Sequence
  Description of Artificial Sequence: Synthetic oligonucleotide
ccaggcaauuagauuuccu

SEQ ID NO: 1571180 - RNA, 19 nt, Artificial Sequence
  Description of Artificial Sequence: Synthetic oligonucleotide
caauucgaaggagccguuu

SEQ ID NO: 1571181 - RNA, 19 nt, Artificial Sequence
  Description of Artificial Sequence: Synthetic oligonucleotide
caggcggcagcccucgauu

SEQ ID NO: 1571182 - RNA, 19 nt, Artificial Sequence
  Description of Artificial Sequence: Synthetic oligonucleotide
gccggggcgggacccagga

SEQ ID NO: 1571183 - RNA, 19 nt, Artificial Sequence
  Description of Artificial Sequence: Synthetic oligonucleotide
cacuugaggcuacggccau

SEQ ID NO: 1571184 - RNA, 19 nt, Artificial Sequence
  Description of Artificial Sequence: Synthetic oligonucleotide
gacuccggucagacaccaa

SEQ ID NO: 1571185 - RNA, 19 nt, Artificial Sequence
  Description of Artificial Sequence: Synthetic oligonucleotide
guacggggagaaguaccau

SEQ ID NO: 1571186 - RNA, 19 nt, Artificial Sequence
  Description of Artificial Sequence: Synthetic oligonucleotide
ggugucccugucuucccuu

SEQ ID NO: 1571187 - RNA, 19 nt, Artificial Sequence
  Description of Artificial Sequence: Synthetic oligonucleotide
gcgagccggggcgggaccc

SEQ ID NO: 1571188 - RNA, 19 nt, Artificial Sequence
  Description of Artificial Sequence: Synthetic oligonucleotide
ggugcccuugcgguaaauu

SEQ ID NO: 1571189 - RNA, 19 nt, Artificial Sequence
  Description of Artificial Sequence: Synthetic oligonucleotide
guaggggucuuagccucuu

SEQ ID NO: 1571190 - RNA, 19 nt, Artificial Sequence
  Description of Artificial Sequence: Synthetic oligonucleotide
caucagugcccaggcaauu

SEQ ID NO: 1571191 - RNA, 19 nt, Artificial Sequence
  Description of Artificial Sequence: Synthetic oligonucleotide
gccucucgugagucaccca

SEQ ID NO: 1571192 - RNA, 19 nt, Artificial Sequence
  Description of Artificial Sequence: Synthetic oligonucleotide
cccuucuacuuuagagagu

SEQ ID NO: 1571193 - RNA, 19 nt, Artificial Sequence
  Description of Artificial Sequence: Synthetic oligonucleotide
gcugccagucaugcguggu

SEQ ID NO: 1571194 - RNA, 19 nt, Artificial Sequence
  Description of Artificial Sequence: Synthetic oligonucleotide
caucuucguuguccugguu

SEQ ID NO: 1571195 - RNA, 19 nt, Artificial Sequence
  Description of Artificial Sequence: Synthetic oligonucleotide
ggcggcagcccucgauuau

SEQ ID NO: 1571196 - RNA, 19 nt, Artificial Sequence
  Description of Artificial Sequence: Synthetic oligonucleotide
ccguucuugguaggggucu

SEQ ID NO: 1571197 - RNA, 19 nt, Artificial Sequence
  Description of Artificial Sequence: Synthetic oligonucleotide
cugcgcugauagggaggca

SEQ ID NO: 1571198 - RNA, 19 nt, Artificial Sequence
  Description of Artificial Sequence: Synthetic oligonucleotide
cguuugagcauagcccgcu

SEQ ID NO: 1571199 - RNA, 19 nt, Artificial Sequence
  Description of Artificial Sequence: Synthetic oligonucleotide
gccaggggccacucaucuu

SEQ ID NO: 1571200 - RNA, 19 nt, Artificial Sequence
  Description of Artificial Sequence: Synthetic oligonucleotide
cgucgugacuccggucaga

SEQ ID NO: 1571201 - RNA, 19 nt, Artificial Sequence
  Description of Artificial Sequence: Synthetic oligonucleotide
gcccuacgggcugauccau

SEQ ID NO: 1571202 - RNA, 19 nt, Artificial Sequence
  Description of Artificial Sequence: Synthetic oligonucleotide
cccuugcgguaaauuucau

SEQ ID NO: 1571203 - RNA, 19 nt, Artificial Sequence
  Description of Artificial Sequence: Synthetic oligonucleotide
gcguggugcugacgguauu

SEQ ID NO: 1571204 - RNA, 19 nt, Artificial Sequence
  Description of Artificial Sequence: Synthetic oligonucleotide
cccuacgggcugauccauu

SEQ ID NO: 1571205 - RNA, 19 nt, Artificial Sequence
  Description of Artificial Sequence: Synthetic oligonucleotide
cacugcccuacgggcugau

SEQ ID NO: 1571206 - RNA, 19 nt, Artificial Sequence
  Description of Artificial Sequence: Synthetic oligonucleotide
ccggggcgggacccaggaa

SEQ ID NO: 1571207 - RNA, 19 nt, Artificial Sequence
  Description of Artificial Sequence: Synthetic oligonucleotide
cgaugccggccaagcucaa

SEQ ID NO: 1571208 - RNA, 19 nt, Artificial Sequence
  Description of Artificial Sequence: Synthetic oligonucleotide
agcacguacacccagccgc

SEQ ID NO: 1571209 - RNA, 19 nt, Artificial Sequence
  Description of Artificial Sequence: Synthetic oligonucleotide
agaagauaggaaugccucc

SEQ ID NO: 1571210 - RNA, 19 nt, Artificial Sequence
  Description of Artificial Sequence: Synthetic oligonucleotide
aacuuguaccauuuggucu

SEQ ID NO: 1571211 - RNA, 19 nt, Artificial Sequence
  Description of Artificial Sequence: Synthetic oligonucleotide
acaaagaauggccaggaug

SEQ ID NO: 1571212 - RNA, 19 nt, Artificial Sequence
  Description of Artificial Sequence: Synthetic oligonucleotide
uauaagguagccucuggcc

SEQ ID NO: 1571213 - RNA, 19 nt, Artificial Sequence
  Description of Artificial Sequence: Synthetic oligonucleotide
uauccuggagucuucgugg

SEQ ID NO: 1571214 - RNA, 19 nt, Artificial Sequence
  Description of Artificial Sequence: Synthetic oligonucleotide
acuccacacacacacacac

SEQ ID NO: 1571215 - RNA, 19 nt, Artificial Sequence
  Description of Artificial Sequence: Synthetic oligonucleotide
uauccaagaagacagcauc

SEQ ID NO: 1571216 - RNA, 19 nt, Artificial Sequence
  Description of Artificial Sequence: Synthetic oligonucleotide
gugauuaaggcaaugucgg

SEQ ID NO: 1571217 - RNA, 19 nt, Artificial Sequence
  Description of Artificial Sequence: Synthetic oligonucleotide
ucagggagugcccagagcu

SEQ ID NO: 1571218 - RNA, 19 nt, Artificial Sequence
  Description of Artificial Sequence: Synthetic oligonucleotide
cuagcaucuaccaagcguc

SEQ ID NO: 1571219 - RNA, 19 nt, Artificial Sequence
  Description of Artificial Sequence: Synthetic oligonucleotide
gaagcgcccaccuucaacc

SEQ ID NO: 1571220 - RNA, 19 nt, Artificial Sequence
  Description of Artificial Sequence: Synthetic oligonucleotide
uccacacacacacacacac

SEQ ID NO: 1571221 - RNA, 19 nt, Artificial Sequence
  Description of Artificial Sequence: Synthetic oligonucleotide
agaaccgggucgcagcucc

SEQ ID NO: 1571222 - RNA, 19 nt, Artificial Sequence
  Description of Artificial Sequence: Synthetic oligonucleotide
aaaugggcggccaaugagg

SEQ ID NO: 1571223 - RNA, 19 nt, Artificial Sequence
  Description of Artificial Sequence: Synthetic oligonucleotide
gagacagaaccacugcccg

SEQ ID NO: 1571224 - RNA, 19 nt, Artificial Sequence
  Description of Artificial Sequence: Synthetic oligonucleotide
uggcgugggagacagaacc

SEQ ID NO: 1571225 - RNA, 19 nt, Artificial Sequence
  Description of Artificial Sequence: Synthetic oligonucleotide
ggugcuagcaucuaccaag

SEQ ID NO: 1571226 - RNA, 19 nt, Artificial Sequence
  Description of Artificial Sequence: Synthetic oligonucleotide
ggugauuaaggcaaugucg

SEQ ID NO: 1571227 - RNA, 19 nt, Artificial Sequence
  Description of Artificial Sequence: Synthetic oligonucleotide
guugacaacaaagaauggc

SEQ ID NO: 1571228 - RNA, 19 nt, Artificial Sequence
  Description of Artificial Sequence: Synthetic oligonucleotide
uugaucagcuccucguagg

SEQ ID NO: 1571229 - RNA, 19 nt, Artificial Sequence
  Description of Artificial Sequence: Synthetic oligonucleotide
ugcauggagagaaggaaca

SEQ ID NO: 1571230 - RNA, 19 nt, Artificial Sequence
  Description of Artificial Sequence: Synthetic oligonucleotide
ucaugggugugccacuacg

SEQ ID NO: 1571231 - RNA, 19 nt, Artificial Sequence
  Description of Artificial Sequence: Synthetic oligonucleotide
uguugacaacaaagaaugg

SEQ ID NO: 1571232 - RNA, 19 nt, Artificial Sequence
  Description of Artificial Sequence: Synthetic oligonucleotide
uaacuccacacacacacac

SEQ ID NO: 1571233 - RNA, 19 nt, Artificial Sequence
  Description of Artificial Sequence: Synthetic oligonucleotide
gauuaaggcaaugucggug

SEQ ID NO: 1571234 - RNA, 19 nt, Artificial Sequence
  Description of Artificial Sequence: Synthetic oligonucleotide
gagccuauggcagaggaag

SEQ ID NO: 1571235 - RNA, 19 nt, Artificial Sequence
  Description of Artificial Sequence: Synthetic oligonucleotide
cauggugcuagcaucuacc

SEQ ID NO: 1571236 - RNA, 19 nt, Artificial Sequence
  Description of Artificial Sequence: Synthetic oligonucleotide
auaagguagccucuggccu

SEQ ID NO: 1571237 - RNA, 19 nt, Artificial Sequence
  Description of Artificial Sequence: Synthetic oligonucleotide
cuucccucucagaagauag

SEQ ID NO: 1571238 - RNA, 19 nt, Artificial Sequence
  Description of Artificial Sequence: Synthetic oligonucleotide
aaugcauggagagaaggaa

SEQ ID NO: 1571239 - RNA, 19 nt, Artificial Sequence
  Description of Artificial Sequence: Synthetic oligonucleotide
ucucagaagauaggaaugc

SEQ ID NO: 1571240 - RNA, 19 nt, Artificial Sequence
  Description of Artificial Sequence: Synthetic oligonucleotide
gaagauaggaaugccuccc

SEQ ID NO: 1571241 - RNA, 19 nt, Artificial Sequence
  Description of Artificial Sequence: Synthetic oligonucleotide
cagaagauaggaaugccuc

SEQ ID NO: 1571242 - RNA, 19 nt, Artificial Sequence
  Description of Artificial Sequence: Synthetic oligonucleotide
acugacggugcguacauug

SEQ ID NO: 1571243 - RNA, 19 nt, Artificial Sequence
  Description of Artificial Sequence: Synthetic oligonucleotide
cacacacacacacacacac

SEQ ID NO: 1571244 - RNA, 19 nt, Artificial Sequence
  Description of Artificial Sequence: Synthetic oligonucleotide
agcggcuggccauauaagg

SEQ ID NO: 1571245 - RNA, 19 nt, Artificial Sequence
  Description of Artificial Sequence: Synthetic oligonucleotide
gaaagggcuggcaucagag

SEQ ID NO: 1571246 - RNA, 19 nt, Artificial Sequence
  Description of Artificial Sequence: Synthetic oligonucleotide
agcucauggugcuagcauc

SEQ ID NO: 1571247 - RNA, 19 nt, Artificial Sequence
  Description of Artificial Sequence: Synthetic oligonucleotide
ucuaccaagcguccgggac

SEQ ID NO: 1571248 - RNA, 19 nt, Artificial Sequence
  Description of Artificial Sequence: Synthetic oligonucleotide
ugacaccgaagccacugcg

SEQ ID NO: 1571249 - RNA, 19 nt, Artificial Sequence
  Description of Artificial Sequence: Synthetic oligonucleotide
ggcaagggcagacugacgg

SEQ ID NO: 1571250 - RNA, 19 nt, Artificial Sequence
  Description of Artificial Sequence: Synthetic oligonucleotide
cucucagaagauaggaaug

SEQ ID NO: 1571251 - RNA, 19 nt, Artificial Sequence
  Description of Artificial Sequence: Synthetic oligonucleotide
gauacuccugccgaggccc

SEQ ID NO: 1571252 - RNA, 19 nt, Artificial Sequence
  Description of Artificial Sequence: Synthetic oligonucleotide
uguucccuaggccagccug

SEQ ID NO: 1571253 - RNA, 19 nt, Artificial Sequence
  Description of Artificial Sequence: Synthetic oligonucleotide
ugugauacuccugccgagg

SEQ ID NO: 1571254 - RNA, 19 nt, Artificial Sequence
  Description of Artificial Sequence: Synthetic oligonucleotide
ugccacuacggaaagggcu

SEQ ID NO: 1571255 - RNA, 19 nt, Artificial Sequence
  Description of Artificial Sequence: Synthetic oligonucleotide
ucggcccucaacuuguacc

SEQ ID NO: 1571256 - RNA, 19 nt, Artificial Sequence
  Description of Artificial Sequence: Synthetic oligonucleotide
acacgcacugccaucaucg

SEQ ID NO: 1571257 - RNA, 19 nt, Artificial Sequence
  Description of Artificial Sequence: Synthetic oligonucleotide
gggugaagcacguacaccc

SEQ ID NO: 1571258 - RNA, 19 nt, Artificial Sequence
  Description of Artificial Sequence: Synthetic oligonucleotide
acauuguagaccuguggca

SEQ ID NO: 1571259 - RNA, 19 nt, Artificial Sequence
  Description of Artificial Sequence: Synthetic oligonucleotide
caucaucgagccauggccc

SEQ ID NO: 1571260 - RNA, 19 nt, Artificial Sequence
  Description of Artificial Sequence: Synthetic oligonucleotide
aaccaugggcugccagugc

SEQ ID NO: 1571261 - RNA, 19 nt, Artificial Sequence
  Description of Artificial Sequence: Synthetic oligonucleotide
ugugcgguggggcagguuc

SEQ ID NO: 1571262 - RNA, 19 nt, Artificial Sequence
  Description of Artificial Sequence: Synthetic oligonucleotide
cauuguagaccuguggcag

SEQ ID NO: 1571263 - RNA, 19 nt, Artificial Sequence
  Description of Artificial Sequence: Synthetic oligonucleotide
agaccacagaaccgggucg

SEQ ID NO: 1571264 - RNA, 19 nt, Artificial Sequence
  Description of Artificial Sequence: Synthetic oligonucleotide
uguaucgccuuccuugauc

SEQ ID NO: 1571265 - RNA, 19 nt, Artificial Sequence
  Description of Artificial Sequence: Synthetic oligonucleotide
ugggcggccaaugaggucc

SEQ ID NO: 1571266 - RNA, 19 nt, Artificial Sequence
  Description of Artificial Sequence: Synthetic oligonucleotide
ugaagcacguacacccagc

SEQ ID NO: 1571267 - RNA, 19 nt, Artificial Sequence
  Description of Artificial Sequence: Synthetic oligonucleotide
gaagcacguacacccagcc

SEQ ID NO: 1571268 - RNA, 19 nt, Artificial Sequence
  Description of Artificial Sequence: Synthetic oligonucleotide
uccaagaagacagcaucag

SEQ ID NO: 1571269 - RNA, 19 nt, Artificial Sequence
  Description of Artificial Sequence: Synthetic oligonucleotide
acugcggcaaacauccugg

SEQ ID NO: 1571270 - RNA, 19 nt, Artificial Sequence
  Description of Artificial Sequence: Synthetic oligonucleotide
caugcugaccucuaaguca

SEQ ID NO: 1571271 - RNA, 19 nt, Artificial Sequence
  Description of Artificial Sequence: Synthetic oligonucleotide
cuugucugcccgcuguugg

SEQ ID NO: 1571272 - RNA, 19 nt, Artificial Sequence
  Description of Artificial Sequence: Synthetic oligonucleotide
aaaccaugggcugccagug

SEQ ID NO: 1571273 - RNA, 19 nt, Artificial Sequence
  Description of Artificial Sequence: Synthetic oligonucleotide
uucguggcaaaagucaggu

SEQ ID NO: 1571274 - RNA, 19 nt, Artificial Sequence
  Description of Artificial Sequence: Synthetic oligonucleotide
caaaugggcggccaaugag

SEQ ID NO: 1571275 - RNA, 19 nt, Artificial Sequence
  Description of Artificial Sequence: Synthetic oligonucleotide
augcugaccucuaagucac

SEQ ID NO: 1571276 - RNA, 19 nt, Artificial Sequence
  Description of Artificial Sequence: Synthetic oligonucleotide
aggaacagaagcgcccacc

SEQ ID NO: 1571277 - RNA, 19 nt, Artificial Sequence
  Description of Artificial Sequence: Synthetic oligonucleotide
ugugcgcugcacuugcuca

SEQ ID NO: 1571278 - RNA, 19 nt, Artificial Sequence
  Description of Artificial Sequence: Synthetic oligonucleotide
cccucaacuacccaggagg

SEQ ID NO: 1571279 - RNA, 19 nt, Artificial Sequence
  Description of Artificial Sequence: Synthetic oligonucleotide
ugggugugcaccgucaccc

SEQ ID NO: 1571280 - RNA, 19 nt, Artificial Sequence
  Description of Artificial Sequence: Synthetic oligonucleotide
ggcuguaucgccuuccuug

SEQ ID NO: 1571281 - RNA, 19 nt, Artificial Sequence
  Description of Artificial Sequence: Synthetic oligonucleotide
gaagcuucauguugacaac

SEQ ID NO: 1571282 - RNA, 19 nt, Artificial Sequence
  Description of Artificial Sequence: Synthetic oligonucleotide
augcauggagagaaggaac

SEQ ID NO: 1571283 - RNA, 19 nt, Artificial Sequence
  Description of Artificial Sequence: Synthetic oligonucleotide
aagcucauggugcuagcau

SEQ ID NO: 1571284 - RNA, 19 nt, Artificial Sequence
  Description of Artificial Sequence: Synthetic oligonucleotide
gacagaaccacugcccgug

SEQ ID NO: 1571285 - RNA, 19 nt, Artificial Sequence
  Description of Artificial Sequence: Synthetic oligonucleotide
ugauacuccugccgaggcc

SEQ ID NO: 1571286 - RNA, 19 nt, Artificial Sequence
  Description of Artificial Sequence: Synthetic oligonucleotide
uuguuugccugugauacuc

SEQ ID NO: 1571287 - RNA, 19 nt, Artificial Sequence
  Description of Artificial Sequence: Synthetic oligonucleotide
agggagugcccagagcugc

SEQ ID NO: 1571288 - RNA, 19 nt, Artificial Sequence
  Description of Artificial Sequence: Synthetic oligonucleotide
cuaccaagcguccgggacc

SEQ ID NO: 1571289 - RNA, 19 nt, Artificial Sequence
  Description of Artificial Sequence: Synthetic oligonucleotide
gacggugcguacauuguag

SEQ ID NO: 1571290 - RNA, 19 nt, Artificial Sequence
  Description of Artificial Sequence: Synthetic oligonucleotide
ggccauauaagguagccuc

SEQ ID NO: 1571291 - RNA, 19 nt, Artificial Sequence
  Description of Artificial Sequence: Synthetic oligonucleotide
ggugauggaauauccaaga

SEQ ID NO: 1571292 - RNA, 19 nt, Artificial Sequence
  Description of Artificial Sequence: Synthetic oligonucleotide
uguuugccugugauacucc

SEQ ID NO: 1571293 - RNA, 19 nt, Artificial Sequence
  Description of Artificial Sequence: Synthetic oligonucleotide
cacgucaccuccuuuguuc

SEQ ID NO: 1571294 - RNA, 19 nt, Artificial Sequence
  Description of Artificial Sequence: Synthetic oligonucleotide
guaucgccuuccuugauca

SEQ ID NO: 1571295 - RNA, 19 nt, Artificial Sequence
  Description of Artificial Sequence: Synthetic oligonucleotide
gaauauccaagaagacagc

SEQ ID NO: 1571296 - RNA, 19 nt, Artificial Sequence
  Description of Artificial Sequence: Synthetic oligonucleotide
ccaucaucgagccauggcc

SEQ ID NO: 1571297 - RNA, 19 nt, Artificial Sequence
  Description of Artificial Sequence: Synthetic oligonucleotide
ugauuaaggcaaugucggu

SEQ ID NO: 1571298 - RNA, 19 nt, Artificial Sequence
  Description of Artificial Sequence: Synthetic oligonucleotide
ugcuagcaucuaccaagcg

SEQ ID NO: 1571299 - RNA, 19 nt, Artificial Sequence
  Description of Artificial Sequence: Synthetic oligonucleotide
aacaaagaauggccaggau

SEQ ID NO: 1571300 - RNA, 19 nt, Artificial Sequence
  Description of Artificial Sequence: Synthetic oligonucleotide
cuauggcagaggaagcuuc

SEQ ID NO: 1571301 - RNA, 19 nt, Artificial Sequence
  Description of Artificial Sequence: Synthetic oligonucleotide
accuccuuuguucccuagg

SEQ ID NO: 1571302 - RNA, 19 nt, Artificial Sequence
  Description of Artificial Sequence: Synthetic oligonucleotide
uggggugaagcacguacac

SEQ ID NO: 1571303 - RNA, 19 nt, Artificial Sequence
  Description of Artificial Sequence: Synthetic oligonucleotide
cccaccuucaaccuugagg

SEQ ID NO: 1571304 - RNA, 19 nt, Artificial Sequence
  Description of Artificial Sequence: Synthetic oligonucleotide
aggaguggggugaagcacg

SEQ ID NO: 1571305 - RNA, 19 nt, Artificial Sequence
  Description of Artificial Sequence: Synthetic oligonucleotide
uaagguagccucuggccuc

SEQ ID NO: 1571306 - RNA, 19 nt, Artificial Sequence
  Description of Artificial Sequence: Synthetic oligonucleotide
aucagagcccaugcugacc

SEQ ID NO: 1571307 - RNA, 19 nt, Artificial Sequence
  Description of Artificial Sequence: Synthetic oligonucleotide
cacacacacacacacguca

SEQ ID NO: 1571308 - RNA, 19 nt, Artificial Sequence
  Description of Artificial Sequence: Synthetic oligonucleotide
ucccucucagaagauagga

SEQ ID NO: 1571309 - RNA, 19 nt, Artificial Sequence
  Description of Artificial Sequence: Synthetic oligonucleotide
ugugcaccgucacccacug

SEQ ID NO: 1571310 - RNA, 19 nt, Artificial Sequence
  Description of Artificial Sequence: Synthetic oligonucleotide
augugcgcugcacuugcuc

SEQ ID NO: 1571311 - RNA, 19 nt, Artificial Sequence
  Description of Artificial Sequence: Synthetic oligonucleotide
gccacugcggcaaacaucc

SEQ ID NO: 1571312 - RNA, 19 nt, Artificial Sequence
  Description of Artificial Sequence: Synthetic oligonucleotide
acgcugcacacgcacugcc

SEQ ID NO: 1571313 - RNA, 19 nt, Artificial Sequence
  Description of Artificial Sequence: Synthetic oligonucleotide
cucagaagauaggaaugcc

SEQ ID NO: 1571314 - RNA, 19 nt, Artificial Sequence
  Description of Artificial Sequence: Synthetic oligonucleotide
agucagguagccagugugg

SEQ ID NO: 1571315 - RNA, 19 nt, Artificial Sequence
  Description of Artificial Sequence: Synthetic oligonucleotide
uccagagcucaggaguggg

SEQ ID NO: 1571316 - RNA, 19 nt, Artificial Sequence
  Description of Artificial Sequence: Synthetic oligonucleotide
ucugggucugugccccacg

SEQ ID NO: 1571317 - RNA, 19 nt, Artificial Sequence
  Description of Artificial Sequence: Synthetic oligonucleotide
ccuuguuugccugugauac

SEQ ID NO: 1571318 - RNA, 19 nt, Artificial Sequence
  Description of Artificial Sequence: Synthetic oligonucleotide
aaugggcggccaaugaggu

SEQ ID NO: 1571319 - RNA, 19 nt, Artificial Sequence
  Description of Artificial Sequence: Synthetic oligonucleotide
ggugcguacauuguagacc

SEQ ID NO: 1571320 - RNA, 19 nt, Artificial Sequence
  Description of Artificial Sequence: Synthetic oligonucleotide
uagaccuguggcagcaccu

SEQ ID NO: 1571321 - RNA, 19 nt, Artificial Sequence
  Description of Artificial Sequence: Synthetic oligonucleotide
accuucaaccuugagggca

SEQ ID NO: 1571322 - RNA, 19 nt, Artificial Sequence
  Description of Artificial Sequence: Synthetic oligonucleotide
caaugcauggagagaagga

SEQ ID NO: 1571323 - RNA, 19 nt, Artificial Sequence
  Description of Artificial Sequence: Synthetic oligonucleotide
ugcacacgcacugccauca

SEQ ID NO: 1571324 - RNA, 19 nt, Artificial Sequence
  Description of Artificial Sequence: Synthetic oligonucleotide
uggucucaacacccagggg

SEQ ID NO: 1571325 - RNA, 19 nt, Artificial Sequence
  Description of Artificial Sequence: Synthetic oligonucleotide
caccgagugccgcaggacg

SEQ ID NO: 1571326 - RNA, 19 nt, Artificial Sequence
  Description of Artificial Sequence: Synthetic oligonucleotide
guagccucuggccuccuug

SEQ ID NO: 1571327 - RNA, 19 nt, Artificial Sequence
  Description of Artificial Sequence: Synthetic oligonucleotide
gauggcgugggagacagaa

SEQ ID NO: 1571328 - RNA, 19 nt, Artificial Sequence
  Description of Artificial Sequence: Synthetic oligonucleotide
uagcaucuaccaagcgucc

SEQ ID NO: 1571329 - RNA, 19 nt, Artificial Sequence
  Description of Artificial Sequence: Synthetic oligonucleotide
guagaccuguggcagcacc

SEQ ID NO: 1571330 - RNA, 19 nt, Artificial Sequence
  Description of Artificial Sequence: Synthetic oligonucleotide
cugaccucuaagucacuug

SEQ ID NO: 1571331 - RNA, 19 nt, Artificial Sequence
  Description of Artificial Sequence: Synthetic oligonucleotide
cuccuuuguucccuaggcc

SEQ ID NO: 1571332 - RNA, 19 nt, Artificial Sequence
  Description of Artificial Sequence: Synthetic oligonucleotide
aggguacugagcucuguga

SEQ ID NO: 1571333 - RNA, 19 nt, Artificial Sequence
  Description of Artificial Sequence: Synthetic oligonucleotide
cucaaugcauggagagaag

SEQ ID NO: 1571334 - RNA, 19 nt, Artificial Sequence
  Description of Artificial Sequence: Synthetic oligonucleotide
gucuucguggcaaaaguca

SEQ ID NO: 1571335 - RNA, 19 nt, Artificial Sequence
  Description of Artificial Sequence: Synthetic oligonucleotide
acaagccccacaggcagcg

SEQ ID NO: 1571336 - RNA, 19 nt, Artificial Sequence
  Description of Artificial Sequence: Synthetic oligonucleotide
gaacccuguaggucagccc

SEQ ID NO: 1571337 - RNA, 19 nt, Artificial Sequence
  Description of Artificial Sequence: Synthetic oligonucleotide
ucgguggaguagaggaucu

SEQ ID NO: 1571338 - RNA, 19 nt, Artificial Sequence
  Description of Artificial Sequence: Synthetic oligonucleotide
gauggcuguaucgccuucc

SEQ ID NO: 1571339 - RNA, 19 nt, Artificial Sequence
  Description of Artificial Sequence: Synthetic oligonucleotide
acacacacacacacgucac

SEQ ID NO: 1571340 - RNA, 19 nt, Artificial Sequence
  Description of Artificial Sequence: Synthetic oligonucleotide
cuggccauauaagguagcc

SEQ ID NO: 1571341 - RNA, 19 nt, Artificial Sequence
  Description of Artificial Sequence: Synthetic oligonucleotide
uuguagaccuguggcagca

SEQ ID NO: 1571342 - RNA, 19 nt, Artificial Sequence
  Description of Artificial Sequence: Synthetic oligonucleotide
acacacacacacgucaccu

SEQ ID NO: 1571343 - RNA, 19 nt, Artificial Sequence
  Description of Artificial Sequence: Synthetic oligonucleotide
cugccgaggcccacuaucc

SEQ ID NO: 1571344 - RNA, 19 nt, Artificial Sequence
  Description of Artificial Sequence: Synthetic oligonucleotide
uggucccuccaucagcccu

SEQ ID NO: 1571345 - RNA, 19 nt, Artificial Sequence
  Description of Artificial Sequence: Synthetic oligonucleotide
gaaaccaugggcugccagu

SEQ ID NO: 1571346 - RNA, 19 nt, Artificial Sequence
  Description of Artificial Sequence: Synthetic oligonucleotide
gucucaacacccaggggag

SEQ ID NO: 1571347 - RNA, 19 nt, Artificial Sequence
  Description of Artificial Sequence: Synthetic oligonucleotide
agcaucuaccaagcguccg

SEQ ID NO: 1571348 - RNA, 19 nt, Artificial Sequence
  Description of Artificial Sequence: Synthetic oligonucleotide
gugcguacauuguagaccu

SEQ ID NO: 1571349 - RNA, 19 nt, Artificial Sequence
  Description of Artificial Sequence: Synthetic oligonucleotide
aagccacugcggcaaacau

SEQ ID NO: 1571350 - RNA, 19 nt, Artificial Sequence
  Description of Artificial Sequence: Synthetic oligonucleotide
ccaucuauuucuaaacaca

SEQ ID NO: 1571351 - RNA, 19 nt, Artificial Sequence
  Description of Artificial Sequence: Synthetic oligonucleotide
cacacacacacacgucacc

SEQ ID NO: 1571352 - RNA, 19 nt, Artificial Sequence
  Description of Artificial Sequence: Synthetic oligonucleotide
cacagaccacagaaccggg

SEQ ID NO: 1571353 - RNA, 19 nt, Artificial Sequence
  Description of Artificial Sequence: Synthetic oligonucleotide
aggaucugugugcgguggg

SEQ ID NO: 1571354 - RNA, 19 nt, Artificial Sequence
  Description of Artificial Sequence: Synthetic oligonucleotide
acagaaccgggucgcagcu

SEQ ID NO: 1571355 - RNA, 19 nt, Artificial Sequence
  Description of Artificial Sequence: Synthetic oligonucleotide
uucaaccuugagggcaucc

SEQ ID NO: 1571356 - RNA, 19 nt, Artificial Sequence
  Description of Artificial Sequence: Synthetic oligonucleotide
ugcggcaaacauccugggu

SEQ ID NO: 1571357 - RNA, 19 nt, Artificial Sequence
  Description of Artificial Sequence: Synthetic oligonucleotide
guagaggaucugugugcgg

SEQ ID NO: 1571358 - RNA, 19 nt, Artificial Sequence
  Description of Artificial Sequence: Synthetic oligonucleotide
ugacggugcguacauugua

SEQ ID NO: 1571359 - RNA, 19 nt, Artificial Sequence
  Description of Artificial Sequence: Synthetic oligonucleotide
caucuaccaagcguccggg

SEQ ID NO: 1571360 - RNA, 19 nt, Artificial Sequence
  Description of Artificial Sequence: Synthetic oligonucleotide
cugugauacuccugccgag

SEQ ID NO: 1571361 - RNA, 19 nt, Artificial Sequence
  Description of Artificial Sequence: Synthetic oligonucleotide
acgcacugccaucaucgag

SEQ ID NO: 1571362 - RNA, 19 nt, Artificial Sequence
  Description of Artificial Sequence: Synthetic oligonucleotide
cacugcggcaaacauccug

SEQ ID NO: 1571363 - RNA, 19 nt, Artificial Sequence
  Description of Artificial Sequence: Synthetic oligonucleotide
accgagugccgcaggacgc

SEQ ID NO: 1571364 - RNA, 19 nt, Artificial Sequence
  Description of Artificial Sequence: Synthetic oligonucleotide
acggaaagggcuggcauca

SEQ ID NO: 1571365 - RNA, 19 nt, Artificial Sequence
  Description of Artificial Sequence: Synthetic oligonucleotide
agccuauggcagaggaagc

SEQ ID NO: 1571366 - RNA, 19 nt, Artificial Sequence
  Description of Artificial Sequence: Synthetic oligonucleotide
cugugaaaccaugggcugc

SEQ ID NO: 1571367 - RNA, 19 nt, Artificial Sequence
  Description of Artificial Sequence: Synthetic oligonucleotide
acacacacacacacacacg

SEQ ID NO: 1571368 - RNA, 19 nt, Artificial Sequence
  Description of Artificial Sequence: Synthetic oligonucleotide
accgucacccacuggcuca

SEQ ID NO: 1571369 - RNA, 19 nt, Artificial Sequence
  Description of Artificial Sequence: Synthetic oligonucleotide
gaccacagaaccgggucgc

SEQ ID NO: 1571370 - RNA, 19 nt, Artificial Sequence
  Description of Artificial Sequence: Synthetic oligonucleotide
uucuaaacacaagccccac

SEQ ID NO: 1571371 - RNA, 19 nt, Artificial Sequence
  Description of Artificial Sequence: Synthetic oligonucleotide
aacuccacacacacacaca

SEQ ID NO: 1571372 - RNA, 19 nt, Artificial Sequence
  Description of Artificial Sequence: Synthetic oligonucleotide
uggugcuagcaucuaccaa

SEQ ID NO: 1571373 - RNA, 19 nt, Artificial Sequence
  Description of Artificial Sequence: Synthetic oligonucleotide
cacacacacacacacacgu

SEQ ID NO: 1571374 - RNA, 19 nt, Artificial Sequence
  Description of Artificial Sequence: Synthetic oligonucleotide
ugucgguggaguagaggau

SEQ ID NO: 1571375 - RNA, 19 nt, Artificial Sequence
  Description of Artificial Sequence: Synthetic oligonucleotide
acuauccuggagucuucgu

SEQ ID NO: 1571376 - RNA, 19 nt, Artificial Sequence
  Description of Artificial Sequence: Synthetic oligonucleotide
guucccuaggccagccugg

SEQ ID NO: 1571377 - RNA, 19 nt, Artificial Sequence
  Description of Artificial Sequence: Synthetic oligonucleotide
acggugcguacauuguaga

SEQ ID NO: 1571378 - RNA, 19 nt, Artificial Sequence
  Description of Artificial Sequence: Synthetic oligonucleotide
gucugcccgcuguuggugg

SEQ ID NO: 1571379 - RNA, 19 nt, Artificial Sequence
  Description of Artificial Sequence: Synthetic oligonucleotide
gucagguagccaguguggc

SEQ ID NO: 1571380 - RNA, 19 nt, Artificial Sequence
  Description of Artificial Sequence: Synthetic oligonucleotide
caggcuucagggagugccc

SEQ ID NO: 1571381 - RNA, 19 nt, Artificial Sequence
  Description of Artificial Sequence: Synthetic oligonucleotide
gaccucuaagucacuugcc

SEQ ID NO: 1571382 - RNA, 19 nt, Artificial Sequence
  Description of Artificial Sequence: Synthetic oligonucleotide
gcagguucacaguccagag

SEQ ID NO: 1571383 - RNA, 19 nt, Artificial Sequence
  Description of Artificial Sequence: Synthetic oligonucleotide
cacuauccuggagucuucg

SEQ ID NO: 1571384 - RNA, 19 nt, Artificial Sequence
  Description of Artificial Sequence: Synthetic oligonucleotide
caacaaagaauggccagga

SEQ ID NO: 1571385 - RNA, 19 nt, Artificial Sequence
  Description of Artificial Sequence: Synthetic oligonucleotide
aucgagccauggcccagcg

SEQ ID NO: 1571386 - RNA, 19 nt, Artificial Sequence
  Description of Artificial Sequence: Synthetic oligonucleotide
uucaugggugugccacuac

SEQ ID NO: 1571387 - RNA, 19 nt, Artificial Sequence
  Description of Artificial Sequence: Synthetic oligonucleotide
aagcgcccaccuucaaccu

SEQ ID NO: 1571388 - RNA, 19 nt, Artificial Sequence
  Description of Artificial Sequence: Synthetic oligonucleotide
caacuacccaggaggcccc

SEQ ID NO: 1571389 - RNA, 19 nt, Artificial Sequence
  Description of Artificial Sequence: Synthetic oligonucleotide
uggccauauaagguagccu

SEQ ID NO: 1571390 - RNA, 19 nt, Artificial Sequence
  Description of Artificial Sequence: Synthetic oligonucleotide
cacccaggggagccuaugg

SEQ ID NO: 1571391 - RNA, 19 nt, Artificial Sequence
  Description of Artificial Sequence: Synthetic oligonucleotide
caucagagcccaugcugac

SEQ ID NO: 1571392 - RNA, 19 nt, Artificial Sequence
  Description of Artificial Sequence: Synthetic oligonucleotide
ccaagaagacagcaucagc

SEQ ID NO: 1571393 - RNA, 19 nt, Artificial Sequence
  Description of Artificial Sequence: Synthetic oligonucleotide
gaagcucauggugcuagca

SEQ ID NO: 1571394 - RNA, 19 nt, Artificial Sequence
  Description of Artificial Sequence: Synthetic oligonucleotide
agacugacggugcguacau

SEQ ID NO: 1571395 - RNA, 19 nt, Artificial Sequence
  Description of Artificial Sequence: Synthetic oligonucleotide
uggcaucagagcccaugcu

SEQ ID NO: 1571396 - RNA, 19 nt, Artificial Sequence
  Description of Artificial Sequence: Synthetic oligonucleotide
cauggugauuaaggcaaug

SEQ ID NO: 1571397 - RNA, 19 nt, Artificial Sequence
  Description of Artificial Sequence: Synthetic oligonucleotide
ggcaaugucgguggaguag

SEQ ID NO: 1571398 - RNA, 19 nt, Artificial Sequence
  Description of Artificial Sequence: Synthetic oligonucleotide
acacacacacacacacguc

SEQ ID NO: 1571399 - RNA, 19 nt, Artificial Sequence
  Description of Artificial Sequence: Synthetic oligonucleotide
gugacaccgaagccacugc

SEQ ID NO: 1571400 - RNA, 19 nt, Artificial Sequence
  Description of Artificial Sequence: Synthetic oligonucleotide
gugcuagcaucuaccaagc

SEQ ID NO: 1571401 - RNA, 19 nt, Artificial Sequence
  Description of Artificial Sequence: Synthetic oligonucleotide
uccaucagcccuggggaac

SEQ ID NO: 1571402 - RNA, 19 nt, Artificial Sequence
  Description of Artificial Sequence: Synthetic oligonucleotide
cccacaguuucccagggug

SEQ ID NO: 1571403 - RNA, 19 nt, Artificial Sequence
  Description of Artificial Sequence: Synthetic oligonucleotide
caaugucgguggaguagag

SEQ ID NO: 1571404 - RNA, 19 nt, Artificial Sequence
  Description of Artificial Sequence: Synthetic oligonucleotide
ugucugcccgcuguuggug

SEQ ID NO: 1571405 - RNA, 19 nt, Artificial Sequence
  Description of Artificial Sequence: Synthetic oligonucleotide
gucgguggaguagaggauc

SEQ ID NO: 1571406 - RNA, 19 nt, Artificial Sequence
  Description of Artificial Sequence: Synthetic oligonucleotide
gacgccaugccgggucugg

SEQ ID NO: 1571407 - RNA, 19 nt, Artificial Sequence
  Description of Artificial Sequence: Synthetic oligonucleotide
cugcggcaaacauccuggg

SEQ ID NO: 1571408 - RNA, 19 nt, Artificial Sequence
  Description of Artificial Sequence: Synthetic oligonucleotide
gcucaaugcauggagagaa

SEQ ID NO: 1571409 - RNA, 19 nt, Artificial Sequence
  Description of Artificial Sequence: Synthetic oligonucleotide
cugggucugugccccacgc

SEQ ID NO: 1571410 - RNA, 19 nt, Artificial Sequence
  Description of Artificial Sequence: Synthetic oligonucleotide
cugggugugcaccgucacc

SEQ ID NO: 1571411 - RNA, 19 nt, Artificial Sequence
  Description of Artificial Sequence: Synthetic oligonucleotide
cgagccauggcccagcgac

SEQ ID NO: 1571412 - RNA, 19 nt, Artificial Sequence
  Description of Artificial Sequence: Synthetic oligonucleotide
ccucaacuacccaggaggc

SEQ ID NO: 1571413 - RNA, 19 nt, Artificial Sequence
  Description of Artificial Sequence: Synthetic oligonucleotide
agccauggcccagcgacag

SEQ ID NO: 1571414 - RNA, 19 nt, Artificial Sequence
  Description of Artificial Sequence: Synthetic oligonucleotide
ugugccccacgcugcacac

SEQ ID NO: 1571415 - RNA, 19 nt, Artificial Sequence
  Description of Artificial Sequence: Synthetic oligonucleotide
gcuagcaucuaccaagcgu

SEQ ID NO: 1571416 - RNA, 19 nt, Artificial Sequence
  Description of Artificial Sequence: Synthetic oligonucleotide
guugguggaacuccacagu

SEQ ID NO: 1571417 - RNA, 19 nt, Artificial Sequence
  Description of Artificial Sequence: Synthetic oligonucleotide
aaccgggucgcagcuccag

SEQ ID NO: 1571418 - RNA, 19 nt, Artificial Sequence
  Description of Artificial Sequence: Synthetic oligonucleotide
augggcggccaaugagguc

SEQ ID NO: 1571419 - RNA, 19 nt, Artificial Sequence
  Description of Artificial Sequence: Synthetic oligonucleotide
cacaagccccacaggcagc

SEQ ID NO: 1571420 - RNA, 19 nt, Artificial Sequence
  Description of Artificial Sequence: Synthetic oligonucleotide
caccuucaaccuugagggc

SEQ ID NO: 1571421 - RNA, 19 nt, Artificial Sequence
  Description of Artificial Sequence: Synthetic oligonucleotide
uggcaugugcgcugcacuu

SEQ ID NO: 1571422 - RNA, 19 nt, Artificial Sequence
  Description of Artificial Sequence: Synthetic oligonucleotide
cacgugggugacaccgaag

SEQ ID NO: 1571423 - RNA, 19 nt, Artificial Sequence
  Description of Artificial Sequence: Synthetic oligonucleotide
gcaugugcgcugcacuugc

SEQ ID NO: 1571424 - RNA, 19 nt, Artificial Sequence
  Description of Artificial Sequence: Synthetic oligonucleotide
cagcggcuggccauauaag

SEQ ID NO: 1571425 - RNA, 19 nt, Artificial Sequence
  Description of Artificial Sequence: Synthetic oligonucleotide
ugccgaggcccacuauccu

SEQ ID NO: 1571426 - RNA, 19 nt, Artificial Sequence
  Description of Artificial Sequence: Synthetic oligonucleotide
cggccaaugagguccaccg

SEQ ID NO: 1571427 - RNA, 19 nt, Artificial Sequence
  Description of Artificial Sequence: Synthetic oligonucleotide
gcugcacuugcucaaugca

SEQ ID NO: 1571428 - RNA, 19 nt, Artificial Sequence
  Description of Artificial Sequence: Synthetic oligonucleotide
uacacccagccgccucugc

SEQ ID NO: 1571429 - RNA, 19 nt, Artificial Sequence
  Description of Artificial Sequence: Synthetic oligonucleotide
gccacuacggaaagggcug

SEQ ID NO: 1571430 - RNA, 19 nt, Artificial Sequence
  Description of Artificial Sequence: Synthetic oligonucleotide
ugcguacauuguagaccug

SEQ ID NO: 1571431 - RNA, 19 nt, Artificial Sequence
  Description of Artificial Sequence: Synthetic oligonucleotide
ucugcccgcuguuggugga

SEQ ID NO: 1571432 - RNA, 19 nt, Artificial Sequence
  Description of Artificial Sequence: Synthetic oligonucleotide
aggggagccuauggcagag

SEQ ID NO: 1571433 - RNA, 19 nt, Artificial Sequence
  Description of Artificial Sequence: Synthetic oligonucleotide
auggcgugggagacagaac

SEQ ID NO: 1571434 - RNA, 19 nt, Artificial Sequence
  Description of Artificial Sequence: Synthetic oligonucleotide
uuguucccuaggccagccu

SEQ ID NO: 1571435 - RNA, 19 nt, Artificial Sequence
  Description of Artificial Sequence: Synthetic oligonucleotide
uggcagcaccuccagggua

SEQ ID NO: 1571436 - RNA, 19 nt, Artificial Sequence
  Description of Artificial Sequence: Synthetic oligonucleotide
cuggggaacccuguagguc

SEQ ID NO: 1571437 - RNA, 19 nt, Artificial Sequence
  Description of Artificial Sequence: Synthetic oligonucleotide
acaguuucccagggugaug

SEQ ID NO: 1571438 - RNA, 19 nt, Artificial Sequence
  Description of Artificial Sequence: Synthetic oligonucleotide
gcuguaucgccuuccuuga

SEQ ID NO: 1571439 - RNA, 19 nt, Artificial Sequence
  Description of Artificial Sequence: Synthetic oligonucleotide
gccgcaggacgccaugccg

SEQ ID NO: 1571440 - RNA, 19 nt, Artificial Sequence
  Description of Artificial Sequence: Synthetic oligonucleotide
cccagcgacaggauggcug

SEQ ID NO: 1571441 - RNA, 19 nt, Artificial Sequence
  Description of Artificial Sequence: Synthetic oligonucleotide
cucguaggccacgaagcuc

SEQ ID NO: 1571442 - RNA, 19 nt, Artificial Sequence
  Description of Artificial Sequence: Synthetic oligonucleotide
gcaaacauccugggugugc

SEQ ID NO: 1571443 - RNA, 19 nt, Artificial Sequence
  Description of Artificial Sequence: Synthetic oligonucleotide
cacacgcacugccaucauc

SEQ ID NO: 1571444 - RNA, 19 nt, Artificial Sequence
  Description of Artificial Sequence: Synthetic oligonucleotide
cacugcccgugccugacuc

SEQ ID NO: 1571445 - RNA, 19 nt, Artificial Sequence
  Description of Artificial Sequence: Synthetic oligonucleotide
ggcagguucacaguccaga

SEQ ID NO: 1571446 - RNA, 19 nt, Artificial Sequence
  Description of Artificial Sequence: Synthetic oligonucleotide
acacacacacacacacaca

SEQ ID NO: 1571447 - RNA, 19 nt, Artificial Sequence
  Description of Artificial Sequence: Synthetic oligonucleotide
ccugugauacuccugccga

SEQ ID NO: 1571448 - RNA, 19 nt, Artificial Sequence
  Description of Artificial Sequence: Synthetic oligonucleotide
caucgagccauggcccagc

SEQ ID NO: 1571449 - RNA, 19 nt, Artificial Sequence
  Description of Artificial Sequence: Synthetic oligonucleotide
acagaccacagaaccgggu

SEQ ID NO: 1571450 - RNA, 19 nt, Artificial Sequence
  Description of Artificial Sequence: Synthetic oligonucleotide
guaacuccacacacacaca

SEQ ID NO: 1571451 - RNA, 19 nt, Artificial Sequence
  Description of Artificial Sequence: Synthetic oligonucleotide
acacacacgucaccuccuu

SEQ ID NO: 1571452 - RNA, 19 nt, Artificial Sequence
  Description of Artificial Sequence: Synthetic oligonucleotide
cuccacacacacacacaca

SEQ ID NO: 1571453 - RNA, 19 nt, Artificial Sequence
  Description of Artificial Sequence: Synthetic oligonucleotide
ccgcaggacgccaugccgg

SEQ ID NO: 1571454 - RNA, 19 nt, Artificial Sequence
  Description of Artificial Sequence: Synthetic oligonucleotide
agcgacaggauggcuguau

SEQ ID NO: 1571455 - RNA, 19 nt, Artificial Sequence
  Description of Artificial Sequence: Synthetic oligonucleotide
gcaaugucgguggaguaga

SEQ ID NO: 1571456 - RNA, 19 nt, Artificial Sequence
  Description of Artificial Sequence: Synthetic oligonucleotide
ucgagccauggcccagcga

SEQ ID NO: 1571457 - RNA, 19 nt, Artificial Sequence
  Description of Artificial Sequence: Synthetic oligonucleotide
caugggcugccagugccug

SEQ ID NO: 1571458 - RNA, 19 nt, Artificial Sequence
  Description of Artificial Sequence: Synthetic oligonucleotide
cacgcugcacacgcacugc

SEQ ID NO: 1571459 - RNA, 19 nt, Artificial Sequence
  Description of Artificial Sequence: Synthetic oligonucleotide
acugcccgugccugacuca

SEQ ID NO: 1571460 - RNA, 19 nt, Artificial Sequence
  Description of Artificial Sequence: Synthetic oligonucleotide
uguagaccuguggcagcac

SEQ ID NO: 1571461 - RNA, 19 nt, Artificial Sequence
  Description of Artificial Sequence: Synthetic oligonucleotide
ggaaagggcuggcaucaga

SEQ ID NO: 1571462 - RNA, 19 nt, Artificial Sequence
  Description of Artificial Sequence: Synthetic oligonucleotide
gaugcuccuggaacuccuc

SEQ ID NO: 1571463 - RNA, 19 nt, Artificial Sequence
  Description of Artificial Sequence: Synthetic oligonucleotide
guggggugaagcacguaca

SEQ ID NO: 1571464 - RNA, 19 nt, Artificial Sequence
  Description of Artificial Sequence: Synthetic oligonucleotide
cugcacacgcacugccauc

SEQ ID NO: 1571465 - RNA, 19 nt, Artificial Sequence
  Description of Artificial Sequence: Synthetic oligonucleotide
ucguggcaaaagucaggua

SEQ ID NO: 1571466 - RNA, 19 nt, Artificial Sequence
  Description of Artificial Sequence: Synthetic oligonucleotide
aggccacgaagcucauggu

SEQ ID NO: 1571467 - RNA, 19 nt, Artificial Sequence
  Description of Artificial Sequence: Synthetic oligonucleotide
cagaucaccuuggagccaa

SEQ ID NO: 1571468 - RNA, 19 nt, Artificial Sequence
  Description of Artificial Sequence: Synthetic oligonucleotide
uucccuaggccagccuggu

SEQ ID NO: 1571469 - RNA, 19 nt, Artificial Sequence
  Description of Artificial Sequence: Synthetic oligonucleotide
gaaugccucccugcucaac

SEQ ID NO: 1571470 - RNA, 19 nt, Artificial Sequence
  Description of Artificial Sequence: Synthetic oligonucleotide
gccgaggcccacuauccug

SEQ ID NO: 1571471 - RNA, 19 nt, Artificial Sequence
  Description of Artificial Sequence: Synthetic oligonucleotide
cguacauuguagaccugug

SEQ ID NO: 1571472 - RNA, 19 nt, Artificial Sequence
  Description of Artificial Sequence: Synthetic oligonucleotide
cucggcccucaacuuguac

SEQ ID NO: 1571473 - RNA, 19 nt, Artificial Sequence
  Description of Artificial Sequence: Synthetic oligonucleotide
cuguaggucagcccaggcu

SEQ ID NO: 1571474 - RNA, 19 nt, Artificial Sequence
  Description of Artificial Sequence: Synthetic oligonucleotide
acacgucaccuccuuuguu

SEQ ID NO: 1571475 - RNA, 19 nt, Artificial Sequence
  Description of Artificial Sequence: Synthetic oligonucleotide
cacuacggaaagggcuggc

SEQ ID NO: 1571476 - RNA, 19 nt, Artificial Sequence
  Description of Artificial Sequence: Synthetic oligonucleotide
cugcccgugccugacucac

SEQ ID NO: 1571477 - RNA, 19 nt, Artificial Sequence
  Description of Artificial Sequence: Synthetic oligonucleotide
ggggcagguucacagucca

SEQ ID NO: 1571478 - RNA, 19 nt, Artificial Sequence
  Description of Artificial Sequence: Synthetic oligonucleotide
cuuguuugccugugauacu

SEQ ID NO: 1571479 - RNA, 19 nt, Artificial Sequence
  Description of Artificial Sequence: Synthetic oligonucleotide
gccaaaugggcggccaaug

SEQ ID NO: 1571480 - RNA, 19 nt, Artificial Sequence
  Description of Artificial Sequence: Synthetic oligonucleotide
gcugcggaugauggcgugg

SEQ ID NO: 1571481 - RNA, 19 nt, Artificial Sequence
  Description of Artificial Sequence: Synthetic oligonucleotide
aacuacccaggaggccccu

SEQ ID NO: 1571482 - RNA, 19 nt, Artificial Sequence
  Description of Artificial Sequence: Synthetic oligonucleotide
ggcccacuauccuggaguc

SEQ ID NO: 1571483 - RNA, 19 nt, Artificial Sequence
  Description of Artificial Sequence: Synthetic oligonucleotide
caugccgggucugggucug

SEQ ID NO: 1571484 - RNA, 19 nt, Artificial Sequence
  Description of Artificial Sequence: Synthetic oligonucleotide
cuacggaaagggcuggcau

SEQ ID NO: 1571485 - RNA, 19 nt, Artificial Sequence
  Description of Artificial Sequence: Synthetic oligonucleotide
ggcaugugcgcugcacuug

SEQ ID NO: 1571486 - RNA, 19 nt, Artificial Sequence
  Description of Artificial Sequence: Synthetic oligonucleotide
agcgcccaccuucaaccuu

SEQ ID NO: 1571487 - RNA, 19 nt, Artificial Sequence
  Description of Artificial Sequence: Synthetic oligonucleotide
gcauggcccacaguuuccc

SEQ ID NO: 1571488 - RNA, 19 nt, Artificial Sequence
  Description of Artificial Sequence: Synthetic oligonucleotide
ugcgguggggcagguucac

SEQ ID NO: 1571489 - RNA, 19 nt, Artificial Sequence
  Description of Artificial Sequence: Synthetic oligonucleotide
ggucgcagcuccagcauca

SEQ ID NO: 1571490 - RNA, 19 nt, Artificial Sequence
  Description of Artificial Sequence: Synthetic oligonucleotide
gguggaguagaggaucugu

SEQ ID NO: 1571491 - RNA, 19 nt, Artificial Sequence
  Description of Artificial Sequence: Synthetic oligonucleotide
cacgcacugccaucaucga

SEQ ID NO: 1571492 - RNA, 19 nt, Artificial Sequence
  Description of Artificial Sequence: Synthetic oligonucleotide
ccaucagcccuggggaacc

SEQ ID NO: 1571493 - RNA, 19 nt, Artificial Sequence
  Description of Artificial Sequence: Synthetic oligonucleotide
ugccgggucugggucugug

SEQ ID NO: 1571494 - RNA, 19 nt, Artificial Sequence
  Description of Artificial Sequence: Synthetic oligonucleotide
gccaugccgggucuggguc

SEQ ID NO: 1571495 - RNA, 19 nt, Artificial Sequence
  Description of Artificial Sequence: Synthetic oligonucleotide
acuacccaggaggccccug

SEQ ID NO: 1571496 - RNA, 19 nt, Artificial Sequence
  Description of Artificial Sequence: Synthetic oligonucleotide
cgugccugacucacagacc

SEQ ID NO: 1571497 - RNA, 19 nt, Artificial Sequence
  Description of Artificial Sequence: Synthetic oligonucleotide
caucagcccuggggaaccc

SEQ ID NO: 1571498 - RNA, 19 nt, Artificial Sequence
  Description of Artificial Sequence: Synthetic oligonucleotide
gagccauggcccagcgaca

SEQ ID NO: 1571499 - RNA, 19 nt, Artificial Sequence
  Description of Artificial Sequence: Synthetic oligonucleotide
gaacagaagcgcccaccuu

SEQ ID NO: 1571500 - RNA, 19 nt, Artificial Sequence
  Description of Artificial Sequence: Synthetic oligonucleotide
cacacgucaccuccuuugu

SEQ ID NO: 1571501 - RNA, 19 nt, Artificial Sequence
  Description of Artificial Sequence: Synthetic oligonucleotide
gcagacugacggugcguac

SEQ ID NO: 1571502 - RNA, 19 nt, Artificial Sequence
  Description of Artificial Sequence: Synthetic oligonucleotide
aucagcccuggggaacccu

SEQ ID NO: 1571503 - RNA, 19 nt, Artificial Sequence
  Description of Artificial Sequence: Synthetic oligonucleotide
agcccuggggaacccugua

SEQ ID NO: 1571504 - RNA, 19 nt, Artificial Sequence
  Description of Artificial Sequence: Synthetic oligonucleotide
ccgcuguugguggaacucc

SEQ ID NO: 1571505 - RNA, 19 nt, Artificial Sequence
  Description of Artificial Sequence: Synthetic oligonucleotide
guacacccagccgccucug

SEQ ID NO: 1571506 - RNA, 19 nt, Artificial Sequence
  Description of Artificial Sequence: Synthetic oligonucleotide
gugccccacgcugcacacg

SEQ ID NO: 1571507 - RNA, 19 nt, Artificial Sequence
  Description of Artificial Sequence: Synthetic oligonucleotide
cggugcguacauuguagac

SEQ ID NO: 1571508 - RNA, 19 nt, Artificial Sequence
  Description of Artificial Sequence: Synthetic oligonucleotide
gcguacauuguagaccugu

SEQ ID NO: 1571509 - RNA, 19 nt, Artificial Sequence
  Description of Artificial Sequence: Synthetic oligonucleotide
ugugugcgguggggcaggu

SEQ ID NO: 1571510 - RNA, 19 nt, Artificial Sequence
  Description of Artificial Sequence: Synthetic oligonucleotide
ccacuacggaaagggcugg

SEQ ID NO: 1571511 - RNA, 19 nt, Artificial Sequence
  Description of Artificial Sequence: Synthetic oligonucleotide
ccugggugugcaccgucac

SEQ ID NO: 1571512 - RNA, 19 nt, Artificial Sequence
  Description of Artificial Sequence: Synthetic oligonucleotide
cagcuccucguaggccacg

SEQ ID NO: 1571513 - RNA, 19 nt, Artificial Sequence
  Description of Artificial Sequence: Synthetic oligonucleotide
cuucaaccuugagggcauc

SEQ ID NO: 1571514 - RNA, 19 nt, Artificial Sequence
  Description of Artificial Sequence: Synthetic oligonucleotide
ggcaaacauccugggugug

SEQ ID NO: 1571515 - RNA, 19 nt, Artificial Sequence
  Description of Artificial Sequence: Synthetic oligonucleotide
gcuguugguggaacuccac

SEQ ID NO: 1571516 - RNA, 19 nt, Artificial Sequence
  Description of Artificial Sequence: Synthetic oligonucleotide
caucagccacgugggugac

SEQ ID NO: 1571517 - RNA, 19 nt, Artificial Sequence
  Description of Artificial Sequence: Synthetic oligonucleotide
agcucaggaguggggugaa

SEQ ID NO: 1571518 - RNA, 19 nt, Artificial Sequence
  Description of Artificial Sequence: Synthetic oligonucleotide
ccagccuggucccuccauc

SEQ ID NO: 1571519 - RNA, 19 nt, Artificial Sequence
  Description of Artificial Sequence: Synthetic oligonucleotide
aucagccacgugggugaca

SEQ ID NO: 1571520 - RNA, 19 nt, Artificial Sequence
  Description of Artificial Sequence: Synthetic oligonucleotide
gccgggucugggucugugc

SEQ ID NO: 1571521 - RNA, 19 nt, Artificial Sequence
  Description of Artificial Sequence: Synthetic oligonucleotide
auacuccugccgaggccca

SEQ ID NO: 1571522 - RNA, 19 nt, Artificial Sequence
  Description of Artificial Sequence: Synthetic oligonucleotide
ggauggcuguaucgccuuc

SEQ ID NO: 1571523 - RNA, 19 nt, Artificial Sequence
  Description of Artificial Sequence: Synthetic oligonucleotide
ccacacacacacacacaca

SEQ ID NO: 1571524 - RNA, 19 nt, Artificial Sequence
  Description of Artificial Sequence: Synthetic oligonucleotide
ggcgugggagacagaacca

SEQ ID NO: 1571525 - RNA, 19 nt, Artificial Sequence
  Description of Artificial Sequence: Synthetic oligonucleotide
cccucucagaagauaggaa

SEQ ID NO: 1571526 - RNA, 19 nt, Artificial Sequence
  Description of Artificial Sequence: Synthetic oligonucleotide
gugugcaccgucacccacu

SEQ ID NO: 1571527 - RNA, 19 nt, Artificial Sequence
  Description of Artificial Sequence: Synthetic oligonucleotide
ggcccagcgacaggauggc

SEQ ID NO: 1571528 - RNA, 19 nt, Artificial Sequence
  Description of Artificial Sequence: Synthetic oligonucleotide
gguucacaguccagagcuc

SEQ ID NO: 1571529 - RNA, 19 nt, Artificial Sequence
  Description of Artificial Sequence: Synthetic oligonucleotide
cagaaccgggucgcagcuc

SEQ ID NO: 1571530 - RNA, 19 nt, Artificial Sequence
  Description of Artificial Sequence: Synthetic oligonucleotide
gccauauaagguagccucu

SEQ ID NO: 1571531 - RNA, 19 nt, Artificial Sequence
  Description of Artificial Sequence: Synthetic oligonucleotide
gugaaaccaugggcugcca

SEQ ID NO: 1571532 - RNA, 19 nt, Artificial Sequence
  Description of Artificial Sequence: Synthetic oligonucleotide
ccacuauccuggagucuuc

SEQ ID NO: 1571533 - RNA, 19 nt, Artificial Sequence
  Description of Artificial Sequence: Synthetic oligonucleotide
cggcccucaacuuguacca

SEQ ID NO: 1571534 - RNA, 19 nt, Artificial Sequence
  Description of Artificial Sequence: Synthetic oligonucleotide
gcggcuggccauauaaggu

SEQ ID NO: 1571535 - RNA, 19 nt, Artificial Sequence
  Description of Artificial Sequence: Synthetic oligonucleotide
cucauggugcuagcaucua

SEQ ID NO: 1571536 - RNA, 19 nt, Artificial Sequence
  Description of Artificial Sequence: Synthetic oligonucleotide
gaaccgggucgcagcucca

SEQ ID NO: 1571537 - RNA, 19 nt, Artificial Sequence
  Description of Artificial Sequence: Synthetic oligonucleotide
ggcucacacgaugcuccug

SEQ ID NO: 1571538 - RNA, 19 nt, Artificial Sequence
  Description of Artificial Sequence: Synthetic oligonucleotide
ccagcgacaggauggcugu

SEQ ID NO: 1571539 - RNA, 19 nt, Artificial Sequence
  Description of Artificial Sequence: Synthetic oligonucleotide
ccgggucgcagcuccagca

SEQ ID NO: 1571540 - RNA, 19 nt, Artificial Sequence
  Description of Artificial Sequence: Synthetic oligonucleotide
cugccagugccuggcaugu

SEQ ID NO: 1571541 - RNA, 19 nt, Artificial Sequence
  Description of Artificial Sequence: Synthetic oligonucleotide
ccgagugccgcaggacgcc

SEQ ID NO: 1571542 - RNA, 19 nt, Artificial Sequence
  Description of Artificial Sequence: Synthetic oligonucleotide
gcuucccucucagaagaua

SEQ ID NO: 1571543 - RNA, 19 nt, Artificial Sequence
  Description of Artificial Sequence: Synthetic oligonucleotide
gggcagguucacaguccag

SEQ ID NO: 1571544 - RNA, 19 nt, Artificial Sequence
  Description of Artificial Sequence: Synthetic oligonucleotide
caugugcgcugcacuugcu

SEQ ID NO: 1571545 - RNA, 19 nt, Artificial Sequence
  Description of Artificial Sequence: Synthetic oligonucleotide
gcagaucaccuuggagcca

SEQ ID NO: 1571546 - RNA, 19 nt, Artificial Sequence
  Description of Artificial Sequence: Synthetic oligonucleotide
caacacccaggggagccua

SEQ ID NO: 1571547 - RNA, 19 nt, Artificial Sequence
  Description of Artificial Sequence: Synthetic oligonucleotide
ccuucaaccuugagggcau

SEQ ID NO: 1571548 - RNA, 19 nt, Artificial Sequence
  Description of Artificial Sequence: Synthetic oligonucleotide
caguguguagguggccagu

SEQ ID NO: 1571549 - RNA, 19 nt, Artificial Sequence
  Description of Artificial Sequence: Synthetic oligonucleotide
gggaacccuguaggucagc

SEQ ID NO: 1571550 - RNA, 19 nt, Artificial Sequence
  Description of Artificial Sequence: Synthetic oligonucleotide
cagugaugagguggaggcu

SEQ ID NO: 1571551 - RNA, 19 nt, Artificial Sequence
  Description of Artificial Sequence: Synthetic oligonucleotide
agaucaccuuggagccaaa

SEQ ID NO: 1571552 - RNA, 19 nt, Artificial Sequence
  Description of Artificial Sequence: Synthetic oligonucleotide
gaguggggugaagcacgua

SEQ ID NO: 1571553 - RNA, 19 nt, Artificial Sequence
  Description of Artificial Sequence: Synthetic oligonucleotide
ccuggggaacccuguaggu

SEQ ID NO: 1571554 - RNA, 19 nt, Artificial Sequence
  Description of Artificial Sequence: Synthetic oligonucleotide
cccucaacuuguaccauuu

SEQ ID NO: 1571555 - RNA, 19 nt, Artificial Sequence
  Description of Artificial Sequence: Synthetic oligonucleotide
ccaccgagugccgcaggac

SEQ ID NO: 1571556 - RNA, 19 nt, Artificial Sequence
  Description of Artificial Sequence: Synthetic oligonucleotide
cauggcccagcgacaggau

SEQ ID NO: 1571557 - RNA, 19 nt, Artificial Sequence
  Description of Artificial Sequence: Synthetic oligonucleotide
cuguaucgccuuccuugau

SEQ ID NO: 1571558 - RNA, 19 nt, Artificial Sequence
  Description of Artificial Sequence: Synthetic oligonucleotide
cacacacgucaccuccuuu

SEQ ID NO: 1571559 - RNA, 19 nt, Artificial Sequence
  Description of Artificial Sequence: Synthetic oligonucleotide
ggucaggcaagggcagacu

SEQ ID NO: 1571560 - RNA, 19 nt, Artificial Sequence
  Description of Artificial Sequence: Synthetic oligonucleotide
caggcagcggcuggccaua

SEQ ID NO: 1571561 - RNA, 19 nt, Artificial Sequence
  Description of Artificial Sequence: Synthetic oligonucleotide
ggacgccaugccgggucug

SEQ ID NO: 1571562 - RNA, 19 nt, Artificial Sequence
  Description of Artificial Sequence: Synthetic oligonucleotide
cauccugggugugcaccgu

SEQ ID NO: 1571563 - RNA, 19 nt, Artificial Sequence
  Description of Artificial Sequence: Synthetic oligonucleotide
gagugccgcaggacgccau

SEQ ID NO: 1571564 - RNA, 19 nt, Artificial Sequence
  Description of Artificial Sequence: Synthetic oligonucleotide
cugcccgcuguugguggaa

SEQ ID NO: 1571565 - RNA, 19 nt, Artificial Sequence
  Description of Artificial Sequence: Synthetic oligonucleotide
gacugacggugcguacauu

SEQ ID NO: 1571566 - RNA, 19 nt, Artificial Sequence
  Description of Artificial Sequence: Synthetic oligonucleotide
cccugccaucuauuucuaa

SEQ ID NO: 1571567 - RNA, 19 nt, Artificial Sequence
  Description of Artificial Sequence: Synthetic oligonucleotide
ccuauggcagaggaagcuu

SEQ ID NO: 1571568 - RNA, 19 nt, Artificial Sequence
  Description of Artificial Sequence: Synthetic oligonucleotide
gcaccgucacccacuggcu

SEQ ID NO: 1571569 - RNA, 19 nt, Artificial Sequence
  Description of Artificial Sequence: Synthetic oligonucleotide
gucgcagcuccagcaucau

SEQ ID NO: 1571570 - RNA, 19 nt, Artificial Sequence
  Description of Artificial Sequence: Synthetic oligonucleotide
cacguacacccagccgccu

SEQ ID NO: 1571571 - RNA, 19 nt, Artificial Sequence
  Description of Artificial Sequence: Synthetic oligonucleotide
cguacacccagccgccucu

SEQ ID NO: 1571572 - RNA, 19 nt, Artificial Sequence
  Description of Artificial Sequence: Synthetic oligonucleotide
cgguggaguagaggaucug

SEQ ID NO: 1571573 - RNA, 19 nt, Artificial Sequence
  Description of Artificial Sequence: Synthetic oligonucleotide
ggcagcggcuggccauaua

SEQ ID NO: 1571574 - RNA, 19 nt, Artificial Sequence
  Description of Artificial Sequence: Synthetic oligonucleotide
gcgguggggcagguucaca

SEQ ID NO: 1571575 - RNA, 19 nt, Artificial Sequence
  Description of Artificial Sequence: Synthetic oligonucleotide
gccccacccugccaucuau

SEQ ID NO: 1571576 - RNA, 19 nt, Artificial Sequence
  Description of Artificial Sequence: Synthetic oligonucleotide
gguagccucuggccuccuu

SEQ ID NO: 1571577 - RNA, 19 nt, Artificial Sequence
  Description of Artificial Sequence: Synthetic oligonucleotide
cagcgacaggauggcugua

SEQ ID NO: 1571578 - RNA, 19 nt, Artificial Sequence
  Description of Artificial Sequence: Synthetic oligonucleotide
gcccacuauccuggagucu

SEQ ID NO: 1571579 - RNA, 19 nt, Artificial Sequence
  Description of Artificial Sequence: Synthetic oligonucleotide
ccgaagccacugcggcaaa

SEQ ID NO: 1571580 - RNA, 19 nt, Artificial Sequence
  Description of Artificial Sequence: Synthetic oligonucleotide
ccucggcccucaacuugua

SEQ ID NO: 1571581 - RNA, 19 nt, Artificial Sequence
  Description of Artificial Sequence: Synthetic oligonucleotide
cgagugccgcaggacgcca

SEQ ID NO: 1571582 - RNA, 19 nt, Artificial Sequence
  Description of Artificial Sequence: Synthetic oligonucleotide
gggugacaccgaagccacu

SEQ ID NO: 1571583 - RNA, 19 nt, Artificial Sequence
  Description of Artificial Sequence: Synthetic oligonucleotide
gcaggacgccaugccgggu

SEQ ID NO: 1571584 - RNA, 19 nt, Artificial Sequence
  Description of Artificial Sequence: Synthetic oligonucleotide
gugugcgguggggcagguu

SEQ ID NO: 1571585 - RNA, 19 nt, Artificial Sequence
  Description of Artificial Sequence: Synthetic oligonucleotide
ccacugcccgugccugacu

SEQ ID NO: 1571586 - RNA, 19 nt, Artificial Sequence
  Description of Artificial Sequence: Synthetic oligonucleotide
gcccagcgacaggauggcu

SEQ ID NO: 1571587 - RNA, 19 nt, Artificial Sequence
  Description of Artificial Sequence: Synthetic oligonucleotide
ccccacccugccaucuauu

SEQ ID NO: 1571588 - RNA, 19 nt, Artificial Sequence
  Description of Artificial Sequence: Synthetic oligonucleotide
cgggccuugucugcccgcu

SEQ ID NO: 1571589 - RNA, 19 nt, Artificial Sequence
  Description of Artificial Sequence: Synthetic oligonucleotide
aaucauucaaauuagugac

SEQ ID NO: 1571590 - RNA, 19 nt, Artificial Sequence
  Description of Artificial Sequence: Synthetic oligonucleotide
aaauucaucuguuaacccc

SEQ ID NO: 1571591 - RNA, 19 nt, Artificial Sequence
  Description of Artificial Sequence: Synthetic oligonucleotide
aauuagugaccucacagcc

SEQ ID NO: 1571592 - RNA, 19 nt, Artificial Sequence
  Description of Artificial Sequence: Synthetic oligonucleotide
aaaauguuguuacaaucgc

SEQ ID NO: 1571593 - RNA, 19 nt, Artificial Sequence
  Description of Artificial Sequence: Synthetic oligonucleotide
aaauuagugaccucacagc

SEQ ID NO: 1571594 - RNA, 19 nt, Artificial Sequence
  Description of Artificial Sequence: Synthetic oligonucleotide
ucaaacuuaacuuuccgcg

SEQ ID NO: 1571595 - RNA, 19 nt, Artificial Sequence
  Description of Artificial Sequence: Synthetic oligonucleotide
ucuauuaucacugagcuca

SEQ ID NO: 1571596 - RNA, 19 nt, Artificial Sequence
  Description of Artificial Sequence: Synthetic oligonucleotide
aauucuauuaucacugagc

SEQ ID NO: 1571597 - RNA, 19 nt, Artificial Sequence
  Description of Artificial Sequence: Synthetic oligonucleotide
aacguuuacaauuuuguug

SEQ ID NO: 1571598 - RNA, 19 nt, Artificial Sequence
  Description of Artificial Sequence: Synthetic oligonucleotide
acguuuacaauuuuguugg

SEQ ID NO: 1571599 - RNA, 19 nt, Artificial Sequence
  Description of Artificial Sequence: Synthetic oligonucleotide
uaaucauucaaauuaguga

SEQ ID NO: 1571600 - RNA, 19 nt, Artificial Sequence
  Description of Artificial Sequence: Synthetic oligonucleotide
aaacuuaacuuuccgcggc

SEQ ID NO: 1571601 - RNA, 19 nt, Artificial Sequence
  Description of Artificial Sequence: Synthetic oligonucleotide
gucauagccauccagauag

SEQ ID NO: 1571602 - RNA, 19 nt, Artificial Sequence
  Description of Artificial Sequence: Synthetic oligonucleotide
uuuaagacaauccagcuuu

SEQ ID NO: 1571603 - RNA, 19 nt, Artificial Sequence
  Description of Artificial Sequence: Synthetic oligonucleotide
acaaauucaucuguuaacc

SEQ ID NO: 1571604 - RNA, 19 nt, Artificial Sequence
  Description of Artificial Sequence: Synthetic oligonucleotide
agauccaaacuuuuaagac

SEQ ID NO: 1571605 - RNA, 19 nt, Artificial Sequence
  Description of Artificial Sequence: Synthetic oligonucleotide
uuaccaaggggcuaaacgg

SEQ ID NO: 1571606 - RNA, 19 nt, Artificial Sequence
  Description of Artificial Sequence: Synthetic oligonucleotide
auuguuucgggucuuaauc

SEQ ID NO: 1571607 - RNA, 19 nt, Artificial Sequence
  Description of Artificial Sequence: Synthetic oligonucleotide
aagagucuuacacggaaac

SEQ ID NO: 1571608 - RNA, 19 nt, Artificial Sequence
  Description of Artificial Sequence: Synthetic oligonucleotide
uuucaauuuagguagcuug

SEQ ID NO: 1571609 - RNA, 19 nt, Artificial Sequence
  Description of Artificial Sequence: Synthetic oligonucleotide
acacuuauuaaacugagga

SEQ ID NO: 1571610 - RNA, 19 nt, Artificial Sequence
  Description of Artificial Sequence: Synthetic oligonucleotide
aauuuagguagcuugggga

SEQ ID NO: 1571611 - RNA, 19 nt, Artificial Sequence
  Description of Artificial Sequence: Synthetic oligonucleotide
guaacuggcagccaggacg

SEQ ID NO: 1571612 - RNA, 19 nt, Artificial Sequence
  Description of Artificial Sequence: Synthetic oligonucleotide
uucaauuuagguagcuugg

SEQ ID NO: 1571613 - RNA, 19 nt, Artificial Sequence
  Description of Artificial Sequence: Synthetic oligonucleotide
ugcuagucuguccagaccg

SEQ ID NO: 1571614 - RNA, 19 nt, Artificial Sequence
  Description of Artificial Sequence: Synthetic oligonucleotide
aauguuguuacaaucgcag

SEQ ID NO: 1571615 - RNA, 19 nt, Artificial Sequence
  Description of Artificial Sequence: Synthetic oligonucleotide
uuuacaauuuuguuggggu

SEQ ID NO: 1571616 - RNA, 19 nt, Artificial Sequence
  Description of Artificial Sequence: Synthetic oligonucleotide
cugaaacugaaaauaagcc

SEQ ID NO: 1571617 - RNA, 19 nt, Artificial Sequence
  Description of Artificial Sequence: Synthetic oligonucleotide
ugaaacugaaaauaagccu

SEQ ID NO: 1571618 - RNA, 19 nt, Artificial Sequence
  Description of Artificial Sequence: Synthetic oligonucleotide
aaauucuauuaucacugag

SEQ ID NO: 1571619 - RNA, 19 nt, Artificial Sequence
  Description of Artificial Sequence: Synthetic oligonucleotide
aaauuuagguggguuagac

SEQ ID NO: 1571620 - RNA, 19 nt, Artificial Sequence
  Description of Artificial Sequence: Synthetic oligonucleotide
uguuguuacaaucgcagug

SEQ ID NO: 1571621 - RNA, 19 nt, Artificial Sequence
  Description of Artificial Sequence: Synthetic oligonucleotide
ugguggauuaccaaggggc

SEQ ID NO: 1571622 - RNA, 19 nt, Artificial Sequence
  Description of Artificial Sequence: Synthetic oligonucleotide
ucacgauacagcaagaguc

SEQ ID NO: 1571623 - RNA, 19 nt, Artificial Sequence
  Description of Artificial Sequence: Synthetic oligonucleotide
caaauuagugaccucacag

SEQ ID NO: 1571624 - RNA, 19 nt, Artificial Sequence
  Description of Artificial Sequence: Synthetic oligonucleotide
uuaaauuuagguggguuag

SEQ ID NO: 1571625 - RNA, 19 nt, Artificial Sequence
  Description of Artificial Sequence: Synthetic oligonucleotide
uccagauaggacaacuggg

SEQ ID NO: 1571626 - RNA, 19 nt, Artificial Sequence
  Description of Artificial Sequence: Synthetic oligonucleotide
aaccuaacaacguuuacaa

SEQ ID NO: 1571627 - RNA, 19 nt, Artificial Sequence
  Description of Artificial Sequence: Synthetic oligonucleotide
aaugucuugggaacuauuc

SEQ ID NO: 1571628 - RNA, 19 nt, Artificial Sequence
  Description of Artificial Sequence: Synthetic oligonucleotide
aauaagccuacacuuauua

SEQ ID NO: 1571629 - RNA, 19 nt, Artificial Sequence
  Description of Artificial Sequence: Synthetic oligonucleotide
aagccuacacuuauuaaac

SEQ ID NO: 1571630 - RNA, 19 nt, Artificial Sequence
  Description of Artificial Sequence: Synthetic oligonucleotide
uaagccuacacuuauuaaa

SEQ ID NO: 1571631 - RNA, 19 nt, Artificial Sequence
  Description of Artificial Sequence: Synthetic oligonucleotide
aaaacagcuaccaaaucca

SEQ ID NO: 1571632 - RNA, 19 nt, Artificial Sequence
  Description of Artificial Sequence: Synthetic oligonucleotide
uacaauuuuguuggggugg

SEQ ID NO: 1571633 - RNA, 19 nt, Artificial Sequence
  Description of Artificial Sequence: Synthetic oligonucleotide
ucuucugcuagucugucca

SEQ ID NO: 1571634 - RNA, 19 nt, Artificial Sequence
  Description of Artificial Sequence: Synthetic oligonucleotide
auuuagguagcuuggggag

SEQ ID NO: 1571635 - RNA, 19 nt, Artificial Sequence
  Description of Artificial Sequence: Synthetic oligonucleotide
uugggaacuauucuuuggc

SEQ ID NO: 1571636 - RNA, 19 nt, Artificial Sequence
  Description of Artificial Sequence: Synthetic oligonucleotide
uucaaacuuaacuuuccgc

SEQ ID NO: 1571637 - RNA, 19 nt, Artificial Sequence
  Description of Artificial Sequence: Synthetic oligonucleotide
aaaccuaacaacguuuaca

SEQ ID NO: 1571638 - RNA, 19 nt, Artificial Sequence
  Description of Artificial Sequence: Synthetic oligonucleotide
uuucuugcagauuguuucg

SEQ ID NO: 1571639 - RNA, 19 nt, Artificial Sequence
  Description of Artificial Sequence: Synthetic oligonucleotide
uuugcuuugcaguugucca

SEQ ID NO: 1571640 - RNA, 19 nt, Artificial Sequence
  Description of Artificial Sequence: Synthetic oligonucleotide
uagguucacaaauucaucu

SEQ ID NO: 1571641 - RNA, 19 nt, Artificial Sequence
  Description of Artificial Sequence: Synthetic oligonucleotide
auccagauaggacaacugg

SEQ ID NO: 1571642 - RNA, 19 nt, Artificial Sequence
  Description of Artificial Sequence: Synthetic oligonucleotide
aauuuuguugggguggcag

SEQ ID NO: 1571643 - RNA, 19 nt, Artificial Sequence
  Description of Artificial Sequence: Synthetic oligonucleotide
agcuaccaaauccaugagc

SEQ ID NO: 1571644 - RNA, 19 nt, Artificial Sequence
  Description of Artificial Sequence: Synthetic oligonucleotide
uacacuuauuaaacugagg

SEQ ID NO: 1571645 - RNA, 19 nt, Artificial Sequence
  Description of Artificial Sequence: Synthetic oligonucleotide
uacucaacaguucuguuuc

SEQ ID NO: 1571646 - RNA, 19 nt, Artificial Sequence
  Description of Artificial Sequence: Synthetic oligonucleotide
uaggaaguucuucugcuag

SEQ ID NO: 1571647 - RNA, 19 nt, Artificial Sequence
  Description of Artificial Sequence: Synthetic oligonucleotide
aaaauucuauuaucacuga

SEQ ID NO: 1571648 - RNA, 19 nt, Artificial Sequence
  Description of Artificial Sequence: Synthetic oligonucleotide
gacaaguucucgaacagcc

SEQ ID NO: 1571649 - RNA, 19 nt, Artificial Sequence
  Description of Artificial Sequence: Synthetic oligonucleotide
caaacuuaacuuuccgcgg

SEQ ID NO: 1571650 - RNA, 19 nt, Artificial Sequence
  Description of Artificial Sequence: Synthetic oligonucleotide
aacuuaacuuuccgcggcg

SEQ ID NO: 1571651 - RNA, 19 nt, Artificial Sequence
  Description of Artificial Sequence: Synthetic oligonucleotide
accaauacucaacaguucu

SEQ ID NO: 1571652 - RNA, 19 nt, Artificial Sequence
  Description of Artificial Sequence: Synthetic oligonucleotide
uacacggaaaccuaacaac

SEQ ID NO: 1571653 - RNA, 19 nt, Artificial Sequence
  Description of Artificial Sequence: Synthetic oligonucleotide
uguuaagauuuuauuuaca

SEQ ID NO: 1571654 - RNA, 19 nt, Artificial Sequence
  Description of Artificial Sequence: Synthetic oligonucleotide
guuacaaucgcaguguaac

SEQ ID NO: 1571655 - RNA, 19 nt, Artificial Sequence
  Description of Artificial Sequence: Synthetic oligonucleotide
cccgcuuaaauuuaggugg

SEQ ID NO: 1571656 - RNA, 19 nt, Artificial Sequence
  Description of Artificial Sequence: Synthetic oligonucleotide
aauuuagguggguuagacu

SEQ ID NO: 1571657 - RNA, 19 nt, Artificial Sequence
  Description of Artificial Sequence: Synthetic oligonucleotide
uuagugaccucacagccaa

SEQ ID NO: 1571658 - RNA, 19 nt, Artificial Sequence
  Description of Artificial Sequence: Synthetic oligonucleotide
acucuagguucacaaauuc

SEQ ID NO: 1571659 - RNA, 19 nt, Artificial Sequence
  Description of Artificial Sequence: Synthetic oligonucleotide
uuacacggaaaccuaacaa

SEQ ID NO: 1571660 - RNA, 19 nt, Artificial Sequence
  Description of Artificial Sequence: Synthetic oligonucleotide
uuggugguggauuaccaag

SEQ ID NO: 1571661 - RNA, 19 nt, Artificial Sequence
  Description of Artificial Sequence: Synthetic oligonucleotide
aauucaucuguuaaccccu

SEQ ID NO: 1571662 - RNA, 19 nt, Artificial Sequence
  Description of Artificial Sequence: Synthetic oligonucleotide
cagcaagagucuuacacgg

SEQ ID NO: 1571663 - RNA, 19 nt, Artificial Sequence
  Description of Artificial Sequence: Synthetic oligonucleotide
aacaguucuguuucuugca

SEQ ID NO: 1571664 - RNA, 19 nt, Artificial Sequence
  Description of Artificial Sequence: Synthetic oligonucleotide
ucaauuuagguagcuuggg

SEQ ID NO: 1571665 - RNA, 19 nt, Artificial Sequence
  Description of Artificial Sequence: Synthetic oligonucleotide
cacaaauucaucuguuaac

SEQ ID NO: 1571666 - RNA, 19 nt, Artificial Sequence
  Description of Artificial Sequence: Synthetic oligonucleotide
uuuagguggguuagacuag

SEQ ID NO: 1571667 - RNA, 19 nt, Artificial Sequence
  Description of Artificial Sequence: Synthetic oligonucleotide
cuacacuuauuaaacugag

SEQ ID NO: 1571668 - RNA, 19 nt, Artificial Sequence
  Description of Artificial Sequence: Synthetic oligonucleotide
ucuguuaaccccucaauuu

SEQ ID NO: 1571669 - RNA, 19 nt, Artificial Sequence
  Description of Artificial Sequence: Synthetic oligonucleotide
gguggguuagacuaggaag

SEQ ID NO: 1571670 - RNA, 19 nt, Artificial Sequence
  Description of Artificial Sequence: Synthetic oligonucleotide
cuauucuuuggcucuuugg

SEQ ID NO: 1571671 - RNA, 19 nt, Artificial Sequence
  Description of Artificial Sequence: Synthetic oligonucleotide
cuucaaacuuaacuuuccg

SEQ ID NO: 1571672 - RNA, 19 nt, Artificial Sequence
  Description of Artificial Sequence: Synthetic oligonucleotide
cuugggaacuauucuuugg

SEQ ID NO: 1571673 - RNA, 19 nt, Artificial Sequence
  Description of Artificial Sequence: Synthetic oligonucleotide
aacaacguuuacaauuuug

SEQ ID NO: 1571674 - RNA, 19 nt, Artificial Sequence
  Description of Artificial Sequence: Synthetic oligonucleotide
caauuuagguagcuugggg

SEQ ID NO: 1571675 - RNA, 19 nt, Artificial Sequence
  Description of Artificial Sequence: Synthetic oligonucleotide
uuguuucgggucuuaauca

SEQ ID NO: 1571676 - RNA, 19 nt, Artificial Sequence
  Description of Artificial Sequence: Synthetic oligonucleotide
ugagcaguccaaccaauac

SEQ ID NO: 1571677 - RNA, 19 nt, Artificial Sequence
  Description of Artificial Sequence: Synthetic oligonucleotide
uacaccauccaccuccaca

SEQ ID NO: 1571678 - RNA, 19 nt, Artificial Sequence
  Description of Artificial Sequence: Synthetic oligonucleotide
cuuaaagacacucucccga

SEQ ID NO: 1571679 - RNA, 19 nt, Artificial Sequence
  Description of Artificial Sequence: Synthetic oligonucleotide
ucccgcuuaaauuuaggug

SEQ ID NO: 1571680 - RNA, 19 nt, Artificial Sequence
  Description of Artificial Sequence: Synthetic oligonucleotide
ucaaauuagugaccucaca

SEQ ID NO: 1571681 - RNA, 19 nt, Artificial Sequence
  Description of Artificial Sequence: Synthetic oligonucleotide
agcaguccaaccaauacuc

SEQ ID NO: 1571682 - RNA, 19 nt, Artificial Sequence
  Description of Artificial Sequence: Synthetic oligonucleotide
ucauuugcuuugcaguugu

SEQ ID NO: 1571683 - RNA, 19 nt, Artificial Sequence
  Description of Artificial Sequence: Synthetic oligonucleotide
aucauucaaauuagugacc

SEQ ID NO: 1571684 - RNA, 19 nt, Artificial Sequence
  Description of Artificial Sequence: Synthetic oligonucleotide
acacggaaaccuaacaacg

SEQ ID NO: 1571685 - RNA, 19 nt, Artificial Sequence
  Description of Artificial Sequence: Synthetic oligonucleotide
aucgcaguguaacuggcag

SEQ ID NO: 1571686 - RNA, 19 nt, Artificial Sequence
  Description of Artificial Sequence: Synthetic oligonucleotide
uggggcuuguaucacagcu

SEQ ID NO: 1571687 - RNA, 19 nt, Artificial Sequence
  Description of Artificial Sequence: Synthetic oligonucleotide
uucaaauuagugaccucac

SEQ ID NO: 1571688 - RNA, 19 nt, Artificial Sequence
  Description of Artificial Sequence: Synthetic oligonucleotide
uacaaucgcaguguaacug

SEQ ID NO: 1571689 - RNA, 19 nt, Artificial Sequence
  Description of Artificial Sequence: Synthetic oligonucleotide
uuaacuuuccgcggcgggg

SEQ ID NO: 1571690 - RNA, 19 nt, Artificial Sequence
  Description of Artificial Sequence: Synthetic oligonucleotide
acuaggaaguucuucugcu

SEQ ID NO: 1571691 - RNA, 19 nt, Artificial Sequence
  Description of Artificial Sequence: Synthetic oligonucleotide
agagucuuacacggaaacc

SEQ ID NO: 1571692 - RNA, 19 nt, Artificial Sequence
  Description of Artificial Sequence: Synthetic oligonucleotide
acaauuuuguugggguggc

SEQ ID NO: 1571693 - RNA, 19 nt, Artificial Sequence
  Description of Artificial Sequence: Synthetic oligonucleotide
uauucccgcuuaaauuuag

SEQ ID NO: 1571694 - RNA, 19 nt, Artificial Sequence
  Description of Artificial Sequence: Synthetic oligonucleotide
ugcagauuguuucgggucu

SEQ ID NO: 1571695 - RNA, 19 nt, Artificial Sequence
  Description of Artificial Sequence: Synthetic oligonucleotide
aacugaggaacucuagguu

SEQ ID NO: 1571696 - RNA, 19 nt, Artificial Sequence
  Description of Artificial Sequence: Synthetic oligonucleotide
gcugucacgauacagcaag

SEQ ID NO: 1571697 - RNA, 19 nt, Artificial Sequence
  Description of Artificial Sequence: Synthetic oligonucleotide
uguaucacagcuaccuuuu

SEQ ID NO: 1571698 - RNA, 19 nt, Artificial Sequence
  Description of Artificial Sequence: Synthetic oligonucleotide
ucuuacacggaaaccuaac

SEQ ID NO: 1571699 - RNA, 19 nt, Artificial Sequence
  Description of Artificial Sequence: Synthetic oligonucleotide
aguccaaccaauacucaac

SEQ ID NO: 1571700 - RNA, 19 nt, Artificial Sequence
  Description of Artificial Sequence: Synthetic oligonucleotide
aaucacagcugucacgaua

SEQ ID NO: 1571701 - RNA, 19 nt, Artificial Sequence
  Description of Artificial Sequence: Synthetic oligonucleotide
auagccauccagauaggac

SEQ ID NO: 1571702 - RNA, 19 nt, Artificial Sequence
  Description of Artificial Sequence: Synthetic oligonucleotide
acaacguuuacaauuuugu

SEQ ID NO: 1571703 - RNA, 19 nt, Artificial Sequence
  Description of Artificial Sequence: Synthetic oligonucleotide
uguccaagacaaguucucg

SEQ ID NO: 1571704 - RNA, 19 nt, Artificial Sequence
  Description of Artificial Sequence: Synthetic oligonucleotide
uguccuggggcuuguauca

SEQ ID NO: 1571705 - RNA, 19 nt, Artificial Sequence
  Description of Artificial Sequence: Synthetic oligonucleotide
uucaaaauguuaagauuuu

SEQ ID NO: 1571706 - RNA, 19 nt, Artificial Sequence
  Description of Artificial Sequence: Synthetic oligonucleotide
uucaguuuauucccgcuua

SEQ ID NO: 1571707 - RNA, 19 nt, Artificial Sequence
  Description of Artificial Sequence: Synthetic oligonucleotide
accaaucacagcugucacg

SEQ ID NO: 1571708 - RNA, 19 nt, Artificial Sequence
  Description of Artificial Sequence: Synthetic oligonucleotide
agguucacaaauucaucug

SEQ ID NO: 1571709 - RNA, 19 nt, Artificial Sequence
  Description of Artificial Sequence: Synthetic oligonucleotide
ucaucuguuaaccccucaa

SEQ ID NO: 1571710 - RNA, 19 nt, Artificial Sequence
  Description of Artificial Sequence: Synthetic oligonucleotide
uccucuacaccauccaccu

SEQ ID NO: 1571711 - RNA, 19 nt, Artificial Sequence
  Description of Artificial Sequence: Synthetic oligonucleotide
uggauccucuucuucaugu

SEQ ID NO: 1571712 - RNA, 19 nt, Artificial Sequence
  Description of Artificial Sequence: Synthetic oligonucleotide
aaccaauacucaacaguuc

SEQ ID NO: 1571713 - RNA, 19 nt, Artificial Sequence
  Description of Artificial Sequence: Synthetic oligonucleotide
aguucuguuucuugcagau

SEQ ID NO: 1571714 - RNA, 19 nt, Artificial Sequence
  Description of Artificial Sequence: Synthetic oligonucleotide
ucucccgauaaucauucaa

SEQ ID NO: 1571715 - RNA, 19 nt, Artificial Sequence
  Description of Artificial Sequence: Synthetic oligonucleotide
aauacucaacaguucuguu

SEQ ID NO: 1571716 - RNA, 19 nt, Artificial Sequence
  Description of Artificial Sequence: Synthetic oligonucleotide
aggaacucuagguucacaa

SEQ ID NO: 1571717 - RNA, 19 nt, Artificial Sequence
  Description of Artificial Sequence: Synthetic oligonucleotide
uaccaaggggcuaaacgga

SEQ ID NO: 1571718 - RNA, 19 nt, Artificial Sequence
  Description of Artificial Sequence: Synthetic oligonucleotide
ugucacgauacagcaagag

SEQ ID NO: 1571719 - RNA, 19 nt, Artificial Sequence
  Description of Artificial Sequence: Synthetic oligonucleotide
augucuugggaacuauucu

SEQ ID NO: 1571720 - RNA, 19 nt, Artificial Sequence
  Description of Artificial Sequence: Synthetic oligonucleotide
auacucaacaguucuguuu

SEQ ID NO: 1571721 - RNA, 19 nt, Artificial Sequence
  Description of Artificial Sequence: Synthetic oligonucleotide
uucccgcuuaaauuuaggu

SEQ ID NO: 1571722 - RNA, 19 nt, Artificial Sequence
  Description of Artificial Sequence: Synthetic oligonucleotide
cuuaacuuuccgcggcggg

SEQ ID NO: 1571723 - RNA, 19 nt, Artificial Sequence
  Description of Artificial Sequence: Synthetic oligonucleotide
uuggggagaucugaaacug

SEQ ID NO: 1571724 - RNA, 19 nt, Artificial Sequence
  Description of Artificial Sequence: Synthetic oligonucleotide
uccaaccaauacucaacag

SEQ ID NO: 1571725 - RNA, 19 nt, Artificial Sequence
  Description of Artificial Sequence: Synthetic oligonucleotide
uuacaaucgcaguguaacu

SEQ ID NO: 1571726 - RNA, 19 nt, Artificial Sequence
  Description of Artificial Sequence: Synthetic oligonucleotide
ucugcuagucuguccagac

SEQ ID NO: 1571727 - RNA, 19 nt, Artificial Sequence
  Description of Artificial Sequence: Synthetic oligonucleotide
cuagguucacaaauucauc

SEQ ID NO: 1571728 - RNA, 19 nt, Artificial Sequence
  Description of Artificial Sequence: Synthetic oligonucleotide
uugcagauuguuucggguc

SEQ ID NO: 1571729 - RNA, 19 nt, Artificial Sequence
  Description of Artificial Sequence: Synthetic oligonucleotide
uucuugcagauuguuucgg

SEQ ID NO: 1571730 - RNA, 19 nt, Artificial Sequence
  Description of Artificial Sequence: Synthetic oligonucleotide
gaaaccuaacaacguuuac

SEQ ID NO: 1571731 - RNA, 19 nt, Artificial Sequence
  Description of Artificial Sequence: Synthetic oligonucleotide
agacacucucccgauaauc

SEQ ID NO: 1571732 - RNA, 19 nt, Artificial Sequence
  Description of Artificial Sequence: Synthetic oligonucleotide
cugaaaauaagccuacacu

SEQ ID NO: 1571733 - RNA, 19 nt, Artificial Sequence
  Description of Artificial Sequence: Synthetic oligonucleotide
auccaaacuuuuaagacaa

SEQ ID NO: 1571734 - RNA, 19 nt, Artificial Sequence
  Description of Artificial Sequence: Synthetic oligonucleotide
agguggauccucuucuuca

SEQ ID NO: 1571735 - RNA, 19 nt, Artificial Sequence
  Description of Artificial Sequence: Synthetic oligonucleotide
cuuaaucaucaucuccuuc

SEQ ID NO: 1571736 - RNA, 19 nt, Artificial Sequence
  Description of Artificial Sequence: Synthetic oligonucleotide
acucucccgauaaucauuc

SEQ ID NO: 1571737 - RNA, 19 nt, Artificial Sequence
  Description of Artificial Sequence: Synthetic oligonucleotide
ucgggucuuaaucaucauc

SEQ ID NO: 1571738 - RNA, 19 nt, Artificial Sequence
  Description of Artificial Sequence: Synthetic oligonucleotide
gaaaauaagccuacacuua

SEQ ID NO: 1571739 - RNA, 19 nt, Artificial Sequence
  Description of Artificial Sequence: Synthetic oligonucleotide
uucucgaacagccgccgga

SEQ ID NO: 1571740 - RNA, 19 nt, Artificial Sequence
  Description of Artificial Sequence: Synthetic oligonucleotide
acuauucuuuggcucuuug

SEQ ID NO: 1571741 - RNA, 19 nt, Artificial Sequence
  Description of Artificial Sequence: Synthetic oligonucleotide
caacucaccaaucacagcu

SEQ ID NO: 1571742 - RNA, 19 nt, Artificial Sequence
  Description of Artificial Sequence: Synthetic oligonucleotide
caguguaacuggcagccag

SEQ ID NO: 1571743 - RNA, 19 nt, Artificial Sequence
  Description of Artificial Sequence: Synthetic oligonucleotide
ugggaacuauucuuuggcu

SEQ ID NO: 1571744 - RNA, 19 nt, Artificial Sequence
  Description of Artificial Sequence: Synthetic oligonucleotide
uguuucgggucuuaaucau

SEQ ID NO: 1571745 - RNA, 19 nt, Artificial Sequence
  Description of Artificial Sequence: Synthetic oligonucleotide
ucaacucaccaaucacagc

SEQ ID NO: 1571746 - RNA, 19 nt, Artificial Sequence
  Description of Artificial Sequence: Synthetic oligonucleotide
ucccgauaaucauucaaau

SEQ ID NO: 1571747 - RNA, 19 nt, Artificial Sequence
  Description of Artificial Sequence: Synthetic oligonucleotide
gugguggauuaccaagggg

SEQ ID NO: 1571748 - RNA, 19 nt, Artificial Sequence
  Description of Artificial Sequence: Synthetic oligonucleotide
ggagcuuaaagacacucuc

SEQ ID NO: 1571749 - RNA, 19 nt, Artificial Sequence
  Description of Artificial Sequence: Synthetic oligonucleotide
acggucaacucaccaauca

SEQ ID NO: 1571750 - RNA, 19 nt, Artificial Sequence
  Description of Artificial Sequence: Synthetic oligonucleotide
gccuacacuuauuaaacug

SEQ ID NO: 1571751 - RNA, 19 nt, Artificial Sequence
  Description of Artificial Sequence: Synthetic oligonucleotide
ccgauaaucauucaaauua

SEQ ID NO: 1571752 - RNA, 19 nt, Artificial Sequence
  Description of Artificial Sequence: Synthetic oligonucleotide
auaagccuacacuuauuaa

SEQ ID NO: 1571753 - RNA, 19 nt, Artificial Sequence
  Description of Artificial Sequence: Synthetic oligonucleotide
gcuaccaaauccaugagca

SEQ ID NO: 1571754 - RNA, 19 nt, Artificial Sequence
  Description of Artificial Sequence: Synthetic oligonucleotide
uaaauuuagguggguuaga

SEQ ID NO: 1571755 - RNA, 19 nt, Artificial Sequence
  Description of Artificial Sequence: Synthetic oligonucleotide
ucaguuuauucccgcuuaa

SEQ ID NO: 1571756 - RNA, 19 nt, Artificial Sequence
  Description of Artificial Sequence: Synthetic oligonucleotide
uuauucccgcuuaaauuua

SEQ ID NO: 1571757 - RNA, 19 nt, Artificial Sequence
  Description of Artificial Sequence: Synthetic oligonucleotide
uucccucuuucucuuuuca

SEQ ID NO: 1571758 - RNA, 19 nt, Artificial Sequence
  Description of Artificial Sequence: Synthetic oligonucleotide
gaacucuagguucacaaau

SEQ ID NO: 1571759 - RNA, 19 nt, Artificial Sequence
  Description of Artificial Sequence: Synthetic oligonucleotide
uuugcggcgagggccgucg

SEQ ID NO: 1571760 - RNA, 19 nt, Artificial Sequence
  Description of Artificial Sequence: Synthetic oligonucleotide
gagucuuacacggaaaccu

SEQ ID NO: 1571761 - RNA, 19 nt, Artificial Sequence
  Description of Artificial Sequence: Synthetic oligonucleotide
uggauuaccaaggggcuaa

SEQ ID NO: 1571762 - RNA, 19 nt, Artificial Sequence
  Description of Artificial Sequence: Synthetic oligonucleotide
uuuagguagcuuggggaga

SEQ ID NO: 1571763 - RNA, 19 nt, Artificial Sequence
  Description of Artificial Sequence: Synthetic oligonucleotide
gcuuaaagacacucucccg

SEQ ID NO: 1571764 - RNA, 19 nt, Artificial Sequence
  Description of Artificial Sequence: Synthetic oligonucleotide
cuuacacggaaaccuaaca

SEQ ID NO: 1571765 - RNA, 19 nt, Artificial Sequence
  Description of Artificial Sequence: Synthetic oligonucleotide
uuuucaauuuagguagcuu

SEQ ID NO: 1571766 - RNA, 19 nt, Artificial Sequence
  Description of Artificial Sequence: Synthetic oligonucleotide
ucuacaccauccaccucca

SEQ ID NO: 1571767 - RNA, 19 nt, Artificial Sequence
  Description of Artificial Sequence: Synthetic oligonucleotide
uucuauuaucacugagcuc

SEQ ID NO: 1571768 - RNA, 19 nt, Artificial Sequence
  Description of Artificial Sequence: Synthetic oligonucleotide
gucggaaggaggcggcugg

SEQ ID NO: 1571769 - RNA, 19 nt, Artificial Sequence
  Description of Artificial Sequence: Synthetic oligonucleotide
caaucgcaguguaacuggc

SEQ ID NO: 1571770 - RNA, 19 nt, Artificial Sequence
  Description of Artificial Sequence: Synthetic oligonucleotide
guuuauucccgcuuaaauu

SEQ ID NO: 1571771 - RNA, 19 nt, Artificial Sequence
  Description of Artificial Sequence: Synthetic oligonucleotide
aguguaacuggcagccagg

SEQ ID NO: 1571772 - RNA, 19 nt, Artificial Sequence
  Description of Artificial Sequence: Synthetic oligonucleotide
gcuaaacggaggaaggcgg

SEQ ID NO: 1571773 - RNA, 19 nt, Artificial Sequence
  Description of Artificial Sequence: Synthetic oligonucleotide
ggugguggauuaccaaggg

SEQ ID NO: 1571774 - RNA, 19 nt, Artificial Sequence
  Description of Artificial Sequence: Synthetic oligonucleotide
guccaaccaauacucaaca

SEQ ID NO: 1571775 - RNA, 19 nt, Artificial Sequence
  Description of Artificial Sequence: Synthetic oligonucleotide
agccuacacuuauuaaacu

SEQ ID NO: 1571776 - RNA, 19 nt, Artificial Sequence
  Description of Artificial Sequence: Synthetic oligonucleotide
aacucuagguucacaaauu

SEQ ID NO: 1571777 - RNA, 19 nt, Artificial Sequence
  Description of Artificial Sequence: Synthetic oligonucleotide
ucucgaacagccgccggag

SEQ ID NO: 1571778 - RNA, 19 nt, Artificial Sequence
  Description of Artificial Sequence: Synthetic oligonucleotide
cucggcaucggagucgggg

SEQ ID NO: 1571779 - RNA, 19 nt, Artificial Sequence
  Description of Artificial Sequence: Synthetic oligonucleotide
ggcuaaacggaggaaggcg

SEQ ID NO: 1571780 - RNA, 19 nt, Artificial Sequence
  Description of Artificial Sequence: Synthetic oligonucleotide
cuuuuaagacaauccagcu

SEQ ID NO: 1571781 - RNA, 19 nt, Artificial Sequence
  Description of Artificial Sequence: Synthetic oligonucleotide
aguucucgaacagccgccg

SEQ ID NO: 1571782 - RNA, 19 nt, Artificial Sequence
  Description of Artificial Sequence: Synthetic oligonucleotide
uagucuguccagaccgcca

SEQ ID NO: 1571783 - RNA, 19 nt, Artificial Sequence
  Description of Artificial Sequence: Synthetic oligonucleotide
cucuagguucacaaauuca

SEQ ID NO: 1571784 - RNA, 19 nt, Artificial Sequence
  Description of Artificial Sequence: Synthetic oligonucleotide
cgauaaucauucaaauuag

SEQ ID NO: 1571785 - RNA, 19 nt, Artificial Sequence
  Description of Artificial Sequence: Synthetic oligonucleotide
acuuaacuuuccgcggcgg

SEQ ID NO: 1571786 - RNA, 19 nt, Artificial Sequence
  Description of Artificial Sequence: Synthetic oligonucleotide
aggaaguucuucugcuagu

SEQ ID NO: 1571787 - RNA, 19 nt, Artificial Sequence
  Description of Artificial Sequence: Synthetic oligonucleotide
acggaaaccuaacaacguu

SEQ ID NO: 1571788 - RNA, 19 nt, Artificial Sequence
  Description of Artificial Sequence: Synthetic oligonucleotide
uuguuacaaucgcagugua

SEQ ID NO: 1571789 - RNA, 19 nt, Artificial Sequence
  Description of Artificial Sequence: Synthetic oligonucleotide
aggacggucaacucaccaa

SEQ ID NO: 1571790 - RNA, 19 nt, Artificial Sequence
  Description of Artificial Sequence: Synthetic oligonucleotide
uuagguagcuuggggagau

SEQ ID NO: 1571791 - RNA, 19 nt, Artificial Sequence
  Description of Artificial Sequence: Synthetic oligonucleotide
ucgcaguguaacuggcagc

SEQ ID NO: 1571792 - RNA, 19 nt, Artificial Sequence
  Description of Artificial Sequence: Synthetic oligonucleotide
cuaacaacguuuacaauuu

SEQ ID NO: 1571793 - RNA, 19 nt, Artificial Sequence
  Description of Artificial Sequence: Synthetic oligonucleotide
agccaggacggucaacuca

SEQ ID NO: 1571794 - RNA, 19 nt, Artificial Sequence
  Description of Artificial Sequence: Synthetic oligonucleotide
ccacauccgagucaggugc

SEQ ID NO: 1571795 - RNA, 19 nt, Artificial Sequence
  Description of Artificial Sequence: Synthetic oligonucleotide
guuguuacaaucgcagugu

SEQ ID NO: 1571796 - RNA, 19 nt, Artificial Sequence
  Description of Artificial Sequence: Synthetic oligonucleotide
caaccaauacucaacaguu

SEQ ID NO: 1571797 - RNA, 19 nt, Artificial Sequence
  Description of Artificial Sequence: Synthetic oligonucleotide
gggaacuauucuuuggcuc

SEQ ID NO: 1571798 - RNA, 19 nt, Artificial Sequence
  Description of Artificial Sequence: Synthetic oligonucleotide
ucccucuuucucuuuucac

SEQ ID NO: 1571799 - RNA, 19 nt, Artificial Sequence
  Description of Artificial Sequence: Synthetic oligonucleotide
aaauaagccuacacuuauu

SEQ ID NO: 1571800 - RNA, 19 nt, Artificial Sequence
  Description of Artificial Sequence: Synthetic oligonucleotide
ggaaggaggcggcuggcgg

SEQ ID NO: 1571801 - RNA, 19 nt, Artificial Sequence
  Description of Artificial Sequence: Synthetic oligonucleotide
auucccgcuuaaauuuagg

SEQ ID NO: 1571802 - RNA, 19 nt, Artificial Sequence
  Description of Artificial Sequence: Synthetic oligonucleotide
aaucgcaguguaacuggca

SEQ ID NO: 1571803 - RNA, 19 nt, Artificial Sequence
  Description of Artificial Sequence: Synthetic oligonucleotide
ccuacacuuauuaaacuga

SEQ ID NO: 1571804 - RNA, 19 nt, Artificial Sequence
  Description of Artificial Sequence: Synthetic oligonucleotide
uuaagacaauccagcuuuu

SEQ ID NO: 1571805 - RNA, 19 nt, Artificial Sequence
  Description of Artificial Sequence: Synthetic oligonucleotide
caucaugcccaaacucuuc

SEQ ID NO: 1571806 - RNA, 19 nt, Artificial Sequence
  Description of Artificial Sequence: Synthetic oligonucleotide
gaggcgugcggcgugcggg

SEQ ID NO: 1571807 - RNA, 19 nt, Artificial Sequence
  Description of Artificial Sequence: Synthetic oligonucleotide
guagcuuggggagaucuga

SEQ ID NO: 1571808 - RNA, 19 nt, Artificial Sequence
  Description of Artificial Sequence: Synthetic oligonucleotide
aaacggaggaaggcggaau

SEQ ID NO: 1571809 - RNA, 19 nt, Artificial Sequence
  Description of Artificial Sequence: Synthetic oligonucleotide
ggaacuauucuuuggcucu

SEQ ID NO: 1571810 - RNA, 19 nt, Artificial Sequence
  Description of Artificial Sequence: Synthetic oligonucleotide
cuagucuguccagaccgcc

SEQ ID NO: 1571811 - RNA, 19 nt, Artificial Sequence
  Description of Artificial Sequence: Synthetic oligonucleotide
cuucauccuccccacugac

SEQ ID NO: 1571812 - RNA, 19 nt, Artificial Sequence
  Description of Artificial Sequence: Synthetic oligonucleotide
cugcuagucuguccagacc

SEQ ID NO: 1571813 - RNA, 19 nt, Artificial Sequence
  Description of Artificial Sequence: Synthetic oligonucleotide
ucuguccagaccgccaaaa

SEQ ID NO: 1571814 - RNA, 19 nt, Artificial Sequence
  Description of Artificial Sequence: Synthetic oligonucleotide
uaacaacguuuacaauuuu

SEQ ID NO: 1571815 - RNA, 19 nt, Artificial Sequence
  Description of Artificial Sequence: Synthetic oligonucleotide
uucugcuagucuguccaga

SEQ ID NO: 1571816 - RNA, 19 nt, Artificial Sequence
  Description of Artificial Sequence: Synthetic oligonucleotide
guguccuggggcuuguauc

SEQ ID NO: 1571817 - RNA, 19 nt, Artificial Sequence
  Description of Artificial Sequence: Synthetic oligonucleotide
cuaaacggaggaaggcgga

SEQ ID NO: 1571818 - RNA, 19 nt, Artificial Sequence
  Description of Artificial Sequence: Synthetic oligonucleotide
uagguggguuagacuagga

SEQ ID NO: 1571819 - RNA, 19 nt, Artificial Sequence
  Description of Artificial Sequence: Synthetic oligonucleotide
guggguuagacuaggaagu

SEQ ID NO: 1571820 - RNA, 19 nt, Artificial Sequence
  Description of Artificial Sequence: Synthetic oligonucleotide
cuuggggagaucugaaacu

SEQ ID NO: 1571821 - RNA, 19 nt, Artificial Sequence
  Description of Artificial Sequence: Synthetic oligonucleotide
aggagcuuaaagacacucu

SEQ ID NO: 1571822 - RNA, 19 nt, Artificial Sequence
  Description of Artificial Sequence: Synthetic oligonucleotide
gauuguuucgggucuuaau

SEQ ID NO: 1571823 - RNA, 19 nt, Artificial Sequence
  Description of Artificial Sequence: Synthetic oligonucleotide
uguugggguggcagucccc

SEQ ID NO: 1571824 - RNA, 19 nt, Artificial Sequence
  Description of Artificial Sequence: Synthetic oligonucleotide
gucacgauacagcaagagu

SEQ ID NO: 1571825 - RNA, 19 nt, Artificial Sequence
  Description of Artificial Sequence: Synthetic oligonucleotide
ugcugauaucuuucaguuu

SEQ ID NO: 1571826 - RNA, 19 nt, Artificial Sequence
  Description of Artificial Sequence: Synthetic oligonucleotide
ggucaacucaccaaucaca

SEQ ID NO: 1571827 - RNA, 19 nt, Artificial Sequence
  Description of Artificial Sequence: Synthetic oligonucleotide
cccggagccaaguuacucg

SEQ ID NO: 1571828 - RNA, 19 nt, Artificial Sequence
  Description of Artificial Sequence: Synthetic oligonucleotide
uccuggggcuuguaucaca

SEQ ID NO: 1571829 - RNA, 19 nt, Artificial Sequence
  Description of Artificial Sequence: Synthetic oligonucleotide
uaaacggaggaaggcggaa

SEQ ID NO: 1571830 - RNA, 19 nt, Artificial Sequence
  Description of Artificial Sequence: Synthetic oligonucleotide
gguuagacuaggaaguucu

SEQ ID NO: 1571831 - RNA, 19 nt, Artificial Sequence
  Description of Artificial Sequence: Synthetic oligonucleotide
ccuaacaacguuuacaauu

SEQ ID NO: 1571832 - RNA, 19 nt, Artificial Sequence
  Description of Artificial Sequence: Synthetic oligonucleotide
cucaccaaucacagcuguc

SEQ ID NO: 1571833 - RNA, 19 nt, Artificial Sequence
  Description of Artificial Sequence: Synthetic oligonucleotide
caguccaaccaauacucaa

SEQ ID NO: 1571834 - RNA, 19 nt, Artificial Sequence
  Description of Artificial Sequence: Synthetic oligonucleotide
cacgauacagcaagagucu

SEQ ID NO: 1571835 - RNA, 19 nt, Artificial Sequence
  Description of Artificial Sequence: Synthetic oligonucleotide
gcaagagucuuacacggaa

SEQ ID NO: 1571836 - RNA, 19 nt, Artificial Sequence
  Description of Artificial Sequence: Synthetic oligonucleotide
accuaacaacguuuacaau

SEQ ID NO: 1571837 - RNA, 19 nt, Artificial Sequence
  Description of Artificial Sequence: Synthetic oligonucleotide
ggcggcguggucccgagag

SEQ ID NO: 1571838 - RNA, 19 nt, Artificial Sequence
  Description of Artificial Sequence: Synthetic oligonucleotide
ccaauacucaacaguucug

SEQ ID NO: 1571839 - RNA, 19 nt, Artificial Sequence
  Description of Artificial Sequence: Synthetic oligonucleotide
accucggcaucggagucgg

SEQ ID NO: 1571840 - RNA, 19 nt, Artificial Sequence
  Description of Artificial Sequence: Synthetic oligonucleotide
caagagucuuacacggaaa

SEQ ID NO: 1571841 - RNA, 19 nt, Artificial Sequence
  Description of Artificial Sequence: Synthetic oligonucleotide
ccgcuuaaauuuagguggg

SEQ ID NO: 1571842 - RNA, 19 nt, Artificial Sequence
  Description of Artificial Sequence: Synthetic oligonucleotide
caauacucaacaguucugu

SEQ ID NO: 1571843 - RNA, 19 nt, Artificial Sequence
  Description of Artificial Sequence: Synthetic oligonucleotide
cuuggugguggauuaccaa

SEQ ID NO: 1571844 - RNA, 19 nt, Artificial Sequence
  Description of Artificial Sequence: Synthetic oligonucleotide
cuugcagauuguuucgggu

SEQ ID NO: 1571845 - RNA, 19 nt, Artificial Sequence
  Description of Artificial Sequence: Synthetic oligonucleotide
cagcuaccaaauccaugag

SEQ ID NO: 1571846 - RNA, 19 nt, Artificial Sequence
  Description of Artificial Sequence: Synthetic oligonucleotide
agaggcgugcggcgugcgg

SEQ ID NO: 1571847 - RNA, 19 nt, Artificial Sequence
  Description of Artificial Sequence: Synthetic oligonucleotide
gcuuguaucacagcuaccu

SEQ ID NO: 1571848 - RNA, 19 nt, Artificial Sequence
  Description of Artificial Sequence: Synthetic oligonucleotide
gaggcgacccggccuuugc

SEQ ID NO: 1571849 - RNA, 19 nt, Artificial Sequence
  Description of Artificial Sequence: Synthetic oligonucleotide
cuccuucuacaucuucguc

SEQ ID NO: 1571850 - RNA, 19 nt, Artificial Sequence
  Description of Artificial Sequence: Synthetic oligonucleotide
ccaaucacagcugucacga

SEQ ID NO: 1571851 - RNA, 19 nt, Artificial Sequence
  Description of Artificial Sequence: Synthetic oligonucleotide
ggcgacccggccuuugcgg

SEQ ID NO: 1571852 - RNA, 19 nt, Artificial Sequence
  Description of Artificial Sequence: Synthetic oligonucleotide
guuucgggucuuaaucauc

SEQ ID NO: 1571853 - RNA, 19 nt, Artificial Sequence
  Description of Artificial Sequence: Synthetic oligonucleotide
caaacagauccaaacuuuu

SEQ ID NO: 1571854 - RNA, 19 nt, Artificial Sequence
  Description of Artificial Sequence: Synthetic oligonucleotide
ccuggggcuuguaucacag

SEQ ID NO: 1571855 - RNA, 19 nt, Artificial Sequence
  Description of Artificial Sequence: Synthetic oligonucleotide
guggcaguccccaggcuug

SEQ ID NO: 1571856 - RNA, 19 nt, Artificial Sequence
  Description of Artificial Sequence: Synthetic oligonucleotide
cuaggaaguucuucugcua

SEQ ID NO: 1571857 - RNA, 19 nt, Artificial Sequence
  Description of Artificial Sequence: Synthetic oligonucleotide
agccgccggaguccgguuc

SEQ ID NO: 1571858 - RNA, 19 nt, Artificial Sequence
  Description of Artificial Sequence: Synthetic oligonucleotide
ccaagacaaguucucgaac

SEQ ID NO: 1571859 - RNA, 19 nt, Artificial Sequence
  Description of Artificial Sequence: Synthetic oligonucleotide
cugguccucccggucauag

SEQ ID NO: 1571860 - RNA, 19 nt, Artificial Sequence
  Description of Artificial Sequence: Synthetic oligonucleotide
aacuauucuuuggcucuuu

SEQ ID NO: 1571861 - RNA, 19 nt, Artificial Sequence
  Description of Artificial Sequence: Synthetic oligonucleotide
agucuuacacggaaaccua

SEQ ID NO: 1571862 - RNA, 19 nt, Artificial Sequence
  Description of Artificial Sequence: Synthetic oligonucleotide
ggcgagggccgucggaagg

SEQ ID NO: 1571863 - RNA, 19 nt, Artificial Sequence
  Description of Artificial Sequence: Synthetic oligonucleotide
cuggggcuuguaucacagc

SEQ ID NO: 1571864 - RNA, 19 nt, Artificial Sequence
  Description of Artificial Sequence: Synthetic oligonucleotide
ggaacucuagguucacaaa

SEQ ID NO: 1571865 - RNA, 19 nt, Artificial Sequence
  Description of Artificial Sequence: Synthetic oligonucleotide
ggccuuugcggcgagggcc

SEQ ID NO: 1571866 - RNA, 19 nt, Artificial Sequence
  Description of Artificial Sequence: Synthetic oligonucleotide
agauuguuucgggucuuaa

SEQ ID NO: 1571867 - RNA, 19 nt, Artificial Sequence
  Description of Artificial Sequence: Synthetic oligonucleotide
cgcaguguaacuggcagcc

SEQ ID NO: 1571868 - RNA, 19 nt, Artificial Sequence
  Description of Artificial Sequence: Synthetic oligonucleotide
gacggucaacucaccaauc

SEQ ID NO: 1571869 - RNA, 19 nt, Artificial Sequence
  Description of Artificial Sequence: Synthetic oligonucleotide
cacggaaaccuaacaacgu

SEQ ID NO: 1571870 - RNA, 19 nt, Artificial Sequence
  Description of Artificial Sequence: Synthetic oligonucleotide
caccucggcaucggagucg

SEQ ID NO: 1571871 - RNA, 19 nt, Artificial Sequence
  Description of Artificial Sequence: Synthetic oligonucleotide
ggaaaccuaacaacguuua

SEQ ID NO: 1571872 - RNA, 19 nt, Artificial Sequence
  Description of Artificial Sequence: Synthetic oligonucleotide
cuguuaaccccucaauuuu

SEQ ID NO: 1571873 - RNA, 19 nt, Artificial Sequence
  Description of Artificial Sequence: Synthetic oligonucleotide
ccaaccaauacucaacagu

SEQ ID NO: 1571874 - RNA, 19 nt, Artificial Sequence
  Description of Artificial Sequence: Synthetic oligonucleotide
ccaucauuugcuuugcagu

SEQ ID NO: 1571875 - RNA, 19 nt, Artificial Sequence
  Description of Artificial Sequence: Synthetic oligonucleotide
acggaggaaggcggaaugu

SEQ ID NO: 1571876 - RNA, 19 nt, Artificial Sequence
  Description of Artificial Sequence: Synthetic oligonucleotide
cuauuaucacugagcucaa

SEQ ID NO: 1571877 - RNA, 19 nt, Artificial Sequence
  Description of Artificial Sequence: Synthetic oligonucleotide
gggucuuaaucaucaucuc

SEQ ID NO: 1571878 - RNA, 19 nt, Artificial Sequence
  Description of Artificial Sequence: Synthetic oligonucleotide
agcaagagucuuacacgga

SEQ ID NO: 1571879 - RNA, 19 nt, Artificial Sequence
  Description of Artificial Sequence: Synthetic oligonucleotide
gucuuacacggaaaccuaa

SEQ ID NO: 1571880 - RNA, 19 nt, Artificial Sequence
  Description of Artificial Sequence: Synthetic oligonucleotide
caggacggucaacucacca

SEQ ID NO: 1571881 - RNA, 19 nt, Artificial Sequence
  Description of Artificial Sequence: Synthetic oligonucleotide
aggcuuggugguggauuac

SEQ ID NO: 1571882 - RNA, 19 nt, Artificial Sequence
  Description of Artificial Sequence: Synthetic oligonucleotide
gagggccgucggaaggagg

SEQ ID NO: 1571883 - RNA, 19 nt, Artificial Sequence
  Description of Artificial Sequence: Synthetic oligonucleotide
gaguccgguuccucagcuc

SEQ ID NO: 1571884 - RNA, 19 nt, Artificial Sequence
  Description of Artificial Sequence: Synthetic oligonucleotide
caacguuuacaauuuuguu

SEQ ID NO: 1571885 - RNA, 19 nt, Artificial Sequence
  Description of Artificial Sequence: Synthetic oligonucleotide
ggcuuggugguggauuacc

SEQ ID NO: 1571886 - RNA, 19 nt, Artificial Sequence
  Description of Artificial Sequence: Synthetic oligonucleotide
cauccuccccacugacuuc

SEQ ID NO: 1571887 - RNA, 19 nt, Artificial Sequence
  Description of Artificial Sequence: Synthetic oligonucleotide
ggucccgagaggcgugcgg

SEQ ID NO: 1571888 - RNA, 19 nt, Artificial Sequence
  Description of Artificial Sequence: Synthetic oligonucleotide
gaggcggcguggucccgag

SEQ ID NO: 1571889 - RNA, 19 nt, Artificial Sequence
  Description of Artificial Sequence: Synthetic oligonucleotide
gccaggacggucaacucac

SEQ ID NO: 1571890 - RNA, 19 nt, Artificial Sequence
  Description of Artificial Sequence: Synthetic oligonucleotide
ugcggcgagggccgucgga

SEQ ID NO: 1571891 - RNA, 19 nt, Artificial Sequence
  Description of Artificial Sequence: Synthetic oligonucleotide
ugcggcgugcgggcgugcg

SEQ ID NO: 1571892 - RNA, 19 nt, Artificial Sequence
  Description of Artificial Sequence: Synthetic oligonucleotide
acagccgccggaguccggu

SEQ ID NO: 1571893 - RNA, 19 nt, Artificial Sequence
  Description of Artificial Sequence: Synthetic oligonucleotide
caucuguuaaccccucaau

SEQ ID NO: 1571894 - RNA, 19 nt, Artificial Sequence
  Description of Artificial Sequence: Synthetic oligonucleotide
acgauacagcaagagucuu

SEQ ID NO: 1571895 - RNA, 19 nt, Artificial Sequence
  Description of Artificial Sequence: Synthetic oligonucleotide
cugucacgauacagcaaga

SEQ ID NO: 1571896 - RNA, 19 nt, Artificial Sequence
  Description of Artificial Sequence: Synthetic oligonucleotide
ccggucauagccauccaga

SEQ ID NO: 1571897 - RNA, 19 nt, Artificial Sequence
  Description of Artificial Sequence: Synthetic oligonucleotide
cguuuacaauuuuguuggg

SEQ ID NO: 1571898 - RNA, 19 nt, Artificial Sequence
  Description of Artificial Sequence: Synthetic oligonucleotide
cgggucuuaaucaucaucu

SEQ ID NO: 1571899 - RNA, 19 nt, Artificial Sequence
  Description of Artificial Sequence: Synthetic oligonucleotide
gguagcuuggggagaucug

SEQ ID NO: 1571900 - RNA, 19 nt, Artificial Sequence
  Description of Artificial Sequence: Synthetic oligonucleotide
uugcggcgagggccgucgg

SEQ ID NO: 1571901 - RNA, 19 nt, Artificial Sequence
  Description of Artificial Sequence: Synthetic oligonucleotide
gcaguccccaggcuuggug

SEQ ID NO: 1571902 - RNA, 19 nt, Artificial Sequence
  Description of Artificial Sequence: Synthetic oligonucleotide
ggggagaucugaaacugaa

SEQ ID NO: 1571903 - RNA, 19 nt, Artificial Sequence
  Description of Artificial Sequence: Synthetic oligonucleotide
ggcggaggcggcguggucc

SEQ ID NO: 1571904 - RNA, 19 nt, Artificial Sequence
  Description of Artificial Sequence: Synthetic oligonucleotide
ggucauagccauccagaua

SEQ ID NO: 1571905 - RNA, 19 nt, Artificial Sequence
  Description of Artificial Sequence: Synthetic oligonucleotide
gccuuugcggcgagggccg

SEQ ID NO: 1571906 - RNA, 19 nt, Artificial Sequence
  Description of Artificial Sequence: Synthetic oligonucleotide
gagaggcgugcggcgugcg

SEQ ID NO: 1571907 - RNA, 19 nt, Artificial Sequence
  Description of Artificial Sequence: Synthetic oligonucleotide
ggguuagacuaggaaguuc

SEQ ID NO: 1571908 - RNA, 19 nt, Artificial Sequence
  Description of Artificial Sequence: Synthetic oligonucleotide
caaaggcuccaaggugcug

SEQ ID NO: 1571909 - RNA, 19 nt, Artificial Sequence
  Description of Artificial Sequence: Synthetic oligonucleotide
cacagccaaacagauccaa

SEQ ID NO: 1571910 - RNA, 19 nt, Artificial Sequence
  Description of Artificial Sequence: Synthetic oligonucleotide
cagccaggacggucaacuc

SEQ ID NO: 1571911 - RNA, 19 nt, Artificial Sequence
  Description of Artificial Sequence: Synthetic oligonucleotide
cccggucauagccauccag

SEQ ID NO: 1571912 - RNA, 19 nt, Artificial Sequence
  Description of Artificial Sequence: Synthetic oligonucleotide
ggccgucggaaggaggcgg

SEQ ID NO: 1571913 - RNA, 19 nt, Artificial Sequence
  Description of Artificial Sequence: Synthetic oligonucleotide
uagugaccucacagccaaa

SEQ ID NO: 1571914 - RNA, 19 nt, Artificial Sequence
  Description of Artificial Sequence: Synthetic oligonucleotide
ggacggucaacucaccaau

SEQ ID NO: 1571915 - RNA, 19 nt, Artificial Sequence
  Description of Artificial Sequence: Synthetic oligonucleotide
cuccacauccgagucaggu

SEQ ID NO: 1571916 - RNA, 19 nt, Artificial Sequence
  Description of Artificial Sequence: Synthetic oligonucleotide
caugagcaguccaaccaau

SEQ ID NO: 1571917 - RNA, 19 nt, Artificial Sequence
  Description of Artificial Sequence: Synthetic oligonucleotide
cuacaccauccaccuccac

SEQ ID NO: 1571918 - RNA, 19 nt, Artificial Sequence
  Description of Artificial Sequence: Synthetic oligonucleotide
gcuagucuguccagaccgc

SEQ ID NO: 1571919 - RNA, 19 nt, Artificial Sequence
  Description of Artificial Sequence: Synthetic oligonucleotide
ccccucuucaaacuuaacu

SEQ ID NO: 1571920 - RNA, 19 nt, Artificial Sequence
  Description of Artificial Sequence: Synthetic oligonucleotide
gguggauuaccaaggggcu

SEQ ID NO: 1571921 - RNA, 19 nt, Artificial Sequence
  Description of Artificial Sequence: Synthetic oligonucleotide
guggauuaccaaggggcua

SEQ ID NO: 1571922 - RNA, 19 nt, Artificial Sequence
  Description of Artificial Sequence: Synthetic oligonucleotide
cuuguaucacagcuaccuu

SEQ ID NO: 1571923 - RNA, 19 nt, Artificial Sequence
  Description of Artificial Sequence: Synthetic oligonucleotide
agcugucacgauacagcaa

SEQ ID NO: 1571924 - RNA, 19 nt, Artificial Sequence
  Description of Artificial Sequence: Synthetic oligonucleotide
agaggcgacccggccuuug

SEQ ID NO: 1571925 - RNA, 19 nt, Artificial Sequence
  Description of Artificial Sequence: Synthetic oligonucleotide
ccggaguccgguuccucag

SEQ ID NO: 1571926 - RNA, 19 nt, Artificial Sequence
  Description of Artificial Sequence: Synthetic oligonucleotide
gcuuggugguggauuacca

SEQ ID NO: 1571927 - RNA, 19 nt, Artificial Sequence
  Description of Artificial Sequence: Synthetic oligonucleotide
cggucaacucaccaaucac

SEQ ID NO: 1571928 - RNA, 19 nt, Artificial Sequence
  Description of Artificial Sequence: Synthetic oligonucleotide
ccggccuuugcggcgaggg

SEQ ID NO: 1571929 - RNA, 19 nt, Artificial Sequence
  Description of Artificial Sequence: Synthetic oligonucleotide
ggcguggucccgagaggcg

SEQ ID NO: 1571930 - RNA, 19 nt, Artificial Sequence
  Description of Artificial Sequence: Synthetic oligonucleotide
gccgccggaguccgguucc

SEQ ID NO: 1571931 - RNA, 19 nt, Artificial Sequence
  Description of Artificial Sequence: Synthetic oligonucleotide
ggcuuguaucacagcuacc

SEQ ID NO: 1571932 - RNA, 19 nt, Artificial Sequence
  Description of Artificial Sequence: Synthetic oligonucleotide
uagguagcuuggggagauc

SEQ ID NO: 1571933 - RNA, 19 nt, Artificial Sequence
  Description of Artificial Sequence: Synthetic oligonucleotide
gcggcguggucccgagagg

SEQ ID NO: 1571934 - RNA, 19 nt, Artificial Sequence
  Description of Artificial Sequence: Synthetic oligonucleotide
cgugcgggcgagcggagcc

SEQ ID NO: 1571935 - RNA, 19 nt, Artificial Sequence
  Description of Artificial Sequence: Synthetic oligonucleotide
gcggaggcggcgugguccc

SEQ ID NO: 1571936 - RNA, 19 nt, Artificial Sequence
  Description of Artificial Sequence: Synthetic oligonucleotide
ggaguccgguuccucagcu

SEQ ID NO: 1571937 - RNA, 19 nt, Artificial Sequence
  Description of Artificial Sequence: Synthetic oligonucleotide
gcaguccaaccaauacuca

SEQ ID NO: 1571938 - RNA, 19 nt, Artificial Sequence
  Description of Artificial Sequence: Synthetic oligonucleotide
ccaggacggucaacucacc

SEQ ID NO: 1571939 - RNA, 19 nt, Artificial Sequence
  Description of Artificial Sequence: Synthetic oligonucleotide
cacauccgagucaggugcu

SEQ ID NO: 1571940 - RNA, 19 nt, Artificial Sequence
  Description of Artificial Sequence: Synthetic oligonucleotide
gggccgucggaaggaggcg

SEQ ID NO: 1571941 - RNA, 19 nt, Artificial Sequence
  Description of Artificial Sequence: Synthetic oligonucleotide
cuuugcggcgagggccguc

SEQ ID NO: 1571942 - RNA, 19 nt, Artificial Sequence
  Description of Artificial Sequence: Synthetic oligonucleotide
ccgagucaggugcuuccug

SEQ ID NO: 1571943 - RNA, 19 nt, Artificial Sequence
  Description of Artificial Sequence: Synthetic oligonucleotide
gggagaggcgacccggccu

SEQ ID NO: 1571944 - RNA, 19 nt, Artificial Sequence
  Description of Artificial Sequence: Synthetic oligonucleotide
cccgauaaucauucaaauu

SEQ ID NO: 1571945 - RNA, 19 nt, Artificial Sequence
  Description of Artificial Sequence: Synthetic oligonucleotide
cagauuguuucgggucuua

SEQ ID NO: 1571946 - RNA, 19 nt, Artificial Sequence
  Description of Artificial Sequence: Synthetic oligonucleotide
gguguccuggggcuuguau

SEQ ID NO: 1571947 - RNA, 19 nt, Artificial Sequence
  Description of Artificial Sequence: Synthetic oligonucleotide
ggagaggcgacccggccuu

SEQ ID NO: 1571948 - RNA, 19 nt, Artificial Sequence
  Description of Artificial Sequence: Synthetic oligonucleotide
cggcguggucccgagaggc

SEQ ID NO: 1571949 - RNA, 19 nt, Artificial Sequence
  Description of Artificial Sequence: Synthetic oligonucleotide
ccauccagauaggacaacu

SEQ ID NO: 1571950 - RNA, 19 nt, Artificial Sequence
  Description of Artificial Sequence: Synthetic oligonucleotide
gcggcgugcgggcgugcgg

SEQ ID NO: 1571951 - RNA, 19 nt, Artificial Sequence
  Description of Artificial Sequence: Synthetic oligonucleotide
gccgucggaaggaggcggc

SEQ ID NO: 1571952 - RNA, 19 nt, Artificial Sequence
  Description of Artificial Sequence: Synthetic oligonucleotide
cgacccggccuuugcggcg

SEQ ID NO: 1571953 - RNA, 19 nt, Artificial Sequence
  Description of Artificial Sequence: Synthetic oligonucleotide
caucaucuguuucccucuu

SEQ ID NO: 1571954 - RNA, 19 nt, Artificial Sequence
  Description of Artificial Sequence: Synthetic oligonucleotide
acccggccuuugcggcgag

SEQ ID NO: 1571955 - RNA, 19 nt, Artificial Sequence
  Description of Artificial Sequence: Synthetic oligonucleotide
cucgaacagccgccggagu

SEQ ID NO: 1571956 - RNA, 19 nt, Artificial Sequence
  Description of Artificial Sequence: Synthetic oligonucleotide
gcaguguaacuggcagcca

SEQ ID NO: 1571957 - RNA, 19 nt, Artificial Sequence
  Description of Artificial Sequence: Synthetic oligonucleotide
ccgagaggcgugcggcgug

SEQ ID NO: 1571958 - RNA, 19 nt, Artificial Sequence
  Description of Artificial Sequence: Synthetic oligonucleotide
aggcggcguggucccgaga

SEQ ID NO: 1571959 - RNA, 19 nt, Artificial Sequence
  Description of Artificial Sequence: Synthetic oligonucleotide
cguggucccgagaggcgug

SEQ ID NO: 1571960 - RNA, 19 nt, Artificial Sequence
  Description of Artificial Sequence: Synthetic oligonucleotide
gcgagggccgucggaagga

SEQ ID NO: 1571961 - RNA, 19 nt, Artificial Sequence
  Description of Artificial Sequence: Synthetic oligonucleotide
gcgugcgggcgugcgggcg

SEQ ID NO: 1571962 - RNA, 19 nt, Artificial Sequence
  Description of Artificial Sequence: Synthetic oligonucleotide
ggauuaccaaggggcuaaa

SEQ ID NO: 1571963 - RNA, 19 nt, Artificial Sequence
  Description of Artificial Sequence: Synthetic oligonucleotide
gcggaaugucuugggaacu

SEQ ID NO: 1571964 - RNA, 19 nt, Artificial Sequence
  Description of Artificial Sequence: Synthetic oligonucleotide
cggaaaccuaacaacguuu

SEQ ID NO: 1571965 - RNA, 19 nt, Artificial Sequence
  Description of Artificial Sequence: Synthetic oligonucleotide
gcggcgagggccgucggaa

SEQ ID NO: 1571966 - RNA, 19 nt, Artificial Sequence
  Description of Artificial Sequence: Synthetic oligonucleotide
cgucggaaggaggcggcug

SEQ ID NO: 1571967 - RNA, 19 nt, Artificial Sequence
  Description of Artificial Sequence: Synthetic oligonucleotide
cgagaggcgugcggcgugc

SEQ ID NO: 1571968 - RNA, 19 nt, Artificial Sequence
  Description of Artificial Sequence: Synthetic oligonucleotide
ggcagccaggacggucaac

SEQ ID NO: 1571969 - RNA, 19 nt, Artificial Sequence
  Description of Artificial Sequence: Synthetic oligonucleotide
cggccuuugcggcgagggc

SEQ ID NO: 1571970 - RNA, 19 nt, Artificial Sequence
  Description of Artificial Sequence: Synthetic oligonucleotide
gcguggucccgagaggcgu

SEQ ID NO: 1571971 - RNA, 19 nt, Artificial Sequence
  Description of Artificial Sequence: Synthetic oligonucleotide
cgagggccgucggaaggag

SEQ ID NO: 1571972 - RNA, 19 nt, Artificial Sequence
  Description of Artificial Sequence: Synthetic oligonucleotide
cuggcggaggcggcguggu

SEQ ID NO: 1571973 - RNA, 19 nt, Artificial Sequence
  Description of Artificial Sequence: Synthetic oligonucleotide
ccucggcaucggagucggg

SEQ ID NO: 1571974 - RNA, 19 nt, Artificial Sequence
  Description of Artificial Sequence: Synthetic oligonucleotide
gcagauuguuucgggucuu

SEQ ID NO: 1571975 - RNA, 19 nt, Artificial Sequence
  Description of Artificial Sequence: Synthetic oligonucleotide
gugcggcgugcgggcgugc

SEQ ID NO: 1571976 - RNA, 19 nt, Artificial Sequence
  Description of Artificial Sequence: Synthetic oligonucleotide
ggguggcaguccccaggcu

SEQ ID NO: 1571977 - RNA, 19 nt, Artificial Sequence
  Description of Artificial Sequence: Synthetic oligonucleotide
cgugcggcgugcgggcgug

SEQ ID NO: 1571978 - RNA, 19 nt, Artificial Sequence
  Description of Artificial Sequence: Synthetic oligonucleotide
cccggccuuugcggcgagg

SEQ ID NO: 1571979 - RNA, 19 nt, Artificial Sequence
  Description of Artificial Sequence: Synthetic oligonucleotide
gagaggcgacccggccuuu

SEQ ID NO: 1571980 - RNA, 19 nt, Artificial Sequence
  Description of Artificial Sequence: Synthetic oligonucleotide
gcgugcggcgugcgggcgu

SEQ ID NO: 1571981 - RNA, 19 nt, Artificial Sequence
  Description of Artificial Sequence: Synthetic oligonucleotide
cgcuuaaauuuaggugggu

SEQ ID NO: 1571982 - RNA, 19 nt, Artificial Sequence
  Description of Artificial Sequence: Synthetic oligonucleotide
cccgagaggcgugcggcgu

SEQ ID NO: 1571983 - RNA, 19 nt, Artificial Sequence
  Description of Artificial Sequence: Synthetic oligonucleotide
cagccgccggaguccgguu

SEQ ID NO: 1571984 - RNA, 19 nt, Artificial Sequence
  Description of Artificial Sequence: Synthetic oligonucleotide
cgccggaguccgguuccuc

SEQ ID NO: 1571985 - RNA, 19 nt, Artificial Sequence
  Description of Artificial Sequence: Synthetic oligonucleotide
ccgucggaaggaggcggcu

SEQ ID NO: 1571986 - RNA, 19 nt, Artificial Sequence
  Description of Artificial Sequence: Synthetic oligonucleotide
uuuaaucaaacauugaggg

SEQ ID NO: 1571987 - RNA, 19 nt, Artificial Sequence
  Description of Artificial Sequence: Synthetic oligonucleotide
acugcuuucggguacaugg

SEQ ID NO: 1571988 - RNA, 19 nt, Artificial Sequence
  Description of Artificial Sequence: Synthetic oligonucleotide
uuaacguugaauugcuugg

SEQ ID NO: 1571989 - RNA, 19 nt, Artificial Sequence
  Description of Artificial Sequence: Synthetic oligonucleotide
ucagccgccacaaugaugc

SEQ ID NO: 1571990 - RNA, 19 nt, Artificial Sequence
  Description of Artificial Sequence: Synthetic oligonucleotide
aacacuuuggaaagcauac

SEQ ID NO: 1571991 - RNA, 19 nt, Artificial Sequence
  Description of Artificial Sequence: Synthetic oligonucleotide
ugugguugcgcccacaugc

SEQ ID NO: 1571992 - RNA, 19 nt, Artificial Sequence
  Description of Artificial Sequence: Synthetic oligonucleotide
uucgggacagguaagaucu

SEQ ID NO: 1571993 - RNA, 19 nt, Artificial Sequence
  Description of Artificial Sequence: Synthetic oligonucleotide
agcacaugaacccgaaacc

SEQ ID NO: 1571994 - RNA, 19 nt, Artificial Sequence
  Description of Artificial Sequence: Synthetic oligonucleotide
uaaucaaacauugagggaa

SEQ ID NO: 1571995 - RNA, 19 nt, Artificial Sequence
  Description of Artificial Sequence: Synthetic oligonucleotide
ucucgaaccaccacauucg

SEQ ID NO: 1571996 - RNA, 19 nt, Artificial Sequence
  Description of Artificial Sequence: Synthetic oligonucleotide
acgugaaaaugacagcugc

SEQ ID NO: 1571997 - RNA, 19 nt, Artificial Sequence
  Description of Artificial Sequence: Synthetic oligonucleotide
aucucgaaccaccacauuc

SEQ ID NO: 1571998 - RNA, 19 nt, Artificial Sequence
  Description of Artificial Sequence: Synthetic oligonucleotide
aacccgaaaccacaguccg

SEQ ID NO: 1571999 - RNA, 19 nt, Artificial Sequence
  Description of Artificial Sequence: Synthetic oligonucleotide
ugaacuucccaucugaguu

SEQ ID NO: 1572000 - RNA, 19 nt, Artificial Sequence
  Description of Artificial Sequence: Synthetic oligonucleotide
agugugaauagcccauggc

SEQ ID NO: 1572001 - RNA, 19 nt, Artificial Sequence
  Description of Artificial Sequence: Synthetic oligonucleotide
auugccucauggcugaggg

SEQ ID NO: 1572002 - RNA, 19 nt, Artificial Sequence
  Description of Artificial Sequence: Synthetic oligonucleotide
uacaucucgaaccaccaca

SEQ ID NO: 1572003 - RNA, 19 nt, Artificial Sequence
  Description of Artificial Sequence: Synthetic oligonucleotide
uuggaaacggaaccgcggg

SEQ ID NO: 1572004 - RNA, 19 nt, Artificial Sequence
  Description of Artificial Sequence: Synthetic oligonucleotide
uauucagggcacccaaagg

SEQ ID NO: 1572005 - RNA, 19 nt, Artificial Sequence
  Description of Artificial Sequence: Synthetic oligonucleotide
guaguuaacguugaauugc

SEQ ID NO: 1572006 - RNA, 19 nt, Artificial Sequence
  Description of Artificial Sequence: Synthetic oligonucleotide
aacuuuugcuucuuaaauu

SEQ ID NO: 1572007 - RNA, 19 nt, Artificial Sequence
  Description of Artificial Sequence: Synthetic oligonucleotide
acagcaaaggagcaggugu

SEQ ID NO: 1572008 - RNA, 19 nt, Artificial Sequence
  Description of Artificial Sequence: Synthetic oligonucleotide
gugugaauagcccauggcc

SEQ ID NO: 1572009 - RNA, 19 nt, Artificial Sequence
  Description of Artificial Sequence: Synthetic oligonucleotide
auucagggcacccaaagga

SEQ ID NO: 1572010 - RNA, 19 nt, Artificial Sequence
  Description of Artificial Sequence: Synthetic oligonucleotide
auucuauccgcugugcucg

SEQ ID NO: 1572011 - RNA, 19 nt, Artificial Sequence
  Description of Artificial Sequence: Synthetic oligonucleotide
auauucagggcacccaaag

SEQ ID NO: 1572012 - RNA, 19 nt, Artificial Sequence
  Description of Artificial Sequence: Synthetic oligonucleotide
uacaugguagacucacgcg

SEQ ID NO: 1572013 - RNA, 19 nt, Artificial Sequence
  Description of Artificial Sequence: Synthetic oligonucleotide
guaucuguuaacgccaggg

SEQ ID NO: 1572014 - RNA, 19 nt, Artificial Sequence
  Description of Artificial Sequence: Synthetic oligonucleotide
aaaggaauagagguugccu

SEQ ID NO: 1572015 - RNA, 19 nt, Artificial Sequence
  Description of Artificial Sequence: Synthetic oligonucleotide
agguaguuaacguugaauu

SEQ ID NO: 1572016 - RNA, 19 nt, Artificial Sequence
  Description of Artificial Sequence: Synthetic oligonucleotide
ucauauucuauccgcugug

SEQ ID NO: 1572017 - RNA, 19 nt, Artificial Sequence
  Description of Artificial Sequence: Synthetic oligonucleotide
gugauaaggaggcugugag

SEQ ID NO: 1572018 - RNA, 19 nt, Artificial Sequence
  Description of Artificial Sequence: Synthetic oligonucleotide
ugaacccgaaaccacaguc

SEQ ID NO: 1572019 - RNA, 19 nt, Artificial Sequence
  Description of Artificial Sequence: Synthetic oligonucleotide
agcgccacaggcuacaucu

SEQ ID NO: 1572020 - RNA, 19 nt, Artificial Sequence
  Description of Artificial Sequence: Synthetic oligonucleotide
accagugugugguuagcgc

SEQ ID NO: 1572021 - RNA, 19 nt, Artificial Sequence
  Description of Artificial Sequence: Synthetic oligonucleotide
auucgggacagguaagauc

SEQ ID NO: 1572022 - RNA, 19 nt, Artificial Sequence
  Description of Artificial Sequence: Synthetic oligonucleotide
aagauggccacccgccggg

SEQ ID NO: 1572023 - RNA, 19 nt, Artificial Sequence
  Description of Artificial Sequence: Synthetic oligonucleotide
ugcccguuguacaugaucu

SEQ ID NO: 1572024 - RNA, 19 nt, Artificial Sequence
  Description of Artificial Sequence: Synthetic oligonucleotide
cugccugucucguagaaag

SEQ ID NO: 1572025 - RNA, 19 nt, Artificial Sequence
  Description of Artificial Sequence: Synthetic oligonucleotide
uugguagcgccccagaaaa

SEQ ID NO: 1572026 - RNA, 19 nt, Artificial Sequence
  Description of Artificial Sequence: Synthetic oligonucleotide
ucuugguaucaccauggcc

SEQ ID NO: 1572027 - RNA, 19 nt, Artificial Sequence
  Description of Artificial Sequence: Synthetic oligonucleotide
guugaauugcuuggaaacg

SEQ ID NO: 1572028 - RNA, 19 nt, Artificial Sequence
  Description of Artificial Sequence: Synthetic oligonucleotide
acccaaugcaccuucgguc

SEQ ID NO: 1572029 - RNA, 19 nt, Artificial Sequence
  Description of Artificial Sequence: Synthetic oligonucleotide
guacaugguagacucacgc

SEQ ID NO: 1572030 - RNA, 19 nt, Artificial Sequence
  Description of Artificial Sequence: Synthetic oligonucleotide
cugaauucagccccgcagg

SEQ ID NO: 1572031 - RNA, 19 nt, Artificial Sequence
  Description of Artificial Sequence: Synthetic oligonucleotide
aucuguuaacgccagggug

SEQ ID NO: 1572032 - RNA, 19 nt, Artificial Sequence
  Description of Artificial Sequence: Synthetic oligonucleotide
ucaucucgugcuaucacca

SEQ ID NO: 1572033 - RNA, 19 nt, Artificial Sequence
  Description of Artificial Sequence: Synthetic oligonucleotide
ucugaguugugucccagcu

SEQ ID NO: 1572034 - RNA, 19 nt, Artificial Sequence
  Description of Artificial Sequence: Synthetic oligonucleotide
cagcuggccauauucaggg

SEQ ID NO: 1572035 - RNA, 19 nt, Artificial Sequence
  Description of Artificial Sequence: Synthetic oligonucleotide
ucacgcgauguauugguag

SEQ ID NO: 1572036 - RNA, 19 nt, Artificial Sequence
  Description of Artificial Sequence: Synthetic oligonucleotide
uaguuaacguugaauugcu

SEQ ID NO: 1572037 - RNA, 19 nt, Artificial Sequence
  Description of Artificial Sequence: Synthetic oligonucleotide
gugcacgugaaaaugacag

SEQ ID NO: 1572038 - RNA, 19 nt, Artificial Sequence
  Description of Artificial Sequence: Synthetic oligonucleotide
cucggcauggcccagccgg

SEQ ID NO: 1572039 - RNA, 19 nt, Artificial Sequence
  Description of Artificial Sequence: Synthetic oligonucleotide
ugaauugcuuggaaacgga

SEQ ID NO: 1572040 - RNA, 19 nt, Artificial Sequence
  Description of Artificial Sequence: Synthetic oligonucleotide
gagccaguaucuguuaacg

SEQ ID NO: 1572041 - RNA, 19 nt, Artificial Sequence
  Description of Artificial Sequence: Synthetic oligonucleotide
agagguugccuuugcaguc

SEQ ID NO: 1572042 - RNA, 19 nt, Artificial Sequence
  Description of Artificial Sequence: Synthetic oligonucleotide
ugaagauggccacccgccg

SEQ ID NO: 1572043 - RNA, 19 nt, Artificial Sequence
  Description of Artificial Sequence: Synthetic oligonucleotide
acaggcaaggcuccggauc

SEQ ID NO: 1572044 - RNA, 19 nt, Artificial Sequence
  Description of Artificial Sequence: Synthetic oligonucleotide
ucggguacaugguagacuc

SEQ ID NO: 1572045 - RNA, 19 nt, Artificial Sequence
  Description of Artificial Sequence: Synthetic oligonucleotide
ugugcucgggcgaugaacu

SEQ ID NO: 1572046 - RNA, 19 nt, Artificial Sequence
  Description of Artificial Sequence: Synthetic oligonucleotide
cagcacaugaacccgaaac

SEQ ID NO: 1572047 - RNA, 19 nt, Artificial Sequence
  Description of Artificial Sequence: Synthetic oligonucleotide
uccuguacugcuuucgggu

SEQ ID NO: 1572048 - RNA, 19 nt, Artificial Sequence
  Description of Artificial Sequence: Synthetic oligonucleotide
ucucguuccgaccccacgc

SEQ ID NO: 1572049 - RNA, 19 nt, Artificial Sequence
  Description of Artificial Sequence: Synthetic oligonucleotide
guuguacaugaucugagca

SEQ ID NO: 1572050 - RNA, 19 nt, Artificial Sequence
  Description of Artificial Sequence: Synthetic oligonucleotide
cucaucucgugcuaucacc

SEQ ID NO: 1572051 - RNA, 19 nt, Artificial Sequence
  Description of Artificial Sequence: Synthetic oligonucleotide
gagugugaauagcccaugg

SEQ ID NO: 1572052 - RNA, 19 nt, Artificial Sequence
  Description of Artificial Sequence: Synthetic oligonucleotide
gauguauugguagcgcccc

SEQ ID NO: 1572053 - RNA, 19 nt, Artificial Sequence
  Description of Artificial Sequence: Synthetic oligonucleotide
gaagauggccacccgccgg

SEQ ID NO: 1572054 - RNA, 19 nt, Artificial Sequence
  Description of Artificial Sequence: Synthetic oligonucleotide
ugaauucagccccgcaggc

SEQ ID NO: 1572055 - RNA, 19 nt, Artificial Sequence
  Description of Artificial Sequence: Synthetic oligonucleotide
cacagucauauucuauccg

SEQ ID NO: 1572056 - RNA, 19 nt, Artificial Sequence
  Description of Artificial Sequence: Synthetic oligonucleotide
gguaguuaacguugaauug

SEQ ID NO: 1572057 - RNA, 19 nt, Artificial Sequence
  Description of Artificial Sequence: Synthetic oligonucleotide
guagaucuggguugcgccg

SEQ ID NO: 1572058 - RNA, 19 nt, Artificial Sequence
  Description of Artificial Sequence: Synthetic oligonucleotide
gacagguaagaucugccca

SEQ ID NO: 1572059 - RNA, 19 nt, Artificial Sequence
  Description of Artificial Sequence: Synthetic oligonucleotide
ugacccaaugcaccuucgg

SEQ ID NO: 1572060 - RNA, 19 nt, Artificial Sequence
  Description of Artificial Sequence: Synthetic oligonucleotide
aagguaguuaacguugaau

SEQ ID NO: 1572061 - RNA, 19 nt, Artificial Sequence
  Description of Artificial Sequence: Synthetic oligonucleotide
aaaagguaguuaacguuga

SEQ ID NO: 1572062 - RNA, 19 nt, Artificial Sequence
  Description of Artificial Sequence: Synthetic oligonucleotide
caugaacccgaaaccacag

SEQ ID NO: 1572063 - RNA, 19 nt, Artificial Sequence
  Description of Artificial Sequence: Synthetic oligonucleotide
aguugugucccagcuggcc

SEQ ID NO: 1572064 - RNA, 19 nt, Artificial Sequence
  Description of Artificial Sequence: Synthetic oligonucleotide
ucgugcuaucaccaaggag

SEQ ID NO: 1572065 - RNA, 19 nt, Artificial Sequence
  Description of Artificial Sequence: Synthetic oligonucleotide
ucccaucuuauucucucca

SEQ ID NO: 1572066 - RNA, 19 nt, Artificial Sequence
  Description of Artificial Sequence: Synthetic oligonucleotide
caaacacggagccaguauc

SEQ ID NO: 1572067 - RNA, 19 nt, Artificial Sequence
  Description of Artificial Sequence: Synthetic oligonucleotide
ugcacgugaaaaugacagc

SEQ ID NO: 1572068 - RNA, 19 nt, Artificial Sequence
  Description of Artificial Sequence: Synthetic oligonucleotide
auauucuauccgcugugcu

SEQ ID NO: 1572069 - RNA, 19 nt, Artificial Sequence
  Description of Artificial Sequence: Synthetic oligonucleotide
uucucguuccgaccccacg

SEQ ID NO: 1572070 - RNA, 19 nt, Artificial Sequence
  Description of Artificial Sequence: Synthetic oligonucleotide
acaguccgcacccggacuc

SEQ ID NO: 1572071 - RNA, 19 nt, Artificial Sequence
  Description of Artificial Sequence: Synthetic oligonucleotide
ucccaucugaguugugucc

SEQ ID NO: 1572072 - RNA, 19 nt, Artificial Sequence
  Description of Artificial Sequence: Synthetic oligonucleotide
gaacccgaaaccacagucc

SEQ ID NO: 1572073 - RNA, 19 nt, Artificial Sequence
  Description of Artificial Sequence: Synthetic oligonucleotide
acucacgcgauguauuggu

SEQ ID NO: 1572074 - RNA, 19 nt, Artificial Sequence
  Description of Artificial Sequence: Synthetic oligonucleotide
gaauagagguugccuuugc

SEQ ID NO: 1572075 - RNA, 19 nt, Artificial Sequence
  Description of Artificial Sequence: Synthetic oligonucleotide
agacucacgcgauguauug

SEQ ID NO: 1572076 - RNA, 19 nt, Artificial Sequence
  Description of Artificial Sequence: Synthetic oligonucleotide
cacaugaacccgaaaccac

SEQ ID NO: 1572077 - RNA, 19 nt, Artificial Sequence
  Description of Artificial Sequence: Synthetic oligonucleotide
cacgcgauguauugguagc

SEQ ID NO: 1572078 - RNA, 19 nt, Artificial Sequence
  Description of Artificial Sequence: Synthetic oligonucleotide
aaagguaguuaacguugaa

SEQ ID NO: 1572079 - RNA, 19 nt, Artificial Sequence
  Description of Artificial Sequence: Synthetic oligonucleotide
accuucggucaacuuuugc

SEQ ID NO: 1572080 - RNA, 19 nt, Artificial Sequence
  Description of Artificial Sequence: Synthetic oligonucleotide
aguaucuguuaacgccagg

SEQ ID NO: 1572081 - RNA, 19 nt, Artificial Sequence
  Description of Artificial Sequence: Synthetic oligonucleotide
ucucguagaaaggcaagcu

SEQ ID NO: 1572082 - RNA, 19 nt, Artificial Sequence
  Description of Artificial Sequence: Synthetic oligonucleotide
auugguagcgccccagaaa

SEQ ID NO: 1572083 - RNA, 19 nt, Artificial Sequence
  Description of Artificial Sequence: Synthetic oligonucleotide
caggcaaggcuccggaucc

SEQ ID NO: 1572084 - RNA, 19 nt, Artificial Sequence
  Description of Artificial Sequence: Synthetic oligonucleotide
gcaugcugaauucagcccc

SEQ ID NO: 1572085 - RNA, 19 nt, Artificial Sequence
  Description of Artificial Sequence: Synthetic oligonucleotide
aaaggcaagcuggcuauga

SEQ ID NO: 1572086 - RNA, 19 nt, Artificial Sequence
  Description of Artificial Sequence: Synthetic oligonucleotide
aucuggguugcgccgcgcc

SEQ ID NO: 1572087 - RNA, 19 nt, Artificial Sequence
  Description of Artificial Sequence: Synthetic oligonucleotide
gcugaauucagccccgcag

SEQ ID NO: 1572088 - RNA, 19 nt, Artificial Sequence
  Description of Artificial Sequence: Synthetic oligonucleotide
ucucaucucgugcuaucac

SEQ ID NO: 1572089 - RNA, 19 nt, Artificial Sequence
  Description of Artificial Sequence: Synthetic oligonucleotide
aaacggaaccgcggggagg

SEQ ID NO: 1572090 - RNA, 19 nt, Artificial Sequence
  Description of Artificial Sequence: Synthetic oligonucleotide
cauauucuauccgcugugc

SEQ ID NO: 1572091 - RNA, 19 nt, Artificial Sequence
  Description of Artificial Sequence: Synthetic oligonucleotide
caccucuugagcugcagug

SEQ ID NO: 1572092 - RNA, 19 nt, Artificial Sequence
  Description of Artificial Sequence: Synthetic oligonucleotide
auaaggaggcugugagcag

SEQ ID NO: 1572093 - RNA, 19 nt, Artificial Sequence
  Description of Artificial Sequence: Synthetic oligonucleotide
gugaauagcccauggccac

SEQ ID NO: 1572094 - RNA, 19 nt, Artificial Sequence
  Description of Artificial Sequence: Synthetic oligonucleotide
gcuaucaccaaggagugug

SEQ ID NO: 1572095 - RNA, 19 nt, Artificial Sequence
  Description of Artificial Sequence: Synthetic oligonucleotide
aacccucuugguaucacca

SEQ ID NO: 1572096 - RNA, 19 nt, Artificial Sequence
  Description of Artificial Sequence: Synthetic oligonucleotide
acugacagcaaaggagcag

SEQ ID NO: 1572097 - RNA, 19 nt, Artificial Sequence
  Description of Artificial Sequence: Synthetic oligonucleotide
acguugaauugcuuggaaa

SEQ ID NO: 1572098 - RNA, 19 nt, Artificial Sequence
  Description of Artificial Sequence: Synthetic oligonucleotide
cuggccauauucagggcac

SEQ ID NO: 1572099 - RNA, 19 nt, Artificial Sequence
  Description of Artificial Sequence: Synthetic oligonucleotide
guagccggcguagaucugg

SEQ ID NO: 1572100 - RNA, 19 nt, Artificial Sequence
  Description of Artificial Sequence: Synthetic oligonucleotide
uaacguugaauugcuugga

SEQ ID NO: 1572101 - RNA, 19 nt, Artificial Sequence
  Description of Artificial Sequence: Synthetic oligonucleotide
ugcgcccacaugcugccag

SEQ ID NO: 1572102 - RNA, 19 nt, Artificial Sequence
  Description of Artificial Sequence: Synthetic oligonucleotide
gaccagugugugguuagcg

SEQ ID NO: 1572103 - RNA, 19 nt, Artificial Sequence
  Description of Artificial Sequence: Synthetic oligonucleotide
ugcuuggaaacggaaccgc

SEQ ID NO: 1572104 - RNA, 19 nt, Artificial Sequence
  Description of Artificial Sequence: Synthetic oligonucleotide
gacucacgcgauguauugg

SEQ ID NO: 1572105 - RNA, 19 nt, Artificial Sequence
  Description of Artificial Sequence: Synthetic oligonucleotide
aacacggagccaguaucug

SEQ ID NO: 1572106 - RNA, 19 nt, Artificial Sequence
  Description of Artificial Sequence: Synthetic oligonucleotide
uagacucacgcgauguauu

SEQ ID NO: 1572107 - RNA, 19 nt, Artificial Sequence
  Description of Artificial Sequence: Synthetic oligonucleotide
aagacucgcuucugugagu

SEQ ID NO: 1572108 - RNA, 19 nt, Artificial Sequence
  Description of Artificial Sequence: Synthetic oligonucleotide
uguacugcuuucggguaca

SEQ ID NO: 1572109 - RNA, 19 nt, Artificial Sequence
  Description of Artificial Sequence: Synthetic oligonucleotide
ugguagacucacgcgaugu

SEQ ID NO: 1572110 - RNA, 19 nt, Artificial Sequence
  Description of Artificial Sequence: Synthetic oligonucleotide
uucggguacaugguagacu

SEQ ID NO: 1572111 - RNA, 19 nt, Artificial Sequence
  Description of Artificial Sequence: Synthetic oligonucleotide
caguaucuguuaacgccag

SEQ ID NO: 1572112 - RNA, 19 nt, Artificial Sequence
  Description of Artificial Sequence: Synthetic oligonucleotide
cuauccgcugugcucgggc

SEQ ID NO: 1572113 - RNA, 19 nt, Artificial Sequence
  Description of Artificial Sequence: Synthetic oligonucleotide
acaugaacccgaaaccaca

SEQ ID NO: 1572114 - RNA, 19 nt, Artificial Sequence
  Description of Artificial Sequence: Synthetic oligonucleotide
gcuugugguccccauaccc

SEQ ID NO: 1572115 - RNA, 19 nt, Artificial Sequence
  Description of Artificial Sequence: Synthetic oligonucleotide
ucuggguugcgccgcgccc

SEQ ID NO: 1572116 - RNA, 19 nt, Artificial Sequence
  Description of Artificial Sequence: Synthetic oligonucleotide
aguucuccgaagguuggug

SEQ ID NO: 1572117 - RNA, 19 nt, Artificial Sequence
  Description of Artificial Sequence: Synthetic oligonucleotide
gucucguagaaaggcaagc

SEQ ID NO: 1572118 - RNA, 19 nt, Artificial Sequence
  Description of Artificial Sequence: Synthetic oligonucleotide
uagccggcguagaucuggg

SEQ ID NO: 1572119 - RNA, 19 nt, Artificial Sequence
  Description of Artificial Sequence: Synthetic oligonucleotide
ugccucagagggugcgugg

SEQ ID NO: 1572120 - RNA, 19 nt, Artificial Sequence
  Description of Artificial Sequence: Synthetic oligonucleotide
gacagcaaaggagcaggug

SEQ ID NO: 1572121 - RNA, 19 nt, Artificial Sequence
  Description of Artificial Sequence: Synthetic oligonucleotide
cuaugagcaaauguuuuaa

SEQ ID NO: 1572122 - RNA, 19 nt, Artificial Sequence
  Description of Artificial Sequence: Synthetic oligonucleotide
ccagugugugguuagcgcc

SEQ ID NO: 1572123 - RNA, 19 nt, Artificial Sequence
  Description of Artificial Sequence: Synthetic oligonucleotide
agguccuguacugcuuucg

SEQ ID NO: 1572124 - RNA, 19 nt, Artificial Sequence
  Description of Artificial Sequence: Synthetic oligonucleotide
gucauauucuauccgcugu

SEQ ID NO: 1572125 - RNA, 19 nt, Artificial Sequence
  Description of Artificial Sequence: Synthetic oligonucleotide
gguccuguacugcuuucgg

SEQ ID NO: 1572126 - RNA, 19 nt, Artificial Sequence
  Description of Artificial Sequence: Synthetic oligonucleotide
ugcugaauucagccccgca

SEQ ID NO: 1572127 - RNA, 19 nt, Artificial Sequence
  Description of Artificial Sequence: Synthetic oligonucleotide
cuggcuaugagcaaauguu

SEQ ID NO: 1572128 - RNA, 19 nt, Artificial Sequence
  Description of Artificial Sequence: Synthetic oligonucleotide
gugcgugggguguacucgg

SEQ ID NO: 1572129 - RNA, 19 nt, Artificial Sequence
  Description of Artificial Sequence: Synthetic oligonucleotide
acgcgauguauugguagcg

SEQ ID NO: 1572130 - RNA, 19 nt, Artificial Sequence
  Description of Artificial Sequence: Synthetic oligonucleotide
agaucuggguugcgccgcg

SEQ ID NO: 1572131 - RNA, 19 nt, Artificial Sequence
  Description of Artificial Sequence: Synthetic oligonucleotide
uccggauccgccagccaca

SEQ ID NO: 1572132 - RNA, 19 nt, Artificial Sequence
  Description of Artificial Sequence: Synthetic oligonucleotide
guugcgcccacaugcugcc

SEQ ID NO: 1572133 - RNA, 19 nt, Artificial Sequence
  Description of Artificial Sequence: Synthetic oligonucleotide
ugcgugggguguacucggg

SEQ ID NO: 1572134 - RNA, 19 nt, Artificial Sequence
  Description of Artificial Sequence: Synthetic oligonucleotide
augguagacucacgcgaug

SEQ ID NO: 1572135 - RNA, 19 nt, Artificial Sequence
  Description of Artificial Sequence: Synthetic oligonucleotide
cuuucggguacaugguaga

SEQ ID NO: 1572136 - RNA, 19 nt, Artificial Sequence
  Description of Artificial Sequence: Synthetic oligonucleotide
cuccggauccgccagccac

SEQ ID NO: 1572137 - RNA, 19 nt, Artificial Sequence
  Description of Artificial Sequence: Synthetic oligonucleotide
uugagcugcaguggaagau

SEQ ID NO: 1572138 - RNA, 19 nt, Artificial Sequence
  Description of Artificial Sequence: Synthetic oligonucleotide
uuucggguacaugguagac

SEQ ID NO: 1572139 - RNA, 19 nt, Artificial Sequence
  Description of Artificial Sequence: Synthetic oligonucleotide
aauagcccauggccaccug

SEQ ID NO: 1572140 - RNA, 19 nt, Artificial Sequence
  Description of Artificial Sequence: Synthetic oligonucleotide
guucuccgaagguugguga

SEQ ID NO: 1572141 - RNA, 19 nt, Artificial Sequence
  Description of Artificial Sequence: Synthetic oligonucleotide
cgugcuaucaccaaggagu

SEQ ID NO: 1572142 - RNA, 19 nt, Artificial Sequence
  Description of Artificial Sequence: Synthetic oligonucleotide
ucgggcgaugaacuuccca

SEQ ID NO: 1572143 - RNA, 19 nt, Artificial Sequence
  Description of Artificial Sequence: Synthetic oligonucleotide
uaacgccagggugugguug

SEQ ID NO: 1572144 - RNA, 19 nt, Artificial Sequence
  Description of Artificial Sequence: Synthetic oligonucleotide
caggcuacaucucgaacca

SEQ ID NO: 1572145 - RNA, 19 nt, Artificial Sequence
  Description of Artificial Sequence: Synthetic oligonucleotide
cugacccaaugcaccuucg

SEQ ID NO: 1572146 - RNA, 19 nt, Artificial Sequence
  Description of Artificial Sequence: Synthetic oligonucleotide
augaacccgaaaccacagu

SEQ ID NO: 1572147 - RNA, 19 nt, Artificial Sequence
  Description of Artificial Sequence: Synthetic oligonucleotide
cugaguugugucccagcug

SEQ ID NO: 1572148 - RNA, 19 nt, Artificial Sequence
  Description of Artificial Sequence: Synthetic oligonucleotide
acauucgggacagguaaga

SEQ ID NO: 1572149 - RNA, 19 nt, Artificial Sequence
  Description of Artificial Sequence: Synthetic oligonucleotide
gguaauuggcugcccguug

SEQ ID NO: 1572150 - RNA, 19 nt, Artificial Sequence
  Description of Artificial Sequence: Synthetic oligonucleotide
gggagugccacccugccuc

SEQ ID NO: 1572151 - RNA, 19 nt, Artificial Sequence
  Description of Artificial Sequence: Synthetic oligonucleotide
gguacucucaucagccgcc

SEQ ID NO: 1572152 - RNA, 19 nt, Artificial Sequence
  Description of Artificial Sequence: Synthetic oligonucleotide
cucgaugaagauggccacc

SEQ ID NO: 1572153 - RNA, 19 nt, Artificial Sequence
  Description of Artificial Sequence: Synthetic oligonucleotide
gugcuaucaccaaggagug

SEQ ID NO: 1572154 - RNA, 19 nt, Artificial Sequence
  Description of Artificial Sequence: Synthetic oligonucleotide
uaauuggcugcccguugua

SEQ ID NO: 1572155 - RNA, 19 nt, Artificial Sequence
  Description of Artificial Sequence: Synthetic oligonucleotide
ugguugcgcccacaugcug

SEQ ID NO: 1572156 - RNA, 19 nt, Artificial Sequence
  Description of Artificial Sequence: Synthetic oligonucleotide
ugcgccgcgcccugggaag

SEQ ID NO: 1572157 - RNA, 19 nt, Artificial Sequence
  Description of Artificial Sequence: Synthetic oligonucleotide
ccggccauagccaccaaag

SEQ ID NO: 1572158 - RNA, 19 nt, Artificial Sequence
  Description of Artificial Sequence: Synthetic oligonucleotide
uucaccucuugagcugcag

SEQ ID NO: 1572159 - RNA, 19 nt, Artificial Sequence
  Description of Artificial Sequence: Synthetic oligonucleotide
agugcacgugaaaaugaca

SEQ ID NO: 1572160 - RNA, 19 nt, Artificial Sequence
  Description of Artificial Sequence: Synthetic oligonucleotide
auaccccaguucuccgaag

SEQ ID NO: 1572161 - RNA, 19 nt, Artificial Sequence
  Description of Artificial Sequence: Synthetic oligonucleotide
ggugcgugggguguacucg

SEQ ID NO: 1572162 - RNA, 19 nt, Artificial Sequence
  Description of Artificial Sequence: Synthetic oligonucleotide
uguuaacgccagggugugg

SEQ ID NO: 1572163 - RNA, 19 nt, Artificial Sequence
  Description of Artificial Sequence: Synthetic oligonucleotide
guuccgaccccacgccucc

SEQ ID NO: 1572164 - RNA, 19 nt, Artificial Sequence
  Description of Artificial Sequence: Synthetic oligonucleotide
uucaacccucuugguauca

SEQ ID NO: 1572165 - RNA, 19 nt, Artificial Sequence
  Description of Artificial Sequence: Synthetic oligonucleotide
cugcccguuguacaugauc

SEQ ID NO: 1572166 - RNA, 19 nt, Artificial Sequence
  Description of Artificial Sequence: Synthetic oligonucleotide
gcgauguauugguagcgcc

SEQ ID NO: 1572167 - RNA, 19 nt, Artificial Sequence
  Description of Artificial Sequence: Synthetic oligonucleotide
ggagccaguaucuguuaac

SEQ ID NO: 1572168 - RNA, 19 nt, Artificial Sequence
  Description of Artificial Sequence: Synthetic oligonucleotide
ggaauagagguugccuuug

SEQ ID NO: 1572169 - RNA, 19 nt, Artificial Sequence
  Description of Artificial Sequence: Synthetic oligonucleotide
gguacaugguagacucacg

SEQ ID NO: 1572170 - RNA, 19 nt, Artificial Sequence
  Description of Artificial Sequence: Synthetic oligonucleotide
acaucucgaaccaccacau

SEQ ID NO: 1572171 - RNA, 19 nt, Artificial Sequence
  Description of Artificial Sequence: Synthetic oligonucleotide
gaccccacgccuccaccag

SEQ ID NO: 1572172 - RNA, 19 nt, Artificial Sequence
  Description of Artificial Sequence: Synthetic oligonucleotide
ccaguaucuguuaacgcca

SEQ ID NO: 1572173 - RNA, 19 nt, Artificial Sequence
  Description of Artificial Sequence: Synthetic oligonucleotide
gguaucaccauggcccagc

SEQ ID NO: 1572174 - RNA, 19 nt, Artificial Sequence
  Description of Artificial Sequence: Synthetic oligonucleotide
guaauuggcugcccguugu

SEQ ID NO: 1572175 - RNA, 19 nt, Artificial Sequence
  Description of Artificial Sequence: Synthetic oligonucleotide
guaagaucugcccauccuu

SEQ ID NO: 1572176 - RNA, 19 nt, Artificial Sequence
  Description of Artificial Sequence: Synthetic oligonucleotide
cacccugccucagagggug

SEQ ID NO: 1572177 - RNA, 19 nt, Artificial Sequence
  Description of Artificial Sequence: Synthetic oligonucleotide
cgauguauugguagcgccc

SEQ ID NO: 1572178 - RNA, 19 nt, Artificial Sequence
  Description of Artificial Sequence: Synthetic oligonucleotide
ggguacaugguagacucac

SEQ ID NO: 1572179 - RNA, 19 nt, Artificial Sequence
  Description of Artificial Sequence: Synthetic oligonucleotide
aggagugugaauagcccau

SEQ ID NO: 1572180 - RNA, 19 nt, Artificial Sequence
  Description of Artificial Sequence: Synthetic oligonucleotide
acccgaaaccacaguccgc

SEQ ID NO: 1572181 - RNA, 19 nt, Artificial Sequence
  Description of Artificial Sequence: Synthetic oligonucleotide
guuaacgccaggguguggu

SEQ ID NO: 1572182 - RNA, 19 nt, Artificial Sequence
  Description of Artificial Sequence: Synthetic oligonucleotide
ugcucgggcgaugaacuuc

SEQ ID NO: 1572183 - RNA, 19 nt, Artificial Sequence
  Description of Artificial Sequence: Synthetic oligonucleotide
ucguuccgaccccacgccu

SEQ ID NO: 1572184 - RNA, 19 nt, Artificial Sequence
  Description of Artificial Sequence: Synthetic oligonucleotide
cuguuaacgccagggugug

SEQ ID NO: 1572185 - RNA, 19 nt, Artificial Sequence
  Description of Artificial Sequence: Synthetic oligonucleotide
uugccucauggcugagggc

SEQ ID NO: 1572186 - RNA, 19 nt, Artificial Sequence
  Description of Artificial Sequence: Synthetic oligonucleotide
gguugcgcccacaugcugc

SEQ ID NO: 1572187 - RNA, 19 nt, Artificial Sequence
  Description of Artificial Sequence: Synthetic oligonucleotide
ugggguguacucgggcagc

SEQ ID NO: 1572188 - RNA, 19 nt, Artificial Sequence
  Description of Artificial Sequence: Synthetic oligonucleotide
cauauucagggcacccaaa

SEQ ID NO: 1572189 - RNA, 19 nt, Artificial Sequence
  Description of Artificial Sequence: Synthetic oligonucleotide
ucgggacagguaagaucug

SEQ ID NO: 1572190 - RNA, 19 nt, Artificial Sequence
  Description of Artificial Sequence: Synthetic oligonucleotide
cuucggucaacuuuugcuu

SEQ ID NO: 1572191 - RNA, 19 nt, Artificial Sequence
  Description of Artificial Sequence: Synthetic oligonucleotide
uacugcuuucggguacaug

SEQ ID NO: 1572192 - RNA, 19 nt, Artificial Sequence
  Description of Artificial Sequence: Synthetic oligonucleotide
gggacagguaagaucugcc

SEQ ID NO: 1572193 - RNA, 19 nt, Artificial Sequence
  Description of Artificial Sequence: Synthetic oligonucleotide
gcacaugaacccgaaacca

SEQ ID NO: 1572194 - RNA, 19 nt, Artificial Sequence
  Description of Artificial Sequence: Synthetic oligonucleotide
gucccagugcacgugaaaa

SEQ ID NO: 1572195 - RNA, 19 nt, Artificial Sequence
  Description of Artificial Sequence: Synthetic oligonucleotide
guuagcgccacaggcuaca

SEQ ID NO: 1572196 - RNA, 19 nt, Artificial Sequence
  Description of Artificial Sequence: Synthetic oligonucleotide
gcgaggcaccaucucaucc

SEQ ID NO: 1572197 - RNA, 19 nt, Artificial Sequence
  Description of Artificial Sequence: Synthetic oligonucleotide
aagcuggcuaugagcaaau

SEQ ID NO: 1572198 - RNA, 19 nt, Artificial Sequence
  Description of Artificial Sequence: Synthetic oligonucleotide
acccucuugguaucaccau

SEQ ID NO: 1572199 - RNA, 19 nt, Artificial Sequence
  Description of Artificial Sequence: Synthetic oligonucleotide
cacugacagcaaaggagca

SEQ ID NO: 1572200 - RNA, 19 nt, Artificial Sequence
  Description of Artificial Sequence: Synthetic oligonucleotide
agccgccacaaugaugcug

SEQ ID NO: 1572201 - RNA, 19 nt, Artificial Sequence
  Description of Artificial Sequence: Synthetic oligonucleotide
ccgccagccacagaggucc

SEQ ID NO: 1572202 - RNA, 19 nt, Artificial Sequence
  Description of Artificial Sequence: Synthetic oligonucleotide
ccggcguagaucuggguug

SEQ ID NO: 1572203 - RNA, 19 nt, Artificial Sequence
  Description of Artificial Sequence: Synthetic oligonucleotide
uuaacgccagggugugguu

SEQ ID NO: 1572204 - RNA, 19 nt, Artificial Sequence
  Description of Artificial Sequence: Synthetic oligonucleotide
aucagccgccacaaugaug

SEQ ID NO: 1572205 - RNA, 19 nt, Artificial Sequence
  Description of Artificial Sequence: Synthetic oligonucleotide
uugcgccgcgcccugggaa

SEQ ID NO: 1572206 - RNA, 19 nt, Artificial Sequence
  Description of Artificial Sequence: Synthetic oligonucleotide
gagguccuguacugcuuuc

SEQ ID NO: 1572207 - RNA, 19 nt, Artificial Sequence
  Description of Artificial Sequence: Synthetic oligonucleotide
gguaagaucugcccauccu

SEQ ID NO: 1572208 - RNA, 19 nt, Artificial Sequence
  Description of Artificial Sequence: Synthetic oligonucleotide
aggcuacaucucgaaccac

SEQ ID NO: 1572209 - RNA, 19 nt, Artificial Sequence
  Description of Artificial Sequence: Synthetic oligonucleotide
gugugguugcgcccacaug

SEQ ID NO: 1572210 - RNA, 19 nt, Artificial Sequence
  Description of Artificial Sequence: Synthetic oligonucleotide
cccaaugcaccuucgguca

SEQ ID NO: 1572211 - RNA, 19 nt, Artificial Sequence
  Description of Artificial Sequence: Synthetic oligonucleotide
cucucaucucgugcuauca

SEQ ID NO: 1572212 - RNA, 19 nt, Artificial Sequence
  Description of Artificial Sequence: Synthetic oligonucleotide
caaugcaccuucggucaac

SEQ ID NO: 1572213 - RNA, 19 nt, Artificial Sequence
  Description of Artificial Sequence: Synthetic oligonucleotide
ugccacgaggggagugcca

SEQ ID NO: 1572214 - RNA, 19 nt, Artificial Sequence
  Description of Artificial Sequence: Synthetic oligonucleotide
uccgaccccacgccuccac

SEQ ID NO: 1572215 - RNA, 19 nt, Artificial Sequence
  Description of Artificial Sequence: Synthetic oligonucleotide
caugaucugagcagggcuu

SEQ ID NO: 1572216 - RNA, 19 nt, Artificial Sequence
  Description of Artificial Sequence: Synthetic oligonucleotide
ccccuucucguuccgaccc

SEQ ID NO: 1572217 - RNA, 19 nt, Artificial Sequence
  Description of Artificial Sequence: Synthetic oligonucleotide
gcuggcuaugagcaaaugu

SEQ ID NO: 1572218 - RNA, 19 nt, Artificial Sequence
  Description of Artificial Sequence: Synthetic oligonucleotide
ugcuaucaccaaggagugu

SEQ ID NO: 1572219 - RNA, 19 nt, Artificial Sequence
  Description of Artificial Sequence: Synthetic oligonucleotide
gcucgggcgaugaacuucc

SEQ ID NO: 1572220 - RNA, 19 nt, Artificial Sequence
  Description of Artificial Sequence: Synthetic oligonucleotide
uggguugcgccgcgcccug

SEQ ID NO: 1572221 - RNA, 19 nt, Artificial Sequence
  Description of Artificial Sequence: Synthetic oligonucleotide
cucgugcuaucaccaagga

SEQ ID NO: 1572222 - RNA, 19 nt, Artificial Sequence
  Description of Artificial Sequence: Synthetic oligonucleotide
gguguagccggcguagauc

SEQ ID NO: 1572223 - RNA, 19 nt, Artificial Sequence
  Description of Artificial Sequence: Synthetic oligonucleotide
ccacagagguccuguacug

SEQ ID NO: 1572224 - RNA, 19 nt, Artificial Sequence
  Description of Artificial Sequence: Synthetic oligonucleotide
caugguagacucacgcgau

SEQ ID NO: 1572225 - RNA, 19 nt, Artificial Sequence
  Description of Artificial Sequence: Synthetic oligonucleotide
ggagugugaauagcccaug

SEQ ID NO: 1572226 - RNA, 19 nt, Artificial Sequence
  Description of Artificial Sequence: Synthetic oligonucleotide
ccagugcacgugaaaauga

SEQ ID NO: 1572227 - RNA, 19 nt, Artificial Sequence
  Description of Artificial Sequence: Synthetic oligonucleotide
gguugcgccgcgcccuggg

SEQ ID NO: 1572228 - RNA, 19 nt, Artificial Sequence
  Description of Artificial Sequence: Synthetic oligonucleotide
ggagcagguguagccggcg

SEQ ID NO: 1572229 - RNA, 19 nt, Artificial Sequence
  Description of Artificial Sequence: Synthetic oligonucleotide
guagacucacgcgauguau

SEQ ID NO: 1572230 - RNA, 19 nt, Artificial Sequence
  Description of Artificial Sequence: Synthetic oligonucleotide
ggcgaugaacuucccaucu

SEQ ID NO: 1572231 - RNA, 19 nt, Artificial Sequence
  Description of Artificial Sequence: Synthetic oligonucleotide
accacauucgggacaggua

SEQ ID NO: 1572232 - RNA, 19 nt, Artificial Sequence
  Description of Artificial Sequence: Synthetic oligonucleotide
caccuucggucaacuuuug

SEQ ID NO: 1572233 - RNA, 19 nt, Artificial Sequence
  Description of Artificial Sequence: Synthetic oligonucleotide
cugccucagagggugcgug

SEQ ID NO: 1572234 - RNA, 19 nt, Artificial Sequence
  Description of Artificial Sequence: Synthetic oligonucleotide
cccauaccccaguucuccg

SEQ ID NO: 1572235 - RNA, 19 nt, Artificial Sequence
  Description of Artificial Sequence: Synthetic oligonucleotide
agcuggcuaugagcaaaug

SEQ ID NO: 1572236 - RNA, 19 nt, Artificial Sequence
  Description of Artificial Sequence: Synthetic oligonucleotide
uccgcugugcucgggcgau

SEQ ID NO: 1572237 - RNA, 19 nt, Artificial Sequence
  Description of Artificial Sequence: Synthetic oligonucleotide
ccccauaccccaguucucc

SEQ ID NO: 1572238 - RNA, 19 nt, Artificial Sequence
  Description of Artificial Sequence: Synthetic oligonucleotide
caucucgugcuaucaccaa

SEQ ID NO: 1572239 - RNA, 19 nt, Artificial Sequence
  Description of Artificial Sequence: Synthetic oligonucleotide
gggcgaugaacuucccauc

SEQ ID NO: 1572240 - RNA, 19 nt, Artificial Sequence
  Description of Artificial Sequence: Synthetic oligonucleotide
cacccgccgggguaccagc

SEQ ID NO: 1572241 - RNA, 19 nt, Artificial Sequence
  Description of Artificial Sequence: Synthetic oligonucleotide
cugccacgaggggagugcc

SEQ ID NO: 1572242 - RNA, 19 nt, Artificial Sequence
  Description of Artificial Sequence: Synthetic oligonucleotide
ucagccccgcaggccaucu

SEQ ID NO: 1572243 - RNA, 19 nt, Artificial Sequence
  Description of Artificial Sequence: Synthetic oligonucleotide
gcugccacgaggggagugc

SEQ ID NO: 1572244 - RNA, 19 nt, Artificial Sequence
  Description of Artificial Sequence: Synthetic oligonucleotide
gaucuggguugcgccgcgc

SEQ ID NO: 1572245 - RNA, 19 nt, Artificial Sequence
  Description of Artificial Sequence: Synthetic oligonucleotide
ggcugcccguuguacauga

SEQ ID NO: 1572246 - RNA, 19 nt, Artificial Sequence
  Description of Artificial Sequence: Synthetic oligonucleotide
cauagccaccaaagcccca

SEQ ID NO: 1572247 - RNA, 19 nt, Artificial Sequence
  Description of Artificial Sequence: Synthetic oligonucleotide
uuagcgccacaggcuacau

SEQ ID NO: 1572248 - RNA, 19 nt, Artificial Sequence
  Description of Artificial Sequence: Synthetic oligonucleotide
acgaggggagugccacccu

SEQ ID NO: 1572249 - RNA, 19 nt, Artificial Sequence
  Description of Artificial Sequence: Synthetic oligonucleotide
cccacaugcugccagcaca

SEQ ID NO: 1572250 - RNA, 19 nt, Artificial Sequence
  Description of Artificial Sequence: Synthetic oligonucleotide
gcccguuguacaugaucug

SEQ ID NO: 1572251 - RNA, 19 nt, Artificial Sequence
  Description of Artificial Sequence: Synthetic oligonucleotide
cccgaaaccacaguccgca

SEQ ID NO: 1572252 - RNA, 19 nt, Artificial Sequence
  Description of Artificial Sequence: Synthetic oligonucleotide
cucgggcgaugaacuuccc

SEQ ID NO: 1572253 - RNA, 19 nt, Artificial Sequence
  Description of Artificial Sequence: Synthetic oligonucleotide
cucacgcgauguauuggua

SEQ ID NO: 1572254 - RNA, 19 nt, Artificial Sequence
  Description of Artificial Sequence: Synthetic oligonucleotide
gguagacucacgcgaugua

SEQ ID NO: 1572255 - RNA, 19 nt, Artificial Sequence
  Description of Artificial Sequence: Synthetic oligonucleotide
cugcuuucggguacauggu

SEQ ID NO: 1572256 - RNA, 19 nt, Artificial Sequence
  Description of Artificial Sequence: Synthetic oligonucleotide
caguccgcacccggacucc

SEQ ID NO: 1572257 - RNA, 19 nt, Artificial Sequence
  Description of Artificial Sequence: Synthetic oligonucleotide
ccagggugugguugcgccc

SEQ ID NO: 1572258 - RNA, 19 nt, Artificial Sequence
  Description of Artificial Sequence: Synthetic oligonucleotide
gccacgaggggagugccac

SEQ ID NO: 1572259 - RNA, 19 nt, Artificial Sequence
  Description of Artificial Sequence: Synthetic oligonucleotide
gagggugcgugggguguac

SEQ ID NO: 1572260 - RNA, 19 nt, Artificial Sequence
  Description of Artificial Sequence: Synthetic oligonucleotide
agccggcguagaucugggu

SEQ ID NO: 1572261 - RNA, 19 nt, Artificial Sequence
  Description of Artificial Sequence: Synthetic oligonucleotide
ugugucccagcuggccaua

SEQ ID NO: 1572262 - RNA, 19 nt, Artificial Sequence
  Description of Artificial Sequence: Synthetic oligonucleotide
gggugcgugggguguacuc

SEQ ID NO: 1572263 - RNA, 19 nt, Artificial Sequence
  Description of Artificial Sequence: Synthetic oligonucleotide
acgccagggugugguugcg

SEQ ID NO: 1572264 - RNA, 19 nt, Artificial Sequence
  Description of Artificial Sequence: Synthetic oligonucleotide
gcgugggguguacucgggc

SEQ ID NO: 1572265 - RNA, 19 nt, Artificial Sequence
  Description of Artificial Sequence: Synthetic oligonucleotide
ccacaguccgcacccggac

SEQ ID NO: 1572266 - RNA, 19 nt, Artificial Sequence
  Description of Artificial Sequence: Synthetic oligonucleotide
cccguuguacaugaucuga

SEQ ID NO: 1572267 - RNA, 19 nt, Artificial Sequence
  Description of Artificial Sequence: Synthetic oligonucleotide
guugcgccgcgcccuggga

SEQ ID NO: 1572268 - RNA, 19 nt, Artificial Sequence
  Description of Artificial Sequence: Synthetic oligonucleotide
ggcgaggcaccaucucauc

SEQ ID NO: 1572269 - RNA, 19 nt, Artificial Sequence
  Description of Artificial Sequence: Synthetic oligonucleotide
cgcgauguauugguagcgc

SEQ ID NO: 1572270 - RNA, 19 nt, Artificial Sequence
  Description of Artificial Sequence: Synthetic oligonucleotide
gauggccacccgccggggu

SEQ ID NO: 1572271 - RNA, 19 nt, Artificial Sequence
  Description of Artificial Sequence: Synthetic oligonucleotide
ggucccagugcacgugaaa

SEQ ID NO: 1572272 - RNA, 19 nt, Artificial Sequence
  Description of Artificial Sequence: Synthetic oligonucleotide
ggaaccgcggggaggcuga

SEQ ID NO: 1572273 - RNA, 19 nt, Artificial Sequence
  Description of Artificial Sequence: Synthetic oligonucleotide
gcaaggcuccggauccgcc

SEQ ID NO: 1572274 - RNA, 19 nt, Artificial Sequence
  Description of Artificial Sequence: Synthetic oligonucleotide
gagcugcaguggaagauuu

SEQ ID NO: 1572275 - RNA, 19 nt, Artificial Sequence
  Description of Artificial Sequence: Synthetic oligonucleotide
gguuagcgccacaggcuac

SEQ ID NO: 1572276 - RNA, 19 nt, Artificial Sequence
  Description of Artificial Sequence: Synthetic oligonucleotide
ccauaccccaguucuccga

SEQ ID NO: 1572277 - RNA, 19 nt, Artificial Sequence
  Description of Artificial Sequence: Synthetic oligonucleotide
ggugugguugcgcccacau

SEQ ID NO: 1572278 - RNA, 19 nt, Artificial Sequence
  Description of Artificial Sequence: Synthetic oligonucleotide
gcucggcauggcccagccg

SEQ ID NO: 1572279 - RNA, 19 nt, Artificial Sequence
  Description of Artificial Sequence: Synthetic oligonucleotide
ggcguagaucuggguugcg

SEQ ID NO: 1572280 - RNA, 19 nt, Artificial Sequence
  Description of Artificial Sequence: Synthetic oligonucleotide
agagggugcguggggugua

SEQ ID NO: 1572281 - RNA, 19 nt, Artificial Sequence
  Description of Artificial Sequence: Synthetic oligonucleotide
cauucgggacagguaagau

SEQ ID NO: 1572282 - RNA, 19 nt, Artificial Sequence
  Description of Artificial Sequence: Synthetic oligonucleotide
uuccgaccccacgccucca

SEQ ID NO: 1572283 - RNA, 19 nt, Artificial Sequence
  Description of Artificial Sequence: Synthetic oligonucleotide
uugcgcccacaugcugcca

SEQ ID NO: 1572284 - RNA, 19 nt, Artificial Sequence
  Description of Artificial Sequence: Synthetic oligonucleotide
cccuucucguuccgacccc

SEQ ID NO: 1572285 - RNA, 19 nt, Artificial Sequence
  Description of Artificial Sequence: Synthetic oligonucleotide
gugguugcgcccacaugcu

SEQ ID NO: 1572286 - RNA, 19 nt, Artificial Sequence
  Description of Artificial Sequence: Synthetic oligonucleotide
cacaguccgcacccggacu

SEQ ID NO: 1572287 - RNA, 19 nt, Artificial Sequence
  Description of Artificial Sequence: Synthetic oligonucleotide
gcgcccacaugcugccagc

SEQ ID NO: 1572288 - RNA, 19 nt, Artificial Sequence
  Description of Artificial Sequence: Synthetic oligonucleotide
gcaccuucggucaacuuuu

SEQ ID NO: 1572289 - RNA, 19 nt, Artificial Sequence
  Description of Artificial Sequence: Synthetic oligonucleotide
ccacgaggggagugccacc

SEQ ID NO: 1572290 - RNA, 19 nt, Artificial Sequence
  Description of Artificial Sequence: Synthetic oligonucleotide
ccgaaaccacaguccgcac

SEQ ID NO: 1572291 - RNA, 19 nt, Artificial Sequence
  Description of Artificial Sequence: Synthetic oligonucleotide
cguuccgaccccacgccuc

SEQ ID NO: 1572292 - RNA, 19 nt, Artificial Sequence
  Description of Artificial Sequence: Synthetic oligonucleotide
gccggcguagaucuggguu

SEQ ID NO: 1572293 - RNA, 19 nt, Artificial Sequence
  Description of Artificial Sequence: Synthetic oligonucleotide
caucagccgccacaaugau

SEQ ID NO: 1572294 - RNA, 19 nt, Artificial Sequence
  Description of Artificial Sequence: Synthetic oligonucleotide
ccgaccccacgccuccacc

SEQ ID NO: 1572295 - RNA, 19 nt, Artificial Sequence
  Description of Artificial Sequence: Synthetic oligonucleotide
cuggguugcgccgcgcccu

SEQ ID NO: 1572296 - RNA, 19 nt, Artificial Sequence
  Description of Artificial Sequence: Synthetic oligonucleotide
ggguaccagcucacaguca

SEQ ID NO: 1572297 - RNA, 19 nt, Artificial Sequence
  Description of Artificial Sequence: Synthetic oligonucleotide
cgggcgaugaacuucccau

SEQ ID NO: 1572298 - RNA, 19 nt, Artificial Sequence
  Description of Artificial Sequence: Synthetic oligonucleotide
cggcguagaucuggguugc

SEQ ID NO: 1572299 - RNA, 19 nt, Artificial Sequence
  Description of Artificial Sequence: Synthetic oligonucleotide
caguucuccgaagguuggu

SEQ ID NO: 1572300 - RNA, 19 nt, Artificial Sequence
  Description of Artificial Sequence: Synthetic oligonucleotide
ccgccgggguaccagcuca

SEQ ID NO: 1572301 - RNA, 19 nt, Artificial Sequence
  Description of Artificial Sequence: Synthetic oligonucleotide
acggaaccgcggggaggcu

SEQ ID NO: 1572302 - RNA, 19 nt, Artificial Sequence
  Description of Artificial Sequence: Synthetic oligonucleotide
ccuucucguuccgacccca

SEQ ID NO: 1572303 - RNA, 19 nt, Artificial Sequence
  Description of Artificial Sequence: Synthetic oligonucleotide
ccacccgccgggguaccag

SEQ ID NO: 1572304 - RNA, 19 nt, Artificial Sequence
  Description of Artificial Sequence: Synthetic oligonucleotide
cgaccccacgccuccacca

SEQ ID NO: 1572305 - RNA, 19 nt, Artificial Sequence
  Description of Artificial Sequence: Synthetic oligonucleotide
gugcucgggcgaugaacuu

SEQ ID NO: 1572306 - RNA, 19 nt, Artificial Sequence
  Description of Artificial Sequence: Synthetic oligonucleotide
ccugccugucucguagaaa

SEQ ID NO: 1572307 - RNA, 19 nt, Artificial Sequence
  Description of Artificial Sequence: Synthetic oligonucleotide
cccgccgggguaccagcuc

SEQ ID NO: 1572308 - RNA, 19 nt, Artificial Sequence
  Description of Artificial Sequence: Synthetic oligonucleotide
guccaucagcaugcugaau

SEQ ID NO: 1572309 - RNA, 19 nt, Artificial Sequence
  Description of Artificial Sequence: Synthetic oligonucleotide
gccgggguaccagcucaca

SEQ ID NO: 1572310 - RNA, 19 nt, Artificial Sequence
  Description of Artificial Sequence: Synthetic oligonucleotide
ccaccacauucgggacagg

SEQ ID NO: 1572311 - RNA, 19 nt, Artificial Sequence
  Description of Artificial Sequence: Synthetic oligonucleotide
cggguacaugguagacuca

SEQ ID NO: 1572312 - RNA, 19 nt, Artificial Sequence
  Description of Artificial Sequence: Synthetic oligonucleotide
gccgcgcccugggaaguca

SEQ ID NO: 1572313 - RNA, 19 nt, Artificial Sequence
  Description of Artificial Sequence: Synthetic oligonucleotide
cgccgggguaccagcucac

SEQ ID NO: 1572314 - RNA, 19 nt, Artificial Sequence
  Description of Artificial Sequence: Synthetic oligonucleotide
cagccgccacaaugaugcu

SEQ ID NO: 1572315 - RNA, 19 nt, Artificial Sequence
  Description of Artificial Sequence: Synthetic oligonucleotide
ccccaguucuccgaagguu

SEQ ID NO: 1572316 - RNA, 19 nt, Artificial Sequence
  Description of Artificial Sequence: Synthetic oligonucleotide
cgcggggaggcugacccaa

SEQ ID NO: 1572317 - RNA, 19 nt, Artificial Sequence
  Description of Artificial Sequence: Synthetic oligonucleotide
ccgcgcccugggaagucaa

SEQ ID NO: 1572318 - RNA, 19 nt, Artificial Sequence
  Description of Artificial Sequence: Synthetic oligonucleotide
ccgcggggaggcugaccca

SEQ ID NO: 1572319 - RNA, 19 nt, Artificial Sequence
  Description of Artificial Sequence: Synthetic oligonucleotide
cagcugccacgaggggagu

SEQ ID NO: 1572320 - RNA, 19 nt, Artificial Sequence
  Description of Artificial Sequence: Synthetic oligonucleotide
cgcgcccugggaagucaaa

SEQ ID NO: 1572321 - RNA, 19 nt, Artificial Sequence
  Description of Artificial Sequence: Synthetic oligonucleotide
gcugcccguuguacaugau

SEQ ID NO: 1572322 - RNA, 19 nt, Artificial Sequence
  Description of Artificial Sequence: Synthetic oligonucleotide
cgcaggccaucuugguaau

SEQ ID NO: 1572323 - RNA, 19 nt, Artificial Sequence
  Description of Artificial Sequence: Synthetic oligonucleotide
ccgccacaaugaugcugcu

SEQ ID NO: 1572324 - RNA, 19 nt, Artificial Sequence
  Description of Artificial Sequence: Synthetic oligonucleotide
gcggggaggcugacccaau

SEQ ID NO: 1572325 - RNA, 19 nt, Artificial Sequence
  Description of Artificial Sequence: Synthetic oligonucleotide
aaaguuacuauacaaaggg

SEQ ID NO: 1572326 - RNA, 19 nt, Artificial Sequence
  Description of Artificial Sequence: Synthetic oligonucleotide
aaucaaauuauauuaguuc

SEQ ID NO: 1572327 - RNA, 19 nt, Artificial Sequence
  Description of Artificial Sequence: Synthetic oligonucleotide
gaaaguacgauacacaggg

SEQ ID NO: 1572328 - RNA, 19 nt, Artificial Sequence
  Description of Artificial Sequence: Synthetic oligonucleotide
aauauuugauccaagauac

SEQ ID NO: 1572329 - RNA, 19 nt, Artificial Sequence
  Description of Artificial Sequence: Synthetic oligonucleotide
uguaaauauauaaaauucc

SEQ ID NO: 1572330 - RNA, 19 nt, Artificial Sequence
  Description of Artificial Sequence: Synthetic oligonucleotide
acaucuaucacucuacagc

SEQ ID NO: 1572331 - RNA, 19 nt, Artificial Sequence
  Description of Artificial Sequence: Synthetic oligonucleotide
auuacuaguacauuucugg

SEQ ID NO: 1572332 - RNA, 19 nt, Artificial Sequence
  Description of Artificial Sequence: Synthetic oligonucleotide
aaauacaugacagagggag

SEQ ID NO: 1572333 - RNA, 19 nt, Artificial Sequence
  Description of Artificial Sequence: Synthetic oligonucleotide
uccauuaccauucauacca

SEQ ID NO: 1572334 - RNA, 19 nt, Artificial Sequence
  Description of Artificial Sequence: Synthetic oligonucleotide
aauucaaccugauacaugu

SEQ ID NO: 1572335 - RNA, 19 nt, Artificial Sequence
  Description of Artificial Sequence: Synthetic oligonucleotide
gauacuuugcaccauagag

SEQ ID NO: 1572336 - RNA, 19 nt, Artificial Sequence
  Description of Artificial Sequence: Synthetic oligonucleotide
uauuaguucaaaacuaugc

SEQ ID NO: 1572337 - RNA, 19 nt, Artificial Sequence
  Description of Artificial Sequence: Synthetic oligonucleotide
acaaaugugaguaagacuc

SEQ ID NO: 1572338 - RNA, 19 nt, Artificial Sequence
  Description of Artificial Sequence: Synthetic oligonucleotide
acaaagggaauacagauag

SEQ ID NO: 1572339 - RNA, 19 nt, Artificial Sequence
  Description of Artificial Sequence: Synthetic oligonucleotide
auagguaaauuccauuacc

SEQ ID NO: 1572340 - RNA, 19 nt, Artificial Sequence
  Description of Artificial Sequence: Synthetic oligonucleotide
aagagcacaaauuuuccuc

SEQ ID NO: 1572341 - RNA, 19 nt, Artificial Sequence
  Description of Artificial Sequence: Synthetic oligonucleotide
acagagaugacuuucucac

SEQ ID NO: 1572342 - RNA, 19 nt, Artificial Sequence
  Description of Artificial Sequence: Synthetic oligonucleotide
auuccauuaccauucauac

SEQ ID NO: 1572343 - RNA, 19 nt, Artificial Sequence
  Description of Artificial Sequence: Synthetic oligonucleotide
aaguacgauacacaggguc

SEQ ID NO: 1572344 - RNA, 19 nt, Artificial Sequence
  Description of Artificial Sequence: Synthetic oligonucleotide
aacucuucaagaaaguacg

SEQ ID NO: 1572345 - RNA, 19 nt, Artificial Sequence
  Description of Artificial Sequence: Synthetic oligonucleotide
auaaaauucccauagacuu

SEQ ID NO: 1572346 - RNA, 19 nt, Artificial Sequence
  Description of Artificial Sequence: Synthetic oligonucleotide
aucaaauuauauuaguuca

SEQ ID NO: 1572347 - RNA, 19 nt, Artificial Sequence
  Description of Artificial Sequence: Synthetic oligonucleotide
ucuaaaaguguauaugucu

SEQ ID NO: 1572348 - RNA, 19 nt, Artificial Sequence
  Description of Artificial Sequence: Synthetic oligonucleotide
aaaaguuacuauacaaagg

SEQ ID NO: 1572349 - RNA, 19 nt, Artificial Sequence
  Description of Artificial Sequence: Synthetic oligonucleotide
ugaaguguuuaaaauacca

SEQ ID NO: 1572350 - RNA, 19 nt, Artificial Sequence
  Description of Artificial Sequence: Synthetic oligonucleotide
acagauagcacauagguaa

SEQ ID NO: 1572351 - RNA, 19 nt, Artificial Sequence
  Description of Artificial Sequence: Synthetic oligonucleotide
auccaagauacuuugcacc

SEQ ID NO: 1572352 - RNA, 19 nt, Artificial Sequence
  Description of Artificial Sequence: Synthetic oligonucleotide
aaugcauauucuuuggggu

SEQ ID NO: 1572353 - RNA, 19 nt, Artificial Sequence
  Description of Artificial Sequence: Synthetic oligonucleotide
ucagacacaaucaaaagua

SEQ ID NO: 1572354 - RNA, 19 nt, Artificial Sequence
  Description of Artificial Sequence: Synthetic oligonucleotide
acgaguucuauauaguggg

SEQ ID NO: 1572355 - RNA, 19 nt, Artificial Sequence
  Description of Artificial Sequence: Synthetic oligonucleotide
agagaugacuuucucacac

SEQ ID NO: 1572356 - RNA, 19 nt, Artificial Sequence
  Description of Artificial Sequence: Synthetic oligonucleotide
agagcacaaauuuuccucc

SEQ ID NO: 1572357 - RNA, 19 nt, Artificial Sequence
  Description of Artificial Sequence: Synthetic oligonucleotide
uuuucaggagaaaacagga

SEQ ID NO: 1572358 - RNA, 19 nt, Artificial Sequence
  Description of Artificial Sequence: Synthetic oligonucleotide
uaaaaugugucuucgaauc

SEQ ID NO: 1572359 - RNA, 19 nt, Artificial Sequence
  Description of Artificial Sequence: Synthetic oligonucleotide
aaaugugucuucgaaucgc

SEQ ID NO: 1572360 - RNA, 19 nt, Artificial Sequence
  Description of Artificial Sequence: Synthetic oligonucleotide
uucaaaacuaugcuuuaag

SEQ ID NO: 1572361 - RNA, 19 nt, Artificial Sequence
  Description of Artificial Sequence: Synthetic oligonucleotide
uucaaccugauacauguag

SEQ ID NO: 1572362 - RNA, 19 nt, Artificial Sequence
  Description of Artificial Sequence: Synthetic oligonucleotide
guaaauauauaaaauuccc

SEQ ID NO: 1572363 - RNA, 19 nt, Artificial Sequence
  Description of Artificial Sequence: Synthetic oligonucleotide
gugaguaagacucuuuccg

SEQ ID NO: 1572364 - RNA, 19 nt, Artificial Sequence
  Description of Artificial Sequence: Synthetic oligonucleotide
aaagggaauacagauagca

SEQ ID NO: 1572365 - RNA, 19 nt, Artificial Sequence
  Description of Artificial Sequence: Synthetic oligonucleotide
uuuguuaugacugucugac

SEQ ID NO: 1572366 - RNA, 19 nt, Artificial Sequence
  Description of Artificial Sequence: Synthetic oligonucleotide
uucgaaucgcauaucagag

SEQ ID NO: 1572367 - RNA, 19 nt, Artificial Sequence
  Description of Artificial Sequence: Synthetic oligonucleotide
ugccacuuaaaacaaaugu

SEQ ID NO: 1572368 - RNA, 19 nt, Artificial Sequence
  Description of Artificial Sequence: Synthetic oligonucleotide
uauauagugggccauucac

SEQ ID NO: 1572369 - RNA, 19 nt, Artificial Sequence
  Description of Artificial Sequence: Synthetic oligonucleotide
auagcacauagguaaauuc

SEQ ID NO: 1572370 - RNA, 19 nt, Artificial Sequence
  Description of Artificial Sequence: Synthetic oligonucleotide
uaaauuacuaguacauuuc

SEQ ID NO: 1572371 - RNA, 19 nt, Artificial Sequence
  Description of Artificial Sequence: Synthetic oligonucleotide
ucaaccugauacauguagg

SEQ ID NO: 1572372 - RNA, 19 nt, Artificial Sequence
  Description of Artificial Sequence: Synthetic oligonucleotide
aguuauauuuauuuuaauu

SEQ ID NO: 1572373 - RNA, 19 nt, Artificial Sequence
  Description of Artificial Sequence: Synthetic oligonucleotide
cuucaagaaaguacgauac

SEQ ID NO: 1572374 - RNA, 19 nt, Artificial Sequence
  Description of Artificial Sequence: Synthetic oligonucleotide
cuugguaaccaaauucugg

SEQ ID NO: 1572375 - RNA, 19 nt, Artificial Sequence
  Description of Artificial Sequence: Synthetic oligonucleotide
uuacuaguacauuucuggg

SEQ ID NO: 1572376 - RNA, 19 nt, Artificial Sequence
  Description of Artificial Sequence: Synthetic oligonucleotide
uagcacauagguaaauucc

SEQ ID NO: 1572377 - RNA, 19 nt, Artificial Sequence
  Description of Artificial Sequence: Synthetic oligonucleotide
uucagaacaggaauuguga

SEQ ID NO: 1572378 - RNA, 19 nt, Artificial Sequence
  Description of Artificial Sequence: Synthetic oligonucleotide
acuaguacauuucugggcu

SEQ ID NO: 1572379 - RNA, 19 nt, Artificial Sequence
  Description of Artificial Sequence: Synthetic oligonucleotide
gacugucugacccacagag

SEQ ID NO: 1572380 - RNA, 19 nt, Artificial Sequence
  Description of Artificial Sequence: Synthetic oligonucleotide
uagguaaauuccauuacca

SEQ ID NO: 1572381 - RNA, 19 nt, Artificial Sequence
  Description of Artificial Sequence: Synthetic oligonucleotide
cagguuaucaacuauuguc

SEQ ID NO: 1572382 - RNA, 19 nt, Artificial Sequence
  Description of Artificial Sequence: Synthetic oligonucleotide
ugcaccauagaguuuacca

SEQ ID NO: 1572383 - RNA, 19 nt, Artificial Sequence
  Description of Artificial Sequence: Synthetic oligonucleotide
ugaguaagacucuuuccgg

SEQ ID NO: 1572384 - RNA, 19 nt, Artificial Sequence
  Description of Artificial Sequence: Synthetic oligonucleotide
uauagugggccauucacug

SEQ ID NO: 1572385 - RNA, 19 nt, Artificial Sequence
  Description of Artificial Sequence: Synthetic oligonucleotide
aauacagauagcacauagg

SEQ ID NO: 1572386 - RNA, 19 nt, Artificial Sequence
  Description of Artificial Sequence: Synthetic oligonucleotide
uugguaaccaaauucugga

SEQ ID NO: 1572387 - RNA, 19 nt, Artificial Sequence
  Description of Artificial Sequence: Synthetic oligonucleotide
guaaccaaauucuggaagc

SEQ ID NO: 1572388 - RNA, 19 nt, Artificial Sequence
  Description of Artificial Sequence: Synthetic oligonucleotide
aaaacaggauuuuaauuuu

SEQ ID NO: 1572389 - RNA, 19 nt, Artificial Sequence
  Description of Artificial Sequence: Synthetic oligonucleotide
uuaccauucauaccauuug

SEQ ID NO: 1572390 - RNA, 19 nt, Artificial Sequence
  Description of Artificial Sequence: Synthetic oligonucleotide
ucaucuaaaaguguauaug

SEQ ID NO: 1572391 - RNA, 19 nt, Artificial Sequence
  Description of Artificial Sequence: Synthetic oligonucleotide
ucaaaacuaugcuuuaagu

SEQ ID NO: 1572392 - RNA, 19 nt, Artificial Sequence
  Description of Artificial Sequence: Synthetic oligonucleotide
ucccauagacuucauauga

SEQ ID NO: 1572393 - RNA, 19 nt, Artificial Sequence
  Description of Artificial Sequence: Synthetic oligonucleotide
ucauaugaauuccuuuuca

SEQ ID NO: 1572394 - RNA, 19 nt, Artificial Sequence
  Description of Artificial Sequence: Synthetic oligonucleotide
aaguguauaugucuucccu

SEQ ID NO: 1572395 - RNA, 19 nt, Artificial Sequence
  Description of Artificial Sequence: Synthetic oligonucleotide
uaguucaaaacuaugcuuu

SEQ ID NO: 1572396 - RNA, 19 nt, Artificial Sequence
  Description of Artificial Sequence: Synthetic oligonucleotide
uacauguaggcaauauuug

SEQ ID NO: 1572397 - RNA, 19 nt, Artificial Sequence
  Description of Artificial Sequence: Synthetic oligonucleotide
uguaguaccgaguguuccg

SEQ ID NO: 1572398 - RNA, 19 nt, Artificial Sequence
  Description of Artificial Sequence: Synthetic oligonucleotide
auguaggcaauauuugauc

SEQ ID NO: 1572399 - RNA, 19 nt, Artificial Sequence
  Description of Artificial Sequence: Synthetic oligonucleotide
agaguuuaccaucaggcca

SEQ ID NO: 1572400 - RNA, 19 nt, Artificial Sequence
  Description of Artificial Sequence: Synthetic oligonucleotide
ucaagaaaguacgauacac

SEQ ID NO: 1572401 - RNA, 19 nt, Artificial Sequence
  Description of Artificial Sequence: Synthetic oligonucleotide
guaaauuccauuaccauuc

SEQ ID NO: 1572402 - RNA, 19 nt, Artificial Sequence
  Description of Artificial Sequence: Synthetic oligonucleotide
aguguauaugucuucccuc

SEQ ID NO: 1572403 - RNA, 19 nt, Artificial Sequence
  Description of Artificial Sequence: Synthetic oligonucleotide
uuuccuccuacaaaggcca

SEQ ID NO: 1572404 - RNA, 19 nt, Artificial Sequence
  Description of Artificial Sequence: Synthetic oligonucleotide
ucugcucacaauauccuca

SEQ ID NO: 1572405 - RNA, 19 nt, Artificial Sequence
  Description of Artificial Sequence: Synthetic oligonucleotide
augugaguaagacucuuuc

SEQ ID NO: 1572406 - RNA, 19 nt, Artificial Sequence
  Description of Artificial Sequence: Synthetic oligonucleotide
gaaaagcgggccuuuaccc

SEQ ID NO: 1572407 - RNA, 19 nt, Artificial Sequence
  Description of Artificial Sequence: Synthetic oligonucleotide
gaguaagacucuuuccggg

SEQ ID NO: 1572408 - RNA, 19 nt, Artificial Sequence
  Description of Artificial Sequence: Synthetic oligonucleotide
auugugaaguguuuaaaau

SEQ ID NO: 1572409 - RNA, 19 nt, Artificial Sequence
  Description of Artificial Sequence: Synthetic oligonucleotide
uauaugucuucccucuuca

SEQ ID NO: 1572410 - RNA, 19 nt, Artificial Sequence
  Description of Artificial Sequence: Synthetic oligonucleotide
aaagcgggccuuuacccuc

SEQ ID NO: 1572411 - RNA, 19 nt, Artificial Sequence
  Description of Artificial Sequence: Synthetic oligonucleotide
cuuggauuacaucugcccc

SEQ ID NO: 1572412 - RNA, 19 nt, Artificial Sequence
  Description of Artificial Sequence: Synthetic oligonucleotide
acagcuguaguaccgagug

SEQ ID NO: 1572413 - RNA, 19 nt, Artificial Sequence
  Description of Artificial Sequence: Synthetic oligonucleotide
aaucgcauaucagaggcug

SEQ ID NO: 1572414 - RNA, 19 nt, Artificial Sequence
  Description of Artificial Sequence: Synthetic oligonucleotide
cacgaguucuauauagugg

SEQ ID NO: 1572415 - RNA, 19 nt, Artificial Sequence
  Description of Artificial Sequence: Synthetic oligonucleotide
aaacacauaaugaaagaaa

SEQ ID NO: 1572416 - RNA, 19 nt, Artificial Sequence
  Description of Artificial Sequence: Synthetic oligonucleotide
uacuaguacauuucugggc

SEQ ID NO: 1572417 - RNA, 19 nt, Artificial Sequence
  Description of Artificial Sequence: Synthetic oligonucleotide
uuaccaucaggccauuuga

SEQ ID NO: 1572418 - RNA, 19 nt, Artificial Sequence
  Description of Artificial Sequence: Synthetic oligonucleotide
cacuuaaaacaaaugugag

SEQ ID NO: 1572419 - RNA, 19 nt, Artificial Sequence
  Description of Artificial Sequence: Synthetic oligonucleotide
uuugagacgucacaucuau

SEQ ID NO: 1572420 - RNA, 19 nt, Artificial Sequence
  Description of Artificial Sequence: Synthetic oligonucleotide
ugugaguaagacucuuucc

SEQ ID NO: 1572421 - RNA, 19 nt, Artificial Sequence
  Description of Artificial Sequence: Synthetic oligonucleotide
uccaagauacuuugcacca

SEQ ID NO: 1572422 - RNA, 19 nt, Artificial Sequence
  Description of Artificial Sequence: Synthetic oligonucleotide
ugaucagacuacagaauca

SEQ ID NO: 1572423 - RNA, 19 nt, Artificial Sequence
  Description of Artificial Sequence: Synthetic oligonucleotide
aauauccucaggaaaugug

SEQ ID NO: 1572424 - RNA, 19 nt, Artificial Sequence
  Description of Artificial Sequence: Synthetic oligonucleotide
uuaguucaaaacuaugcuu

SEQ ID NO: 1572425 - RNA, 19 nt, Artificial Sequence
  Description of Artificial Sequence: Synthetic oligonucleotide
acauagguaaauuccauua

SEQ ID NO: 1572426 - RNA, 19 nt, Artificial Sequence
  Description of Artificial Sequence: Synthetic oligonucleotide
agacuacagaaucaauguc

SEQ ID NO: 1572427 - RNA, 19 nt, Artificial Sequence
  Description of Artificial Sequence: Synthetic oligonucleotide
uuacaucugccccauaaaa

SEQ ID NO: 1572428 - RNA, 19 nt, Artificial Sequence
  Description of Artificial Sequence: Synthetic oligonucleotide
ucuggcacgaguucuauau

SEQ ID NO: 1572429 - RNA, 19 nt, Artificial Sequence
  Description of Artificial Sequence: Synthetic oligonucleotide
uucuuuggggucaaauaca

SEQ ID NO: 1572430 - RNA, 19 nt, Artificial Sequence
  Description of Artificial Sequence: Synthetic oligonucleotide
ucuuggguaacucuucauc

SEQ ID NO: 1572431 - RNA, 19 nt, Artificial Sequence
  Description of Artificial Sequence: Synthetic oligonucleotide
uucauaugaauuccuuuuc

SEQ ID NO: 1572432 - RNA, 19 nt, Artificial Sequence
  Description of Artificial Sequence: Synthetic oligonucleotide
uggcacgaguucuauauag

SEQ ID NO: 1572433 - RNA, 19 nt, Artificial Sequence
  Description of Artificial Sequence: Synthetic oligonucleotide
ucuucgaaucgcauaucag

SEQ ID NO: 1572434 - RNA, 19 nt, Artificial Sequence
  Description of Artificial Sequence: Synthetic oligonucleotide
aauuccauuaccauucaua

SEQ ID NO: 1572435 - RNA, 19 nt, Artificial Sequence
  Description of Artificial Sequence: Synthetic oligonucleotide
aauuacuaguacauuucug

SEQ ID NO: 1572436 - RNA, 19 nt, Artificial Sequence
  Description of Artificial Sequence: Synthetic oligonucleotide
ugcuuuaaguuauauuuau

SEQ ID NO: 1572437 - RNA, 19 nt, Artificial Sequence
  Description of Artificial Sequence: Synthetic oligonucleotide
augcauauucuuugggguc

SEQ ID NO: 1572438 - RNA, 19 nt, Artificial Sequence
  Description of Artificial Sequence: Synthetic oligonucleotide
auucauaccauuuguguuu

SEQ ID NO: 1572439 - RNA, 19 nt, Artificial Sequence
  Description of Artificial Sequence: Synthetic oligonucleotide
aaauaucuguucagaacag

SEQ ID NO: 1572440 - RNA, 19 nt, Artificial Sequence
  Description of Artificial Sequence: Synthetic oligonucleotide
caaccugauacauguaggc

SEQ ID NO: 1572441 - RNA, 19 nt, Artificial Sequence
  Description of Artificial Sequence: Synthetic oligonucleotide
uucaucuaaaaguguauau

SEQ ID NO: 1572442 - RNA, 19 nt, Artificial Sequence
  Description of Artificial Sequence: Synthetic oligonucleotide
aguucuauauagugggcca

SEQ ID NO: 1572443 - RNA, 19 nt, Artificial Sequence
  Description of Artificial Sequence: Synthetic oligonucleotide
cauauuuguucccugagga

SEQ ID NO: 1572444 - RNA, 19 nt, Artificial Sequence
  Description of Artificial Sequence: Synthetic oligonucleotide
ucgaaucgcauaucagagg

SEQ ID NO: 1572445 - RNA, 19 nt, Artificial Sequence
  Description of Artificial Sequence: Synthetic oligonucleotide
auauuuguucccugaggag

SEQ ID NO: 1572446 - RNA, 19 nt, Artificial Sequence
  Description of Artificial Sequence: Synthetic oligonucleotide
gguaaccaaauucuggaag

SEQ ID NO: 1572447 - RNA, 19 nt, Artificial Sequence
  Description of Artificial Sequence: Synthetic oligonucleotide
aauuccuuuucaagagcac

SEQ ID NO: 1572448 - RNA, 19 nt, Artificial Sequence
  Description of Artificial Sequence: Synthetic oligonucleotide
acgauacacagggucaucc

SEQ ID NO: 1572449 - RNA, 19 nt, Artificial Sequence
  Description of Artificial Sequence: Synthetic oligonucleotide
aaaagcgggccuuuacccu

SEQ ID NO: 1572450 - RNA, 19 nt, Artificial Sequence
  Description of Artificial Sequence: Synthetic oligonucleotide
gagugaucagacuacagaa

SEQ ID NO: 1572451 - RNA, 19 nt, Artificial Sequence
  Description of Artificial Sequence: Synthetic oligonucleotide
cuaucugggauccaucuuc

SEQ ID NO: 1572452 - RNA, 19 nt, Artificial Sequence
  Description of Artificial Sequence: Synthetic oligonucleotide
uucauugcuaucugggauc

SEQ ID NO: 1572453 - RNA, 19 nt, Artificial Sequence
  Description of Artificial Sequence: Synthetic oligonucleotide
cauagguaaauuccauuac

SEQ ID NO: 1572454 - RNA, 19 nt, Artificial Sequence
  Description of Artificial Sequence: Synthetic oligonucleotide
gauuacaucugccccauaa

SEQ ID NO: 1572455 - RNA, 19 nt, Artificial Sequence
  Description of Artificial Sequence: Synthetic oligonucleotide
uuggauuacaucugcccca

SEQ ID NO: 1572456 - RNA, 19 nt, Artificial Sequence
  Description of Artificial Sequence: Synthetic oligonucleotide
cauacaccaagacuuuccc

SEQ ID NO: 1572457 - RNA, 19 nt, Artificial Sequence
  Description of Artificial Sequence: Synthetic oligonucleotide
aguuacuauacaaagggaa

SEQ ID NO: 1572458 - RNA, 19 nt, Artificial Sequence
  Description of Artificial Sequence: Synthetic oligonucleotide
aucuguucagaacaggaau

SEQ ID NO: 1572459 - RNA, 19 nt, Artificial Sequence
  Description of Artificial Sequence: Synthetic oligonucleotide
gaguucuauauagugggcc

SEQ ID NO: 1572460 - RNA, 19 nt, Artificial Sequence
  Description of Artificial Sequence: Synthetic oligonucleotide
cuucgaaucgcauaucaga

SEQ ID NO: 1572461 - RNA, 19 nt, Artificial Sequence
  Description of Artificial Sequence: Synthetic oligonucleotide
cacuuaggaaugcauauuc

SEQ ID NO: 1572462 - RNA, 19 nt, Artificial Sequence
  Description of Artificial Sequence: Synthetic oligonucleotide
uacaucugccccauaaaau

SEQ ID NO: 1572463 - RNA, 19 nt, Artificial Sequence
  Description of Artificial Sequence: Synthetic oligonucleotide
aucuaaaaguguauauguc

SEQ ID NO: 1572464 - RNA, 19 nt, Artificial Sequence
  Description of Artificial Sequence: Synthetic oligonucleotide
aggccauuugacuuggaug

SEQ ID NO: 1572465 - RNA, 19 nt, Artificial Sequence
  Description of Artificial Sequence: Synthetic oligonucleotide
aaauucaaccugauacaug

SEQ ID NO: 1572466 - RNA, 19 nt, Artificial Sequence
  Description of Artificial Sequence: Synthetic oligonucleotide
agagggagugaucagacua

SEQ ID NO: 1572467 - RNA, 19 nt, Artificial Sequence
  Description of Artificial Sequence: Synthetic oligonucleotide
augacagagggagugauca

SEQ ID NO: 1572468 - RNA, 19 nt, Artificial Sequence
  Description of Artificial Sequence: Synthetic oligonucleotide
acacaaucaaaaguaauaa

SEQ ID NO: 1572469 - RNA, 19 nt, Artificial Sequence
  Description of Artificial Sequence: Synthetic oligonucleotide
gagcucaguacucuuugcc

SEQ ID NO: 1572470 - RNA, 19 nt, Artificial Sequence
  Description of Artificial Sequence: Synthetic oligonucleotide
ugacccacagagaugacuu

SEQ ID NO: 1572471 - RNA, 19 nt, Artificial Sequence
  Description of Artificial Sequence: Synthetic oligonucleotide
aguaagacucuuuccggga

SEQ ID NO: 1572472 - RNA, 19 nt, Artificial Sequence
  Description of Artificial Sequence: Synthetic oligonucleotide
guaccgaguguuccgaugc

SEQ ID NO: 1572473 - RNA, 19 nt, Artificial Sequence
  Description of Artificial Sequence: Synthetic oligonucleotide
gaagguuugagacgucaca

SEQ ID NO: 1572474 - RNA, 19 nt, Artificial Sequence
  Description of Artificial Sequence: Synthetic oligonucleotide
uggguaacucuucaucuaa

SEQ ID NO: 1572475 - RNA, 19 nt, Artificial Sequence
  Description of Artificial Sequence: Synthetic oligonucleotide
ugccccauaaaaugugucu

SEQ ID NO: 1572476 - RNA, 19 nt, Artificial Sequence
  Description of Artificial Sequence: Synthetic oligonucleotide
guucagaacaggaauugug

SEQ ID NO: 1572477 - RNA, 19 nt, Artificial Sequence
  Description of Artificial Sequence: Synthetic oligonucleotide
agguuugagacgucacauc

SEQ ID NO: 1572478 - RNA, 19 nt, Artificial Sequence
  Description of Artificial Sequence: Synthetic oligonucleotide
uuaucaacuauugucucuu

SEQ ID NO: 1572479 - RNA, 19 nt, Artificial Sequence
  Description of Artificial Sequence: Synthetic oligonucleotide
uacaaaggccaacucaguu

SEQ ID NO: 1572480 - RNA, 19 nt, Artificial Sequence
  Description of Artificial Sequence: Synthetic oligonucleotide
uaaccaaauucuggaagcc

SEQ ID NO: 1572481 - RNA, 19 nt, Artificial Sequence
  Description of Artificial Sequence: Synthetic oligonucleotide
agacgucacaucuaucacu

SEQ ID NO: 1572482 - RNA, 19 nt, Artificial Sequence
  Description of Artificial Sequence: Synthetic oligonucleotide
gaagccuugucuguuacca

SEQ ID NO: 1572483 - RNA, 19 nt, Artificial Sequence
  Description of Artificial Sequence: Synthetic oligonucleotide
ggaccugagccacagagag

SEQ ID NO: 1572484 - RNA, 19 nt, Artificial Sequence
  Description of Artificial Sequence: Synthetic oligonucleotide
uuucucuccccuuggauua

SEQ ID NO: 1572485 - RNA, 19 nt, Artificial Sequence
  Description of Artificial Sequence: Synthetic oligonucleotide
auaucuguucagaacagga

SEQ ID NO: 1572486 - RNA, 19 nt, Artificial Sequence
  Description of Artificial Sequence: Synthetic oligonucleotide
ucacaucuaucacucuaca

SEQ ID NO: 1572487 - RNA, 19 nt, Artificial Sequence
  Description of Artificial Sequence: Synthetic oligonucleotide
guaagacucuuuccgggag

SEQ ID NO: 1572488 - RNA, 19 nt, Artificial Sequence
  Description of Artificial Sequence: Synthetic oligonucleotide
ggccauuugacuuggauga

SEQ ID NO: 1572489 - RNA, 19 nt, Artificial Sequence
  Description of Artificial Sequence: Synthetic oligonucleotide
auauuaguucaaaacuaug

SEQ ID NO: 1572490 - RNA, 19 nt, Artificial Sequence
  Description of Artificial Sequence: Synthetic oligonucleotide
uugauccaagauacuuugc

SEQ ID NO: 1572491 - RNA, 19 nt, Artificial Sequence
  Description of Artificial Sequence: Synthetic oligonucleotide
ugugucuucgaaucgcaua

SEQ ID NO: 1572492 - RNA, 19 nt, Artificial Sequence
  Description of Artificial Sequence: Synthetic oligonucleotide
uaagacucuuuccgggaga

SEQ ID NO: 1572493 - RNA, 19 nt, Artificial Sequence
  Description of Artificial Sequence: Synthetic oligonucleotide
acaaaggccaacucaguuu

SEQ ID NO: 1572494 - RNA, 19 nt, Artificial Sequence
  Description of Artificial Sequence: Synthetic oligonucleotide
cacucuacagcuguaguac

SEQ ID NO: 1572495 - RNA, 19 nt, Artificial Sequence
  Description of Artificial Sequence: Synthetic oligonucleotide
agccacagagagguaaccc

SEQ ID NO: 1572496 - RNA, 19 nt, Artificial Sequence
  Description of Artificial Sequence: Synthetic oligonucleotide
auuugacuuggaugacuuc

SEQ ID NO: 1572497 - RNA, 19 nt, Artificial Sequence
  Description of Artificial Sequence: Synthetic oligonucleotide
gagccuccauauuuguucc

SEQ ID NO: 1572498 - RNA, 19 nt, Artificial Sequence
  Description of Artificial Sequence: Synthetic oligonucleotide
uagugggccauucacuguc

SEQ ID NO: 1572499 - RNA, 19 nt, Artificial Sequence
  Description of Artificial Sequence: Synthetic oligonucleotide
acagagggagugaucagac

SEQ ID NO: 1572500 - RNA, 19 nt, Artificial Sequence
  Description of Artificial Sequence: Synthetic oligonucleotide
aaccugauacauguaggca

SEQ ID NO: 1572501 - RNA, 19 nt, Artificial Sequence
  Description of Artificial Sequence: Synthetic oligonucleotide
agcucaguacucuuugccu

SEQ ID NO: 1572502 - RNA, 19 nt, Artificial Sequence
  Description of Artificial Sequence: Synthetic oligonucleotide
aaguuacuauacaaaggga

SEQ ID NO: 1572503 - RNA, 19 nt, Artificial Sequence
  Description of Artificial Sequence: Synthetic oligonucleotide
uguucccugaggagggacc

SEQ ID NO: 1572504 - RNA, 19 nt, Artificial Sequence
  Description of Artificial Sequence: Synthetic oligonucleotide
aguacgauacacaggguca

SEQ ID NO: 1572505 - RNA, 19 nt, Artificial Sequence
  Description of Artificial Sequence: Synthetic oligonucleotide
agguaaauuccauuaccau

SEQ ID NO: 1572506 - RNA, 19 nt, Artificial Sequence
  Description of Artificial Sequence: Synthetic oligonucleotide
gacgucacaucuaucacuc

SEQ ID NO: 1572507 - RNA, 19 nt, Artificial Sequence
  Description of Artificial Sequence: Synthetic oligonucleotide
gacuacagaaucaaugucu

SEQ ID NO: 1572508 - RNA, 19 nt, Artificial Sequence
  Description of Artificial Sequence: Synthetic oligonucleotide
ucauugcuaucugggaucc

SEQ ID NO: 1572509 - RNA, 19 nt, Artificial Sequence
  Description of Artificial Sequence: Synthetic oligonucleotide
aauaccauacccagauuuu

SEQ ID NO: 1572510 - RNA, 19 nt, Artificial Sequence
  Description of Artificial Sequence: Synthetic oligonucleotide
auuacaucugccccauaaa

SEQ ID NO: 1572511 - RNA, 19 nt, Artificial Sequence
  Description of Artificial Sequence: Synthetic oligonucleotide
ucacucuacagcuguagua

SEQ ID NO: 1572512 - RNA, 19 nt, Artificial Sequence
  Description of Artificial Sequence: Synthetic oligonucleotide
uuugccucuuucucucccc

SEQ ID NO: 1572513 - RNA, 19 nt, Artificial Sequence
  Description of Artificial Sequence: Synthetic oligonucleotide
ggaaaagcgggccuuuacc

SEQ ID NO: 1572514 - RNA, 19 nt, Artificial Sequence
  Description of Artificial Sequence: Synthetic oligonucleotide
ucucacacguuuuggacuu

SEQ ID NO: 1572515 - RNA, 19 nt, Artificial Sequence
  Description of Artificial Sequence: Synthetic oligonucleotide
aguaccgaguguuccgaug

SEQ ID NO: 1572516 - RNA, 19 nt, Artificial Sequence
  Description of Artificial Sequence: Synthetic oligonucleotide
uggaaaagcgggccuuuac

SEQ ID NO: 1572517 - RNA, 19 nt, Artificial Sequence
  Description of Artificial Sequence: Synthetic oligonucleotide
aaaauaccauacccagauu

SEQ ID NO: 1572518 - RNA, 19 nt, Artificial Sequence
  Description of Artificial Sequence: Synthetic oligonucleotide
gagacgucacaucuaucac

SEQ ID NO: 1572519 - RNA, 19 nt, Artificial Sequence
  Description of Artificial Sequence: Synthetic oligonucleotide
gccacuuaaaacaaaugug

SEQ ID NO: 1572520 - RNA, 19 nt, Artificial Sequence
  Description of Artificial Sequence: Synthetic oligonucleotide
ucuuuccgggagaggagcc

SEQ ID NO: 1572521 - RNA, 19 nt, Artificial Sequence
  Description of Artificial Sequence: Synthetic oligonucleotide
ucuacagcuguaguaccga

SEQ ID NO: 1572522 - RNA, 19 nt, Artificial Sequence
  Description of Artificial Sequence: Synthetic oligonucleotide
ggagccuccauauuuguuc

SEQ ID NO: 1572523 - RNA, 19 nt, Artificial Sequence
  Description of Artificial Sequence: Synthetic oligonucleotide
cagagaagcacccacccca

SEQ ID NO: 1572524 - RNA, 19 nt, Artificial Sequence
  Description of Artificial Sequence: Synthetic oligonucleotide
ugauacauguaggcaauau

SEQ ID NO: 1572525 - RNA, 19 nt, Artificial Sequence
  Description of Artificial Sequence: Synthetic oligonucleotide
uuguuaugacugucugacc

SEQ ID NO: 1572526 - RNA, 19 nt, Artificial Sequence
  Description of Artificial Sequence: Synthetic oligonucleotide
ucuauauagugggccauuc

SEQ ID NO: 1572527 - RNA, 19 nt, Artificial Sequence
  Description of Artificial Sequence: Synthetic oligonucleotide
guaggcaauauuugaucca

SEQ ID NO: 1572528 - RNA, 19 nt, Artificial Sequence
  Description of Artificial Sequence: Synthetic oligonucleotide
ggagugaucagacuacaga

SEQ ID NO: 1572529 - RNA, 19 nt, Artificial Sequence
  Description of Artificial Sequence: Synthetic oligonucleotide
aucacucuacagcuguagu

SEQ ID NO: 1572530 - RNA, 19 nt, Artificial Sequence
  Description of Artificial Sequence: Synthetic oligonucleotide
caaagggaauacagauagc

SEQ ID NO: 1572531 - RNA, 19 nt, Artificial Sequence
  Description of Artificial Sequence: Synthetic oligonucleotide
uuuccucuguaaauauaua

SEQ ID NO: 1572532 - RNA, 19 nt, Artificial Sequence
  Description of Artificial Sequence: Synthetic oligonucleotide
guuaugacugucugaccca

SEQ ID NO: 1572533 - RNA, 19 nt, Artificial Sequence
  Description of Artificial Sequence: Synthetic oligonucleotide
uguucagaacaggaauugu

SEQ ID NO: 1572534 - RNA, 19 nt, Artificial Sequence
  Description of Artificial Sequence: Synthetic oligonucleotide
cagacuacagaaucaaugu

SEQ ID NO: 1572535 - RNA, 19 nt, Artificial Sequence
  Description of Artificial Sequence: Synthetic oligonucleotide
cgaaucgcauaucagaggc

SEQ ID NO: 1572536 - RNA, 19 nt, Artificial Sequence
  Description of Artificial Sequence: Synthetic oligonucleotide
ugcucacaauauccucagg

SEQ ID NO: 1572537 - RNA, 19 nt, Artificial Sequence
  Description of Artificial Sequence: Synthetic oligonucleotide
ugguaaccaaauucuggaa

SEQ ID NO: 1572538 - RNA, 19 nt, Artificial Sequence
  Description of Artificial Sequence: Synthetic oligonucleotide
caacuauugucucuucuga

SEQ ID NO: 1572539 - RNA, 19 nt, Artificial Sequence
  Description of Artificial Sequence: Synthetic oligonucleotide
acugccacuuaaaacaaau

SEQ ID NO: 1572540 - RNA, 19 nt, Artificial Sequence
  Description of Artificial Sequence: Synthetic oligonucleotide
caucuaucacucuacagcu

SEQ ID NO: 1572541 - RNA, 19 nt, Artificial Sequence
  Description of Artificial Sequence: Synthetic oligonucleotide
auacaccaagacuuucccu

SEQ ID NO: 1572542 - RNA, 19 nt, Artificial Sequence
  Description of Artificial Sequence: Synthetic oligonucleotide
cauagaagguuugagacgu

SEQ ID NO: 1572543 - RNA, 19 nt, Artificial Sequence
  Description of Artificial Sequence: Synthetic oligonucleotide
uuaugacugucugacccac

SEQ ID NO: 1572544 - RNA, 19 nt, Artificial Sequence
  Description of Artificial Sequence: Synthetic oligonucleotide
auuugauccaagauacuuu

SEQ ID NO: 1572545 - RNA, 19 nt, Artificial Sequence
  Description of Artificial Sequence: Synthetic oligonucleotide
cugccacuuaaaacaaaug

SEQ ID NO: 1572546 - RNA, 19 nt, Artificial Sequence
  Description of Artificial Sequence: Synthetic oligonucleotide
uuggguaacucuucaucua

SEQ ID NO: 1572547 - RNA, 19 nt, Artificial Sequence
  Description of Artificial Sequence: Synthetic oligonucleotide
cuguaguaccgaguguucc

SEQ ID NO: 1572548 - RNA, 19 nt, Artificial Sequence
  Description of Artificial Sequence: Synthetic oligonucleotide
auauucuuuggggucaaau

SEQ ID NO: 1572549 - RNA, 19 nt, Artificial Sequence
  Description of Artificial Sequence: Synthetic oligonucleotide
uggaagccuugucuguuac

SEQ ID NO: 1572550 - RNA, 19 nt, Artificial Sequence
  Description of Artificial Sequence: Synthetic oligonucleotide
uucugacacuucuucugga

SEQ ID NO: 1572551 - RNA, 19 nt, Artificial Sequence
  Description of Artificial Sequence: Synthetic oligonucleotide
gaagcacccaccccaucac

SEQ ID NO: 1572552 - RNA, 19 nt, Artificial Sequence
  Description of Artificial Sequence: Synthetic oligonucleotide
aaacugccacuuaaaacaa

SEQ ID NO: 1572553 - RNA, 19 nt, Artificial Sequence
  Description of Artificial Sequence: Synthetic oligonucleotide
gcacgaguucuauauagug

SEQ ID NO: 1572554 - RNA, 19 nt, Artificial Sequence
  Description of Artificial Sequence: Synthetic oligonucleotide
gucacaucuaucacucuac

SEQ ID NO: 1572555 - RNA, 19 nt, Artificial Sequence
  Description of Artificial Sequence: Synthetic oligonucleotide
cuaaaaguguauaugucuu

SEQ ID NO: 1572556 - RNA, 19 nt, Artificial Sequence
  Description of Artificial Sequence: Synthetic oligonucleotide
auugucucuucugacacuu

SEQ ID NO: 1572557 - RNA, 19 nt, Artificial Sequence
  Description of Artificial Sequence: Synthetic oligonucleotide
cacaugucccagugcauac

SEQ ID NO: 1572558 - RNA, 19 nt, Artificial Sequence
  Description of Artificial Sequence: Synthetic oligonucleotide
agccuugucuguuaccaau

SEQ ID NO: 1572559 - RNA, 19 nt, Artificial Sequence
  Description of Artificial Sequence: Synthetic oligonucleotide
uccgaugcuuuguuaugac

SEQ ID NO: 1572560 - RNA, 19 nt, Artificial Sequence
  Description of Artificial Sequence: Synthetic oligonucleotide
cacaaauuuuccuccuaca

SEQ ID NO: 1572561 - RNA, 19 nt, Artificial Sequence
  Description of Artificial Sequence: Synthetic oligonucleotide
cgaugcuuuguuaugacug

SEQ ID NO: 1572562 - RNA, 19 nt, Artificial Sequence
  Description of Artificial Sequence: Synthetic oligonucleotide
uuccugguugcuugguaac

SEQ ID NO: 1572563 - RNA, 19 nt, Artificial Sequence
  Description of Artificial Sequence: Synthetic oligonucleotide
gauacauguaggcaauauu

SEQ ID NO: 1572564 - RNA, 19 nt, Artificial Sequence
  Description of Artificial Sequence: Synthetic oligonucleotide
agcuguaguaccgaguguu

SEQ ID NO: 1572565 - RNA, 19 nt, Artificial Sequence
  Description of Artificial Sequence: Synthetic oligonucleotide
ggagggcccaguuuuaaac

SEQ ID NO: 1572566 - RNA, 19 nt, Artificial Sequence
  Description of Artificial Sequence: Synthetic oligonucleotide
agaggagccuccauauuug

SEQ ID NO: 1572567 - RNA, 19 nt, Artificial Sequence
  Description of Artificial Sequence: Synthetic oligonucleotide
cucuuuccgggagaggagc

SEQ ID NO: 1572568 - RNA, 19 nt, Artificial Sequence
  Description of Artificial Sequence: Synthetic oligonucleotide
acuacagaaucaaugucuu

SEQ ID NO: 1572569 - RNA, 19 nt, Artificial Sequence
  Description of Artificial Sequence: Synthetic oligonucleotide
auagugggccauucacugu

SEQ ID NO: 1572570 - RNA, 19 nt, Artificial Sequence
  Description of Artificial Sequence: Synthetic oligonucleotide
ggaauugugaaguguuuaa

SEQ ID NO: 1572571 - RNA, 19 nt, Artificial Sequence
  Description of Artificial Sequence: Synthetic oligonucleotide
uacccucuuggguaacucu

SEQ ID NO: 1572572 - RNA, 19 nt, Artificial Sequence
  Description of Artificial Sequence: Synthetic oligonucleotide
cuaguacauuucugggcug

SEQ ID NO: 1572573 - RNA, 19 nt, Artificial Sequence
  Description of Artificial Sequence: Synthetic oligonucleotide
caagacuuucccuuugucu

SEQ ID NO: 1572574 - RNA, 19 nt, Artificial Sequence
  Description of Artificial Sequence: Synthetic oligonucleotide
gguuaucaacuauugucuc

SEQ ID NO: 1572575 - RNA, 19 nt, Artificial Sequence
  Description of Artificial Sequence: Synthetic oligonucleotide
aguacauuucugggcuguc

SEQ ID NO: 1572576 - RNA, 19 nt, Artificial Sequence
  Description of Artificial Sequence: Synthetic oligonucleotide
agacacaaucaaaaguaau

SEQ ID NO: 1572577 - RNA, 19 nt, Artificial Sequence
  Description of Artificial Sequence: Synthetic oligonucleotide
uccugguugcuugguaacc

SEQ ID NO: 1572578 - RNA, 19 nt, Artificial Sequence
  Description of Artificial Sequence: Synthetic oligonucleotide
cugggauccaucuucaaau

SEQ ID NO: 1572579 - RNA, 19 nt, Artificial Sequence
  Description of Artificial Sequence: Synthetic oligonucleotide
cuacagaaucaaugucuuc

SEQ ID NO: 1572580 - RNA, 19 nt, Artificial Sequence
  Description of Artificial Sequence: Synthetic oligonucleotide
aggaauugugaaguguuua

SEQ ID NO: 1572581 - RNA, 19 nt, Artificial Sequence
  Description of Artificial Sequence: Synthetic oligonucleotide
uaucaacuauugucucuuc

SEQ ID NO: 1572582 - RNA, 19 nt, Artificial Sequence
  Description of Artificial Sequence: Synthetic oligonucleotide
cuauauagugggccauuca

SEQ ID NO: 1572583 - RNA, 19 nt, Artificial Sequence
  Description of Artificial Sequence: Synthetic oligonucleotide
gguuugagacgucacaucu

SEQ ID NO: 1572584 - RNA, 19 nt, Artificial Sequence
  Description of Artificial Sequence: Synthetic oligonucleotide
guuacuauacaaagggaau

SEQ ID NO: 1572585 - RNA, 19 nt, Artificial Sequence
  Description of Artificial Sequence: Synthetic oligonucleotide
agugaucagacuacagaau

SEQ ID NO: 1572586 - RNA, 19 nt, Artificial Sequence
  Description of Artificial Sequence: Synthetic oligonucleotide
uccuuucacuuaggaaugc

SEQ ID NO: 1572587 - RNA, 19 nt, Artificial Sequence
  Description of Artificial Sequence: Synthetic oligonucleotide
cuccauauuuguucccuga

SEQ ID NO: 1572588 - RNA, 19 nt, Artificial Sequence
  Description of Artificial Sequence: Synthetic oligonucleotide
aaaggccaacucaguuuuc

SEQ ID NO: 1572589 - RNA, 19 nt, Artificial Sequence
  Description of Artificial Sequence: Synthetic oligonucleotide
ucacuuaggaaugcauauu

SEQ ID NO: 1572590 - RNA, 19 nt, Artificial Sequence
  Description of Artificial Sequence: Synthetic oligonucleotide
cauguaggcaauauuugau

SEQ ID NO: 1572591 - RNA, 19 nt, Artificial Sequence
  Description of Artificial Sequence: Synthetic oligonucleotide
aggaaaugugucucugcua

SEQ ID NO: 1572592 - RNA, 19 nt, Artificial Sequence
  Description of Artificial Sequence: Synthetic oligonucleotide
aaaguacgauacacagggu

SEQ ID NO: 1572593 - RNA, 19 nt, Artificial Sequence
  Description of Artificial Sequence: Synthetic oligonucleotide
cuuccugguugcuugguaa

SEQ ID NO: 1572594 - RNA, 19 nt, Artificial Sequence
  Description of Artificial Sequence: Synthetic oligonucleotide
ugggauccaucuucaaauu

SEQ ID NO: 1572595 - RNA, 19 nt, Artificial Sequence
  Description of Artificial Sequence: Synthetic oligonucleotide
gugucuucgaaucgcauau

SEQ ID NO: 1572596 - RNA, 19 nt, Artificial Sequence
  Description of Artificial Sequence: Synthetic oligonucleotide
augcuuuaaguuauauuua

SEQ ID NO: 1572597 - RNA, 19 nt, Artificial Sequence
  Description of Artificial Sequence: Synthetic oligonucleotide
agcacaaauuuuccuccua

SEQ ID NO: 1572598 - RNA, 19 nt, Artificial Sequence
  Description of Artificial Sequence: Synthetic oligonucleotide
cauucauaccauuuguguu

SEQ ID NO: 1572599 - RNA, 19 nt, Artificial Sequence
  Description of Artificial Sequence: Synthetic oligonucleotide
uggauuacaucugccccau

SEQ ID NO: 1572600 - RNA, 19 nt, Artificial Sequence
  Description of Artificial Sequence: Synthetic oligonucleotide
ugcauacaccaagacuuuc

SEQ ID NO: 1572601 - RNA, 19 nt, Artificial Sequence
  Description of Artificial Sequence: Synthetic oligonucleotide
gggccuuuacccucuuggg

SEQ ID NO: 1572602 - RNA, 19 nt, Artificial Sequence
  Description of Artificial Sequence: Synthetic oligonucleotide
caaauacaugacagaggga

SEQ ID NO: 1572603 - RNA, 19 nt, Artificial Sequence
  Description of Artificial Sequence: Synthetic oligonucleotide
caagauacuuugcaccaua

SEQ ID NO: 1572604 - RNA, 19 nt, Artificial Sequence
  Description of Artificial Sequence: Synthetic oligonucleotide
auaugucuucccucuucau

SEQ ID NO: 1572605 - RNA, 19 nt, Artificial Sequence
  Description of Artificial Sequence: Synthetic oligonucleotide
uuccgggagaggagccucc

SEQ ID NO: 1572606 - RNA, 19 nt, Artificial Sequence
  Description of Artificial Sequence: Synthetic oligonucleotide
uucuauauagugggccauu

SEQ ID NO: 1572607 - RNA, 19 nt, Artificial Sequence
  Description of Artificial Sequence: Synthetic oligonucleotide
auauuugauccaagauacu

SEQ ID NO: 1572608 - RNA, 19 nt, Artificial Sequence
  Description of Artificial Sequence: Synthetic oligonucleotide
cugccccauaaaauguguc

SEQ ID NO: 1572609 - RNA, 19 nt, Artificial Sequence
  Description of Artificial Sequence: Synthetic oligonucleotide
uugcaccauagaguuuacc

SEQ ID NO: 1572610 - RNA, 19 nt, Artificial Sequence
  Description of Artificial Sequence: Synthetic oligonucleotide
cugucugacccacagagau

SEQ ID NO: 1572611 - RNA, 19 nt, Artificial Sequence
  Description of Artificial Sequence: Synthetic oligonucleotide
gaguuuaccaucaggccau

SEQ ID NO: 1572612 - RNA, 19 nt, Artificial Sequence
  Description of Artificial Sequence: Synthetic oligonucleotide
agauagcacauagguaaau

SEQ ID NO: 1572613 - RNA, 19 nt, Artificial Sequence
  Description of Artificial Sequence: Synthetic oligonucleotide
uaccgaguguuccgaugcu

SEQ ID NO: 1572614 - RNA, 19 nt, Artificial Sequence
  Description of Artificial Sequence: Synthetic oligonucleotide
acucuucaucuaaaagugu

SEQ ID NO: 1572615 - RNA, 19 nt, Artificial Sequence
  Description of Artificial Sequence: Synthetic oligonucleotide
cuaaaggagccaucaucaa

SEQ ID NO: 1572616 - RNA, 19 nt, Artificial Sequence
  Description of Artificial Sequence: Synthetic oligonucleotide
caagagcacaaauuuuccu

SEQ ID NO: 1572617 - RNA, 19 nt, Artificial Sequence
  Description of Artificial Sequence: Synthetic oligonucleotide
gauagcacauagguaaauu

SEQ ID NO: 1572618 - RNA, 19 nt, Artificial Sequence
  Description of Artificial Sequence: Synthetic oligonucleotide
aggagaaaacaggauuuua

SEQ ID NO: 1572619 - RNA, 19 nt, Artificial Sequence
  Description of Artificial Sequence: Synthetic oligonucleotide
uuacccucuuggguaacuc

SEQ ID NO: 1572620 - RNA, 19 nt, Artificial Sequence
  Description of Artificial Sequence: Synthetic oligonucleotide
ugggccauucacugucauc

SEQ ID NO: 1572621 - RNA, 19 nt, Artificial Sequence
  Description of Artificial Sequence: Synthetic oligonucleotide
caccaagacuuucccuuug

SEQ ID NO: 1572622 - RNA, 19 nt, Artificial Sequence
  Description of Artificial Sequence: Synthetic oligonucleotide
uuuccgggagaggagccuc

SEQ ID NO: 1572623 - RNA, 19 nt, Artificial Sequence
  Description of Artificial Sequence: Synthetic oligonucleotide
gcauaucagaggcugugga

SEQ ID NO: 1572624 - RNA, 19 nt, Artificial Sequence
  Description of Artificial Sequence: Synthetic oligonucleotide
guaguaccgaguguuccga

SEQ ID NO: 1572625 - RNA, 19 nt, Artificial Sequence
  Description of Artificial Sequence: Synthetic oligonucleotide
ggagcucaguacucuuugc

SEQ ID NO: 1572626 - RNA, 19 nt, Artificial Sequence
  Description of Artificial Sequence: Synthetic oligonucleotide
gguugcagcagguuaucaa

SEQ ID NO: 1572627 - RNA, 19 nt, Artificial Sequence
  Description of Artificial Sequence: Synthetic oligonucleotide
agggagugaucagacuaca

SEQ ID NO: 1572628 - RNA, 19 nt, Artificial Sequence
  Description of Artificial Sequence: Synthetic oligonucleotide
cuaugcuuuaaguuauauu

SEQ ID NO: 1572629 - RNA, 19 nt, Artificial Sequence
  Description of Artificial Sequence: Synthetic oligonucleotide
cagauagcacauagguaaa

SEQ ID NO: 1572630 - RNA, 19 nt, Artificial Sequence
  Description of Artificial Sequence: Synthetic oligonucleotide
caucugccccauaaaaugu

SEQ ID NO: 1572631 - RNA, 19 nt, Artificial Sequence
  Description of Artificial Sequence: Synthetic oligonucleotide
caaauucaaccugauacau

SEQ ID NO: 1572632 - RNA, 19 nt, Artificial Sequence
  Description of Artificial Sequence: Synthetic oligonucleotide
cuccuacaaaggccaacuc

SEQ ID NO: 1572633 - RNA, 19 nt, Artificial Sequence
  Description of Artificial Sequence: Synthetic oligonucleotide
cgggccuuuacccucuugg

SEQ ID NO: 1572634 - RNA, 19 nt, Artificial Sequence
  Description of Artificial Sequence: Synthetic oligonucleotide
ggaagccuugucuguuacc

SEQ ID NO: 1572635 - RNA, 19 nt, Artificial Sequence
  Description of Artificial Sequence: Synthetic oligonucleotide
aggagggcccaguuuuaaa

SEQ ID NO: 1572636 - RNA, 19 nt, Artificial Sequence
  Description of Artificial Sequence: Synthetic oligonucleotide
ugucuucgaaucgcauauc

SEQ ID NO: 1572637 - RNA, 19 nt, Artificial Sequence
  Description of Artificial Sequence: Synthetic oligonucleotide
uacgauacacagggucauc

SEQ ID NO: 1572638 - RNA, 19 nt, Artificial Sequence
  Description of Artificial Sequence: Synthetic oligonucleotide
cugagccacagagagguaa

SEQ ID NO: 1572639 - RNA, 19 nt, Artificial Sequence
  Description of Artificial Sequence: Synthetic oligonucleotide
uaguaccgaguguuccgau

SEQ ID NO: 1572640 - RNA, 19 nt, Artificial Sequence
  Description of Artificial Sequence: Synthetic oligonucleotide
cccaucacaugucccagug

SEQ ID NO: 1572641 - RNA, 19 nt, Artificial Sequence
  Description of Artificial Sequence: Synthetic oligonucleotide
acugucugacccacagaga

SEQ ID NO: 1572642 - RNA, 19 nt, Artificial Sequence
  Description of Artificial Sequence: Synthetic oligonucleotide
ccauucauaccauuugugu

SEQ ID NO: 1572643 - RNA, 19 nt, Artificial Sequence
  Description of Artificial Sequence: Synthetic oligonucleotide
ccccauaaaaugugucuuc

SEQ ID NO: 1572644 - RNA, 19 nt, Artificial Sequence
  Description of Artificial Sequence: Synthetic oligonucleotide
acgucacaucuaucacucu

SEQ ID NO: 1572645 - RNA, 19 nt, Artificial Sequence
  Description of Artificial Sequence: Synthetic oligonucleotide
cacauagguaaauuccauu

SEQ ID NO: 1572646 - RNA, 19 nt, Artificial Sequence
  Description of Artificial Sequence: Synthetic oligonucleotide
agccuggagcucaguacuc

SEQ ID NO: 1572647 - RNA, 19 nt, Artificial Sequence
  Description of Artificial Sequence: Synthetic oligonucleotide
ucaggccauuugacuugga

SEQ ID NO: 1572648 - RNA, 19 nt, Artificial Sequence
  Description of Artificial Sequence: Synthetic oligonucleotide
gaggagccuccauauuugu

SEQ ID NO: 1572649 - RNA, 19 nt, Artificial Sequence
  Description of Artificial Sequence: Synthetic oligonucleotide
ucucuccccuuggauuaca

SEQ ID NO: 1572650 - RNA, 19 nt, Artificial Sequence
  Description of Artificial Sequence: Synthetic oligonucleotide
agcacccaccccaucacau

SEQ ID NO: 1572651 - RNA, 19 nt, Artificial Sequence
  Description of Artificial Sequence: Synthetic oligonucleotide
guuugagacgucacaucua

SEQ ID NO: 1572652 - RNA, 19 nt, Artificial Sequence
  Description of Artificial Sequence: Synthetic oligonucleotide
uucucuccccuuggauuac

SEQ ID NO: 1572653 - RNA, 19 nt, Artificial Sequence
  Description of Artificial Sequence: Synthetic oligonucleotide
ucauaccauuuguguuuua

SEQ ID NO: 1572654 - RNA, 19 nt, Artificial Sequence
  Description of Artificial Sequence: Synthetic oligonucleotide
agccaucaucaaacaugac

SEQ ID NO: 1572655 - RNA, 19 nt, Artificial Sequence
  Description of Artificial Sequence: Synthetic oligonucleotide
gaguguuccgaugcuuugu

SEQ ID NO: 1572656 - RNA, 19 nt, Artificial Sequence
  Description of Artificial Sequence: Synthetic oligonucleotide
gccuugucuguuaccaaug

SEQ ID NO: 1572657 - RNA, 19 nt, Artificial Sequence
  Description of Artificial Sequence: Synthetic oligonucleotide
cuacaaaggccaacucagu

SEQ ID NO: 1572658 - RNA, 19 nt, Artificial Sequence
  Description of Artificial Sequence: Synthetic oligonucleotide
agagaagcacccaccccau

SEQ ID NO: 1572659 - RNA, 19 nt, Artificial Sequence
  Description of Artificial Sequence: Synthetic oligonucleotide
aagcgggccuuuacccucu

SEQ ID NO: 1572660 - RNA, 19 nt, Artificial Sequence
  Description of Artificial Sequence: Synthetic oligonucleotide
ccauaaaaugugucuucga

SEQ ID NO: 1572661 - RNA, 19 nt, Artificial Sequence
  Description of Artificial Sequence: Synthetic oligonucleotide
cgaguucuauauagugggc

SEQ ID NO: 1572662 - RNA, 19 nt, Artificial Sequence
  Description of Artificial Sequence: Synthetic oligonucleotide
cuuuacccucuuggguaac

SEQ ID NO: 1572663 - RNA, 19 nt, Artificial Sequence
  Description of Artificial Sequence: Synthetic oligonucleotide
caauauccucaggaaaugu

SEQ ID NO: 1572664 - RNA, 19 nt, Artificial Sequence
  Description of Artificial Sequence: Synthetic oligonucleotide
gaaucgcauaucagaggcu

SEQ ID NO: 1572665 - RNA, 19 nt, Artificial Sequence
  Description of Artificial Sequence: Synthetic oligonucleotide
gcaccauagaguuuaccau

SEQ ID NO: 1572666 - RNA, 19 nt, Artificial Sequence
  Description of Artificial Sequence: Synthetic oligonucleotide
cuaucacucuacagcugua

SEQ ID NO: 1572667 - RNA, 19 nt, Artificial Sequence
  Description of Artificial Sequence: Synthetic oligonucleotide
ccuccauauuuguucccug

SEQ ID NO: 1572668 - RNA, 19 nt, Artificial Sequence
  Description of Artificial Sequence: Synthetic oligonucleotide
aucacaugucccagugcau

SEQ ID NO: 1572669 - RNA, 19 nt, Artificial Sequence
  Description of Artificial Sequence: Synthetic oligonucleotide
gcacccaccccaucacaug

SEQ ID NO: 1572670 - RNA, 19 nt, Artificial Sequence
  Description of Artificial Sequence: Synthetic oligonucleotide
agugggccauucacuguca

SEQ ID NO: 1572671 - RNA, 19 nt, Artificial Sequence
  Description of Artificial Sequence: Synthetic oligonucleotide
guacauuucugggcugucu

SEQ ID NO: 1572672 - RNA, 19 nt, Artificial Sequence
  Description of Artificial Sequence: Synthetic oligonucleotide
gcagguuaucaacuauugu

SEQ ID NO: 1572673 - RNA, 19 nt, Artificial Sequence
  Description of Artificial Sequence: Synthetic oligonucleotide
guucuauauagugggccau

SEQ ID NO: 1572674 - RNA, 19 nt, Artificial Sequence
  Description of Artificial Sequence: Synthetic oligonucleotide
cccauagacuucauaugaa

SEQ ID NO: 1572675 - RNA, 19 nt, Artificial Sequence
  Description of Artificial Sequence: Synthetic oligonucleotide
auucaaccugauacaugua

SEQ ID NO: 1572676 - RNA, 19 nt, Artificial Sequence
  Description of Artificial Sequence: Synthetic oligonucleotide
guacgauacacagggucau

SEQ ID NO: 1572677 - RNA, 19 nt, Artificial Sequence
  Description of Artificial Sequence: Synthetic oligonucleotide
ggccuuuacccucuugggu

SEQ ID NO: 1572678 - RNA, 19 nt, Artificial Sequence
  Description of Artificial Sequence: Synthetic oligonucleotide
gcuguaguaccgaguguuc

SEQ ID NO: 1572679 - RNA, 19 nt, Artificial Sequence
  Description of Artificial Sequence: Synthetic oligonucleotide
cgcauaucagaggcugugg

SEQ ID NO: 1572680 - RNA, 19 nt, Artificial Sequence
  Description of Artificial Sequence: Synthetic oligonucleotide
aggagccuccauauuuguu

SEQ ID NO: 1572681 - RNA, 19 nt, Artificial Sequence
  Description of Artificial Sequence: Synthetic oligonucleotide
caggccauuugacuuggau

SEQ ID NO: 1572682 - RNA, 19 nt, Artificial Sequence
  Description of Artificial Sequence: Synthetic oligonucleotide
cgaguguuccgaugcuuug

SEQ ID NO: 1572683 - RNA, 19 nt, Artificial Sequence
  Description of Artificial Sequence: Synthetic oligonucleotide
cucuuggguaacucuucau

SEQ ID NO: 1572684 - RNA, 19 nt, Artificial Sequence
  Description of Artificial Sequence: Synthetic oligonucleotide
ggguaacucuucaucuaaa

SEQ ID NO: 1572685 - RNA, 19 nt, Artificial Sequence
  Description of Artificial Sequence: Synthetic oligonucleotide
gccauuugacuuggaugac

SEQ ID NO: 1572686 - RNA, 19 nt, Artificial Sequence
  Description of Artificial Sequence: Synthetic oligonucleotide
aguuuaccaucaggccauu

SEQ ID NO: 1572687 - RNA, 19 nt, Artificial Sequence
  Description of Artificial Sequence: Synthetic oligonucleotide
cucacacguuuuggacuuc

SEQ ID NO: 1572688 - RNA, 19 nt, Artificial Sequence
  Description of Artificial Sequence: Synthetic oligonucleotide
cuggagcucaguacucuuu

SEQ ID NO: 1572689 - RNA, 19 nt, Artificial Sequence
  Description of Artificial Sequence: Synthetic oligonucleotide
ccuuucacuuaggaaugca

SEQ ID NO: 1572690 - RNA, 19 nt, Artificial Sequence
  Description of Artificial Sequence: Synthetic oligonucleotide
ggcacgaguucuauauagu

SEQ ID NO: 1572691 - RNA, 19 nt, Artificial Sequence
  Description of Artificial Sequence: Synthetic oligonucleotide
gacccacagagaugacuuu

SEQ ID NO: 1572692 - RNA, 19 nt, Artificial Sequence
  Description of Artificial Sequence: Synthetic oligonucleotide
cgucacaucuaucacucua

SEQ ID NO: 1572693 - RNA, 19 nt, Artificial Sequence
  Description of Artificial Sequence: Synthetic oligonucleotide
cgauacacagggucaucca

SEQ ID NO: 1572694 - RNA, 19 nt, Artificial Sequence
  Description of Artificial Sequence: Synthetic oligonucleotide
caggagggcccaguuuuaa

SEQ ID NO: 1572695 - RNA, 19 nt, Artificial Sequence
  Description of Artificial Sequence: Synthetic oligonucleotide
cuuuccgggagaggagccu

SEQ ID NO: 1572696 - RNA, 19 nt, Artificial Sequence
  Description of Artificial Sequence: Synthetic oligonucleotide
cauugcuaucugggaucca

SEQ ID NO: 1572697 - RNA, 19 nt, Artificial Sequence
  Description of Artificial Sequence: Synthetic oligonucleotide
ccuccuacaaaggccaacu

SEQ ID NO: 1572698 - RNA, 19 nt, Artificial Sequence
  Description of Artificial Sequence: Synthetic oligonucleotide
gcacauagguaaauuccau

SEQ ID NO: 1572699 - RNA, 19 nt, Artificial Sequence
  Description of Artificial Sequence: Synthetic oligonucleotide
ggcccaguuuuaaacaguu

SEQ ID NO: 1572700 - RNA, 19 nt, Artificial Sequence
  Description of Artificial Sequence: Synthetic oligonucleotide
gugcauacaccaagacuuu

SEQ ID NO: 1572701 - RNA, 19 nt, Artificial Sequence
  Description of Artificial Sequence: Synthetic oligonucleotide
gggcugucuugcaaagaaa

SEQ ID NO: 1572702 - RNA, 19 nt, Artificial Sequence
  Description of Artificial Sequence: Synthetic oligonucleotide
gccccauaaaaugugucuu

SEQ ID NO: 1572703 - RNA, 19 nt, Artificial Sequence
  Description of Artificial Sequence: Synthetic oligonucleotide
ccauuugacuuggaugacu

SEQ ID NO: 1572704 - RNA, 19 nt, Artificial Sequence
  Description of Artificial Sequence: Synthetic oligonucleotide
ccgaugcuuuguuaugacu

SEQ ID NO: 1572705 - RNA, 19 nt, Artificial Sequence
  Description of Artificial Sequence: Synthetic oligonucleotide
gugggccauucacugucau

SEQ ID NO: 1572706 - RNA, 19 nt, Artificial Sequence
  Description of Artificial Sequence: Synthetic oligonucleotide
ggagaggagccuccauauu

SEQ ID NO: 1572707 - RNA, 19 nt, Artificial Sequence
  Description of Artificial Sequence: Synthetic oligonucleotide
gggcccaguuuuaaacagu

SEQ ID NO: 1572708 - RNA, 19 nt, Artificial Sequence
  Description of Artificial Sequence: Synthetic oligonucleotide
agcgggccuuuacccucuu

SEQ ID NO: 1572709 - RNA, 19 nt, Artificial Sequence
  Description of Artificial Sequence: Synthetic oligonucleotide
ccauuaccauucauaccau

SEQ ID NO: 1572710 - RNA, 19 nt, Artificial Sequence
  Description of Artificial Sequence: Synthetic oligonucleotide
ggauuacaucugccccaua

SEQ ID NO: 1572711 - RNA, 19 nt, Artificial Sequence
  Description of Artificial Sequence: Synthetic oligonucleotide
cgggagaggagccuccaua

SEQ ID NO: 1572712 - RNA, 19 nt, Artificial Sequence
  Description of Artificial Sequence: Synthetic oligonucleotide
ccaagauacuuugcaccau

SEQ ID NO: 1572713 - RNA, 19 nt, Artificial Sequence
  Description of Artificial Sequence: Synthetic oligonucleotide
ccuggagcucaguacucuu

SEQ ID NO: 1572714 - RNA, 19 nt, Artificial Sequence
  Description of Artificial Sequence: Synthetic oligonucleotide
ccgggagaggagccuccau

SEQ ID NO: 1572715 - RNA, 19 nt, Artificial Sequence
  Description of Artificial Sequence: Synthetic oligonucleotide
aaaaucagcugauuuaggc

SEQ ID NO: 1572716 - RNA, 19 nt, Artificial Sequence
  Description of Artificial Sequence: Synthetic oligonucleotide
aaauauaauagguucugac

SEQ ID NO: 1572717 - RNA, 19 nt, Artificial Sequence
  Description of Artificial Sequence: Synthetic oligonucleotide
auauaauagguucugacac

SEQ ID NO: 1572718 - RNA, 19 nt, Artificial Sequence
  Description of Artificial Sequence: Synthetic oligonucleotide
aaagaauaugaggagaccc

SEQ ID NO: 1572719 - RNA, 19 nt, Artificial Sequence
  Description of Artificial Sequence: Synthetic oligonucleotide
aagagcaucuccccgaugc

SEQ ID NO: 1572720 - RNA, 19 nt, Artificial Sequence
  Description of Artificial Sequence: Synthetic oligonucleotide
ucaaaacucugaaagaggg

SEQ ID NO: 1572721 - RNA, 19 nt, Artificial Sequence
  Description of Artificial Sequence: Synthetic oligonucleotide
aacaaucccaucaagaaac

SEQ ID NO: 1572722 - RNA, 19 nt, Artificial Sequence
  Description of Artificial Sequence: Synthetic oligonucleotide
aauauaauagguucugaca

SEQ ID NO: 1572723 - RNA, 19 nt, Artificial Sequence
  Description of Artificial Sequence: Synthetic oligonucleotide
aaucagcugauuuaggcag

SEQ ID NO: 1572724 - RNA, 19 nt, Artificial Sequence
  Description of Artificial Sequence: Synthetic oligonucleotide
aaaguuuauccacaucgac

SEQ ID NO: 1572725 - RNA, 19 nt, Artificial Sequence
  Description of Artificial Sequence: Synthetic oligonucleotide
augaauuccgcacauuccc

SEQ ID NO: 1572726 - RNA, 19 nt, Artificial Sequence
  Description of Artificial Sequence: Synthetic oligonucleotide
uuuagugaguaacuguagg

SEQ ID NO: 1572727 - RNA, 19 nt, Artificial Sequence
  Description of Artificial Sequence: Synthetic oligonucleotide
ugaaucauuacuguguucc

SEQ ID NO: 1572728 - RNA, 19 nt, Artificial Sequence
  Description of Artificial Sequence: Synthetic oligonucleotide
gauuacuuugauuuucucc

SEQ ID NO: 1572729 - RNA, 19 nt, Artificial Sequence
  Description of Artificial Sequence: Synthetic oligonucleotide
uuagugaguaacuguaggg

SEQ ID NO: 1572730 - RNA, 19 nt, Artificial Sequence
  Description of Artificial Sequence: Synthetic oligonucleotide
uauaguaguuuauauuugc

SEQ ID NO: 1572731 - RNA, 19 nt, Artificial Sequence
  Description of Artificial Sequence: Synthetic oligonucleotide
uggaaucuuaaccaaaucu

SEQ ID NO: 1572732 - RNA, 19 nt, Artificial Sequence
  Description of Artificial Sequence: Synthetic oligonucleotide
ugaaagauuuuauaguagu

SEQ ID NO: 1572733 - RNA, 19 nt, Artificial Sequence
  Description of Artificial Sequence: Synthetic oligonucleotide
ugaacaacugguaggagug

SEQ ID NO: 1572734 - RNA, 19 nt, Artificial Sequence
  Description of Artificial Sequence: Synthetic oligonucleotide
aguaguuuauauuugcaca

SEQ ID NO: 1572735 - RNA, 19 nt, Artificial Sequence
  Description of Artificial Sequence: Synthetic oligonucleotide
uauaauagguucugacacg

SEQ ID NO: 1572736 - RNA, 19 nt, Artificial Sequence
  Description of Artificial Sequence: Synthetic oligonucleotide
cuucuuuugaucuaaugug

SEQ ID NO: 1572737 - RNA, 19 nt, Artificial Sequence
  Description of Artificial Sequence: Synthetic oligonucleotide
uucagugucaccaaacuaa

SEQ ID NO: 1572738 - RNA, 19 nt, Artificial Sequence
  Description of Artificial Sequence: Synthetic oligonucleotide
uaugguaggaccaaagaau

SEQ ID NO: 1572739 - RNA, 19 nt, Artificial Sequence
  Description of Artificial Sequence: Synthetic oligonucleotide
uuagggaguaauuaacuug

SEQ ID NO: 1572740 - RNA, 19 nt, Artificial Sequence
  Description of Artificial Sequence: Synthetic oligonucleotide
uguucuacaaaaucagcug

SEQ ID NO: 1572741 - RNA, 19 nt, Artificial Sequence
  Description of Artificial Sequence: Synthetic oligonucleotide
aguugaaagauuuuauagu

SEQ ID NO: 1572742 - RNA, 19 nt, Artificial Sequence
  Description of Artificial Sequence: Synthetic oligonucleotide
aaaucagcugauuuaggca

SEQ ID NO: 1572743 - RNA, 19 nt, Artificial Sequence
  Description of Artificial Sequence: Synthetic oligonucleotide
acaucgacuaguuuaaugu

SEQ ID NO: 1572744 - RNA, 19 nt, Artificial Sequence
  Description of Artificial Sequence: Synthetic oligonucleotide
gauuuaggcagauaagaac

SEQ ID NO: 1572745 - RNA, 19 nt, Artificial Sequence
  Description of Artificial Sequence: Synthetic oligonucleotide
cugccuaucagucacacag

SEQ ID NO: 1572746 - RNA, 19 nt, Artificial Sequence
  Description of Artificial Sequence: Synthetic oligonucleotide
uggacuggaaucuuaacca

SEQ ID NO: 1572747 - RNA, 19 nt, Artificial Sequence
  Description of Artificial Sequence: Synthetic oligonucleotide
agagaagacaugcuuagug

SEQ ID NO: 1572748 - RNA, 19 nt, Artificial Sequence
  Description of Artificial Sequence: Synthetic oligonucleotide
gacaugcuuagugugaucg

SEQ ID NO: 1572749 - RNA, 19 nt, Artificial Sequence
  Description of Artificial Sequence: Synthetic oligonucleotide
aaaucagcugccuaucagu

SEQ ID NO: 1572750 - RNA, 19 nt, Artificial Sequence
  Description of Artificial Sequence: Synthetic oligonucleotide
ugaucucugggucauagga

SEQ ID NO: 1572751 - RNA, 19 nt, Artificial Sequence
  Description of Artificial Sequence: Synthetic oligonucleotide
uagggaguaauuaacuugu

SEQ ID NO: 1572752 - RNA, 19 nt, Artificial Sequence
  Description of Artificial Sequence: Synthetic oligonucleotide
ucuaauguguguuguaacu

SEQ ID NO: 1572753 - RNA, 19 nt, Artificial Sequence
  Description of Artificial Sequence: Synthetic oligonucleotide
aacugcaagcuucaucguc

SEQ ID NO: 1572754 - RNA, 19 nt, Artificial Sequence
  Description of Artificial Sequence: Synthetic oligonucleotide
agugucaccaaacuaaaau

SEQ ID NO: 1572755 - RNA, 19 nt, Artificial Sequence
  Description of Artificial Sequence: Synthetic oligonucleotide
ugaaucuuuagugaguaac

SEQ ID NO: 1572756 - RNA, 19 nt, Artificial Sequence
  Description of Artificial Sequence: Synthetic oligonucleotide
guaauuaacuuguagacua

SEQ ID NO: 1572757 - RNA, 19 nt, Artificial Sequence
  Description of Artificial Sequence: Synthetic oligonucleotide
aguaacuguagggauuucc

SEQ ID NO: 1572758 - RNA, 19 nt, Artificial Sequence
  Description of Artificial Sequence: Synthetic oligonucleotide
aaaauguugagagguuguc

SEQ ID NO: 1572759 - RNA, 19 nt, Artificial Sequence
  Description of Artificial Sequence: Synthetic oligonucleotide
aacucugaaagagggacuc

SEQ ID NO: 1572760 - RNA, 19 nt, Artificial Sequence
  Description of Artificial Sequence: Synthetic oligonucleotide
auuaaaggaauacucuuaa

SEQ ID NO: 1572761 - RNA, 19 nt, Artificial Sequence
  Description of Artificial Sequence: Synthetic oligonucleotide
gauaagaacugacacuuga

SEQ ID NO: 1572762 - RNA, 19 nt, Artificial Sequence
  Description of Artificial Sequence: Synthetic oligonucleotide
uguaguugaaagauuuuau

SEQ ID NO: 1572763 - RNA, 19 nt, Artificial Sequence
  Description of Artificial Sequence: Synthetic oligonucleotide
ugcuaaugaacacaccugu

SEQ ID NO: 1572764 - RNA, 19 nt, Artificial Sequence
  Description of Artificial Sequence: Synthetic oligonucleotide
cucaaaacucugaaagagg

SEQ ID NO: 1572765 - RNA, 19 nt, Artificial Sequence
  Description of Artificial Sequence: Synthetic oligonucleotide
uuuguuuccaaaguaucca

SEQ ID NO: 1572766 - RNA, 19 nt, Artificial Sequence
  Description of Artificial Sequence: Synthetic oligonucleotide
acugacacuugaaagauag

SEQ ID NO: 1572767 - RNA, 19 nt, Artificial Sequence
  Description of Artificial Sequence: Synthetic oligonucleotide
caaguaggacauuugaaug

SEQ ID NO: 1572768 - RNA, 19 nt, Artificial Sequence
  Description of Artificial Sequence: Synthetic oligonucleotide
ucuaagagcccuucuaaac

SEQ ID NO: 1572769 - RNA, 19 nt, Artificial Sequence
  Description of Artificial Sequence: Synthetic oligonucleotide
acuugaaagauagucuuuc

SEQ ID NO: 1572770 - RNA, 19 nt, Artificial Sequence
  Description of Artificial Sequence: Synthetic oligonucleotide
aaauugggcacgugagguc

SEQ ID NO: 1572771 - RNA, 19 nt, Artificial Sequence
  Description of Artificial Sequence: Synthetic oligonucleotide
auuacuguguuccccaaca

SEQ ID NO: 1572772 - RNA, 19 nt, Artificial Sequence
  Description of Artificial Sequence: Synthetic oligonucleotide
uuugaucuaauguguguug

SEQ ID NO: 1572773 - RNA, 19 nt, Artificial Sequence
  Description of Artificial Sequence: Synthetic oligonucleotide
cuggacuggaaucuuaacc

SEQ ID NO: 1572774 - RNA, 19 nt, Artificial Sequence
  Description of Artificial Sequence: Synthetic oligonucleotide
ugauuuaggcagauaagaa

SEQ ID NO: 1572775 - RNA, 19 nt, Artificial Sequence
  Description of Artificial Sequence: Synthetic oligonucleotide
aauggagaccacuccagga

SEQ ID NO: 1572776 - RNA, 19 nt, Artificial Sequence
  Description of Artificial Sequence: Synthetic oligonucleotide
aaauuagaggguagcaaag

SEQ ID NO: 1572777 - RNA, 19 nt, Artificial Sequence
  Description of Artificial Sequence: Synthetic oligonucleotide
agacuauugacuccaguug

SEQ ID NO: 1572778 - RNA, 19 nt, Artificial Sequence
  Description of Artificial Sequence: Synthetic oligonucleotide
agcgggaaagagcaucucc

SEQ ID NO: 1572779 - RNA, 19 nt, Artificial Sequence
  Description of Artificial Sequence: Synthetic oligonucleotide
acaaauugggcacgugagg

SEQ ID NO: 1572780 - RNA, 19 nt, Artificial Sequence
  Description of Artificial Sequence: Synthetic oligonucleotide
aaaguauccaagcgggaaa

SEQ ID NO: 1572781 - RNA, 19 nt, Artificial Sequence
  Description of Artificial Sequence: Synthetic oligonucleotide
ugacacuugaaagauaguc

SEQ ID NO: 1572782 - RNA, 19 nt, Artificial Sequence
  Description of Artificial Sequence: Synthetic oligonucleotide
aaguuuauccacaucgacu

SEQ ID NO: 1572783 - RNA, 19 nt, Artificial Sequence
  Description of Artificial Sequence: Synthetic oligonucleotide
acuguguuccccaacaauc

SEQ ID NO: 1572784 - RNA, 19 nt, Artificial Sequence
  Description of Artificial Sequence: Synthetic oligonucleotide
uugcuaaugaacacaccug

SEQ ID NO: 1572785 - RNA, 19 nt, Artificial Sequence
  Description of Artificial Sequence: Synthetic oligonucleotide
uguucagugucaccaaacu

SEQ ID NO: 1572786 - RNA, 19 nt, Artificial Sequence
  Description of Artificial Sequence: Synthetic oligonucleotide
ggaguaauuaacuuguaga

SEQ ID NO: 1572787 - RNA, 19 nt, Artificial Sequence
  Description of Artificial Sequence: Synthetic oligonucleotide
gaaacacuggacuggaauc

SEQ ID NO: 1572788 - RNA, 19 nt, Artificial Sequence
  Description of Artificial Sequence: Synthetic oligonucleotide
uaguuuaaugucuucccac

SEQ ID NO: 1572789 - RNA, 19 nt, Artificial Sequence
  Description of Artificial Sequence: Synthetic oligonucleotide
ugugaucgccacaaguagc

SEQ ID NO: 1572790 - RNA, 19 nt, Artificial Sequence
  Description of Artificial Sequence: Synthetic oligonucleotide
uagacuauugacuccaguu

SEQ ID NO: 1572791 - RNA, 19 nt, Artificial Sequence
  Description of Artificial Sequence: Synthetic oligonucleotide
gaccaaagaauaugaggag

SEQ ID NO: 1572792 - RNA, 19 nt, Artificial Sequence
  Description of Artificial Sequence: Synthetic oligonucleotide
ugagagguugucccaagug

SEQ ID NO: 1572793 - RNA, 19 nt, Artificial Sequence
  Description of Artificial Sequence: Synthetic oligonucleotide
aauuccgcacauuccccuc

SEQ ID NO: 1572794 - RNA, 19 nt, Artificial Sequence
  Description of Artificial Sequence: Synthetic oligonucleotide
ucggggaucaucaaacaaa

SEQ ID NO: 1572795 - RNA, 19 nt, Artificial Sequence
  Description of Artificial Sequence: Synthetic oligonucleotide
agcagggcaaaacucgggg

SEQ ID NO: 1572796 - RNA, 19 nt, Artificial Sequence
  Description of Artificial Sequence: Synthetic oligonucleotide
uuccuuacggcaaguagga

SEQ ID NO: 1572797 - RNA, 19 nt, Artificial Sequence
  Description of Artificial Sequence: Synthetic oligonucleotide
uuugaauggagauggucuc

SEQ ID NO: 1572798 - RNA, 19 nt, Artificial Sequence
  Description of Artificial Sequence: Synthetic oligonucleotide
cuugaaagauagucuuucc

SEQ ID NO: 1572799 - RNA, 19 nt, Artificial Sequence
  Description of Artificial Sequence: Synthetic oligonucleotide
gaaucuugcuaaugaacac

SEQ ID NO: 1572800 - RNA, 19 nt, Artificial Sequence
  Description of Artificial Sequence: Synthetic oligonucleotide
aaacagacuguucuacaaa

SEQ ID NO: 1572801 - RNA, 19 nt, Artificial Sequence
  Description of Artificial Sequence: Synthetic oligonucleotide
gaugccaagucucaaaacu

SEQ ID NO: 1572802 - RNA, 19 nt, Artificial Sequence
  Description of Artificial Sequence: Synthetic oligonucleotide
aaguauccaagcgggaaag

SEQ ID NO: 1572803 - RNA, 19 nt, Artificial Sequence
  Description of Artificial Sequence: Synthetic oligonucleotide
agggacucaaaaggcaucc

SEQ ID NO: 1572804 - RNA, 19 nt, Artificial Sequence
  Description of Artificial Sequence: Synthetic oligonucleotide
uuuagggaguaauuaacuu

SEQ ID NO: 1572805 - RNA, 19 nt, Artificial Sequence
  Description of Artificial Sequence: Synthetic oligonucleotide
aaucccaucaagaaacaaa

SEQ ID NO: 1572806 - RNA, 19 nt, Artificial Sequence
  Description of Artificial Sequence: Synthetic oligonucleotide
uugcacacuggucauuuug

SEQ ID NO: 1572807 - RNA, 19 nt, Artificial Sequence
  Description of Artificial Sequence: Synthetic oligonucleotide
ugaauuccgcacauucccc

SEQ ID NO: 1572808 - RNA, 19 nt, Artificial Sequence
  Description of Artificial Sequence: Synthetic oligonucleotide
ggaaucuuaaccaaaucug

SEQ ID NO: 1572809 - RNA, 19 nt, Artificial Sequence
  Description of Artificial Sequence: Synthetic oligonucleotide
aagaauaugaggagaccca

SEQ ID NO: 1572810 - RNA, 19 nt, Artificial Sequence
  Description of Artificial Sequence: Synthetic oligonucleotide
uguuaaaggccauccgcug

SEQ ID NO: 1572811 - RNA, 19 nt, Artificial Sequence
  Description of Artificial Sequence: Synthetic oligonucleotide
gaaucuuaaccaaaucuga

SEQ ID NO: 1572812 - RNA, 19 nt, Artificial Sequence
  Description of Artificial Sequence: Synthetic oligonucleotide
aucuuaaccaaaucugaau

SEQ ID NO: 1572813 - RNA, 19 nt, Artificial Sequence
  Description of Artificial Sequence: Synthetic oligonucleotide
aguuuauauuugcacacaa

SEQ ID NO: 1572814 - RNA, 19 nt, Artificial Sequence
  Description of Artificial Sequence: Synthetic oligonucleotide
acaugcuuagugugaucgc

SEQ ID NO: 1572815 - RNA, 19 nt, Artificial Sequence
  Description of Artificial Sequence: Synthetic oligonucleotide
acacuugaaagauagucuu

SEQ ID NO: 1572816 - RNA, 19 nt, Artificial Sequence
  Description of Artificial Sequence: Synthetic oligonucleotide
aauugggcacgugaggucu

SEQ ID NO: 1572817 - RNA, 19 nt, Artificial Sequence
  Description of Artificial Sequence: Synthetic oligonucleotide
aggacauuugaauggagau

SEQ ID NO: 1572818 - RNA, 19 nt, Artificial Sequence
  Description of Artificial Sequence: Synthetic oligonucleotide
uagugaguaacuguaggga

SEQ ID NO: 1572819 - RNA, 19 nt, Artificial Sequence
  Description of Artificial Sequence: Synthetic oligonucleotide
caaaaucagcugauuuagg

SEQ ID NO: 1572820 - RNA, 19 nt, Artificial Sequence
  Description of Artificial Sequence: Synthetic oligonucleotide
caaaacucggggaucauca

SEQ ID NO: 1572821 - RNA, 19 nt, Artificial Sequence
  Description of Artificial Sequence: Synthetic oligonucleotide
uccacaucgacuaguuuaa

SEQ ID NO: 1572822 - RNA, 19 nt, Artificial Sequence
  Description of Artificial Sequence: Synthetic oligonucleotide
uaggcagauaagaacugac

SEQ ID NO: 1572823 - RNA, 19 nt, Artificial Sequence
  Description of Artificial Sequence: Synthetic oligonucleotide
caaauuagaggguagcaaa

SEQ ID NO: 1572824 - RNA, 19 nt, Artificial Sequence
  Description of Artificial Sequence: Synthetic oligonucleotide
aaacugcaacaaauugggc

SEQ ID NO: 1572825 - RNA, 19 nt, Artificial Sequence
  Description of Artificial Sequence: Synthetic oligonucleotide
guuaaaggccauccgcugc

SEQ ID NO: 1572826 - RNA, 19 nt, Artificial Sequence
  Description of Artificial Sequence: Synthetic oligonucleotide
auaauagguucugacacgu

SEQ ID NO: 1572827 - RNA, 19 nt, Artificial Sequence
  Description of Artificial Sequence: Synthetic oligonucleotide
agacuguucuacaaaauca

SEQ ID NO: 1572828 - RNA, 19 nt, Artificial Sequence
  Description of Artificial Sequence: Synthetic oligonucleotide
ggaccaaagaauaugagga

SEQ ID NO: 1572829 - RNA, 19 nt, Artificial Sequence
  Description of Artificial Sequence: Synthetic oligonucleotide
agaauaugaggagacccag

SEQ ID NO: 1572830 - RNA, 19 nt, Artificial Sequence
  Description of Artificial Sequence: Synthetic oligonucleotide
aaucuuaaccaaaucugaa

SEQ ID NO: 1572831 - RNA, 19 nt, Artificial Sequence
  Description of Artificial Sequence: Synthetic oligonucleotide
gugaucgccacaaguagcg

SEQ ID NO: 1572832 - RNA, 19 nt, Artificial Sequence
  Description of Artificial Sequence: Synthetic oligonucleotide
uugcugaaguuuccuuacg

SEQ ID NO: 1572833 - RNA, 19 nt, Artificial Sequence
  Description of Artificial Sequence: Synthetic oligonucleotide
ggcagauaagaacugacac

SEQ ID NO: 1572834 - RNA, 19 nt, Artificial Sequence
  Description of Artificial Sequence: Synthetic oligonucleotide
caaaucagcugccuaucag

SEQ ID NO: 1572835 - RNA, 19 nt, Artificial Sequence
  Description of Artificial Sequence: Synthetic oligonucleotide
agagcaucuccccgaugcc

SEQ ID NO: 1572836 - RNA, 19 nt, Artificial Sequence
  Description of Artificial Sequence: Synthetic oligonucleotide
ugggcaaauuagaggguag

SEQ ID NO: 1572837 - RNA, 19 nt, Artificial Sequence
  Description of Artificial Sequence: Synthetic oligonucleotide
aaaucuugauuuuguuaua

SEQ ID NO: 1572838 - RNA, 19 nt, Artificial Sequence
  Description of Artificial Sequence: Synthetic oligonucleotide
caugcuuagugugaucgcc

SEQ ID NO: 1572839 - RNA, 19 nt, Artificial Sequence
  Description of Artificial Sequence: Synthetic oligonucleotide
gauugcauaacugcaagcu

SEQ ID NO: 1572840 - RNA, 19 nt, Artificial Sequence
  Description of Artificial Sequence: Synthetic oligonucleotide
cacaucgacuaguuuaaug

SEQ ID NO: 1572841 - RNA, 19 nt, Artificial Sequence
  Description of Artificial Sequence: Synthetic oligonucleotide
gugugaucgccacaaguag

SEQ ID NO: 1572842 - RNA, 19 nt, Artificial Sequence
  Description of Artificial Sequence: Synthetic oligonucleotide
uaauuaacuuguagacuau

SEQ ID NO: 1572843 - RNA, 19 nt, Artificial Sequence
  Description of Artificial Sequence: Synthetic oligonucleotide
cugaaguuuccuuacggca

SEQ ID NO: 1572844 - RNA, 19 nt, Artificial Sequence
  Description of Artificial Sequence: Synthetic oligonucleotide
guaguugaaagauuuuaua

SEQ ID NO: 1572845 - RNA, 19 nt, Artificial Sequence
  Description of Artificial Sequence: Synthetic oligonucleotide
uugaucuaauguguguugu

SEQ ID NO: 1572846 - RNA, 19 nt, Artificial Sequence
  Description of Artificial Sequence: Synthetic oligonucleotide
ccaggaauaugguaggacc

SEQ ID NO: 1572847 - RNA, 19 nt, Artificial Sequence
  Description of Artificial Sequence: Synthetic oligonucleotide
auugacuccaguugcugaa

SEQ ID NO: 1572848 - RNA, 19 nt, Artificial Sequence
  Description of Artificial Sequence: Synthetic oligonucleotide
caaagaauaugaggagacc

SEQ ID NO: 1572849 - RNA, 19 nt, Artificial Sequence
  Description of Artificial Sequence: Synthetic oligonucleotide
cugagcauaggcaucuuca

SEQ ID NO: 1572850 - RNA, 19 nt, Artificial Sequence
  Description of Artificial Sequence: Synthetic oligonucleotide
ucgacuaguuuaaugucuu

SEQ ID NO: 1572851 - RNA, 19 nt, Artificial Sequence
  Description of Artificial Sequence: Synthetic oligonucleotide
uuacuuuaucugaaucuuu

SEQ ID NO: 1572852 - RNA, 19 nt, Artificial Sequence
  Description of Artificial Sequence: Synthetic oligonucleotide
ugucccaaguguccuuugc

SEQ ID NO: 1572853 - RNA, 19 nt, Artificial Sequence
  Description of Artificial Sequence: Synthetic oligonucleotide
gaggcaaagaaaguuuauc

SEQ ID NO: 1572854 - RNA, 19 nt, Artificial Sequence
  Description of Artificial Sequence: Synthetic oligonucleotide
uguagacuauugacuccag

SEQ ID NO: 1572855 - RNA, 19 nt, Artificial Sequence
  Description of Artificial Sequence: Synthetic oligonucleotide
uaguuuauauuugcacaca

SEQ ID NO: 1572856 - RNA, 19 nt, Artificial Sequence
  Description of Artificial Sequence: Synthetic oligonucleotide
uagcgcacaucccacaaau

SEQ ID NO: 1572857 - RNA, 19 nt, Artificial Sequence
  Description of Artificial Sequence: Synthetic oligonucleotide
gcacauuccccucuaagag

SEQ ID NO: 1572858 - RNA, 19 nt, Artificial Sequence
  Description of Artificial Sequence: Synthetic oligonucleotide
ggaaucuugcuaaugaaca

SEQ ID NO: 1572859 - RNA, 19 nt, Artificial Sequence
  Description of Artificial Sequence: Synthetic oligonucleotide
ugagcauaggcaucuucaa

SEQ ID NO: 1572860 - RNA, 19 nt, Artificial Sequence
  Description of Artificial Sequence: Synthetic oligonucleotide
auccaagcgggaaagagca

SEQ ID NO: 1572861 - RNA, 19 nt, Artificial Sequence
  Description of Artificial Sequence: Synthetic oligonucleotide
agcaaaggaguuuccuuga

SEQ ID NO: 1572862 - RNA, 19 nt, Artificial Sequence
  Description of Artificial Sequence: Synthetic oligonucleotide
auaguaguuuauauuugca

SEQ ID NO: 1572863 - RNA, 19 nt, Artificial Sequence
  Description of Artificial Sequence: Synthetic oligonucleotide
caucgacuaguuuaauguc

SEQ ID NO: 1572864 - RNA, 19 nt, Artificial Sequence
  Description of Artificial Sequence: Synthetic oligonucleotide
ccacaaguagcgcacaucc

SEQ ID NO: 1572865 - RNA, 19 nt, Artificial Sequence
  Description of Artificial Sequence: Synthetic oligonucleotide
auugcauaacugcaagcuu

SEQ ID NO: 1572866 - RNA, 19 nt, Artificial Sequence
  Description of Artificial Sequence: Synthetic oligonucleotide
uuagugugaucgccacaag

SEQ ID NO: 1572867 - RNA, 19 nt, Artificial Sequence
  Description of Artificial Sequence: Synthetic oligonucleotide
aucgucucaaagucugaca

SEQ ID NO: 1572868 - RNA, 19 nt, Artificial Sequence
  Description of Artificial Sequence: Synthetic oligonucleotide
cauuugaauggagaugguc

SEQ ID NO: 1572869 - RNA, 19 nt, Artificial Sequence
  Description of Artificial Sequence: Synthetic oligonucleotide
uguuccccaacaaucccau

SEQ ID NO: 1572870 - RNA, 19 nt, Artificial Sequence
  Description of Artificial Sequence: Synthetic oligonucleotide
gaucgccacaaguagcgca

SEQ ID NO: 1572871 - RNA, 19 nt, Artificial Sequence
  Description of Artificial Sequence: Synthetic oligonucleotide
aucgccacaaguagcgcac

SEQ ID NO: 1572872 - RNA, 19 nt, Artificial Sequence
  Description of Artificial Sequence: Synthetic oligonucleotide
caaguagcgcacaucccac

SEQ ID NO: 1572873 - RNA, 19 nt, Artificial Sequence
  Description of Artificial Sequence: Synthetic oligonucleotide
agugccagggaaucuugcu

SEQ ID NO: 1572874 - RNA, 19 nt, Artificial Sequence
  Description of Artificial Sequence: Synthetic oligonucleotide
cuaaugaacacaccugugu

SEQ ID NO: 1572875 - RNA, 19 nt, Artificial Sequence
  Description of Artificial Sequence: Synthetic oligonucleotide
acgucuuuaaaagccucag

SEQ ID NO: 1572876 - RNA, 19 nt, Artificial Sequence
  Description of Artificial Sequence: Synthetic oligonucleotide
gacacuugaaagauagucu

SEQ ID NO: 1572877 - RNA, 19 nt, Artificial Sequence
  Description of Artificial Sequence: Synthetic oligonucleotide
cagggaaucuugcuaauga

SEQ ID NO: 1572878 - RNA, 19 nt, Artificial Sequence
  Description of Artificial Sequence: Synthetic oligonucleotide
ugauuacuuugauuuucuc

SEQ ID NO: 1572879 - RNA, 19 nt, Artificial Sequence
  Description of Artificial Sequence: Synthetic oligonucleotide
cuacaaugcccuuuaggga

SEQ ID NO: 1572880 - RNA, 19 nt, Artificial Sequence
  Description of Artificial Sequence: Synthetic oligonucleotide
cuuagugugaucgccacaa

SEQ ID NO: 1572881 - RNA, 19 nt, Artificial Sequence
  Description of Artificial Sequence: Synthetic oligonucleotide
uugagagguugucccaagu

SEQ ID NO: 1572882 - RNA, 19 nt, Artificial Sequence
  Description of Artificial Sequence: Synthetic oligonucleotide
ugugggcaaauuagagggu

SEQ ID NO: 1572883 - RNA, 19 nt, Artificial Sequence
  Description of Artificial Sequence: Synthetic oligonucleotide
ccuuuagggaguaauuaac

SEQ ID NO: 1572884 - RNA, 19 nt, Artificial Sequence
  Description of Artificial Sequence: Synthetic oligonucleotide
caggaauaugguaggacca

SEQ ID NO: 1572885 - RNA, 19 nt, Artificial Sequence
  Description of Artificial Sequence: Synthetic oligonucleotide
cuuuagggaguaauuaacu

SEQ ID NO: 1572886 - RNA, 19 nt, Artificial Sequence
  Description of Artificial Sequence: Synthetic oligonucleotide
gcugaaguuuccuuacggc

SEQ ID NO: 1572887 - RNA, 19 nt, Artificial Sequence
  Description of Artificial Sequence: Synthetic oligonucleotide
ugaucuaauguguguugua

SEQ ID NO: 1572888 - RNA, 19 nt, Artificial Sequence
  Description of Artificial Sequence: Synthetic oligonucleotide
uccccaacaaucccaucaa

SEQ ID NO: 1572889 - RNA, 19 nt, Artificial Sequence
  Description of Artificial Sequence: Synthetic oligonucleotide
agugugaucgccacaagua

SEQ ID NO: 1572890 - RNA, 19 nt, Artificial Sequence
  Description of Artificial Sequence: Synthetic oligonucleotide
aaaacccaucugucaucug

SEQ ID NO: 1572891 - RNA, 19 nt, Artificial Sequence
  Description of Artificial Sequence: Synthetic oligonucleotide
agggaaucuugcuaaugaa

SEQ ID NO: 1572892 - RNA, 19 nt, Artificial Sequence
  Description of Artificial Sequence: Synthetic oligonucleotide
aucuccccgaugccaaguc

SEQ ID NO: 1572893 - RNA, 19 nt, Artificial Sequence
  Description of Artificial Sequence: Synthetic oligonucleotide
guugagagguugucccaag

SEQ ID NO: 1572894 - RNA, 19 nt, Artificial Sequence
  Description of Artificial Sequence: Synthetic oligonucleotide
uuacuguguuccccaacaa

SEQ ID NO: 1572895 - RNA, 19 nt, Artificial Sequence
  Description of Artificial Sequence: Synthetic oligonucleotide
cacaaguagcgcacauccc

SEQ ID NO: 1572896 - RNA, 19 nt, Artificial Sequence
  Description of Artificial Sequence: Synthetic oligonucleotide
cacacagaaaauguugaga

SEQ ID NO: 1572897 - RNA, 19 nt, Artificial Sequence
  Description of Artificial Sequence: Synthetic oligonucleotide
ugccuaucagucacacaga

SEQ ID NO: 1572898 - RNA, 19 nt, Artificial Sequence
  Description of Artificial Sequence: Synthetic oligonucleotide
aguagcgcacaucccacaa

SEQ ID NO: 1572899 - RNA, 19 nt, Artificial Sequence
  Description of Artificial Sequence: Synthetic oligonucleotide
uguugagagguugucccaa

SEQ ID NO: 1572900 - RNA, 19 nt, Artificial Sequence
  Description of Artificial Sequence: Synthetic oligonucleotide
ugguaucaaaguucuucau

SEQ ID NO: 1572901 - RNA, 19 nt, Artificial Sequence
  Description of Artificial Sequence: Synthetic oligonucleotide
agggcuugugggcaaauua

SEQ ID NO: 1572902 - RNA, 19 nt, Artificial Sequence
  Description of Artificial Sequence: Synthetic oligonucleotide
aguugugugagcagggcaa

SEQ ID NO: 1572903 - RNA, 19 nt, Artificial Sequence
  Description of Artificial Sequence: Synthetic oligonucleotide
uagucuuuccaagcugcca

SEQ ID NO: 1572904 - RNA, 19 nt, Artificial Sequence
  Description of Artificial Sequence: Synthetic oligonucleotide
ggauugcauaacugcaagc

SEQ ID NO: 1572905 - RNA, 19 nt, Artificial Sequence
  Description of Artificial Sequence: Synthetic oligonucleotide
cuuacggcaaguaggacau

SEQ ID NO: 1572906 - RNA, 19 nt, Artificial Sequence
  Description of Artificial Sequence: Synthetic oligonucleotide
ugucaucuguucccagaaa

SEQ ID NO: 1572907 - RNA, 19 nt, Artificial Sequence
  Description of Artificial Sequence: Synthetic oligonucleotide
agcugccuaucagucacac

SEQ ID NO: 1572908 - RNA, 19 nt, Artificial Sequence
  Description of Artificial Sequence: Synthetic oligonucleotide
cauuacuguguuccccaac

SEQ ID NO: 1572909 - RNA, 19 nt, Artificial Sequence
  Description of Artificial Sequence: Synthetic oligonucleotide
augguaggaccaaagaaua

SEQ ID NO: 1572910 - RNA, 19 nt, Artificial Sequence
  Description of Artificial Sequence: Synthetic oligonucleotide
caucgucucaaagucugac

SEQ ID NO: 1572911 - RNA, 19 nt, Artificial Sequence
  Description of Artificial Sequence: Synthetic oligonucleotide
ggugcuuuuggcaagguua

SEQ ID NO: 1572912 - RNA, 19 nt, Artificial Sequence
  Description of Artificial Sequence: Synthetic oligonucleotide
ggacauuugaauggagaug

SEQ ID NO: 1572913 - RNA, 19 nt, Artificial Sequence
  Description of Artificial Sequence: Synthetic oligonucleotide
uacggcaaguaggacauuu

SEQ ID NO: 1572914 - RNA, 19 nt, Artificial Sequence
  Description of Artificial Sequence: Synthetic oligonucleotide
gaacaacugguaggagugc

SEQ ID NO: 1572915 - RNA, 19 nt, Artificial Sequence
  Description of Artificial Sequence: Synthetic oligonucleotide
ugggagaaaucuugauuuu

SEQ ID NO: 1572916 - RNA, 19 nt, Artificial Sequence
  Description of Artificial Sequence: Synthetic oligonucleotide
gcaagcaggugcuuuuggc

SEQ ID NO: 1572917 - RNA, 19 nt, Artificial Sequence
  Description of Artificial Sequence: Synthetic oligonucleotide
gcugauuuaggcagauaag

SEQ ID NO: 1572918 - RNA, 19 nt, Artificial Sequence
  Description of Artificial Sequence: Synthetic oligonucleotide
gggaaucuugcuaaugaac

SEQ ID NO: 1572919 - RNA, 19 nt, Artificial Sequence
  Description of Artificial Sequence: Synthetic oligonucleotide
cacgucuuuaaaagccuca

SEQ ID NO: 1572920 - RNA, 19 nt, Artificial Sequence
  Description of Artificial Sequence: Synthetic oligonucleotide
aagcgggaaagagcaucuc

SEQ ID NO: 1572921 - RNA, 19 nt, Artificial Sequence
  Description of Artificial Sequence: Synthetic oligonucleotide
gaauuccgcacauuccccu

SEQ ID NO: 1572922 - RNA, 19 nt, Artificial Sequence
  Description of Artificial Sequence: Synthetic oligonucleotide
cagcagaacugccaccaug

SEQ ID NO: 1572923 - RNA, 19 nt, Artificial Sequence
  Description of Artificial Sequence: Synthetic oligonucleotide
gcaaguaggacauuugaau

SEQ ID NO: 1572924 - RNA, 19 nt, Artificial Sequence
  Description of Artificial Sequence: Synthetic oligonucleotide
uaacugcaagcuucaucgu

SEQ ID NO: 1572925 - RNA, 19 nt, Artificial Sequence
  Description of Artificial Sequence: Synthetic oligonucleotide
aggaauaugguaggaccaa

SEQ ID NO: 1572926 - RNA, 19 nt, Artificial Sequence
  Description of Artificial Sequence: Synthetic oligonucleotide
guucagugucaccaaacua

SEQ ID NO: 1572927 - RNA, 19 nt, Artificial Sequence
  Description of Artificial Sequence: Synthetic oligonucleotide
cugcaacaaauugggcacg

SEQ ID NO: 1572928 - RNA, 19 nt, Artificial Sequence
  Description of Artificial Sequence: Synthetic oligonucleotide
uccgcugcuccuguaaaau

SEQ ID NO: 1572929 - RNA, 19 nt, Artificial Sequence
  Description of Artificial Sequence: Synthetic oligonucleotide
guguucagugucaccaaac

SEQ ID NO: 1572930 - RNA, 19 nt, Artificial Sequence
  Description of Artificial Sequence: Synthetic oligonucleotide
uggagauggucuccacaau

SEQ ID NO: 1572931 - RNA, 19 nt, Artificial Sequence
  Description of Artificial Sequence: Synthetic oligonucleotide
ccuuacggcaaguaggaca

SEQ ID NO: 1572932 - RNA, 19 nt, Artificial Sequence
  Description of Artificial Sequence: Synthetic oligonucleotide
caugaacaacugguaggag

SEQ ID NO: 1572933 - RNA, 19 nt, Artificial Sequence
  Description of Artificial Sequence: Synthetic oligonucleotide
cucuaagagcccuucuaaa

SEQ ID NO: 1572934 - RNA, 19 nt, Artificial Sequence
  Description of Artificial Sequence: Synthetic oligonucleotide
guaggagugccagggaauc

SEQ ID NO: 1572935 - RNA, 19 nt, Artificial Sequence
  Description of Artificial Sequence: Synthetic oligonucleotide
aacacuggacuggaaucuu

SEQ ID NO: 1572936 - RNA, 19 nt, Artificial Sequence
  Description of Artificial Sequence: Synthetic oligonucleotide
caaauugggcacgugaggu

SEQ ID NO: 1572937 - RNA, 19 nt, Artificial Sequence
  Description of Artificial Sequence: Synthetic oligonucleotide
gugucuugaggcaaagaaa

SEQ ID NO: 1572938 - RNA, 19 nt, Artificial Sequence
  Description of Artificial Sequence: Synthetic oligonucleotide
gucccaaguguccuuugca

SEQ ID NO: 1572939 - RNA, 19 nt, Artificial Sequence
  Description of Artificial Sequence: Synthetic oligonucleotide
gcagaaguugugugagcag

SEQ ID NO: 1572940 - RNA, 19 nt, Artificial Sequence
  Description of Artificial Sequence: Synthetic oligonucleotide
gcagauaagaacugacacu

SEQ ID NO: 1572941 - RNA, 19 nt, Artificial Sequence
  Description of Artificial Sequence: Synthetic oligonucleotide
ugaucgccacaaguagcgc

SEQ ID NO: 1572942 - RNA, 19 nt, Artificial Sequence
  Description of Artificial Sequence: Synthetic oligonucleotide
cgcugcuccuguaaaauag

SEQ ID NO: 1572943 - RNA, 19 nt, Artificial Sequence
  Description of Artificial Sequence: Synthetic oligonucleotide
cuguagggauuuccuuuug

SEQ ID NO: 1572944 - RNA, 19 nt, Artificial Sequence
  Description of Artificial Sequence: Synthetic oligonucleotide
gagugccagggaaucuugc

SEQ ID NO: 1572945 - RNA, 19 nt, Artificial Sequence
  Description of Artificial Sequence: Synthetic oligonucleotide
gcuaaugaacacaccugug

SEQ ID NO: 1572946 - RNA, 19 nt, Artificial Sequence
  Description of Artificial Sequence: Synthetic oligonucleotide
acagacuguucuacaaaau

SEQ ID NO: 1572947 - RNA, 19 nt, Artificial Sequence
  Description of Artificial Sequence: Synthetic oligonucleotide
acaacugguaggagugcca

SEQ ID NO: 1572948 - RNA, 19 nt, Artificial Sequence
  Description of Artificial Sequence: Synthetic oligonucleotide
agagcccuucuaaacauuu

SEQ ID NO: 1572949 - RNA, 19 nt, Artificial Sequence
  Description of Artificial Sequence: Synthetic oligonucleotide
augcccuuuagggaguaau

SEQ ID NO: 1572950 - RNA, 19 nt, Artificial Sequence
  Description of Artificial Sequence: Synthetic oligonucleotide
aguauccaagcgggaaaga

SEQ ID NO: 1572951 - RNA, 19 nt, Artificial Sequence
  Description of Artificial Sequence: Synthetic oligonucleotide
gguaucaaaguucuucauu

SEQ ID NO: 1572952 - RNA, 19 nt, Artificial Sequence
  Description of Artificial Sequence: Synthetic oligonucleotide
gggcaaauuagaggguagc

SEQ ID NO: 1572953 - RNA, 19 nt, Artificial Sequence
  Description of Artificial Sequence: Synthetic oligonucleotide
guguuccccaacaauccca

SEQ ID NO: 1572954 - RNA, 19 nt, Artificial Sequence
  Description of Artificial Sequence: Synthetic oligonucleotide
cucugaaagagggacucaa

SEQ ID NO: 1572955 - RNA, 19 nt, Artificial Sequence
  Description of Artificial Sequence: Synthetic oligonucleotide
gaaagagcaucuccccgau

SEQ ID NO: 1572956 - RNA, 19 nt, Artificial Sequence
  Description of Artificial Sequence: Synthetic oligonucleotide
acggcaaguaggacauuug

SEQ ID NO: 1572957 - RNA, 19 nt, Artificial Sequence
  Description of Artificial Sequence: Synthetic oligonucleotide
agcgcacaucccacaaauc

SEQ ID NO: 1572958 - RNA, 19 nt, Artificial Sequence
  Description of Artificial Sequence: Synthetic oligonucleotide
aggugcuuuuggcaagguu

SEQ ID NO: 1572959 - RNA, 19 nt, Artificial Sequence
  Description of Artificial Sequence: Synthetic oligonucleotide
auccgcugcuccuguaaaa

SEQ ID NO: 1572960 - RNA, 19 nt, Artificial Sequence
  Description of Artificial Sequence: Synthetic oligonucleotide
aggagugccagggaaucuu

SEQ ID NO: 1572961 - RNA, 19 nt, Artificial Sequence
  Description of Artificial Sequence: Synthetic oligonucleotide
caagcgggaaagagcaucu

SEQ ID NO: 1572962 - RNA, 19 nt, Artificial Sequence
  Description of Artificial Sequence: Synthetic oligonucleotide
ggucauuuugggagaaauc

SEQ ID NO: 1572963 - RNA, 19 nt, Artificial Sequence
  Description of Artificial Sequence: Synthetic oligonucleotide
aaagggcuugugggcaaau

SEQ ID NO: 1572964 - RNA, 19 nt, Artificial Sequence
  Description of Artificial Sequence: Synthetic oligonucleotide
aucagcugauuuaggcaga

SEQ ID NO: 1572965 - RNA, 19 nt, Artificial Sequence
  Description of Artificial Sequence: Synthetic oligonucleotide
aagagcccuucuaaacauu

SEQ ID NO: 1572966 - RNA, 19 nt, Artificial Sequence
  Description of Artificial Sequence: Synthetic oligonucleotide
gugggcaaauuagagggua

SEQ ID NO: 1572967 - RNA, 19 nt, Artificial Sequence
  Description of Artificial Sequence: Synthetic oligonucleotide
ccuuuccugagcauaggca

SEQ ID NO: 1572968 - RNA, 19 nt, Artificial Sequence
  Description of Artificial Sequence: Synthetic oligonucleotide
ugcuuuuggcaagguuacu

SEQ ID NO: 1572969 - RNA, 19 nt, Artificial Sequence
  Description of Artificial Sequence: Synthetic oligonucleotide
uccaagcgggaaagagcau

SEQ ID NO: 1572970 - RNA, 19 nt, Artificial Sequence
  Description of Artificial Sequence: Synthetic oligonucleotide
acaaaacuguguaguugaa

SEQ ID NO: 1572971 - RNA, 19 nt, Artificial Sequence
  Description of Artificial Sequence: Synthetic oligonucleotide
cgucucaaagucugacagg

SEQ ID NO: 1572972 - RNA, 19 nt, Artificial Sequence
  Description of Artificial Sequence: Synthetic oligonucleotide
gaucucugggucauaggau

SEQ ID NO: 1572973 - RNA, 19 nt, Artificial Sequence
  Description of Artificial Sequence: Synthetic oligonucleotide
caucugucaucuguuccca

SEQ ID NO: 1572974 - RNA, 19 nt, Artificial Sequence
  Description of Artificial Sequence: Synthetic oligonucleotide
ggcaaguaggacauuugaa

SEQ ID NO: 1572975 - RNA, 19 nt, Artificial Sequence
  Description of Artificial Sequence: Synthetic oligonucleotide
uccuuacggcaaguaggac

SEQ ID NO: 1572976 - RNA, 19 nt, Artificial Sequence
  Description of Artificial Sequence: Synthetic oligonucleotide
cuaauguguguuguaacuu

SEQ ID NO: 1572977 - RNA, 19 nt, Artificial Sequence
  Description of Artificial Sequence: Synthetic oligonucleotide
guagcgcacaucccacaaa

SEQ ID NO: 1572978 - RNA, 19 nt, Artificial Sequence
  Description of Artificial Sequence: Synthetic oligonucleotide
gcuuuuggcaagguuacua

SEQ ID NO: 1572979 - RNA, 19 nt, Artificial Sequence
  Description of Artificial Sequence: Synthetic oligonucleotide
ccaagcgggaaagagcauc

SEQ ID NO: 1572980 - RNA, 19 nt, Artificial Sequence
  Description of Artificial Sequence: Synthetic oligonucleotide
aaugcccuuuagggaguaa

SEQ ID NO: 1572981 - RNA, 19 nt, Artificial Sequence
  Description of Artificial Sequence: Synthetic oligonucleotide
ugggcacgugaggucuucc

SEQ ID NO: 1572982 - RNA, 19 nt, Artificial Sequence
  Description of Artificial Sequence: Synthetic oligonucleotide
cagugucaccaaacuaaaa

SEQ ID NO: 1572983 - RNA, 19 nt, Artificial Sequence
  Description of Artificial Sequence: Synthetic oligonucleotide
ggcuugugggcaaauuaga

SEQ ID NO: 1572984 - RNA, 19 nt, Artificial Sequence
  Description of Artificial Sequence: Synthetic oligonucleotide
guugugugagcagggcaaa

SEQ ID NO: 1572985 - RNA, 19 nt, Artificial Sequence
  Description of Artificial Sequence: Synthetic oligonucleotide
gcaaaacucggggaucauc

SEQ ID NO: 1572986 - RNA, 19 nt, Artificial Sequence
  Description of Artificial Sequence: Synthetic oligonucleotide
cacgugaggucuuccucaa

SEQ ID NO: 1572987 - RNA, 19 nt, Artificial Sequence
  Description of Artificial Sequence: Synthetic oligonucleotide
ccucuaagagcccuucuaa

SEQ ID NO: 1572988 - RNA, 19 nt, Artificial Sequence
  Description of Artificial Sequence: Synthetic oligonucleotide
ccgcacauuccccucuaag

SEQ ID NO: 1572989 - RNA, 19 nt, Artificial Sequence
  Description of Artificial Sequence: Synthetic oligonucleotide
gggcaaaacucggggauca

SEQ ID NO: 1572990 - RNA, 19 nt, Artificial Sequence
  Description of Artificial Sequence: Synthetic oligonucleotide
gagaccacuccaggaauau

SEQ ID NO: 1572991 - RNA, 19 nt, Artificial Sequence
  Description of Artificial Sequence: Synthetic oligonucleotide
ccugagcauaggcaucuuc

SEQ ID NO: 1572992 - RNA, 19 nt, Artificial Sequence
  Description of Artificial Sequence: Synthetic oligonucleotide
cauccgcugcuccuguaaa

SEQ ID NO: 1572993 - RNA, 19 nt, Artificial Sequence
  Description of Artificial Sequence: Synthetic oligonucleotide
uugggcacgugaggucuuc

SEQ ID NO: 1572994 - RNA, 19 nt, Artificial Sequence
  Description of Artificial Sequence: Synthetic oligonucleotide
cugguaggagugccaggga

SEQ ID NO: 1572995 - RNA, 19 nt, Artificial Sequence
  Description of Artificial Sequence: Synthetic oligonucleotide
acacuggacuggaaucuua

SEQ ID NO: 1572996 - RNA, 19 nt, Artificial Sequence
  Description of Artificial Sequence: Synthetic oligonucleotide
ccagggaaucuugcuaaug

SEQ ID NO: 1572997 - RNA, 19 nt, Artificial Sequence
  Description of Artificial Sequence: Synthetic oligonucleotide
cugacacuugaaagauagu

SEQ ID NO: 1572998 - RNA, 19 nt, Artificial Sequence
  Description of Artificial Sequence: Synthetic oligonucleotide
gcccuuuagggaguaauua

SEQ ID NO: 1572999 - RNA, 19 nt, Artificial Sequence
  Description of Artificial Sequence: Synthetic oligonucleotide
gccacaaguagcgcacauc

SEQ ID NO: 1573000 - RNA, 19 nt, Artificial Sequence
  Description of Artificial Sequence: Synthetic oligonucleotide
gcugccuaucagucacaca

SEQ ID NO: 1573001 - RNA, 19 nt, Artificial Sequence
  Description of Artificial Sequence: Synthetic oligonucleotide
cggcaaguaggacauuuga

SEQ ID NO: 1573002 - RNA, 19 nt, Artificial Sequence
  Description of Artificial Sequence: Synthetic oligonucleotide
cgacuaguuuaaugucuuc

SEQ ID NO: 1573003 - RNA, 19 nt, Artificial Sequence
  Description of Artificial Sequence: Synthetic oligonucleotide
cagcugccuaucagucaca

SEQ ID NO: 1573004 - RNA, 19 nt, Artificial Sequence
  Description of Artificial Sequence: Synthetic oligonucleotide
gguaggagugccagggaau

SEQ ID NO: 1573005 - RNA, 19 nt, Artificial Sequence
  Description of Artificial Sequence: Synthetic oligonucleotide
cccgaugccaagucucaaa

SEQ ID NO: 1573006 - RNA, 19 nt, Artificial Sequence
  Description of Artificial Sequence: Synthetic oligonucleotide
uuacggcaaguaggacauu

SEQ ID NO: 1573007 - RNA, 19 nt, Artificial Sequence
  Description of Artificial Sequence: Synthetic oligonucleotide
gcaaaggaguuuccuugau

SEQ ID NO: 1573008 - RNA, 19 nt, Artificial Sequence
  Description of Artificial Sequence: Synthetic oligonucleotide
gagcccuucuaaacauuuu

SEQ ID NO: 1573009 - RNA, 19 nt, Artificial Sequence
  Description of Artificial Sequence: Synthetic oligonucleotide
cagcugauuuaggcagaua

SEQ ID NO: 1573010 - RNA, 19 nt, Artificial Sequence
  Description of Artificial Sequence: Synthetic oligonucleotide
ccggcaagcaggugcuuuu

SEQ ID NO: 1573011 - RNA, 19 nt, Artificial Sequence
  Description of Artificial Sequence: Synthetic oligonucleotide
ccacaucgacuaguuuaau

SEQ ID NO: 1573012 - RNA, 19 nt, Artificial Sequence
  Description of Artificial Sequence: Synthetic oligonucleotide
cccggcaagcaggugcuuu

SEQ ID NO: 1573013 - RNA, 19 nt, Artificial Sequence
  Description of Artificial Sequence: Synthetic oligonucleotide
cgccacaaguagcgcacau

SEQ ID NO: 1573014 - RNA, 19 nt, Artificial Sequence
  Description of Artificial Sequence: Synthetic oligonucleotide
ccccggcaagcaggugcuu

SEQ ID NO: 1573015 - RNA, 19 nt, Artificial Sequence
  Description of Artificial Sequence: Synthetic oligonucleotide
uaacuaaucucaaagaugg

SEQ ID NO: 1573016 - RNA, 19 nt, Artificial Sequence
  Description of Artificial Sequence: Synthetic oligonucleotide
aaacagaugacccugcgac

SEQ ID NO: 1573017 - RNA, 19 nt, Artificial Sequence
  Description of Artificial Sequence: Synthetic oligonucleotide
gaaguaacuaaucucaaag

SEQ ID NO: 1573018 - RNA, 19 nt, Artificial Sequence
  Description of Artificial Sequence: Synthetic oligonucleotide
aagagaaugaaggaucuac

SEQ ID NO: 1573019 - RNA, 19 nt, Artificial Sequence
  Description of Artificial Sequence: Synthetic oligonucleotide
agacggaugaaguaguggc

SEQ ID NO: 1573020 - RNA, 19 nt, Artificial Sequence
  Description of Artificial Sequence: Synthetic oligonucleotide
gaaugaaggaucuacugag

SEQ ID NO: 1573021 - RNA, 19 nt, Artificial Sequence
  Description of Artificial Sequence: Synthetic oligonucleotide
ucuguaucgauccggcucg

SEQ ID NO: 1573022 - RNA, 19 nt, Artificial Sequence
  Description of Artificial Sequence: Synthetic oligonucleotide
ucuacugagccccacacca

SEQ ID NO: 1573023 - RNA, 19 nt, Artificial Sequence
  Description of Artificial Sequence: Synthetic oligonucleotide
cuugaaguaacuaaucuca

SEQ ID NO: 1573024 - RNA, 19 nt, Artificial Sequence
  Description of Artificial Sequence: Synthetic oligonucleotide
gaauagauuccgcaggaag

SEQ ID NO: 1573025 - RNA, 19 nt, Artificial Sequence
  Description of Artificial Sequence: Synthetic oligonucleotide
ucuguaagcuuucuuggag

SEQ ID NO: 1573026 - RNA, 19 nt, Artificial Sequence
  Description of Artificial Sequence: Synthetic oligonucleotide
aaguaacuaaucucaaaga

SEQ ID NO: 1573027 - RNA, 19 nt, Artificial Sequence
  Description of Artificial Sequence: Synthetic oligonucleotide
cauagaggccaguagacgg

SEQ ID NO: 1573028 - RNA, 19 nt, Artificial Sequence
  Description of Artificial Sequence: Synthetic oligonucleotide
aguaacuaaucucaaagau

SEQ ID NO: 1573029 - RNA, 19 nt, Artificial Sequence
  Description of Artificial Sequence: Synthetic oligonucleotide
acggguaacuccuucaagg

SEQ ID NO: 1573030 - RNA, 19 nt, Artificial Sequence
  Description of Artificial Sequence: Synthetic oligonucleotide
uauuagaacuuucugggau

SEQ ID NO: 1573031 - RNA, 19 nt, Artificial Sequence
  Description of Artificial Sequence: Synthetic oligonucleotide
aagaaagcgguuaagagaa

SEQ ID NO: 1573032 - RNA, 19 nt, Artificial Sequence
  Description of Artificial Sequence: Synthetic oligonucleotide
uguuagagggaccagugcu

SEQ ID NO: 1573033 - RNA, 19 nt, Artificial Sequence
  Description of Artificial Sequence: Synthetic oligonucleotide
cagugugagguguagaagg

SEQ ID NO: 1573034 - RNA, 19 nt, Artificial Sequence
  Description of Artificial Sequence: Synthetic oligonucleotide
aaugaaggaucuacugagc

SEQ ID NO: 1573035 - RNA, 19 nt, Artificial Sequence
  Description of Artificial Sequence: Synthetic oligonucleotide
uacucuugucugcaggugg

SEQ ID NO: 1573036 - RNA, 19 nt, Artificial Sequence
  Description of Artificial Sequence: Synthetic oligonucleotide
agaaugaaggaucuacuga

SEQ ID NO: 1573037 - RNA, 19 nt, Artificial Sequence
  Description of Artificial Sequence: Synthetic oligonucleotide
gagaaugaaggaucuacug

SEQ ID NO: 1573038 - RNA, 19 nt, Artificial Sequence
  Description of Artificial Sequence: Synthetic oligonucleotide
aacuuucugggauugaguu

SEQ ID NO: 1573039 - RNA, 19 nt, Artificial Sequence
  Description of Artificial Sequence: Synthetic oligonucleotide
ucugggagaauagauuccg

SEQ ID NO: 1573040 - RNA, 19 nt, Artificial Sequence
  Description of Artificial Sequence: Synthetic oligonucleotide
aauagauuccgcaggaagu

SEQ ID NO: 1573041 - RNA, 19 nt, Artificial Sequence
  Description of Artificial Sequence: Synthetic oligonucleotide
ucuggauguuucuugaagu

SEQ ID NO: 1573042 - RNA, 19 nt, Artificial Sequence
  Description of Artificial Sequence: Synthetic oligonucleotide
uugcauagaggccaguaga

SEQ ID NO: 1573043 - RNA, 19 nt, Artificial Sequence
  Description of Artificial Sequence: Synthetic oligonucleotide
ucaggcuucaccacgcucu

SEQ ID NO: 1573044 - RNA, 19 nt, Artificial Sequence
  Description of Artificial Sequence: Synthetic oligonucleotide
aacaaaggucuccugcuca

SEQ ID NO: 1573045 - RNA, 19 nt, Artificial Sequence
  Description of Artificial Sequence: Synthetic oligonucleotide
guuaagagaaugaaggauc

SEQ ID NO: 1573046 - RNA, 19 nt, Artificial Sequence
  Description of Artificial Sequence: Synthetic oligonucleotide
aaauccaugccaccgccca

SEQ ID NO: 1573047 - RNA, 19 nt, Artificial Sequence
  Description of Artificial Sequence: Synthetic oligonucleotide
uggcgggagauucucaccg

SEQ ID NO: 1573048 - RNA, 19 nt, Artificial Sequence
  Description of Artificial Sequence: Synthetic oligonucleotide
cacgcucugacauuucucg

SEQ ID NO: 1573049 - RNA, 19 nt, Artificial Sequence
  Description of Artificial Sequence: Synthetic oligonucleotide
ucagcguguacucuugucu

SEQ ID NO: 1573050 - RNA, 19 nt, Artificial Sequence
  Description of Artificial Sequence: Synthetic oligonucleotide
agucaaaauccaugccacc

SEQ ID NO: 1573051 - RNA, 19 nt, Artificial Sequence
  Description of Artificial Sequence: Synthetic oligonucleotide
gagaagucugacugcaugc

SEQ ID NO: 1573052 - RNA, 19 nt, Artificial Sequence
  Description of Artificial Sequence: Synthetic oligonucleotide
uccgagucuguaucgaucc

SEQ ID NO: 1573053 - RNA, 19 nt, Artificial Sequence
  Description of Artificial Sequence: Synthetic oligonucleotide
aacugcccgggauagagcu

SEQ ID NO: 1573054 - RNA, 19 nt, Artificial Sequence
  Description of Artificial Sequence: Synthetic oligonucleotide
ggagaauagauuccgcagg

SEQ ID NO: 1573055 - RNA, 19 nt, Artificial Sequence
  Description of Artificial Sequence: Synthetic oligonucleotide
auguuagagggaccagugc

SEQ ID NO: 1573056 - RNA, 19 nt, Artificial Sequence
  Description of Artificial Sequence: Synthetic oligonucleotide
ugaugagggaggcgaaggg

SEQ ID NO: 1573057 - RNA, 19 nt, Artificial Sequence
  Description of Artificial Sequence: Synthetic oligonucleotide
ucucaaagauggcuuccgg

SEQ ID NO: 1573058 - RNA, 19 nt, Artificial Sequence
  Description of Artificial Sequence: Synthetic oligonucleotide
auagauuccgcaggaaguc

SEQ ID NO: 1573059 - RNA, 19 nt, Artificial Sequence
  Description of Artificial Sequence: Synthetic oligonucleotide
gguauauuagaacuuucug

SEQ ID NO: 1573060 - RNA, 19 nt, Artificial Sequence
  Description of Artificial Sequence: Synthetic oligonucleotide
guagcagcgcaccagcagg

SEQ ID NO: 1573061 - RNA, 19 nt, Artificial Sequence
  Description of Artificial Sequence: Synthetic oligonucleotide
aaaauccaugccaccgccc

SEQ ID NO: 1573062 - RNA, 19 nt, Artificial Sequence
  Description of Artificial Sequence: Synthetic oligonucleotide
cacaccagcuccauguuag

SEQ ID NO: 1573063 - RNA, 19 nt, Artificial Sequence
  Description of Artificial Sequence: Synthetic oligonucleotide
uaaacagaugacccugcga

SEQ ID NO: 1573064 - RNA, 19 nt, Artificial Sequence
  Description of Artificial Sequence: Synthetic oligonucleotide
gauagagcuccuuggcaag

SEQ ID NO: 1573065 - RNA, 19 nt, Artificial Sequence
  Description of Artificial Sequence: Synthetic oligonucleotide
ugcauagaggccaguagac

SEQ ID NO: 1573066 - RNA, 19 nt, Artificial Sequence
  Description of Artificial Sequence: Synthetic oligonucleotide
guuggcuugaacugcccgg

SEQ ID NO: 1573067 - RNA, 19 nt, Artificial Sequence
  Description of Artificial Sequence: Synthetic oligonucleotide
gacaauaaggagguccacc

SEQ ID NO: 1573068 - RNA, 19 nt, Artificial Sequence
  Description of Artificial Sequence: Synthetic oligonucleotide
aacggguaacuccuucaag

SEQ ID NO: 1573069 - RNA, 19 nt, Artificial Sequence
  Description of Artificial Sequence: Synthetic oligonucleotide
uguacucuugucugcaggu

SEQ ID NO: 1573070 - RNA, 19 nt, Artificial Sequence
  Description of Artificial Sequence: Synthetic oligonucleotide
ugaaguaacuaaucucaaa

SEQ ID NO: 1573071 - RNA, 19 nt, Artificial Sequence
  Description of Artificial Sequence: Synthetic oligonucleotide
uuagagggaccagugcugg

SEQ ID NO: 1573072 - RNA, 19 nt, Artificial Sequence
  Description of Artificial Sequence: Synthetic oligonucleotide
aucuacugagccccacacc

SEQ ID NO: 1573073 - RNA, 19 nt, Artificial Sequence
  Description of Artificial Sequence: Synthetic oligonucleotide
ucagcccucagguauauua

SEQ ID NO: 1573074 - RNA, 19 nt, Artificial Sequence
  Description of Artificial Sequence: Synthetic oligonucleotide
aacuaaucucaaagauggc

SEQ ID NO: 1573075 - RNA, 19 nt, Artificial Sequence
  Description of Artificial Sequence: Synthetic oligonucleotide
aguguccgagucuguaucg

SEQ ID NO: 1573076 - RNA, 19 nt, Artificial Sequence
  Description of Artificial Sequence: Synthetic oligonucleotide
aaagcgguuaagagaauga

SEQ ID NO: 1573077 - RNA, 19 nt, Artificial Sequence
  Description of Artificial Sequence: Synthetic oligonucleotide
agcguguacucuugucugc

SEQ ID NO: 1573078 - RNA, 19 nt, Artificial Sequence
  Description of Artificial Sequence: Synthetic oligonucleotide
cuaaacagaugacccugcg

SEQ ID NO: 1573079 - RNA, 19 nt, Artificial Sequence
  Description of Artificial Sequence: Synthetic oligonucleotide
uaggaaagggguuguauau

SEQ ID NO: 1573080 - RNA, 19 nt, Artificial Sequence
  Description of Artificial Sequence: Synthetic oligonucleotide
gagaauagauuccgcagga

SEQ ID NO: 1573081 - RNA, 19 nt, Artificial Sequence
  Description of Artificial Sequence: Synthetic oligonucleotide
ucgcucugcauguaacggg

SEQ ID NO: 1573082 - RNA, 19 nt, Artificial Sequence
  Description of Artificial Sequence: Synthetic oligonucleotide
uugaaguaacuaaucucaa

SEQ ID NO: 1573083 - RNA, 19 nt, Artificial Sequence
  Description of Artificial Sequence: Synthetic oligonucleotide
gacccugguuucaagaaag

SEQ ID NO: 1573084 - RNA, 19 nt, Artificial Sequence
  Description of Artificial Sequence: Synthetic oligonucleotide
gaugguuggcuugaacugc

SEQ ID NO: 1573085 - RNA, 19 nt, Artificial Sequence
  Description of Artificial Sequence: Synthetic oligonucleotide
uaucgauccggcucgggca

SEQ ID NO: 1573086 - RNA, 19 nt, Artificial Sequence
  Description of Artificial Sequence: Synthetic oligonucleotide
gacaguggugccuugcuga

SEQ ID NO: 1573087 - RNA, 19 nt, Artificial Sequence
  Description of Artificial Sequence: Synthetic oligonucleotide
uccggcucgggcaugggag

SEQ ID NO: 1573088 - RNA, 19 nt, Artificial Sequence
  Description of Artificial Sequence: Synthetic oligonucleotide
aacagaugacccugcgaca

SEQ ID NO: 1573089 - RNA, 19 nt, Artificial Sequence
  Description of Artificial Sequence: Synthetic oligonucleotide
gaucuacugagccccacac

SEQ ID NO: 1573090 - RNA, 19 nt, Artificial Sequence
  Description of Artificial Sequence: Synthetic oligonucleotide
agacgcuccuucugggagc

SEQ ID NO: 1573091 - RNA, 19 nt, Artificial Sequence
  Description of Artificial Sequence: Synthetic oligonucleotide
auagaggccaguagacggc

SEQ ID NO: 1573092 - RNA, 19 nt, Artificial Sequence
  Description of Artificial Sequence: Synthetic oligonucleotide
cccacuaaacagaugaccc

SEQ ID NO: 1573093 - RNA, 19 nt, Artificial Sequence
  Description of Artificial Sequence: Synthetic oligonucleotide
ucucucuuugguccuggcc

SEQ ID NO: 1573094 - RNA, 19 nt, Artificial Sequence
  Description of Artificial Sequence: Synthetic oligonucleotide
acagaugacccugcgacag

SEQ ID NO: 1573095 - RNA, 19 nt, Artificial Sequence
  Description of Artificial Sequence: Synthetic oligonucleotide
gaagggcugcaccugcagg

SEQ ID NO: 1573096 - RNA, 19 nt, Artificial Sequence
  Description of Artificial Sequence: Synthetic oligonucleotide
auuagaacuuucugggauu

SEQ ID NO: 1573097 - RNA, 19 nt, Artificial Sequence
  Description of Artificial Sequence: Synthetic oligonucleotide
uguaacggguaacuccuuc

SEQ ID NO: 1573098 - RNA, 19 nt, Artificial Sequence
  Description of Artificial Sequence: Synthetic oligonucleotide
gauacccgcagauguggag

SEQ ID NO: 1573099 - RNA, 19 nt, Artificial Sequence
  Description of Artificial Sequence: Synthetic oligonucleotide
ugagccccacaccagcucc

SEQ ID NO: 1573100 - RNA, 19 nt, Artificial Sequence
  Description of Artificial Sequence: Synthetic oligonucleotide
ucaucaugcccaggaaggg

SEQ ID NO: 1573101 - RNA, 19 nt, Artificial Sequence
  Description of Artificial Sequence: Synthetic oligonucleotide
uauguucugcguguagcag

SEQ ID NO: 1573102 - RNA, 19 nt, Artificial Sequence
  Description of Artificial Sequence: Synthetic oligonucleotide
guggagcugacacagugug

SEQ ID NO: 1573103 - RNA, 19 nt, Artificial Sequence
  Description of Artificial Sequence: Synthetic oligonucleotide
aaggguucuggauguuucu

SEQ ID NO: 1573104 - RNA, 19 nt, Artificial Sequence
  Description of Artificial Sequence: Synthetic oligonucleotide
ucagguauauuagaacuuu

SEQ ID NO: 1573105 - RNA, 19 nt, Artificial Sequence
  Description of Artificial Sequence: Synthetic oligonucleotide
acuucuuaggggagguggc

SEQ ID NO: 1573106 - RNA, 19 nt, Artificial Sequence
  Description of Artificial Sequence: Synthetic oligonucleotide
gcucccacuaaacagauga

SEQ ID NO: 1573107 - RNA, 19 nt, Artificial Sequence
  Description of Artificial Sequence: Synthetic oligonucleotide
gcccaugacaauaaggagg

SEQ ID NO: 1573108 - RNA, 19 nt, Artificial Sequence
  Description of Artificial Sequence: Synthetic oligonucleotide
gggagaauagauuccgcag

SEQ ID NO: 1573109 - RNA, 19 nt, Artificial Sequence
  Description of Artificial Sequence: Synthetic oligonucleotide
accaagccaggccacaucu

SEQ ID NO: 1573110 - RNA, 19 nt, Artificial Sequence
  Description of Artificial Sequence: Synthetic oligonucleotide
gucuguaucgauccggcuc

SEQ ID NO: 1573111 - RNA, 19 nt, Artificial Sequence
  Description of Artificial Sequence: Synthetic oligonucleotide
ugccuugcugaugagggag

SEQ ID NO: 1573112 - RNA, 19 nt, Artificial Sequence
  Description of Artificial Sequence: Synthetic oligonucleotide
ugggcaucuaugcuggcau

SEQ ID NO: 1573113 - RNA, 19 nt, Artificial Sequence
  Description of Artificial Sequence: Synthetic oligonucleotide
guaucgauccggcucgggc

SEQ ID NO: 1573114 - RNA, 19 nt, Artificial Sequence
  Description of Artificial Sequence: Synthetic oligonucleotide
gaugagggaggcgaagggc

SEQ ID NO: 1573115 - RNA, 19 nt, Artificial Sequence
  Description of Artificial Sequence: Synthetic oligonucleotide
guguagaaggugccguggg

SEQ ID NO: 1573116 - RNA, 19 nt, Artificial Sequence
  Description of Artificial Sequence: Synthetic oligonucleotide
agaugacccugcgacagcg

SEQ ID NO: 1573117 - RNA, 19 nt, Artificial Sequence
  Description of Artificial Sequence: Synthetic oligonucleotide
gacauuucucgcacuuggg

SEQ ID NO: 1573118 - RNA, 19 nt, Artificial Sequence
  Description of Artificial Sequence: Synthetic oligonucleotide
aaguaguggcagaugguug

SEQ ID NO: 1573119 - RNA, 19 nt, Artificial Sequence
  Description of Artificial Sequence: Synthetic oligonucleotide
ucucuuugguccuggccgc

SEQ ID NO: 1573120 - RNA, 19 nt, Artificial Sequence
  Description of Artificial Sequence: Synthetic oligonucleotide
augguuggcuugaacugcc

SEQ ID NO: 1573121 - RNA, 19 nt, Artificial Sequence
  Description of Artificial Sequence: Synthetic oligonucleotide
acagcgcucgcucugcaug

SEQ ID NO: 1573122 - RNA, 19 nt, Artificial Sequence
  Description of Artificial Sequence: Synthetic oligonucleotide
guagaaggugccgugggcc

SEQ ID NO: 1573123 - RNA, 19 nt, Artificial Sequence
  Description of Artificial Sequence: Synthetic oligonucleotide
auccgaggaggucagccag

SEQ ID NO: 1573124 - RNA, 19 nt, Artificial Sequence
  Description of Artificial Sequence: Synthetic oligonucleotide
gacugcaugcaggagaaga

SEQ ID NO: 1573125 - RNA, 19 nt, Artificial Sequence
  Description of Artificial Sequence: Synthetic oligonucleotide
uugacaguggugccuugcu

SEQ ID NO: 1573126 - RNA, 19 nt, Artificial Sequence
  Description of Artificial Sequence: Synthetic oligonucleotide
cuccagguuugcauagagg

SEQ ID NO: 1573127 - RNA, 19 nt, Artificial Sequence
  Description of Artificial Sequence: Synthetic oligonucleotide
aguuggggacccugguuuc

SEQ ID NO: 1573128 - RNA, 19 nt, Artificial Sequence
  Description of Artificial Sequence: Synthetic oligonucleotide
uguccugcuugggagguag

SEQ ID NO: 1573129 - RNA, 19 nt, Artificial Sequence
  Description of Artificial Sequence: Synthetic oligonucleotide
ggagaagucugacugcaug

SEQ ID NO: 1573130 - RNA, 19 nt, Artificial Sequence
  Description of Artificial Sequence: Synthetic oligonucleotide
uggauguuucuugaaguaa

SEQ ID NO: 1573131 - RNA, 19 nt, Artificial Sequence
  Description of Artificial Sequence: Synthetic oligonucleotide
agagaaugaaggaucuacu

SEQ ID NO: 1573132 - RNA, 19 nt, Artificial Sequence
  Description of Artificial Sequence: Synthetic oligonucleotide
auuccagcucccacuaaac

SEQ ID NO: 1573133 - RNA, 19 nt, Artificial Sequence
  Description of Artificial Sequence: Synthetic oligonucleotide
gacccuaggaaagggguug

SEQ ID NO: 1573134 - RNA, 19 nt, Artificial Sequence
  Description of Artificial Sequence: Synthetic oligonucleotide
cauguaacggguaacuccu

SEQ ID NO: 1573135 - RNA, 19 nt, Artificial Sequence
  Description of Artificial Sequence: Synthetic oligonucleotide
aagcgguuaagagaaugaa

SEQ ID NO: 1573136 - RNA, 19 nt, Artificial Sequence
  Description of Artificial Sequence: Synthetic oligonucleotide
gaggccaguagacggcgag

SEQ ID NO: 1573137 - RNA, 19 nt, Artificial Sequence
  Description of Artificial Sequence: Synthetic oligonucleotide
gagucuguaucgauccggc

SEQ ID NO: 1573138 - RNA, 19 nt, Artificial Sequence
  Description of Artificial Sequence: Synthetic oligonucleotide
guaacggguaacuccuuca

SEQ ID NO: 1573139 - RNA, 19 nt, Artificial Sequence
  Description of Artificial Sequence: Synthetic oligonucleotide
guugucucugagaagaucu

SEQ ID NO: 1573140 - RNA, 19 nt, Artificial Sequence
  Description of Artificial Sequence: Synthetic oligonucleotide
guuagagggaccagugcug

SEQ ID NO: 1573141 - RNA, 19 nt, Artificial Sequence
  Description of Artificial Sequence: Synthetic oligonucleotide
acagugugagguguagaag

SEQ ID NO: 1573142 - RNA, 19 nt, Artificial Sequence
  Description of Artificial Sequence: Synthetic oligonucleotide
ugggagguaguggucacug

SEQ ID NO: 1573143 - RNA, 19 nt, Artificial Sequence
  Description of Artificial Sequence: Synthetic oligonucleotide
uuucugggauugaguuggg

SEQ ID NO: 1573144 - RNA, 19 nt, Artificial Sequence
  Description of Artificial Sequence: Synthetic oligonucleotide
cagacggaugaaguagugg

SEQ ID NO: 1573145 - RNA, 19 nt, Artificial Sequence
  Description of Artificial Sequence: Synthetic oligonucleotide
ucuuaggggagguggcagu

SEQ ID NO: 1573146 - RNA, 19 nt, Artificial Sequence
  Description of Artificial Sequence: Synthetic oligonucleotide
cagcguguacucuugucug

SEQ ID NO: 1573147 - RNA, 19 nt, Artificial Sequence
  Description of Artificial Sequence: Synthetic oligonucleotide
ggugcccaugacaauaagg

SEQ ID NO: 1573148 - RNA, 19 nt, Artificial Sequence
  Description of Artificial Sequence: Synthetic oligonucleotide
gcaggcgugggguugacag

SEQ ID NO: 1573149 - RNA, 19 nt, Artificial Sequence
  Description of Artificial Sequence: Synthetic oligonucleotide
gagguaguggucacuggug

SEQ ID NO: 1573150 - RNA, 19 nt, Artificial Sequence
  Description of Artificial Sequence: Synthetic oligonucleotide
gguaacuccuucaaggcuc

SEQ ID NO: 1573151 - RNA, 19 nt, Artificial Sequence
  Description of Artificial Sequence: Synthetic oligonucleotide
cagguuugcauagaggcca

SEQ ID NO: 1573152 - RNA, 19 nt, Artificial Sequence
  Description of Artificial Sequence: Synthetic oligonucleotide
uuccauccgaggaggucag

SEQ ID NO: 1573153 - RNA, 19 nt, Artificial Sequence
  Description of Artificial Sequence: Synthetic oligonucleotide
uggugccuugcugaugagg

SEQ ID NO: 1573154 - RNA, 19 nt, Artificial Sequence
  Description of Artificial Sequence: Synthetic oligonucleotide
cagacgcuccuucugggag

SEQ ID NO: 1573155 - RNA, 19 nt, Artificial Sequence
  Description of Artificial Sequence: Synthetic oligonucleotide
cagaugguuggcuugaacu

SEQ ID NO: 1573156 - RNA, 19 nt, Artificial Sequence
  Description of Artificial Sequence: Synthetic oligonucleotide
aggaaagggguuguauaug

SEQ ID NO: 1573157 - RNA, 19 nt, Artificial Sequence
  Description of Artificial Sequence: Synthetic oligonucleotide
cuaaucucaaagauggcuu

SEQ ID NO: 1573158 - RNA, 19 nt, Artificial Sequence
  Description of Artificial Sequence: Synthetic oligonucleotide
gguuggcuugaacugcccg

SEQ ID NO: 1573159 - RNA, 19 nt, Artificial Sequence
  Description of Artificial Sequence: Synthetic oligonucleotide
augacccugcgacagcgcu

SEQ ID NO: 1573160 - RNA, 19 nt, Artificial Sequence
  Description of Artificial Sequence: Synthetic oligonucleotide
aagauggcuuccggguaag

SEQ ID NO: 1573161 - RNA, 19 nt, Artificial Sequence
  Description of Artificial Sequence: Synthetic oligonucleotide
gcaugcaggagaagaagcg

SEQ ID NO: 1573162 - RNA, 19 nt, Artificial Sequence
  Description of Artificial Sequence: Synthetic oligonucleotide
accgcccaagcccaucauc

SEQ ID NO: 1573163 - RNA, 19 nt, Artificial Sequence
  Description of Artificial Sequence: Synthetic oligonucleotide
cacagugugagguguagaa

SEQ ID NO: 1573164 - RNA, 19 nt, Artificial Sequence
  Description of Artificial Sequence: Synthetic oligonucleotide
ugggguuaggggccuguga

SEQ ID NO: 1573165 - RNA, 19 nt, Artificial Sequence
  Description of Artificial Sequence: Synthetic oligonucleotide
accacgcucugacauuucu

SEQ ID NO: 1573166 - RNA, 19 nt, Artificial Sequence
  Description of Artificial Sequence: Synthetic oligonucleotide
cuuccauccgaggagguca

SEQ ID NO: 1573167 - RNA, 19 nt, Artificial Sequence
  Description of Artificial Sequence: Synthetic oligonucleotide
uggagcugacacaguguga

SEQ ID NO: 1573168 - RNA, 19 nt, Artificial Sequence
  Description of Artificial Sequence: Synthetic oligonucleotide
auacccgcagauguggaga

SEQ ID NO: 1573169 - RNA, 19 nt, Artificial Sequence
  Description of Artificial Sequence: Synthetic oligonucleotide
cagccuuggucacagucac

SEQ ID NO: 1573170 - RNA, 19 nt, Artificial Sequence
  Description of Artificial Sequence: Synthetic oligonucleotide
uaaggagguccaccuugga

SEQ ID NO: 1573171 - RNA, 19 nt, Artificial Sequence
  Description of Artificial Sequence: Synthetic oligonucleotide
gaagucagggauacccgca

SEQ ID NO: 1573172 - RNA, 19 nt, Artificial Sequence
  Description of Artificial Sequence: Synthetic oligonucleotide
caggccuuucuccuucagc

SEQ ID NO: 1573173 - RNA, 19 nt, Artificial Sequence
  Description of Artificial Sequence: Synthetic oligonucleotide
gcggaagucagggauaccc

SEQ ID NO: 1573174 - RNA, 19 nt, Artificial Sequence
  Description of Artificial Sequence: Synthetic oligonucleotide
cuacugagccccacaccag

SEQ ID NO: 1573175 - RNA, 19 nt, Artificial Sequence
  Description of Artificial Sequence: Synthetic oligonucleotide
uguaucgauccggcucggg

SEQ ID NO: 1573176 - RNA, 19 nt, Artificial Sequence
  Description of Artificial Sequence: Synthetic oligonucleotide
cuugcugaugagggaggcg

SEQ ID NO: 1573177 - RNA, 19 nt, Artificial Sequence
  Description of Artificial Sequence: Synthetic oligonucleotide
cugcccgggauagagcucc

SEQ ID NO: 1573178 - RNA, 19 nt, Artificial Sequence
  Description of Artificial Sequence: Synthetic oligonucleotide
ugcauguaacggguaacuc

SEQ ID NO: 1573179 - RNA, 19 nt, Artificial Sequence
  Description of Artificial Sequence: Synthetic oligonucleotide
gguguagaaggugccgugg

SEQ ID NO: 1573180 - RNA, 19 nt, Artificial Sequence
  Description of Artificial Sequence: Synthetic oligonucleotide
cucuguaagcuuucuugga

SEQ ID NO: 1573181 - RNA, 19 nt, Artificial Sequence
  Description of Artificial Sequence: Synthetic oligonucleotide
acccugguuucaagaaagc

SEQ ID NO: 1573182 - RNA, 19 nt, Artificial Sequence
  Description of Artificial Sequence: Synthetic oligonucleotide
gguucuggauguuucuuga

SEQ ID NO: 1573183 - RNA, 19 nt, Artificial Sequence
  Description of Artificial Sequence: Synthetic oligonucleotide
aauccaugccaccgcccaa

SEQ ID NO: 1573184 - RNA, 19 nt, Artificial Sequence
  Description of Artificial Sequence: Synthetic oligonucleotide
ugggguugacaguggugcc

SEQ ID NO: 1573185 - RNA, 19 nt, Artificial Sequence
  Description of Artificial Sequence: Synthetic oligonucleotide
uggccugucuucuccuugu

SEQ ID NO: 1573186 - RNA, 19 nt, Artificial Sequence
  Description of Artificial Sequence: Synthetic oligonucleotide
gagauuccagcucccacua

SEQ ID NO: 1573187 - RNA, 19 nt, Artificial Sequence
  Description of Artificial Sequence: Synthetic oligonucleotide
ugcguguagcagcgcacca

SEQ ID NO: 1573188 - RNA, 19 nt, Artificial Sequence
  Description of Artificial Sequence: Synthetic oligonucleotide
agugugagguguagaaggu

SEQ ID NO: 1573189 - RNA, 19 nt, Artificial Sequence
  Description of Artificial Sequence: Synthetic oligonucleotide
gaagaagcguggcgggaga

SEQ ID NO: 1573190 - RNA, 19 nt, Artificial Sequence
  Description of Artificial Sequence: Synthetic oligonucleotide
gggauacccgcagaugugg

SEQ ID NO: 1573191 - RNA, 19 nt, Artificial Sequence
  Description of Artificial Sequence: Synthetic oligonucleotide
gcucgcucugcauguaacg

SEQ ID NO: 1573192 - RNA, 19 nt, Artificial Sequence
  Description of Artificial Sequence: Synthetic oligonucleotide
gacggaugaaguaguggca

SEQ ID NO: 1573193 - RNA, 19 nt, Artificial Sequence
  Description of Artificial Sequence: Synthetic oligonucleotide
gggguuaggggccugugac

SEQ ID NO: 1573194 - RNA, 19 nt, Artificial Sequence
  Description of Artificial Sequence: Synthetic oligonucleotide
auccaugccaccgcccaag

SEQ ID NO: 1573195 - RNA, 19 nt, Artificial Sequence
  Description of Artificial Sequence: Synthetic oligonucleotide
cucccacuaaacagaugac

SEQ ID NO: 1573196 - RNA, 19 nt, Artificial Sequence
  Description of Artificial Sequence: Synthetic oligonucleotide
uguccgagucuguaucgau

SEQ ID NO: 1573197 - RNA, 19 nt, Artificial Sequence
  Description of Artificial Sequence: Synthetic oligonucleotide
ugguuggcuugaacugccc

SEQ ID NO: 1573198 - RNA, 19 nt, Artificial Sequence
  Description of Artificial Sequence: Synthetic oligonucleotide
aggccaguagacggcgagc

SEQ ID NO: 1573199 - RNA, 19 nt, Artificial Sequence
  Description of Artificial Sequence: Synthetic oligonucleotide
gcauagaggccaguagacg

SEQ ID NO: 1573200 - RNA, 19 nt, Artificial Sequence
  Description of Artificial Sequence: Synthetic oligonucleotide
cuggcaagugggacccuag

SEQ ID NO: 1573201 - RNA, 19 nt, Artificial Sequence
  Description of Artificial Sequence: Synthetic oligonucleotide
uagacggcgagcggaaguc

SEQ ID NO: 1573202 - RNA, 19 nt, Artificial Sequence
  Description of Artificial Sequence: Synthetic oligonucleotide
cucagcguguacucuuguc

SEQ ID NO: 1573203 - RNA, 19 nt, Artificial Sequence
  Description of Artificial Sequence: Synthetic oligonucleotide
cuggauguuucuugaagua

SEQ ID NO: 1573204 - RNA, 19 nt, Artificial Sequence
  Description of Artificial Sequence: Synthetic oligonucleotide
agucuguaucgauccggcu

SEQ ID NO: 1573205 - RNA, 19 nt, Artificial Sequence
  Description of Artificial Sequence: Synthetic oligonucleotide
gaaguaguggcagaugguu

SEQ ID NO: 1573206 - RNA, 19 nt, Artificial Sequence
  Description of Artificial Sequence: Synthetic oligonucleotide
gagcggaagucagggauac

SEQ ID NO: 1573207 - RNA, 19 nt, Artificial Sequence
  Description of Artificial Sequence: Synthetic oligonucleotide
ggaaagggguuguauaugu

SEQ ID NO: 1573208 - RNA, 19 nt, Artificial Sequence
  Description of Artificial Sequence: Synthetic oligonucleotide
gacggcgagcggaagucag

SEQ ID NO: 1573209 - RNA, 19 nt, Artificial Sequence
  Description of Artificial Sequence: Synthetic oligonucleotide
agcagcgcaccagcaggcc

SEQ ID NO: 1573210 - RNA, 19 nt, Artificial Sequence
  Description of Artificial Sequence: Synthetic oligonucleotide
agauuccgcaggaagucca

SEQ ID NO: 1573211 - RNA, 19 nt, Artificial Sequence
  Description of Artificial Sequence: Synthetic oligonucleotide
acugcaugcaggagaagaa

SEQ ID NO: 1573212 - RNA, 19 nt, Artificial Sequence
  Description of Artificial Sequence: Synthetic oligonucleotide
gacgcuccuucugggagcc

SEQ ID NO: 1573213 - RNA, 19 nt, Artificial Sequence
  Description of Artificial Sequence: Synthetic oligonucleotide
uucaccacgcucugacauu

SEQ ID NO: 1573214 - RNA, 19 nt, Artificial Sequence
  Description of Artificial Sequence: Synthetic oligonucleotide
ugucaggcuucaccacgcu

SEQ ID NO: 1573215 - RNA, 19 nt, Artificial Sequence
  Description of Artificial Sequence: Synthetic oligonucleotide
ccggacaaggucuuccagc

SEQ ID NO: 1573216 - RNA, 19 nt, Artificial Sequence
  Description of Artificial Sequence: Synthetic oligonucleotide
ggccaguagacggcgagcg

SEQ ID NO: 1573217 - RNA, 19 nt, Artificial Sequence
  Description of Artificial Sequence: Synthetic oligonucleotide
agcguggcgggagauucuc

SEQ ID NO: 1573218 - RNA, 19 nt, Artificial Sequence
  Description of Artificial Sequence: Synthetic oligonucleotide
cugacauuucucgcacuug

SEQ ID NO: 1573219 - RNA, 19 nt, Artificial Sequence
  Description of Artificial Sequence: Synthetic oligonucleotide
ugugacccugacugggcau

SEQ ID NO: 1573220 - RNA, 19 nt, Artificial Sequence
  Description of Artificial Sequence: Synthetic oligonucleotide
uggcagaugguuggcuuga

SEQ ID NO: 1573221 - RNA, 19 nt, Artificial Sequence
  Description of Artificial Sequence: Synthetic oligonucleotide
aggaucuacugagccccac

SEQ ID NO: 1573222 - RNA, 19 nt, Artificial Sequence
  Description of Artificial Sequence: Synthetic oligonucleotide
gaaggugccgugggccucc

SEQ ID NO: 1573223 - RNA, 19 nt, Artificial Sequence
  Description of Artificial Sequence: Synthetic oligonucleotide
aucgauccggcucgggcau

SEQ ID NO: 1573224 - RNA, 19 nt, Artificial Sequence
  Description of Artificial Sequence: Synthetic oligonucleotide
cagggauacccgcagaugu

SEQ ID NO: 1573225 - RNA, 19 nt, Artificial Sequence
  Description of Artificial Sequence: Synthetic oligonucleotide
cuguaagcuuucuuggagu

SEQ ID NO: 1573226 - RNA, 19 nt, Artificial Sequence
  Description of Artificial Sequence: Synthetic oligonucleotide
agaauagauuccgcaggaa

SEQ ID NO: 1573227 - RNA, 19 nt, Artificial Sequence
  Description of Artificial Sequence: Synthetic oligonucleotide
uagaacuuucugggauuga

SEQ ID NO: 1573228 - RNA, 19 nt, Artificial Sequence
  Description of Artificial Sequence: Synthetic oligonucleotide
uccggguaagggagguggu

SEQ ID NO: 1573229 - RNA, 19 nt, Artificial Sequence
  Description of Artificial Sequence: Synthetic oligonucleotide
ggcaucuaugcuggcaugc

SEQ ID NO: 1573230 - RNA, 19 nt, Artificial Sequence
  Description of Artificial Sequence: Synthetic oligonucleotide
agggcaaagaaggguucug

SEQ ID NO: 1573231 - RNA, 19 nt, Artificial Sequence
  Description of Artificial Sequence: Synthetic oligonucleotide
ucaccacgcucugacauuu

SEQ ID NO: 1573232 - RNA, 19 nt, Artificial Sequence
  Description of Artificial Sequence: Synthetic oligonucleotide
cccucagguauauuagaac

SEQ ID NO: 1573233 - RNA, 19 nt, Artificial Sequence
  Description of Artificial Sequence: Synthetic oligonucleotide
agaaggugccgugggccuc

SEQ ID NO: 1573234 - RNA, 19 nt, Artificial Sequence
  Description of Artificial Sequence: Synthetic oligonucleotide
cuaugcuggcaugcucccg

SEQ ID NO: 1573235 - RNA, 19 nt, Artificial Sequence
  Description of Artificial Sequence: Synthetic oligonucleotide
guaguggcagaugguuggc

SEQ ID NO: 1573236 - RNA, 19 nt, Artificial Sequence
  Description of Artificial Sequence: Synthetic oligonucleotide
guaagggaggugguacuuc

SEQ ID NO: 1573237 - RNA, 19 nt, Artificial Sequence
  Description of Artificial Sequence: Synthetic oligonucleotide
gaacugcccgggauagagc

SEQ ID NO: 1573238 - RNA, 19 nt, Artificial Sequence
  Description of Artificial Sequence: Synthetic oligonucleotide
gggauagagcuccuuggca

SEQ ID NO: 1573239 - RNA, 19 nt, Artificial Sequence
  Description of Artificial Sequence: Synthetic oligonucleotide
cauccgaggaggucagcca

SEQ ID NO: 1573240 - RNA, 19 nt, Artificial Sequence
  Description of Artificial Sequence: Synthetic oligonucleotide
cucugcauguaacggguaa

SEQ ID NO: 1573241 - RNA, 19 nt, Artificial Sequence
  Description of Artificial Sequence: Synthetic oligonucleotide
ucauccagcucagcgugua

SEQ ID NO: 1573242 - RNA, 19 nt, Artificial Sequence
  Description of Artificial Sequence: Synthetic oligonucleotide
gaacuuucugggauugagu

SEQ ID NO: 1573243 - RNA, 19 nt, Artificial Sequence
  Description of Artificial Sequence: Synthetic oligonucleotide
aagaagcguggcgggagau

SEQ ID NO: 1573244 - RNA, 19 nt, Artificial Sequence
  Description of Artificial Sequence: Synthetic oligonucleotide
acucgcuccagugugucua

SEQ ID NO: 1573245 - RNA, 19 nt, Artificial Sequence
  Description of Artificial Sequence: Synthetic oligonucleotide
uggcuugaacugcccggga

SEQ ID NO: 1573246 - RNA, 19 nt, Artificial Sequence
  Description of Artificial Sequence: Synthetic oligonucleotide
acccugacugggcaucuau

SEQ ID NO: 1573247 - RNA, 19 nt, Artificial Sequence
  Description of Artificial Sequence: Synthetic oligonucleotide
gagaagaagcguggcggga

SEQ ID NO: 1573248 - RNA, 19 nt, Artificial Sequence
  Description of Artificial Sequence: Synthetic oligonucleotide
gaugacccugcgacagcgc

SEQ ID NO: 1573249 - RNA, 19 nt, Artificial Sequence
  Description of Artificial Sequence: Synthetic oligonucleotide
agcggaagucagggauacc

SEQ ID NO: 1573250 - RNA, 19 nt, Artificial Sequence
  Description of Artificial Sequence: Synthetic oligonucleotide
agucgcuccuccccucagu

SEQ ID NO: 1573251 - RNA, 19 nt, Artificial Sequence
  Description of Artificial Sequence: Synthetic oligonucleotide
cuucaccacgcucugacau

SEQ ID NO: 1573252 - RNA, 19 nt, Artificial Sequence
  Description of Artificial Sequence: Synthetic oligonucleotide
cugcuugggagguaguggu

SEQ ID NO: 1573253 - RNA, 19 nt, Artificial Sequence
  Description of Artificial Sequence: Synthetic oligonucleotide
gagguguagaaggugccgu

SEQ ID NO: 1573254 - RNA, 19 nt, Artificial Sequence
  Description of Artificial Sequence: Synthetic oligonucleotide
cucagguauauuagaacuu

SEQ ID NO: 1573255 - RNA, 19 nt, Artificial Sequence
  Description of Artificial Sequence: Synthetic oligonucleotide
ggaucuacugagccccaca

SEQ ID NO: 1573256 - RNA, 19 nt, Artificial Sequence
  Description of Artificial Sequence: Synthetic oligonucleotide
guccgagucuguaucgauc

SEQ ID NO: 1573257 - RNA, 19 nt, Artificial Sequence
  Description of Artificial Sequence: Synthetic oligonucleotide
ggagguaguggucacuggu

SEQ ID NO: 1573258 - RNA, 19 nt, Artificial Sequence
  Description of Artificial Sequence: Synthetic oligonucleotide
uugggagguaguggucacu

SEQ ID NO: 1573259 - RNA, 19 nt, Artificial Sequence
  Description of Artificial Sequence: Synthetic oligonucleotide
caucaugcccaggaaggga

SEQ ID NO: 1573260 - RNA, 19 nt, Artificial Sequence
  Description of Artificial Sequence: Synthetic oligonucleotide
aaggaucuacugagcccca

SEQ ID NO: 1573261 - RNA, 19 nt, Artificial Sequence
  Description of Artificial Sequence: Synthetic oligonucleotide
gugccgugggccuccacca

SEQ ID NO: 1573262 - RNA, 19 nt, Artificial Sequence
  Description of Artificial Sequence: Synthetic oligonucleotide
guagacggcgagcggaagu

SEQ ID NO: 1573263 - RNA, 19 nt, Artificial Sequence
  Description of Artificial Sequence: Synthetic oligonucleotide
cugagccccacaccagcuc

SEQ ID NO: 1573264 - RNA, 19 nt, Artificial Sequence
  Description of Artificial Sequence: Synthetic oligonucleotide
cuucuuaggggagguggca

SEQ ID NO: 1573265 - RNA, 19 nt, Artificial Sequence
  Description of Artificial Sequence: Synthetic oligonucleotide
agcucagcguguacucuug

SEQ ID NO: 1573266 - RNA, 19 nt, Artificial Sequence
  Description of Artificial Sequence: Synthetic oligonucleotide
ggcgaagggcugcaccugc

SEQ ID NO: 1573267 - RNA, 19 nt, Artificial Sequence
  Description of Artificial Sequence: Synthetic oligonucleotide
acggcgagcggaagucagg

SEQ ID NO: 1573268 - RNA, 19 nt, Artificial Sequence
  Description of Artificial Sequence: Synthetic oligonucleotide
cauccagcucagcguguac

SEQ ID NO: 1573269 - RNA, 19 nt, Artificial Sequence
  Description of Artificial Sequence: Synthetic oligonucleotide
ccauccgaggaggucagcc

SEQ ID NO: 1573270 - RNA, 19 nt, Artificial Sequence
  Description of Artificial Sequence: Synthetic oligonucleotide
caugcucccgccggacaag

SEQ ID NO: 1573271 - RNA, 19 nt, Artificial Sequence
  Description of Artificial Sequence: Synthetic oligonucleotide
ugacugcaugcaggagaag

SEQ ID NO: 1573272 - RNA, 19 nt, Artificial Sequence
  Description of Artificial Sequence: Synthetic oligonucleotide
ccugugacccugacugggc

SEQ ID NO: 1573273 - RNA, 19 nt, Artificial Sequence
  Description of Artificial Sequence: Synthetic oligonucleotide
uuggggacccugguuucaa

SEQ ID NO: 1573274 - RNA, 19 nt, Artificial Sequence
  Description of Artificial Sequence: Synthetic oligonucleotide
gcccaagcccaucaucaug

SEQ ID NO: 1573275 - RNA, 19 nt, Artificial Sequence
  Description of Artificial Sequence: Synthetic oligonucleotide
ccagggucugggagaauag

SEQ ID NO: 1573276 - RNA, 19 nt, Artificial Sequence
  Description of Artificial Sequence: Synthetic oligonucleotide
gucagggauacccgcagau

SEQ ID NO: 1573277 - RNA, 19 nt, Artificial Sequence
  Description of Artificial Sequence: Synthetic oligonucleotide
gcagaugguuggcuugaac

SEQ ID NO: 1573278 - RNA, 19 nt, Artificial Sequence
  Description of Artificial Sequence: Synthetic oligonucleotide
caccaagccaggccacauc

SEQ ID NO: 1573279 - RNA, 19 nt, Artificial Sequence
  Description of Artificial Sequence: Synthetic oligonucleotide
cugucuggccugucuucuc

SEQ ID NO: 1573280 - RNA, 19 nt, Artificial Sequence
  Description of Artificial Sequence: Synthetic oligonucleotide
gugacccugacugggcauc

SEQ ID NO: 1573281 - RNA, 19 nt, Artificial Sequence
  Description of Artificial Sequence: Synthetic oligonucleotide
caugcaggagaagaagcgu

SEQ ID NO: 1573282 - RNA, 19 nt, Artificial Sequence
  Description of Artificial Sequence: Synthetic oligonucleotide
cugacugggcaucuaugcu

SEQ ID NO: 1573283 - RNA, 19 nt, Artificial Sequence
  Description of Artificial Sequence: Synthetic oligonucleotide
acugcccgggauagagcuc

SEQ ID NO: 1573284 - RNA, 19 nt, Artificial Sequence
  Description of Artificial Sequence: Synthetic oligonucleotide
gccaguagacggcgagcgg

SEQ ID NO: 1573285 - RNA, 19 nt, Artificial Sequence
  Description of Artificial Sequence: Synthetic oligonucleotide
gccgugggccuccaccagg

SEQ ID NO: 1573286 - RNA, 19 nt, Artificial Sequence
  Description of Artificial Sequence: Synthetic oligonucleotide
cccgcagauguggagauuc

SEQ ID NO: 1573287 - RNA, 19 nt, Artificial Sequence
  Description of Artificial Sequence: Synthetic oligonucleotide
cccgggauagagcuccuug

SEQ ID NO: 1573288 - RNA, 19 nt, Artificial Sequence
  Description of Artificial Sequence: Synthetic oligonucleotide
ccugcgacagcgcucgcuc

SEQ ID NO: 1573289 - RNA, 19 nt, Artificial Sequence
  Description of Artificial Sequence: Synthetic oligonucleotide
cuguaucgauccggcucgg

SEQ ID NO: 1573290 - RNA, 19 nt, Artificial Sequence
  Description of Artificial Sequence: Synthetic oligonucleotide
acccuaggaaagggguugu

SEQ ID NO: 1573291 - RNA, 19 nt, Artificial Sequence
  Description of Artificial Sequence: Synthetic oligonucleotide
caguagacggcgagcggaa

SEQ ID NO: 1573292 - RNA, 19 nt, Artificial Sequence
  Description of Artificial Sequence: Synthetic oligonucleotide
gagguccaccuuggagaag

SEQ ID NO: 1573293 - RNA, 19 nt, Artificial Sequence
  Description of Artificial Sequence: Synthetic oligonucleotide
gccggacaaggucuuccag

SEQ ID NO: 1573294 - RNA, 19 nt, Artificial Sequence
  Description of Artificial Sequence: Synthetic oligonucleotide
uaggggccugugacccuga

SEQ ID NO: 1573295 - RNA, 19 nt, Artificial Sequence
  Description of Artificial Sequence: Synthetic oligonucleotide
guguccgagucuguaucga

SEQ ID NO: 1573296 - RNA, 19 nt, Artificial Sequence
  Description of Artificial Sequence: Synthetic oligonucleotide
agggaucugucuggccugu

SEQ ID NO: 1573297 - RNA, 19 nt, Artificial Sequence
  Description of Artificial Sequence: Synthetic oligonucleotide
gggcaucuaugcuggcaug

SEQ ID NO: 1573298 - RNA, 19 nt, Artificial Sequence
  Description of Artificial Sequence: Synthetic oligonucleotide
ccgcccaagcccaucauca

SEQ ID NO: 1573299 - RNA, 19 nt, Artificial Sequence
  Description of Artificial Sequence: Synthetic oligonucleotide
gcagacggaugaaguagug

SEQ ID NO: 1573300 - RNA, 19 nt, Artificial Sequence
  Description of Artificial Sequence: Synthetic oligonucleotide
gcucccgccggacaagguc

SEQ ID NO: 1573301 - RNA, 19 nt, Artificial Sequence
  Description of Artificial Sequence: Synthetic oligonucleotide
agacggcgagcggaaguca

SEQ ID NO: 1573302 - RNA, 19 nt, Artificial Sequence
  Description of Artificial Sequence: Synthetic oligonucleotide
cucaguguccgagucugua

SEQ ID NO: 1573303 - RNA, 19 nt, Artificial Sequence
  Description of Artificial Sequence: Synthetic oligonucleotide
gucaccaagccaggccaca

SEQ ID NO: 1573304 - RNA, 19 nt, Artificial Sequence
  Description of Artificial Sequence: Synthetic oligonucleotide
agaagcguggcgggagauu

SEQ ID NO: 1573305 - RNA, 19 nt, Artificial Sequence
  Description of Artificial Sequence: Synthetic oligonucleotide
guggugccuugcugaugag

SEQ ID NO: 1573306 - RNA, 19 nt, Artificial Sequence
  Description of Artificial Sequence: Synthetic oligonucleotide
cguggcgggagauucucac

SEQ ID NO: 1573307 - RNA, 19 nt, Artificial Sequence
  Description of Artificial Sequence: Synthetic oligonucleotide
gaugagcaggcgugggguu

SEQ ID NO: 1573308 - RNA, 19 nt, Artificial Sequence
  Description of Artificial Sequence: Synthetic oligonucleotide
cuuccggguaagggaggug

SEQ ID NO: 1573309 - RNA, 19 nt, Artificial Sequence
  Description of Artificial Sequence: Synthetic oligonucleotide
uggcaugcucccgccggac

SEQ ID NO: 1573310 - RNA, 19 nt, Artificial Sequence
  Description of Artificial Sequence: Synthetic oligonucleotide
ccgagucuguaucgauccg

SEQ ID NO: 1573311 - RNA, 19 nt, Artificial Sequence
  Description of Artificial Sequence: Synthetic oligonucleotide
ucgcuccagugugucuaug

SEQ ID NO: 1573312 - RNA, 19 nt, Artificial Sequence
  Description of Artificial Sequence: Synthetic oligonucleotide
ccacgcucugacauuucuc

SEQ ID NO: 1573313 - RNA, 19 nt, Artificial Sequence
  Description of Artificial Sequence: Synthetic oligonucleotide
ccaguagacggcgagcgga

SEQ ID NO: 1573314 - RNA, 19 nt, Artificial Sequence
  Description of Artificial Sequence: Synthetic oligonucleotide
gguugacaguggugccuug

SEQ ID NO: 1573315 - RNA, 19 nt, Artificial Sequence
  Description of Artificial Sequence: Synthetic oligonucleotide
ccgaggaggucagccaggg

SEQ ID NO: 1573316 - RNA, 19 nt, Artificial Sequence
  Description of Artificial Sequence: Synthetic oligonucleotide
agaaagcgguuaagagaau

SEQ ID NO: 1573317 - RNA, 19 nt, Artificial Sequence
  Description of Artificial Sequence: Synthetic oligonucleotide
agcucccacuaaacagaug

SEQ ID NO: 1573318 - RNA, 19 nt, Artificial Sequence
  Description of Artificial Sequence: Synthetic oligonucleotide
cugggguuaggggccugug

SEQ ID NO: 1573319 - RNA, 19 nt, Artificial Sequence
  Description of Artificial Sequence: Synthetic oligonucleotide
gcgagcggaagucagggau

SEQ ID NO: 1573320 - RNA, 19 nt, Artificial Sequence
  Description of Artificial Sequence: Synthetic oligonucleotide
caguggugccuugcugaug

SEQ ID NO: 1573321 - RNA, 19 nt, Artificial Sequence
  Description of Artificial Sequence: Synthetic oligonucleotide
ccgcagauguggagauucc

SEQ ID NO: 1573322 - RNA, 19 nt, Artificial Sequence
  Description of Artificial Sequence: Synthetic oligonucleotide
caccacgcucugacauuuc

SEQ ID NO: 1573323 - RNA, 19 nt, Artificial Sequence
  Description of Artificial Sequence: Synthetic oligonucleotide
gcaagggcaaagaaggguu

SEQ ID NO: 1573324 - RNA, 19 nt, Artificial Sequence
  Description of Artificial Sequence: Synthetic oligonucleotide
gcucgggcaugggagcggg

SEQ ID NO: 1573325 - RNA, 19 nt, Artificial Sequence
  Description of Artificial Sequence: Synthetic oligonucleotide
cgcucugacauuucucgca

SEQ ID NO: 1573326 - RNA, 19 nt, Artificial Sequence
  Description of Artificial Sequence: Synthetic oligonucleotide
cguguacucuugucugcag

SEQ ID NO: 1573327 - RNA, 19 nt, Artificial Sequence
  Description of Artificial Sequence: Synthetic oligonucleotide
ggccucagcccucagguau

SEQ ID NO: 1573328 - RNA, 19 nt, Artificial Sequence
  Description of Artificial Sequence: Synthetic oligonucleotide
cuggcaugcucccgccgga

SEQ ID NO: 1573329 - RNA, 19 nt, Artificial Sequence
  Description of Artificial Sequence: Synthetic oligonucleotide
caugcccaggaagggaucu

SEQ ID NO: 1573330 - RNA, 19 nt, Artificial Sequence
  Description of Artificial Sequence: Synthetic oligonucleotide
ucgauccggcucgggcaug

SEQ ID NO: 1573331 - RNA, 19 nt, Artificial Sequence
  Description of Artificial Sequence: Synthetic oligonucleotide
gcaugcucccgccggacaa

SEQ ID NO: 1573332 - RNA, 19 nt, Artificial Sequence
  Description of Artificial Sequence: Synthetic oligonucleotide
aggugccgugggccuccac

SEQ ID NO: 1573333 - RNA, 19 nt, Artificial Sequence
  Description of Artificial Sequence: Synthetic oligonucleotide
ucccgccggacaaggucuu

SEQ ID NO: 1573334 - RNA, 19 nt, Artificial Sequence
  Description of Artificial Sequence: Synthetic oligonucleotide
gauuccgcaggaaguccau

SEQ ID NO: 1573335 - RNA, 19 nt, Artificial Sequence
  Description of Artificial Sequence: Synthetic oligonucleotide
gggacccuaggaaaggggu

SEQ ID NO: 1573336 - RNA, 19 nt, Artificial Sequence
  Description of Artificial Sequence: Synthetic oligonucleotide
ccuccccucaguguccgag

SEQ ID NO: 1573337 - RNA, 19 nt, Artificial Sequence
  Description of Artificial Sequence: Synthetic oligonucleotide
ggcgugggguugacagugg

SEQ ID NO: 1573338 - RNA, 19 nt, Artificial Sequence
  Description of Artificial Sequence: Synthetic oligonucleotide
cggguaagggaggugguac

SEQ ID NO: 1573339 - RNA, 19 nt, Artificial Sequence
  Description of Artificial Sequence: Synthetic oligonucleotide
ccacuaaacagaugacccu

SEQ ID NO: 1573340 - RNA, 19 nt, Artificial Sequence
  Description of Artificial Sequence: Synthetic oligonucleotide
gcguguacucuugucugca

SEQ ID NO: 1573341 - RNA, 19 nt, Artificial Sequence
  Description of Artificial Sequence: Synthetic oligonucleotide
cgcuccuccccucaguguc

SEQ ID NO: 1573342 - RNA, 19 nt, Artificial Sequence
  Description of Artificial Sequence: Synthetic oligonucleotide
ggcgggagauucucaccga

SEQ ID NO: 1573343 - RNA, 19 nt, Artificial Sequence
  Description of Artificial Sequence: Synthetic oligonucleotide
ggauacccgcagaugugga

SEQ ID NO: 1573344 - RNA, 19 nt, Artificial Sequence
  Description of Artificial Sequence: Synthetic oligonucleotide
gacagcgcucgcucugcau

SEQ ID NO: 1573345 - RNA, 19 nt, Artificial Sequence
  Description of Artificial Sequence: Synthetic oligonucleotide
gcgggagauucucaccgaa

SEQ ID NO: 1573346 - RNA, 19 nt, Artificial Sequence
  Description of Artificial Sequence: Synthetic oligonucleotide
ccggcucgggcaugggagc

SEQ ID NO: 1573347 - RNA, 19 nt, Artificial Sequence
  Description of Artificial Sequence: Synthetic oligonucleotide
cgaagggcugcaccugcag

SEQ ID NO: 1573348 - RNA, 19 nt, Artificial Sequence
  Description of Artificial Sequence: Synthetic oligonucleotide
guuaggggccugugacccu

SEQ ID NO: 1573349 - RNA, 19 nt, Artificial Sequence
  Description of Artificial Sequence: Synthetic oligonucleotide
ggaccagugcuggcugggc

SEQ ID NO: 1573350 - RNA, 19 nt, Artificial Sequence
  Description of Artificial Sequence: Synthetic oligonucleotide
uccuccccucaguguccga

SEQ ID NO: 1573351 - RNA, 19 nt, Artificial Sequence
  Description of Artificial Sequence: Synthetic oligonucleotide
acgcuccuucugggagccc

SEQ ID NO: 1573352 - RNA, 19 nt, Artificial Sequence
  Description of Artificial Sequence: Synthetic oligonucleotide
cagcucccacuaaacagau

SEQ ID NO: 1573353 - RNA, 19 nt, Artificial Sequence
  Description of Artificial Sequence: Synthetic oligonucleotide
agcaggcgugggguugaca

SEQ ID NO: 1573354 - RNA, 19 nt, Artificial Sequence
  Description of Artificial Sequence: Synthetic oligonucleotide
auguaacggguaacuccuu

SEQ ID NO: 1573355 - RNA, 19 nt, Artificial Sequence
  Description of Artificial Sequence: Synthetic oligonucleotide
cagcuccauguuagaggga

SEQ ID NO: 1573356 - RNA, 19 nt, Artificial Sequence
  Description of Artificial Sequence: Synthetic oligonucleotide
cggcgagcggaagucaggg

SEQ ID NO: 1573357 - RNA, 19 nt, Artificial Sequence
  Description of Artificial Sequence: Synthetic oligonucleotide
gguggagcugacacagugu

SEQ ID NO: 1573358 - RNA, 19 nt, Artificial Sequence
  Description of Artificial Sequence: Synthetic oligonucleotide
ggcuugaacugcccgggau

SEQ ID NO: 1573359 - RNA, 19 nt, Artificial Sequence
  Description of Artificial Sequence: Synthetic oligonucleotide
aaggugccgugggccucca

SEQ ID NO: 1573360 - RNA, 19 nt, Artificial Sequence
  Description of Artificial Sequence: Synthetic oligonucleotide
ccgccggacaaggucuucc

SEQ ID NO: 1573361 - RNA, 19 nt, Artificial Sequence
  Description of Artificial Sequence: Synthetic oligonucleotide
ggcgagcggaagucaggga

SEQ ID NO: 1573362 - RNA, 19 nt, Artificial Sequence
  Description of Artificial Sequence: Synthetic oligonucleotide
gcgacagcgcucgcucugc

SEQ ID NO: 1573363 - RNA, 19 nt, Artificial Sequence
  Description of Artificial Sequence: Synthetic oligonucleotide
cagcgcucgcucugcaugu

SEQ ID NO: 1573364 - RNA, 19 nt, Artificial Sequence
  Description of Artificial Sequence: Synthetic oligonucleotide
gggucugggagaauagauu

SEQ ID NO: 1573365 - RNA, 19 nt, Artificial Sequence
  Description of Artificial Sequence: Synthetic oligonucleotide
ccucuccgccagucgcucc

SEQ ID NO: 1573366 - RNA, 19 nt, Artificial Sequence
  Description of Artificial Sequence: Synthetic oligonucleotide
gggguugacaguggugccu

SEQ ID NO: 1573367 - RNA, 19 nt, Artificial Sequence
  Description of Artificial Sequence: Synthetic oligonucleotide
gguaagggaggugguacuu

SEQ ID NO: 1573368 - RNA, 19 nt, Artificial Sequence
  Description of Artificial Sequence: Synthetic oligonucleotide
cagcgcaccagcaggccuu

SEQ ID NO: 1573369 - RNA, 19 nt, Artificial Sequence
  Description of Artificial Sequence: Synthetic oligonucleotide
agcgcaccagcaggccuuu

SEQ ID NO: 1573370 - RNA, 19 nt, Artificial Sequence
  Description of Artificial Sequence: Synthetic oligonucleotide
cccagggucugggagaaua

SEQ ID NO: 1573371 - RNA, 19 nt, Artificial Sequence
  Description of Artificial Sequence: Synthetic oligonucleotide
cgauccggcucgggcaugg

SEQ ID NO: 1573372 - RNA, 19 nt, Artificial Sequence
  Description of Artificial Sequence: Synthetic oligonucleotide
gcagcgcaccagcaggccu

SEQ ID NO: 1573373 - RNA, 19 nt, Artificial Sequence
  Description of Artificial Sequence: Synthetic oligonucleotide
ccaccgcccaagcccauca

SEQ ID NO: 1573374 - RNA, 19 nt, Artificial Sequence
  Description of Artificial Sequence: Synthetic oligonucleotide
cacucgcuccagugugucu

SEQ ID NO: 1573375 - RNA, 19 nt, Artificial Sequence
  Description of Artificial Sequence: Synthetic oligonucleotide
ccacucgcuccaguguguc

SEQ ID NO: 1573376 - RNA, 19 nt, Artificial Sequence
  Description of Artificial Sequence: Synthetic oligonucleotide
agcgcucgcucugcaugua

SEQ ID NO: 1573377 - RNA, 19 nt, Artificial Sequence
  Description of Artificial Sequence: Synthetic oligonucleotide
cucgcuccagugugucuau

SEQ ID NO: 1573378 - RNA, 19 nt, Artificial Sequence
  Description of Artificial Sequence: Synthetic oligonucleotide
gacccugacugggcaucua

SEQ ID NO: 1573379 - RNA, 19 nt, Artificial Sequence
  Description of Artificial Sequence: Synthetic oligonucleotide
cgcucugcauguaacgggu

SEQ ID NO: 1573380 - RNA, 19 nt, Artificial Sequence
  Description of Artificial Sequence: Synthetic oligonucleotide
cugcgacagcgcucgcucu

SEQ ID NO: 1573381 - RNA, 19 nt, Artificial Sequence
  Description of Artificial Sequence: Synthetic oligonucleotide
gcuggcaagugggacccua

SEQ ID NO: 1573382 - RNA, 19 nt, Artificial Sequence
  Description of Artificial Sequence: Synthetic oligonucleotide
ccagucgcuccuccccuca

SEQ ID NO: 1573383 - RNA, 19 nt, Artificial Sequence
  Description of Artificial Sequence: Synthetic oligonucleotide
gguccaccuuggagaaguc

SEQ ID NO: 1573384 - RNA, 19 nt, Artificial Sequence
  Description of Artificial Sequence: Synthetic oligonucleotide
gcgcucgcucugcauguaa

SEQ ID NO: 1573385 - RNA, 19 nt, Artificial Sequence
  Description of Artificial Sequence: Synthetic oligonucleotide
cgagcggaagucagggaua

SEQ ID NO: 1573386 - RNA, 19 nt, Artificial Sequence
  Description of Artificial Sequence: Synthetic oligonucleotide
gcucagcguguacucuugu

SEQ ID NO: 1573387 - RNA, 19 nt, Artificial Sequence
  Description of Artificial Sequence: Synthetic oligonucleotide
cgggagauucucaccgaaa

SEQ ID NO: 1573388 - RNA, 19 nt, Artificial Sequence
  Description of Artificial Sequence: Synthetic oligonucleotide
gcgugggguugacaguggu

SEQ ID NO: 1573389 - RNA, 19 nt, Artificial Sequence
  Description of Artificial Sequence: Synthetic oligonucleotide
gccaggccacaucucugua

SEQ ID NO: 1573390 - RNA, 19 nt, Artificial Sequence
  Description of Artificial Sequence: Synthetic oligonucleotide
ggacccuaggaaagggguu

SEQ ID NO: 1573391 - RNA, 19 nt, Artificial Sequence
  Description of Artificial Sequence: Synthetic oligonucleotide
gcucugcauguaacgggua

SEQ ID NO: 1573392 - RNA, 19 nt, Artificial Sequence
  Description of Artificial Sequence: Synthetic oligonucleotide
gguuugcauagaggccagu

SEQ ID NO: 1573393 - RNA, 19 nt, Artificial Sequence
  Description of Artificial Sequence: Synthetic oligonucleotide
gggaucugucuggccuguc

SEQ ID NO: 1573394 - RNA, 19 nt, Artificial Sequence
  Description of Artificial Sequence: Synthetic oligonucleotide
cgccggacaaggucuucca

SEQ ID NO: 1573395 - RNA, 19 nt, Artificial Sequence
  Description of Artificial Sequence: Synthetic oligonucleotide
gcguggcgggagauucuca

SEQ ID NO: 1573396 - RNA, 19 nt, Artificial Sequence
  Description of Artificial Sequence: Synthetic oligonucleotide
ccgugggccuccaccaggu

SEQ ID NO: 1573397 - RNA, 19 nt, Artificial Sequence
  Description of Artificial Sequence: Synthetic oligonucleotide
guccugcuugggagguagu

SEQ ID NO: 1573398 - RNA, 19 nt, Artificial Sequence
  Description of Artificial Sequence: Synthetic oligonucleotide
gccacucgcuccagugugu

SEQ ID NO: 1573399 - RNA, 19 nt, Artificial Sequence
  Description of Artificial Sequence: Synthetic oligonucleotide
ggauugaguuggggacccu

SEQ ID NO: 1573400 - RNA, 19 nt, Artificial Sequence
  Description of Artificial Sequence: Synthetic oligonucleotide
ccggguaagggagguggua

SEQ ID NO: 1573401 - RNA, 19 nt, Artificial Sequence
  Description of Artificial Sequence: Synthetic oligonucleotide
caccgcccaagcccaucau

SEQ ID NO: 1573402 - RNA, 19 nt, Artificial Sequence
  Description of Artificial Sequence: Synthetic oligonucleotide
cccgccggacaaggucuuc

SEQ ID NO: 1573403 - RNA, 19 nt, Artificial Sequence
  Description of Artificial Sequence: Synthetic oligonucleotide
cccuaggaaagggguugua

SEQ ID NO: 1573404 - RNA, 19 nt, Artificial Sequence
  Description of Artificial Sequence: Synthetic oligonucleotide
cgacagcgcucgcucugca

SEQ ID NO: 1573405 - RNA, 19 nt, Artificial Sequence
  Description of Artificial Sequence: Synthetic oligonucleotide
cucagcccucagguauauu

SEQ ID NO: 1573406 - RNA, 19 nt, Artificial Sequence
  Description of Artificial Sequence: Synthetic oligonucleotide
cccugcgacagcgcucgcu

SEQ ID NO: 1573407 - RNA, 19 nt, Artificial Sequence
  Description of Artificial Sequence: Synthetic oligonucleotide
cgccagucgcuccuccccu

SEQ ID NO: 1573408 - RNA, 19 nt, Artificial Sequence
  Description of Artificial Sequence: Synthetic oligonucleotide
ccucagcccucagguauau

SEQ ID NO: 1573409 - RNA, 19 nt, Artificial Sequence
  Description of Artificial Sequence: Synthetic oligonucleotide
gcgcaccagcaggccuuuc

SEQ ID NO: 1573410 - RNA, 19 nt, Artificial Sequence
  Description of Artificial Sequence: Synthetic oligonucleotide
cccugccacucgcuccagu

SEQ ID NO: 1573411 - RNA, 19 nt, Artificial Sequence
  Description of Artificial Sequence: Synthetic oligonucleotide
gcccgggauagagcuccuu

SEQ ID NO: 1573412 - RNA, 19 nt, Artificial Sequence
  Description of Artificial Sequence: Synthetic oligonucleotide
aaagcagugaauccggacc

SEQ ID NO: 1573413 - RNA, 19 nt, Artificial Sequence
  Description of Artificial Sequence: Synthetic oligonucleotide
auuguugaaagccugugcc

SEQ ID NO: 1573414 - RNA, 19 nt, Artificial Sequence
  Description of Artificial Sequence: Synthetic oligonucleotide
aauagcgcaaugcaguguc

SEQ ID NO: 1573415 - RNA, 19 nt, Artificial Sequence
  Description of Artificial Sequence: Synthetic oligonucleotide
auagaagccagccaggagg

SEQ ID NO: 1573416 - RNA, 19 nt, Artificial Sequence
  Description of Artificial Sequence: Synthetic oligonucleotide
auacuuaaaggccauuugg

SEQ ID NO: 1573417 - RNA, 19 nt, Artificial Sequence
  Description of Artificial Sequence: Synthetic oligonucleotide
agggucuuauccuucaucc

SEQ ID NO: 1573418 - RNA, 19 nt, Artificial Sequence
  Description of Artificial Sequence: Synthetic oligonucleotide
cugguauucaucaaucucc

SEQ ID NO: 1573419 - RNA, 19 nt, Artificial Sequence
  Description of Artificial Sequence: Synthetic oligonucleotide
aaggugguaggaugcagcc

SEQ ID NO: 1573420 - RNA, 19 nt, Artificial Sequence
  Description of Artificial Sequence: Synthetic oligonucleotide
cauaguaugauauguuggc

SEQ ID NO: 1573421 - RNA, 19 nt, Artificial Sequence
  Description of Artificial Sequence: Synthetic oligonucleotide
cucaagauacuuaaaggcc

SEQ ID NO: 1573422 - RNA, 19 nt, Artificial Sequence
  Description of Artificial Sequence: Synthetic oligonucleotide
cugaauguugcccugaaag

SEQ ID NO: 1573423 - RNA, 19 nt, Artificial Sequence
  Description of Artificial Sequence: Synthetic oligonucleotide
ucugauggacucuuugggg

SEQ ID NO: 1573424 - RNA, 19 nt, Artificial Sequence
  Description of Artificial Sequence: Synthetic oligonucleotide
ugugucuccagauuuuagc

SEQ ID NO: 1573425 - RNA, 19 nt, Artificial Sequence
  Description of Artificial Sequence: Synthetic oligonucleotide
agucaaugccccgugagcc

SEQ ID NO: 1573426 - RNA, 19 nt, Artificial Sequence
  Description of Artificial Sequence: Synthetic oligonucleotide
ugauauguuggcugaagga

SEQ ID NO: 1573427 - RNA, 19 nt, Artificial Sequence
  Description of Artificial Sequence: Synthetic oligonucleotide
aagugcacugccuguuuac

SEQ ID NO: 1573428 - RNA, 19 nt, Artificial Sequence
  Description of Artificial Sequence: Synthetic oligonucleotide
ucguaauagcgcaaugcag

SEQ ID NO: 1573429 - RNA, 19 nt, Artificial Sequence
  Description of Artificial Sequence: Synthetic oligonucleotide
cacauaguaugauauguug

SEQ ID NO: 1573430 - RNA, 19 nt, Artificial Sequence
  Description of Artificial Sequence: Synthetic oligonucleotide
aguaugauauguuggcuga

SEQ ID NO: 1573431 - RNA, 19 nt, Artificial Sequence
  Description of Artificial Sequence: Synthetic oligonucleotide
acauaguaugauauguugg

SEQ ID NO: 1573432 - RNA, 19 nt, Artificial Sequence
  Description of Artificial Sequence: Synthetic oligonucleotide
agugcgcugguccacauag

SEQ ID NO: 1573433 - RNA, 19 nt, Artificial Sequence
  Description of Artificial Sequence: Synthetic oligonucleotide
cuuggcuuuggauaggcac

SEQ ID NO: 1573434 - RNA, 19 nt, Artificial Sequence
  Description of Artificial Sequence: Synthetic oligonucleotide
ucuugagacgcccgcaaag

SEQ ID NO: 1573435 - RNA, 19 nt, Artificial Sequence
  Description of Artificial Sequence: Synthetic oligonucleotide
uguccuucgggccuggaug

SEQ ID NO: 1573436 - RNA, 19 nt, Artificial Sequence
  Description of Artificial Sequence: Synthetic oligonucleotide
acuagggucaucuugcuuu

SEQ ID NO: 1573437 - RNA, 19 nt, Artificial Sequence
  Description of Artificial Sequence: Synthetic oligonucleotide
uccacauaguaugauaugu

SEQ ID NO: 1573438 - RNA, 19 nt, Artificial Sequence
  Description of Artificial Sequence: Synthetic oligonucleotide
uggcuuucaggcuuguucc

SEQ ID NO: 1573439 - RNA, 19 nt, Artificial Sequence
  Description of Artificial Sequence: Synthetic oligonucleotide
agacagguccuuugagucc

SEQ ID NO: 1573440 - RNA, 19 nt, Artificial Sequence
  Description of Artificial Sequence: Synthetic oligonucleotide
ccucaagauacuuaaaggc

SEQ ID NO: 1573441 - RNA, 19 nt, Artificial Sequence
  Description of Artificial Sequence: Synthetic oligonucleotide
uuggacacggucaucuucu

SEQ ID NO: 1573442 - RNA, 19 nt, Artificial Sequence
  Description of Artificial Sequence: Synthetic oligonucleotide
caugcuauugugccggacc

SEQ ID NO: 1573443 - RNA, 19 nt, Artificial Sequence
  Description of Artificial Sequence: Synthetic oligonucleotide
ggcaauuugcucuagcagc

SEQ ID NO: 1573444 - RNA, 19 nt, Artificial Sequence
  Description of Artificial Sequence: Synthetic oligonucleotide
uuuaccucauccuggcucu

SEQ ID NO: 1573445 - RNA, 19 nt, Artificial Sequence
  Description of Artificial Sequence: Synthetic oligonucleotide
gugauaguugcccuggcgc

SEQ ID NO: 1573446 - RNA, 19 nt, Artificial Sequence
  Description of Artificial Sequence: Synthetic oligonucleotide
guagaagcugauaauauuc

SEQ ID NO: 1573447 - RNA, 19 nt, Artificial Sequence
  Description of Artificial Sequence: Synthetic oligonucleotide
ugguauucaucaaucucca

SEQ ID NO: 1573448 - RNA, 19 nt, Artificial Sequence
  Description of Artificial Sequence: Synthetic oligonucleotide
gucauguucuguucuaggc

SEQ ID NO: 1573449 - RNA, 19 nt, Artificial Sequence
  Description of Artificial Sequence: Synthetic oligonucleotide
ugugcccuuguguagaagu

SEQ ID NO: 1573450 - RNA, 19 nt, Artificial Sequence
  Description of Artificial Sequence: Synthetic oligonucleotide
uuaaaggccauuugguauu

SEQ ID NO: 1573451 - RNA, 19 nt, Artificial Sequence
  Description of Artificial Sequence: Synthetic oligonucleotide
gugaauccggaccagggag

SEQ ID NO: 1573452 - RNA, 19 nt, Artificial Sequence
  Description of Artificial Sequence: Synthetic oligonucleotide
auuggcugccaugauauag

SEQ ID NO: 1573453 - RNA, 19 nt, Artificial Sequence
  Description of Artificial Sequence: Synthetic oligonucleotide
cuuguguagaagugcacug

SEQ ID NO: 1573454 - RNA, 19 nt, Artificial Sequence
  Description of Artificial Sequence: Synthetic oligonucleotide
ucagacagguccuuugagu

SEQ ID NO: 1573455 - RNA, 19 nt, Artificial Sequence
  Description of Artificial Sequence: Synthetic oligonucleotide
gauauguuggcugaaggaa

SEQ ID NO: 1573456 - RNA, 19 nt, Artificial Sequence
  Description of Artificial Sequence: Synthetic oligonucleotide
cauuguugaaagccugugc

SEQ ID NO: 1573457 - RNA, 19 nt, Artificial Sequence
  Description of Artificial Sequence: Synthetic oligonucleotide
ugaaccucuucacuagggu

SEQ ID NO: 1573458 - RNA, 19 nt, Artificial Sequence
  Description of Artificial Sequence: Synthetic oligonucleotide
auagacguccccgaugcgg

SEQ ID NO: 1573459 - RNA, 19 nt, Artificial Sequence
  Description of Artificial Sequence: Synthetic oligonucleotide
guaauagcgcaaugcagug

SEQ ID NO: 1573460 - RNA, 19 nt, Artificial Sequence
  Description of Artificial Sequence: Synthetic oligonucleotide
uagauuuccuucugucuug

SEQ ID NO: 1573461 - RNA, 19 nt, Artificial Sequence
  Description of Artificial Sequence: Synthetic oligonucleotide
guuuaccucauccuggcuc

SEQ ID NO: 1573462 - RNA, 19 nt, Artificial Sequence
  Description of Artificial Sequence: Synthetic oligonucleotide
caagaugcgggauggcggg

SEQ ID NO: 1573463 - RNA, 19 nt, Artificial Sequence
  Description of Artificial Sequence: Synthetic oligonucleotide
ugccaugauauagauuucc

SEQ ID NO: 1573464 - RNA, 19 nt, Artificial Sequence
  Description of Artificial Sequence: Synthetic oligonucleotide
caaggugguaggaugcagc

SEQ ID NO: 1573465 - RNA, 19 nt, Artificial Sequence
  Description of Artificial Sequence: Synthetic oligonucleotide
ggcgcaauacagcaguugg

SEQ ID NO: 1573466 - RNA, 19 nt, Artificial Sequence
  Description of Artificial Sequence: Synthetic oligonucleotide
ugauaguugcccuggcgca

SEQ ID NO: 1573467 - RNA, 19 nt, Artificial Sequence
  Description of Artificial Sequence: Synthetic oligonucleotide
agccuggucaucuaagcca

SEQ ID NO: 1573468 - RNA, 19 nt, Artificial Sequence
  Description of Artificial Sequence: Synthetic oligonucleotide
agucucguuggcuauuuca

SEQ ID NO: 1573469 - RNA, 19 nt, Artificial Sequence
  Description of Artificial Sequence: Synthetic oligonucleotide
gaaagcagugaauccggac

SEQ ID NO: 1573470 - RNA, 19 nt, Artificial Sequence
  Description of Artificial Sequence: Synthetic oligonucleotide
cagacagguccuuugaguc

SEQ ID NO: 1573471 - RNA, 19 nt, Artificial Sequence
  Description of Artificial Sequence: Synthetic oligonucleotide
cuguuuaccucauccuggc

SEQ ID NO: 1573472 - RNA, 19 nt, Artificial Sequence
  Description of Artificial Sequence: Synthetic oligonucleotide
aauacagcaguuggcaauu

SEQ ID NO: 1573473 - RNA, 19 nt, Artificial Sequence
  Description of Artificial Sequence: Synthetic oligonucleotide
uguucuaggcacagcugca

SEQ ID NO: 1573474 - RNA, 19 nt, Artificial Sequence
  Description of Artificial Sequence: Synthetic oligonucleotide
cagugaauccggaccaggg

SEQ ID NO: 1573475 - RNA, 19 nt, Artificial Sequence
  Description of Artificial Sequence: Synthetic oligonucleotide
agugcacugccuguuuacc

SEQ ID NO: 1573476 - RNA, 19 nt, Artificial Sequence
  Description of Artificial Sequence: Synthetic oligonucleotide
ugcuuuguagcugggcuag

SEQ ID NO: 1573477 - RNA, 19 nt, Artificial Sequence
  Description of Artificial Sequence: Synthetic oligonucleotide
ugaauccggaccagggaga

SEQ ID NO: 1573478 - RNA, 19 nt, Artificial Sequence
  Description of Artificial Sequence: Synthetic oligonucleotide
uuguguagaagugcacugc

SEQ ID NO: 1573479 - RNA, 19 nt, Artificial Sequence
  Description of Artificial Sequence: Synthetic oligonucleotide
uucugucuugagacgcccg

SEQ ID NO: 1573480 - RNA, 19 nt, Artificial Sequence
  Description of Artificial Sequence: Synthetic oligonucleotide
agauuuuagcagugcucuc

SEQ ID NO: 1573481 - RNA, 19 nt, Artificial Sequence
  Description of Artificial Sequence: Synthetic oligonucleotide
cuucgggccuggaugaacc

SEQ ID NO: 1573482 - RNA, 19 nt, Artificial Sequence
  Description of Artificial Sequence: Synthetic oligonucleotide
ucguuggcuauuucagcag

SEQ ID NO: 1573483 - RNA, 19 nt, Artificial Sequence
  Description of Artificial Sequence: Synthetic oligonucleotide
uccccgaugcggauggugc

SEQ ID NO: 1573484 - RNA, 19 nt, Artificial Sequence
  Description of Artificial Sequence: Synthetic oligonucleotide
uagacguccccgaugcgga

SEQ ID NO: 1573485 - RNA, 19 nt, Artificial Sequence
  Description of Artificial Sequence: Synthetic oligonucleotide
cucguaauagcgcaaugca

SEQ ID NO: 1573486 - RNA, 19 nt, Artificial Sequence
  Description of Artificial Sequence: Synthetic oligonucleotide
gcugccaugauauagauuu

SEQ ID NO: 1573487 - RNA, 19 nt, Artificial Sequence
  Description of Artificial Sequence: Synthetic oligonucleotide
ucuaagccauucuccuugc

SEQ ID NO: 1573488 - RNA, 19 nt, Artificial Sequence
  Description of Artificial Sequence: Synthetic oligonucleotide
auaguaugauauguuggcu

SEQ ID NO: 1573489 - RNA, 19 nt, Artificial Sequence
  Description of Artificial Sequence: Synthetic oligonucleotide
ugccuuuccuggaagacuu

SEQ ID NO: 1573490 - RNA, 19 nt, Artificial Sequence
  Description of Artificial Sequence: Synthetic oligonucleotide
cucguuggcuauuucagca

SEQ ID NO: 1573491 - RNA, 19 nt, Artificial Sequence
  Description of Artificial Sequence: Synthetic oligonucleotide
ccugaaagcagugaauccg

SEQ ID NO: 1573492 - RNA, 19 nt, Artificial Sequence
  Description of Artificial Sequence: Synthetic oligonucleotide
ggaugaaccucuucacuag

SEQ ID NO: 1573493 - RNA, 19 nt, Artificial Sequence
  Description of Artificial Sequence: Synthetic oligonucleotide
gaaguaguccugugccagc

SEQ ID NO: 1573494 - RNA, 19 nt, Artificial Sequence
  Description of Artificial Sequence: Synthetic oligonucleotide
gucucguuggcuauuucag

SEQ ID NO: 1573495 - RNA, 19 nt, Artificial Sequence
  Description of Artificial Sequence: Synthetic oligonucleotide
gacucuuugggguccucug

SEQ ID NO: 1573496 - RNA, 19 nt, Artificial Sequence
  Description of Artificial Sequence: Synthetic oligonucleotide
ucgggcaagaugcgggaug

SEQ ID NO: 1573497 - RNA, 19 nt, Artificial Sequence
  Description of Artificial Sequence: Synthetic oligonucleotide
acgccgugacuccucagac

SEQ ID NO: 1573498 - RNA, 19 nt, Artificial Sequence
  Description of Artificial Sequence: Synthetic oligonucleotide
ugucuugagacgcccgcaa

SEQ ID NO: 1573499 - RNA, 19 nt, Artificial Sequence
  Description of Artificial Sequence: Synthetic oligonucleotide
ggugauaguugcccuggcg

SEQ ID NO: 1573500 - RNA, 19 nt, Artificial Sequence
  Description of Artificial Sequence: Synthetic oligonucleotide
uauugugccggacccgcuc

SEQ ID NO: 1573501 - RNA, 19 nt, Artificial Sequence
  Description of Artificial Sequence: Synthetic oligonucleotide
cauuugguauuccuccauc

SEQ ID NO: 1573502 - RNA, 19 nt, Artificial Sequence
  Description of Artificial Sequence: Synthetic oligonucleotide
gauaggcacuuauaggccu

SEQ ID NO: 1573503 - RNA, 19 nt, Artificial Sequence
  Description of Artificial Sequence: Synthetic oligonucleotide
guuggcaauuugcucuagc

SEQ ID NO: 1573504 - RNA, 19 nt, Artificial Sequence
  Description of Artificial Sequence: Synthetic oligonucleotide
aggucuggcucuucuagga

SEQ ID NO: 1573505 - RNA, 19 nt, Artificial Sequence
  Description of Artificial Sequence: Synthetic oligonucleotide
gcucucaagguacugggcc

SEQ ID NO: 1573506 - RNA, 19 nt, Artificial Sequence
  Description of Artificial Sequence: Synthetic oligonucleotide
auccggaccagggagaagu

SEQ ID NO: 1573507 - RNA, 19 nt, Artificial Sequence
  Description of Artificial Sequence: Synthetic oligonucleotide
uugcauaggcggauggcau

SEQ ID NO: 1573508 - RNA, 19 nt, Artificial Sequence
  Description of Artificial Sequence: Synthetic oligonucleotide
ugccuguuuaccucauccu

SEQ ID NO: 1573509 - RNA, 19 nt, Artificial Sequence
  Description of Artificial Sequence: Synthetic oligonucleotide
uugagacgcccgcaaagaa

SEQ ID NO: 1573510 - RNA, 19 nt, Artificial Sequence
  Description of Artificial Sequence: Synthetic oligonucleotide
ccauagacguccccgaugc

SEQ ID NO: 1573511 - RNA, 19 nt, Artificial Sequence
  Description of Artificial Sequence: Synthetic oligonucleotide
ucugaauguugcccugaaa

SEQ ID NO: 1573512 - RNA, 19 nt, Artificial Sequence
  Description of Artificial Sequence: Synthetic oligonucleotide
gagaaguaguccugugcca

SEQ ID NO: 1573513 - RNA, 19 nt, Artificial Sequence
  Description of Artificial Sequence: Synthetic oligonucleotide
ugcccuuguguagaagugc

SEQ ID NO: 1573514 - RNA, 19 nt, Artificial Sequence
  Description of Artificial Sequence: Synthetic oligonucleotide
gauguagagcuccagugau

SEQ ID NO: 1573515 - RNA, 19 nt, Artificial Sequence
  Description of Artificial Sequence: Synthetic oligonucleotide
caggucuggcucuucuagg

SEQ ID NO: 1573516 - RNA, 19 nt, Artificial Sequence
  Description of Artificial Sequence: Synthetic oligonucleotide
uggucauguucuguucuag

SEQ ID NO: 1573517 - RNA, 19 nt, Artificial Sequence
  Description of Artificial Sequence: Synthetic oligonucleotide
acggucaucuucucugcca

SEQ ID NO: 1573518 - RNA, 19 nt, Artificial Sequence
  Description of Artificial Sequence: Synthetic oligonucleotide
caggugauaguugcccugg

SEQ ID NO: 1573519 - RNA, 19 nt, Artificial Sequence
  Description of Artificial Sequence: Synthetic oligonucleotide
uucugaauguugcccugaa

SEQ ID NO: 1573520 - RNA, 19 nt, Artificial Sequence
  Description of Artificial Sequence: Synthetic oligonucleotide
cuuugaguccuuggacacg

SEQ ID NO: 1573521 - RNA, 19 nt, Artificial Sequence
  Description of Artificial Sequence: Synthetic oligonucleotide
uguauguccuucgggccug

SEQ ID NO: 1573522 - RNA, 19 nt, Artificial Sequence
  Description of Artificial Sequence: Synthetic oligonucleotide
gaugcgggauggcgggagg

SEQ ID NO: 1573523 - RNA, 19 nt, Artificial Sequence
  Description of Artificial Sequence: Synthetic oligonucleotide
caggcuuguucccagccug

SEQ ID NO: 1573524 - RNA, 19 nt, Artificial Sequence
  Description of Artificial Sequence: Synthetic oligonucleotide
aguccaaggacuguaggua

SEQ ID NO: 1573525 - RNA, 19 nt, Artificial Sequence
  Description of Artificial Sequence: Synthetic oligonucleotide
cuguagguaauuggcugcc

SEQ ID NO: 1573526 - RNA, 19 nt, Artificial Sequence
  Description of Artificial Sequence: Synthetic oligonucleotide
uguuuaccucauccuggcu

SEQ ID NO: 1573527 - RNA, 19 nt, Artificial Sequence
  Description of Artificial Sequence: Synthetic oligonucleotide
ugcuauugugccggacccg

SEQ ID NO: 1573528 - RNA, 19 nt, Artificial Sequence
  Description of Artificial Sequence: Synthetic oligonucleotide
auaggcacuuauaggccuc

SEQ ID NO: 1573529 - RNA, 19 nt, Artificial Sequence
  Description of Artificial Sequence: Synthetic oligonucleotide
auauguuggcugaaggaau

SEQ ID NO: 1573530 - RNA, 19 nt, Artificial Sequence
  Description of Artificial Sequence: Synthetic oligonucleotide
uaauagcgcaaugcagugu

SEQ ID NO: 1573531 - RNA, 19 nt, Artificial Sequence
  Description of Artificial Sequence: Synthetic oligonucleotide
ggcaagaugcgggauggcg

SEQ ID NO: 1573532 - RNA, 19 nt, Artificial Sequence
  Description of Artificial Sequence: Synthetic oligonucleotide
auagcgcaaugcagugucc

SEQ ID NO: 1573533 - RNA, 19 nt, Artificial Sequence
  Description of Artificial Sequence: Synthetic oligonucleotide
ugcccugaaagcagugaau

SEQ ID NO: 1573534 - RNA, 19 nt, Artificial Sequence
  Description of Artificial Sequence: Synthetic oligonucleotide
cuggucaucuaagccauuc

SEQ ID NO: 1573535 - RNA, 19 nt, Artificial Sequence
  Description of Artificial Sequence: Synthetic oligonucleotide
cuucugucuugagacgccc

SEQ ID NO: 1573536 - RNA, 19 nt, Artificial Sequence
  Description of Artificial Sequence: Synthetic oligonucleotide
gaaagccugugcccuugug

SEQ ID NO: 1573537 - RNA, 19 nt, Artificial Sequence
  Description of Artificial Sequence: Synthetic oligonucleotide
gcucguaauagcgcaaugc

SEQ ID NO: 1573538 - RNA, 19 nt, Artificial Sequence
  Description of Artificial Sequence: Synthetic oligonucleotide
cagauuuuagcagugcucu

SEQ ID NO: 1573539 - RNA, 19 nt, Artificial Sequence
  Description of Artificial Sequence: Synthetic oligonucleotide
agcucguaauagcgcaaug

SEQ ID NO: 1573540 - RNA, 19 nt, Artificial Sequence
  Description of Artificial Sequence: Synthetic oligonucleotide
gucuccagauuuuagcagu

SEQ ID NO: 1573541 - RNA, 19 nt, Artificial Sequence
  Description of Artificial Sequence: Synthetic oligonucleotide
ucacuagggucaucuugcu

SEQ ID NO: 1573542 - RNA, 19 nt, Artificial Sequence
  Description of Artificial Sequence: Synthetic oligonucleotide
gccuguuuaccucauccug

SEQ ID NO: 1573543 - RNA, 19 nt, Artificial Sequence
  Description of Artificial Sequence: Synthetic oligonucleotide
uggcuauuucagcagccuu

SEQ ID NO: 1573544 - RNA, 19 nt, Artificial Sequence
  Description of Artificial Sequence: Synthetic oligonucleotide
ggauaggcacuuauaggcc

SEQ ID NO: 1573545 - RNA, 19 nt, Artificial Sequence
  Description of Artificial Sequence: Synthetic oligonucleotide
uguagguaauuggcugcca

SEQ ID NO: 1573546 - RNA, 19 nt, Artificial Sequence
  Description of Artificial Sequence: Synthetic oligonucleotide
ccagauuuuagcagugcuc

SEQ ID NO: 1573547 - RNA, 19 nt, Artificial Sequence
  Description of Artificial Sequence: Synthetic oligonucleotide
uggcgcaauacagcaguug

SEQ ID NO: 1573548 - RNA, 19 nt, Artificial Sequence
  Description of Artificial Sequence: Synthetic oligonucleotide
agccugugcccuuguguag

SEQ ID NO: 1573549 - RNA, 19 nt, Artificial Sequence
  Description of Artificial Sequence: Synthetic oligonucleotide
agcugccuuuccuggaaga

SEQ ID NO: 1573550 - RNA, 19 nt, Artificial Sequence
  Description of Artificial Sequence: Synthetic oligonucleotide
cuugagacgcccgcaaaga

SEQ ID NO: 1573551 - RNA, 19 nt, Artificial Sequence
  Description of Artificial Sequence: Synthetic oligonucleotide
ugcauaggcggauggcauu

SEQ ID NO: 1573552 - RNA, 19 nt, Artificial Sequence
  Description of Artificial Sequence: Synthetic oligonucleotide
agauuuccuucugucuuga

SEQ ID NO: 1573553 - RNA, 19 nt, Artificial Sequence
  Description of Artificial Sequence: Synthetic oligonucleotide
agaagugcacugccuguuu

SEQ ID NO: 1573554 - RNA, 19 nt, Artificial Sequence
  Description of Artificial Sequence: Synthetic oligonucleotide
guaggaugcagcccagucu

SEQ ID NO: 1573555 - RNA, 19 nt, Artificial Sequence
  Description of Artificial Sequence: Synthetic oligonucleotide
guagagcuccagugauugc

SEQ ID NO: 1573556 - RNA, 19 nt, Artificial Sequence
  Description of Artificial Sequence: Synthetic oligonucleotide
auggucauguucuguucua

SEQ ID NO: 1573557 - RNA, 19 nt, Artificial Sequence
  Description of Artificial Sequence: Synthetic oligonucleotide
ggcuagcuuggucuccugg

SEQ ID NO: 1573558 - RNA, 19 nt, Artificial Sequence
  Description of Artificial Sequence: Synthetic oligonucleotide
aagauacuuaaaggccauu

SEQ ID NO: 1573559 - RNA, 19 nt, Artificial Sequence
  Description of Artificial Sequence: Synthetic oligonucleotide
cauagacguccccgaugcg

SEQ ID NO: 1573560 - RNA, 19 nt, Artificial Sequence
  Description of Artificial Sequence: Synthetic oligonucleotide
caauacagcaguuggcaau

SEQ ID NO: 1573561 - RNA, 19 nt, Artificial Sequence
  Description of Artificial Sequence: Synthetic oligonucleotide
caaggcccgcccuuuggug

SEQ ID NO: 1573562 - RNA, 19 nt, Artificial Sequence
  Description of Artificial Sequence: Synthetic oligonucleotide
uccagugauugcaggucuu

SEQ ID NO: 1573563 - RNA, 19 nt, Artificial Sequence
  Description of Artificial Sequence: Synthetic oligonucleotide
gcuauugugccggacccgc

SEQ ID NO: 1573564 - RNA, 19 nt, Artificial Sequence
  Description of Artificial Sequence: Synthetic oligonucleotide
guccuucgggccuggauga

SEQ ID NO: 1573565 - RNA, 19 nt, Artificial Sequence
  Description of Artificial Sequence: Synthetic oligonucleotide
ugugccggacccgcucggg

SEQ ID NO: 1573566 - RNA, 19 nt, Artificial Sequence
  Description of Artificial Sequence: Synthetic oligonucleotide
ggucuggcucuucuaggag

SEQ ID NO: 1573567 - RNA, 19 nt, Artificial Sequence
  Description of Artificial Sequence: Synthetic oligonucleotide
agcgcaaugcaguguccau

SEQ ID NO: 1573568 - RNA, 19 nt, Artificial Sequence
  Description of Artificial Sequence: Synthetic oligonucleotide
gauaguugcccuggcgcaa

SEQ ID NO: 1573569 - RNA, 19 nt, Artificial Sequence
  Description of Artificial Sequence: Synthetic oligonucleotide
auguccuucgggccuggau

SEQ ID NO: 1573570 - RNA, 19 nt, Artificial Sequence
  Description of Artificial Sequence: Synthetic oligonucleotide
cugccaugauauagauuuc

SEQ ID NO: 1573571 - RNA, 19 nt, Artificial Sequence
  Description of Artificial Sequence: Synthetic oligonucleotide
guugcccugaaagcaguga

SEQ ID NO: 1573572 - RNA, 19 nt, Artificial Sequence
  Description of Artificial Sequence: Synthetic oligonucleotide
uucgggccuggaugaaccu

SEQ ID NO: 1573573 - RNA, 19 nt, Artificial Sequence
  Description of Artificial Sequence: Synthetic oligonucleotide
agcagcucacgccgugacu

SEQ ID NO: 1573574 - RNA, 19 nt, Artificial Sequence
  Description of Artificial Sequence: Synthetic oligonucleotide
guguauguccuucgggccu

SEQ ID NO: 1573575 - RNA, 19 nt, Artificial Sequence
  Description of Artificial Sequence: Synthetic oligonucleotide
ggccaggugauaguugccc

SEQ ID NO: 1573576 - RNA, 19 nt, Artificial Sequence
  Description of Artificial Sequence: Synthetic oligonucleotide
cuucuaggagcaguucaca

SEQ ID NO: 1573577 - RNA, 19 nt, Artificial Sequence
  Description of Artificial Sequence: Synthetic oligonucleotide
ccuccaugcuauugugccg

SEQ ID NO: 1573578 - RNA, 19 nt, Artificial Sequence
  Description of Artificial Sequence: Synthetic oligonucleotide
auaggcggauggcauuguu

SEQ ID NO: 1573579 - RNA, 19 nt, Artificial Sequence
  Description of Artificial Sequence: Synthetic oligonucleotide
uccaugcuauugugccgga

SEQ ID NO: 1573580 - RNA, 19 nt, Artificial Sequence
  Description of Artificial Sequence: Synthetic oligonucleotide
gccauagacguccccgaug

SEQ ID NO: 1573581 - RNA, 19 nt, Artificial Sequence
  Description of Artificial Sequence: Synthetic oligonucleotide
cagcucacgccgugacucc

SEQ ID NO: 1573582 - RNA, 19 nt, Artificial Sequence
  Description of Artificial Sequence: Synthetic oligonucleotide
caagauacuuaaaggccau

SEQ ID NO: 1573583 - RNA, 19 nt, Artificial Sequence
  Description of Artificial Sequence: Synthetic oligonucleotide
acgcccgcaaagaacacaa

SEQ ID NO: 1573584 - RNA, 19 nt, Artificial Sequence
  Description of Artificial Sequence: Synthetic oligonucleotide
gacgcccgcaaagaacaca

SEQ ID NO: 1573585 - RNA, 19 nt, Artificial Sequence
  Description of Artificial Sequence: Synthetic oligonucleotide
cagcaguuggcaauuugcu

SEQ ID NO: 1573586 - RNA, 19 nt, Artificial Sequence
  Description of Artificial Sequence: Synthetic oligonucleotide
gcauaggcggauggcauug

SEQ ID NO: 1573587 - RNA, 19 nt, Artificial Sequence
  Description of Artificial Sequence: Synthetic oligonucleotide
gcagcucacgccgugacuc

SEQ ID NO: 1573588 - RNA, 19 nt, Artificial Sequence
  Description of Artificial Sequence: Synthetic oligonucleotide
aagaugcgggauggcggga

SEQ ID NO: 1573589 - RNA, 19 nt, Artificial Sequence
  Description of Artificial Sequence: Synthetic oligonucleotide
cguuggcuauuucagcagc

SEQ ID NO: 1573590 - RNA, 19 nt, Artificial Sequence
  Description of Artificial Sequence: Synthetic oligonucleotide
cccgugagccuugucauag

SEQ ID NO: 1573591 - RNA, 19 nt, Artificial Sequence
  Description of Artificial Sequence: Synthetic oligonucleotide
gcaauacagcaguuggcaa

SEQ ID NO: 1573592 - RNA, 19 nt, Artificial Sequence
  Description of Artificial Sequence: Synthetic oligonucleotide
guaugauauguuggcugaa

SEQ ID NO: 1573593 - RNA, 19 nt, Artificial Sequence
  Description of Artificial Sequence: Synthetic oligonucleotide
ggagguccaaggcccgccc

SEQ ID NO: 1573594 - RNA, 19 nt, Artificial Sequence
  Description of Artificial Sequence: Synthetic oligonucleotide
gucuugagacgcccgcaaa

SEQ ID NO: 1573595 - RNA, 19 nt, Artificial Sequence
  Description of Artificial Sequence: Synthetic oligonucleotide
ugguaggaugcagcccagu

SEQ ID NO: 1573596 - RNA, 19 nt, Artificial Sequence
  Description of Artificial Sequence: Synthetic oligonucleotide
caaugccccgugagccuug

SEQ ID NO: 1573597 - RNA, 19 nt, Artificial Sequence
  Description of Artificial Sequence: Synthetic oligonucleotide
gcucucauacugccgggca

SEQ ID NO: 1573598 - RNA, 19 nt, Artificial Sequence
  Description of Artificial Sequence: Synthetic oligonucleotide
gucaaugccccgugagccu

SEQ ID NO: 1573599 - RNA, 19 nt, Artificial Sequence
  Description of Artificial Sequence: Synthetic oligonucleotide
cuccuugcauaggcggaug

SEQ ID NO: 1573600 - RNA, 19 nt, Artificial Sequence
  Description of Artificial Sequence: Synthetic oligonucleotide
guauguccuucgggccugg

SEQ ID NO: 1573601 - RNA, 19 nt, Artificial Sequence
  Description of Artificial Sequence: Synthetic oligonucleotide
gccauucuccuugcauagg

SEQ ID NO: 1573602 - RNA, 19 nt, Artificial Sequence
  Description of Artificial Sequence: Synthetic oligonucleotide
acagugcgcugguccacau

SEQ ID NO: 1573603 - RNA, 19 nt, Artificial Sequence
  Description of Artificial Sequence: Synthetic oligonucleotide
cuuuguagcugggcuagcu

SEQ ID NO: 1573604 - RNA, 19 nt, Artificial Sequence
  Description of Artificial Sequence: Synthetic oligonucleotide
gcgcaauacagcaguuggc

SEQ ID NO: 1573605 - RNA, 19 nt, Artificial Sequence
  Description of Artificial Sequence: Synthetic oligonucleotide
cuuauaggccucagucaau

SEQ ID NO: 1573606 - RNA, 19 nt, Artificial Sequence
  Description of Artificial Sequence: Synthetic oligonucleotide
auguagagcuccagugauu

SEQ ID NO: 1573607 - RNA, 19 nt, Artificial Sequence
  Description of Artificial Sequence: Synthetic oligonucleotide
uccagucucguuggcuauu

SEQ ID NO: 1573608 - RNA, 19 nt, Artificial Sequence
  Description of Artificial Sequence: Synthetic oligonucleotide
cucacgccgugacuccuca

SEQ ID NO: 1573609 - RNA, 19 nt, Artificial Sequence
  Description of Artificial Sequence: Synthetic oligonucleotide
caggagguccaaggcccgc

SEQ ID NO: 1573610 - RNA, 19 nt, Artificial Sequence
  Description of Artificial Sequence: Synthetic oligonucleotide
guaggggcccaggacuguc

SEQ ID NO: 1573611 - RNA, 19 nt, Artificial Sequence
  Description of Artificial Sequence: Synthetic oligonucleotide
cagucucguuggcuauuuc

SEQ ID NO: 1573612 - RNA, 19 nt, Artificial Sequence
  Description of Artificial Sequence: Synthetic oligonucleotide
uauguccuucgggccugga

SEQ ID NO: 1573613 - RNA, 19 nt, Artificial Sequence
  Description of Artificial Sequence: Synthetic oligonucleotide
agacguccccgaugcggau

SEQ ID NO: 1573614 - RNA, 19 nt, Artificial Sequence
  Description of Artificial Sequence: Synthetic oligonucleotide
ccucagucaaugccccgug

SEQ ID NO: 1573615 - RNA, 19 nt, Artificial Sequence
  Description of Artificial Sequence: Synthetic oligonucleotide
cccgcaaagaacacaauuu

SEQ ID NO: 1573616 - RNA, 19 nt, Artificial Sequence
  Description of Artificial Sequence: Synthetic oligonucleotide
uuaccucauccuggcucuc

SEQ ID NO: 1573617 - RNA, 19 nt, Artificial Sequence
  Description of Artificial Sequence: Synthetic oligonucleotide
guacugggcccaccaccuc

SEQ ID NO: 1573618 - RNA, 19 nt, Artificial Sequence
  Description of Artificial Sequence: Synthetic oligonucleotide
cacagugcgcugguccaca

SEQ ID NO: 1573619 - RNA, 19 nt, Artificial Sequence
  Description of Artificial Sequence: Synthetic oligonucleotide
auacagcaguuggcaauuu

SEQ ID NO: 1573620 - RNA, 19 nt, Artificial Sequence
  Description of Artificial Sequence: Synthetic oligonucleotide
cucugugucuccagauuuu

SEQ ID NO: 1573621 - RNA, 19 nt, Artificial Sequence
  Description of Artificial Sequence: Synthetic oligonucleotide
gccaugauauagauuuccu

SEQ ID NO: 1573622 - RNA, 19 nt, Artificial Sequence
  Description of Artificial Sequence: Synthetic oligonucleotide
cugccuuuccuggaagacu

SEQ ID NO: 1573623 - RNA, 19 nt, Artificial Sequence
  Description of Artificial Sequence: Synthetic oligonucleotide
gcucgggcaagaugcggga

SEQ ID NO: 1573624 - RNA, 19 nt, Artificial Sequence
  Description of Artificial Sequence: Synthetic oligonucleotide
ggcaaggugguaggaugca

SEQ ID NO: 1573625 - RNA, 19 nt, Artificial Sequence
  Description of Artificial Sequence: Synthetic oligonucleotide
gcgcaaugcaguguccauc

SEQ ID NO: 1573626 - RNA, 19 nt, Artificial Sequence
  Description of Artificial Sequence: Synthetic oligonucleotide
gcccgcaaagaacacaauu

SEQ ID NO: 1573627 - RNA, 19 nt, Artificial Sequence
  Description of Artificial Sequence: Synthetic oligonucleotide
cagugauugcaggucuucu

SEQ ID NO: 1573628 - RNA, 19 nt, Artificial Sequence
  Description of Artificial Sequence: Synthetic oligonucleotide
ccaugauauagauuuccuu

SEQ ID NO: 1573629 - RNA, 19 nt, Artificial Sequence
  Description of Artificial Sequence: Synthetic oligonucleotide
ccgugacuccucagacagg

SEQ ID NO: 1573630 - RNA, 19 nt, Artificial Sequence
  Description of Artificial Sequence: Synthetic oligonucleotide
cccgcucgggcaagaugcg

SEQ ID NO: 1573631 - RNA, 19 nt, Artificial Sequence
  Description of Artificial Sequence: Synthetic oligonucleotide
cuauugugccggacccgcu

SEQ ID NO: 1573632 - RNA, 19 nt, Artificial Sequence
  Description of Artificial Sequence: Synthetic oligonucleotide
ccggaccagggagaaguag

SEQ ID NO: 1573633 - RNA, 19 nt, Artificial Sequence
  Description of Artificial Sequence: Synthetic oligonucleotide
gcucuucuaggagcaguuc

SEQ ID NO: 1573634 - RNA, 19 nt, Artificial Sequence
  Description of Artificial Sequence: Synthetic oligonucleotide
gccaggugauaguugcccu

SEQ ID NO: 1573635 - RNA, 19 nt, Artificial Sequence
  Description of Artificial Sequence: Synthetic oligonucleotide
ccuucgggccuggaugaac

SEQ ID NO: 1573636 - RNA, 19 nt, Artificial Sequence
  Description of Artificial Sequence: Synthetic oligonucleotide
ccagccuguguguacuucu

SEQ ID NO: 1573637 - RNA, 19 nt, Artificial Sequence
  Description of Artificial Sequence: Synthetic oligonucleotide
cccgaugcggauggugcug

SEQ ID NO: 1573638 - RNA, 19 nt, Artificial Sequence
  Description of Artificial Sequence: Synthetic oligonucleotide
gggcuagcuuggucuccug

SEQ ID NO: 1573639 - RNA, 19 nt, Artificial Sequence
  Description of Artificial Sequence: Synthetic oligonucleotide
ccaugcuauugugccggac

SEQ ID NO: 1573640 - RNA, 19 nt, Artificial Sequence
  Description of Artificial Sequence: Synthetic oligonucleotide
ccagcucguaauagcgcaa

SEQ ID NO: 1573641 - RNA, 19 nt, Artificial Sequence
  Description of Artificial Sequence: Synthetic oligonucleotide
cagcucguaauagcgcaau

SEQ ID NO: 1573642 - RNA, 19 nt, Artificial Sequence
  Description of Artificial Sequence: Synthetic oligonucleotide
gcccaggacugucagggau

SEQ ID NO: 1573643 - RNA, 19 nt, Artificial Sequence
  Description of Artificial Sequence: Synthetic oligonucleotide
cacuagggucaucuugcuu

SEQ ID NO: 1573644 - RNA, 19 nt, Artificial Sequence
  Description of Artificial Sequence: Synthetic oligonucleotide
cggaccagggagaaguagu

SEQ ID NO: 1573645 - RNA, 19 nt, Artificial Sequence
  Description of Artificial Sequence: Synthetic oligonucleotide
gggcaagaugcgggauggc

SEQ ID NO: 1573646 - RNA, 19 nt, Artificial Sequence
  Description of Artificial Sequence: Synthetic oligonucleotide
cagugcgcugguccacaua

SEQ ID NO: 1573647 - RNA, 19 nt, Artificial Sequence
  Description of Artificial Sequence: Synthetic oligonucleotide
gccccgugagccuugucau

SEQ ID NO: 1573648 - RNA, 19 nt, Artificial Sequence
  Description of Artificial Sequence: Synthetic oligonucleotide
cuggcgcaauacagcaguu

SEQ ID NO: 1573649 - RNA, 19 nt, Artificial Sequence
  Description of Artificial Sequence: Synthetic oligonucleotide
ccugugcccuuguguagaa

SEQ ID NO: 1573650 - RNA, 19 nt, Artificial Sequence
  Description of Artificial Sequence: Synthetic oligonucleotide
cucgggcaagaugcgggau

SEQ ID NO: 1573651 - RNA, 19 nt, Artificial Sequence
  Description of Artificial Sequence: Synthetic oligonucleotide
gccgggcaaggugguagga

SEQ ID NO: 1573652 - RNA, 19 nt, Artificial Sequence
  Description of Artificial Sequence: Synthetic oligonucleotide
cgggauggcgggaggccca

SEQ ID NO: 1573653 - RNA, 19 nt, Artificial Sequence
  Description of Artificial Sequence: Synthetic oligonucleotide
ccccgugagccuugucaua

SEQ ID NO: 1573654 - RNA, 19 nt, Artificial Sequence
  Description of Artificial Sequence: Synthetic oligonucleotide
ccggacccgcucgggcaag

SEQ ID NO: 1573655 - RNA, 19 nt, Artificial Sequence
  Description of Artificial Sequence: Synthetic oligonucleotide
cgccaguccaaggacugua

SEQ ID NO: 1573656 - RNA, 19 nt, Artificial Sequence
  Description of Artificial Sequence: Synthetic oligonucleotide
ccagucucguuggcuauuu

SEQ ID NO: 1573657 - RNA, 19 nt, Artificial Sequence
  Description of Artificial Sequence: Synthetic oligonucleotide
ccgggcaaggugguaggau

SEQ ID NO: 1573658 - RNA, 19 nt, Artificial Sequence
  Description of Artificial Sequence: Synthetic oligonucleotide
gcaggucuucugagagcau

SEQ ID NO: 1573659 - RNA, 19 nt, Artificial Sequence
  Description of Artificial Sequence: Synthetic oligonucleotide
ggacccgcucgggcaagau

SEQ ID NO: 1573660 - RNA, 19 nt, Artificial Sequence
  Description of Artificial Sequence: Synthetic oligonucleotide
caggacugucagggaucau

SEQ ID NO: 1573661 - RNA, 19 nt, Artificial Sequence
  Description of Artificial Sequence: Synthetic oligonucleotide
cgcccgcaaagaacacaau

SEQ ID NO: 1573662 - RNA, 19 nt, Artificial Sequence
  Description of Artificial Sequence: Synthetic oligonucleotide
cggacccgcucgggcaaga

SEQ ID NO: 1573663 - RNA, 19 nt, Artificial Sequence
  Description of Artificial Sequence: Synthetic oligonucleotide
acuacauuuaaguagaaac

SEQ ID NO: 1573664 - RNA, 19 nt, Artificial Sequence
  Description of Artificial Sequence: Synthetic oligonucleotide
aauacaaguguacaucaac

SEQ ID NO: 1573665 - RNA, 19 nt, Artificial Sequence
  Description of Artificial Sequence: Synthetic oligonucleotide
gaaucuuucaaguuaacag

SEQ ID NO: 1573666 - RNA, 19 nt, Artificial Sequence
  Description of Artificial Sequence: Synthetic oligonucleotide
aaugucaagaaagaacacc

SEQ ID NO: 1573667 - RNA, 19 nt, Artificial Sequence
  Description of Artificial Sequence: Synthetic oligonucleotide
aaucuaacagucuucugcg

SEQ ID NO: 1573668 - RNA, 19 nt, Artificial Sequence
  Description of Artificial Sequence: Synthetic oligonucleotide
agaaaagaggagcagagcg

SEQ ID NO: 1573669 - RNA, 19 nt, Artificial Sequence
  Description of Artificial Sequence: Synthetic oligonucleotide
aauacaaagcuuuguauga

SEQ ID NO: 1573670 - RNA, 19 nt, Artificial Sequence
  Description of Artificial Sequence: Synthetic oligonucleotide
uuaaguagaaacgagauau

SEQ ID NO: 1573671 - RNA, 19 nt, Artificial Sequence
  Description of Artificial Sequence: Synthetic oligonucleotide
aagcacuacauuuaaguag

SEQ ID NO: 1573672 - RNA, 19 nt, Artificial Sequence
  Description of Artificial Sequence: Synthetic oligonucleotide
uuuauugaggcauuaauaa

SEQ ID NO: 1573673 - RNA, 19 nt, Artificial Sequence
  Description of Artificial Sequence: Synthetic oligonucleotide
aaaccuuguucccaguagc

SEQ ID NO: 1573674 - RNA, 19 nt, Artificial Sequence
  Description of Artificial Sequence: Synthetic oligonucleotide
uucaaguuaacagaaauug

SEQ ID NO: 1573675 - RNA, 19 nt, Artificial Sequence
  Description of Artificial Sequence: Synthetic oligonucleotide
cuacauuuaaguagaaacg

SEQ ID NO: 1573676 - RNA, 19 nt, Artificial Sequence
  Description of Artificial Sequence: Synthetic oligonucleotide
aaaauuaacccuaagcacu

SEQ ID NO: 1573677 - RNA, 19 nt, Artificial Sequence
  Description of Artificial Sequence: Synthetic oligonucleotide
uaagaaauuuacaagcacu

SEQ ID NO: 1573678 - RNA, 19 nt, Artificial Sequence
  Description of Artificial Sequence: Synthetic oligonucleotide
ugauccacagucaaaagug

SEQ ID NO: 1573679 - RNA, 19 nt, Artificial Sequence
  Description of Artificial Sequence: Synthetic oligonucleotide
auuaauaauacaaguguac

SEQ ID NO: 1573680 - RNA, 19 nt, Artificial Sequence
  Description of Artificial Sequence: Synthetic oligonucleotide
acauuuuagauccucgcgg

SEQ ID NO: 1573681 - RNA, 19 nt, Artificial Sequence
  Description of Artificial Sequence: Synthetic oligonucleotide
aacagaagcucccauccac

SEQ ID NO: 1573682 - RNA, 19 nt, Artificial Sequence
  Description of Artificial Sequence: Synthetic oligonucleotide
aaagcuuuguaugaaagcu

SEQ ID NO: 1573683 - RNA, 19 nt, Artificial Sequence
  Description of Artificial Sequence: Synthetic oligonucleotide
uaugaaagcucuuacuagc

SEQ ID NO: 1573684 - RNA, 19 nt, Artificial Sequence
  Description of Artificial Sequence: Synthetic oligonucleotide
aguguacaucaacugaucc

SEQ ID NO: 1573685 - RNA, 19 nt, Artificial Sequence
  Description of Artificial Sequence: Synthetic oligonucleotide
uuggcuguugauauuacag

SEQ ID NO: 1573686 - RNA, 19 nt, Artificial Sequence
  Description of Artificial Sequence: Synthetic oligonucleotide
caaucuaacagucuucugc

SEQ ID NO: 1573687 - RNA, 19 nt, Artificial Sequence
  Description of Artificial Sequence: Synthetic oligonucleotide
augucaagaaagaacaccc

SEQ ID NO: 1573688 - RNA, 19 nt, Artificial Sequence
  Description of Artificial Sequence: Synthetic oligonucleotide
ugacauaccaucacaaaac

SEQ ID NO: 1573689 - RNA, 19 nt, Artificial Sequence
  Description of Artificial Sequence: Synthetic oligonucleotide
agaaacgagauauaauucu

SEQ ID NO: 1573690 - RNA, 19 nt, Artificial Sequence
  Description of Artificial Sequence: Synthetic oligonucleotide
caguggacauuuuagaucc

SEQ ID NO: 1573691 - RNA, 19 nt, Artificial Sequence
  Description of Artificial Sequence: Synthetic oligonucleotide
auugaaaagggaauaaaag

SEQ ID NO: 1573692 - RNA, 19 nt, Artificial Sequence
  Description of Artificial Sequence: Synthetic oligonucleotide
gacauuuuagauccucgcg

SEQ ID NO: 1573693 - RNA, 19 nt, Artificial Sequence
  Description of Artificial Sequence: Synthetic oligonucleotide
ugguuugcacuuaaaacag

SEQ ID NO: 1573694 - RNA, 19 nt, Artificial Sequence
  Description of Artificial Sequence: Synthetic oligonucleotide
auaauacaaguguacauca

SEQ ID NO: 1573695 - RNA, 19 nt, Artificial Sequence
  Description of Artificial Sequence: Synthetic oligonucleotide
caugcacccaccaauaaag

SEQ ID NO: 1573696 - RNA, 19 nt, Artificial Sequence
  Description of Artificial Sequence: Synthetic oligonucleotide
uaaacggguagucugguga

SEQ ID NO: 1573697 - RNA, 19 nt, Artificial Sequence
  Description of Artificial Sequence: Synthetic oligonucleotide
uacauuuaaguagaaacga

SEQ ID NO: 1573698 - RNA, 19 nt, Artificial Sequence
  Description of Artificial Sequence: Synthetic oligonucleotide
uuuguaugaaagcucuuac

SEQ ID NO: 1573699 - RNA, 19 nt, Artificial Sequence
  Description of Artificial Sequence: Synthetic oligonucleotide
ugaaugugcuugcacacag

SEQ ID NO: 1573700 - RNA, 19 nt, Artificial Sequence
  Description of Artificial Sequence: Synthetic oligonucleotide
aaucccgaaucuuucaagu

SEQ ID NO: 1573701 - RNA, 19 nt, Artificial Sequence
  Description of Artificial Sequence: Synthetic oligonucleotide
gaaggcucgugauaaacag

SEQ ID NO: 1573702 - RNA, 19 nt, Artificial Sequence
  Description of Artificial Sequence: Synthetic oligonucleotide
ucaaguuaacagaaauuga

SEQ ID NO: 1573703 - RNA, 19 nt, Artificial Sequence
  Description of Artificial Sequence: Synthetic oligonucleotide
aacccuaagcacuacauuu

SEQ ID NO: 1573704 - RNA, 19 nt, Artificial Sequence
  Description of Artificial Sequence: Synthetic oligonucleotide
agugauucugauuggaccu

SEQ ID NO: 1573705 - RNA, 19 nt, Artificial Sequence
  Description of Artificial Sequence: Synthetic oligonucleotide
uggacauuuuagauccucg

SEQ ID NO: 1573706 - RNA, 19 nt, Artificial Sequence
  Description of Artificial Sequence: Synthetic oligonucleotide
ucuaacagucuucugcgug

SEQ ID NO: 1573707 - RNA, 19 nt, Artificial Sequence
  Description of Artificial Sequence: Synthetic oligonucleotide
uguucaaucuaacagucuu

SEQ ID NO: 1573708 - RNA, 19 nt, Artificial Sequence
  Description of Artificial Sequence: Synthetic oligonucleotide
auugaggcauuaauaauac

SEQ ID NO: 1573709 - RNA, 19 nt, Artificial Sequence
  Description of Artificial Sequence: Synthetic oligonucleotide
uacuguguggcaauacugc

SEQ ID NO: 1573710 - RNA, 19 nt, Artificial Sequence
  Description of Artificial Sequence: Synthetic oligonucleotide
uacaaguguacaucaacug

SEQ ID NO: 1573711 - RNA, 19 nt, Artificial Sequence
  Description of Artificial Sequence: Synthetic oligonucleotide
acuuuagagauggucaggg

SEQ ID NO: 1573712 - RNA, 19 nt, Artificial Sequence
  Description of Artificial Sequence: Synthetic oligonucleotide
uacaucaacugauccacag

SEQ ID NO: 1573713 - RNA, 19 nt, Artificial Sequence
  Description of Artificial Sequence: Synthetic oligonucleotide
gucucaguaaugcacagug

SEQ ID NO: 1573714 - RNA, 19 nt, Artificial Sequence
  Description of Artificial Sequence: Synthetic oligonucleotide
auuuacaagcacuuaagua

SEQ ID NO: 1573715 - RNA, 19 nt, Artificial Sequence
  Description of Artificial Sequence: Synthetic oligonucleotide
cuaacagucuucugcgugg

SEQ ID NO: 1573716 - RNA, 19 nt, Artificial Sequence
  Description of Artificial Sequence: Synthetic oligonucleotide
aacgagauauaauucugaa

SEQ ID NO: 1573717 - RNA, 19 nt, Artificial Sequence
  Description of Artificial Sequence: Synthetic oligonucleotide
aaagcucuuacuagcacag

SEQ ID NO: 1573718 - RNA, 19 nt, Artificial Sequence
  Description of Artificial Sequence: Synthetic oligonucleotide
cgagauauaauucugaaug

SEQ ID NO: 1573719 - RNA, 19 nt, Artificial Sequence
  Description of Artificial Sequence: Synthetic oligonucleotide
acaaguguacaucaacuga

SEQ ID NO: 1573720 - RNA, 19 nt, Artificial Sequence
  Description of Artificial Sequence: Synthetic oligonucleotide
ucgugcuccgcucuguugg

SEQ ID NO: 1573721 - RNA, 19 nt, Artificial Sequence
  Description of Artificial Sequence: Synthetic oligonucleotide
aaugacauaccaucacaaa

SEQ ID NO: 1573722 - RNA, 19 nt, Artificial Sequence
  Description of Artificial Sequence: Synthetic oligonucleotide
ucugauuggaccuuuugua

SEQ ID NO: 1573723 - RNA, 19 nt, Artificial Sequence
  Description of Artificial Sequence: Synthetic oligonucleotide
cucccguugaucuccaucg

SEQ ID NO: 1573724 - RNA, 19 nt, Artificial Sequence
  Description of Artificial Sequence: Synthetic oligonucleotide
cauuuuagauccucgcggc

SEQ ID NO: 1573725 - RNA, 19 nt, Artificial Sequence
  Description of Artificial Sequence: Synthetic oligonucleotide
uagaaacgagauauaauuc

SEQ ID NO: 1573726 - RNA, 19 nt, Artificial Sequence
  Description of Artificial Sequence: Synthetic oligonucleotide
uguacuguguggcaauacu

SEQ ID NO: 1573727 - RNA, 19 nt, Artificial Sequence
  Description of Artificial Sequence: Synthetic oligonucleotide
caaguuaacagaaauugaa

SEQ ID NO: 1573728 - RNA, 19 nt, Artificial Sequence
  Description of Artificial Sequence: Synthetic oligonucleotide
aacccaaaaccacacagua

SEQ ID NO: 1573729 - RNA, 19 nt, Artificial Sequence
  Description of Artificial Sequence: Synthetic oligonucleotide
aggcauuaauaauacaagu

SEQ ID NO: 1573730 - RNA, 19 nt, Artificial Sequence
  Description of Artificial Sequence: Synthetic oligonucleotide
cagugauucugauuggacc

SEQ ID NO: 1573731 - RNA, 19 nt, Artificial Sequence
  Description of Artificial Sequence: Synthetic oligonucleotide
gaaagcucuuacuagcaca

SEQ ID NO: 1573732 - RNA, 19 nt, Artificial Sequence
  Description of Artificial Sequence: Synthetic oligonucleotide
ugauuggaccuuuuguaca

SEQ ID NO: 1573733 - RNA, 19 nt, Artificial Sequence
  Description of Artificial Sequence: Synthetic oligonucleotide
aacugauccacagucaaaa

SEQ ID NO: 1573734 - RNA, 19 nt, Artificial Sequence
  Description of Artificial Sequence: Synthetic oligonucleotide
uuaacccuaagcacuacau

SEQ ID NO: 1573735 - RNA, 19 nt, Artificial Sequence
  Description of Artificial Sequence: Synthetic oligonucleotide
uguugauccgccacaguga

SEQ ID NO: 1573736 - RNA, 19 nt, Artificial Sequence
  Description of Artificial Sequence: Synthetic oligonucleotide
agauauaauucugaaugug

SEQ ID NO: 1573737 - RNA, 19 nt, Artificial Sequence
  Description of Artificial Sequence: Synthetic oligonucleotide
cacguaggccccuaggugg

SEQ ID NO: 1573738 - RNA, 19 nt, Artificial Sequence
  Description of Artificial Sequence: Synthetic oligonucleotide
caagcacuuaaguaaauca

SEQ ID NO: 1573739 - RNA, 19 nt, Artificial Sequence
  Description of Artificial Sequence: Synthetic oligonucleotide
guagaaacgagauauaauu

SEQ ID NO: 1573740 - RNA, 19 nt, Artificial Sequence
  Description of Artificial Sequence: Synthetic oligonucleotide
uuauugaggcauuaauaau

SEQ ID NO: 1573741 - RNA, 19 nt, Artificial Sequence
  Description of Artificial Sequence: Synthetic oligonucleotide
uuguaugaaagcucuuacu

SEQ ID NO: 1573742 - RNA, 19 nt, Artificial Sequence
  Description of Artificial Sequence: Synthetic oligonucleotide
aagaaauuuacaagcacuu

SEQ ID NO: 1573743 - RNA, 19 nt, Artificial Sequence
  Description of Artificial Sequence: Synthetic oligonucleotide
gaaucccgaaucuuucaag

SEQ ID NO: 1573744 - RNA, 19 nt, Artificial Sequence
  Description of Artificial Sequence: Synthetic oligonucleotide
gguaaugucaagaaagaac

SEQ ID NO: 1573745 - RNA, 19 nt, Artificial Sequence
  Description of Artificial Sequence: Synthetic oligonucleotide
aacaggaaacagaacggag

SEQ ID NO: 1573746 - RNA, 19 nt, Artificial Sequence
  Description of Artificial Sequence: Synthetic oligonucleotide
caguaaugcacagugauuc

SEQ ID NO: 1573747 - RNA, 19 nt, Artificial Sequence
  Description of Artificial Sequence: Synthetic oligonucleotide
aaaaguggcaggucccuaa

SEQ ID NO: 1573748 - RNA, 19 nt, Artificial Sequence
  Description of Artificial Sequence: Synthetic oligonucleotide
auuuuagauccucgcggcg

SEQ ID NO: 1573749 - RNA, 19 nt, Artificial Sequence
  Description of Artificial Sequence: Synthetic oligonucleotide
cauaccaucacaaaacagu

SEQ ID NO: 1573750 - RNA, 19 nt, Artificial Sequence
  Description of Artificial Sequence: Synthetic oligonucleotide
gccacagugauuuauugag

SEQ ID NO: 1573751 - RNA, 19 nt, Artificial Sequence
  Description of Artificial Sequence: Synthetic oligonucleotide
ucugacaugguuugcacuu

SEQ ID NO: 1573752 - RNA, 19 nt, Artificial Sequence
  Description of Artificial Sequence: Synthetic oligonucleotide
ggacaaaugacauaccauc

SEQ ID NO: 1573753 - RNA, 19 nt, Artificial Sequence
  Description of Artificial Sequence: Synthetic oligonucleotide
ugauauuacagugguagau

SEQ ID NO: 1573754 - RNA, 19 nt, Artificial Sequence
  Description of Artificial Sequence: Synthetic oligonucleotide
acaagcacuuaaguaaauc

SEQ ID NO: 1573755 - RNA, 19 nt, Artificial Sequence
  Description of Artificial Sequence: Synthetic oligonucleotide
aggcucgugauaaacaggg

SEQ ID NO: 1573756 - RNA, 19 nt, Artificial Sequence
  Description of Artificial Sequence: Synthetic oligonucleotide
aaaugacauaccaucacaa

SEQ ID NO: 1573757 - RNA, 19 nt, Artificial Sequence
  Description of Artificial Sequence: Synthetic oligonucleotide
cugcgugggguacagaagg

SEQ ID NO: 1573758 - RNA, 19 nt, Artificial Sequence
  Description of Artificial Sequence: Synthetic oligonucleotide
aaguguacaucaacugauc

SEQ ID NO: 1573759 - RNA, 19 nt, Artificial Sequence
  Description of Artificial Sequence: Synthetic oligonucleotide
acauuuaaguagaaacgag

SEQ ID NO: 1573760 - RNA, 19 nt, Artificial Sequence
  Description of Artificial Sequence: Synthetic oligonucleotide
aaacgagauauaauucuga

SEQ ID NO: 1573761 - RNA, 19 nt, Artificial Sequence
  Description of Artificial Sequence: Synthetic oligonucleotide
gauaaacagggucucagua

SEQ ID NO: 1573762 - RNA, 19 nt, Artificial Sequence
  Description of Artificial Sequence: Synthetic oligonucleotide
acaugguuugcacuuaaaa

SEQ ID NO: 1573763 - RNA, 19 nt, Artificial Sequence
  Description of Artificial Sequence: Synthetic oligonucleotide
aaagaacaccccuccuuca

SEQ ID NO: 1573764 - RNA, 19 nt, Artificial Sequence
  Description of Artificial Sequence: Synthetic oligonucleotide
gauccacagucaaaagugg

SEQ ID NO: 1573765 - RNA, 19 nt, Artificial Sequence
  Description of Artificial Sequence: Synthetic oligonucleotide
uucccaguagcaugcaccc

SEQ ID NO: 1573766 - RNA, 19 nt, Artificial Sequence
  Description of Artificial Sequence: Synthetic oligonucleotide
agugcuuggacugucguca

SEQ ID NO: 1573767 - RNA, 19 nt, Artificial Sequence
  Description of Artificial Sequence: Synthetic oligonucleotide
gucgucaacucucugugcc

SEQ ID NO: 1573768 - RNA, 19 nt, Artificial Sequence
  Description of Artificial Sequence: Synthetic oligonucleotide
uugauauuacagugguaga

SEQ ID NO: 1573769 - RNA, 19 nt, Artificial Sequence
  Description of Artificial Sequence: Synthetic oligonucleotide
aggacuuuagagaugguca

SEQ ID NO: 1573770 - RNA, 19 nt, Artificial Sequence
  Description of Artificial Sequence: Synthetic oligonucleotide
gagcacauaaaggagaaaa

SEQ ID NO: 1573771 - RNA, 19 nt, Artificial Sequence
  Description of Artificial Sequence: Synthetic oligonucleotide
cagaacggaggucuggagg

SEQ ID NO: 1573772 - RNA, 19 nt, Artificial Sequence
  Description of Artificial Sequence: Synthetic oligonucleotide
auuaacccuaagcacuaca

SEQ ID NO: 1573773 - RNA, 19 nt, Artificial Sequence
  Description of Artificial Sequence: Synthetic oligonucleotide
ugauccgccacagugauuu

SEQ ID NO: 1573774 - RNA, 19 nt, Artificial Sequence
  Description of Artificial Sequence: Synthetic oligonucleotide
cacacaguaauacaaagcu

SEQ ID NO: 1573775 - RNA, 19 nt, Artificial Sequence
  Description of Artificial Sequence: Synthetic oligonucleotide
uaauacaaguguacaucaa

SEQ ID NO: 1573776 - RNA, 19 nt, Artificial Sequence
  Description of Artificial Sequence: Synthetic oligonucleotide
auuuauugaggcauuaaua

SEQ ID NO: 1573777 - RNA, 19 nt, Artificial Sequence
  Description of Artificial Sequence: Synthetic oligonucleotide
aagcacuuaaguaaaucaa

SEQ ID NO: 1573778 - RNA, 19 nt, Artificial Sequence
  Description of Artificial Sequence: Synthetic oligonucleotide
ucccgaaucuuucaaguua

SEQ ID NO: 1573779 - RNA, 19 nt, Artificial Sequence
  Description of Artificial Sequence: Synthetic oligonucleotide
ugauaaacagggucucagu

SEQ ID NO: 1573780 - RNA, 19 nt, Artificial Sequence
  Description of Artificial Sequence: Synthetic oligonucleotide
agaaagaacaccccuccuu

SEQ ID NO: 1573781 - RNA, 19 nt, Artificial Sequence
  Description of Artificial Sequence: Synthetic oligonucleotide
aacggaggucuggaggggc

SEQ ID NO: 1573782 - RNA, 19 nt, Artificial Sequence
  Description of Artificial Sequence: Synthetic oligonucleotide
uggcuguugauauuacagu

SEQ ID NO: 1573783 - RNA, 19 nt, Artificial Sequence
  Description of Artificial Sequence: Synthetic oligonucleotide
cagggucucaguaaugcac

SEQ ID NO: 1573784 - RNA, 19 nt, Artificial Sequence
  Description of Artificial Sequence: Synthetic oligonucleotide
uucugcgugggguacagaa

SEQ ID NO: 1573785 - RNA, 19 nt, Artificial Sequence
  Description of Artificial Sequence: Synthetic oligonucleotide
auccacagucaaaaguggc

SEQ ID NO: 1573786 - RNA, 19 nt, Artificial Sequence
  Description of Artificial Sequence: Synthetic oligonucleotide
gugauaaacagggucucag

SEQ ID NO: 1573787 - RNA, 19 nt, Artificial Sequence
  Description of Artificial Sequence: Synthetic oligonucleotide
ugcacccaccaauaaagac

SEQ ID NO: 1573788 - RNA, 19 nt, Artificial Sequence
  Description of Artificial Sequence: Synthetic oligonucleotide
caaaugacauaccaucaca

SEQ ID NO: 1573789 - RNA, 19 nt, Artificial Sequence
  Description of Artificial Sequence: Synthetic oligonucleotide
aaugcacagugauucugau

SEQ ID NO: 1573790 - RNA, 19 nt, Artificial Sequence
  Description of Artificial Sequence: Synthetic oligonucleotide
uucggaaggugaccuuagg

SEQ ID NO: 1573791 - RNA, 19 nt, Artificial Sequence
  Description of Artificial Sequence: Synthetic oligonucleotide
agcucuuacuagcacagau

SEQ ID NO: 1573792 - RNA, 19 nt, Artificial Sequence
  Description of Artificial Sequence: Synthetic oligonucleotide
ggcuguugauauuacagug

SEQ ID NO: 1573793 - RNA, 19 nt, Artificial Sequence
  Description of Artificial Sequence: Synthetic oligonucleotide
uugggaggaggguccagcg

SEQ ID NO: 1573794 - RNA, 19 nt, Artificial Sequence
  Description of Artificial Sequence: Synthetic oligonucleotide
gggcuauugaugcacuugg

SEQ ID NO: 1573795 - RNA, 19 nt, Artificial Sequence
  Description of Artificial Sequence: Synthetic oligonucleotide
gacuuuagagauggucagg

SEQ ID NO: 1573796 - RNA, 19 nt, Artificial Sequence
  Description of Artificial Sequence: Synthetic oligonucleotide
aagaacaccccuccuucau

SEQ ID NO: 1573797 - RNA, 19 nt, Artificial Sequence
  Description of Artificial Sequence: Synthetic oligonucleotide
ucuuacuagcacagaucug

SEQ ID NO: 1573798 - RNA, 19 nt, Artificial Sequence
  Description of Artificial Sequence: Synthetic oligonucleotide
gaucugacaugguuugcac

SEQ ID NO: 1573799 - RNA, 19 nt, Artificial Sequence
  Description of Artificial Sequence: Synthetic oligonucleotide
aggaggagggacaaaugac

SEQ ID NO: 1573800 - RNA, 19 nt, Artificial Sequence
  Description of Artificial Sequence: Synthetic oligonucleotide
aaggcucgugauaaacagg

SEQ ID NO: 1573801 - RNA, 19 nt, Artificial Sequence
  Description of Artificial Sequence: Synthetic oligonucleotide
acugauccacagucaaaag

SEQ ID NO: 1573802 - RNA, 19 nt, Artificial Sequence
  Description of Artificial Sequence: Synthetic oligonucleotide
gauuggaccuuuuguacaa

SEQ ID NO: 1573803 - RNA, 19 nt, Artificial Sequence
  Description of Artificial Sequence: Synthetic oligonucleotide
cuuuagagauggucagggc

SEQ ID NO: 1573804 - RNA, 19 nt, Artificial Sequence
  Description of Artificial Sequence: Synthetic oligonucleotide
ucaaucuaacagucuucug

SEQ ID NO: 1573805 - RNA, 19 nt, Artificial Sequence
  Description of Artificial Sequence: Synthetic oligonucleotide
aacagaacggaggucugga

SEQ ID NO: 1573806 - RNA, 19 nt, Artificial Sequence
  Description of Artificial Sequence: Synthetic oligonucleotide
cccaauauaguugaccucc

SEQ ID NO: 1573807 - RNA, 19 nt, Artificial Sequence
  Description of Artificial Sequence: Synthetic oligonucleotide
uucucguucggaaggugac

SEQ ID NO: 1573808 - RNA, 19 nt, Artificial Sequence
  Description of Artificial Sequence: Synthetic oligonucleotide
aaacggguagucuggugaa

SEQ ID NO: 1573809 - RNA, 19 nt, Artificial Sequence
  Description of Artificial Sequence: Synthetic oligonucleotide
uuaaacggguagucuggug

SEQ ID NO: 1573810 - RNA, 19 nt, Artificial Sequence
  Description of Artificial Sequence: Synthetic oligonucleotide
aggucccuaagaaauuuac

SEQ ID NO: 1573811 - RNA, 19 nt, Artificial Sequence
  Description of Artificial Sequence: Synthetic oligonucleotide
cugucgucaacucucugug

SEQ ID NO: 1573812 - RNA, 19 nt, Artificial Sequence
  Description of Artificial Sequence: Synthetic oligonucleotide
gagauauaauucugaaugu

SEQ ID NO: 1573813 - RNA, 19 nt, Artificial Sequence
  Description of Artificial Sequence: Synthetic oligonucleotide
agcuuuguaugaaagcucu

SEQ ID NO: 1573814 - RNA, 19 nt, Artificial Sequence
  Description of Artificial Sequence: Synthetic oligonucleotide
cacuuggugaaugugcuug

SEQ ID NO: 1573815 - RNA, 19 nt, Artificial Sequence
  Description of Artificial Sequence: Synthetic oligonucleotide
guggcguaccgcuuggucc

SEQ ID NO: 1573816 - RNA, 19 nt, Artificial Sequence
  Description of Artificial Sequence: Synthetic oligonucleotide
acgagauauaauucugaau

SEQ ID NO: 1573817 - RNA, 19 nt, Artificial Sequence
  Description of Artificial Sequence: Synthetic oligonucleotide
uccaucggaacuuccucca

SEQ ID NO: 1573818 - RNA, 19 nt, Artificial Sequence
  Description of Artificial Sequence: Synthetic oligonucleotide
guucccaguagcaugcacc

SEQ ID NO: 1573819 - RNA, 19 nt, Artificial Sequence
  Description of Artificial Sequence: Synthetic oligonucleotide
gaaaagaggagcagagcga

SEQ ID NO: 1573820 - RNA, 19 nt, Artificial Sequence
  Description of Artificial Sequence: Synthetic oligonucleotide
uuacuagcacagaucugac

SEQ ID NO: 1573821 - RNA, 19 nt, Artificial Sequence
  Description of Artificial Sequence: Synthetic oligonucleotide
ucuccaucggaacuuccuc

SEQ ID NO: 1573822 - RNA, 19 nt, Artificial Sequence
  Description of Artificial Sequence: Synthetic oligonucleotide
agguucuugcugaacacuc

SEQ ID NO: 1573823 - RNA, 19 nt, Artificial Sequence
  Description of Artificial Sequence: Synthetic oligonucleotide
gcaggugggcuauugaugc

SEQ ID NO: 1573824 - RNA, 19 nt, Artificial Sequence
  Description of Artificial Sequence: Synthetic oligonucleotide
uuggacugucgucaacucu

SEQ ID NO: 1573825 - RNA, 19 nt, Artificial Sequence
  Description of Artificial Sequence: Synthetic oligonucleotide
gaugcacuuggugaaugug

SEQ ID NO: 1573826 - RNA, 19 nt, Artificial Sequence
  Description of Artificial Sequence: Synthetic oligonucleotide
uaccaucacaaaacaguuc

SEQ ID NO: 1573827 - RNA, 19 nt, Artificial Sequence
  Description of Artificial Sequence: Synthetic oligonucleotide
ggacauuuuagauccucgc

SEQ ID NO: 1573828 - RNA, 19 nt, Artificial Sequence
  Description of Artificial Sequence: Synthetic oligonucleotide
aggugggcuauugaugcac

SEQ ID NO: 1573829 - RNA, 19 nt, Artificial Sequence
  Description of Artificial Sequence: Synthetic oligonucleotide
uuuggcacugguugacagu

SEQ ID NO: 1573830 - RNA, 19 nt, Artificial Sequence
  Description of Artificial Sequence: Synthetic oligonucleotide
aguagaaacgagauauaau

SEQ ID NO: 1573831 - RNA, 19 nt, Artificial Sequence
  Description of Artificial Sequence: Synthetic oligonucleotide
ugggcuauugaugcacuug

SEQ ID NO: 1573832 - RNA, 19 nt, Artificial Sequence
  Description of Artificial Sequence: Synthetic oligonucleotide
ucgcucagguucuugcuga

SEQ ID NO: 1573833 - RNA, 19 nt, Artificial Sequence
  Description of Artificial Sequence: Synthetic oligonucleotide
uacuagcacagaucugaca

SEQ ID NO: 1573834 - RNA, 19 nt, Artificial Sequence
  Description of Artificial Sequence: Synthetic oligonucleotide
uuuaaacggguagucuggu

SEQ ID NO: 1573835 - RNA, 19 nt, Artificial Sequence
  Description of Artificial Sequence: Synthetic oligonucleotide
agagggucggcaggguugc

SEQ ID NO: 1573836 - RNA, 19 nt, Artificial Sequence
  Description of Artificial Sequence: Synthetic oligonucleotide
acauaccaucacaaaacag

SEQ ID NO: 1573837 - RNA, 19 nt, Artificial Sequence
  Description of Artificial Sequence: Synthetic oligonucleotide
agcacuuaaguaaaucaaa

SEQ ID NO: 1573838 - RNA, 19 nt, Artificial Sequence
  Description of Artificial Sequence: Synthetic oligonucleotide
uuggaccuuuuguacaaaa

SEQ ID NO: 1573839 - RNA, 19 nt, Artificial Sequence
  Description of Artificial Sequence: Synthetic oligonucleotide
uggcguaccgcuuggucca

SEQ ID NO: 1573840 - RNA, 19 nt, Artificial Sequence
  Description of Artificial Sequence: Synthetic oligonucleotide
guuugcacuuaaaacagaa

SEQ ID NO: 1573841 - RNA, 19 nt, Artificial Sequence
  Description of Artificial Sequence: Synthetic oligonucleotide
cucucugugccucagugga

SEQ ID NO: 1573842 - RNA, 19 nt, Artificial Sequence
  Description of Artificial Sequence: Synthetic oligonucleotide
ggugaggguaggaaggagg

SEQ ID NO: 1573843 - RNA, 19 nt, Artificial Sequence
  Description of Artificial Sequence: Synthetic oligonucleotide
aucugacaugguuugcacu

SEQ ID NO: 1573844 - RNA, 19 nt, Artificial Sequence
  Description of Artificial Sequence: Synthetic oligonucleotide
ucucccguugaucuccauc

SEQ ID NO: 1573845 - RNA, 19 nt, Artificial Sequence
  Description of Artificial Sequence: Synthetic oligonucleotide
ugucuggccauccggucgu

SEQ ID NO: 1573846 - RNA, 19 nt, Artificial Sequence
  Description of Artificial Sequence: Synthetic oligonucleotide
ugacaugguuugcacuuaa

SEQ ID NO: 1573847 - RNA, 19 nt, Artificial Sequence
  Description of Artificial Sequence: Synthetic oligonucleotide
ucccguugaucuccaucgg

SEQ ID NO: 1573848 - RNA, 19 nt, Artificial Sequence
  Description of Artificial Sequence: Synthetic oligonucleotide
cuagcacagaucugacaug

SEQ ID NO: 1573849 - RNA, 19 nt, Artificial Sequence
  Description of Artificial Sequence: Synthetic oligonucleotide
uguugauauuacaguggua

SEQ ID NO: 1573850 - RNA, 19 nt, Artificial Sequence
  Description of Artificial Sequence: Synthetic oligonucleotide
ggugaaugugcuugcacac

SEQ ID NO: 1573851 - RNA, 19 nt, Artificial Sequence
  Description of Artificial Sequence: Synthetic oligonucleotide
acagaacggaggucuggag

SEQ ID NO: 1573852 - RNA, 19 nt, Artificial Sequence
  Description of Artificial Sequence: Synthetic oligonucleotide
cucgugauaaacagggucu

SEQ ID NO: 1573853 - RNA, 19 nt, Artificial Sequence
  Description of Artificial Sequence: Synthetic oligonucleotide
gugggguacagaaggcucg

SEQ ID NO: 1573854 - RNA, 19 nt, Artificial Sequence
  Description of Artificial Sequence: Synthetic oligonucleotide
uagguggcguaccgcuugg

SEQ ID NO: 1573855 - RNA, 19 nt, Artificial Sequence
  Description of Artificial Sequence: Synthetic oligonucleotide
cuagguggcguaccgcuug

SEQ ID NO: 1573856 - RNA, 19 nt, Artificial Sequence
  Description of Artificial Sequence: Synthetic oligonucleotide
auguacuguguggcaauac

SEQ ID NO: 1573857 - RNA, 19 nt, Artificial Sequence
  Description of Artificial Sequence: Synthetic oligonucleotide
cggaaggugaccuuagggg

SEQ ID NO: 1573858 - RNA, 19 nt, Artificial Sequence
  Description of Artificial Sequence: Synthetic oligonucleotide
ugucgucaacucucugugc

SEQ ID NO: 1573859 - RNA, 19 nt, Artificial Sequence
  Description of Artificial Sequence: Synthetic oligonucleotide
accccuuggcuguugauau

SEQ ID NO: 1573860 - RNA, 19 nt, Artificial Sequence
  Description of Artificial Sequence: Synthetic oligonucleotide
gaaggaggagggacaaaug

SEQ ID NO: 1573861 - RNA, 19 nt, Artificial Sequence
  Description of Artificial Sequence: Synthetic oligonucleotide
ucggaacuuccuccacuag

SEQ ID NO: 1573862 - RNA, 19 nt, Artificial Sequence
  Description of Artificial Sequence: Synthetic oligonucleotide
ugcuccgcucuguugguca

SEQ ID NO: 1573863 - RNA, 19 nt, Artificial Sequence
  Description of Artificial Sequence: Synthetic oligonucleotide
ugcgugggguacagaaggc

SEQ ID NO: 1573864 - RNA, 19 nt, Artificial Sequence
  Description of Artificial Sequence: Synthetic oligonucleotide
uacaagcacuuaaguaaau

SEQ ID NO: 1573865 - RNA, 19 nt, Artificial Sequence
  Description of Artificial Sequence: Synthetic oligonucleotide
ugguagauucucguucgga

SEQ ID NO: 1573866 - RNA, 19 nt, Artificial Sequence
  Description of Artificial Sequence: Synthetic oligonucleotide
ucaacucucugugccucag

SEQ ID NO: 1573867 - RNA, 19 nt, Artificial Sequence
  Description of Artificial Sequence: Synthetic oligonucleotide
agcgugaucucugcaagcu

SEQ ID NO: 1573868 - RNA, 19 nt, Artificial Sequence
  Description of Artificial Sequence: Synthetic oligonucleotide
cagacagaucaccccuugg

SEQ ID NO: 1573869 - RNA, 19 nt, Artificial Sequence
  Description of Artificial Sequence: Synthetic oligonucleotide
uagcaugcacccaccaaua

SEQ ID NO: 1573870 - RNA, 19 nt, Artificial Sequence
  Description of Artificial Sequence: Synthetic oligonucleotide
acauauuauuuuguucaau

SEQ ID NO: 1573871 - RNA, 19 nt, Artificial Sequence
  Description of Artificial Sequence: Synthetic oligonucleotide
cagcugucuugcuggauag

SEQ ID NO: 1573872 - RNA, 19 nt, Artificial Sequence
  Description of Artificial Sequence: Synthetic oligonucleotide
aucggaacuuccuccacua

SEQ ID NO: 1573873 - RNA, 19 nt, Artificial Sequence
  Description of Artificial Sequence: Synthetic oligonucleotide
gcucgugauaaacaggguc

SEQ ID NO: 1573874 - RNA, 19 nt, Artificial Sequence
  Description of Artificial Sequence: Synthetic oligonucleotide
ucuucugcgugggguacag

SEQ ID NO: 1573875 - RNA, 19 nt, Artificial Sequence
  Description of Artificial Sequence: Synthetic oligonucleotide
ucccaauauaguugaccuc

SEQ ID NO: 1573876 - RNA, 19 nt, Artificial Sequence
  Description of Artificial Sequence: Synthetic oligonucleotide
cuuuguaugaaagcucuua

SEQ ID NO: 1573877 - RNA, 19 nt, Artificial Sequence
  Description of Artificial Sequence: Synthetic oligonucleotide
caaguguacaucaacugau

SEQ ID NO: 1573878 - RNA, 19 nt, Artificial Sequence
  Description of Artificial Sequence: Synthetic oligonucleotide
gguagauucucguucggaa

SEQ ID NO: 1573879 - RNA, 19 nt, Artificial Sequence
  Description of Artificial Sequence: Synthetic oligonucleotide
cuuggacugucgucaacuc

SEQ ID NO: 1573880 - RNA, 19 nt, Artificial Sequence
  Description of Artificial Sequence: Synthetic oligonucleotide
ggucccaauauaguugacc

SEQ ID NO: 1573881 - RNA, 19 nt, Artificial Sequence
  Description of Artificial Sequence: Synthetic oligonucleotide
ugaacacucucccguugau

SEQ ID NO: 1573882 - RNA, 19 nt, Artificial Sequence
  Description of Artificial Sequence: Synthetic oligonucleotide
cuugggcugaacuugcucu

SEQ ID NO: 1573883 - RNA, 19 nt, Artificial Sequence
  Description of Artificial Sequence: Synthetic oligonucleotide
aucuaacagucuucugcgu

SEQ ID NO: 1573884 - RNA, 19 nt, Artificial Sequence
  Description of Artificial Sequence: Synthetic oligonucleotide
ucgucaacucucugugccu

SEQ ID NO: 1573885 - RNA, 19 nt, Artificial Sequence
  Description of Artificial Sequence: Synthetic oligonucleotide
agucuucugcgugggguac

SEQ ID NO: 1573886 - RNA, 19 nt, Artificial Sequence
  Description of Artificial Sequence: Synthetic oligonucleotide
ugacaguuuggcagcuguc

SEQ ID NO: 1573887 - RNA, 19 nt, Artificial Sequence
  Description of Artificial Sequence: Synthetic oligonucleotide
guagcaugcacccaccaau

SEQ ID NO: 1573888 - RNA, 19 nt, Artificial Sequence
  Description of Artificial Sequence: Synthetic oligonucleotide
cuugcacacagcuggcaca

SEQ ID NO: 1573889 - RNA, 19 nt, Artificial Sequence
  Description of Artificial Sequence: Synthetic oligonucleotide
gugguagauucucguucgg

SEQ ID NO: 1573890 - RNA, 19 nt, Artificial Sequence
  Description of Artificial Sequence: Synthetic oligonucleotide
ucucguucggaaggugacc

SEQ ID NO: 1573891 - RNA, 19 nt, Artificial Sequence
  Description of Artificial Sequence: Synthetic oligonucleotide
auucucguucggaagguga

SEQ ID NO: 1573892 - RNA, 19 nt, Artificial Sequence
  Description of Artificial Sequence: Synthetic oligonucleotide
aacaccccuccuucauaga

SEQ ID NO: 1573893 - RNA, 19 nt, Artificial Sequence
  Description of Artificial Sequence: Synthetic oligonucleotide
agguaaugucaagaaagaa

SEQ ID NO: 1573894 - RNA, 19 nt, Artificial Sequence
  Description of Artificial Sequence: Synthetic oligonucleotide
uccgccacagugauuuauu

SEQ ID NO: 1573895 - RNA, 19 nt, Artificial Sequence
  Description of Artificial Sequence: Synthetic oligonucleotide
ccaccaauaaagacuucag

SEQ ID NO: 1573896 - RNA, 19 nt, Artificial Sequence
  Description of Artificial Sequence: Synthetic oligonucleotide
ucgugauaaacagggucuc

SEQ ID NO: 1573897 - RNA, 19 nt, Artificial Sequence
  Description of Artificial Sequence: Synthetic oligonucleotide
ccacagugauuuauugagg

SEQ ID NO: 1573898 - RNA, 19 nt, Artificial Sequence
  Description of Artificial Sequence: Synthetic oligonucleotide
gaacggaggucuggagggg

SEQ ID NO: 1573899 - RNA, 19 nt, Artificial Sequence
  Description of Artificial Sequence: Synthetic oligonucleotide
gucuggugaaaagguaaug

SEQ ID NO: 1573900 - RNA, 19 nt, Artificial Sequence
  Description of Artificial Sequence: Synthetic oligonucleotide
accuuuuguacaaaaccuu

SEQ ID NO: 1573901 - RNA, 19 nt, Artificial Sequence
  Description of Artificial Sequence: Synthetic oligonucleotide
cagcgugaucucugcaagc

SEQ ID NO: 1573902 - RNA, 19 nt, Artificial Sequence
  Description of Artificial Sequence: Synthetic oligonucleotide
aucccgaaucuuucaaguu

SEQ ID NO: 1573903 - RNA, 19 nt, Artificial Sequence
  Description of Artificial Sequence: Synthetic oligonucleotide
uccgcucuguuggucaugu

SEQ ID NO: 1573904 - RNA, 19 nt, Artificial Sequence
  Description of Artificial Sequence: Synthetic oligonucleotide
agcugucuugcuggauagc

SEQ ID NO: 1573905 - RNA, 19 nt, Artificial Sequence
  Description of Artificial Sequence: Synthetic oligonucleotide
ccaguuguccuugaggaug

SEQ ID NO: 1573906 - RNA, 19 nt, Artificial Sequence
  Description of Artificial Sequence: Synthetic oligonucleotide
gugaggguaggaaggagga

SEQ ID NO: 1573907 - RNA, 19 nt, Artificial Sequence
  Description of Artificial Sequence: Synthetic oligonucleotide
cugaacacucucccguuga

SEQ ID NO: 1573908 - RNA, 19 nt, Artificial Sequence
  Description of Artificial Sequence: Synthetic oligonucleotide
gauagcuuccccuccuuuu

SEQ ID NO: 1573909 - RNA, 19 nt, Artificial Sequence
  Description of Artificial Sequence: Synthetic oligonucleotide
acagaagcucccauccaca

SEQ ID NO: 1573910 - RNA, 19 nt, Artificial Sequence
  Description of Artificial Sequence: Synthetic oligonucleotide
cucaguggacauuuuagau

SEQ ID NO: 1573911 - RNA, 19 nt, Artificial Sequence
  Description of Artificial Sequence: Synthetic oligonucleotide
aggaggguccagcgugauc

SEQ ID NO: 1573912 - RNA, 19 nt, Artificial Sequence
  Description of Artificial Sequence: Synthetic oligonucleotide
agaacaccccuccuucaua

SEQ ID NO: 1573913 - RNA, 19 nt, Artificial Sequence
  Description of Artificial Sequence: Synthetic oligonucleotide
ccuaagcacuacauuuaag

SEQ ID NO: 1573914 - RNA, 19 nt, Artificial Sequence
  Description of Artificial Sequence: Synthetic oligonucleotide
agcaugcacccaccaauaa

SEQ ID NO: 1573915 - RNA, 19 nt, Artificial Sequence
  Description of Artificial Sequence: Synthetic oligonucleotide
gaacacucucccguugauc

SEQ ID NO: 1573916 - RNA, 19 nt, Artificial Sequence
  Description of Artificial Sequence: Synthetic oligonucleotide
aggagggacaaaugacaua

SEQ ID NO: 1573917 - RNA, 19 nt, Artificial Sequence
  Description of Artificial Sequence: Synthetic oligonucleotide
ggguacagaaggcucguga

SEQ ID NO: 1573918 - RNA, 19 nt, Artificial Sequence
  Description of Artificial Sequence: Synthetic oligonucleotide
auccggucgugcuccgcuc

SEQ ID NO: 1573919 - RNA, 19 nt, Artificial Sequence
  Description of Artificial Sequence: Synthetic oligonucleotide
ugcuuggacugucgucaac

SEQ ID NO: 1573920 - RNA, 19 nt, Artificial Sequence
  Description of Artificial Sequence: Synthetic oligonucleotide
cacagaucugacaugguuu

SEQ ID NO: 1573921 - RNA, 19 nt, Artificial Sequence
  Description of Artificial Sequence: Synthetic oligonucleotide
guacagaaggcucgugaua

SEQ ID NO: 1573922 - RNA, 19 nt, Artificial Sequence
  Description of Artificial Sequence: Synthetic oligonucleotide
aagcucuuacuagcacaga

SEQ ID NO: 1573923 - RNA, 19 nt, Artificial Sequence
  Description of Artificial Sequence: Synthetic oligonucleotide
aucaccccuuggcuguuga

SEQ ID NO: 1573924 - RNA, 19 nt, Artificial Sequence
  Description of Artificial Sequence: Synthetic oligonucleotide
ggaaucccgaaucuuucaa

SEQ ID NO: 1573925 - RNA, 19 nt, Artificial Sequence
  Description of Artificial Sequence: Synthetic oligonucleotide
gugaaugugcuugcacaca

SEQ ID NO: 1573926 - RNA, 19 nt, Artificial Sequence
  Description of Artificial Sequence: Synthetic oligonucleotide
guugauccgccacagugau

SEQ ID NO: 1573927 - RNA, 19 nt, Artificial Sequence
  Description of Artificial Sequence: Synthetic oligonucleotide
ggaggguccagcgugaucu

SEQ ID NO: 1573928 - RNA, 19 nt, Artificial Sequence
  Description of Artificial Sequence: Synthetic oligonucleotide
ccagcgugaucucugcaag

SEQ ID NO: 1573929 - RNA, 19 nt, Artificial Sequence
  Description of Artificial Sequence: Synthetic oligonucleotide
acggguagucuggugaaaa

SEQ ID NO: 1573930 - RNA, 19 nt, Artificial Sequence
  Description of Artificial Sequence: Synthetic oligonucleotide
ugggguacagaaggcucgu

SEQ ID NO: 1573931 - RNA, 19 nt, Artificial Sequence
  Description of Artificial Sequence: Synthetic oligonucleotide
cagaucugacaugguuugc

SEQ ID NO: 1573932 - RNA, 19 nt, Artificial Sequence
  Description of Artificial Sequence: Synthetic oligonucleotide
cucugugccucaguggaca

SEQ ID NO: 1573933 - RNA, 19 nt, Artificial Sequence
  Description of Artificial Sequence: Synthetic oligonucleotide
caccaauaaagacuucagu

SEQ ID NO: 1573934 - RNA, 19 nt, Artificial Sequence
  Description of Artificial Sequence: Synthetic oligonucleotide
ggcaggugggcuauugaug

SEQ ID NO: 1573935 - RNA, 19 nt, Artificial Sequence
  Description of Artificial Sequence: Synthetic oligonucleotide
gucgugcuccgcucuguug

SEQ ID NO: 1573936 - RNA, 19 nt, Artificial Sequence
  Description of Artificial Sequence: Synthetic oligonucleotide
gcacacguaggccccuagg

SEQ ID NO: 1573937 - RNA, 19 nt, Artificial Sequence
  Description of Artificial Sequence: Synthetic oligonucleotide
accuuguucccaguagcau

SEQ ID NO: 1573938 - RNA, 19 nt, Artificial Sequence
  Description of Artificial Sequence: Synthetic oligonucleotide
acccuaagcacuacauuua

SEQ ID NO: 1573939 - RNA, 19 nt, Artificial Sequence
  Description of Artificial Sequence: Synthetic oligonucleotide
cuccuuuggguccagcacu

SEQ ID NO: 1573940 - RNA, 19 nt, Artificial Sequence
  Description of Artificial Sequence: Synthetic oligonucleotide
caacugauccacagucaaa

SEQ ID NO: 1573941 - RNA, 19 nt, Artificial Sequence
  Description of Artificial Sequence: Synthetic oligonucleotide
cuccacuagugcuuggacu

SEQ ID NO: 1573942 - RNA, 19 nt, Artificial Sequence
  Description of Artificial Sequence: Synthetic oligonucleotide
ggucccuaagaaauuuaca

SEQ ID NO: 1573943 - RNA, 19 nt, Artificial Sequence
  Description of Artificial Sequence: Synthetic oligonucleotide
gcucuuacuagcacagauc

SEQ ID NO: 1573944 - RNA, 19 nt, Artificial Sequence
  Description of Artificial Sequence: Synthetic oligonucleotide
cagaucaccccuuggcugu

SEQ ID NO: 1573945 - RNA, 19 nt, Artificial Sequence
  Description of Artificial Sequence: Synthetic oligonucleotide
ccucaguggacauuuuaga

SEQ ID NO: 1573946 - RNA, 19 nt, Artificial Sequence
  Description of Artificial Sequence: Synthetic oligonucleotide
gugauuuauugaggcauua

SEQ ID NO: 1573947 - RNA, 19 nt, Artificial Sequence
  Description of Artificial Sequence: Synthetic oligonucleotide
augcacccaccaauaaaga

SEQ ID NO: 1573948 - RNA, 19 nt, Artificial Sequence
  Description of Artificial Sequence: Synthetic oligonucleotide
ucuggccauccggucgugc

SEQ ID NO: 1573949 - RNA, 19 nt, Artificial Sequence
  Description of Artificial Sequence: Synthetic oligonucleotide
cuuggugaaugugcuugca

SEQ ID NO: 1573950 - RNA, 19 nt, Artificial Sequence
  Description of Artificial Sequence: Synthetic oligonucleotide
gcaugcacccaccaauaaa

SEQ ID NO: 1573951 - RNA, 19 nt, Artificial Sequence
  Description of Artificial Sequence: Synthetic oligonucleotide
agagcacauaaaggagaaa

SEQ ID NO: 1573952 - RNA, 19 nt, Artificial Sequence
  Description of Artificial Sequence: Synthetic oligonucleotide
auuggaccuuuuguacaaa

SEQ ID NO: 1573953 - RNA, 19 nt, Artificial Sequence
  Description of Artificial Sequence: Synthetic oligonucleotide
cccgaaucuuucaaguuaa

SEQ ID NO: 1573954 - RNA, 19 nt, Artificial Sequence
  Description of Artificial Sequence: Synthetic oligonucleotide
gguggcguaccgcuugguc

SEQ ID NO: 1573955 - RNA, 19 nt, Artificial Sequence
  Description of Artificial Sequence: Synthetic oligonucleotide
guacaucaacugauccaca

SEQ ID NO: 1573956 - RNA, 19 nt, Artificial Sequence
  Description of Artificial Sequence: Synthetic oligonucleotide
auccgccacagugauuuau

SEQ ID NO: 1573957 - RNA, 19 nt, Artificial Sequence
  Description of Artificial Sequence: Synthetic oligonucleotide
cguugaucuccaucggaac

SEQ ID NO: 1573958 - RNA, 19 nt, Artificial Sequence
  Description of Artificial Sequence: Synthetic oligonucleotide
gggcugaacuugcucucgc

SEQ ID NO: 1573959 - RNA, 19 nt, Artificial Sequence
  Description of Artificial Sequence: Synthetic oligonucleotide
ucccaguagcaugcaccca

SEQ ID NO: 1573960 - RNA, 19 nt, Artificial Sequence
  Description of Artificial Sequence: Synthetic oligonucleotide
caucggaacuuccuccacu

SEQ ID NO: 1573961 - RNA, 19 nt, Artificial Sequence
  Description of Artificial Sequence: Synthetic oligonucleotide
gccccuagguggcguaccg

SEQ ID NO: 1573962 - RNA, 19 nt, Artificial Sequence
  Description of Artificial Sequence: Synthetic oligonucleotide
caguagcaugcacccacca

SEQ ID NO: 1573963 - RNA, 19 nt, Artificial Sequence
  Description of Artificial Sequence: Synthetic oligonucleotide
ccagacagaucaccccuug

SEQ ID NO: 1573964 - RNA, 19 nt, Artificial Sequence
  Description of Artificial Sequence: Synthetic oligonucleotide
gaucaccccuuggcuguug

SEQ ID NO: 1573965 - RNA, 19 nt, Artificial Sequence
  Description of Artificial Sequence: Synthetic oligonucleotide
caggucccuaagaaauuua

SEQ ID NO: 1573966 - RNA, 19 nt, Artificial Sequence
  Description of Artificial Sequence: Synthetic oligonucleotide
ucaccccuuggcuguugau

SEQ ID NO: 1573967 - RNA, 19 nt, Artificial Sequence
  Description of Artificial Sequence: Synthetic oligonucleotide
cucguucggaaggugaccu

SEQ ID NO: 1573968 - RNA, 19 nt, Artificial Sequence
  Description of Artificial Sequence: Synthetic oligonucleotide
ucguucggaaggugaccuu

SEQ ID NO: 1573969 - RNA, 19 nt, Artificial Sequence
  Description of Artificial Sequence: Synthetic oligonucleotide
uggcacugguugacaguuu

SEQ ID NO: 1573970 - RNA, 19 nt, Artificial Sequence
  Description of Artificial Sequence: Synthetic oligonucleotide
cgaaucuuucaaguuaaca

SEQ ID NO: 1573971 - RNA, 19 nt, Artificial Sequence
  Description of Artificial Sequence: Synthetic oligonucleotide
ccguugaucuccaucggaa

SEQ ID NO: 1573972 - RNA, 19 nt, Artificial Sequence
  Description of Artificial Sequence: Synthetic oligonucleotide
ccgccacagugauuuauug

SEQ ID NO: 1573973 - RNA, 19 nt, Artificial Sequence
  Description of Artificial Sequence: Synthetic oligonucleotide
agcacagaucugacauggu

SEQ ID NO: 1573974 - RNA, 19 nt, Artificial Sequence
  Description of Artificial Sequence: Synthetic oligonucleotide
ccuccacuagugcuuggac

SEQ ID NO: 1573975 - RNA, 19 nt, Artificial Sequence
  Description of Artificial Sequence: Synthetic oligonucleotide
gcuuggacugucgucaacu

SEQ ID NO: 1573976 - RNA, 19 nt, Artificial Sequence
  Description of Artificial Sequence: Synthetic oligonucleotide
ggcacacguaggccccuag

SEQ ID NO: 1573977 - RNA, 19 nt, Artificial Sequence
  Description of Artificial Sequence: Synthetic oligonucleotide
caauauaguugaccuccau

SEQ ID NO: 1573978 - RNA, 19 nt, Artificial Sequence
  Description of Artificial Sequence: Synthetic oligonucleotide
ccgaaucuuucaaguuaac

SEQ ID NO: 1573979 - RNA, 19 nt, Artificial Sequence
  Description of Artificial Sequence: Synthetic oligonucleotide
acggaggucuggaggggca

SEQ ID NO: 1573980 - RNA, 19 nt, Artificial Sequence
  Description of Artificial Sequence: Synthetic oligonucleotide
cggguagucuggugaaaag

SEQ ID NO: 1573981 - RNA, 19 nt, Artificial Sequence
  Description of Artificial Sequence: Synthetic oligonucleotide
cauguacuguguggcaaua

SEQ ID NO: 1573982 - RNA, 19 nt, Artificial Sequence
  Description of Artificial Sequence: Synthetic oligonucleotide
caccccuuggcuguugaua

SEQ ID NO: 1573983 - RNA, 19 nt, Artificial Sequence
  Description of Artificial Sequence: Synthetic oligonucleotide
gcgugaucucugcaagcuc

SEQ ID NO: 1573984 - RNA, 19 nt, Artificial Sequence
  Description of Artificial Sequence: Synthetic oligonucleotide
gucuucugcgugggguaca

SEQ ID NO: 1573985 - RNA, 19 nt, Artificial Sequence
  Description of Artificial Sequence: Synthetic oligonucleotide
ccaucggaacuuccuccac

SEQ ID NO: 1573986 - RNA, 19 nt, Artificial Sequence
  Description of Artificial Sequence: Synthetic oligonucleotide
cguaccgcuugguccacug

SEQ ID NO: 1573987 - RNA, 19 nt, Artificial Sequence
  Description of Artificial Sequence: Synthetic oligonucleotide
acucucccguugaucucca

SEQ ID NO: 1573988 - RNA, 19 nt, Artificial Sequence
  Description of Artificial Sequence: Synthetic oligonucleotide
cugucuugcuggauagcuu

SEQ ID NO: 1573989 - RNA, 19 nt, Artificial Sequence
  Description of Artificial Sequence: Synthetic oligonucleotide
gauccgccacagugauuua

SEQ ID NO: 1573990 - RNA, 19 nt, Artificial Sequence
  Description of Artificial Sequence: Synthetic oligonucleotide
cuccgcucuguuggucaug

SEQ ID NO: 1573991 - RNA, 19 nt, Artificial Sequence
  Description of Artificial Sequence: Synthetic oligonucleotide
cccguugaucuccaucgga

SEQ ID NO: 1573992 - RNA, 19 nt, Artificial Sequence
  Description of Artificial Sequence: Synthetic oligonucleotide
gggcaggugggcuauugau

SEQ ID NO: 1573993 - RNA, 19 nt, Artificial Sequence
  Description of Artificial Sequence: Synthetic oligonucleotide
cgccacagugauuuauuga

SEQ ID NO: 1573994 - RNA, 19 nt, Artificial Sequence
  Description of Artificial Sequence: Synthetic oligonucleotide
ccgcuugguccacugucug

SEQ ID NO: 1573995 - RNA, 19 nt, Artificial Sequence
  Description of Artificial Sequence: Synthetic oligonucleotide
guaccgcuugguccacugu

SEQ ID NO: 1573996 - RNA, 19 nt, Artificial Sequence
  Description of Artificial Sequence: Synthetic oligonucleotide
agaucaccccuuggcuguu

SEQ ID NO: 1573997 - RNA, 19 nt, Artificial Sequence
  Description of Artificial Sequence: Synthetic oligonucleotide
gccauccggucgugcuccg

SEQ ID NO: 1573998 - RNA, 19 nt, Artificial Sequence
  Description of Artificial Sequence: Synthetic oligonucleotide
agguggcguaccgcuuggu

SEQ ID NO: 1573999 - RNA, 19 nt, Artificial Sequence
  Description of Artificial Sequence: Synthetic oligonucleotide
ggucucaguaaugcacagu

SEQ ID NO: 1574000 - RNA, 19 nt, Artificial Sequence
  Description of Artificial Sequence: Synthetic oligonucleotide
uggcacacguaggccccua

SEQ ID NO: 1574001 - RNA, 19 nt, Artificial Sequence
  Description of Artificial Sequence: Synthetic oligonucleotide
gagcgaaggggaggagggu

SEQ ID NO: 1574002 - RNA, 19 nt, Artificial Sequence
  Description of Artificial Sequence: Synthetic oligonucleotide
gugcuccgcucuguugguc

SEQ ID NO: 1574003 - RNA, 19 nt, Artificial Sequence
  Description of Artificial Sequence: Synthetic oligonucleotide
gcagagcgaaggggaggag

SEQ ID NO: 1574004 - RNA, 19 nt, Artificial Sequence
  Description of Artificial Sequence: Synthetic oligonucleotide
cccuagguggcguaccgcu

SEQ ID NO: 1574005 - RNA, 19 nt, Artificial Sequence
  Description of Artificial Sequence: Synthetic oligonucleotide
ggcuauugaugcacuuggu

SEQ ID NO: 1574006 - RNA, 19 nt, Artificial Sequence
  Description of Artificial Sequence: Synthetic oligonucleotide
gguugacaguuuggcagcu

SEQ ID NO: 1574007 - RNA, 19 nt, Artificial Sequence
  Description of Artificial Sequence: Synthetic oligonucleotide
gucuggccauccggucgug

SEQ ID NO: 1574008 - RNA, 19 nt, Artificial Sequence
  Description of Artificial Sequence: Synthetic oligonucleotide
ggacugucgucaacucucu

SEQ ID NO: 1574009 - RNA, 19 nt, Artificial Sequence
  Description of Artificial Sequence: Synthetic oligonucleotide
gcacuacauuuaaguagaa

SEQ ID NO: 1574010 - RNA, 19 nt, Artificial Sequence
  Description of Artificial Sequence: Synthetic oligonucleotide
gggucccaauauaguugac

SEQ ID NO: 1574011 - RNA, 19 nt, Artificial Sequence
  Description of Artificial Sequence: Synthetic oligonucleotide
ccuuuggguccagcacuac

SEQ ID NO: 1574012 - RNA, 19 nt, Artificial Sequence
  Description of Artificial Sequence: Synthetic oligonucleotide
ccccuagguggcguaccgc

SEQ ID NO: 1574013 - RNA, 19 nt, Artificial Sequence
  Description of Artificial Sequence: Synthetic oligonucleotide
gcgugggguacagaaggcu

SEQ ID NO: 1574014 - RNA, 19 nt, Artificial Sequence
  Description of Artificial Sequence: Synthetic oligonucleotide
ccggucgugcuccgcucug

SEQ ID NO: 1574015 - RNA, 19 nt, Artificial Sequence
  Description of Artificial Sequence: Synthetic oligonucleotide
gagggucggcaggguugca

SEQ ID NO: 1574016 - RNA, 19 nt, Artificial Sequence
  Description of Artificial Sequence: Synthetic oligonucleotide
cguucggaaggugaccuua

SEQ ID NO: 1574017 - RNA, 19 nt, Artificial Sequence
  Description of Artificial Sequence: Synthetic oligonucleotide
ggcucgugauaaacagggu

SEQ ID NO: 1574018 - RNA, 19 nt, Artificial Sequence
  Description of Artificial Sequence: Synthetic oligonucleotide
ggucgugcuccgcucuguu

SEQ ID NO: 1574019 - RNA, 19 nt, Artificial Sequence
  Description of Artificial Sequence: Synthetic oligonucleotide
gcuuuguaugaaagcucuu

SEQ ID NO: 1574020 - RNA, 19 nt, Artificial Sequence
  Description of Artificial Sequence: Synthetic oligonucleotide
ggcguaccgcuugguccac

SEQ ID NO: 1574021 - RNA, 19 nt, Artificial Sequence
  Description of Artificial Sequence: Synthetic oligonucleotide
gcuccgcucuguuggucau

SEQ ID NO: 1574022 - RNA, 19 nt, Artificial Sequence
  Description of Artificial Sequence: Synthetic oligonucleotide
cugugccucaguggacauu

SEQ ID NO: 1574023 - RNA, 19 nt, Artificial Sequence
  Description of Artificial Sequence: Synthetic oligonucleotide
cucucccguugaucuccau

SEQ ID NO: 1574024 - RNA, 19 nt, Artificial Sequence
  Description of Artificial Sequence: Synthetic oligonucleotide
ccccuccuucauagacaga

SEQ ID NO: 1574025 - RNA, 19 nt, Artificial Sequence
  Description of Artificial Sequence: Synthetic oligonucleotide
gugccucaguggacauuuu

SEQ ID NO: 1574026 - RNA, 19 nt, Artificial Sequence
  Description of Artificial Sequence: Synthetic oligonucleotide
cgugcuccgcucuguuggu

SEQ ID NO: 1574027 - RNA, 19 nt, Artificial Sequence
  Description of Artificial Sequence: Synthetic oligonucleotide
gcguaccgcuugguccacu

SEQ ID NO: 1574028 - RNA, 19 nt, Artificial Sequence
  Description of Artificial Sequence: Synthetic oligonucleotide
cggucgugcuccgcucugu

SEQ ID NO: 1574029 - RNA, 19 nt, Artificial Sequence
  Description of Artificial Sequence: Synthetic oligonucleotide
aaaagaaucacuuucgaug

SEQ ID NO: 1574030 - RNA, 19 nt, Artificial Sequence
  Description of Artificial Sequence: Synthetic oligonucleotide
aaagaaucacuuucgaugg

SEQ ID NO: 1574031 - RNA, 19 nt, Artificial Sequence
  Description of Artificial Sequence: Synthetic oligonucleotide
agauuuacuauucacaaug

SEQ ID NO: 1574032 - RNA, 19 nt, Artificial Sequence
  Description of Artificial Sequence: Synthetic oligonucleotide
uuacuauucacaauguuug

SEQ ID NO: 1574033 - RNA, 19 nt, Artificial Sequence
  Description of Artificial Sequence: Synthetic oligonucleotide
ucaaccauaagucucuucc

SEQ ID NO: 1574034 - RNA, 19 nt, Artificial Sequence
  Description of Artificial Sequence: Synthetic oligonucleotide
uuuauaauagauuuacuau

SEQ ID NO: 1574035 - RNA, 19 nt, Artificial Sequence
  Description of Artificial Sequence: Synthetic oligonucleotide
aauauguuuucaugcacuc

SEQ ID NO: 1574036 - RNA, 19 nt, Artificial Sequence
  Description of Artificial Sequence: Synthetic oligonucleotide
ucucucauaagaaugggag

SEQ ID NO: 1574037 - RNA, 19 nt, Artificial Sequence
  Description of Artificial Sequence: Synthetic oligonucleotide
auaaauuuggaugagcuag

SEQ ID NO: 1574038 - RNA, 19 nt, Artificial Sequence
  Description of Artificial Sequence: Synthetic oligonucleotide
uagagaauugucaucuugg

SEQ ID NO: 1574039 - RNA, 19 nt, Artificial Sequence
  Description of Artificial Sequence: Synthetic oligonucleotide
cauuaaucuuucuugacgg

SEQ ID NO: 1574040 - RNA, 19 nt, Artificial Sequence
  Description of Artificial Sequence: Synthetic oligonucleotide
ucuaauccagcuuugaugu

SEQ ID NO: 1574041 - RNA, 19 nt, Artificial Sequence
  Description of Artificial Sequence: Synthetic oligonucleotide
uuuuacuuguuccaccagg

SEQ ID NO: 1574042 - RNA, 19 nt, Artificial Sequence
  Description of Artificial Sequence: Synthetic oligonucleotide
auaagucucuuccucaggc

SEQ ID NO: 1574043 - RNA, 19 nt, Artificial Sequence
  Description of Artificial Sequence: Synthetic oligonucleotide
auaagaaugggagcgaggc

SEQ ID NO: 1574044 - RNA, 19 nt, Artificial Sequence
  Description of Artificial Sequence: Synthetic oligonucleotide
uugauuagcuuuauuaaca

SEQ ID NO: 1574045 - RNA, 19 nt, Artificial Sequence
  Description of Artificial Sequence: Synthetic oligonucleotide
uuucgcagcagcuucaagg

SEQ ID NO: 1574046 - RNA, 19 nt, Artificial Sequence
  Description of Artificial Sequence: Synthetic oligonucleotide
uauaauagauuuacuauuc

SEQ ID NO: 1574047 - RNA, 19 nt, Artificial Sequence
  Description of Artificial Sequence: Synthetic oligonucleotide
uuuacuucaucccugacau

SEQ ID NO: 1574048 - RNA, 19 nt, Artificial Sequence
  Description of Artificial Sequence: Synthetic oligonucleotide
uuuacuuguuccaccaggg

SEQ ID NO: 1574049 - RNA, 19 nt, Artificial Sequence
  Description of Artificial Sequence: Synthetic oligonucleotide
aaccucaauuuucacaagg

SEQ ID NO: 1574050 - RNA, 19 nt, Artificial Sequence
  Description of Artificial Sequence: Synthetic oligonucleotide
ugcuuuuggaccgagaccg

SEQ ID NO: 1574051 - RNA, 19 nt, Artificial Sequence
  Description of Artificial Sequence: Synthetic oligonucleotide
ugucuguugaauaaaagaa

SEQ ID NO: 1574052 - RNA, 19 nt, Artificial Sequence
  Description of Artificial Sequence: Synthetic oligonucleotide
aauuggcuaaauuauucug

SEQ ID NO: 1574053 - RNA, 19 nt, Artificial Sequence
  Description of Artificial Sequence: Synthetic oligonucleotide
ucuguugaauaaaagaauc

SEQ ID NO: 1574054 - RNA, 19 nt, Artificial Sequence
  Description of Artificial Sequence: Synthetic oligonucleotide
uuuacuauucacaauguuu

SEQ ID NO: 1574055 - RNA, 19 nt, Artificial Sequence
  Description of Artificial Sequence: Synthetic oligonucleotide
aaucuuucuugacggaggg

SEQ ID NO: 1574056 - RNA, 19 nt, Artificial Sequence
  Description of Artificial Sequence: Synthetic oligonucleotide
uguaaucuggcuuuggccu

SEQ ID NO: 1574057 - RNA, 19 nt, Artificial Sequence
  Description of Artificial Sequence: Synthetic oligonucleotide
aauuaaucucuugaaccac

SEQ ID NO: 1574058 - RNA, 19 nt, Artificial Sequence
  Description of Artificial Sequence: Synthetic oligonucleotide
acaauauguuuucaugcac

SEQ ID NO: 1574059 - RNA, 19 nt, Artificial Sequence
  Description of Artificial Sequence: Synthetic oligonucleotide
uugauucaaaucaacaaau

SEQ ID NO: 1574060 - RNA, 19 nt, Artificial Sequence
  Description of Artificial Sequence: Synthetic oligonucleotide
uuuaaugcuguguacuucu

SEQ ID NO: 1574061 - RNA, 19 nt, Artificial Sequence
  Description of Artificial Sequence: Synthetic oligonucleotide
cucuauaggacuucccucg

SEQ ID NO: 1574062 - RNA, 19 nt, Artificial Sequence
  Description of Artificial Sequence: Synthetic oligonucleotide
uguugaauaaaagaaucac

SEQ ID NO: 1574063 - RNA, 19 nt, Artificial Sequence
  Description of Artificial Sequence: Synthetic oligonucleotide
gcaauuaaucucuugaacc

SEQ ID NO: 1574064 - RNA, 19 nt, Artificial Sequence
  Description of Artificial Sequence: Synthetic oligonucleotide
uaccuuuuauaauagauuu

SEQ ID NO: 1574065 - RNA, 19 nt, Artificial Sequence
  Description of Artificial Sequence: Synthetic oligonucleotide
ucugcuuuuggaccgagac

SEQ ID NO: 1574066 - RNA, 19 nt, Artificial Sequence
  Description of Artificial Sequence: Synthetic oligonucleotide
auaggacuucccucgaccc

SEQ ID NO: 1574067 - RNA, 19 nt, Artificial Sequence
  Description of Artificial Sequence: Synthetic oligonucleotide
uauaggacuucccucgacc

SEQ ID NO: 1574068 - RNA, 19 nt, Artificial Sequence
  Description of Artificial Sequence: Synthetic oligonucleotide
uuggcuaaauuauucugag

SEQ ID NO: 1574069 - RNA, 19 nt, Artificial Sequence
  Description of Artificial Sequence: Synthetic oligonucleotide
uucgacuaugggaacgugg

SEQ ID NO: 1574070 - RNA, 19 nt, Artificial Sequence
  Description of Artificial Sequence: Synthetic oligonucleotide
gacuaugggaacguggacg

SEQ ID NO: 1574071 - RNA, 19 nt, Artificial Sequence
  Description of Artificial Sequence: Synthetic oligonucleotide
uucacugcuucgacuaugg

SEQ ID NO: 1574072 - RNA, 19 nt, Artificial Sequence
  Description of Artificial Sequence: Synthetic oligonucleotide
aauaaauuuggaugagcua

SEQ ID NO: 1574073 - RNA, 19 nt, Artificial Sequence
  Description of Artificial Sequence: Synthetic oligonucleotide
ugcccauuaaucuuucuug

SEQ ID NO: 1574074 - RNA, 19 nt, Artificial Sequence
  Description of Artificial Sequence: Synthetic oligonucleotide
uaauuggcuaaauuauucu

SEQ ID NO: 1574075 - RNA, 19 nt, Artificial Sequence
  Description of Artificial Sequence: Synthetic oligonucleotide
acucauaccuuuuauaaua

SEQ ID NO: 1574076 - RNA, 19 nt, Artificial Sequence
  Description of Artificial Sequence: Synthetic oligonucleotide
uucuucgggagccauagga

SEQ ID NO: 1574077 - RNA, 19 nt, Artificial Sequence
  Description of Artificial Sequence: Synthetic oligonucleotide
uucacuugguucuacagau

SEQ ID NO: 1574078 - RNA, 19 nt, Artificial Sequence
  Description of Artificial Sequence: Synthetic oligonucleotide
cacaauagaagaaaugaga

SEQ ID NO: 1574079 - RNA, 19 nt, Artificial Sequence
  Description of Artificial Sequence: Synthetic oligonucleotide
augacuggaucuuucacug

SEQ ID NO: 1574080 - RNA, 19 nt, Artificial Sequence
  Description of Artificial Sequence: Synthetic oligonucleotide
uuuacgucguucucugucc

SEQ ID NO: 1574081 - RNA, 19 nt, Artificial Sequence
  Description of Artificial Sequence: Synthetic oligonucleotide
augggagcgaggcugacgg

SEQ ID NO: 1574082 - RNA, 19 nt, Artificial Sequence
  Description of Artificial Sequence: Synthetic oligonucleotide
ugucccgcacuuuacgucg

SEQ ID NO: 1574083 - RNA, 19 nt, Artificial Sequence
  Description of Artificial Sequence: Synthetic oligonucleotide
agggcaauuaaucucuuga

SEQ ID NO: 1574084 - RNA, 19 nt, Artificial Sequence
  Description of Artificial Sequence: Synthetic oligonucleotide
ugaacacaauagaagaaau

SEQ ID NO: 1574085 - RNA, 19 nt, Artificial Sequence
  Description of Artificial Sequence: Synthetic oligonucleotide
ucgacuaugggaacgugga

SEQ ID NO: 1574086 - RNA, 19 nt, Artificial Sequence
  Description of Artificial Sequence: Synthetic oligonucleotide
auaaaagaaucacuuucga

SEQ ID NO: 1574087 - RNA, 19 nt, Artificial Sequence
  Description of Artificial Sequence: Synthetic oligonucleotide
uuauuuacuucaucccuga

SEQ ID NO: 1574088 - RNA, 19 nt, Artificial Sequence
  Description of Artificial Sequence: Synthetic oligonucleotide
uugaagaggagcgucuccg

SEQ ID NO: 1574089 - RNA, 19 nt, Artificial Sequence
  Description of Artificial Sequence: Synthetic oligonucleotide
uaaauuuggaugagcuaga

SEQ ID NO: 1574090 - RNA, 19 nt, Artificial Sequence
  Description of Artificial Sequence: Synthetic oligonucleotide
aauccccucguuuaaugcu

SEQ ID NO: 1574091 - RNA, 19 nt, Artificial Sequence
  Description of Artificial Sequence: Synthetic oligonucleotide
acucuauaggacuucccuc

SEQ ID NO: 1574092 - RNA, 19 nt, Artificial Sequence
  Description of Artificial Sequence: Synthetic oligonucleotide
auaauagauuuacuauuca

SEQ ID NO: 1574093 - RNA, 19 nt, Artificial Sequence
  Description of Artificial Sequence: Synthetic oligonucleotide
ggacaauauguuuucaugc

SEQ ID NO: 1574094 - RNA, 19 nt, Artificial Sequence
  Description of Artificial Sequence: Synthetic oligonucleotide
uucuucuaugacuggaucu

SEQ ID NO: 1574095 - RNA, 19 nt, Artificial Sequence
  Description of Artificial Sequence: Synthetic oligonucleotide
uaugggaacguggacgagg

SEQ ID NO: 1574096 - RNA, 19 nt, Artificial Sequence
  Description of Artificial Sequence: Synthetic oligonucleotide
aauuuggaugagcuagaga

SEQ ID NO: 1574097 - RNA, 19 nt, Artificial Sequence
  Description of Artificial Sequence: Synthetic oligonucleotide
uguaauuggcuaaauuauu

SEQ ID NO: 1574098 - RNA, 19 nt, Artificial Sequence
  Description of Artificial Sequence: Synthetic oligonucleotide
acaauagaagaaaugagau

SEQ ID NO: 1574099 - RNA, 19 nt, Artificial Sequence
  Description of Artificial Sequence: Synthetic oligonucleotide
ucuaugacuggaucuuuca

SEQ ID NO: 1574100 - RNA, 19 nt, Artificial Sequence
  Description of Artificial Sequence: Synthetic oligonucleotide
aaauuuggaugagcuagag

SEQ ID NO: 1574101 - RNA, 19 nt, Artificial Sequence
  Description of Artificial Sequence: Synthetic oligonucleotide
uuaacaggacaauauguuu

SEQ ID NO: 1574102 - RNA, 19 nt, Artificial Sequence
  Description of Artificial Sequence: Synthetic oligonucleotide
cuguaaucuggcuuuggcc

SEQ ID NO: 1574103 - RNA, 19 nt, Artificial Sequence
  Description of Artificial Sequence: Synthetic oligonucleotide
uucacaaggcuucugucaa

SEQ ID NO: 1574104 - RNA, 19 nt, Artificial Sequence
  Description of Artificial Sequence: Synthetic oligonucleotide
acggagggcaauuaaucuc

SEQ ID NO: 1574105 - RNA, 19 nt, Artificial Sequence
  Description of Artificial Sequence: Synthetic oligonucleotide
uuuacuugaucugaauguc

SEQ ID NO: 1574106 - RNA, 19 nt, Artificial Sequence
  Description of Artificial Sequence: Synthetic oligonucleotide
agcuagagaauugucaucu

SEQ ID NO: 1574107 - RNA, 19 nt, Artificial Sequence
  Description of Artificial Sequence: Synthetic oligonucleotide
acuaugggaacguggacga

SEQ ID NO: 1574108 - RNA, 19 nt, Artificial Sequence
  Description of Artificial Sequence: Synthetic oligonucleotide
guuuucaugcacucauacc

SEQ ID NO: 1574109 - RNA, 19 nt, Artificial Sequence
  Description of Artificial Sequence: Synthetic oligonucleotide
acuuguuccaccaggguag

SEQ ID NO: 1574110 - RNA, 19 nt, Artificial Sequence
  Description of Artificial Sequence: Synthetic oligonucleotide
aagaggagcgucuccggug

SEQ ID NO: 1574111 - RNA, 19 nt, Artificial Sequence
  Description of Artificial Sequence: Synthetic oligonucleotide
agaccgcugaacucuauag

SEQ ID NO: 1574112 - RNA, 19 nt, Artificial Sequence
  Description of Artificial Sequence: Synthetic oligonucleotide
gaagaaaugagauuuucuu

SEQ ID NO: 1574113 - RNA, 19 nt, Artificial Sequence
  Description of Artificial Sequence: Synthetic oligonucleotide
accgcugaacucuauagga

SEQ ID NO: 1574114 - RNA, 19 nt, Artificial Sequence
  Description of Artificial Sequence: Synthetic oligonucleotide
cauaagaaugggagcgagg

SEQ ID NO: 1574115 - RNA, 19 nt, Artificial Sequence
  Description of Artificial Sequence: Synthetic oligonucleotide
guaauuggcuaaauuauuc

SEQ ID NO: 1574116 - RNA, 19 nt, Artificial Sequence
  Description of Artificial Sequence: Synthetic oligonucleotide
gaauccccucguuuaaugc

SEQ ID NO: 1574117 - RNA, 19 nt, Artificial Sequence
  Description of Artificial Sequence: Synthetic oligonucleotide
gaccgcugaacucuauagg

SEQ ID NO: 1574118 - RNA, 19 nt, Artificial Sequence
  Description of Artificial Sequence: Synthetic oligonucleotide
ccauuaaucuuucuugacg

SEQ ID NO: 1574119 - RNA, 19 nt, Artificial Sequence
  Description of Artificial Sequence: Synthetic oligonucleotide
aggcugacggucucuagac

SEQ ID NO: 1574120 - RNA, 19 nt, Artificial Sequence
  Description of Artificial Sequence: Synthetic oligonucleotide
ugacggagggcaauuaauc

SEQ ID NO: 1574121 - RNA, 19 nt, Artificial Sequence
  Description of Artificial Sequence: Synthetic oligonucleotide
ucauaagaaugggagcgag

SEQ ID NO: 1574122 - RNA, 19 nt, Artificial Sequence
  Description of Artificial Sequence: Synthetic oligonucleotide
agagaauugucaucuuggu

SEQ ID NO: 1574123 - RNA, 19 nt, Artificial Sequence
  Description of Artificial Sequence: Synthetic oligonucleotide
ucguuuaaugcuguguacu

SEQ ID NO: 1574124 - RNA, 19 nt, Artificial Sequence
  Description of Artificial Sequence: Synthetic oligonucleotide
ccuuuuauaauagauuuac

SEQ ID NO: 1574125 - RNA, 19 nt, Artificial Sequence
  Description of Artificial Sequence: Synthetic oligonucleotide
cuuugucccgcacuuuacg

SEQ ID NO: 1574126 - RNA, 19 nt, Artificial Sequence
  Description of Artificial Sequence: Synthetic oligonucleotide
uuuuggaccgagaccgcug

SEQ ID NO: 1574127 - RNA, 19 nt, Artificial Sequence
  Description of Artificial Sequence: Synthetic oligonucleotide
uuuaagcucagcgccuucc

SEQ ID NO: 1574128 - RNA, 19 nt, Artificial Sequence
  Description of Artificial Sequence: Synthetic oligonucleotide
cuuuacgucguucucuguc

SEQ ID NO: 1574129 - RNA, 19 nt, Artificial Sequence
  Description of Artificial Sequence: Synthetic oligonucleotide
agaauccccucguuuaaug

SEQ ID NO: 1574130 - RNA, 19 nt, Artificial Sequence
  Description of Artificial Sequence: Synthetic oligonucleotide
uggaugagcuagagaauug

SEQ ID NO: 1574131 - RNA, 19 nt, Artificial Sequence
  Description of Artificial Sequence: Synthetic oligonucleotide
ugaacucuauaggacuucc

SEQ ID NO: 1574132 - RNA, 19 nt, Artificial Sequence
  Description of Artificial Sequence: Synthetic oligonucleotide
auuaacaggacaauauguu

SEQ ID NO: 1574133 - RNA, 19 nt, Artificial Sequence
  Description of Artificial Sequence: Synthetic oligonucleotide
auguaauuggcuaaauuau

SEQ ID NO: 1574134 - RNA, 19 nt, Artificial Sequence
  Description of Artificial Sequence: Synthetic oligonucleotide
ucauaccuuuuauaauaga

SEQ ID NO: 1574135 - RNA, 19 nt, Artificial Sequence
  Description of Artificial Sequence: Synthetic oligonucleotide
uuugucccgcacuuuacgu

SEQ ID NO: 1574136 - RNA, 19 nt, Artificial Sequence
  Description of Artificial Sequence: Synthetic oligonucleotide
gauguucuaauccagcuuu

SEQ ID NO: 1574137 - RNA, 19 nt, Artificial Sequence
  Description of Artificial Sequence: Synthetic oligonucleotide
uccagaauccccucguuua

SEQ ID NO: 1574138 - RNA, 19 nt, Artificial Sequence
  Description of Artificial Sequence: Synthetic oligonucleotide
ucggcuucguuuucuucgg

SEQ ID NO: 1574139 - RNA, 19 nt, Artificial Sequence
  Description of Artificial Sequence: Synthetic oligonucleotide
aaugggagcgaggcugacg

SEQ ID NO: 1574140 - RNA, 19 nt, Artificial Sequence
  Description of Artificial Sequence: Synthetic oligonucleotide
uugauagccguggggaugc

SEQ ID NO: 1574141 - RNA, 19 nt, Artificial Sequence
  Description of Artificial Sequence: Synthetic oligonucleotide
ucuucgggagccauaggaa

SEQ ID NO: 1574142 - RNA, 19 nt, Artificial Sequence
  Description of Artificial Sequence: Synthetic oligonucleotide
auuuacuauucacaauguu

SEQ ID NO: 1574143 - RNA, 19 nt, Artificial Sequence
  Description of Artificial Sequence: Synthetic oligonucleotide
uugaccuacugcgaguucu

SEQ ID NO: 1574144 - RNA, 19 nt, Artificial Sequence
  Description of Artificial Sequence: Synthetic oligonucleotide
ugcuucgacuaugggaacg

SEQ ID NO: 1574145 - RNA, 19 nt, Artificial Sequence
  Description of Artificial Sequence: Synthetic oligonucleotide
gcugucagggucuauuucc

SEQ ID NO: 1574146 - RNA, 19 nt, Artificial Sequence
  Description of Artificial Sequence: Synthetic oligonucleotide
agaaucacuuucgauggcu

SEQ ID NO: 1574147 - RNA, 19 nt, Artificial Sequence
  Description of Artificial Sequence: Synthetic oligonucleotide
ucuauaggacuucccucga

SEQ ID NO: 1574148 - RNA, 19 nt, Artificial Sequence
  Description of Artificial Sequence: Synthetic oligonucleotide
cuuuccaaugcuggguggg

SEQ ID NO: 1574149 - RNA, 19 nt, Artificial Sequence
  Description of Artificial Sequence: Synthetic oligonucleotide
gauguugguccugaugcug

SEQ ID NO: 1574150 - RNA, 19 nt, Artificial Sequence
  Description of Artificial Sequence: Synthetic oligonucleotide
cuucguuuucuucgggagc

SEQ ID NO: 1574151 - RNA, 19 nt, Artificial Sequence
  Description of Artificial Sequence: Synthetic oligonucleotide
augagcuagagaauuguca

SEQ ID NO: 1574152 - RNA, 19 nt, Artificial Sequence
  Description of Artificial Sequence: Synthetic oligonucleotide
ggcaauuaaucucuugaac

SEQ ID NO: 1574153 - RNA, 19 nt, Artificial Sequence
  Description of Artificial Sequence: Synthetic oligonucleotide
ucuucuaugacuggaucuu

SEQ ID NO: 1574154 - RNA, 19 nt, Artificial Sequence
  Description of Artificial Sequence: Synthetic oligonucleotide
uuacgucguucucuguccc

SEQ ID NO: 1574155 - RNA, 19 nt, Artificial Sequence
  Description of Artificial Sequence: Synthetic oligonucleotide
cacuuuacgucguucucug

SEQ ID NO: 1574156 - RNA, 19 nt, Artificial Sequence
  Description of Artificial Sequence: Synthetic oligonucleotide
ucccucgaccccuggaccg

SEQ ID NO: 1574157 - RNA, 19 nt, Artificial Sequence
  Description of Artificial Sequence: Synthetic oligonucleotide
cuaugacuggaucuuucac

SEQ ID NO: 1574158 - RNA, 19 nt, Artificial Sequence
  Description of Artificial Sequence: Synthetic oligonucleotide
ugcacucauaccuuuuaua

SEQ ID NO: 1574159 - RNA, 19 nt, Artificial Sequence
  Description of Artificial Sequence: Synthetic oligonucleotide
uguacguccugcugucuga

SEQ ID NO: 1574160 - RNA, 19 nt, Artificial Sequence
  Description of Artificial Sequence: Synthetic oligonucleotide
acggucucuagaccaggac

SEQ ID NO: 1574161 - RNA, 19 nt, Artificial Sequence
  Description of Artificial Sequence: Synthetic oligonucleotide
cuugaagaggagcgucucc

SEQ ID NO: 1574162 - RNA, 19 nt, Artificial Sequence
  Description of Artificial Sequence: Synthetic oligonucleotide
ucuuugucccgcacuuuac

SEQ ID NO: 1574163 - RNA, 19 nt, Artificial Sequence
  Description of Artificial Sequence: Synthetic oligonucleotide
cucguuuaaugcuguguac

SEQ ID NO: 1574164 - RNA, 19 nt, Artificial Sequence
  Description of Artificial Sequence: Synthetic oligonucleotide
uucuuacggcuguacgucc

SEQ ID NO: 1574165 - RNA, 19 nt, Artificial Sequence
  Description of Artificial Sequence: Synthetic oligonucleotide
acguggacgaggucuugac

SEQ ID NO: 1574166 - RNA, 19 nt, Artificial Sequence
  Description of Artificial Sequence: Synthetic oligonucleotide
uucuauguaauuggcuaaa

SEQ ID NO: 1574167 - RNA, 19 nt, Artificial Sequence
  Description of Artificial Sequence: Synthetic oligonucleotide
acuauucacaauguuugau

SEQ ID NO: 1574168 - RNA, 19 nt, Artificial Sequence
  Description of Artificial Sequence: Synthetic oligonucleotide
ucuuacggcuguacguccu

SEQ ID NO: 1574169 - RNA, 19 nt, Artificial Sequence
  Description of Artificial Sequence: Synthetic oligonucleotide
guaaucuggcuuuggccug

SEQ ID NO: 1574170 - RNA, 19 nt, Artificial Sequence
  Description of Artificial Sequence: Synthetic oligonucleotide
cuucuuacggcuguacguc

SEQ ID NO: 1574171 - RNA, 19 nt, Artificial Sequence
  Description of Artificial Sequence: Synthetic oligonucleotide
uuucuucgggagccauagg

SEQ ID NO: 1574172 - RNA, 19 nt, Artificial Sequence
  Description of Artificial Sequence: Synthetic oligonucleotide
aucacuuucgauggcuuca

SEQ ID NO: 1574173 - RNA, 19 nt, Artificial Sequence
  Description of Artificial Sequence: Synthetic oligonucleotide
ucacugcuucgacuauggg

SEQ ID NO: 1574174 - RNA, 19 nt, Artificial Sequence
  Description of Artificial Sequence: Synthetic oligonucleotide
agaggagcgucuccggugu

SEQ ID NO: 1574175 - RNA, 19 nt, Artificial Sequence
  Description of Artificial Sequence: Synthetic oligonucleotide
accgacuucggcuucguuu

SEQ ID NO: 1574176 - RNA, 19 nt, Artificial Sequence
  Description of Artificial Sequence: Synthetic oligonucleotide
ucuagaccaggaccuggac

SEQ ID NO: 1574177 - RNA, 19 nt, Artificial Sequence
  Description of Artificial Sequence: Synthetic oligonucleotide
gagggcaauuaaucucuug

SEQ ID NO: 1574178 - RNA, 19 nt, Artificial Sequence
  Description of Artificial Sequence: Synthetic oligonucleotide
uucccucgaccccuggacc

SEQ ID NO: 1574179 - RNA, 19 nt, Artificial Sequence
  Description of Artificial Sequence: Synthetic oligonucleotide
gcuucguuuucuucgggag

SEQ ID NO: 1574180 - RNA, 19 nt, Artificial Sequence
  Description of Artificial Sequence: Synthetic oligonucleotide
cuuucgauggcuucaauuu

SEQ ID NO: 1574181 - RNA, 19 nt, Artificial Sequence
  Description of Artificial Sequence: Synthetic oligonucleotide
gcacucauaccuuuuauaa

SEQ ID NO: 1574182 - RNA, 19 nt, Artificial Sequence
  Description of Artificial Sequence: Synthetic oligonucleotide
aggcucucaccuccggacg

SEQ ID NO: 1574183 - RNA, 19 nt, Artificial Sequence
  Description of Artificial Sequence: Synthetic oligonucleotide
accgagaccgcugaacucu

SEQ ID NO: 1574184 - RNA, 19 nt, Artificial Sequence
  Description of Artificial Sequence: Synthetic oligonucleotide
ugaccggcgccccaucucu

SEQ ID NO: 1574185 - RNA, 19 nt, Artificial Sequence
  Description of Artificial Sequence: Synthetic oligonucleotide
uugguacuugauagccgug

SEQ ID NO: 1574186 - RNA, 19 nt, Artificial Sequence
  Description of Artificial Sequence: Synthetic oligonucleotide
cuucccucgaccccuggac

SEQ ID NO: 1574187 - RNA, 19 nt, Artificial Sequence
  Description of Artificial Sequence: Synthetic oligonucleotide
cuugguacuugauagccgu

SEQ ID NO: 1574188 - RNA, 19 nt, Artificial Sequence
  Description of Artificial Sequence: Synthetic oligonucleotide
ucuauguaauuggcuaaau

SEQ ID NO: 1574189 - RNA, 19 nt, Artificial Sequence
  Description of Artificial Sequence: Synthetic oligonucleotide
ugcuucacuucacuugguu

SEQ ID NO: 1574190 - RNA, 19 nt, Artificial Sequence
  Description of Artificial Sequence: Synthetic oligonucleotide
aguuuuaagcucagcgccu

SEQ ID NO: 1574191 - RNA, 19 nt, Artificial Sequence
  Description of Artificial Sequence: Synthetic oligonucleotide
guuuaaugcuguguacuuc

SEQ ID NO: 1574192 - RNA, 19 nt, Artificial Sequence
  Description of Artificial Sequence: Synthetic oligonucleotide
uugucccgcacuuuacguc

SEQ ID NO: 1574193 - RNA, 19 nt, Artificial Sequence
  Description of Artificial Sequence: Synthetic oligonucleotide
cugacggucucuagaccag

SEQ ID NO: 1574194 - RNA, 19 nt, Artificial Sequence
  Description of Artificial Sequence: Synthetic oligonucleotide
gacggagggcaauuaaucu

SEQ ID NO: 1574195 - RNA, 19 nt, Artificial Sequence
  Description of Artificial Sequence: Synthetic oligonucleotide
ugcuugaccugugccugcg

SEQ ID NO: 1574196 - RNA, 19 nt, Artificial Sequence
  Description of Artificial Sequence: Synthetic oligonucleotide
gcgaguucuucuaugacug

SEQ ID NO: 1574197 - RNA, 19 nt, Artificial Sequence
  Description of Artificial Sequence: Synthetic oligonucleotide
augaccggcgccccaucuc

SEQ ID NO: 1574198 - RNA, 19 nt, Artificial Sequence
  Description of Artificial Sequence: Synthetic oligonucleotide
ugacggucucuagaccagg

SEQ ID NO: 1574199 - RNA, 19 nt, Artificial Sequence
  Description of Artificial Sequence: Synthetic oligonucleotide
ugucaucuugguacuugau

SEQ ID NO: 1574200 - RNA, 19 nt, Artificial Sequence
  Description of Artificial Sequence: Synthetic oligonucleotide
ucucaccuccggacgcggg

SEQ ID NO: 1574201 - RNA, 19 nt, Artificial Sequence
  Description of Artificial Sequence: Synthetic oligonucleotide
aaaccacggcgccaccggu

SEQ ID NO: 1574202 - RNA, 19 nt, Artificial Sequence
  Description of Artificial Sequence: Synthetic oligonucleotide
aacguggacgaggucuuga

SEQ ID NO: 1574203 - RNA, 19 nt, Artificial Sequence
  Description of Artificial Sequence: Synthetic oligonucleotide
cuauaggacuucccucgac

SEQ ID NO: 1574204 - RNA, 19 nt, Artificial Sequence
  Description of Artificial Sequence: Synthetic oligonucleotide
uuaaugcuguguacuucuu

SEQ ID NO: 1574205 - RNA, 19 nt, Artificial Sequence
  Description of Artificial Sequence: Synthetic oligonucleotide
cuguacguccugcugucug

SEQ ID NO: 1574206 - RNA, 19 nt, Artificial Sequence
  Description of Artificial Sequence: Synthetic oligonucleotide
ucaugcacucauaccuuuu

SEQ ID NO: 1574207 - RNA, 19 nt, Artificial Sequence
  Description of Artificial Sequence: Synthetic oligonucleotide
gcugacggucucuagacca

SEQ ID NO: 1574208 - RNA, 19 nt, Artificial Sequence
  Description of Artificial Sequence: Synthetic oligonucleotide
agcuacugauguugguccu

SEQ ID NO: 1574209 - RNA, 19 nt, Artificial Sequence
  Description of Artificial Sequence: Synthetic oligonucleotide
ucguucucugucccuugac

SEQ ID NO: 1574210 - RNA, 19 nt, Artificial Sequence
  Description of Artificial Sequence: Synthetic oligonucleotide
ccucagugucugaugaccg

SEQ ID NO: 1574211 - RNA, 19 nt, Artificial Sequence
  Description of Artificial Sequence: Synthetic oligonucleotide
uuuccagaauccccucguu

SEQ ID NO: 1574212 - RNA, 19 nt, Artificial Sequence
  Description of Artificial Sequence: Synthetic oligonucleotide
cagggucuauuuccuuucc

SEQ ID NO: 1574213 - RNA, 19 nt, Artificial Sequence
  Description of Artificial Sequence: Synthetic oligonucleotide
uggaccgagaccgcugaac

SEQ ID NO: 1574214 - RNA, 19 nt, Artificial Sequence
  Description of Artificial Sequence: Synthetic oligonucleotide
cuuacggcuguacguccug

SEQ ID NO: 1574215 - RNA, 19 nt, Artificial Sequence
  Description of Artificial Sequence: Synthetic oligonucleotide
guacuucuuuguccuugcc

SEQ ID NO: 1574216 - RNA, 19 nt, Artificial Sequence
  Description of Artificial Sequence: Synthetic oligonucleotide
uuucuugacggagggcaau

SEQ ID NO: 1574217 - RNA, 19 nt, Artificial Sequence
  Description of Artificial Sequence: Synthetic oligonucleotide
accggcgccccaucucugg

SEQ ID NO: 1574218 - RNA, 19 nt, Artificial Sequence
  Description of Artificial Sequence: Synthetic oligonucleotide
uuacggcuguacguccugc

SEQ ID NO: 1574219 - RNA, 19 nt, Artificial Sequence
  Description of Artificial Sequence: Synthetic oligonucleotide
ugaccuacugcgaguucuu

SEQ ID NO: 1574220 - RNA, 19 nt, Artificial Sequence
  Description of Artificial Sequence: Synthetic oligonucleotide
guuuccagaauccccucgu

SEQ ID NO: 1574221 - RNA, 19 nt, Artificial Sequence
  Description of Artificial Sequence: Synthetic oligonucleotide
accacggcgccaccggugu

SEQ ID NO: 1574222 - RNA, 19 nt, Artificial Sequence
  Description of Artificial Sequence: Synthetic oligonucleotide
uguucugcuuuuggaccga

SEQ ID NO: 1574223 - RNA, 19 nt, Artificial Sequence
  Description of Artificial Sequence: Synthetic oligonucleotide
cccauuaaucuuucuugac

SEQ ID NO: 1574224 - RNA, 19 nt, Artificial Sequence
  Description of Artificial Sequence: Synthetic oligonucleotide
cuugacggagggcaauuaa

SEQ ID NO: 1574225 - RNA, 19 nt, Artificial Sequence
  Description of Artificial Sequence: Synthetic oligonucleotide
cuuguuccaccaggguagc

SEQ ID NO: 1574226 - RNA, 19 nt, Artificial Sequence
  Description of Artificial Sequence: Synthetic oligonucleotide
acuuuacgucguucucugu

SEQ ID NO: 1574227 - RNA, 19 nt, Artificial Sequence
  Description of Artificial Sequence: Synthetic oligonucleotide
gcuucaaggaccaacugua

SEQ ID NO: 1574228 - RNA, 19 nt, Artificial Sequence
  Description of Artificial Sequence: Synthetic oligonucleotide
gaccgagaccgcugaacuc

SEQ ID NO: 1574229 - RNA, 19 nt, Artificial Sequence
  Description of Artificial Sequence: Synthetic oligonucleotide
gaagaggagcgucuccggu

SEQ ID NO: 1574230 - RNA, 19 nt, Artificial Sequence
  Description of Artificial Sequence: Synthetic oligonucleotide
gagaccgcugaacucuaua

SEQ ID NO: 1574231 - RNA, 19 nt, Artificial Sequence
  Description of Artificial Sequence: Synthetic oligonucleotide
agaccaggaccuggacucg

SEQ ID NO: 1574232 - RNA, 19 nt, Artificial Sequence
  Description of Artificial Sequence: Synthetic oligonucleotide
uuccaaugcuggguggguc

SEQ ID NO: 1574233 - RNA, 19 nt, Artificial Sequence
  Description of Artificial Sequence: Synthetic oligonucleotide
gggcaauuaaucucuugaa

SEQ ID NO: 1574234 - RNA, 19 nt, Artificial Sequence
  Description of Artificial Sequence: Synthetic oligonucleotide
cuucaaggaccaacuguaa

SEQ ID NO: 1574235 - RNA, 19 nt, Artificial Sequence
  Description of Artificial Sequence: Synthetic oligonucleotide
cucauaagaaugggagcga

SEQ ID NO: 1574236 - RNA, 19 nt, Artificial Sequence
  Description of Artificial Sequence: Synthetic oligonucleotide
cugcuugaccugugccugc

SEQ ID NO: 1574237 - RNA, 19 nt, Artificial Sequence
  Description of Artificial Sequence: Synthetic oligonucleotide
ugguggcagauguucuaau

SEQ ID NO: 1574238 - RNA, 19 nt, Artificial Sequence
  Description of Artificial Sequence: Synthetic oligonucleotide
ugaccuggaccuucuuguu

SEQ ID NO: 1574239 - RNA, 19 nt, Artificial Sequence
  Description of Artificial Sequence: Synthetic oligonucleotide
guccugaugcuggagucac

SEQ ID NO: 1574240 - RNA, 19 nt, Artificial Sequence
  Description of Artificial Sequence: Synthetic oligonucleotide
ccucccgcccuucuuacgg

SEQ ID NO: 1574241 - RNA, 19 nt, Artificial Sequence
  Description of Artificial Sequence: Synthetic oligonucleotide
aaccacggcgccaccggug

SEQ ID NO: 1574242 - RNA, 19 nt, Artificial Sequence
  Description of Artificial Sequence: Synthetic oligonucleotide
agaacuugcuucaguuuua

SEQ ID NO: 1574243 - RNA, 19 nt, Artificial Sequence
  Description of Artificial Sequence: Synthetic oligonucleotide
cccuucuuacggcuguacg

SEQ ID NO: 1574244 - RNA, 19 nt, Artificial Sequence
  Description of Artificial Sequence: Synthetic oligonucleotide
uucuugacggagggcaauu

SEQ ID NO: 1574245 - RNA, 19 nt, Artificial Sequence
  Description of Artificial Sequence: Synthetic oligonucleotide
ucuugacggagggcaauua

SEQ ID NO: 1574246 - RNA, 19 nt, Artificial Sequence
  Description of Artificial Sequence: Synthetic oligonucleotide
gaugcuggagucacaugcu

SEQ ID NO: 1574247 - RNA, 19 nt, Artificial Sequence
  Description of Artificial Sequence: Synthetic oligonucleotide
ccuuuccaaugcugggugg

SEQ ID NO: 1574248 - RNA, 19 nt, Artificial Sequence
  Description of Artificial Sequence: Synthetic oligonucleotide
cuacugauguugguccuga

SEQ ID NO: 1574249 - RNA, 19 nt, Artificial Sequence
  Description of Artificial Sequence: Synthetic oligonucleotide
cuugaccuacugcgaguuc

SEQ ID NO: 1574250 - RNA, 19 nt, Artificial Sequence
  Description of Artificial Sequence: Synthetic oligonucleotide
caacuguaaucuggcuuug

SEQ ID NO: 1574251 - RNA, 19 nt, Artificial Sequence
  Description of Artificial Sequence: Synthetic oligonucleotide
cacggcgccaccggugucc

SEQ ID NO: 1574252 - RNA, 19 nt, Artificial Sequence
  Description of Artificial Sequence: Synthetic oligonucleotide
ucaccuccggacgcgggga

SEQ ID NO: 1574253 - RNA, 19 nt, Artificial Sequence
  Description of Artificial Sequence: Synthetic oligonucleotide
cguucucugucccuugacc

SEQ ID NO: 1574254 - RNA, 19 nt, Artificial Sequence
  Description of Artificial Sequence: Synthetic oligonucleotide
caaccauaagucucuuccu

SEQ ID NO: 1574255 - RNA, 19 nt, Artificial Sequence
  Description of Artificial Sequence: Synthetic oligonucleotide
gucguucucugucccuuga

SEQ ID NO: 1574256 - RNA, 19 nt, Artificial Sequence
  Description of Artificial Sequence: Synthetic oligonucleotide
ccgcugaacucuauaggac

SEQ ID NO: 1574257 - RNA, 19 nt, Artificial Sequence
  Description of Artificial Sequence: Synthetic oligonucleotide
cacucauaccuuuuauaau

SEQ ID NO: 1574258 - RNA, 19 nt, Artificial Sequence
  Description of Artificial Sequence: Synthetic oligonucleotide
cugcuucgacuaugggaac

SEQ ID NO: 1574259 - RNA, 19 nt, Artificial Sequence
  Description of Artificial Sequence: Synthetic oligonucleotide
ggacgaggucuugaccugg

SEQ ID NO: 1574260 - RNA, 19 nt, Artificial Sequence
  Description of Artificial Sequence: Synthetic oligonucleotide
ggcucucaccuccggacgc

SEQ ID NO: 1574261 - RNA, 19 nt, Artificial Sequence
  Description of Artificial Sequence: Synthetic oligonucleotide
ucguuuucuucgggagcca

SEQ ID NO: 1574262 - RNA, 19 nt, Artificial Sequence
  Description of Artificial Sequence: Synthetic oligonucleotide
gucagggucuauuuccuuu

SEQ ID NO: 1574263 - RNA, 19 nt, Artificial Sequence
  Description of Artificial Sequence: Synthetic oligonucleotide
cuucgacuaugggaacgug

SEQ ID NO: 1574264 - RNA, 19 nt, Artificial Sequence
  Description of Artificial Sequence: Synthetic oligonucleotide
guucugcuuuuggaccgag

SEQ ID NO: 1574265 - RNA, 19 nt, Artificial Sequence
  Description of Artificial Sequence: Synthetic oligonucleotide
gucucuagaccaggaccug

SEQ ID NO: 1574266 - RNA, 19 nt, Artificial Sequence
  Description of Artificial Sequence: Synthetic oligonucleotide
aaucuggcuuuggccugcu

SEQ ID NO: 1574267 - RNA, 19 nt, Artificial Sequence
  Description of Artificial Sequence: Synthetic oligonucleotide
uacugauguugguccugau

SEQ ID NO: 1574268 - RNA, 19 nt, Artificial Sequence
  Description of Artificial Sequence: Synthetic oligonucleotide
cuaugggaacguggacgag

SEQ ID NO: 1574269 - RNA, 19 nt, Artificial Sequence
  Description of Artificial Sequence: Synthetic oligonucleotide
ggacgcggggaccuggaac

SEQ ID NO: 1574270 - RNA, 19 nt, Artificial Sequence
  Description of Artificial Sequence: Synthetic oligonucleotide
acuugguucuacagauuuu

SEQ ID NO: 1574271 - RNA, 19 nt, Artificial Sequence
  Description of Artificial Sequence: Synthetic oligonucleotide
cucucaccuccggacgcgg

SEQ ID NO: 1574272 - RNA, 19 nt, Artificial Sequence
  Description of Artificial Sequence: Synthetic oligonucleotide
acgcggggaccuggaaccc

SEQ ID NO: 1574273 - RNA, 19 nt, Artificial Sequence
  Description of Artificial Sequence: Synthetic oligonucleotide
gaacguggacgaggucuug

SEQ ID NO: 1574274 - RNA, 19 nt, Artificial Sequence
  Description of Artificial Sequence: Synthetic oligonucleotide
uuggaccgagaccgcugaa

SEQ ID NO: 1574275 - RNA, 19 nt, Artificial Sequence
  Description of Artificial Sequence: Synthetic oligonucleotide
gaugaccggcgccccaucu

SEQ ID NO: 1574276 - RNA, 19 nt, Artificial Sequence
  Description of Artificial Sequence: Synthetic oligonucleotide
acggcgccaccgguguccc

SEQ ID NO: 1574277 - RNA, 19 nt, Artificial Sequence
  Description of Artificial Sequence: Synthetic oligonucleotide
cacaggacugcccauuaau

SEQ ID NO: 1574278 - RNA, 19 nt, Artificial Sequence
  Description of Artificial Sequence: Synthetic oligonucleotide
ggcugacggucucuagacc

SEQ ID NO: 1574279 - RNA, 19 nt, Artificial Sequence
  Description of Artificial Sequence: Synthetic oligonucleotide
ccucguuuaaugcugugua

SEQ ID NO: 1574280 - RNA, 19 nt, Artificial Sequence
  Description of Artificial Sequence: Synthetic oligonucleotide
ggcuguacguccugcuguc

SEQ ID NO: 1574281 - RNA, 19 nt, Artificial Sequence
  Description of Artificial Sequence: Synthetic oligonucleotide
ggaccgagaccgcugaacu

SEQ ID NO: 1574282 - RNA, 19 nt, Artificial Sequence
  Description of Artificial Sequence: Synthetic oligonucleotide
gaccuacugcgaguucuuc

SEQ ID NO: 1574283 - RNA, 19 nt, Artificial Sequence
  Description of Artificial Sequence: Synthetic oligonucleotide
ugggaacguggacgagguc

SEQ ID NO: 1574284 - RNA, 19 nt, Artificial Sequence
  Description of Artificial Sequence: Synthetic oligonucleotide
gaaucacuuucgauggcuu

SEQ ID NO: 1574285 - RNA, 19 nt, Artificial Sequence
  Description of Artificial Sequence: Synthetic oligonucleotide
ggacucggaccuuggccgc

SEQ ID NO: 1574286 - RNA, 19 nt, Artificial Sequence
  Description of Artificial Sequence: Synthetic oligonucleotide
acgucguucucugucccuu

SEQ ID NO: 1574287 - RNA, 19 nt, Artificial Sequence
  Description of Artificial Sequence: Synthetic oligonucleotide
gucugaugaccggcgcccc

SEQ ID NO: 1574288 - RNA, 19 nt, Artificial Sequence
  Description of Artificial Sequence: Synthetic oligonucleotide
ccuucuuacggcuguacgu

SEQ ID NO: 1574289 - RNA, 19 nt, Artificial Sequence
  Description of Artificial Sequence: Synthetic oligonucleotide
gcgucuucucucauaagaa

SEQ ID NO: 1574290 - RNA, 19 nt, Artificial Sequence
  Description of Artificial Sequence: Synthetic oligonucleotide
ugggagcgaggcugacggu

SEQ ID NO: 1574291 - RNA, 19 nt, Artificial Sequence
  Description of Artificial Sequence: Synthetic oligonucleotide
gggagcgaggcugacgguc

SEQ ID NO: 1574292 - RNA, 19 nt, Artificial Sequence
  Description of Artificial Sequence: Synthetic oligonucleotide
ggucuugaccuggaccuuc

SEQ ID NO: 1574293 - RNA, 19 nt, Artificial Sequence
  Description of Artificial Sequence: Synthetic oligonucleotide
caccgguguccccagaacu

SEQ ID NO: 1574294 - RNA, 19 nt, Artificial Sequence
  Description of Artificial Sequence: Synthetic oligonucleotide
gcucucaccuccggacgcg

SEQ ID NO: 1574295 - RNA, 19 nt, Artificial Sequence
  Description of Artificial Sequence: Synthetic oligonucleotide
gagcgaggcugacggucuc

SEQ ID NO: 1574296 - RNA, 19 nt, Artificial Sequence
  Description of Artificial Sequence: Synthetic oligonucleotide
cuuuuggaccgagaccgcu

SEQ ID NO: 1574297 - RNA, 19 nt, Artificial Sequence
  Description of Artificial Sequence: Synthetic oligonucleotide
cguggacgaggucuugacc

SEQ ID NO: 1574298 - RNA, 19 nt, Artificial Sequence
  Description of Artificial Sequence: Synthetic oligonucleotide
agcgaggcugacggucucu

SEQ ID NO: 1574299 - RNA, 19 nt, Artificial Sequence
  Description of Artificial Sequence: Synthetic oligonucleotide
cuggaccgacuucggcuuc

SEQ ID NO: 1574300 - RNA, 19 nt, Artificial Sequence
  Description of Artificial Sequence: Synthetic oligonucleotide
ucccgcacuuuacgucguu

SEQ ID NO: 1574301 - RNA, 19 nt, Artificial Sequence
  Description of Artificial Sequence: Synthetic oligonucleotide
aggagcgucuccgguguuu

SEQ ID NO: 1574302 - RNA, 19 nt, Artificial Sequence
  Description of Artificial Sequence: Synthetic oligonucleotide
caccuccggacgcggggac

SEQ ID NO: 1574303 - RNA, 19 nt, Artificial Sequence
  Description of Artificial Sequence: Synthetic oligonucleotide
ugauagccguggggaugcu

SEQ ID NO: 1574304 - RNA, 19 nt, Artificial Sequence
  Description of Artificial Sequence: Synthetic oligonucleotide
cuuucacugcuucgacuau

SEQ ID NO: 1574305 - RNA, 19 nt, Artificial Sequence
  Description of Artificial Sequence: Synthetic oligonucleotide
gaccggcgccccaucucug

SEQ ID NO: 1574306 - RNA, 19 nt, Artificial Sequence
  Description of Artificial Sequence: Synthetic oligonucleotide
ggcgccaccggugucccca

SEQ ID NO: 1574307 - RNA, 19 nt, Artificial Sequence
  Description of Artificial Sequence: Synthetic oligonucleotide
ccagaauccccucguuuaa

SEQ ID NO: 1574308 - RNA, 19 nt, Artificial Sequence
  Description of Artificial Sequence: Synthetic oligonucleotide
gcgccccaucucugggucg

SEQ ID NO: 1574309 - RNA, 19 nt, Artificial Sequence
  Description of Artificial Sequence: Synthetic oligonucleotide
ccaccgguguccccagaac

SEQ ID NO: 1574310 - RNA, 19 nt, Artificial Sequence
  Description of Artificial Sequence: Synthetic oligonucleotide
cgcacuuuacgucguucuc

SEQ ID NO: 1574311 - RNA, 19 nt, Artificial Sequence
  Description of Artificial Sequence: Synthetic oligonucleotide
cgcugaacucuauaggacu

SEQ ID NO: 1574312 - RNA, 19 nt, Artificial Sequence
  Description of Artificial Sequence: Synthetic oligonucleotide
gcuucgacuaugggaacgu

SEQ ID NO: 1574313 - RNA, 19 nt, Artificial Sequence
  Description of Artificial Sequence: Synthetic oligonucleotide
cgacuaugggaacguggac

SEQ ID NO: 1574314 - RNA, 19 nt, Artificial Sequence
  Description of Artificial Sequence: Synthetic oligonucleotide
ccguggggaugcugucagg

SEQ ID NO: 1574315 - RNA, 19 nt, Artificial Sequence
  Description of Artificial Sequence: Synthetic oligonucleotide
ggagcgaggcugacggucu

SEQ ID NO: 1574316 - RNA, 19 nt, Artificial Sequence
  Description of Artificial Sequence: Synthetic oligonucleotide
ccgcacuuuacgucguucu

SEQ ID NO: 1574317 - RNA, 19 nt, Artificial Sequence
  Description of Artificial Sequence: Synthetic oligonucleotide
cgucguucucugucccuug

SEQ ID NO: 1574318 - RNA, 19 nt, Artificial Sequence
  Description of Artificial Sequence: Synthetic oligonucleotide
ggaacguggacgaggucuu

SEQ ID NO: 1574319 - RNA, 19 nt, Artificial Sequence
  Description of Artificial Sequence: Synthetic oligonucleotide
cccgcacuuuacgucguuc

SEQ ID NO: 1574320 - RNA, 19 nt, Artificial Sequence
  Description of Artificial Sequence: Synthetic oligonucleotide
cggcuucguuuucuucggg

SEQ ID NO: 1574321 - RNA, 19 nt, Artificial Sequence
  Description of Artificial Sequence: Synthetic oligonucleotide
cccucguuuaaugcugugu

SEQ ID NO: 1574322 - RNA, 19 nt, Artificial Sequence
  Description of Artificial Sequence: Synthetic oligonucleotide
gcgccaccgguguccccag

SEQ ID NO: 1574323 - RNA, 19 nt, Artificial Sequence
  Description of Artificial Sequence: Synthetic oligonucleotide
cuccggacgcggggaccug

SEQ ID NO: 1574324 - RNA, 19 nt, Artificial Sequence
  Description of Artificial Sequence: Synthetic oligonucleotide
gaccgacuucggcuucguu

SEQ ID NO: 1574325 - RNA, 19 nt, Artificial Sequence
  Description of Artificial Sequence: Synthetic oligonucleotide
ccuugaccuacugcgaguu

SEQ ID NO: 1574326 - RNA, 19 nt, Artificial Sequence
  Description of Artificial Sequence: Synthetic oligonucleotide
cggcuguacguccugcugu

SEQ ID NO: 1574327 - RNA, 19 nt, Artificial Sequence
  Description of Artificial Sequence: Synthetic oligonucleotide
ccgagaccgcugaacucua

SEQ ID NO: 1574328 - RNA, 19 nt, Artificial Sequence
  Description of Artificial Sequence: Synthetic oligonucleotide
ccggacgcggggaccugga

SEQ ID NO: 1574329 - RNA, 19 nt, Artificial Sequence
  Description of Artificial Sequence: Synthetic oligonucleotide
ggaccgacuucggcuucgu

SEQ ID NO: 1574330 - RNA, 19 nt, Artificial Sequence
  Description of Artificial Sequence: Synthetic oligonucleotide
ccacggcgccaccgguguc

SEQ ID NO: 1574331 - RNA, 19 nt, Artificial Sequence
  Description of Artificial Sequence: Synthetic oligonucleotide
ccuccggacgcggggaccu

SEQ ID NO: 1574332 - RNA, 19 nt, Artificial Sequence
  Description of Artificial Sequence: Synthetic oligonucleotide
cguuuucuucgggagccau

SEQ ID NO: 1574333 - RNA, 19 nt, Artificial Sequence
  Description of Artificial Sequence: Synthetic oligonucleotide
cgucuccgguguuucuuuu

SEQ ID NO: 1574334 - RNA, 19 nt, Artificial Sequence
  Description of Artificial Sequence: Synthetic oligonucleotide
cgagaccgcugaacucuau

SEQ ID NO: 1574335 - RNA, 19 nt, Artificial Sequence
  Description of Artificial Sequence: Synthetic oligonucleotide
uauagaacuggaaagaugg

SEQ ID NO: 1574336 - RNA, 19 nt, Artificial Sequence
  Description of Artificial Sequence: Synthetic oligonucleotide
ucuuauuugaaucuguucc

SEQ ID NO: 1574337 - RNA, 19 nt, Artificial Sequence
  Description of Artificial Sequence: Synthetic oligonucleotide
aggaguaaaagauucaugg

SEQ ID NO: 1574338 - RNA, 19 nt, Artificial Sequence
  Description of Artificial Sequence: Synthetic oligonucleotide
uauagcgauagcaauaggg

SEQ ID NO: 1574339 - RNA, 19 nt, Artificial Sequence
  Description of Artificial Sequence: Synthetic oligonucleotide
aaagauucaugguucaaac

SEQ ID NO: 1574340 - RNA, 19 nt, Artificial Sequence
  Description of Artificial Sequence: Synthetic oligonucleotide
auagccaaccaccagaacc

SEQ ID NO: 1574341 - RNA, 19 nt, Artificial Sequence
  Description of Artificial Sequence: Synthetic oligonucleotide
agauucaugguucaaacac

SEQ ID NO: 1574342 - RNA, 19 nt, Artificial Sequence
  Description of Artificial Sequence: Synthetic oligonucleotide
uguuguucaaaacauacug

SEQ ID NO: 1574343 - RNA, 19 nt, Artificial Sequence
  Description of Artificial Sequence: Synthetic oligonucleotide
uuuaagauaaauuccuuca

SEQ ID NO: 1574344 - RNA, 19 nt, Artificial Sequence
  Description of Artificial Sequence: Synthetic oligonucleotide
uguucaauauuauaaagcu

SEQ ID NO: 1574345 - RNA, 19 nt, Artificial Sequence
  Description of Artificial Sequence: Synthetic oligonucleotide
aaggcguucaucuccaugg

SEQ ID NO: 1574346 - RNA, 19 nt, Artificial Sequence
  Description of Artificial Sequence: Synthetic oligonucleotide
uuaauuaccacuuuccauc

SEQ ID NO: 1574347 - RNA, 19 nt, Artificial Sequence
  Description of Artificial Sequence: Synthetic oligonucleotide
ugaguguucaauauuauaa

SEQ ID NO: 1574348 - RNA, 19 nt, Artificial Sequence
  Description of Artificial Sequence: Synthetic oligonucleotide
ugaacuauagaacuggaaa

SEQ ID NO: 1574349 - RNA, 19 nt, Artificial Sequence
  Description of Artificial Sequence: Synthetic oligonucleotide
uuacaaaacaaauauucca

SEQ ID NO: 1574350 - RNA, 19 nt, Artificial Sequence
  Description of Artificial Sequence: Synthetic oligonucleotide
acagaguucaaauuacgac

SEQ ID NO: 1574351 - RNA, 19 nt, Artificial Sequence
  Description of Artificial Sequence: Synthetic oligonucleotide
ucucugcaaacuaagaugc

SEQ ID NO: 1574352 - RNA, 19 nt, Artificial Sequence
  Description of Artificial Sequence: Synthetic oligonucleotide
gaacuauagaacuggaaag

SEQ ID NO: 1574353 - RNA, 19 nt, Artificial Sequence
  Description of Artificial Sequence: Synthetic oligonucleotide
uuaacuagugguaacauuu

SEQ ID NO: 1574354 - RNA, 19 nt, Artificial Sequence
  Description of Artificial Sequence: Synthetic oligonucleotide
uuaagauaaauuccuucag

SEQ ID NO: 1574355 - RNA, 19 nt, Artificial Sequence
  Description of Artificial Sequence: Synthetic oligonucleotide
uauaagaguaguuuaacua

SEQ ID NO: 1574356 - RNA, 19 nt, Artificial Sequence
  Description of Artificial Sequence: Synthetic oligonucleotide
cugagaacaguccacaagg

SEQ ID NO: 1574357 - RNA, 19 nt, Artificial Sequence
  Description of Artificial Sequence: Synthetic oligonucleotide
uucgguucauaguagaugc

SEQ ID NO: 1574358 - RNA, 19 nt, Artificial Sequence
  Description of Artificial Sequence: Synthetic oligonucleotide
gaagaagccucccauaccc

SEQ ID NO: 1574359 - RNA, 19 nt, Artificial Sequence
  Description of Artificial Sequence: Synthetic oligonucleotide
aauauuccagacucagaag

SEQ ID NO: 1574360 - RNA, 19 nt, Artificial Sequence
  Description of Artificial Sequence: Synthetic oligonucleotide
cauccuuugccucauaggg

SEQ ID NO: 1574361 - RNA, 19 nt, Artificial Sequence
  Description of Artificial Sequence: Synthetic oligonucleotide
aguaaaagauucaugguuc

SEQ ID NO: 1574362 - RNA, 19 nt, Artificial Sequence
  Description of Artificial Sequence: Synthetic oligonucleotide
ugccauugcgcauuaaacg

SEQ ID NO: 1574363 - RNA, 19 nt, Artificial Sequence
  Description of Artificial Sequence: Synthetic oligonucleotide
auagccguucacuaacugc

SEQ ID NO: 1574364 - RNA, 19 nt, Artificial Sequence
  Description of Artificial Sequence: Synthetic oligonucleotide
uauccugugucauuagccg

SEQ ID NO: 1574365 - RNA, 19 nt, Artificial Sequence
  Description of Artificial Sequence: Synthetic oligonucleotide
uuaaauuuuggaguggcca

SEQ ID NO: 1574366 - RNA, 19 nt, Artificial Sequence
  Description of Artificial Sequence: Synthetic oligonucleotide
auagcgauagcaauagggc

SEQ ID NO: 1574367 - RNA, 19 nt, Artificial Sequence
  Description of Artificial Sequence: Synthetic oligonucleotide
uuuuaagauaaauuccuuc

SEQ ID NO: 1574368 - RNA, 19 nt, Artificial Sequence
  Description of Artificial Sequence: Synthetic oligonucleotide
aauucacacaguaggauag

SEQ ID NO: 1574369 - RNA, 19 nt, Artificial Sequence
  Description of Artificial Sequence: Synthetic oligonucleotide
cuaagaugcaaggaggucg

SEQ ID NO: 1574370 - RNA, 19 nt, Artificial Sequence
  Description of Artificial Sequence: Synthetic oligonucleotide
auagcaauagggcccacgg

SEQ ID NO: 1574371 - RNA, 19 nt, Artificial Sequence
  Description of Artificial Sequence: Synthetic oligonucleotide
agcaaacucagguuuguac

SEQ ID NO: 1574372 - RNA, 19 nt, Artificial Sequence
  Description of Artificial Sequence: Synthetic oligonucleotide
ucuauagcgauagcaauag

SEQ ID NO: 1574373 - RNA, 19 nt, Artificial Sequence
  Description of Artificial Sequence: Synthetic oligonucleotide
aaagcuguguauaagagua

SEQ ID NO: 1574374 - RNA, 19 nt, Artificial Sequence
  Description of Artificial Sequence: Synthetic oligonucleotide
agaguaguuuaacuagugg

SEQ ID NO: 1574375 - RNA, 19 nt, Artificial Sequence
  Description of Artificial Sequence: Synthetic oligonucleotide
ugugucauuagccgcagca

SEQ ID NO: 1574376 - RNA, 19 nt, Artificial Sequence
  Description of Artificial Sequence: Synthetic oligonucleotide
caaugauucaaguacuaug

SEQ ID NO: 1574377 - RNA, 19 nt, Artificial Sequence
  Description of Artificial Sequence: Synthetic oligonucleotide
uguaguacccauaagucuu

SEQ ID NO: 1574378 - RNA, 19 nt, Artificial Sequence
  Description of Artificial Sequence: Synthetic oligonucleotide
uuuaauuaccacuuuccau

SEQ ID NO: 1574379 - RNA, 19 nt, Artificial Sequence
  Description of Artificial Sequence: Synthetic oligonucleotide
uacaguucgguucauagua

SEQ ID NO: 1574380 - RNA, 19 nt, Artificial Sequence
  Description of Artificial Sequence: Synthetic oligonucleotide
guacuuacagguuccaucc

SEQ ID NO: 1574381 - RNA, 19 nt, Artificial Sequence
  Description of Artificial Sequence: Synthetic oligonucleotide
cuacuuacaaguucucugc

SEQ ID NO: 1574382 - RNA, 19 nt, Artificial Sequence
  Description of Artificial Sequence: Synthetic oligonucleotide
uucacuaacugccggaacu

SEQ ID NO: 1574383 - RNA, 19 nt, Artificial Sequence
  Description of Artificial Sequence: Synthetic oligonucleotide
caaauuacgacuuggaucu

SEQ ID NO: 1574384 - RNA, 19 nt, Artificial Sequence
  Description of Artificial Sequence: Synthetic oligonucleotide
uauggucucaguaaggguu

SEQ ID NO: 1574385 - RNA, 19 nt, Artificial Sequence
  Description of Artificial Sequence: Synthetic oligonucleotide
uguacuuacagguuccauc

SEQ ID NO: 1574386 - RNA, 19 nt, Artificial Sequence
  Description of Artificial Sequence: Synthetic oligonucleotide
uguguauaagaguaguuua

SEQ ID NO: 1574387 - RNA, 19 nt, Artificial Sequence
  Description of Artificial Sequence: Synthetic oligonucleotide
cauacuggaaggcaaaauc

SEQ ID NO: 1574388 - RNA, 19 nt, Artificial Sequence
  Description of Artificial Sequence: Synthetic oligonucleotide
uaagaguaguuuaacuagu

SEQ ID NO: 1574389 - RNA, 19 nt, Artificial Sequence
  Description of Artificial Sequence: Synthetic oligonucleotide
agcgauagcaauagggccc

SEQ ID NO: 1574390 - RNA, 19 nt, Artificial Sequence
  Description of Artificial Sequence: Synthetic oligonucleotide
cuuauagccguucacuaac

SEQ ID NO: 1574391 - RNA, 19 nt, Artificial Sequence
  Description of Artificial Sequence: Synthetic oligonucleotide
gguucaaacaccugaggcg

SEQ ID NO: 1574392 - RNA, 19 nt, Artificial Sequence
  Description of Artificial Sequence: Synthetic oligonucleotide
aaacguuugauuaaauuuu

SEQ ID NO: 1574393 - RNA, 19 nt, Artificial Sequence
  Description of Artificial Sequence: Synthetic oligonucleotide
ugauucaaguacuaugguc

SEQ ID NO: 1574394 - RNA, 19 nt, Artificial Sequence
  Description of Artificial Sequence: Synthetic oligonucleotide
guucaaacaccugaggcgg

SEQ ID NO: 1574395 - RNA, 19 nt, Artificial Sequence
  Description of Artificial Sequence: Synthetic oligonucleotide
ugaaacaccuuccccuucc

SEQ ID NO: 1574396 - RNA, 19 nt, Artificial Sequence
  Description of Artificial Sequence: Synthetic oligonucleotide
acuccuccgagucuagacc

SEQ ID NO: 1574397 - RNA, 19 nt, Artificial Sequence
  Description of Artificial Sequence: Synthetic oligonucleotide
guccacaagguucuguucg

SEQ ID NO: 1574398 - RNA, 19 nt, Artificial Sequence
  Description of Artificial Sequence: Synthetic oligonucleotide
aagauucaugguucaaaca

SEQ ID NO: 1574399 - RNA, 19 nt, Artificial Sequence
  Description of Artificial Sequence: Synthetic oligonucleotide
aacuggaaagauggguggc

SEQ ID NO: 1574400 - RNA, 19 nt, Artificial Sequence
  Description of Artificial Sequence: Synthetic oligonucleotide
uccugaaacaccuuccccu

SEQ ID NO: 1574401 - RNA, 19 nt, Artificial Sequence
  Description of Artificial Sequence: Synthetic oligonucleotide
aauuacgacuuggaucuuc

SEQ ID NO: 1574402 - RNA, 19 nt, Artificial Sequence
  Description of Artificial Sequence: Synthetic oligonucleotide
uaaagcuguguauaagagu

SEQ ID NO: 1574403 - RNA, 19 nt, Artificial Sequence
  Description of Artificial Sequence: Synthetic oligonucleotide
uucaaauuacgacuuggau

SEQ ID NO: 1574404 - RNA, 19 nt, Artificial Sequence
  Description of Artificial Sequence: Synthetic oligonucleotide
ucaaguacuauggucucag

SEQ ID NO: 1574405 - RNA, 19 nt, Artificial Sequence
  Description of Artificial Sequence: Synthetic oligonucleotide
uggucaaguucuuugcugc

SEQ ID NO: 1574406 - RNA, 19 nt, Artificial Sequence
  Description of Artificial Sequence: Synthetic oligonucleotide
gauguaguacccauaaguc

SEQ ID NO: 1574407 - RNA, 19 nt, Artificial Sequence
  Description of Artificial Sequence: Synthetic oligonucleotide
auuuuggaguggccaaggc

SEQ ID NO: 1574408 - RNA, 19 nt, Artificial Sequence
  Description of Artificial Sequence: Synthetic oligonucleotide
aaacaccugaggcggcggc

SEQ ID NO: 1574409 - RNA, 19 nt, Artificial Sequence
  Description of Artificial Sequence: Synthetic oligonucleotide
cuauauggaagaagccucc

SEQ ID NO: 1574410 - RNA, 19 nt, Artificial Sequence
  Description of Artificial Sequence: Synthetic oligonucleotide
uggacuuccacuugugcca

SEQ ID NO: 1574411 - RNA, 19 nt, Artificial Sequence
  Description of Artificial Sequence: Synthetic oligonucleotide
uguauaagaguaguuuaac

SEQ ID NO: 1574412 - RNA, 19 nt, Artificial Sequence
  Description of Artificial Sequence: Synthetic oligonucleotide
cuauagaacuggaaagaug

SEQ ID NO: 1574413 - RNA, 19 nt, Artificial Sequence
  Description of Artificial Sequence: Synthetic oligonucleotide
gcuaaacaaagcuuuauac

SEQ ID NO: 1574414 - RNA, 19 nt, Artificial Sequence
  Description of Artificial Sequence: Synthetic oligonucleotide
uguauguggacuuccacuu

SEQ ID NO: 1574415 - RNA, 19 nt, Artificial Sequence
  Description of Artificial Sequence: Synthetic oligonucleotide
ugauuaaauuuuggagugg

SEQ ID NO: 1574416 - RNA, 19 nt, Artificial Sequence
  Description of Artificial Sequence: Synthetic oligonucleotide
aaccccauggucaaguucu

SEQ ID NO: 1574417 - RNA, 19 nt, Artificial Sequence
  Description of Artificial Sequence: Synthetic oligonucleotide
uguucaaaacauacuggaa

SEQ ID NO: 1574418 - RNA, 19 nt, Artificial Sequence
  Description of Artificial Sequence: Synthetic oligonucleotide
aaguacuauggucucagua

SEQ ID NO: 1574419 - RNA, 19 nt, Artificial Sequence
  Description of Artificial Sequence: Synthetic oligonucleotide
uagcgauagcaauagggcc

SEQ ID NO: 1574420 - RNA, 19 nt, Artificial Sequence
  Description of Artificial Sequence: Synthetic oligonucleotide
aacguuugauuaaauuuug

SEQ ID NO: 1574421 - RNA, 19 nt, Artificial Sequence
  Description of Artificial Sequence: Synthetic oligonucleotide
uaaauuccuucagauguag

SEQ ID NO: 1574422 - RNA, 19 nt, Artificial Sequence
  Description of Artificial Sequence: Synthetic oligonucleotide
auguaguacccauaagucu

SEQ ID NO: 1574423 - RNA, 19 nt, Artificial Sequence
  Description of Artificial Sequence: Synthetic oligonucleotide
gauaggacuccuccgaguc

SEQ ID NO: 1574424 - RNA, 19 nt, Artificial Sequence
  Description of Artificial Sequence: Synthetic oligonucleotide
aaaggcguucaucuccaug

SEQ ID NO: 1574425 - RNA, 19 nt, Artificial Sequence
  Description of Artificial Sequence: Synthetic oligonucleotide
aacuccacagugguuguuc

SEQ ID NO: 1574426 - RNA, 19 nt, Artificial Sequence
  Description of Artificial Sequence: Synthetic oligonucleotide
cuaagggagaccagcacac

SEQ ID NO: 1574427 - RNA, 19 nt, Artificial Sequence
  Description of Artificial Sequence: Synthetic oligonucleotide
gaguaguuuaacuaguggu

SEQ ID NO: 1574428 - RNA, 19 nt, Artificial Sequence
  Description of Artificial Sequence: Synthetic oligonucleotide
ugugccauugcgcauuaaa

SEQ ID NO: 1574429 - RNA, 19 nt, Artificial Sequence
  Description of Artificial Sequence: Synthetic oligonucleotide
guugccacggccuucauaa

SEQ ID NO: 1574430 - RNA, 19 nt, Artificial Sequence
  Description of Artificial Sequence: Synthetic oligonucleotide
uguucgcuaagggagacca

SEQ ID NO: 1574431 - RNA, 19 nt, Artificial Sequence
  Description of Artificial Sequence: Synthetic oligonucleotide
acccauaagucuuuaauua

SEQ ID NO: 1574432 - RNA, 19 nt, Artificial Sequence
  Description of Artificial Sequence: Synthetic oligonucleotide
uucuuauuugaaucuguuc

SEQ ID NO: 1574433 - RNA, 19 nt, Artificial Sequence
  Description of Artificial Sequence: Synthetic oligonucleotide
aagaguaguuuaacuagug

SEQ ID NO: 1574434 - RNA, 19 nt, Artificial Sequence
  Description of Artificial Sequence: Synthetic oligonucleotide
aacuagugguaacauuuaa

SEQ ID NO: 1574435 - RNA, 19 nt, Artificial Sequence
  Description of Artificial Sequence: Synthetic oligonucleotide
guggacuuccacuugugcc

SEQ ID NO: 1574436 - RNA, 19 nt, Artificial Sequence
  Description of Artificial Sequence: Synthetic oligonucleotide
aaagauggguggcuggcau

SEQ ID NO: 1574437 - RNA, 19 nt, Artificial Sequence
  Description of Artificial Sequence: Synthetic oligonucleotide
augguucaaacaccugagg

SEQ ID NO: 1574438 - RNA, 19 nt, Artificial Sequence
  Description of Artificial Sequence: Synthetic oligonucleotide
aguuuaacuagugguaaca

SEQ ID NO: 1574439 - RNA, 19 nt, Artificial Sequence
  Description of Artificial Sequence: Synthetic oligonucleotide
auuaccacuuuccaucaau

SEQ ID NO: 1574440 - RNA, 19 nt, Artificial Sequence
  Description of Artificial Sequence: Synthetic oligonucleotide
uagggauaggacuccuccg

SEQ ID NO: 1574441 - RNA, 19 nt, Artificial Sequence
  Description of Artificial Sequence: Synthetic oligonucleotide
acagugguuguucuugucu

SEQ ID NO: 1574442 - RNA, 19 nt, Artificial Sequence
  Description of Artificial Sequence: Synthetic oligonucleotide
guagccaugcuuccccucg

SEQ ID NO: 1574443 - RNA, 19 nt, Artificial Sequence
  Description of Artificial Sequence: Synthetic oligonucleotide
aacuaagaugcaaggaggu

SEQ ID NO: 1574444 - RNA, 19 nt, Artificial Sequence
  Description of Artificial Sequence: Synthetic oligonucleotide
agcgcuaaaagcccaacaa

SEQ ID NO: 1574445 - RNA, 19 nt, Artificial Sequence
  Description of Artificial Sequence: Synthetic oligonucleotide
uauagccguucacuaacug

SEQ ID NO: 1574446 - RNA, 19 nt, Artificial Sequence
  Description of Artificial Sequence: Synthetic oligonucleotide
uuuaacuagugguaacauu

SEQ ID NO: 1574447 - RNA, 19 nt, Artificial Sequence
  Description of Artificial Sequence: Synthetic oligonucleotide
agaccuuuguuguucaaaa

SEQ ID NO: 1574448 - RNA, 19 nt, Artificial Sequence
  Description of Artificial Sequence: Synthetic oligonucleotide
uucgcuaagggagaccagc

SEQ ID NO: 1574449 - RNA, 19 nt, Artificial Sequence
  Description of Artificial Sequence: Synthetic oligonucleotide
gcuacuuacaaguucucug

SEQ ID NO: 1574450 - RNA, 19 nt, Artificial Sequence
  Description of Artificial Sequence: Synthetic oligonucleotide
cuuuaauuaccacuuucca

SEQ ID NO: 1574451 - RNA, 19 nt, Artificial Sequence
  Description of Artificial Sequence: Synthetic oligonucleotide
uccugugucauuagccgca

SEQ ID NO: 1574452 - RNA, 19 nt, Artificial Sequence
  Description of Artificial Sequence: Synthetic oligonucleotide
agcaauagggcccacgguu

SEQ ID NO: 1574453 - RNA, 19 nt, Artificial Sequence
  Description of Artificial Sequence: Synthetic oligonucleotide
aagguucuguucgcuaagg

SEQ ID NO: 1574454 - RNA, 19 nt, Artificial Sequence
  Description of Artificial Sequence: Synthetic oligonucleotide
uacgacuuggaucuucaau

SEQ ID NO: 1574455 - RNA, 19 nt, Artificial Sequence
  Description of Artificial Sequence: Synthetic oligonucleotide
ugagggauauccacguauc

SEQ ID NO: 1574456 - RNA, 19 nt, Artificial Sequence
  Description of Artificial Sequence: Synthetic oligonucleotide
guagaugccugaacuauag

SEQ ID NO: 1574457 - RNA, 19 nt, Artificial Sequence
  Description of Artificial Sequence: Synthetic oligonucleotide
ucuguauguggacuuccac

SEQ ID NO: 1574458 - RNA, 19 nt, Artificial Sequence
  Description of Artificial Sequence: Synthetic oligonucleotide
auucgugccauacagccuu

SEQ ID NO: 1574459 - RNA, 19 nt, Artificial Sequence
  Description of Artificial Sequence: Synthetic oligonucleotide
guucaauauuauaaagcug

SEQ ID NO: 1574460 - RNA, 19 nt, Artificial Sequence
  Description of Artificial Sequence: Synthetic oligonucleotide
aagcgcuaaaagcccaaca

SEQ ID NO: 1574461 - RNA, 19 nt, Artificial Sequence
  Description of Artificial Sequence: Synthetic oligonucleotide
gaugcaaggaggucgccga

SEQ ID NO: 1574462 - RNA, 19 nt, Artificial Sequence
  Description of Artificial Sequence: Synthetic oligonucleotide
guuuggucaauuuuaagau

SEQ ID NO: 1574463 - RNA, 19 nt, Artificial Sequence
  Description of Artificial Sequence: Synthetic oligonucleotide
ugagaacaguccacaaggu

SEQ ID NO: 1574464 - RNA, 19 nt, Artificial Sequence
  Description of Artificial Sequence: Synthetic oligonucleotide
ucuagaccuuuguuguuca

SEQ ID NO: 1574465 - RNA, 19 nt, Artificial Sequence
  Description of Artificial Sequence: Synthetic oligonucleotide
uaguuuaacuagugguaac

SEQ ID NO: 1574466 - RNA, 19 nt, Artificial Sequence
  Description of Artificial Sequence: Synthetic oligonucleotide
uggcuauauggaagaagcc

SEQ ID NO: 1574467 - RNA, 19 nt, Artificial Sequence
  Description of Artificial Sequence: Synthetic oligonucleotide
uuauagccguucacuaacu

SEQ ID NO: 1574468 - RNA, 19 nt, Artificial Sequence
  Description of Artificial Sequence: Synthetic oligonucleotide
aauccauagccaaccacca

SEQ ID NO: 1574469 - RNA, 19 nt, Artificial Sequence
  Description of Artificial Sequence: Synthetic oligonucleotide
agguucuguucgcuaaggg

SEQ ID NO: 1574470 - RNA, 19 nt, Artificial Sequence
  Description of Artificial Sequence: Synthetic oligonucleotide
cauaguagaugccugaacu

SEQ ID NO: 1574471 - RNA, 19 nt, Artificial Sequence
  Description of Artificial Sequence: Synthetic oligonucleotide
acuaagaugcaaggagguc

SEQ ID NO: 1574472 - RNA, 19 nt, Artificial Sequence
  Description of Artificial Sequence: Synthetic oligonucleotide
cuuugccucauagggauag

SEQ ID NO: 1574473 - RNA, 19 nt, Artificial Sequence
  Description of Artificial Sequence: Synthetic oligonucleotide
gagggauauccacguaucc

SEQ ID NO: 1574474 - RNA, 19 nt, Artificial Sequence
  Description of Artificial Sequence: Synthetic oligonucleotide
cagaguucaaauuacgacu

SEQ ID NO: 1574475 - RNA, 19 nt, Artificial Sequence
  Description of Artificial Sequence: Synthetic oligonucleotide
gauauccacguauccugug

SEQ ID NO: 1574476 - RNA, 19 nt, Artificial Sequence
  Description of Artificial Sequence: Synthetic oligonucleotide
gggauauccacguauccug

SEQ ID NO: 1574477 - RNA, 19 nt, Artificial Sequence
  Description of Artificial Sequence: Synthetic oligonucleotide
uucuguauguggacuucca

SEQ ID NO: 1574478 - RNA, 19 nt, Artificial Sequence
  Description of Artificial Sequence: Synthetic oligonucleotide
uucuguucgcuaagggaga

SEQ ID NO: 1574479 - RNA, 19 nt, Artificial Sequence
  Description of Artificial Sequence: Synthetic oligonucleotide
aguaguuuaacuaguggua

SEQ ID NO: 1574480 - RNA, 19 nt, Artificial Sequence
  Description of Artificial Sequence: Synthetic oligonucleotide
augauucaaguacuauggu

SEQ ID NO: 1574481 - RNA, 19 nt, Artificial Sequence
  Description of Artificial Sequence: Synthetic oligonucleotide
aacaaauauuccagacuca

SEQ ID NO: 1574482 - RNA, 19 nt, Artificial Sequence
  Description of Artificial Sequence: Synthetic oligonucleotide
ugccauacagccuucugua

SEQ ID NO: 1574483 - RNA, 19 nt, Artificial Sequence
  Description of Artificial Sequence: Synthetic oligonucleotide
ccauaccccaugaagaacc

SEQ ID NO: 1574484 - RNA, 19 nt, Artificial Sequence
  Description of Artificial Sequence: Synthetic oligonucleotide
cuguauuccccauugugca

SEQ ID NO: 1574485 - RNA, 19 nt, Artificial Sequence
  Description of Artificial Sequence: Synthetic oligonucleotide
uugcgcauuaaacguuuga

SEQ ID NO: 1574486 - RNA, 19 nt, Artificial Sequence
  Description of Artificial Sequence: Synthetic oligonucleotide
uauauggaagaagccuccc

SEQ ID NO: 1574487 - RNA, 19 nt, Artificial Sequence
  Description of Artificial Sequence: Synthetic oligonucleotide
cucgcuguauuccccauug

SEQ ID NO: 1574488 - RNA, 19 nt, Artificial Sequence
  Description of Artificial Sequence: Synthetic oligonucleotide
uaacuagugguaacauuua

SEQ ID NO: 1574489 - RNA, 19 nt, Artificial Sequence
  Description of Artificial Sequence: Synthetic oligonucleotide
agggauaggacuccuccga

SEQ ID NO: 1574490 - RNA, 19 nt, Artificial Sequence
  Description of Artificial Sequence: Synthetic oligonucleotide
ucauuagccgcagcaaacu

SEQ ID NO: 1574491 - RNA, 19 nt, Artificial Sequence
  Description of Artificial Sequence: Synthetic oligonucleotide
cuggaaggcaaaauccauc

SEQ ID NO: 1574492 - RNA, 19 nt, Artificial Sequence
  Description of Artificial Sequence: Synthetic oligonucleotide
agaugcaaggaggucgccg

SEQ ID NO: 1574493 - RNA, 19 nt, Artificial Sequence
  Description of Artificial Sequence: Synthetic oligonucleotide
uauccacguauccuguguc

SEQ ID NO: 1574494 - RNA, 19 nt, Artificial Sequence
  Description of Artificial Sequence: Synthetic oligonucleotide
ugcuuauagccguucacua

SEQ ID NO: 1574495 - RNA, 19 nt, Artificial Sequence
  Description of Artificial Sequence: Synthetic oligonucleotide
ugcgcauuaaacguuugau

SEQ ID NO: 1574496 - RNA, 19 nt, Artificial Sequence
  Description of Artificial Sequence: Synthetic oligonucleotide
gguuuguacuuacagguuc

SEQ ID NO: 1574497 - RNA, 19 nt, Artificial Sequence
  Description of Artificial Sequence: Synthetic oligonucleotide
uuaccacuuuccaucaauu

SEQ ID NO: 1574498 - RNA, 19 nt, Artificial Sequence
  Description of Artificial Sequence: Synthetic oligonucleotide
uuacagguuccauccuuug

SEQ ID NO: 1574499 - RNA, 19 nt, Artificial Sequence
  Description of Artificial Sequence: Synthetic oligonucleotide
acuauagaacuggaaagau

SEQ ID NO: 1574500 - RNA, 19 nt, Artificial Sequence
  Description of Artificial Sequence: Synthetic oligonucleotide
uaguagaugccugaacuau

SEQ ID NO: 1574501 - RNA, 19 nt, Artificial Sequence
  Description of Artificial Sequence: Synthetic oligonucleotide
guucgguucauaguagaug

SEQ ID NO: 1574502 - RNA, 19 nt, Artificial Sequence
  Description of Artificial Sequence: Synthetic oligonucleotide
agaaguaggcagugagugu

SEQ ID NO: 1574503 - RNA, 19 nt, Artificial Sequence
  Description of Artificial Sequence: Synthetic oligonucleotide
ucucaguaaggguuugguc

SEQ ID NO: 1574504 - RNA, 19 nt, Artificial Sequence
  Description of Artificial Sequence: Synthetic oligonucleotide
guaacauuuaacccaugua

SEQ ID NO: 1574505 - RNA, 19 nt, Artificial Sequence
  Description of Artificial Sequence: Synthetic oligonucleotide
guauaagaguaguuuaacu

SEQ ID NO: 1574506 - RNA, 19 nt, Artificial Sequence
  Description of Artificial Sequence: Synthetic oligonucleotide
ggaucuucaaugauucaag

SEQ ID NO: 1574507 - RNA, 19 nt, Artificial Sequence
  Description of Artificial Sequence: Synthetic oligonucleotide
uccacaagguucuguucgc

SEQ ID NO: 1574508 - RNA, 19 nt, Artificial Sequence
  Description of Artificial Sequence: Synthetic oligonucleotide
ugaagcaucagaggcuccu

SEQ ID NO: 1574509 - RNA, 19 nt, Artificial Sequence
  Description of Artificial Sequence: Synthetic oligonucleotide
uucaugguucaaacaccug

SEQ ID NO: 1574510 - RNA, 19 nt, Artificial Sequence
  Description of Artificial Sequence: Synthetic oligonucleotide
cucauucgugccauacagc

SEQ ID NO: 1574511 - RNA, 19 nt, Artificial Sequence
  Description of Artificial Sequence: Synthetic oligonucleotide
uaccacuuuccaucaauuc

SEQ ID NO: 1574512 - RNA, 19 nt, Artificial Sequence
  Description of Artificial Sequence: Synthetic oligonucleotide
gacuccuccgagucuagac

SEQ ID NO: 1574513 - RNA, 19 nt, Artificial Sequence
  Description of Artificial Sequence: Synthetic oligonucleotide
acguuugauuaaauuuugg

SEQ ID NO: 1574514 - RNA, 19 nt, Artificial Sequence
  Description of Artificial Sequence: Synthetic oligonucleotide
uccucauucgugccauaca

SEQ ID NO: 1574515 - RNA, 19 nt, Artificial Sequence
  Description of Artificial Sequence: Synthetic oligonucleotide
gaccuuuguuguucaaaac

SEQ ID NO: 1574516 - RNA, 19 nt, Artificial Sequence
  Description of Artificial Sequence: Synthetic oligonucleotide
cagcuguucuugacaaucc

SEQ ID NO: 1574517 - RNA, 19 nt, Artificial Sequence
  Description of Artificial Sequence: Synthetic oligonucleotide
cauaccccaugaagaaccc

SEQ ID NO: 1574518 - RNA, 19 nt, Artificial Sequence
  Description of Artificial Sequence: Synthetic oligonucleotide
aguggccaaggcuguuccc

SEQ ID NO: 1574519 - RNA, 19 nt, Artificial Sequence
  Description of Artificial Sequence: Synthetic oligonucleotide
aagaugcaaggaggucgcc

SEQ ID NO: 1574520 - RNA, 19 nt, Artificial Sequence
  Description of Artificial Sequence: Synthetic oligonucleotide
cuuauuugaaucuguuccu

SEQ ID NO: 1574521 - RNA, 19 nt, Artificial Sequence
  Description of Artificial Sequence: Synthetic oligonucleotide
ucgguucauaguagaugcc

SEQ ID NO: 1574522 - RNA, 19 nt, Artificial Sequence
  Description of Artificial Sequence: Synthetic oligonucleotide
guauuccccauugugcagc

SEQ ID NO: 1574523 - RNA, 19 nt, Artificial Sequence
  Description of Artificial Sequence: Synthetic oligonucleotide
uucacacaguaggauagcu

SEQ ID NO: 1574524 - RNA, 19 nt, Artificial Sequence
  Description of Artificial Sequence: Synthetic oligonucleotide
guaguuuaacuagugguaa

SEQ ID NO: 1574525 - RNA, 19 nt, Artificial Sequence
  Description of Artificial Sequence: Synthetic oligonucleotide
uccgagucuagaccuuugu

SEQ ID NO: 1574526 - RNA, 19 nt, Artificial Sequence
  Description of Artificial Sequence: Synthetic oligonucleotide
uaaaagauucaugguucaa

SEQ ID NO: 1574527 - RNA, 19 nt, Artificial Sequence
  Description of Artificial Sequence: Synthetic oligonucleotide
acuuacagguuccauccuu

SEQ ID NO: 1574528 - RNA, 19 nt, Artificial Sequence
  Description of Artificial Sequence: Synthetic oligonucleotide
aauuaccacuuuccaucaa

SEQ ID NO: 1574529 - RNA, 19 nt, Artificial Sequence
  Description of Artificial Sequence: Synthetic oligonucleotide
cuauagcgauagcaauagg

SEQ ID NO: 1574530 - RNA, 19 nt, Artificial Sequence
  Description of Artificial Sequence: Synthetic oligonucleotide
agggauauccacguauccu

SEQ ID NO: 1574531 - RNA, 19 nt, Artificial Sequence
  Description of Artificial Sequence: Synthetic oligonucleotide
uucaaacaccugaggcggc

SEQ ID NO: 1574532 - RNA, 19 nt, Artificial Sequence
  Description of Artificial Sequence: Synthetic oligonucleotide
cagugaguguucaauauua

SEQ ID NO: 1574533 - RNA, 19 nt, Artificial Sequence
  Description of Artificial Sequence: Synthetic oligonucleotide
uggugcuuauagccguuca

SEQ ID NO: 1574534 - RNA, 19 nt, Artificial Sequence
  Description of Artificial Sequence: Synthetic oligonucleotide
auuagccgcagcaaacuca

SEQ ID NO: 1574535 - RNA, 19 nt, Artificial Sequence
  Description of Artificial Sequence: Synthetic oligonucleotide
aagcuguguauaagaguag

SEQ ID NO: 1574536 - RNA, 19 nt, Artificial Sequence
  Description of Artificial Sequence: Synthetic oligonucleotide
guucaaauuacgacuugga

SEQ ID NO: 1574537 - RNA, 19 nt, Artificial Sequence
  Description of Artificial Sequence: Synthetic oligonucleotide
cuucuguauguggacuucc

SEQ ID NO: 1574538 - RNA, 19 nt, Artificial Sequence
  Description of Artificial Sequence: Synthetic oligonucleotide
gccugaacuauagaacugg

SEQ ID NO: 1574539 - RNA, 19 nt, Artificial Sequence
  Description of Artificial Sequence: Synthetic oligonucleotide
auuacgacuuggaucuuca

SEQ ID NO: 1574540 - RNA, 19 nt, Artificial Sequence
  Description of Artificial Sequence: Synthetic oligonucleotide
uucaaguacuauggucuca

SEQ ID NO: 1574541 - RNA, 19 nt, Artificial Sequence
  Description of Artificial Sequence: Synthetic oligonucleotide
ccucauucgugccauacag

SEQ ID NO: 1574542 - RNA, 19 nt, Artificial Sequence
  Description of Artificial Sequence: Synthetic oligonucleotide
auaccccaugaagaacccc

SEQ ID NO: 1574543 - RNA, 19 nt, Artificial Sequence
  Description of Artificial Sequence: Synthetic oligonucleotide
aguaggauagcuggccgca

SEQ ID NO: 1574544 - RNA, 19 nt, Artificial Sequence
  Description of Artificial Sequence: Synthetic oligonucleotide
gguucuguucgcuaaggga

SEQ ID NO: 1574545 - RNA, 19 nt, Artificial Sequence
  Description of Artificial Sequence: Synthetic oligonucleotide
cuucaaugauucaaguacu

SEQ ID NO: 1574546 - RNA, 19 nt, Artificial Sequence
  Description of Artificial Sequence: Synthetic oligonucleotide
acugccggaacucuucauu

SEQ ID NO: 1574547 - RNA, 19 nt, Artificial Sequence
  Description of Artificial Sequence: Synthetic oligonucleotide
uggccaggaggaguaaaag

SEQ ID NO: 1574548 - RNA, 19 nt, Artificial Sequence
  Description of Artificial Sequence: Synthetic oligonucleotide
cucauagggauaggacucc

SEQ ID NO: 1574549 - RNA, 19 nt, Artificial Sequence
  Description of Artificial Sequence: Synthetic oligonucleotide
gcuauauggaagaagccuc

SEQ ID NO: 1574550 - RNA, 19 nt, Artificial Sequence
  Description of Artificial Sequence: Synthetic oligonucleotide
uggcuggcaucuauagcga

SEQ ID NO: 1574551 - RNA, 19 nt, Artificial Sequence
  Description of Artificial Sequence: Synthetic oligonucleotide
cuucauaagggccuucucu

SEQ ID NO: 1574552 - RNA, 19 nt, Artificial Sequence
  Description of Artificial Sequence: Synthetic oligonucleotide
uuugccucauagggauagg

SEQ ID NO: 1574553 - RNA, 19 nt, Artificial Sequence
  Description of Artificial Sequence: Synthetic oligonucleotide
caaggcuguucccaagcac

SEQ ID NO: 1574554 - RNA, 19 nt, Artificial Sequence
  Description of Artificial Sequence: Synthetic oligonucleotide
aaacucagguuuguacuua

SEQ ID NO: 1574555 - RNA, 19 nt, Artificial Sequence
  Description of Artificial Sequence: Synthetic oligonucleotide
cccauaagucuuuaauuac

SEQ ID NO: 1574556 - RNA, 19 nt, Artificial Sequence
  Description of Artificial Sequence: Synthetic oligonucleotide
guguauaagaguaguuuaa

SEQ ID NO: 1574557 - RNA, 19 nt, Artificial Sequence
  Description of Artificial Sequence: Synthetic oligonucleotide
uacuuacagguuccauccu

SEQ ID NO: 1574558 - RNA, 19 nt, Artificial Sequence
  Description of Artificial Sequence: Synthetic oligonucleotide
cgagucuagaccuuuguug

SEQ ID NO: 1574559 - RNA, 19 nt, Artificial Sequence
  Description of Artificial Sequence: Synthetic oligonucleotide
ggcaucuauagcgauagca

SEQ ID NO: 1574560 - RNA, 19 nt, Artificial Sequence
  Description of Artificial Sequence: Synthetic oligonucleotide
caauagggcccacgguugc

SEQ ID NO: 1574561 - RNA, 19 nt, Artificial Sequence
  Description of Artificial Sequence: Synthetic oligonucleotide
gcgcuaaaagcccaacaag

SEQ ID NO: 1574562 - RNA, 19 nt, Artificial Sequence
  Description of Artificial Sequence: Synthetic oligonucleotide
aucuauagcgauagcaaua

SEQ ID NO: 1574563 - RNA, 19 nt, Artificial Sequence
  Description of Artificial Sequence: Synthetic oligonucleotide
auccacguauccuguguca

SEQ ID NO: 1574564 - RNA, 19 nt, Artificial Sequence
  Description of Artificial Sequence: Synthetic oligonucleotide
agauggguggcuggcaucu

SEQ ID NO: 1574565 - RNA, 19 nt, Artificial Sequence
  Description of Artificial Sequence: Synthetic oligonucleotide
uagcaauagggcccacggu

SEQ ID NO: 1574566 - RNA, 19 nt, Artificial Sequence
  Description of Artificial Sequence: Synthetic oligonucleotide
gugccauugcgcauuaaac

SEQ ID NO: 1574567 - RNA, 19 nt, Artificial Sequence
  Description of Artificial Sequence: Synthetic oligonucleotide
acaguucgguucauaguag

SEQ ID NO: 1574568 - RNA, 19 nt, Artificial Sequence
  Description of Artificial Sequence: Synthetic oligonucleotide
uuccucauucgugccauac

SEQ ID NO: 1574569 - RNA, 19 nt, Artificial Sequence
  Description of Artificial Sequence: Synthetic oligonucleotide
agcuacuuacaaguucucu

SEQ ID NO: 1574570 - RNA, 19 nt, Artificial Sequence
  Description of Artificial Sequence: Synthetic oligonucleotide
gcuaagggagaccagcaca

SEQ ID NO: 1574571 - RNA, 19 nt, Artificial Sequence
  Description of Artificial Sequence: Synthetic oligonucleotide
cauuagccgcagcaaacuc

SEQ ID NO: 1574572 - RNA, 19 nt, Artificial Sequence
  Description of Artificial Sequence: Synthetic oligonucleotide
aguacccauaagucuuuaa

SEQ ID NO: 1574573 - RNA, 19 nt, Artificial Sequence
  Description of Artificial Sequence: Synthetic oligonucleotide
cugaacuauagaacuggaa

SEQ ID NO: 1574574 - RNA, 19 nt, Artificial Sequence
  Description of Artificial Sequence: Synthetic oligonucleotide
auaggacuccuccgagucu

SEQ ID NO: 1574575 - RNA, 19 nt, Artificial Sequence
  Description of Artificial Sequence: Synthetic oligonucleotide
gucuagaccuuuguuguuc

SEQ ID NO: 1574576 - RNA, 19 nt, Artificial Sequence
  Description of Artificial Sequence: Synthetic oligonucleotide
gcugcuacaguucgguuca

SEQ ID NO: 1574577 - RNA, 19 nt, Artificial Sequence
  Description of Artificial Sequence: Synthetic oligonucleotide
uuaaggcacaucuguccuu

SEQ ID NO: 1574578 - RNA, 19 nt, Artificial Sequence
  Description of Artificial Sequence: Synthetic oligonucleotide
acuccacagugguuguucu

SEQ ID NO: 1574579 - RNA, 19 nt, Artificial Sequence
  Description of Artificial Sequence: Synthetic oligonucleotide
ggaagaagccucccauacc

SEQ ID NO: 1574580 - RNA, 19 nt, Artificial Sequence
  Description of Artificial Sequence: Synthetic oligonucleotide
ccugauugccuucagccug

SEQ ID NO: 1574581 - RNA, 19 nt, Artificial Sequence
  Description of Artificial Sequence: Synthetic oligonucleotide
ccugagaacaguccacaag

SEQ ID NO: 1574582 - RNA, 19 nt, Artificial Sequence
  Description of Artificial Sequence: Synthetic oligonucleotide
ucuguucgcuaagggagac

SEQ ID NO: 1574583 - RNA, 19 nt, Artificial Sequence
  Description of Artificial Sequence: Synthetic oligonucleotide
cuuaaggcacaucuguccu

SEQ ID NO: 1574584 - RNA, 19 nt, Artificial Sequence
  Description of Artificial Sequence: Synthetic oligonucleotide
auaaauuccuucagaugua

SEQ ID NO: 1574585 - RNA, 19 nt, Artificial Sequence
  Description of Artificial Sequence: Synthetic oligonucleotide
uaagggagaccagcacacc

SEQ ID NO: 1574586 - RNA, 19 nt, Artificial Sequence
  Description of Artificial Sequence: Synthetic oligonucleotide
agacucagaaguaggcagu

SEQ ID NO: 1574587 - RNA, 19 nt, Artificial Sequence
  Description of Artificial Sequence: Synthetic oligonucleotide
acguauccugugucauuag

SEQ ID NO: 1574588 - RNA, 19 nt, Artificial Sequence
  Description of Artificial Sequence: Synthetic oligonucleotide
ggugcuuauagccguucac

SEQ ID NO: 1574589 - RNA, 19 nt, Artificial Sequence
  Description of Artificial Sequence: Synthetic oligonucleotide
auugcagcccugauugccu

SEQ ID NO: 1574590 - RNA, 19 nt, Artificial Sequence
  Description of Artificial Sequence: Synthetic oligonucleotide
acauacacacugaacuaaa

SEQ ID NO: 1574591 - RNA, 19 nt, Artificial Sequence
  Description of Artificial Sequence: Synthetic oligonucleotide
cguuugauuaaauuuugga

SEQ ID NO: 1574592 - RNA, 19 nt, Artificial Sequence
  Description of Artificial Sequence: Synthetic oligonucleotide
ugguguagccaugcuuccc

SEQ ID NO: 1574593 - RNA, 19 nt, Artificial Sequence
  Description of Artificial Sequence: Synthetic oligonucleotide
uccacguauccugugucau

SEQ ID NO: 1574594 - RNA, 19 nt, Artificial Sequence
  Description of Artificial Sequence: Synthetic oligonucleotide
aaggcacaucuguccuucu

SEQ ID NO: 1574595 - RNA, 19 nt, Artificial Sequence
  Description of Artificial Sequence: Synthetic oligonucleotide
caaaauccaucaggccacc

SEQ ID NO: 1574596 - RNA, 19 nt, Artificial Sequence
  Description of Artificial Sequence: Synthetic oligonucleotide
uguagccaugcuuccccuc

SEQ ID NO: 1574597 - RNA, 19 nt, Artificial Sequence
  Description of Artificial Sequence: Synthetic oligonucleotide
cgcauuaaacguuugauua

SEQ ID NO: 1574598 - RNA, 19 nt, Artificial Sequence
  Description of Artificial Sequence: Synthetic oligonucleotide
agugaguguucaauauuau

SEQ ID NO: 1574599 - RNA, 19 nt, Artificial Sequence
  Description of Artificial Sequence: Synthetic oligonucleotide
uccccucgcuguauucccc

SEQ ID NO: 1574600 - RNA, 19 nt, Artificial Sequence
  Description of Artificial Sequence: Synthetic oligonucleotide
caaacaccugaggcggcgg

SEQ ID NO: 1574601 - RNA, 19 nt, Artificial Sequence
  Description of Artificial Sequence: Synthetic oligonucleotide
uuacgacuuggaucuucaa

SEQ ID NO: 1574602 - RNA, 19 nt, Artificial Sequence
  Description of Artificial Sequence: Synthetic oligonucleotide
gcaaacuaagaugcaagga

SEQ ID NO: 1574603 - RNA, 19 nt, Artificial Sequence
  Description of Artificial Sequence: Synthetic oligonucleotide
cacaagcgcuaaaagccca

SEQ ID NO: 1574604 - RNA, 19 nt, Artificial Sequence
  Description of Artificial Sequence: Synthetic oligonucleotide
aggauagcuggccgcagua

SEQ ID NO: 1574605 - RNA, 19 nt, Artificial Sequence
  Description of Artificial Sequence: Synthetic oligonucleotide
gggauaggacuccuccgag

SEQ ID NO: 1574606 - RNA, 19 nt, Artificial Sequence
  Description of Artificial Sequence: Synthetic oligonucleotide
ucuggugcuuauagccguu

SEQ ID NO: 1574607 - RNA, 19 nt, Artificial Sequence
  Description of Artificial Sequence: Synthetic oligonucleotide
gguggcuggcaucuauagc

SEQ ID NO: 1574608 - RNA, 19 nt, Artificial Sequence
  Description of Artificial Sequence: Synthetic oligonucleotide
gcaucuauagcgauagcaa

SEQ ID NO: 1574609 - RNA, 19 nt, Artificial Sequence
  Description of Artificial Sequence: Synthetic oligonucleotide
caucuauagcgauagcaau

SEQ ID NO: 1574610 - RNA, 19 nt, Artificial Sequence
  Description of Artificial Sequence: Synthetic oligonucleotide
aguucgguucauaguagau

SEQ ID NO: 1574611 - RNA, 19 nt, Artificial Sequence
  Description of Artificial Sequence: Synthetic oligonucleotide
gagaacaguccacaagguu

SEQ ID NO: 1574612 - RNA, 19 nt, Artificial Sequence
  Description of Artificial Sequence: Synthetic oligonucleotide
cuugacaauccaauauuuu

SEQ ID NO: 1574613 - RNA, 19 nt, Artificial Sequence
  Description of Artificial Sequence: Synthetic oligonucleotide
agccuucuguauguggacu

SEQ ID NO: 1574614 - RNA, 19 nt, Artificial Sequence
  Description of Artificial Sequence: Synthetic oligonucleotide
uggguggcuggcaucuaua

SEQ ID NO: 1574615 - RNA, 19 nt, Artificial Sequence
  Description of Artificial Sequence: Synthetic oligonucleotide
gugccauacagccuucugu

SEQ ID NO: 1574616 - RNA, 19 nt, Artificial Sequence
  Description of Artificial Sequence: Synthetic oligonucleotide
agucuagaccuuuguuguu

SEQ ID NO: 1574617 - RNA, 19 nt, Artificial Sequence
  Description of Artificial Sequence: Synthetic oligonucleotide
cgcuaaaagcccaacaaga

SEQ ID NO: 1574618 - RNA, 19 nt, Artificial Sequence
  Description of Artificial Sequence: Synthetic oligonucleotide
aguagaugccugaacuaua

SEQ ID NO: 1574619 - RNA, 19 nt, Artificial Sequence
  Description of Artificial Sequence: Synthetic oligonucleotide
acaguccacaagguucugu

SEQ ID NO: 1574620 - RNA, 19 nt, Artificial Sequence
  Description of Artificial Sequence: Synthetic oligonucleotide
ucgcuguauuccccauugu

SEQ ID NO: 1574621 - RNA, 19 nt, Artificial Sequence
  Description of Artificial Sequence: Synthetic oligonucleotide
ggcuauauggaagaagccu

SEQ ID NO: 1574622 - RNA, 19 nt, Artificial Sequence
  Description of Artificial Sequence: Synthetic oligonucleotide
cacagugguuguucuuguc

SEQ ID NO: 1574623 - RNA, 19 nt, Artificial Sequence
  Description of Artificial Sequence: Synthetic oligonucleotide
aguaaggguuuggucaauu

SEQ ID NO: 1574624 - RNA, 19 nt, Artificial Sequence
  Description of Artificial Sequence: Synthetic oligonucleotide
cugaaacaccuuccccuuc

SEQ ID NO: 1574625 - RNA, 19 nt, Artificial Sequence
  Description of Artificial Sequence: Synthetic oligonucleotide
uggccgcaguagcaacucc

SEQ ID NO: 1574626 - RNA, 19 nt, Artificial Sequence
  Description of Artificial Sequence: Synthetic oligonucleotide
gccagcuacuuacaaguuc

SEQ ID NO: 1574627 - RNA, 19 nt, Artificial Sequence
  Description of Artificial Sequence: Synthetic oligonucleotide
auugcgcauuaaacguuug

SEQ ID NO: 1574628 - RNA, 19 nt, Artificial Sequence
  Description of Artificial Sequence: Synthetic oligonucleotide
gaggucgccgagguccgag

SEQ ID NO: 1574629 - RNA, 19 nt, Artificial Sequence
  Description of Artificial Sequence: Synthetic oligonucleotide
cuccgagucuagaccuuug

SEQ ID NO: 1574630 - RNA, 19 nt, Artificial Sequence
  Description of Artificial Sequence: Synthetic oligonucleotide
gcuuauagccguucacuaa

SEQ ID NO: 1574631 - RNA, 19 nt, Artificial Sequence
  Description of Artificial Sequence: Synthetic oligonucleotide
guggccaaggcuguuccca

SEQ ID NO: 1574632 - RNA, 19 nt, Artificial Sequence
  Description of Artificial Sequence: Synthetic oligonucleotide
caagcgcuaaaagcccaac

SEQ ID NO: 1574633 - RNA, 19 nt, Artificial Sequence
  Description of Artificial Sequence: Synthetic oligonucleotide
gcggccagcuacuuacaag

SEQ ID NO: 1574634 - RNA, 19 nt, Artificial Sequence
  Description of Artificial Sequence: Synthetic oligonucleotide
auagggcccacgguugcca

SEQ ID NO: 1574635 - RNA, 19 nt, Artificial Sequence
  Description of Artificial Sequence: Synthetic oligonucleotide
gcaauagggcccacgguug

SEQ ID NO: 1574636 - RNA, 19 nt, Artificial Sequence
  Description of Artificial Sequence: Synthetic oligonucleotide
acaaagcuuuauacauccu

SEQ ID NO: 1574637 - RNA, 19 nt, Artificial Sequence
  Description of Artificial Sequence: Synthetic oligonucleotide
cucugcaaacuaagaugca

SEQ ID NO: 1574638 - RNA, 19 nt, Artificial Sequence
  Description of Artificial Sequence: Synthetic oligonucleotide
gugcuuauagccguucacu

SEQ ID NO: 1574639 - RNA, 19 nt, Artificial Sequence
  Description of Artificial Sequence: Synthetic oligonucleotide
ccagcuacuuacaaguucu

SEQ ID NO: 1574640 - RNA, 19 nt, Artificial Sequence
  Description of Artificial Sequence: Synthetic oligonucleotide
gaaccccagcuguucuuga

SEQ ID NO: 1574641 - RNA, 19 nt, Artificial Sequence
  Description of Artificial Sequence: Synthetic oligonucleotide
acucagaaguaggcaguga

SEQ ID NO: 1574642 - RNA, 19 nt, Artificial Sequence
  Description of Artificial Sequence: Synthetic oligonucleotide
uggucucaguaaggguuug

SEQ ID NO: 1574643 - RNA, 19 nt, Artificial Sequence
  Description of Artificial Sequence: Synthetic oligonucleotide
cacguauccugugucauua

SEQ ID NO: 1574644 - RNA, 19 nt, Artificial Sequence
  Description of Artificial Sequence: Synthetic oligonucleotide
cagcuacuuacaaguucuc

SEQ ID NO: 1574645 - RNA, 19 nt, Artificial Sequence
  Description of Artificial Sequence: Synthetic oligonucleotide
cuguucgcuaagggagacc

SEQ ID NO: 1574646 - RNA, 19 nt, Artificial Sequence
  Description of Artificial Sequence: Synthetic oligonucleotide
auguggacuuccacuugug

SEQ ID NO: 1574647 - RNA, 19 nt, Artificial Sequence
  Description of Artificial Sequence: Synthetic oligonucleotide
cuuacagguuccauccuuu

SEQ ID NO: 1574648 - RNA, 19 nt, Artificial Sequence
  Description of Artificial Sequence: Synthetic oligonucleotide
acuaacugccggaacucuu

SEQ ID NO: 1574649 - RNA, 19 nt, Artificial Sequence
  Description of Artificial Sequence: Synthetic oligonucleotide
uucgugccauacagccuuc

SEQ ID NO: 1574650 - RNA, 19 nt, Artificial Sequence
  Description of Artificial Sequence: Synthetic oligonucleotide
ggauagcuggccgcaguag

SEQ ID NO: 1574651 - RNA, 19 nt, Artificial Sequence
  Description of Artificial Sequence: Synthetic oligonucleotide
agguuuguacuuacagguu

SEQ ID NO: 1574652 - RNA, 19 nt, Artificial Sequence
  Description of Artificial Sequence: Synthetic oligonucleotide
cuccuccgagucuagaccu

SEQ ID NO: 1574653 - RNA, 19 nt, Artificial Sequence
  Description of Artificial Sequence: Synthetic oligonucleotide
cauugcgcauuaaacguuu

SEQ ID NO: 1574654 - RNA, 19 nt, Artificial Sequence
  Description of Artificial Sequence: Synthetic oligonucleotide
guucgcuaagggagaccag

SEQ ID NO: 1574655 - RNA, 19 nt, Artificial Sequence
  Description of Artificial Sequence: Synthetic oligonucleotide
aaauuacgacuuggaucuu

SEQ ID NO: 1574656 - RNA, 19 nt, Artificial Sequence
  Description of Artificial Sequence: Synthetic oligonucleotide
acaagcgcuaaaagcccaa

SEQ ID NO: 1574657 - RNA, 19 nt, Artificial Sequence
  Description of Artificial Sequence: Synthetic oligonucleotide
gcacaccagucuuaaggca

SEQ ID NO: 1574658 - RNA, 19 nt, Artificial Sequence
  Description of Artificial Sequence: Synthetic oligonucleotide
cuggccgcaguagcaacuc

SEQ ID NO: 1574659 - RNA, 19 nt, Artificial Sequence
  Description of Artificial Sequence: Synthetic oligonucleotide
uaguacccauaagucuuua

SEQ ID NO: 1574660 - RNA, 19 nt, Artificial Sequence
  Description of Artificial Sequence: Synthetic oligonucleotide
ugcuacaguucgguucaua

SEQ ID NO: 1574661 - RNA, 19 nt, Artificial Sequence
  Description of Artificial Sequence: Synthetic oligonucleotide
uugcugcuacaguucgguu

SEQ ID NO: 1574662 - RNA, 19 nt, Artificial Sequence
  Description of Artificial Sequence: Synthetic oligonucleotide
guaggcagugaguguucaa

SEQ ID NO: 1574663 - RNA, 19 nt, Artificial Sequence
  Description of Artificial Sequence: Synthetic oligonucleotide
ccugaacuauagaacugga

SEQ ID NO: 1574664 - RNA, 19 nt, Artificial Sequence
  Description of Artificial Sequence: Synthetic oligonucleotide
ggcagugaguguucaauau

SEQ ID NO: 1574665 - RNA, 19 nt, Artificial Sequence
  Description of Artificial Sequence: Synthetic oligonucleotide
cauucgugccauacagccu

SEQ ID NO: 1574666 - RNA, 19 nt, Artificial Sequence
  Description of Artificial Sequence: Synthetic oligonucleotide
aggucgccgagguccgaga

SEQ ID NO: 1574667 - RNA, 19 nt, Artificial Sequence
  Description of Artificial Sequence: Synthetic oligonucleotide
acagacuuggggagcugaa

SEQ ID NO: 1574668 - RNA, 19 nt, Artificial Sequence
  Description of Artificial Sequence: Synthetic oligonucleotide
ucgugccauacagccuucu

SEQ ID NO: 1574669 - RNA, 19 nt, Artificial Sequence
  Description of Artificial Sequence: Synthetic oligonucleotide
ccggaacucuucauugguc

SEQ ID NO: 1574670 - RNA, 19 nt, Artificial Sequence
  Description of Artificial Sequence: Synthetic oligonucleotide
ggauaggacuccuccgagu

SEQ ID NO: 1574671 - RNA, 19 nt, Artificial Sequence
  Description of Artificial Sequence: Synthetic oligonucleotide
gcgauagcaauagggccca

SEQ ID NO: 1574672 - RNA, 19 nt, Artificial Sequence
  Description of Artificial Sequence: Synthetic oligonucleotide
gcgcauuaaacguuugauu

SEQ ID NO: 1574673 - RNA, 19 nt, Artificial Sequence
  Description of Artificial Sequence: Synthetic oligonucleotide
gcaaggaggucgccgaggu

SEQ ID NO: 1574674 - RNA, 19 nt, Artificial Sequence
  Description of Artificial Sequence: Synthetic oligonucleotide
aggacuccuccgagucuag

SEQ ID NO: 1574675 - RNA, 19 nt, Artificial Sequence
  Description of Artificial Sequence: Synthetic oligonucleotide
ggccgcaguagcaacucca

SEQ ID NO: 1574676 - RNA, 19 nt, Artificial Sequence
  Description of Artificial Sequence: Synthetic oligonucleotide
ggucaaguucuuugcugcu

SEQ ID NO: 1574677 - RNA, 19 nt, Artificial Sequence
  Description of Artificial Sequence: Synthetic oligonucleotide
cccauaccccaugaagaac

SEQ ID NO: 1574678 - RNA, 19 nt, Artificial Sequence
  Description of Artificial Sequence: Synthetic oligonucleotide
gcagugaguguucaauauu

SEQ ID NO: 1574679 - RNA, 19 nt, Artificial Sequence
  Description of Artificial Sequence: Synthetic oligonucleotide
caaguacuauggucucagu

SEQ ID NO: 1574680 - RNA, 19 nt, Artificial Sequence
  Description of Artificial Sequence: Synthetic oligonucleotide
ccugugucauuagccgcag

SEQ ID NO: 1574681 - RNA, 19 nt, Artificial Sequence
  Description of Artificial Sequence: Synthetic oligonucleotide
gcccacgguugccacggcc

SEQ ID NO: 1574682 - RNA, 19 nt, Artificial Sequence
  Description of Artificial Sequence: Synthetic oligonucleotide
ggauauccacguauccugu

SEQ ID NO: 1574683 - RNA, 19 nt, Artificial Sequence
  Description of Artificial Sequence: Synthetic oligonucleotide
guaguacccauaagucuuu

SEQ ID NO: 1574684 - RNA, 19 nt, Artificial Sequence
  Description of Artificial Sequence: Synthetic oligonucleotide
ccaaggcuguucccaagca

SEQ ID NO: 1574685 - RNA, 19 nt, Artificial Sequence
  Description of Artificial Sequence: Synthetic oligonucleotide
gcuggcaucuauagcgaua

SEQ ID NO: 1574686 - RNA, 19 nt, Artificial Sequence
  Description of Artificial Sequence: Synthetic oligonucleotide
caccauugcagcccugauu

SEQ ID NO: 1574687 - RNA, 19 nt, Artificial Sequence
  Description of Artificial Sequence: Synthetic oligonucleotide
uugugccauugcgcauuaa

SEQ ID NO: 1574688 - RNA, 19 nt, Artificial Sequence
  Description of Artificial Sequence: Synthetic oligonucleotide
ggucgccgagguccgagaa

SEQ ID NO: 1574689 - RNA, 19 nt, Artificial Sequence
  Description of Artificial Sequence: Synthetic oligonucleotide
ggcggccagcuacuuacaa

SEQ ID NO: 1574690 - RNA, 19 nt, Artificial Sequence
  Description of Artificial Sequence: Synthetic oligonucleotide
gguggccaggaggaguaaa

SEQ ID NO: 1574691 - RNA, 19 nt, Artificial Sequence
  Description of Artificial Sequence: Synthetic oligonucleotide
gauggguggcuggcaucua

SEQ ID NO: 1574692 - RNA, 19 nt, Artificial Sequence
  Description of Artificial Sequence: Synthetic oligonucleotide
cacuugugccauugcgcau

SEQ ID NO: 1574693 - RNA, 19 nt, Artificial Sequence
  Description of Artificial Sequence: Synthetic oligonucleotide
cccaagcacaggguggcca

SEQ ID NO: 1574694 - RNA, 19 nt, Artificial Sequence
  Description of Artificial Sequence: Synthetic oligonucleotide
cccacgguugccacggccu

SEQ ID NO: 1574695 - RNA, 19 nt, Artificial Sequence
  Description of Artificial Sequence: Synthetic oligonucleotide
ccauugcgcauuaaacguu

SEQ ID NO: 1574696 - RNA, 19 nt, Artificial Sequence
  Description of Artificial Sequence: Synthetic oligonucleotide
ggacuccuccgagucuaga

SEQ ID NO: 1574697 - RNA, 19 nt, Artificial Sequence
  Description of Artificial Sequence: Synthetic oligonucleotide
cuccacagugguuguucuu

SEQ ID NO: 1574698 - RNA, 19 nt, Artificial Sequence
  Description of Artificial Sequence: Synthetic oligonucleotide
ccccucgcuguauucccca

SEQ ID NO: 1574699 - RNA, 19 nt, Artificial Sequence
  Description of Artificial Sequence: Synthetic oligonucleotide
ccgcaguagcaacuccaca

SEQ ID NO: 1574700 - RNA, 19 nt, Artificial Sequence
  Description of Artificial Sequence: Synthetic oligonucleotide
ggcuggcaucuauagcgau

SEQ ID NO: 1574701 - RNA, 19 nt, Artificial Sequence
  Description of Artificial Sequence: Synthetic oligonucleotide
caaaggcguucaucuccau

SEQ ID NO: 1574702 - RNA, 19 nt, Artificial Sequence
  Description of Artificial Sequence: Synthetic oligonucleotide
ccgcagcaaacucagguuu

SEQ ID NO: 1574703 - RNA, 19 nt, Artificial Sequence
  Description of Artificial Sequence: Synthetic oligonucleotide
ggacuuccacuugugccau

SEQ ID NO: 1574704 - RNA, 19 nt, Artificial Sequence
  Description of Artificial Sequence: Synthetic oligonucleotide
ggcggcggccagcuacuua

SEQ ID NO: 1574705 - RNA, 19 nt, Artificial Sequence
  Description of Artificial Sequence: Synthetic oligonucleotide
ccgagucuagaccuuuguu

SEQ ID NO: 1574706 - RNA, 19 nt, Artificial Sequence
  Description of Artificial Sequence: Synthetic oligonucleotide
ccacguauccugugucauu

SEQ ID NO: 1574707 - RNA, 19 nt, Artificial Sequence
  Description of Artificial Sequence: Synthetic oligonucleotide
cgauagcaauagggcccac

SEQ ID NO: 1574708 - RNA, 19 nt, Artificial Sequence
  Description of Artificial Sequence: Synthetic oligonucleotide
cugcuacaguucgguucau

SEQ ID NO: 1574709 - RNA, 19 nt, Artificial Sequence
  Description of Artificial Sequence: Synthetic oligonucleotide
aacacagguagcuagcugc

SEQ ID NO: 1574710 - RNA, 19 nt, Artificial Sequence
  Description of Artificial Sequence: Synthetic oligonucleotide
aucaugauggcacacgagg

SEQ ID NO: 1574711 - RNA, 19 nt, Artificial Sequence
  Description of Artificial Sequence: Synthetic oligonucleotide
cucacuaucuucacaaagg

SEQ ID NO: 1574712 - RNA, 19 nt, Artificial Sequence
  Description of Artificial Sequence: Synthetic oligonucleotide
agugaaucggguaggaucc

SEQ ID NO: 1574713 - RNA, 19 nt, Artificial Sequence
  Description of Artificial Sequence: Synthetic oligonucleotide
uucaacaaacauaaagggu

SEQ ID NO: 1574714 - RNA, 19 nt, Artificial Sequence
  Description of Artificial Sequence: Synthetic oligonucleotide
cauaguugaaccaguacag

SEQ ID NO: 1574715 - RNA, 19 nt, Artificial Sequence
  Description of Artificial Sequence: Synthetic oligonucleotide
ucggguaggauccugaaac

SEQ ID NO: 1574716 - RNA, 19 nt, Artificial Sequence
  Description of Artificial Sequence: Synthetic oligonucleotide
ucuggaaggcgucaacucg

SEQ ID NO: 1574717 - RNA, 19 nt, Artificial Sequence
  Description of Artificial Sequence: Synthetic oligonucleotide
aaggauugaccacacagga

SEQ ID NO: 1574718 - RNA, 19 nt, Artificial Sequence
  Description of Artificial Sequence: Synthetic oligonucleotide
uuagggcagagguacaacg

SEQ ID NO: 1574719 - RNA, 19 nt, Artificial Sequence
  Description of Artificial Sequence: Synthetic oligonucleotide
guggaaucaauucuugggg

SEQ ID NO: 1574720 - RNA, 19 nt, Artificial Sequence
  Description of Artificial Sequence: Synthetic oligonucleotide
ugaucguccaucuuggacu

SEQ ID NO: 1574721 - RNA, 19 nt, Artificial Sequence
  Description of Artificial Sequence: Synthetic oligonucleotide
ugaaguagauggcaguagc

SEQ ID NO: 1574722 - RNA, 19 nt, Artificial Sequence
  Description of Artificial Sequence: Synthetic oligonucleotide
agaugucuggucuuuuggc

SEQ ID NO: 1574723 - RNA, 19 nt, Artificial Sequence
  Description of Artificial Sequence: Synthetic oligonucleotide
accauuagggcagagguac

SEQ ID NO: 1574724 - RNA, 19 nt, Artificial Sequence
  Description of Artificial Sequence: Synthetic oligonucleotide
ucacuaucuucacaaaggc

SEQ ID NO: 1574725 - RNA, 19 nt, Artificial Sequence
  Description of Artificial Sequence: Synthetic oligonucleotide
uaguugaaccaguacagag

SEQ ID NO: 1574726 - RNA, 19 nt, Artificial Sequence
  Description of Artificial Sequence: Synthetic oligonucleotide
cuagcugccgguaugacac

SEQ ID NO: 1574727 - RNA, 19 nt, Artificial Sequence
  Description of Artificial Sequence: Synthetic oligonucleotide
aaggcgucaacucgcuggc

SEQ ID NO: 1574728 - RNA, 19 nt, Artificial Sequence
  Description of Artificial Sequence: Synthetic oligonucleotide
gauucuccgaagcaggagc

SEQ ID NO: 1574729 - RNA, 19 nt, Artificial Sequence
  Description of Artificial Sequence: Synthetic oligonucleotide
uugaacuuggagguggacg

SEQ ID NO: 1574730 - RNA, 19 nt, Artificial Sequence
  Description of Artificial Sequence: Synthetic oligonucleotide
caaggauugaccacacagg

SEQ ID NO: 1574731 - RNA, 19 nt, Artificial Sequence
  Description of Artificial Sequence: Synthetic oligonucleotide
acagucaucaccagggugg

SEQ ID NO: 1574732 - RNA, 19 nt, Artificial Sequence
  Description of Artificial Sequence: Synthetic oligonucleotide
cuugaugauucuugggagg

SEQ ID NO: 1574733 - RNA, 19 nt, Artificial Sequence
  Description of Artificial Sequence: Synthetic oligonucleotide
acagcgaguaccauuaggg

SEQ ID NO: 1574734 - RNA, 19 nt, Artificial Sequence
  Description of Artificial Sequence: Synthetic oligonucleotide
ugcugaacggggcuaaugc

SEQ ID NO: 1574735 - RNA, 19 nt, Artificial Sequence
  Description of Artificial Sequence: Synthetic oligonucleotide
aggguuacaaagaaagggg

SEQ ID NO: 1574736 - RNA, 19 nt, Artificial Sequence
  Description of Artificial Sequence: Synthetic oligonucleotide
uuugccaaacucguaagug

SEQ ID NO: 1574737 - RNA, 19 nt, Artificial Sequence
  Description of Artificial Sequence: Synthetic oligonucleotide
auugcaguauaggaggcac

SEQ ID NO: 1574738 - RNA, 19 nt, Artificial Sequence
  Description of Artificial Sequence: Synthetic oligonucleotide
uccugaucguccaucuugg

SEQ ID NO: 1574739 - RNA, 19 nt, Artificial Sequence
  Description of Artificial Sequence: Synthetic oligonucleotide
agccaaguggaaucaauuc

SEQ ID NO: 1574740 - RNA, 19 nt, Artificial Sequence
  Description of Artificial Sequence: Synthetic oligonucleotide
aucaaaaugugaggguagc

SEQ ID NO: 1574741 - RNA, 19 nt, Artificial Sequence
  Description of Artificial Sequence: Synthetic oligonucleotide
acuuuugccaaacucguaa

SEQ ID NO: 1574742 - RNA, 19 nt, Artificial Sequence
  Description of Artificial Sequence: Synthetic oligonucleotide
agccaagccacagugagcg

SEQ ID NO: 1574743 - RNA, 19 nt, Artificial Sequence
  Description of Artificial Sequence: Synthetic oligonucleotide
ugaucaugauggcacacga

SEQ ID NO: 1574744 - RNA, 19 nt, Artificial Sequence
  Description of Artificial Sequence: Synthetic oligonucleotide
gagggagcagccuugauga

SEQ ID NO: 1574745 - RNA, 19 nt, Artificial Sequence
  Description of Artificial Sequence: Synthetic oligonucleotide
uugccaaacucguaagugc

SEQ ID NO: 1574746 - RNA, 19 nt, Artificial Sequence
  Description of Artificial Sequence: Synthetic oligonucleotide
ucguaagugcugaucauga

SEQ ID NO: 1574747 - RNA, 19 nt, Artificial Sequence
  Description of Artificial Sequence: Synthetic oligonucleotide
gacaccauugcaguauagg

SEQ ID NO: 1574748 - RNA, 19 nt, Artificial Sequence
  Description of Artificial Sequence: Synthetic oligonucleotide
agaggucaaggauugacca

SEQ ID NO: 1574749 - RNA, 19 nt, Artificial Sequence
  Description of Artificial Sequence: Synthetic oligonucleotide
ugaaggcggaccuucacca

SEQ ID NO: 1574750 - RNA, 19 nt, Artificial Sequence
  Description of Artificial Sequence: Synthetic oligonucleotide
caggcuucaacaaacauaa

SEQ ID NO: 1574751 - RNA, 19 nt, Artificial Sequence
  Description of Artificial Sequence: Synthetic oligonucleotide
caccauugcaguauaggag

SEQ ID NO: 1574752 - RNA, 19 nt, Artificial Sequence
  Description of Artificial Sequence: Synthetic oligonucleotide
auccugaucguccaucuug

SEQ ID NO: 1574753 - RNA, 19 nt, Artificial Sequence
  Description of Artificial Sequence: Synthetic oligonucleotide
uaggauccugaaaccaggg

SEQ ID NO: 1574754 - RNA, 19 nt, Artificial Sequence
  Description of Artificial Sequence: Synthetic oligonucleotide
cugaacggggcuaaugccc

SEQ ID NO: 1574755 - RNA, 19 nt, Artificial Sequence
  Description of Artificial Sequence: Synthetic oligonucleotide
agcgaguaccauuagggca

SEQ ID NO: 1574756 - RNA, 19 nt, Artificial Sequence
  Description of Artificial Sequence: Synthetic oligonucleotide
ccagcuacaaagcugacgc

SEQ ID NO: 1574757 - RNA, 19 nt, Artificial Sequence
  Description of Artificial Sequence: Synthetic oligonucleotide
aaagaaaggggcagcuguc

SEQ ID NO: 1574758 - RNA, 19 nt, Artificial Sequence
  Description of Artificial Sequence: Synthetic oligonucleotide
agugcucccagugugaucu

SEQ ID NO: 1574759 - RNA, 19 nt, Artificial Sequence
  Description of Artificial Sequence: Synthetic oligonucleotide
cuugguccgcacaagcucc

SEQ ID NO: 1574760 - RNA, 19 nt, Artificial Sequence
  Description of Artificial Sequence: Synthetic oligonucleotide
cagugaaucggguaggauc

SEQ ID NO: 1574761 - RNA, 19 nt, Artificial Sequence
  Description of Artificial Sequence: Synthetic oligonucleotide
acucucacagccuccagug

SEQ ID NO: 1574762 - RNA, 19 nt, Artificial Sequence
  Description of Artificial Sequence: Synthetic oligonucleotide
ugaacggggcuaaugcccc

SEQ ID NO: 1574763 - RNA, 19 nt, Artificial Sequence
  Description of Artificial Sequence: Synthetic oligonucleotide
augacugucacagugccca

SEQ ID NO: 1574764 - RNA, 19 nt, Artificial Sequence
  Description of Artificial Sequence: Synthetic oligonucleotide
ugccucacuaucuucacaa

SEQ ID NO: 1574765 - RNA, 19 nt, Artificial Sequence
  Description of Artificial Sequence: Synthetic oligonucleotide
ugccaaacucguaagugcu

SEQ ID NO: 1574766 - RNA, 19 nt, Artificial Sequence
  Description of Artificial Sequence: Synthetic oligonucleotide
caaggugccagugaaucgg

SEQ ID NO: 1574767 - RNA, 19 nt, Artificial Sequence
  Description of Artificial Sequence: Synthetic oligonucleotide
caccauuugcugaacgggg

SEQ ID NO: 1574768 - RNA, 19 nt, Artificial Sequence
  Description of Artificial Sequence: Synthetic oligonucleotide
caucaaagggcagaguaag

SEQ ID NO: 1574769 - RNA, 19 nt, Artificial Sequence
  Description of Artificial Sequence: Synthetic oligonucleotide
aaucuggaaggcgucaacu

SEQ ID NO: 1574770 - RNA, 19 nt, Artificial Sequence
  Description of Artificial Sequence: Synthetic oligonucleotide
uggucauaggcagugaagu

SEQ ID NO: 1574771 - RNA, 19 nt, Artificial Sequence
  Description of Artificial Sequence: Synthetic oligonucleotide
uccaaggggcugaugacug

SEQ ID NO: 1574772 - RNA, 19 nt, Artificial Sequence
  Description of Artificial Sequence: Synthetic oligonucleotide
cuuuugccaaacucguaag

SEQ ID NO: 1574773 - RNA, 19 nt, Artificial Sequence
  Description of Artificial Sequence: Synthetic oligonucleotide
cagaggucaaggauugacc

SEQ ID NO: 1574774 - RNA, 19 nt, Artificial Sequence
  Description of Artificial Sequence: Synthetic oligonucleotide
agaagggcacaucucgaag

SEQ ID NO: 1574775 - RNA, 19 nt, Artificial Sequence
  Description of Artificial Sequence: Synthetic oligonucleotide
aguauaggaggcacuuccc

SEQ ID NO: 1574776 - RNA, 19 nt, Artificial Sequence
  Description of Artificial Sequence: Synthetic oligonucleotide
uugaugauucuugggagga

SEQ ID NO: 1574777 - RNA, 19 nt, Artificial Sequence
  Description of Artificial Sequence: Synthetic oligonucleotide
gagauuugguguagaagag

SEQ ID NO: 1574778 - RNA, 19 nt, Artificial Sequence
  Description of Artificial Sequence: Synthetic oligonucleotide
uccgccuugauucuccgaa

SEQ ID NO: 1574779 - RNA, 19 nt, Artificial Sequence
  Description of Artificial Sequence: Synthetic oligonucleotide
ugucgcugugucuucacca

SEQ ID NO: 1574780 - RNA, 19 nt, Artificial Sequence
  Description of Artificial Sequence: Synthetic oligonucleotide
gaugauucuugggaggaac

SEQ ID NO: 1574781 - RNA, 19 nt, Artificial Sequence
  Description of Artificial Sequence: Synthetic oligonucleotide
cugguugagccucuggaag

SEQ ID NO: 1574782 - RNA, 19 nt, Artificial Sequence
  Description of Artificial Sequence: Synthetic oligonucleotide
ggacuuucaauccugguuc

SEQ ID NO: 1574783 - RNA, 19 nt, Artificial Sequence
  Description of Artificial Sequence: Synthetic oligonucleotide
gguccuagugcccucaugc

SEQ ID NO: 1574784 - RNA, 19 nt, Artificial Sequence
  Description of Artificial Sequence: Synthetic oligonucleotide
guaggauccugaaaccagg

SEQ ID NO: 1574785 - RNA, 19 nt, Artificial Sequence
  Description of Artificial Sequence: Synthetic oligonucleotide
ucaaaaugugaggguagcc

SEQ ID NO: 1574786 - RNA, 19 nt, Artificial Sequence
  Description of Artificial Sequence: Synthetic oligonucleotide
aggauccugaaaccagggg

SEQ ID NO: 1574787 - RNA, 19 nt, Artificial Sequence
  Description of Artificial Sequence: Synthetic oligonucleotide
cuggaaggcgucaacucgc

SEQ ID NO: 1574788 - RNA, 19 nt, Artificial Sequence
  Description of Artificial Sequence: Synthetic oligonucleotide
aaaggggcagcugucagau

SEQ ID NO: 1574789 - RNA, 19 nt, Artificial Sequence
  Description of Artificial Sequence: Synthetic oligonucleotide
uugauucuccgaagcagga

SEQ ID NO: 1574790 - RNA, 19 nt, Artificial Sequence
  Description of Artificial Sequence: Synthetic oligonucleotide
uuacaaagaaaggggcagc

SEQ ID NO: 1574791 - RNA, 19 nt, Artificial Sequence
  Description of Artificial Sequence: Synthetic oligonucleotide
ucuggugcccgauuccgcc

SEQ ID NO: 1574792 - RNA, 19 nt, Artificial Sequence
  Description of Artificial Sequence: Synthetic oligonucleotide
gaggaaggcacuuggcuca

SEQ ID NO: 1574793 - RNA, 19 nt, Artificial Sequence
  Description of Artificial Sequence: Synthetic oligonucleotide
auucuccgaagcaggagcc

SEQ ID NO: 1574794 - RNA, 19 nt, Artificial Sequence
  Description of Artificial Sequence: Synthetic oligonucleotide
ggaggaacccagcaaacag

SEQ ID NO: 1574795 - RNA, 19 nt, Artificial Sequence
  Description of Artificial Sequence: Synthetic oligonucleotide
ugguguagaagagacucca

SEQ ID NO: 1574796 - RNA, 19 nt, Artificial Sequence
  Description of Artificial Sequence: Synthetic oligonucleotide
gugccagugaaucggguag

SEQ ID NO: 1574797 - RNA, 19 nt, Artificial Sequence
  Description of Artificial Sequence: Synthetic oligonucleotide
ugugaucugucgcuguguc

SEQ ID NO: 1574798 - RNA, 19 nt, Artificial Sequence
  Description of Artificial Sequence: Synthetic oligonucleotide
accauuugcugaacggggc

SEQ ID NO: 1574799 - RNA, 19 nt, Artificial Sequence
  Description of Artificial Sequence: Synthetic oligonucleotide
auuccugagaugccaccag

SEQ ID NO: 1574800 - RNA, 19 nt, Artificial Sequence
  Description of Artificial Sequence: Synthetic oligonucleotide
uccuagugcccucaugccu

SEQ ID NO: 1574801 - RNA, 19 nt, Artificial Sequence
  Description of Artificial Sequence: Synthetic oligonucleotide
uccaaggugccagugaauc

SEQ ID NO: 1574802 - RNA, 19 nt, Artificial Sequence
  Description of Artificial Sequence: Synthetic oligonucleotide
cacagcgaguaccauuagg

SEQ ID NO: 1574803 - RNA, 19 nt, Artificial Sequence
  Description of Artificial Sequence: Synthetic oligonucleotide
uccugagaugccaccagcu

SEQ ID NO: 1574804 - RNA, 19 nt, Artificial Sequence
  Description of Artificial Sequence: Synthetic oligonucleotide
acaaacauaaaggguuaca

SEQ ID NO: 1574805 - RNA, 19 nt, Artificial Sequence
  Description of Artificial Sequence: Synthetic oligonucleotide
cugaucguccaucuuggac

SEQ ID NO: 1574806 - RNA, 19 nt, Artificial Sequence
  Description of Artificial Sequence: Synthetic oligonucleotide
guaccauuagggcagaggu

SEQ ID NO: 1574807 - RNA, 19 nt, Artificial Sequence
  Description of Artificial Sequence: Synthetic oligonucleotide
cagaguaaggguggcagcc

SEQ ID NO: 1574808 - RNA, 19 nt, Artificial Sequence
  Description of Artificial Sequence: Synthetic oligonucleotide
ucccagugugaucugucgc

SEQ ID NO: 1574809 - RNA, 19 nt, Artificial Sequence
  Description of Artificial Sequence: Synthetic oligonucleotide
acuuggcucagucuccugu

SEQ ID NO: 1574810 - RNA, 19 nt, Artificial Sequence
  Description of Artificial Sequence: Synthetic oligonucleotide
gaacacagguagcuagcug

SEQ ID NO: 1574811 - RNA, 19 nt, Artificial Sequence
  Description of Artificial Sequence: Synthetic oligonucleotide
cccgauuccgccuugauuc

SEQ ID NO: 1574812 - RNA, 19 nt, Artificial Sequence
  Description of Artificial Sequence: Synthetic oligonucleotide
ucuugaacuuggaggugga

SEQ ID NO: 1574813 - RNA, 19 nt, Artificial Sequence
  Description of Artificial Sequence: Synthetic oligonucleotide
gccaccauuccugagaugc

SEQ ID NO: 1574814 - RNA, 19 nt, Artificial Sequence
  Description of Artificial Sequence: Synthetic oligonucleotide
ugaggccaccauuugcuga

SEQ ID NO: 1574815 - RNA, 19 nt, Artificial Sequence
  Description of Artificial Sequence: Synthetic oligonucleotide
gaguuggucauaggcagug

SEQ ID NO: 1574816 - RNA, 19 nt, Artificial Sequence
  Description of Artificial Sequence: Synthetic oligonucleotide
ugauucuccgaagcaggag

SEQ ID NO: 1574817 - RNA, 19 nt, Artificial Sequence
  Description of Artificial Sequence: Synthetic oligonucleotide
ugauggcacacgagggagc

SEQ ID NO: 1574818 - RNA, 19 nt, Artificial Sequence
  Description of Artificial Sequence: Synthetic oligonucleotide
agccaccgcagcuugaaca

SEQ ID NO: 1574819 - RNA, 19 nt, Artificial Sequence
  Description of Artificial Sequence: Synthetic oligonucleotide
cucccagugugaucugucg

SEQ ID NO: 1574820 - RNA, 19 nt, Artificial Sequence
  Description of Artificial Sequence: Synthetic oligonucleotide
gauuccgccuugauucucc

SEQ ID NO: 1574821 - RNA, 19 nt, Artificial Sequence
  Description of Artificial Sequence: Synthetic oligonucleotide
aaucggguaggauccugaa

SEQ ID NO: 1574822 - RNA, 19 nt, Artificial Sequence
  Description of Artificial Sequence: Synthetic oligonucleotide
gguacaacggcuccaggac

SEQ ID NO: 1574823 - RNA, 19 nt, Artificial Sequence
  Description of Artificial Sequence: Synthetic oligonucleotide
agcugacgcccacagaugu

SEQ ID NO: 1574824 - RNA, 19 nt, Artificial Sequence
  Description of Artificial Sequence: Synthetic oligonucleotide
agcuugaacacagguagcu

SEQ ID NO: 1574825 - RNA, 19 nt, Artificial Sequence
  Description of Artificial Sequence: Synthetic oligonucleotide
ugucuggucuuuuggccca

SEQ ID NO: 1574826 - RNA, 19 nt, Artificial Sequence
  Description of Artificial Sequence: Synthetic oligonucleotide
aacucgcuggcuacugagg

SEQ ID NO: 1574827 - RNA, 19 nt, Artificial Sequence
  Description of Artificial Sequence: Synthetic oligonucleotide
agguggacgaguggugacc

SEQ ID NO: 1574828 - RNA, 19 nt, Artificial Sequence
  Description of Artificial Sequence: Synthetic oligonucleotide
cacgugcugagccuguagc

SEQ ID NO: 1574829 - RNA, 19 nt, Artificial Sequence
  Description of Artificial Sequence: Synthetic oligonucleotide
ucgcuggcuacugagggcc

SEQ ID NO: 1574830 - RNA, 19 nt, Artificial Sequence
  Description of Artificial Sequence: Synthetic oligonucleotide
caacucgcuggcuacugag

SEQ ID NO: 1574831 - RNA, 19 nt, Artificial Sequence
  Description of Artificial Sequence: Synthetic oligonucleotide
cagcgaguaccauuagggc

SEQ ID NO: 1574832 - RNA, 19 nt, Artificial Sequence
  Description of Artificial Sequence: Synthetic oligonucleotide
gaucaugauggcacacgag

SEQ ID NO: 1574833 - RNA, 19 nt, Artificial Sequence
  Description of Artificial Sequence: Synthetic oligonucleotide
agagguacaacggcuccag

SEQ ID NO: 1574834 - RNA, 19 nt, Artificial Sequence
  Description of Artificial Sequence: Synthetic oligonucleotide
guagcuagcugccgguaug

SEQ ID NO: 1574835 - RNA, 19 nt, Artificial Sequence
  Description of Artificial Sequence: Synthetic oligonucleotide
agauuuggucuugaacuug

SEQ ID NO: 1574836 - RNA, 19 nt, Artificial Sequence
  Description of Artificial Sequence: Synthetic oligonucleotide
ugaacacagguagcuagcu

SEQ ID NO: 1574837 - RNA, 19 nt, Artificial Sequence
  Description of Artificial Sequence: Synthetic oligonucleotide
gccucugagacugaaggcg

SEQ ID NO: 1574838 - RNA, 19 nt, Artificial Sequence
  Description of Artificial Sequence: Synthetic oligonucleotide
agauuugguguagaagaga

SEQ ID NO: 1574839 - RNA, 19 nt, Artificial Sequence
  Description of Artificial Sequence: Synthetic oligonucleotide
ggugcguagaggucagagg

SEQ ID NO: 1574840 - RNA, 19 nt, Artificial Sequence
  Description of Artificial Sequence: Synthetic oligonucleotide
guagauggcaguagcuggc

SEQ ID NO: 1574841 - RNA, 19 nt, Artificial Sequence
  Description of Artificial Sequence: Synthetic oligonucleotide
gagaacagcaggaaucaaa

SEQ ID NO: 1574842 - RNA, 19 nt, Artificial Sequence
  Description of Artificial Sequence: Synthetic oligonucleotide
gaaucuggaaggcgucaac

SEQ ID NO: 1574843 - RNA, 19 nt, Artificial Sequence
  Description of Artificial Sequence: Synthetic oligonucleotide
ucaacucgcuggcuacuga

SEQ ID NO: 1574844 - RNA, 19 nt, Artificial Sequence
  Description of Artificial Sequence: Synthetic oligonucleotide
ccuugaugauucuugggag

SEQ ID NO: 1574845 - RNA, 19 nt, Artificial Sequence
  Description of Artificial Sequence: Synthetic oligonucleotide
gugaaguagauggcaguag

SEQ ID NO: 1574846 - RNA, 19 nt, Artificial Sequence
  Description of Artificial Sequence: Synthetic oligonucleotide
auccaggggugucaugaag

SEQ ID NO: 1574847 - RNA, 19 nt, Artificial Sequence
  Description of Artificial Sequence: Synthetic oligonucleotide
uggugaccgugguagggag

SEQ ID NO: 1574848 - RNA, 19 nt, Artificial Sequence
  Description of Artificial Sequence: Synthetic oligonucleotide
gguaggauccugaaaccag

SEQ ID NO: 1574849 - RNA, 19 nt, Artificial Sequence
  Description of Artificial Sequence: Synthetic oligonucleotide
cuuggagguggacgagugg

SEQ ID NO: 1574850 - RNA, 19 nt, Artificial Sequence
  Description of Artificial Sequence: Synthetic oligonucleotide
aucaaagggcagaguaagg

SEQ ID NO: 1574851 - RNA, 19 nt, Artificial Sequence
  Description of Artificial Sequence: Synthetic oligonucleotide
aggauccugaucguccauc

SEQ ID NO: 1574852 - RNA, 19 nt, Artificial Sequence
  Description of Artificial Sequence: Synthetic oligonucleotide
gccaccauuugcugaacgg

SEQ ID NO: 1574853 - RNA, 19 nt, Artificial Sequence
  Description of Artificial Sequence: Synthetic oligonucleotide
ugggaggaacccagcaaac

SEQ ID NO: 1574854 - RNA, 19 nt, Artificial Sequence
  Description of Artificial Sequence: Synthetic oligonucleotide
guccccacccguucaagag

SEQ ID NO: 1574855 - RNA, 19 nt, Artificial Sequence
  Description of Artificial Sequence: Synthetic oligonucleotide
gaguaaggguggcagccac

SEQ ID NO: 1574856 - RNA, 19 nt, Artificial Sequence
  Description of Artificial Sequence: Synthetic oligonucleotide
uccagugcucccaguguga

SEQ ID NO: 1574857 - RNA, 19 nt, Artificial Sequence
  Description of Artificial Sequence: Synthetic oligonucleotide
gacuggguuggggaggaag

SEQ ID NO: 1574858 - RNA, 19 nt, Artificial Sequence
  Description of Artificial Sequence: Synthetic oligonucleotide
gugcguagaggucagaggu

SEQ ID NO: 1574859 - RNA, 19 nt, Artificial Sequence
  Description of Artificial Sequence: Synthetic oligonucleotide
ugcaguauaggaggcacuu

SEQ ID NO: 1574860 - RNA, 19 nt, Artificial Sequence
  Description of Artificial Sequence: Synthetic oligonucleotide
agugaaguagauggcagua

SEQ ID NO: 1574861 - RNA, 19 nt, Artificial Sequence
  Description of Artificial Sequence: Synthetic oligonucleotide
auuccgccuugauucuccg

SEQ ID NO: 1574862 - RNA, 19 nt, Artificial Sequence
  Description of Artificial Sequence: Synthetic oligonucleotide
cugccgguaugacacgugc

SEQ ID NO: 1574863 - RNA, 19 nt, Artificial Sequence
  Description of Artificial Sequence: Synthetic oligonucleotide
uggacgaguggugaccgug

SEQ ID NO: 1574864 - RNA, 19 nt, Artificial Sequence
  Description of Artificial Sequence: Synthetic oligonucleotide
uugcaguauaggaggcacu

SEQ ID NO: 1574865 - RNA, 19 nt, Artificial Sequence
  Description of Artificial Sequence: Synthetic oligonucleotide
guacagagcugagaagggc

SEQ ID NO: 1574866 - RNA, 19 nt, Artificial Sequence
  Description of Artificial Sequence: Synthetic oligonucleotide
cagaguagagggagauuug

SEQ ID NO: 1574867 - RNA, 19 nt, Artificial Sequence
  Description of Artificial Sequence: Synthetic oligonucleotide
cuuggcucagucuccuguc

SEQ ID NO: 1574868 - RNA, 19 nt, Artificial Sequence
  Description of Artificial Sequence: Synthetic oligonucleotide
gaggccaccauuugcugaa

SEQ ID NO: 1574869 - RNA, 19 nt, Artificial Sequence
  Description of Artificial Sequence: Synthetic oligonucleotide
agccuugaguuggucauag

SEQ ID NO: 1574870 - RNA, 19 nt, Artificial Sequence
  Description of Artificial Sequence: Synthetic oligonucleotide
gaguggugaccgugguagg

SEQ ID NO: 1574871 - RNA, 19 nt, Artificial Sequence
  Description of Artificial Sequence: Synthetic oligonucleotide
uguccccacccguucaaga

SEQ ID NO: 1574872 - RNA, 19 nt, Artificial Sequence
  Description of Artificial Sequence: Synthetic oligonucleotide
uaccauuagggcagaggua

SEQ ID NO: 1574873 - RNA, 19 nt, Artificial Sequence
  Description of Artificial Sequence: Synthetic oligonucleotide
agcugguugcuccucgccu

SEQ ID NO: 1574874 - RNA, 19 nt, Artificial Sequence
  Description of Artificial Sequence: Synthetic oligonucleotide
ucggggccaggcuucaaca

SEQ ID NO: 1574875 - RNA, 19 nt, Artificial Sequence
  Description of Artificial Sequence: Synthetic oligonucleotide
cuccagugcucccagugug

SEQ ID NO: 1574876 - RNA, 19 nt, Artificial Sequence
  Description of Artificial Sequence: Synthetic oligonucleotide
gaccgugguagggagaaca

SEQ ID NO: 1574877 - RNA, 19 nt, Artificial Sequence
  Description of Artificial Sequence: Synthetic oligonucleotide
uggaaggcgucaacucgcu

SEQ ID NO: 1574878 - RNA, 19 nt, Artificial Sequence
  Description of Artificial Sequence: Synthetic oligonucleotide
gagguacaacggcuccagg

SEQ ID NO: 1574879 - RNA, 19 nt, Artificial Sequence
  Description of Artificial Sequence: Synthetic oligonucleotide
cagcuugaacacagguagc

SEQ ID NO: 1574880 - RNA, 19 nt, Artificial Sequence
  Description of Artificial Sequence: Synthetic oligonucleotide
gucgcugugucuucaccac

SEQ ID NO: 1574881 - RNA, 19 nt, Artificial Sequence
  Description of Artificial Sequence: Synthetic oligonucleotide
acagugcccauucgggcga

SEQ ID NO: 1574882 - RNA, 19 nt, Artificial Sequence
  Description of Artificial Sequence: Synthetic oligonucleotide
guugcuccucgccuuucag

SEQ ID NO: 1574883 - RNA, 19 nt, Artificial Sequence
  Description of Artificial Sequence: Synthetic oligonucleotide
ucgaagggcugugggaccc

SEQ ID NO: 1574884 - RNA, 19 nt, Artificial Sequence
  Description of Artificial Sequence: Synthetic oligonucleotide
acacgugcugagccuguag

SEQ ID NO: 1574885 - RNA, 19 nt, Artificial Sequence
  Description of Artificial Sequence: Synthetic oligonucleotide
cucgcuggcuacugagggc

SEQ ID NO: 1574886 - RNA, 19 nt, Artificial Sequence
  Description of Artificial Sequence: Synthetic oligonucleotide
ccagccaagccacagugag

SEQ ID NO: 1574887 - RNA, 19 nt, Artificial Sequence
  Description of Artificial Sequence: Synthetic oligonucleotide
ugucaugaagagggaggug

SEQ ID NO: 1574888 - RNA, 19 nt, Artificial Sequence
  Description of Artificial Sequence: Synthetic oligonucleotide
cucgaagggcugugggacc

SEQ ID NO: 1574889 - RNA, 19 nt, Artificial Sequence
  Description of Artificial Sequence: Synthetic oligonucleotide
guagaagagacuccagaau

SEQ ID NO: 1574890 - RNA, 19 nt, Artificial Sequence
  Description of Artificial Sequence: Synthetic oligonucleotide
caaaaugugaggguagccu

SEQ ID NO: 1574891 - RNA, 19 nt, Artificial Sequence
  Description of Artificial Sequence: Synthetic oligonucleotide
guaaggguggcagccacca

SEQ ID NO: 1574892 - RNA, 19 nt, Artificial Sequence
  Description of Artificial Sequence: Synthetic oligonucleotide
uagauggcaguagcuggca

SEQ ID NO: 1574893 - RNA, 19 nt, Artificial Sequence
  Description of Artificial Sequence: Synthetic oligonucleotide
uugcugaacggggcuaaug

SEQ ID NO: 1574894 - RNA, 19 nt, Artificial Sequence
  Description of Artificial Sequence: Synthetic oligonucleotide
cauccaaggugccagugaa

SEQ ID NO: 1574895 - RNA, 19 nt, Artificial Sequence
  Description of Artificial Sequence: Synthetic oligonucleotide
gaaucggguaggauccuga

SEQ ID NO: 1574896 - RNA, 19 nt, Artificial Sequence
  Description of Artificial Sequence: Synthetic oligonucleotide
guacaacggcuccaggaca

SEQ ID NO: 1574897 - RNA, 19 nt, Artificial Sequence
  Description of Artificial Sequence: Synthetic oligonucleotide
ucugucgcugugucuucac

SEQ ID NO: 1574898 - RNA, 19 nt, Artificial Sequence
  Description of Artificial Sequence: Synthetic oligonucleotide
ugccgguaugacacgugcu

SEQ ID NO: 1574899 - RNA, 19 nt, Artificial Sequence
  Description of Artificial Sequence: Synthetic oligonucleotide
gccgguaugacacgugcug

SEQ ID NO: 1574900 - RNA, 19 nt, Artificial Sequence
  Description of Artificial Sequence: Synthetic oligonucleotide
gaaggcggaccuucaccac

SEQ ID NO: 1574901 - RNA, 19 nt, Artificial Sequence
  Description of Artificial Sequence: Synthetic oligonucleotide
acaacggcuccaggacacc

SEQ ID NO: 1574902 - RNA, 19 nt, Artificial Sequence
  Description of Artificial Sequence: Synthetic oligonucleotide
aggguagccugggugacug

SEQ ID NO: 1574903 - RNA, 19 nt, Artificial Sequence
  Description of Artificial Sequence: Synthetic oligonucleotide
gcugaacggggcuaaugcc

SEQ ID NO: 1574904 - RNA, 19 nt, Artificial Sequence
  Description of Artificial Sequence: Synthetic oligonucleotide
ggucagaggucaaggauug

SEQ ID NO: 1574905 - RNA, 19 nt, Artificial Sequence
  Description of Artificial Sequence: Synthetic oligonucleotide
agugcccucaugccucacu

SEQ ID NO: 1574906 - RNA, 19 nt, Artificial Sequence
  Description of Artificial Sequence: Synthetic oligonucleotide
gaaccaguacagagcugag

SEQ ID NO: 1574907 - RNA, 19 nt, Artificial Sequence
  Description of Artificial Sequence: Synthetic oligonucleotide
acucguaagugcugaucau

SEQ ID NO: 1574908 - RNA, 19 nt, Artificial Sequence
  Description of Artificial Sequence: Synthetic oligonucleotide
ccuugauucuccgaagcag

SEQ ID NO: 1574909 - RNA, 19 nt, Artificial Sequence
  Description of Artificial Sequence: Synthetic oligonucleotide
aagcugacgcccacagaug

SEQ ID NO: 1574910 - RNA, 19 nt, Artificial Sequence
  Description of Artificial Sequence: Synthetic oligonucleotide
acugagggccucugagacu

SEQ ID NO: 1574911 - RNA, 19 nt, Artificial Sequence
  Description of Artificial Sequence: Synthetic oligonucleotide
gguagccugggugacuggg

SEQ ID NO: 1574912 - RNA, 19 nt, Artificial Sequence
  Description of Artificial Sequence: Synthetic oligonucleotide
gaaguagauggcaguagcu

SEQ ID NO: 1574913 - RNA, 19 nt, Artificial Sequence
  Description of Artificial Sequence: Synthetic oligonucleotide
gcaggagccaaguggaauc

SEQ ID NO: 1574914 - RNA, 19 nt, Artificial Sequence
  Description of Artificial Sequence: Synthetic oligonucleotide
gguggacgaguggugaccg

SEQ ID NO: 1574915 - RNA, 19 nt, Artificial Sequence
  Description of Artificial Sequence: Synthetic oligonucleotide
auagcggcuccgcggccgg

SEQ ID NO: 1574916 - RNA, 19 nt, Artificial Sequence
  Description of Artificial Sequence: Synthetic oligonucleotide
uagcuagcugccgguauga

SEQ ID NO: 1574917 - RNA, 19 nt, Artificial Sequence
  Description of Artificial Sequence: Synthetic oligonucleotide
aucggguaggauccugaaa

SEQ ID NO: 1574918 - RNA, 19 nt, Artificial Sequence
  Description of Artificial Sequence: Synthetic oligonucleotide
augccucacuaucuucaca

SEQ ID NO: 1574919 - RNA, 19 nt, Artificial Sequence
  Description of Artificial Sequence: Synthetic oligonucleotide
cuacaaagcugacgcccac

SEQ ID NO: 1574920 - RNA, 19 nt, Artificial Sequence
  Description of Artificial Sequence: Synthetic oligonucleotide
cagccaagccacagugagc

SEQ ID NO: 1574921 - RNA, 19 nt, Artificial Sequence
  Description of Artificial Sequence: Synthetic oligonucleotide
ugagccaccgcagcuugaa

SEQ ID NO: 1574922 - RNA, 19 nt, Artificial Sequence
  Description of Artificial Sequence: Synthetic oligonucleotide
agaaucuggaaggcgucaa

SEQ ID NO: 1574923 - RNA, 19 nt, Artificial Sequence
  Description of Artificial Sequence: Synthetic oligonucleotide
ugacgcccacagaugucug

SEQ ID NO: 1574924 - RNA, 19 nt, Artificial Sequence
  Description of Artificial Sequence: Synthetic oligonucleotide
gggaggugaccacagcccc

SEQ ID NO: 1574925 - RNA, 19 nt, Artificial Sequence
  Description of Artificial Sequence: Synthetic oligonucleotide
cuugggaggaacccagcaa

SEQ ID NO: 1574926 - RNA, 19 nt, Artificial Sequence
  Description of Artificial Sequence: Synthetic oligonucleotide
caaagggcagaguaagggu

SEQ ID NO: 1574927 - RNA, 19 nt, Artificial Sequence
  Description of Artificial Sequence: Synthetic oligonucleotide
ugacacgugcugagccugu

SEQ ID NO: 1574928 - RNA, 19 nt, Artificial Sequence
  Description of Artificial Sequence: Synthetic oligonucleotide
gguagggagaacagcagga

SEQ ID NO: 1574929 - RNA, 19 nt, Artificial Sequence
  Description of Artificial Sequence: Synthetic oligonucleotide
uagcugccgguaugacacg

SEQ ID NO: 1574930 - RNA, 19 nt, Artificial Sequence
  Description of Artificial Sequence: Synthetic oligonucleotide
ccuagugcccucaugccuc

SEQ ID NO: 1574931 - RNA, 19 nt, Artificial Sequence
  Description of Artificial Sequence: Synthetic oligonucleotide
ugaugauucuugggaggaa

SEQ ID NO: 1574932 - RNA, 19 nt, Artificial Sequence
  Description of Artificial Sequence: Synthetic oligonucleotide
gggaggccgcuccacaggg

SEQ ID NO: 1574933 - RNA, 19 nt, Artificial Sequence
  Description of Artificial Sequence: Synthetic oligonucleotide
cgaguggugaccgugguag

SEQ ID NO: 1574934 - RNA, 19 nt, Artificial Sequence
  Description of Artificial Sequence: Synthetic oligonucleotide
cauuccugagaugccacca

SEQ ID NO: 1574935 - RNA, 19 nt, Artificial Sequence
  Description of Artificial Sequence: Synthetic oligonucleotide
gcagagguacaacggcucc

SEQ ID NO: 1574936 - RNA, 19 nt, Artificial Sequence
  Description of Artificial Sequence: Synthetic oligonucleotide
gcggaccuucaccacaucc

SEQ ID NO: 1574937 - RNA, 19 nt, Artificial Sequence
  Description of Artificial Sequence: Synthetic oligonucleotide
aacuuuugccaaacucgua

SEQ ID NO: 1574938 - RNA, 19 nt, Artificial Sequence
  Description of Artificial Sequence: Synthetic oligonucleotide
gccaaguggaaucaauucu

SEQ ID NO: 1574939 - RNA, 19 nt, Artificial Sequence
  Description of Artificial Sequence: Synthetic oligonucleotide
aggacaccauugcaguaua

SEQ ID NO: 1574940 - RNA, 19 nt, Artificial Sequence
  Description of Artificial Sequence: Synthetic oligonucleotide
uucuccgaagcaggagcca

SEQ ID NO: 1574941 - RNA, 19 nt, Artificial Sequence
  Description of Artificial Sequence: Synthetic oligonucleotide
agcaggagccaaguggaau

SEQ ID NO: 1574942 - RNA, 19 nt, Artificial Sequence
  Description of Artificial Sequence: Synthetic oligonucleotide
gugcccauucgggcgaggg

SEQ ID NO: 1574943 - RNA, 19 nt, Artificial Sequence
  Description of Artificial Sequence: Synthetic oligonucleotide
agcuccugaggccaccauu

SEQ ID NO: 1574944 - RNA, 19 nt, Artificial Sequence
  Description of Artificial Sequence: Synthetic oligonucleotide
gucaacucgcuggcuacug

SEQ ID NO: 1574945 - RNA, 19 nt, Artificial Sequence
  Description of Artificial Sequence: Synthetic oligonucleotide
caaggggcugaugacuguc

SEQ ID NO: 1574946 - RNA, 19 nt, Artificial Sequence
  Description of Artificial Sequence: Synthetic oligonucleotide
gaggaacccagcaaacagu

SEQ ID NO: 1574947 - RNA, 19 nt, Artificial Sequence
  Description of Artificial Sequence: Synthetic oligonucleotide
agcuagcugccgguaugac

SEQ ID NO: 1574948 - RNA, 19 nt, Artificial Sequence
  Description of Artificial Sequence: Synthetic oligonucleotide
gccuggcgggcccauagcg

SEQ ID NO: 1574949 - RNA, 19 nt, Artificial Sequence
  Description of Artificial Sequence: Synthetic oligonucleotide
gguguagaagagacuccag

SEQ ID NO: 1574950 - RNA, 19 nt, Artificial Sequence
  Description of Artificial Sequence: Synthetic oligonucleotide
cugagccggugccugcgcc

SEQ ID NO: 1574951 - RNA, 19 nt, Artificial Sequence
  Description of Artificial Sequence: Synthetic oligonucleotide
ccgcacaagcuccaagggg

SEQ ID NO: 1574952 - RNA, 19 nt, Artificial Sequence
  Description of Artificial Sequence: Synthetic oligonucleotide
gccaccgcagcuugaacac

SEQ ID NO: 1574953 - RNA, 19 nt, Artificial Sequence
  Description of Artificial Sequence: Synthetic oligonucleotide
gugaccgugguagggagaa

SEQ ID NO: 1574954 - RNA, 19 nt, Artificial Sequence
  Description of Artificial Sequence: Synthetic oligonucleotide
gggugcguagaggucagag

SEQ ID NO: 1574955 - RNA, 19 nt, Artificial Sequence
  Description of Artificial Sequence: Synthetic oligonucleotide
gggugucaugaagagggag

SEQ ID NO: 1574956 - RNA, 19 nt, Artificial Sequence
  Description of Artificial Sequence: Synthetic oligonucleotide
uuccgccuugauucuccga

SEQ ID NO: 1574957 - RNA, 19 nt, Artificial Sequence
  Description of Artificial Sequence: Synthetic oligonucleotide
cugugggaccccagccaag

SEQ ID NO: 1574958 - RNA, 19 nt, Artificial Sequence
  Description of Artificial Sequence: Synthetic oligonucleotide
cauuagggcagagguacaa

SEQ ID NO: 1574959 - RNA, 19 nt, Artificial Sequence
  Description of Artificial Sequence: Synthetic oligonucleotide
gguccgcacaagcuccaag

SEQ ID NO: 1574960 - RNA, 19 nt, Artificial Sequence
  Description of Artificial Sequence: Synthetic oligonucleotide
caccauuccugagaugcca

SEQ ID NO: 1574961 - RNA, 19 nt, Artificial Sequence
  Description of Artificial Sequence: Synthetic oligonucleotide
ugcucccagugugaucugu

SEQ ID NO: 1574962 - RNA, 19 nt, Artificial Sequence
  Description of Artificial Sequence: Synthetic oligonucleotide
gagggagauuugguguaga

SEQ ID NO: 1574963 - RNA, 19 nt, Artificial Sequence
  Description of Artificial Sequence: Synthetic oligonucleotide
augugaggguagccugggu

SEQ ID NO: 1574964 - RNA, 19 nt, Artificial Sequence
  Description of Artificial Sequence: Synthetic oligonucleotide
uaaggguggcagccaccau

SEQ ID NO: 1574965 - RNA, 19 nt, Artificial Sequence
  Description of Artificial Sequence: Synthetic oligonucleotide
cgagggagcagccuugaug

SEQ ID NO: 1574966 - RNA, 19 nt, Artificial Sequence
  Description of Artificial Sequence: Synthetic oligonucleotide
ccuggcgggcccauagcgg

SEQ ID NO: 1574967 - RNA, 19 nt, Artificial Sequence
  Description of Artificial Sequence: Synthetic oligonucleotide
ggugccagugaaucgggua

SEQ ID NO: 1574968 - RNA, 19 nt, Artificial Sequence
  Description of Artificial Sequence: Synthetic oligonucleotide
ugcgccgcgccgcgccagg

SEQ ID NO: 1574969 - RNA, 19 nt, Artificial Sequence
  Description of Artificial Sequence: Synthetic oligonucleotide
augggugcguagaggucag

SEQ ID NO: 1574970 - RNA, 19 nt, Artificial Sequence
  Description of Artificial Sequence: Synthetic oligonucleotide
uggugcccgauuccgccuu

SEQ ID NO: 1574971 - RNA, 19 nt, Artificial Sequence
  Description of Artificial Sequence: Synthetic oligonucleotide
accgcagcuugaacacagg

SEQ ID NO: 1574972 - RNA, 19 nt, Artificial Sequence
  Description of Artificial Sequence: Synthetic oligonucleotide
uuugcugaacggggcuaau

SEQ ID NO: 1574973 - RNA, 19 nt, Artificial Sequence
  Description of Artificial Sequence: Synthetic oligonucleotide
ggguaggauccugaaacca

SEQ ID NO: 1574974 - RNA, 19 nt, Artificial Sequence
  Description of Artificial Sequence: Synthetic oligonucleotide
gccuugauucuccgaagca

SEQ ID NO: 1574975 - RNA, 19 nt, Artificial Sequence
  Description of Artificial Sequence: Synthetic oligonucleotide
ccacccguucaagagcugg

SEQ ID NO: 1574976 - RNA, 19 nt, Artificial Sequence
  Description of Artificial Sequence: Synthetic oligonucleotide
auucgggcgagggcaccag

SEQ ID NO: 1574977 - RNA, 19 nt, Artificial Sequence
  Description of Artificial Sequence: Synthetic oligonucleotide
gagccaccgcagcuugaac

SEQ ID NO: 1574978 - RNA, 19 nt, Artificial Sequence
  Description of Artificial Sequence: Synthetic oligonucleotide
gggccaggcuucaacaaac

SEQ ID NO: 1574979 - RNA, 19 nt, Artificial Sequence
  Description of Artificial Sequence: Synthetic oligonucleotide
ugcccgauuccgccuugau

SEQ ID NO: 1574980 - RNA, 19 nt, Artificial Sequence
  Description of Artificial Sequence: Synthetic oligonucleotide
agcugccgguaugacacgu

SEQ ID NO: 1574981 - RNA, 19 nt, Artificial Sequence
  Description of Artificial Sequence: Synthetic oligonucleotide
gcagaguagagggagauuu

SEQ ID NO: 1574982 - RNA, 19 nt, Artificial Sequence
  Description of Artificial Sequence: Synthetic oligonucleotide
ggaacccagcaaacagucc

SEQ ID NO: 1574983 - RNA, 19 nt, Artificial Sequence
  Description of Artificial Sequence: Synthetic oligonucleotide
cuagugcccucaugccuca

SEQ ID NO: 1574984 - RNA, 19 nt, Artificial Sequence
  Description of Artificial Sequence: Synthetic oligonucleotide
gugcccucaugccucacua

SEQ ID NO: 1574985 - RNA, 19 nt, Artificial Sequence
  Description of Artificial Sequence: Synthetic oligonucleotide
ccucuggugcccgauuccg

SEQ ID NO: 1574986 - RNA, 19 nt, Artificial Sequence
  Description of Artificial Sequence: Synthetic oligonucleotide
agccaccauuccugagaug

SEQ ID NO: 1574987 - RNA, 19 nt, Artificial Sequence
  Description of Artificial Sequence: Synthetic oligonucleotide
gcgucaacucgcuggcuac

SEQ ID NO: 1574988 - RNA, 19 nt, Artificial Sequence
  Description of Artificial Sequence: Synthetic oligonucleotide
ccaccauuccugagaugcc

SEQ ID NO: 1574989 - RNA, 19 nt, Artificial Sequence
  Description of Artificial Sequence: Synthetic oligonucleotide
cagagguacaacggcucca

SEQ ID NO: 1574990 - RNA, 19 nt, Artificial Sequence
  Description of Artificial Sequence: Synthetic oligonucleotide
cacuuggcucagucuccug

SEQ ID NO: 1574991 - RNA, 19 nt, Artificial Sequence
  Description of Artificial Sequence: Synthetic oligonucleotide
cugacgcccacagaugucu

SEQ ID NO: 1574992 - RNA, 19 nt, Artificial Sequence
  Description of Artificial Sequence: Synthetic oligonucleotide
ggucaaggauugaccacac

SEQ ID NO: 1574993 - RNA, 19 nt, Artificial Sequence
  Description of Artificial Sequence: Synthetic oligonucleotide
ggugaccacagccccagcu

SEQ ID NO: 1574994 - RNA, 19 nt, Artificial Sequence
  Description of Artificial Sequence: Synthetic oligonucleotide
gggaggaacccagcaaaca

SEQ ID NO: 1574995 - RNA, 19 nt, Artificial Sequence
  Description of Artificial Sequence: Synthetic oligonucleotide
cgccuugauucuccgaagc

SEQ ID NO: 1574996 - RNA, 19 nt, Artificial Sequence
  Description of Artificial Sequence: Synthetic oligonucleotide
ggaaggcgucaacucgcug

SEQ ID NO: 1574997 - RNA, 19 nt, Artificial Sequence
  Description of Artificial Sequence: Synthetic oligonucleotide
cggguaggauccugaaacc

SEQ ID NO: 1574998 - RNA, 19 nt, Artificial Sequence
  Description of Artificial Sequence: Synthetic oligonucleotide
cauuugcugaacggggcua

SEQ ID NO: 1574999 - RNA, 19 nt, Artificial Sequence
  Description of Artificial Sequence: Synthetic oligonucleotide
gccaaacucguaagugcug

SEQ ID NO: 1575000 - RNA, 19 nt, Artificial Sequence
  Description of Artificial Sequence: Synthetic oligonucleotide
ggcgucaacucgcuggcua

SEQ ID NO: 1575001 - RNA, 19 nt, Artificial Sequence
  Description of Artificial Sequence: Synthetic oligonucleotide
cuguccccacccguucaag

SEQ ID NO: 1575002 - RNA, 19 nt, Artificial Sequence
  Description of Artificial Sequence: Synthetic oligonucleotide
gguugcuccucgccuuuca

SEQ ID NO: 1575003 - RNA, 19 nt, Artificial Sequence
  Description of Artificial Sequence: Synthetic oligonucleotide
aagcuccaaggggcugaug

SEQ ID NO: 1575004 - RNA, 19 nt, Artificial Sequence
  Description of Artificial Sequence: Synthetic oligonucleotide
agggagcagccuugaugau

SEQ ID NO: 1575005 - RNA, 19 nt, Artificial Sequence
  Description of Artificial Sequence: Synthetic oligonucleotide
agugcccauucgggcgagg

SEQ ID NO: 1575006 - RNA, 19 nt, Artificial Sequence
  Description of Artificial Sequence: Synthetic oligonucleotide
ggugccugcgccgcgccgc

SEQ ID NO: 1575007 - RNA, 19 nt, Artificial Sequence
  Description of Artificial Sequence: Synthetic oligonucleotide
caccacauccagggguguc

SEQ ID NO: 1575008 - RNA, 19 nt, Artificial Sequence
  Description of Artificial Sequence: Synthetic oligonucleotide
gguugagccucuggaagaa

SEQ ID NO: 1575009 - RNA, 19 nt, Artificial Sequence
  Description of Artificial Sequence: Synthetic oligonucleotide
aggcggaccuucaccacau

SEQ ID NO: 1575010 - RNA, 19 nt, Artificial Sequence
  Description of Artificial Sequence: Synthetic oligonucleotide
ggauugcagaguagaggga

SEQ ID NO: 1575011 - RNA, 19 nt, Artificial Sequence
  Description of Artificial Sequence: Synthetic oligonucleotide
cacacgagggagcagccuu

SEQ ID NO: 1575012 - RNA, 19 nt, Artificial Sequence
  Description of Artificial Sequence: Synthetic oligonucleotide
caacggcuccaggacacca

SEQ ID NO: 1575013 - RNA, 19 nt, Artificial Sequence
  Description of Artificial Sequence: Synthetic oligonucleotide
ggguccuagugcccucaug

SEQ ID NO: 1575014 - RNA, 19 nt, Artificial Sequence
  Description of Artificial Sequence: Synthetic oligonucleotide
aggagccaaguggaaucaa

SEQ ID NO: 1575015 - RNA, 19 nt, Artificial Sequence
  Description of Artificial Sequence: Synthetic oligonucleotide
cauucgggcgagggcacca

SEQ ID NO: 1575016 - RNA, 19 nt, Artificial Sequence
  Description of Artificial Sequence: Synthetic oligonucleotide
acgagggagcagccuugau

SEQ ID NO: 1575017 - RNA, 19 nt, Artificial Sequence
  Description of Artificial Sequence: Synthetic oligonucleotide
ugaccgugguagggagaac

SEQ ID NO: 1575018 - RNA, 19 nt, Artificial Sequence
  Description of Artificial Sequence: Synthetic oligonucleotide
gcacagcgaguaccauuag

SEQ ID NO: 1575019 - RNA, 19 nt, Artificial Sequence
  Description of Artificial Sequence: Synthetic oligonucleotide
ccauucagccagcucuuca

SEQ ID NO: 1575020 - RNA, 19 nt, Artificial Sequence
  Description of Artificial Sequence: Synthetic oligonucleotide
aggguccuagugcccucau

SEQ ID NO: 1575021 - RNA, 19 nt, Artificial Sequence
  Description of Artificial Sequence: Synthetic oligonucleotide
ugguugcuccucgccuuuc

SEQ ID NO: 1575022 - RNA, 19 nt, Artificial Sequence
  Description of Artificial Sequence: Synthetic oligonucleotide
gcaguauaggaggcacuuc

SEQ ID NO: 1575023 - RNA, 19 nt, Artificial Sequence
  Description of Artificial Sequence: Synthetic oligonucleotide
ccgugguagggagaacagc

SEQ ID NO: 1575024 - RNA, 19 nt, Artificial Sequence
  Description of Artificial Sequence: Synthetic oligonucleotide
gcucauaguugaaccagua

SEQ ID NO: 1575025 - RNA, 19 nt, Artificial Sequence
  Description of Artificial Sequence: Synthetic oligonucleotide
aggugccagugaaucgggu

SEQ ID NO: 1575026 - RNA, 19 nt, Artificial Sequence
  Description of Artificial Sequence: Synthetic oligonucleotide
agguagcuagcugccggua

SEQ ID NO: 1575027 - RNA, 19 nt, Artificial Sequence
  Description of Artificial Sequence: Synthetic oligonucleotide
ugguccgcacaagcuccaa

SEQ ID NO: 1575028 - RNA, 19 nt, Artificial Sequence
  Description of Artificial Sequence: Synthetic oligonucleotide
gguagcuagcugccgguau

SEQ ID NO: 1575029 - RNA, 19 nt, Artificial Sequence
  Description of Artificial Sequence: Synthetic oligonucleotide
cacaggguccuagugcccu

SEQ ID NO: 1575030 - RNA, 19 nt, Artificial Sequence
  Description of Artificial Sequence: Synthetic oligonucleotide
cagccaccauuccugagau

SEQ ID NO: 1575031 - RNA, 19 nt, Artificial Sequence
  Description of Artificial Sequence: Synthetic oligonucleotide
ugggugcguagaggucaga

SEQ ID NO: 1575032 - RNA, 19 nt, Artificial Sequence
  Description of Artificial Sequence: Synthetic oligonucleotide
gcugccgguaugacacgug

SEQ ID NO: 1575033 - RNA, 19 nt, Artificial Sequence
  Description of Artificial Sequence: Synthetic oligonucleotide
gacacgugcugagccugua

SEQ ID NO: 1575034 - RNA, 19 nt, Artificial Sequence
  Description of Artificial Sequence: Synthetic oligonucleotide
cccauucgggcgagggcac

SEQ ID NO: 1575035 - RNA, 19 nt, Artificial Sequence
  Description of Artificial Sequence: Synthetic oligonucleotide
ggaggugaccacagcccca

SEQ ID NO: 1575036 - RNA, 19 nt, Artificial Sequence
  Description of Artificial Sequence: Synthetic oligonucleotide
ggugcccgauuccgccuug

SEQ ID NO: 1575037 - RNA, 19 nt, Artificial Sequence
  Description of Artificial Sequence: Synthetic oligonucleotide
ggccuggcgggcccauagc

SEQ ID NO: 1575038 - RNA, 19 nt, Artificial Sequence
  Description of Artificial Sequence: Synthetic oligonucleotide
caggguccuagugcccuca

SEQ ID NO: 1575039 - RNA, 19 nt, Artificial Sequence
  Description of Artificial Sequence: Synthetic oligonucleotide
cagugcccauucgggcgag

SEQ ID NO: 1575040 - RNA, 19 nt, Artificial Sequence
  Description of Artificial Sequence: Synthetic oligonucleotide
gccaagccacagugagcgc

SEQ ID NO: 1575041 - RNA, 19 nt, Artificial Sequence
  Description of Artificial Sequence: Synthetic oligonucleotide
ggagccaaguggaaucaau

SEQ ID NO: 1575042 - RNA, 19 nt, Artificial Sequence
  Description of Artificial Sequence: Synthetic oligonucleotide
ggagaacagcaggaaucaa

SEQ ID NO: 1575043 - RNA, 19 nt, Artificial Sequence
  Description of Artificial Sequence: Synthetic oligonucleotide
ccauuagggcagagguaca

SEQ ID NO: 1575044 - RNA, 19 nt, Artificial Sequence
  Description of Artificial Sequence: Synthetic oligonucleotide
gaggguagccugggugacu

SEQ ID NO: 1575045 - RNA, 19 nt, Artificial Sequence
  Description of Artificial Sequence: Synthetic oligonucleotide
aggcuucaacaaacauaaa

SEQ ID NO: 1575046 - RNA, 19 nt, Artificial Sequence
  Description of Artificial Sequence: Synthetic oligonucleotide
aggcgucaacucgcuggcu

SEQ ID NO: 1575047 - RNA, 19 nt, Artificial Sequence
  Description of Artificial Sequence: Synthetic oligonucleotide
guuggggaggaaggcacuu

SEQ ID NO: 1575048 - RNA, 19 nt, Artificial Sequence
  Description of Artificial Sequence: Synthetic oligonucleotide
ccauuugcugaacggggcu

SEQ ID NO: 1575049 - RNA, 19 nt, Artificial Sequence
  Description of Artificial Sequence: Synthetic oligonucleotide
ccgguaugacacgugcuga

SEQ ID NO: 1575050 - RNA, 19 nt, Artificial Sequence
  Description of Artificial Sequence: Synthetic oligonucleotide
auccugguucugagccggu

SEQ ID NO: 1575051 - RNA, 19 nt, Artificial Sequence
  Description of Artificial Sequence: Synthetic oligonucleotide
gcugguugcuccucgccuu

SEQ ID NO: 1575052 - RNA, 19 nt, Artificial Sequence
  Description of Artificial Sequence: Synthetic oligonucleotide
ccugaucguccaucuugga

SEQ ID NO: 1575053 - RNA, 19 nt, Artificial Sequence
  Description of Artificial Sequence: Synthetic oligonucleotide
gugaaucggguaggauccu

SEQ ID NO: 1575054 - RNA, 19 nt, Artificial Sequence
  Description of Artificial Sequence: Synthetic oligonucleotide
cuggcuacugagggccucu

SEQ ID NO: 1575055 - RNA, 19 nt, Artificial Sequence
  Description of Artificial Sequence: Synthetic oligonucleotide
guggacgaguggugaccgu

SEQ ID NO: 1575056 - RNA, 19 nt, Artificial Sequence
  Description of Artificial Sequence: Synthetic oligonucleotide
ccaggacaccauugcagua

SEQ ID NO: 1575057 - RNA, 19 nt, Artificial Sequence
  Description of Artificial Sequence: Synthetic oligonucleotide
cccuggggauugcagagua

SEQ ID NO: 1575058 - RNA, 19 nt, Artificial Sequence
  Description of Artificial Sequence: Synthetic oligonucleotide
ccauucgggcgagggcacc

SEQ ID NO: 1575059 - RNA, 19 nt, Artificial Sequence
  Description of Artificial Sequence: Synthetic oligonucleotide
gcuggcuacugagggccuc

SEQ ID NO: 1575060 - RNA, 19 nt, Artificial Sequence
  Description of Artificial Sequence: Synthetic oligonucleotide
gugcccgauuccgccuuga

SEQ ID NO: 1575061 - RNA, 19 nt, Artificial Sequence
  Description of Artificial Sequence: Synthetic oligonucleotide
ggcugggaggccgcuccac

SEQ ID NO: 1575062 - RNA, 19 nt, Artificial Sequence
  Description of Artificial Sequence: Synthetic oligonucleotide
cugcgccgcgccgcgccag

SEQ ID NO: 1575063 - RNA, 19 nt, Artificial Sequence
  Description of Artificial Sequence: Synthetic oligonucleotide
gcggccgguggaggguccg

SEQ ID NO: 1575064 - RNA, 19 nt, Artificial Sequence
  Description of Artificial Sequence: Synthetic oligonucleotide
gcacaucucgaagggcugu

SEQ ID NO: 1575065 - RNA, 19 nt, Artificial Sequence
  Description of Artificial Sequence: Synthetic oligonucleotide
cugguugcuccucgccuuu

SEQ ID NO: 1575066 - RNA, 19 nt, Artificial Sequence
  Description of Artificial Sequence: Synthetic oligonucleotide
ggcggaccuucaccacauc

SEQ ID NO: 1575067 - RNA, 19 nt, Artificial Sequence
  Description of Artificial Sequence: Synthetic oligonucleotide
ccccaggauccugaucguc

SEQ ID NO: 1575068 - RNA, 19 nt, Artificial Sequence
  Description of Artificial Sequence: Synthetic oligonucleotide
gcacuuggcucagucuccu

SEQ ID NO: 1575069 - RNA, 19 nt, Artificial Sequence
  Description of Artificial Sequence: Synthetic oligonucleotide
gccggugccugcgccgcgc

SEQ ID NO: 1575070 - RNA, 19 nt, Artificial Sequence
  Description of Artificial Sequence: Synthetic oligonucleotide
caggauccugaucguccau

SEQ ID NO: 1575071 - RNA, 19 nt, Artificial Sequence
  Description of Artificial Sequence: Synthetic oligonucleotide
ccuguccccacccguucaa

SEQ ID NO: 1575072 - RNA, 19 nt, Artificial Sequence
  Description of Artificial Sequence: Synthetic oligonucleotide
gcgggcccauagcggcucc

SEQ ID NO: 1575073 - RNA, 19 nt, Artificial Sequence
  Description of Artificial Sequence: Synthetic oligonucleotide
ccgcuccacaggguccuag

SEQ ID NO: 1575074 - RNA, 19 nt, Artificial Sequence
  Description of Artificial Sequence: Synthetic oligonucleotide
gcccgauuccgccuugauu

SEQ ID NO: 1575075 - RNA, 19 nt, Artificial Sequence
  Description of Artificial Sequence: Synthetic oligonucleotide
cgauuccgccuugauucuc

SEQ ID NO: 1575076 - RNA, 19 nt, Artificial Sequence
  Description of Artificial Sequence: Synthetic oligonucleotide
caagcuccaaggggcugau

SEQ ID NO: 1575077 - RNA, 19 nt, Artificial Sequence
  Description of Artificial Sequence: Synthetic oligonucleotide
ccgauuccgccuugauucu

SEQ ID NO: 1575078 - RNA, 19 nt, Artificial Sequence
  Description of Artificial Sequence: Synthetic oligonucleotide
cguaagugcugaucaugau

SEQ ID NO: 1575079 - RNA, 19 nt, Artificial Sequence
  Description of Artificial Sequence: Synthetic oligonucleotide
ccucgccuuucaggagccc

SEQ ID NO: 1575080 - RNA, 19 nt, Artificial Sequence
  Description of Artificial Sequence: Synthetic oligonucleotide
ccaccgcagcuugaacaca

SEQ ID NO: 1575081 - RNA, 19 nt, Artificial Sequence
  Description of Artificial Sequence: Synthetic oligonucleotide
cagccaccaugggugcgua

SEQ ID NO: 1575082 - RNA, 19 nt, Artificial Sequence
  Description of Artificial Sequence: Synthetic oligonucleotide
ccagugaaucggguaggau

SEQ ID NO: 1575083 - RNA, 19 nt, Artificial Sequence
  Description of Artificial Sequence: Synthetic oligonucleotide
ccagugcucccagugugau

SEQ ID NO: 1575084 - RNA, 19 nt, Artificial Sequence
  Description of Artificial Sequence: Synthetic oligonucleotide
cgggcccauagcggcuccg

SEQ ID NO: 1575085 - RNA, 19 nt, Artificial Sequence
  Description of Artificial Sequence: Synthetic oligonucleotide
ccgcggccgguggaggguc

SEQ ID NO: 1575086 - RNA, 19 nt, Artificial Sequence
  Description of Artificial Sequence: Synthetic oligonucleotide
cgcuccacaggguccuagu

SEQ ID NO: 1575087 - RNA, 19 nt, Artificial Sequence
  Description of Artificial Sequence: Synthetic oligonucleotide
cgucaacucgcuggcuacu

SEQ ID NO: 1575088 - RNA, 19 nt, Artificial Sequence
  Description of Artificial Sequence: Synthetic oligonucleotide
gcgccgcgccaggggccug

SEQ ID NO: 1575089 - RNA, 19 nt, Artificial Sequence
  Description of Artificial Sequence: Synthetic oligonucleotide
aaagaucucacuccgaagc

SEQ ID NO: 1575090 - RNA, 19 nt, Artificial Sequence
  Description of Artificial Sequence: Synthetic oligonucleotide
acaaguuucacuuuuguac

SEQ ID NO: 1575091 - RNA, 19 nt, Artificial Sequence
  Description of Artificial Sequence: Synthetic oligonucleotide
augucaguugcacagagcc

SEQ ID NO: 1575092 - RNA, 19 nt, Artificial Sequence
  Description of Artificial Sequence: Synthetic oligonucleotide
aaaggguuagacuggggcc

SEQ ID NO: 1575093 - RNA, 19 nt, Artificial Sequence
  Description of Artificial Sequence: Synthetic oligonucleotide
aguucuaucuggcuggagc

SEQ ID NO: 1575094 - RNA, 19 nt, Artificial Sequence
  Description of Artificial Sequence: Synthetic oligonucleotide
acgauaaaggguuagacug

SEQ ID NO: 1575095 - RNA, 19 nt, Artificial Sequence
  Description of Artificial Sequence: Synthetic oligonucleotide
aacaccauauccuugucug

SEQ ID NO: 1575096 - RNA, 19 nt, Artificial Sequence
  Description of Artificial Sequence: Synthetic oligonucleotide
uguguccucaguaaaagca

SEQ ID NO: 1575097 - RNA, 19 nt, Artificial Sequence
  Description of Artificial Sequence: Synthetic oligonucleotide
cuaaacuccgguaaucccg

SEQ ID NO: 1575098 - RNA, 19 nt, Artificial Sequence
  Description of Artificial Sequence: Synthetic oligonucleotide
acuccgguaaucccgaagc

SEQ ID NO: 1575099 - RNA, 19 nt, Artificial Sequence
  Description of Artificial Sequence: Synthetic oligonucleotide
aguauugcacacuacaagu

SEQ ID NO: 1575100 - RNA, 19 nt, Artificial Sequence
  Description of Artificial Sequence: Synthetic oligonucleotide
aaauuaguuccacaacuca

SEQ ID NO: 1575101 - RNA, 19 nt, Artificial Sequence
  Description of Artificial Sequence: Synthetic oligonucleotide
ucauauuugcuuugaacug

SEQ ID NO: 1575102 - RNA, 19 nt, Artificial Sequence
  Description of Artificial Sequence: Synthetic oligonucleotide
uggaaaaugguguugaguu

SEQ ID NO: 1575103 - RNA, 19 nt, Artificial Sequence
  Description of Artificial Sequence: Synthetic oligonucleotide
uuaaagaucucacuccgaa

SEQ ID NO: 1575104 - RNA, 19 nt, Artificial Sequence
  Description of Artificial Sequence: Synthetic oligonucleotide
aauuaguuccacaacucag

SEQ ID NO: 1575105 - RNA, 19 nt, Artificial Sequence
  Description of Artificial Sequence: Synthetic oligonucleotide
uauggucuacaaaugaccu

SEQ ID NO: 1575106 - RNA, 19 nt, Artificial Sequence
  Description of Artificial Sequence: Synthetic oligonucleotide
ucuauggucuacaaaugac

SEQ ID NO: 1575107 - RNA, 19 nt, Artificial Sequence
  Description of Artificial Sequence: Synthetic oligonucleotide
agagggccggccuugagcc

SEQ ID NO: 1575108 - RNA, 19 nt, Artificial Sequence
  Description of Artificial Sequence: Synthetic oligonucleotide
uggucuacaaaugaccucc

SEQ ID NO: 1575109 - RNA, 19 nt, Artificial Sequence
  Description of Artificial Sequence: Synthetic oligonucleotide
uguaggaagggcuuggaaa

SEQ ID NO: 1575110 - RNA, 19 nt, Artificial Sequence
  Description of Artificial Sequence: Synthetic oligonucleotide
acuuuuguacuugccaacc

SEQ ID NO: 1575111 - RNA, 19 nt, Artificial Sequence
  Description of Artificial Sequence: Synthetic oligonucleotide
aacccuagggacccuuccc

SEQ ID NO: 1575112 - RNA, 19 nt, Artificial Sequence
  Description of Artificial Sequence: Synthetic oligonucleotide
aguuccacaacucaguauu

SEQ ID NO: 1575113 - RNA, 19 nt, Artificial Sequence
  Description of Artificial Sequence: Synthetic oligonucleotide
uguaccguagcaauagguc

SEQ ID NO: 1575114 - RNA, 19 nt, Artificial Sequence
  Description of Artificial Sequence: Synthetic oligonucleotide
agagccccuguccagaugg

SEQ ID NO: 1575115 - RNA, 19 nt, Artificial Sequence
  Description of Artificial Sequence: Synthetic oligonucleotide
uaggauguccucauauuug

SEQ ID NO: 1575116 - RNA, 19 nt, Artificial Sequence
  Description of Artificial Sequence: Synthetic oligonucleotide
cuacaaaugaccucccaug

SEQ ID NO: 1575117 - RNA, 19 nt, Artificial Sequence
  Description of Artificial Sequence: Synthetic oligonucleotide
gauaaaggguuagacuggg

SEQ ID NO: 1575118 - RNA, 19 nt, Artificial Sequence
  Description of Artificial Sequence: Synthetic oligonucleotide
ucccaugucaguugcacag

SEQ ID NO: 1575119 - RNA, 19 nt, Artificial Sequence
  Description of Artificial Sequence: Synthetic oligonucleotide
ugaggcuccagcuugcaca

SEQ ID NO: 1575120 - RNA, 19 nt, Artificial Sequence
  Description of Artificial Sequence: Synthetic oligonucleotide
ucugaugccuguaccguag

SEQ ID NO: 1575121 - RNA, 19 nt, Artificial Sequence
  Description of Artificial Sequence: Synthetic oligonucleotide
ugcuaacucaguccagccg

SEQ ID NO: 1575122 - RNA, 19 nt, Artificial Sequence
  Description of Artificial Sequence: Synthetic oligonucleotide
ucuaaacuccgguaauccc

SEQ ID NO: 1575123 - RNA, 19 nt, Artificial Sequence
  Description of Artificial Sequence: Synthetic oligonucleotide
gauguguccucaguaaaag

SEQ ID NO: 1575124 - RNA, 19 nt, Artificial Sequence
  Description of Artificial Sequence: Synthetic oligonucleotide
uggucugaugccuguaccg

SEQ ID NO: 1575125 - RNA, 19 nt, Artificial Sequence
  Description of Artificial Sequence: Synthetic oligonucleotide
uaaagaucucacuccgaag

SEQ ID NO: 1575126 - RNA, 19 nt, Artificial Sequence
  Description of Artificial Sequence: Synthetic oligonucleotide
auguguccucaguaaaagc

SEQ ID NO: 1575127 - RNA, 19 nt, Artificial Sequence
  Description of Artificial Sequence: Synthetic oligonucleotide
guaccguagcaauaggucc

SEQ ID NO: 1575128 - RNA, 19 nt, Artificial Sequence
  Description of Artificial Sequence: Synthetic oligonucleotide
aguccagccggccuccucc

SEQ ID NO: 1575129 - RNA, 19 nt, Artificial Sequence
  Description of Artificial Sequence: Synthetic oligonucleotide
aaaugguguugaguugggc

SEQ ID NO: 1575130 - RNA, 19 nt, Artificial Sequence
  Description of Artificial Sequence: Synthetic oligonucleotide
ucaucugggagaugugucc

SEQ ID NO: 1575131 - RNA, 19 nt, Artificial Sequence
  Description of Artificial Sequence: Synthetic oligonucleotide
ucacuuuuguacuugccaa

SEQ ID NO: 1575132 - RNA, 19 nt, Artificial Sequence
  Description of Artificial Sequence: Synthetic oligonucleotide
ucucuauggucuacaaaug

SEQ ID NO: 1575133 - RNA, 19 nt, Artificial Sequence
  Description of Artificial Sequence: Synthetic oligonucleotide
uuagacuggggccuucagc

SEQ ID NO: 1575134 - RNA, 19 nt, Artificial Sequence
  Description of Artificial Sequence: Synthetic oligonucleotide
uauuugucauuauauuuua

SEQ ID NO: 1575135 - RNA, 19 nt, Artificial Sequence
  Description of Artificial Sequence: Synthetic oligonucleotide
aacucaguauugcacacua

SEQ ID NO: 1575136 - RNA, 19 nt, Artificial Sequence
  Description of Artificial Sequence: Synthetic oligonucleotide
guagcaauagguccacgag

SEQ ID NO: 1575137 - RNA, 19 nt, Artificial Sequence
  Description of Artificial Sequence: Synthetic oligonucleotide
cugaggguagcucaaggcc

SEQ ID NO: 1575138 - RNA, 19 nt, Artificial Sequence
  Description of Artificial Sequence: Synthetic oligonucleotide
gcuaacucaguccagccgg

SEQ ID NO: 1575139 - RNA, 19 nt, Artificial Sequence
  Description of Artificial Sequence: Synthetic oligonucleotide
caguauugcacacuacaag

SEQ ID NO: 1575140 - RNA, 19 nt, Artificial Sequence
  Description of Artificial Sequence: Synthetic oligonucleotide
guaaucccgaagcucagcc

SEQ ID NO: 1575141 - RNA, 19 nt, Artificial Sequence
  Description of Artificial Sequence: Synthetic oligonucleotide
aagaucucacuccgaagca

SEQ ID NO: 1575142 - RNA, 19 nt, Artificial Sequence
  Description of Artificial Sequence: Synthetic oligonucleotide
uagggcccgacgauaaagg

SEQ ID NO: 1575143 - RNA, 19 nt, Artificial Sequence
  Description of Artificial Sequence: Synthetic oligonucleotide
uaaacuccgguaaucccga

SEQ ID NO: 1575144 - RNA, 19 nt, Artificial Sequence
  Description of Artificial Sequence: Synthetic oligonucleotide
uauugcacacuacaaguuu

SEQ ID NO: 1575145 - RNA, 19 nt, Artificial Sequence
  Description of Artificial Sequence: Synthetic oligonucleotide
gauuccauuggggugcucc

SEQ ID NO: 1575146 - RNA, 19 nt, Artificial Sequence
  Description of Artificial Sequence: Synthetic oligonucleotide
uggguucucagcaggcggg

SEQ ID NO: 1575147 - RNA, 19 nt, Artificial Sequence
  Description of Artificial Sequence: Synthetic oligonucleotide
ugguaguacccacaggccu

SEQ ID NO: 1575148 - RNA, 19 nt, Artificial Sequence
  Description of Artificial Sequence: Synthetic oligonucleotide
agggccucgggucucuucc

SEQ ID NO: 1575149 - RNA, 19 nt, Artificial Sequence
  Description of Artificial Sequence: Synthetic oligonucleotide
ucugcuaacucaguccagc

SEQ ID NO: 1575150 - RNA, 19 nt, Artificial Sequence
  Description of Artificial Sequence: Synthetic oligonucleotide
uaccguagcaauaggucca

SEQ ID NO: 1575151 - RNA, 19 nt, Artificial Sequence
  Description of Artificial Sequence: Synthetic oligonucleotide
caaaugaccucccauguca

SEQ ID NO: 1575152 - RNA, 19 nt, Artificial Sequence
  Description of Artificial Sequence: Synthetic oligonucleotide
auugcacacuacaaguuuc

SEQ ID NO: 1575153 - RNA, 19 nt, Artificial Sequence
  Description of Artificial Sequence: Synthetic oligonucleotide
aacuccgguaaucccgaag

SEQ ID NO: 1575154 - RNA, 19 nt, Artificial Sequence
  Description of Artificial Sequence: Synthetic oligonucleotide
acccuagggacccuucccc

SEQ ID NO: 1575155 - RNA, 19 nt, Artificial Sequence
  Description of Artificial Sequence: Synthetic oligonucleotide
ucuggggugagcuggguac

SEQ ID NO: 1575156 - RNA, 19 nt, Artificial Sequence
  Description of Artificial Sequence: Synthetic oligonucleotide
auaggauguccucauauuu

SEQ ID NO: 1575157 - RNA, 19 nt, Artificial Sequence
  Description of Artificial Sequence: Synthetic oligonucleotide
gaucucacuccgaagcagg

SEQ ID NO: 1575158 - RNA, 19 nt, Artificial Sequence
  Description of Artificial Sequence: Synthetic oligonucleotide
uccaagcugcuguaggaag

SEQ ID NO: 1575159 - RNA, 19 nt, Artificial Sequence
  Description of Artificial Sequence: Synthetic oligonucleotide
guagcucaaggccuugggg

SEQ ID NO: 1575160 - RNA, 19 nt, Artificial Sequence
  Description of Artificial Sequence: Synthetic oligonucleotide
gucaacagugcagaugggg

SEQ ID NO: 1575161 - RNA, 19 nt, Artificial Sequence
  Description of Artificial Sequence: Synthetic oligonucleotide
cucaguauugcacacuaca

SEQ ID NO: 1575162 - RNA, 19 nt, Artificial Sequence
  Description of Artificial Sequence: Synthetic oligonucleotide
aucaaggcgacgguggcgg

SEQ ID NO: 1575163 - RNA, 19 nt, Artificial Sequence
  Description of Artificial Sequence: Synthetic oligonucleotide
uggaggguggcacuccaag

SEQ ID NO: 1575164 - RNA, 19 nt, Artificial Sequence
  Description of Artificial Sequence: Synthetic oligonucleotide
uuaguuccacaacucagua

SEQ ID NO: 1575165 - RNA, 19 nt, Artificial Sequence
  Description of Artificial Sequence: Synthetic oligonucleotide
gaggugagcaucaaggcga

SEQ ID NO: 1575166 - RNA, 19 nt, Artificial Sequence
  Description of Artificial Sequence: Synthetic oligonucleotide
aggagcuuaaagaucucac

SEQ ID NO: 1575167 - RNA, 19 nt, Artificial Sequence
  Description of Artificial Sequence: Synthetic oligonucleotide
cuuuuguacuugccaaccc

SEQ ID NO: 1575168 - RNA, 19 nt, Artificial Sequence
  Description of Artificial Sequence: Synthetic oligonucleotide
gugccagcuccacaaaugg

SEQ ID NO: 1575169 - RNA, 19 nt, Artificial Sequence
  Description of Artificial Sequence: Synthetic oligonucleotide
auuaguuccacaacucagu

SEQ ID NO: 1575170 - RNA, 19 nt, Artificial Sequence
  Description of Artificial Sequence: Synthetic oligonucleotide
aaggguuagacuggggccu

SEQ ID NO: 1575171 - RNA, 19 nt, Artificial Sequence
  Description of Artificial Sequence: Synthetic oligonucleotide
cuugagcagcucuaaacuc

SEQ ID NO: 1575172 - RNA, 19 nt, Artificial Sequence
  Description of Artificial Sequence: Synthetic oligonucleotide
cuggucgccggucagcugg

SEQ ID NO: 1575173 - RNA, 19 nt, Artificial Sequence
  Description of Artificial Sequence: Synthetic oligonucleotide
auagucaacagugcagaug

SEQ ID NO: 1575174 - RNA, 19 nt, Artificial Sequence
  Description of Artificial Sequence: Synthetic oligonucleotide
ggaggugagcaucaaggcg

SEQ ID NO: 1575175 - RNA, 19 nt, Artificial Sequence
  Description of Artificial Sequence: Synthetic oligonucleotide
acagaggaguucaaagggg

SEQ ID NO: 1575176 - RNA, 19 nt, Artificial Sequence
  Description of Artificial Sequence: Synthetic oligonucleotide
uucccaacccacacagaag

SEQ ID NO: 1575177 - RNA, 19 nt, Artificial Sequence
  Description of Artificial Sequence: Synthetic oligonucleotide
guaggaagggcuuggaaaa

SEQ ID NO: 1575178 - RNA, 19 nt, Artificial Sequence
  Description of Artificial Sequence: Synthetic oligonucleotide
uacaaguuucacuuuugua

SEQ ID NO: 1575179 - RNA, 19 nt, Artificial Sequence
  Description of Artificial Sequence: Synthetic oligonucleotide
cucucuauggucuacaaau

SEQ ID NO: 1575180 - RNA, 19 nt, Artificial Sequence
  Description of Artificial Sequence: Synthetic oligonucleotide
guuggagguucccacauca

SEQ ID NO: 1575181 - RNA, 19 nt, Artificial Sequence
  Description of Artificial Sequence: Synthetic oligonucleotide
caggauuccauuggggugc

SEQ ID NO: 1575182 - RNA, 19 nt, Artificial Sequence
  Description of Artificial Sequence: Synthetic oligonucleotide
ugucaguugcacagagccc

SEQ ID NO: 1575183 - RNA, 19 nt, Artificial Sequence
  Description of Artificial Sequence: Synthetic oligonucleotide
ugcuguugcaucucaguuc

SEQ ID NO: 1575184 - RNA, 19 nt, Artificial Sequence
  Description of Artificial Sequence: Synthetic oligonucleotide
agcaauagguccacgaggu

SEQ ID NO: 1575185 - RNA, 19 nt, Artificial Sequence
  Description of Artificial Sequence: Synthetic oligonucleotide
aacucaguccagccggccu

SEQ ID NO: 1575186 - RNA, 19 nt, Artificial Sequence
  Description of Artificial Sequence: Synthetic oligonucleotide
uucuaggagggcucugacc

SEQ ID NO: 1575187 - RNA, 19 nt, Artificial Sequence
  Description of Artificial Sequence: Synthetic oligonucleotide
cuaucagcugccucacagc

SEQ ID NO: 1575188 - RNA, 19 nt, Artificial Sequence
  Description of Artificial Sequence: Synthetic oligonucleotide
aaaugaccucccaugucag

SEQ ID NO: 1575189 - RNA, 19 nt, Artificial Sequence
  Description of Artificial Sequence: Synthetic oligonucleotide
gacgauaaaggguuagacu

SEQ ID NO: 1575190 - RNA, 19 nt, Artificial Sequence
  Description of Artificial Sequence: Synthetic oligonucleotide
uggagguucccacaucauc

SEQ ID NO: 1575191 - RNA, 19 nt, Artificial Sequence
  Description of Artificial Sequence: Synthetic oligonucleotide
ucgcugguaguacccacag

SEQ ID NO: 1575192 - RNA, 19 nt, Artificial Sequence
  Description of Artificial Sequence: Synthetic oligonucleotide
uguugcaucucaguucuuc

SEQ ID NO: 1575193 - RNA, 19 nt, Artificial Sequence
  Description of Artificial Sequence: Synthetic oligonucleotide
gccaguucuaucuggcugg

SEQ ID NO: 1575194 - RNA, 19 nt, Artificial Sequence
  Description of Artificial Sequence: Synthetic oligonucleotide
cugguaguacccacaggcc

SEQ ID NO: 1575195 - RNA, 19 nt, Artificial Sequence
  Description of Artificial Sequence: Synthetic oligonucleotide
uaaucccgaagcucagccc

SEQ ID NO: 1575196 - RNA, 19 nt, Artificial Sequence
  Description of Artificial Sequence: Synthetic oligonucleotide
cuggguucucagcaggcgg

SEQ ID NO: 1575197 - RNA, 19 nt, Artificial Sequence
  Description of Artificial Sequence: Synthetic oligonucleotide
cuuccccuucucucuaugg

SEQ ID NO: 1575198 - RNA, 19 nt, Artificial Sequence
  Description of Artificial Sequence: Synthetic oligonucleotide
uugagccccggucuguucu

SEQ ID NO: 1575199 - RNA, 19 nt, Artificial Sequence
  Description of Artificial Sequence: Synthetic oligonucleotide
auauccuugucugagggua

SEQ ID NO: 1575200 - RNA, 19 nt, Artificial Sequence
  Description of Artificial Sequence: Synthetic oligonucleotide
aucaucugggagauguguc

SEQ ID NO: 1575201 - RNA, 19 nt, Artificial Sequence
  Description of Artificial Sequence: Synthetic oligonucleotide
ucgcgcucugcuaacucag

SEQ ID NO: 1575202 - RNA, 19 nt, Artificial Sequence
  Description of Artificial Sequence: Synthetic oligonucleotide
ucucucuauggucuacaaa

SEQ ID NO: 1575203 - RNA, 19 nt, Artificial Sequence
  Description of Artificial Sequence: Synthetic oligonucleotide
cuuggggagcuucccaacc

SEQ ID NO: 1575204 - RNA, 19 nt, Artificial Sequence
  Description of Artificial Sequence: Synthetic oligonucleotide
uguucuaggagggcucuga

SEQ ID NO: 1575205 - RNA, 19 nt, Artificial Sequence
  Description of Artificial Sequence: Synthetic oligonucleotide
ugagcaucaaggcgacggu

SEQ ID NO: 1575206 - RNA, 19 nt, Artificial Sequence
  Description of Artificial Sequence: Synthetic oligonucleotide
cucuauggucuacaaauga

SEQ ID NO: 1575207 - RNA, 19 nt, Artificial Sequence
  Description of Artificial Sequence: Synthetic oligonucleotide
caugucaguugcacagagc

SEQ ID NO: 1575208 - RNA, 19 nt, Artificial Sequence
  Description of Artificial Sequence: Synthetic oligonucleotide
auguccucauauuugcuuu

SEQ ID NO: 1575209 - RNA, 19 nt, Artificial Sequence
  Description of Artificial Sequence: Synthetic oligonucleotide
agggcccgacgauaaaggg

SEQ ID NO: 1575210 - RNA, 19 nt, Artificial Sequence
  Description of Artificial Sequence: Synthetic oligonucleotide
gcacaggcgacaaaggagg

SEQ ID NO: 1575211 - RNA, 19 nt, Artificial Sequence
  Description of Artificial Sequence: Synthetic oligonucleotide
ugcuguaggaagggcuugg

SEQ ID NO: 1575212 - RNA, 19 nt, Artificial Sequence
  Description of Artificial Sequence: Synthetic oligonucleotide
ucucacuccgaagcagggg

SEQ ID NO: 1575213 - RNA, 19 nt, Artificial Sequence
  Description of Artificial Sequence: Synthetic oligonucleotide
ugggaccgcagccugccag

SEQ ID NO: 1575214 - RNA, 19 nt, Artificial Sequence
  Description of Artificial Sequence: Synthetic oligonucleotide
uccgucgcugguaguaccc

SEQ ID NO: 1575215 - RNA, 19 nt, Artificial Sequence
  Description of Artificial Sequence: Synthetic oligonucleotide
caccauauccuugucugag

SEQ ID NO: 1575216 - RNA, 19 nt, Artificial Sequence
  Description of Artificial Sequence: Synthetic oligonucleotide
accgcagccugccaguucu

SEQ ID NO: 1575217 - RNA, 19 nt, Artificial Sequence
  Description of Artificial Sequence: Synthetic oligonucleotide
caccaguugggccuugagc

SEQ ID NO: 1575218 - RNA, 19 nt, Artificial Sequence
  Description of Artificial Sequence: Synthetic oligonucleotide
gaucccauaggauguccuc

SEQ ID NO: 1575219 - RNA, 19 nt, Artificial Sequence
  Description of Artificial Sequence: Synthetic oligonucleotide
cugcuaacucaguccagcc

SEQ ID NO: 1575220 - RNA, 19 nt, Artificial Sequence
  Description of Artificial Sequence: Synthetic oligonucleotide
ugaugccuguaccguagca

SEQ ID NO: 1575221 - RNA, 19 nt, Artificial Sequence
  Description of Artificial Sequence: Synthetic oligonucleotide
ucugccagcaggagcuuaa

SEQ ID NO: 1575222 - RNA, 19 nt, Artificial Sequence
  Description of Artificial Sequence: Synthetic oligonucleotide
cuggguaccucgcaggcuc

SEQ ID NO: 1575223 - RNA, 19 nt, Artificial Sequence
  Description of Artificial Sequence: Synthetic oligonucleotide
cuaacucaguccagccggc

SEQ ID NO: 1575224 - RNA, 19 nt, Artificial Sequence
  Description of Artificial Sequence: Synthetic oligonucleotide
uuccucaccuagcaccgcu

SEQ ID NO: 1575225 - RNA, 19 nt, Artificial Sequence
  Description of Artificial Sequence: Synthetic oligonucleotide
cuucccaacccacacagaa

SEQ ID NO: 1575226 - RNA, 19 nt, Artificial Sequence
  Description of Artificial Sequence: Synthetic oligonucleotide
ggaagggcuuggaaaaugg

SEQ ID NO: 1575227 - RNA, 19 nt, Artificial Sequence
  Description of Artificial Sequence: Synthetic oligonucleotide
aagccaacugugagaggcg

SEQ ID NO: 1575228 - RNA, 19 nt, Artificial Sequence
  Description of Artificial Sequence: Synthetic oligonucleotide
gacgguggcgggcaaacuc

SEQ ID NO: 1575229 - RNA, 19 nt, Artificial Sequence
  Description of Artificial Sequence: Synthetic oligonucleotide
ccucauauuugcuuugaac

SEQ ID NO: 1575230 - RNA, 19 nt, Artificial Sequence
  Description of Artificial Sequence: Synthetic oligonucleotide
uugccaacccuagggaccc

SEQ ID NO: 1575231 - RNA, 19 nt, Artificial Sequence
  Description of Artificial Sequence: Synthetic oligonucleotide
augccuguaccguagcaau

SEQ ID NO: 1575232 - RNA, 19 nt, Artificial Sequence
  Description of Artificial Sequence: Synthetic oligonucleotide
aguacccacaggccuccuc

SEQ ID NO: 1575233 - RNA, 19 nt, Artificial Sequence
  Description of Artificial Sequence: Synthetic oligonucleotide
cuagggcccgacgauaaag

SEQ ID NO: 1575234 - RNA, 19 nt, Artificial Sequence
  Description of Artificial Sequence: Synthetic oligonucleotide
guggucugaugccuguacc

SEQ ID NO: 1575235 - RNA, 19 nt, Artificial Sequence
  Description of Artificial Sequence: Synthetic oligonucleotide
augcuguugcaucucaguu

SEQ ID NO: 1575236 - RNA, 19 nt, Artificial Sequence
  Description of Artificial Sequence: Synthetic oligonucleotide
auuccauuggggugcuccu

SEQ ID NO: 1575237 - RNA, 19 nt, Artificial Sequence
  Description of Artificial Sequence: Synthetic oligonucleotide
uaguuccacaacucaguau

SEQ ID NO: 1575238 - RNA, 19 nt, Artificial Sequence
  Description of Artificial Sequence: Synthetic oligonucleotide
aggugcccgaaacaugcug

SEQ ID NO: 1575239 - RNA, 19 nt, Artificial Sequence
  Description of Artificial Sequence: Synthetic oligonucleotide
aguugcacagagccccugu

SEQ ID NO: 1575240 - RNA, 19 nt, Artificial Sequence
  Description of Artificial Sequence: Synthetic oligonucleotide
ccuagcaccgcuagggccc

SEQ ID NO: 1575241 - RNA, 19 nt, Artificial Sequence
  Description of Artificial Sequence: Synthetic oligonucleotide
agcucuaaacuccgguaau

SEQ ID NO: 1575242 - RNA, 19 nt, Artificial Sequence
  Description of Artificial Sequence: Synthetic oligonucleotide
acaggcgacaaaggagggg

SEQ ID NO: 1575243 - RNA, 19 nt, Artificial Sequence
  Description of Artificial Sequence: Synthetic oligonucleotide
gucccuggaucccauagga

SEQ ID NO: 1575244 - RNA, 19 nt, Artificial Sequence
  Description of Artificial Sequence: Synthetic oligonucleotide
gauguccucauauuugcuu

SEQ ID NO: 1575245 - RNA, 19 nt, Artificial Sequence
  Description of Artificial Sequence: Synthetic oligonucleotide
ucuguucuaggagggcucu

SEQ ID NO: 1575246 - RNA, 19 nt, Artificial Sequence
  Description of Artificial Sequence: Synthetic oligonucleotide
cagagggccggccuugagc

SEQ ID NO: 1575247 - RNA, 19 nt, Artificial Sequence
  Description of Artificial Sequence: Synthetic oligonucleotide
gcccgaaacaugcuguugc

SEQ ID NO: 1575248 - RNA, 19 nt, Artificial Sequence
  Description of Artificial Sequence: Synthetic oligonucleotide
gguucccacaucaucuggg

SEQ ID NO: 1575249 - RNA, 19 nt, Artificial Sequence
  Description of Artificial Sequence: Synthetic oligonucleotide
cacaggcgacaaaggaggg

SEQ ID NO: 1575250 - RNA, 19 nt, Artificial Sequence
  Description of Artificial Sequence: Synthetic oligonucleotide
agccaacugugagaggcgg

SEQ ID NO: 1575251 - RNA, 19 nt, Artificial Sequence
  Description of Artificial Sequence: Synthetic oligonucleotide
uucuaucuggcuggagcug

SEQ ID NO: 1575252 - RNA, 19 nt, Artificial Sequence
  Description of Artificial Sequence: Synthetic oligonucleotide
uggaggauaggaggccaag

SEQ ID NO: 1575253 - RNA, 19 nt, Artificial Sequence
  Description of Artificial Sequence: Synthetic oligonucleotide
gaggagucgagggccaggc

SEQ ID NO: 1575254 - RNA, 19 nt, Artificial Sequence
  Description of Artificial Sequence: Synthetic oligonucleotide
guuagacuggggccuucag

SEQ ID NO: 1575255 - RNA, 19 nt, Artificial Sequence
  Description of Artificial Sequence: Synthetic oligonucleotide
agggccuggaggguggcac

SEQ ID NO: 1575256 - RNA, 19 nt, Artificial Sequence
  Description of Artificial Sequence: Synthetic oligonucleotide
gaugccuguaccguagcaa

SEQ ID NO: 1575257 - RNA, 19 nt, Artificial Sequence
  Description of Artificial Sequence: Synthetic oligonucleotide
guucuaucuggcuggagcu

SEQ ID NO: 1575258 - RNA, 19 nt, Artificial Sequence
  Description of Artificial Sequence: Synthetic oligonucleotide
acaccauauccuugucuga

SEQ ID NO: 1575259 - RNA, 19 nt, Artificial Sequence
  Description of Artificial Sequence: Synthetic oligonucleotide
accguagcaauagguccac

SEQ ID NO: 1575260 - RNA, 19 nt, Artificial Sequence
  Description of Artificial Sequence: Synthetic oligonucleotide
agcuggguucucagcaggc

SEQ ID NO: 1575261 - RNA, 19 nt, Artificial Sequence
  Description of Artificial Sequence: Synthetic oligonucleotide
gugagaggcggcucugccc

SEQ ID NO: 1575262 - RNA, 19 nt, Artificial Sequence
  Description of Artificial Sequence: Synthetic oligonucleotide
ucgccggucagcuggguuc

SEQ ID NO: 1575263 - RNA, 19 nt, Artificial Sequence
  Description of Artificial Sequence: Synthetic oligonucleotide
uccacgaggugggguaggg

SEQ ID NO: 1575264 - RNA, 19 nt, Artificial Sequence
  Description of Artificial Sequence: Synthetic oligonucleotide
caacccuagggacccuucc

SEQ ID NO: 1575265 - RNA, 19 nt, Artificial Sequence
  Description of Artificial Sequence: Synthetic oligonucleotide
caucuggagccaguucugg

SEQ ID NO: 1575266 - RNA, 19 nt, Artificial Sequence
  Description of Artificial Sequence: Synthetic oligonucleotide
ucaguugcacagagccccu

SEQ ID NO: 1575267 - RNA, 19 nt, Artificial Sequence
  Description of Artificial Sequence: Synthetic oligonucleotide
gggaggugagcaucaaggc

SEQ ID NO: 1575268 - RNA, 19 nt, Artificial Sequence
  Description of Artificial Sequence: Synthetic oligonucleotide
ugggccgcccaccugccca

SEQ ID NO: 1575269 - RNA, 19 nt, Artificial Sequence
  Description of Artificial Sequence: Synthetic oligonucleotide
agggcucugaccaagccaa

SEQ ID NO: 1575270 - RNA, 19 nt, Artificial Sequence
  Description of Artificial Sequence: Synthetic oligonucleotide
cagcaggagcuuaaagauc

SEQ ID NO: 1575271 - RNA, 19 nt, Artificial Sequence
  Description of Artificial Sequence: Synthetic oligonucleotide
acucaguauugcacacuac

SEQ ID NO: 1575272 - RNA, 19 nt, Artificial Sequence
  Description of Artificial Sequence: Synthetic oligonucleotide
agauguguccucaguaaaa

SEQ ID NO: 1575273 - RNA, 19 nt, Artificial Sequence
  Description of Artificial Sequence: Synthetic oligonucleotide
cacaucaucugggagaugu

SEQ ID NO: 1575274 - RNA, 19 nt, Artificial Sequence
  Description of Artificial Sequence: Synthetic oligonucleotide
gggugagcuggguaccucg

SEQ ID NO: 1575275 - RNA, 19 nt, Artificial Sequence
  Description of Artificial Sequence: Synthetic oligonucleotide
uggaucccauaggaugucc

SEQ ID NO: 1575276 - RNA, 19 nt, Artificial Sequence
  Description of Artificial Sequence: Synthetic oligonucleotide
cccggucuguucuaggagg

SEQ ID NO: 1575277 - RNA, 19 nt, Artificial Sequence
  Description of Artificial Sequence: Synthetic oligonucleotide
ggaggauaggaggccaagg

SEQ ID NO: 1575278 - RNA, 19 nt, Artificial Sequence
  Description of Artificial Sequence: Synthetic oligonucleotide
ggagauguguccucaguaa

SEQ ID NO: 1575279 - RNA, 19 nt, Artificial Sequence
  Description of Artificial Sequence: Synthetic oligonucleotide
caucaaggcgacgguggcg

SEQ ID NO: 1575280 - RNA, 19 nt, Artificial Sequence
  Description of Artificial Sequence: Synthetic oligonucleotide
ugggccuugagcagcucua

SEQ ID NO: 1575281 - RNA, 19 nt, Artificial Sequence
  Description of Artificial Sequence: Synthetic oligonucleotide
guucuaggagggcucugac

SEQ ID NO: 1575282 - RNA, 19 nt, Artificial Sequence
  Description of Artificial Sequence: Synthetic oligonucleotide
cagaugguacccaggccuc

SEQ ID NO: 1575283 - RNA, 19 nt, Artificial Sequence
  Description of Artificial Sequence: Synthetic oligonucleotide
cuagggacccuuccccuuc

SEQ ID NO: 1575284 - RNA, 19 nt, Artificial Sequence
  Description of Artificial Sequence: Synthetic oligonucleotide
caggcuccgucgcugguag

SEQ ID NO: 1575285 - RNA, 19 nt, Artificial Sequence
  Description of Artificial Sequence: Synthetic oligonucleotide
guaguacccacaggccucc

SEQ ID NO: 1575286 - RNA, 19 nt, Artificial Sequence
  Description of Artificial Sequence: Synthetic oligonucleotide
uuggagguucccacaucau

SEQ ID NO: 1575287 - RNA, 19 nt, Artificial Sequence
  Description of Artificial Sequence: Synthetic oligonucleotide
ggguggagucccuggaucc

SEQ ID NO: 1575288 - RNA, 19 nt, Artificial Sequence
  Description of Artificial Sequence: Synthetic oligonucleotide
ccugcccagaagcaguucc

SEQ ID NO: 1575289 - RNA, 19 nt, Artificial Sequence
  Description of Artificial Sequence: Synthetic oligonucleotide
gcuguugcaucucaguucu

SEQ ID NO: 1575290 - RNA, 19 nt, Artificial Sequence
  Description of Artificial Sequence: Synthetic oligonucleotide
guaaaagcaggagcucauc

SEQ ID NO: 1575291 - RNA, 19 nt, Artificial Sequence
  Description of Artificial Sequence: Synthetic oligonucleotide
gccuguaccguagcaauag

SEQ ID NO: 1575292 - RNA, 19 nt, Artificial Sequence
  Description of Artificial Sequence: Synthetic oligonucleotide
cucugcuaacucaguccag

SEQ ID NO: 1575293 - RNA, 19 nt, Artificial Sequence
  Description of Artificial Sequence: Synthetic oligonucleotide
uucuggggugagcugggua

SEQ ID NO: 1575294 - RNA, 19 nt, Artificial Sequence
  Description of Artificial Sequence: Synthetic oligonucleotide
ucgagggccaggccugccu

SEQ ID NO: 1575295 - RNA, 19 nt, Artificial Sequence
  Description of Artificial Sequence: Synthetic oligonucleotide
guugcaucucaguucuucu

SEQ ID NO: 1575296 - RNA, 19 nt, Artificial Sequence
  Description of Artificial Sequence: Synthetic oligonucleotide
ucaaggcgacgguggcggg

SEQ ID NO: 1575297 - RNA, 19 nt, Artificial Sequence
  Description of Artificial Sequence: Synthetic oligonucleotide
aggugagcaucaaggcgac

SEQ ID NO: 1575298 - RNA, 19 nt, Artificial Sequence
  Description of Artificial Sequence: Synthetic oligonucleotide
ucgcaggcuccgucgcugg

SEQ ID NO: 1575299 - RNA, 19 nt, Artificial Sequence
  Description of Artificial Sequence: Synthetic oligonucleotide
guuccacaacucaguauug

SEQ ID NO: 1575300 - RNA, 19 nt, Artificial Sequence
  Description of Artificial Sequence: Synthetic oligonucleotide
uaacucaguccagccggcc

SEQ ID NO: 1575301 - RNA, 19 nt, Artificial Sequence
  Description of Artificial Sequence: Synthetic oligonucleotide
cuccgucgcugguaguacc

SEQ ID NO: 1575302 - RNA, 19 nt, Artificial Sequence
  Description of Artificial Sequence: Synthetic oligonucleotide
guugcacagagccccuguc

SEQ ID NO: 1575303 - RNA, 19 nt, Artificial Sequence
  Description of Artificial Sequence: Synthetic oligonucleotide
cagcucuaaacuccgguaa

SEQ ID NO: 1575304 - RNA, 19 nt, Artificial Sequence
  Description of Artificial Sequence: Synthetic oligonucleotide
cugaugccuguaccguagc

SEQ ID NO: 1575305 - RNA, 19 nt, Artificial Sequence
  Description of Artificial Sequence: Synthetic oligonucleotide
uggucgccggucagcuggg

SEQ ID NO: 1575306 - RNA, 19 nt, Artificial Sequence
  Description of Artificial Sequence: Synthetic oligonucleotide
ggaggguggcacuccaagc

SEQ ID NO: 1575307 - RNA, 19 nt, Artificial Sequence
  Description of Artificial Sequence: Synthetic oligonucleotide
gaacugggccagagggccg

SEQ ID NO: 1575308 - RNA, 19 nt, Artificial Sequence
  Description of Artificial Sequence: Synthetic oligonucleotide
ugcccgaaacaugcuguug

SEQ ID NO: 1575309 - RNA, 19 nt, Artificial Sequence
  Description of Artificial Sequence: Synthetic oligonucleotide
ggagcuuaaagaucucacu

SEQ ID NO: 1575310 - RNA, 19 nt, Artificial Sequence
  Description of Artificial Sequence: Synthetic oligonucleotide
ugccuguaccguagcaaua

SEQ ID NO: 1575311 - RNA, 19 nt, Artificial Sequence
  Description of Artificial Sequence: Synthetic oligonucleotide
uggguggucugaugccugu

SEQ ID NO: 1575312 - RNA, 19 nt, Artificial Sequence
  Description of Artificial Sequence: Synthetic oligonucleotide
gguggucugaugccuguac

SEQ ID NO: 1575313 - RNA, 19 nt, Artificial Sequence
  Description of Artificial Sequence: Synthetic oligonucleotide
acaugcuguugcaucucag

SEQ ID NO: 1575314 - RNA, 19 nt, Artificial Sequence
  Description of Artificial Sequence: Synthetic oligonucleotide
cagccugccaguucuaucu

SEQ ID NO: 1575315 - RNA, 19 nt, Artificial Sequence
  Description of Artificial Sequence: Synthetic oligonucleotide
gagcuucccaacccacaca

SEQ ID NO: 1575316 - RNA, 19 nt, Artificial Sequence
  Description of Artificial Sequence: Synthetic oligonucleotide
ccgguaaucccgaagcuca

SEQ ID NO: 1575317 - RNA, 19 nt, Artificial Sequence
  Description of Artificial Sequence: Synthetic oligonucleotide
cucgcgcucugcuaacuca

SEQ ID NO: 1575318 - RNA, 19 nt, Artificial Sequence
  Description of Artificial Sequence: Synthetic oligonucleotide
cuguaccguagcaauaggu

SEQ ID NO: 1575319 - RNA, 19 nt, Artificial Sequence
  Description of Artificial Sequence: Synthetic oligonucleotide
uucucagcaggcgggccac

SEQ ID NO: 1575320 - RNA, 19 nt, Artificial Sequence
  Description of Artificial Sequence: Synthetic oligonucleotide
aaacuccgguaaucccgaa

SEQ ID NO: 1575321 - RNA, 19 nt, Artificial Sequence
  Description of Artificial Sequence: Synthetic oligonucleotide
ccuugggccgcccaccugc

SEQ ID NO: 1575322 - RNA, 19 nt, Artificial Sequence
  Description of Artificial Sequence: Synthetic oligonucleotide
gguaguacccacaggccuc

SEQ ID NO: 1575323 - RNA, 19 nt, Artificial Sequence
  Description of Artificial Sequence: Synthetic oligonucleotide
uccuugucugaggguagcu

SEQ ID NO: 1575324 - RNA, 19 nt, Artificial Sequence
  Description of Artificial Sequence: Synthetic oligonucleotide
ggagguucccacaucaucu

SEQ ID NO: 1575325 - RNA, 19 nt, Artificial Sequence
  Description of Artificial Sequence: Synthetic oligonucleotide
accgcuagggcccgacgau

SEQ ID NO: 1575326 - RNA, 19 nt, Artificial Sequence
  Description of Artificial Sequence: Synthetic oligonucleotide
agccccggucuguucuagg

SEQ ID NO: 1575327 - RNA, 19 nt, Artificial Sequence
  Description of Artificial Sequence: Synthetic oligonucleotide
ccggucuguucuaggaggg

SEQ ID NO: 1575328 - RNA, 19 nt, Artificial Sequence
  Description of Artificial Sequence: Synthetic oligonucleotide
agucaacagugcagauggg

SEQ ID NO: 1575329 - RNA, 19 nt, Artificial Sequence
  Description of Artificial Sequence: Synthetic oligonucleotide
acgguggcgggcaaacucu

SEQ ID NO: 1575330 - RNA, 19 nt, Artificial Sequence
  Description of Artificial Sequence: Synthetic oligonucleotide
aggcucagggaaaggguug

SEQ ID NO: 1575331 - RNA, 19 nt, Artificial Sequence
  Description of Artificial Sequence: Synthetic oligonucleotide
gucuguucuaggagggcuc

SEQ ID NO: 1575332 - RNA, 19 nt, Artificial Sequence
  Description of Artificial Sequence: Synthetic oligonucleotide
ggauaggaggccaaggccu

SEQ ID NO: 1575333 - RNA, 19 nt, Artificial Sequence
  Description of Artificial Sequence: Synthetic oligonucleotide
cugaggcuccagcuugcac

SEQ ID NO: 1575334 - RNA, 19 nt, Artificial Sequence
  Description of Artificial Sequence: Synthetic oligonucleotide
agcaccgcuagggcccgac

SEQ ID NO: 1575335 - RNA, 19 nt, Artificial Sequence
  Description of Artificial Sequence: Synthetic oligonucleotide
gggagauguguccucagua

SEQ ID NO: 1575336 - RNA, 19 nt, Artificial Sequence
  Description of Artificial Sequence: Synthetic oligonucleotide
acagagccccuguccagau

SEQ ID NO: 1575337 - RNA, 19 nt, Artificial Sequence
  Description of Artificial Sequence: Synthetic oligonucleotide
cauaggauguccucauauu

SEQ ID NO: 1575338 - RNA, 19 nt, Artificial Sequence
  Description of Artificial Sequence: Synthetic oligonucleotide
caggcgggccaccucgcgc

SEQ ID NO: 1575339 - RNA, 19 nt, Artificial Sequence
  Description of Artificial Sequence: Synthetic oligonucleotide
cucccaugucaguugcaca

SEQ ID NO: 1575340 - RNA, 19 nt, Artificial Sequence
  Description of Artificial Sequence: Synthetic oligonucleotide
ccuguaccguagcaauagg

SEQ ID NO: 1575341 - RNA, 19 nt, Artificial Sequence
  Description of Artificial Sequence: Synthetic oligonucleotide
cucaguccagccggccucc

SEQ ID NO: 1575342 - RNA, 19 nt, Artificial Sequence
  Description of Artificial Sequence: Synthetic oligonucleotide
cuugagccccggucuguuc

SEQ ID NO: 1575343 - RNA, 19 nt, Artificial Sequence
  Description of Artificial Sequence: Synthetic oligonucleotide
cuagcaccgcuagggcccg

SEQ ID NO: 1575344 - RNA, 19 nt, Artificial Sequence
  Description of Artificial Sequence: Synthetic oligonucleotide
guaccucgcaggcuccguc

SEQ ID NO: 1575345 - RNA, 19 nt, Artificial Sequence
  Description of Artificial Sequence: Synthetic oligonucleotide
gggugcuugggaccgcagc

SEQ ID NO: 1575346 - RNA, 19 nt, Artificial Sequence
  Description of Artificial Sequence: Synthetic oligonucleotide
caaggcgacgguggcgggc

SEQ ID NO: 1575347 - RNA, 19 nt, Artificial Sequence
  Description of Artificial Sequence: Synthetic oligonucleotide
cucgcaggcuccgucgcug

SEQ ID NO: 1575348 - RNA, 19 nt, Artificial Sequence
  Description of Artificial Sequence: Synthetic oligonucleotide
aguugggccuugagcagcu

SEQ ID NO: 1575349 - RNA, 19 nt, Artificial Sequence
  Description of Artificial Sequence: Synthetic oligonucleotide
uugggccagcuggucgccg

SEQ ID NO: 1575350 - RNA, 19 nt, Artificial Sequence
  Description of Artificial Sequence: Synthetic oligonucleotide
agccuugggccgcccaccu

SEQ ID NO: 1575351 - RNA, 19 nt, Artificial Sequence
  Description of Artificial Sequence: Synthetic oligonucleotide
gucugaugccuguaccgua

SEQ ID NO: 1575352 - RNA, 19 nt, Artificial Sequence
  Description of Artificial Sequence: Synthetic oligonucleotide
cucugaccaagccaacugu

SEQ ID NO: 1575353 - RNA, 19 nt, Artificial Sequence
  Description of Artificial Sequence: Synthetic oligonucleotide
ucguccccugccaccaguu

SEQ ID NO: 1575354 - RNA, 19 nt, Artificial Sequence
  Description of Artificial Sequence: Synthetic oligonucleotide
gucgcugguaguacccaca

SEQ ID NO: 1575355 - RNA, 19 nt, Artificial Sequence
  Description of Artificial Sequence: Synthetic oligonucleotide
gggguggagucccuggauc

SEQ ID NO: 1575356 - RNA, 19 nt, Artificial Sequence
  Description of Artificial Sequence: Synthetic oligonucleotide
cauauccuugucugagggu

SEQ ID NO: 1575357 - RNA, 19 nt, Artificial Sequence
  Description of Artificial Sequence: Synthetic oligonucleotide
cguagcaauagguccacga

SEQ ID NO: 1575358 - RNA, 19 nt, Artificial Sequence
  Description of Artificial Sequence: Synthetic oligonucleotide
guauugcacacuacaaguu

SEQ ID NO: 1575359 - RNA, 19 nt, Artificial Sequence
  Description of Artificial Sequence: Synthetic oligonucleotide
caucaucugggagaugugu

SEQ ID NO: 1575360 - RNA, 19 nt, Artificial Sequence
  Description of Artificial Sequence: Synthetic oligonucleotide
aucccgaagcucagcccuc

SEQ ID NO: 1575361 - RNA, 19 nt, Artificial Sequence
  Description of Artificial Sequence: Synthetic oligonucleotide
ccuugagcagcucuaaacu

SEQ ID NO: 1575362 - RNA, 19 nt, Artificial Sequence
  Description of Artificial Sequence: Synthetic oligonucleotide
caccgcuagggcccgacga

SEQ ID NO: 1575363 - RNA, 19 nt, Artificial Sequence
  Description of Artificial Sequence: Synthetic oligonucleotide
cuggaucccauaggauguc

SEQ ID NO: 1575364 - RNA, 19 nt, Artificial Sequence
  Description of Artificial Sequence: Synthetic oligonucleotide
ccagcaggagcuuaaagau

SEQ ID NO: 1575365 - RNA, 19 nt, Artificial Sequence
  Description of Artificial Sequence: Synthetic oligonucleotide
guccacgaggugggguagg

SEQ ID NO: 1575366 - RNA, 19 nt, Artificial Sequence
  Description of Artificial Sequence: Synthetic oligonucleotide
ggucuacaaaugaccuccc

SEQ ID NO: 1575367 - RNA, 19 nt, Artificial Sequence
  Description of Artificial Sequence: Synthetic oligonucleotide
ccagccggccuccuccucg

SEQ ID NO: 1575368 - RNA, 19 nt, Artificial Sequence
  Description of Artificial Sequence: Synthetic oligonucleotide
ggaaaggguuggagguucc

SEQ ID NO: 1575369 - RNA, 19 nt, Artificial Sequence
  Description of Artificial Sequence: Synthetic oligonucleotide
gagggccggccuugagccc

SEQ ID NO: 1575370 - RNA, 19 nt, Artificial Sequence
  Description of Artificial Sequence: Synthetic oligonucleotide
ccucaccuagcaccgcuag

SEQ ID NO: 1575371 - RNA, 19 nt, Artificial Sequence
  Description of Artificial Sequence: Synthetic oligonucleotide
ccauuggggugcuccuucc

SEQ ID NO: 1575372 - RNA, 19 nt, Artificial Sequence
  Description of Artificial Sequence: Synthetic oligonucleotide
guuccagggccucgggucu

SEQ ID NO: 1575373 - RNA, 19 nt, Artificial Sequence
  Description of Artificial Sequence: Synthetic oligonucleotide
agaggcggcucugccccag

SEQ ID NO: 1575374 - RNA, 19 nt, Artificial Sequence
  Description of Artificial Sequence: Synthetic oligonucleotide
gaccgcagccugccaguuc

SEQ ID NO: 1575375 - RNA, 19 nt, Artificial Sequence
  Description of Artificial Sequence: Synthetic oligonucleotide
gguuggagguucccacauc

SEQ ID NO: 1575376 - RNA, 19 nt, Artificial Sequence
  Description of Artificial Sequence: Synthetic oligonucleotide
caacugugagaggcggcuc

SEQ ID NO: 1575377 - RNA, 19 nt, Artificial Sequence
  Description of Artificial Sequence: Synthetic oligonucleotide
aggccugaggugcccgaaa

SEQ ID NO: 1575378 - RNA, 19 nt, Artificial Sequence
  Description of Artificial Sequence: Synthetic oligonucleotide
cuggaggauaggaggccaa

SEQ ID NO: 1575379 - RNA, 19 nt, Artificial Sequence
  Description of Artificial Sequence: Synthetic oligonucleotide
cagccuugggccgcccacc

SEQ ID NO: 1575380 - RNA, 19 nt, Artificial Sequence
  Description of Artificial Sequence: Synthetic oligonucleotide
ggugagcuggguaccucgc

SEQ ID NO: 1575381 - RNA, 19 nt, Artificial Sequence
  Description of Artificial Sequence: Synthetic oligonucleotide
ugggccccucagcaccuuc

SEQ ID NO: 1575382 - RNA, 19 nt, Artificial Sequence
  Description of Artificial Sequence: Synthetic oligonucleotide
caguucuaucuggcuggag

SEQ ID NO: 1575383 - RNA, 19 nt, Artificial Sequence
  Description of Artificial Sequence: Synthetic oligonucleotide
cauagucaacagugcagau

SEQ ID NO: 1575384 - RNA, 19 nt, Artificial Sequence
  Description of Artificial Sequence: Synthetic oligonucleotide
guggagucccuggauccca

SEQ ID NO: 1575385 - RNA, 19 nt, Artificial Sequence
  Description of Artificial Sequence: Synthetic oligonucleotide
cagagccccuguccagaug

SEQ ID NO: 1575386 - RNA, 19 nt, Artificial Sequence
  Description of Artificial Sequence: Synthetic oligonucleotide
ccuggaucccauaggaugu

SEQ ID NO: 1575387 - RNA, 19 nt, Artificial Sequence
  Description of Artificial Sequence: Synthetic oligonucleotide
ccuuggggagcuucccaac

SEQ ID NO: 1575388 - RNA, 19 nt, Artificial Sequence
  Description of Artificial Sequence: Synthetic oligonucleotide
gggugcuccuucccagaug

SEQ ID NO: 1575389 - RNA, 19 nt, Artificial Sequence
  Description of Artificial Sequence: Synthetic oligonucleotide
cuaggagggcucugaccaa

SEQ ID NO: 1575390 - RNA, 19 nt, Artificial Sequence
  Description of Artificial Sequence: Synthetic oligonucleotide
cuguucuaggagggcucug

SEQ ID NO: 1575391 - RNA, 19 nt, Artificial Sequence
  Description of Artificial Sequence: Synthetic oligonucleotide
gcgcucugcuaacucaguc

SEQ ID NO: 1575392 - RNA, 19 nt, Artificial Sequence
  Description of Artificial Sequence: Synthetic oligonucleotide
cgcccaccugcccagaagc

SEQ ID NO: 1575393 - RNA, 19 nt, Artificial Sequence
  Description of Artificial Sequence: Synthetic oligonucleotide
caggcucagggaaaggguu

SEQ ID NO: 1575394 - RNA, 19 nt, Artificial Sequence
  Description of Artificial Sequence: Synthetic oligonucleotide
aggguagcucaaggccuug

SEQ ID NO: 1575395 - RNA, 19 nt, Artificial Sequence
  Description of Artificial Sequence: Synthetic oligonucleotide
gcagccugccaguucuauc

SEQ ID NO: 1575396 - RNA, 19 nt, Artificial Sequence
  Description of Artificial Sequence: Synthetic oligonucleotide
ggucuguucuaggagggcu

SEQ ID NO: 1575397 - RNA, 19 nt, Artificial Sequence
  Description of Artificial Sequence: Synthetic oligonucleotide
gguucucagcaggcgggcc

SEQ ID NO: 1575398 - RNA, 19 nt, Artificial Sequence
  Description of Artificial Sequence: Synthetic oligonucleotide
cccgacgauaaaggguuag

SEQ ID NO: 1575399 - RNA, 19 nt, Artificial Sequence
  Description of Artificial Sequence: Synthetic oligonucleotide
ggugcccgaaacaugcugu

SEQ ID NO: 1575400 - RNA, 19 nt, Artificial Sequence
  Description of Artificial Sequence: Synthetic oligonucleotide
gguguugaguugggccagc

SEQ ID NO: 1575401 - RNA, 19 nt, Artificial Sequence
  Description of Artificial Sequence: Synthetic oligonucleotide
gguuagacuggggccuuca

SEQ ID NO: 1575402 - RNA, 19 nt, Artificial Sequence
  Description of Artificial Sequence: Synthetic oligonucleotide
gguccacgaggugggguag

SEQ ID NO: 1575403 - RNA, 19 nt, Artificial Sequence
  Description of Artificial Sequence: Synthetic oligonucleotide
ccccggucuguucuaggag

SEQ ID NO: 1575404 - RNA, 19 nt, Artificial Sequence
  Description of Artificial Sequence: Synthetic oligonucleotide
uccagccggccuccuccuc

SEQ ID NO: 1575405 - RNA, 19 nt, Artificial Sequence
  Description of Artificial Sequence: Synthetic oligonucleotide
ggugagcaucaaggcgacg

SEQ ID NO: 1575406 - RNA, 19 nt, Artificial Sequence
  Description of Artificial Sequence: Synthetic oligonucleotide
caguugcacagagccccug

SEQ ID NO: 1575407 - RNA, 19 nt, Artificial Sequence
  Description of Artificial Sequence: Synthetic oligonucleotide
gccuuggggagcuucccaa

SEQ ID NO: 1575408 - RNA, 19 nt, Artificial Sequence
  Description of Artificial Sequence: Synthetic oligonucleotide
ccaguucuggagggcacag

SEQ ID NO: 1575409 - RNA, 19 nt, Artificial Sequence
  Description of Artificial Sequence: Synthetic oligonucleotide
gccccggucuguucuagga

SEQ ID NO: 1575410 - RNA, 19 nt, Artificial Sequence
  Description of Artificial Sequence: Synthetic oligonucleotide
ccauaggauguccucauau

SEQ ID NO: 1575411 - RNA, 19 nt, Artificial Sequence
  Description of Artificial Sequence: Synthetic oligonucleotide
ggguucucagcaggcgggc

SEQ ID NO: 1575412 - RNA, 19 nt, Artificial Sequence
  Description of Artificial Sequence: Synthetic oligonucleotide
cccgaaacaugcuguugca

SEQ ID NO: 1575413 - RNA, 19 nt, Artificial Sequence
  Description of Artificial Sequence: Synthetic oligonucleotide
gccugaggugcccgaaaca

SEQ ID NO: 1575414 - RNA, 19 nt, Artificial Sequence
  Description of Artificial Sequence: Synthetic oligonucleotide
gguggcgggcaaacucugc

SEQ ID NO: 1575415 - RNA, 19 nt, Artificial Sequence
  Description of Artificial Sequence: Synthetic oligonucleotide
ggcccgacgauaaaggguu

SEQ ID NO: 1575416 - RNA, 19 nt, Artificial Sequence
  Description of Artificial Sequence: Synthetic oligonucleotide
gcaccgcuagggcccgacg

SEQ ID NO: 1575417 - RNA, 19 nt, Artificial Sequence
  Description of Artificial Sequence: Synthetic oligonucleotide
gccaacugugagaggcggc

SEQ ID NO: 1575418 - RNA, 19 nt, Artificial Sequence
  Description of Artificial Sequence: Synthetic oligonucleotide
ggucugaugccuguaccgu

SEQ ID NO: 1575419 - RNA, 19 nt, Artificial Sequence
  Description of Artificial Sequence: Synthetic oligonucleotide
ccggccuugagccccgguc

SEQ ID NO: 1575420 - RNA, 19 nt, Artificial Sequence
  Description of Artificial Sequence: Synthetic oligonucleotide
cuccgguaaucccgaagcu

SEQ ID NO: 1575421 - RNA, 19 nt, Artificial Sequence
  Description of Artificial Sequence: Synthetic oligonucleotide
cacugacagaggaguucaa

SEQ ID NO: 1575422 - RNA, 19 nt, Artificial Sequence
  Description of Artificial Sequence: Synthetic oligonucleotide
uuccagggccucgggucuc

SEQ ID NO: 1575423 - RNA, 19 nt, Artificial Sequence
  Description of Artificial Sequence: Synthetic oligonucleotide
caguccagccggccuccuc

SEQ ID NO: 1575424 - RNA, 19 nt, Artificial Sequence
  Description of Artificial Sequence: Synthetic oligonucleotide
aggguuagacuggggccuu

SEQ ID NO: 1575425 - RNA, 19 nt, Artificial Sequence
  Description of Artificial Sequence: Synthetic oligonucleotide
cuggaggguggcacuccaa

SEQ ID NO: 1575426 - RNA, 19 nt, Artificial Sequence
  Description of Artificial Sequence: Synthetic oligonucleotide
ggggagcuucccaacccac

SEQ ID NO: 1575427 - RNA, 19 nt, Artificial Sequence
  Description of Artificial Sequence: Synthetic oligonucleotide
gcuguaggaagggcuugga

SEQ ID NO: 1575428 - RNA, 19 nt, Artificial Sequence
  Description of Artificial Sequence: Synthetic oligonucleotide
cgguaaucccgaagcucag

SEQ ID NO: 1575429 - RNA, 19 nt, Artificial Sequence
  Description of Artificial Sequence: Synthetic oligonucleotide
gcuccgucgcugguaguac

SEQ ID NO: 1575430 - RNA, 19 nt, Artificial Sequence
  Description of Artificial Sequence: Synthetic oligonucleotide
gucgagggccaggccugcc

SEQ ID NO: 1575431 - RNA, 19 nt, Artificial Sequence
  Description of Artificial Sequence: Synthetic oligonucleotide
gcgacgguggcgggcaaac

SEQ ID NO: 1575432 - RNA, 19 nt, Artificial Sequence
  Description of Artificial Sequence: Synthetic oligonucleotide
ccuggaggauaggaggcca

SEQ ID NO: 1575433 - RNA, 19 nt, Artificial Sequence
  Description of Artificial Sequence: Synthetic oligonucleotide
ggcuccgucgcugguagua

SEQ ID NO: 1575434 - RNA, 19 nt, Artificial Sequence
  Description of Artificial Sequence: Synthetic oligonucleotide
gugcccgaaacaugcuguu

SEQ ID NO: 1575435 - RNA, 19 nt, Artificial Sequence
  Description of Artificial Sequence: Synthetic oligonucleotide
aggcuccgucgcugguagu

SEQ ID NO: 1575436 - RNA, 19 nt, Artificial Sequence
  Description of Artificial Sequence: Synthetic oligonucleotide
ccgacgauaaaggguuaga

SEQ ID NO: 1575437 - RNA, 19 nt, Artificial Sequence
  Description of Artificial Sequence: Synthetic oligonucleotide
caguuccagggccucgggu

SEQ ID NO: 1575438 - RNA, 19 nt, Artificial Sequence
  Description of Artificial Sequence: Synthetic oligonucleotide
ccacgaggugggguagggg

SEQ ID NO: 1575439 - RNA, 19 nt, Artificial Sequence
  Description of Artificial Sequence: Synthetic oligonucleotide
gcuggucgccggucagcug

SEQ ID NO: 1575440 - RNA, 19 nt, Artificial Sequence
  Description of Artificial Sequence: Synthetic oligonucleotide
ccaccucgcgcucugcuaa

SEQ ID NO: 1575441 - RNA, 19 nt, Artificial Sequence
  Description of Artificial Sequence: Synthetic oligonucleotide
ggcucugaccaagccaacu

SEQ ID NO: 1575442 - RNA, 19 nt, Artificial Sequence
  Description of Artificial Sequence: Synthetic oligonucleotide
ccaacugugagaggcggcu

SEQ ID NO: 1575443 - RNA, 19 nt, Artificial Sequence
  Description of Artificial Sequence: Synthetic oligonucleotide
gggcccgacgauaaagggu

SEQ ID NO: 1575444 - RNA, 19 nt, Artificial Sequence
  Description of Artificial Sequence: Synthetic oligonucleotide
ccagaugcugggccccuca

SEQ ID NO: 1575445 - RNA, 19 nt, Artificial Sequence
  Description of Artificial Sequence: Synthetic oligonucleotide
cugguccuggguggucuga

SEQ ID NO: 1575446 - RNA, 19 nt, Artificial Sequence
  Description of Artificial Sequence: Synthetic oligonucleotide
ccugaggugcccgaaacau

SEQ ID NO: 1575447 - RNA, 19 nt, Artificial Sequence
  Description of Artificial Sequence: Synthetic oligonucleotide
ccgcccaccugcccagaag

SEQ ID NO: 1575448 - RNA, 19 nt, Artificial Sequence
  Description of Artificial Sequence: Synthetic oligonucleotide
ccuggaggguggcacucca

SEQ ID NO: 1575449 - RNA, 19 nt, Artificial Sequence
  Description of Artificial Sequence: Synthetic oligonucleotide
ccguagcaauagguccacg

SEQ ID NO: 1575450 - RNA, 19 nt, Artificial Sequence
  Description of Artificial Sequence: Synthetic oligonucleotide
gcuagggcccgacgauaaa

SEQ ID NO: 1575451 - RNA, 19 nt, Artificial Sequence
  Description of Artificial Sequence: Synthetic oligonucleotide
gggaccgcagccugccagu

SEQ ID NO: 1575452 - RNA, 19 nt, Artificial Sequence
  Description of Artificial Sequence: Synthetic oligonucleotide
ccagagggccggccuugag

SEQ ID NO: 1575453 - RNA, 19 nt, Artificial Sequence
  Description of Artificial Sequence: Synthetic oligonucleotide
cagcuugcacaggcacuga

SEQ ID NO: 1575454 - RNA, 19 nt, Artificial Sequence
  Description of Artificial Sequence: Synthetic oligonucleotide
cugccagcaggagcuuaaa

SEQ ID NO: 1575455 - RNA, 19 nt, Artificial Sequence
  Description of Artificial Sequence: Synthetic oligonucleotide
guccagccggccuccuccu

SEQ ID NO: 1575456 - RNA, 19 nt, Artificial Sequence
  Description of Artificial Sequence: Synthetic oligonucleotide
gucgccggucagcuggguu

SEQ ID NO: 1575457 - RNA, 19 nt, Artificial Sequence
  Description of Artificial Sequence: Synthetic oligonucleotide
cggucuguucuaggagggc

SEQ ID NO: 1575458 - RNA, 19 nt, Artificial Sequence
  Description of Artificial Sequence: Synthetic oligonucleotide
cgguggcgggcaaacucug

SEQ ID NO: 1575459 - RNA, 19 nt, Artificial Sequence
  Description of Artificial Sequence: Synthetic oligonucleotide
cgagggccaggccugccuc

SEQ ID NO: 1575460 - RNA, 19 nt, Artificial Sequence
  Description of Artificial Sequence: Synthetic oligonucleotide
ccaguucuaucuggcugga

SEQ ID NO: 1575461 - RNA, 19 nt, Artificial Sequence
  Description of Artificial Sequence: Synthetic oligonucleotide
cccacaucaucugggagau

SEQ ID NO: 1575462 - RNA, 19 nt, Artificial Sequence
  Description of Artificial Sequence: Synthetic oligonucleotide
ggccucgggucucuucccu

SEQ ID NO: 1575463 - RNA, 19 nt, Artificial Sequence
  Description of Artificial Sequence: Synthetic oligonucleotide
ggguuagacuggggccuuc

SEQ ID NO: 1575464 - RNA, 19 nt, Artificial Sequence
  Description of Artificial Sequence: Synthetic oligonucleotide
cgcuagggcccgacgauaa

SEQ ID NO: 1575465 - RNA, 19 nt, Artificial Sequence
  Description of Artificial Sequence: Synthetic oligonucleotide
ggccaccucgcgcucugcu

SEQ ID NO: 1575466 - RNA, 19 nt, Artificial Sequence
  Description of Artificial Sequence: Synthetic oligonucleotide
uagcaccgcuagggcccga

SEQ ID NO: 1575467 - RNA, 19 nt, Artificial Sequence
  Description of Artificial Sequence: Synthetic oligonucleotide
gagccccuguccagauggu

SEQ ID NO: 1575468 - RNA, 19 nt, Artificial Sequence
  Description of Artificial Sequence: Synthetic oligonucleotide
cagccggccuccuccucgu

SEQ ID NO: 1575469 - RNA, 19 nt, Artificial Sequence
  Description of Artificial Sequence: Synthetic oligonucleotide
ccucguccccugccaccag

SEQ ID NO: 1575470 - RNA, 19 nt, Artificial Sequence
  Description of Artificial Sequence: Synthetic oligonucleotide
cccauaggauguccucaua

SEQ ID NO: 1575471 - RNA, 19 nt, Artificial Sequence
  Description of Artificial Sequence: Synthetic oligonucleotide
gcuggguaccucgcaggcu

SEQ ID NO: 1575472 - RNA, 19 nt, Artificial Sequence
  Description of Artificial Sequence: Synthetic oligonucleotide
gguaccucgcaggcuccgu

SEQ ID NO: 1575473 - RNA, 19 nt, Artificial Sequence
  Description of Artificial Sequence: Synthetic oligonucleotide
cccuagggacccuuccccu

SEQ ID NO: 1575474 - RNA, 19 nt, Artificial Sequence
  Description of Artificial Sequence: Synthetic oligonucleotide
ggccagcuggucgccgguc

SEQ ID NO: 1575475 - RNA, 19 nt, Artificial Sequence
  Description of Artificial Sequence: Synthetic oligonucleotide
gccagagggccggccuuga

SEQ ID NO: 1575476 - RNA, 19 nt, Artificial Sequence
  Description of Artificial Sequence: Synthetic oligonucleotide
ggcgacgguggcgggcaaa

SEQ ID NO: 1575477 - RNA, 19 nt, Artificial Sequence
  Description of Artificial Sequence: Synthetic oligonucleotide
ccgaaacaugcuguugcau

SEQ ID NO: 1575478 - RNA, 19 nt, Artificial Sequence
  Description of Artificial Sequence: Synthetic oligonucleotide
cccagaugcugggccccuc

SEQ ID NO: 1575479 - RNA, 19 nt, Artificial Sequence
  Description of Artificial Sequence: Synthetic oligonucleotide
ggccggccuugagccccgg

SEQ ID NO: 1575480 - RNA, 19 nt, Artificial Sequence
  Description of Artificial Sequence: Synthetic oligonucleotide
gccaacccuagggacccuu

SEQ ID NO: 1575481 - RNA, 19 nt, Artificial Sequence
  Description of Artificial Sequence: Synthetic oligonucleotide
gcccgacgauaaaggguua

SEQ ID NO: 1575482 - RNA, 19 nt, Artificial Sequence
  Description of Artificial Sequence: Synthetic oligonucleotide
ccgcuagggcccgacgaua

SEQ ID NO: 1575483 - RNA, 19 nt, Artificial Sequence
  Description of Artificial Sequence: Synthetic oligonucleotide
ggaccgcagccugccaguu

SEQ ID NO: 1575484 - RNA, 19 nt, Artificial Sequence
  Description of Artificial Sequence: Synthetic oligonucleotide
cgcgcucugcuaacucagu

SEQ ID NO: 1575485 - RNA, 19 nt, Artificial Sequence
  Description of Artificial Sequence: Synthetic oligonucleotide
gccggccuugagccccggu

SEQ ID NO: 1575486 - RNA, 19 nt, Artificial Sequence
  Description of Artificial Sequence: Synthetic oligonucleotide
ggucgccggucagcugggu

SEQ ID NO: 1575487 - RNA, 19 nt, Artificial Sequence
  Description of Artificial Sequence: Synthetic oligonucleotide
aauaauuacauuaagaauc

SEQ ID NO: 1575488 - RNA, 19 nt, Artificial Sequence
  Description of Artificial Sequence: Synthetic oligonucleotide
aguucuuuuaugcagaacc

SEQ ID NO: 1575489 - RNA, 19 nt, Artificial Sequence
  Description of Artificial Sequence: Synthetic oligonucleotide
uugugaauaaagaagaagg

SEQ ID NO: 1575490 - RNA, 19 nt, Artificial Sequence
  Description of Artificial Sequence: Synthetic oligonucleotide
aaaauaguuacuaagcugg

SEQ ID NO: 1575491 - RNA, 19 nt, Artificial Sequence
  Description of Artificial Sequence: Synthetic oligonucleotide
aaaauuagacauaagcacc

SEQ ID NO: 1575492 - RNA, 19 nt, Artificial Sequence
  Description of Artificial Sequence: Synthetic oligonucleotide
auagagauaaguuagcguc

SEQ ID NO: 1575493 - RNA, 19 nt, Artificial Sequence
  Description of Artificial Sequence: Synthetic oligonucleotide
uuuaccauagccuucagug

SEQ ID NO: 1575494 - RNA, 19 nt, Artificial Sequence
  Description of Artificial Sequence: Synthetic oligonucleotide
uacauuaagaaucagcaca

SEQ ID NO: 1575495 - RNA, 19 nt, Artificial Sequence
  Description of Artificial Sequence: Synthetic oligonucleotide
aauacaauugugaauaaag

SEQ ID NO: 1575496 - RNA, 19 nt, Artificial Sequence
  Description of Artificial Sequence: Synthetic oligonucleotide
aaugucaccgaagauaugg

SEQ ID NO: 1575497 - RNA, 19 nt, Artificial Sequence
  Description of Artificial Sequence: Synthetic oligonucleotide
agcccuauaagguagaagg

SEQ ID NO: 1575498 - RNA, 19 nt, Artificial Sequence
  Description of Artificial Sequence: Synthetic oligonucleotide
aauaagagacaccaaggag

SEQ ID NO: 1575499 - RNA, 19 nt, Artificial Sequence
  Description of Artificial Sequence: Synthetic oligonucleotide
uuucaauuaucuuagaaaa

SEQ ID NO: 1575500 - RNA, 19 nt, Artificial Sequence
  Description of Artificial Sequence: Synthetic oligonucleotide
aauaguuaucagcagacca

SEQ ID NO: 1575501 - RNA, 19 nt, Artificial Sequence
  Description of Artificial Sequence: Synthetic oligonucleotide
aaauuagacauaagcaccc

SEQ ID NO: 1575502 - RNA, 19 nt, Artificial Sequence
  Description of Artificial Sequence: Synthetic oligonucleotide
aaaaugcuaggauaaaugu

SEQ ID NO: 1575503 - RNA, 19 nt, Artificial Sequence
  Description of Artificial Sequence: Synthetic oligonucleotide
aauaccaugagaaaucuug

SEQ ID NO: 1575504 - RNA, 19 nt, Artificial Sequence
  Description of Artificial Sequence: Synthetic oligonucleotide
uagaauuacagcaaugaca

SEQ ID NO: 1575505 - RNA, 19 nt, Artificial Sequence
  Description of Artificial Sequence: Synthetic oligonucleotide
aaucagguuugccaggccc

SEQ ID NO: 1575506 - RNA, 19 nt, Artificial Sequence
  Description of Artificial Sequence: Synthetic oligonucleotide
agggaaauuauguagauga

SEQ ID NO: 1575507 - RNA, 19 nt, Artificial Sequence
  Description of Artificial Sequence: Synthetic oligonucleotide
cucuauagcagcaauacag

SEQ ID NO: 1575508 - RNA, 19 nt, Artificial Sequence
  Description of Artificial Sequence: Synthetic oligonucleotide
ugugucauuaaugugauga

SEQ ID NO: 1575509 - RNA, 19 nt, Artificial Sequence
  Description of Artificial Sequence: Synthetic oligonucleotide
acuaauuuaggccauguca

SEQ ID NO: 1575510 - RNA, 19 nt, Artificial Sequence
  Description of Artificial Sequence: Synthetic oligonucleotide
auaaguuagcgucaccagc

SEQ ID NO: 1575511 - RNA, 19 nt, Artificial Sequence
  Description of Artificial Sequence: Synthetic oligonucleotide
gauaauacaauugugaaua

SEQ ID NO: 1575512 - RNA, 19 nt, Artificial Sequence
  Description of Artificial Sequence: Synthetic oligonucleotide
agaagaaggagauuugaag

SEQ ID NO: 1575513 - RNA, 19 nt, Artificial Sequence
  Description of Artificial Sequence: Synthetic oligonucleotide
auaaaauaguuacuaagcu

SEQ ID NO: 1575514 - RNA, 19 nt, Artificial Sequence
  Description of Artificial Sequence: Synthetic oligonucleotide
agugugauaauacaauugu

SEQ ID NO: 1575515 - RNA, 19 nt, Artificial Sequence
  Description of Artificial Sequence: Synthetic oligonucleotide
gaacacgaaagccaggccg

SEQ ID NO: 1575516 - RNA, 19 nt, Artificial Sequence
  Description of Artificial Sequence: Synthetic oligonucleotide
acaauugugaauaaagaag

SEQ ID NO: 1575517 - RNA, 19 nt, Artificial Sequence
  Description of Artificial Sequence: Synthetic oligonucleotide
uguucaauacaaucuuugg

SEQ ID NO: 1575518 - RNA, 19 nt, Artificial Sequence
  Description of Artificial Sequence: Synthetic oligonucleotide
uguagggaaauuauguaga

SEQ ID NO: 1575519 - RNA, 19 nt, Artificial Sequence
  Description of Artificial Sequence: Synthetic oligonucleotide
ucuggauauucccagguag

SEQ ID NO: 1575520 - RNA, 19 nt, Artificial Sequence
  Description of Artificial Sequence: Synthetic oligonucleotide
auguacauaucauacuccg

SEQ ID NO: 1575521 - RNA, 19 nt, Artificial Sequence
  Description of Artificial Sequence: Synthetic oligonucleotide
uguuuggguagaaacaggc

SEQ ID NO: 1575522 - RNA, 19 nt, Artificial Sequence
  Description of Artificial Sequence: Synthetic oligonucleotide
ugagcaaucagguuugcca

SEQ ID NO: 1575523 - RNA, 19 nt, Artificial Sequence
  Description of Artificial Sequence: Synthetic oligonucleotide
uaaguuagcgucaccagca

SEQ ID NO: 1575524 - RNA, 19 nt, Artificial Sequence
  Description of Artificial Sequence: Synthetic oligonucleotide
ucgaccauugcccaaagga

SEQ ID NO: 1575525 - RNA, 19 nt, Artificial Sequence
  Description of Artificial Sequence: Synthetic oligonucleotide
uauguuuggguagaaacag

SEQ ID NO: 1575526 - RNA, 19 nt, Artificial Sequence
  Description of Artificial Sequence: Synthetic oligonucleotide
aguaccuuaugaucccucc

SEQ ID NO: 1575527 - RNA, 19 nt, Artificial Sequence
  Description of Artificial Sequence: Synthetic oligonucleotide
uccgauguacauaucauac

SEQ ID NO: 1575528 - RNA, 19 nt, Artificial Sequence
  Description of Artificial Sequence: Synthetic oligonucleotide
guacauaucauacuccgug

SEQ ID NO: 1575529 - RNA, 19 nt, Artificial Sequence
  Description of Artificial Sequence: Synthetic oligonucleotide
caagaggagcccuauaagg

SEQ ID NO: 1575530 - RNA, 19 nt, Artificial Sequence
  Description of Artificial Sequence: Synthetic oligonucleotide
agcaauacagugucaaaag

SEQ ID NO: 1575531 - RNA, 19 nt, Artificial Sequence
  Description of Artificial Sequence: Synthetic oligonucleotide
aaaugcuaggauaaauguc

SEQ ID NO: 1575532 - RNA, 19 nt, Artificial Sequence
  Description of Artificial Sequence: Synthetic oligonucleotide
aacuaauuuaggccauguc

SEQ ID NO: 1575533 - RNA, 19 nt, Artificial Sequence
  Description of Artificial Sequence: Synthetic oligonucleotide
cugaacacgagccaaguag

SEQ ID NO: 1575534 - RNA, 19 nt, Artificial Sequence
  Description of Artificial Sequence: Synthetic oligonucleotide
ggagauuugaaguugagca

SEQ ID NO: 1575535 - RNA, 19 nt, Artificial Sequence
  Description of Artificial Sequence: Synthetic oligonucleotide
auauagagauaaguuagcg

SEQ ID NO: 1575536 - RNA, 19 nt, Artificial Sequence
  Description of Artificial Sequence: Synthetic oligonucleotide
caaggaauacuuaguauag

SEQ ID NO: 1575537 - RNA, 19 nt, Artificial Sequence
  Description of Artificial Sequence: Synthetic oligonucleotide
uggauaguggaggugaagg

SEQ ID NO: 1575538 - RNA, 19 nt, Artificial Sequence
  Description of Artificial Sequence: Synthetic oligonucleotide
auacuuaguauagauguuc

SEQ ID NO: 1575539 - RNA, 19 nt, Artificial Sequence
  Description of Artificial Sequence: Synthetic oligonucleotide
aaaauaauguuugcagaca

SEQ ID NO: 1575540 - RNA, 19 nt, Artificial Sequence
  Description of Artificial Sequence: Synthetic oligonucleotide
ugguguagggaaauuaugu

SEQ ID NO: 1575541 - RNA, 19 nt, Artificial Sequence
  Description of Artificial Sequence: Synthetic oligonucleotide
auaagagacaccaaggaga

SEQ ID NO: 1575542 - RNA, 19 nt, Artificial Sequence
  Description of Artificial Sequence: Synthetic oligonucleotide
acauaagcacccaauaaac

SEQ ID NO: 1575543 - RNA, 19 nt, Artificial Sequence
  Description of Artificial Sequence: Synthetic oligonucleotide
ggaguuuauaggcagagcc

SEQ ID NO: 1575544 - RNA, 19 nt, Artificial Sequence
  Description of Artificial Sequence: Synthetic oligonucleotide
ucuauagcagcaauacagu

SEQ ID NO: 1575545 - RNA, 19 nt, Artificial Sequence
  Description of Artificial Sequence: Synthetic oligonucleotide
ugaacacgagccaaguagc

SEQ ID NO: 1575546 - RNA, 19 nt, Artificial Sequence
  Description of Artificial Sequence: Synthetic oligonucleotide
gauaaguuagcgucaccag

SEQ ID NO: 1575547 - RNA, 19 nt, Artificial Sequence
  Description of Artificial Sequence: Synthetic oligonucleotide
aacacgaaagccaggccgc

SEQ ID NO: 1575548 - RNA, 19 nt, Artificial Sequence
  Description of Artificial Sequence: Synthetic oligonucleotide
gcuaggauaaaugucaccg

SEQ ID NO: 1575549 - RNA, 19 nt, Artificial Sequence
  Description of Artificial Sequence: Synthetic oligonucleotide
guguagggaaauuauguag

SEQ ID NO: 1575550 - RNA, 19 nt, Artificial Sequence
  Description of Artificial Sequence: Synthetic oligonucleotide
uccaaaucauaaaauaguu

SEQ ID NO: 1575551 - RNA, 19 nt, Artificial Sequence
  Description of Artificial Sequence: Synthetic oligonucleotide
ugucagacgcucuucuugg

SEQ ID NO: 1575552 - RNA, 19 nt, Artificial Sequence
  Description of Artificial Sequence: Synthetic oligonucleotide
uucaccacucuauagcagc

SEQ ID NO: 1575553 - RNA, 19 nt, Artificial Sequence
  Description of Artificial Sequence: Synthetic oligonucleotide
acuaucauugcuccaauaa

SEQ ID NO: 1575554 - RNA, 19 nt, Artificial Sequence
  Description of Artificial Sequence: Synthetic oligonucleotide
aaccaauauagagauaagu

SEQ ID NO: 1575555 - RNA, 19 nt, Artificial Sequence
  Description of Artificial Sequence: Synthetic oligonucleotide
aggagacucgaccauugcc

SEQ ID NO: 1575556 - RNA, 19 nt, Artificial Sequence
  Description of Artificial Sequence: Synthetic oligonucleotide
agaaguucuguucaauaca

SEQ ID NO: 1575557 - RNA, 19 nt, Artificial Sequence
  Description of Artificial Sequence: Synthetic oligonucleotide
aagaaggagauuugaaguu

SEQ ID NO: 1575558 - RNA, 19 nt, Artificial Sequence
  Description of Artificial Sequence: Synthetic oligonucleotide
cauauaagcaaugcauagg

SEQ ID NO: 1575559 - RNA, 19 nt, Artificial Sequence
  Description of Artificial Sequence: Synthetic oligonucleotide
uuagacauaagcacccaau

SEQ ID NO: 1575560 - RNA, 19 nt, Artificial Sequence
  Description of Artificial Sequence: Synthetic oligonucleotide
guagacagucaucaucugg

SEQ ID NO: 1575561 - RNA, 19 nt, Artificial Sequence
  Description of Artificial Sequence: Synthetic oligonucleotide
gaagaaggagauuugaagu

SEQ ID NO: 1575562 - RNA, 19 nt, Artificial Sequence
  Description of Artificial Sequence: Synthetic oligonucleotide
ucagaauaccaugagaaau

SEQ ID NO: 1575563 - RNA, 19 nt, Artificial Sequence
  Description of Artificial Sequence: Synthetic oligonucleotide
gacauaagcacccaauaaa

SEQ ID NO: 1575564 - RNA, 19 nt, Artificial Sequence
  Description of Artificial Sequence: Synthetic oligonucleotide
ugauaauacaauugugaau

SEQ ID NO: 1575565 - RNA, 19 nt, Artificial Sequence
  Description of Artificial Sequence: Synthetic oligonucleotide
uccaguagugaauccagcc

SEQ ID NO: 1575566 - RNA, 19 nt, Artificial Sequence
  Description of Artificial Sequence: Synthetic oligonucleotide
ugugaugaauaacauuaaa

SEQ ID NO: 1575567 - RNA, 19 nt, Artificial Sequence
  Description of Artificial Sequence: Synthetic oligonucleotide
ucagcagaccaucauuccc

SEQ ID NO: 1575568 - RNA, 19 nt, Artificial Sequence
  Description of Artificial Sequence: Synthetic oligonucleotide
auaauuacauuaagaauca

SEQ ID NO: 1575569 - RNA, 19 nt, Artificial Sequence
  Description of Artificial Sequence: Synthetic oligonucleotide
gagcaaucagguuugccag

SEQ ID NO: 1575570 - RNA, 19 nt, Artificial Sequence
  Description of Artificial Sequence: Synthetic oligonucleotide
ugacacacauuccaguagu

SEQ ID NO: 1575571 - RNA, 19 nt, Artificial Sequence
  Description of Artificial Sequence: Synthetic oligonucleotide
cuguucaauacaaucuuug

SEQ ID NO: 1575572 - RNA, 19 nt, Artificial Sequence
  Description of Artificial Sequence: Synthetic oligonucleotide
cuuuuaugcagaaccguug

SEQ ID NO: 1575573 - RNA, 19 nt, Artificial Sequence
  Description of Artificial Sequence: Synthetic oligonucleotide
caagguucagaauaccaug

SEQ ID NO: 1575574 - RNA, 19 nt, Artificial Sequence
  Description of Artificial Sequence: Synthetic oligonucleotide
aggagauuugaaguugagc

SEQ ID NO: 1575575 - RNA, 19 nt, Artificial Sequence
  Description of Artificial Sequence: Synthetic oligonucleotide
gaaggauauaugaacacga

SEQ ID NO: 1575576 - RNA, 19 nt, Artificial Sequence
  Description of Artificial Sequence: Synthetic oligonucleotide
augagaaaucuugagaaca

SEQ ID NO: 1575577 - RNA, 19 nt, Artificial Sequence
  Description of Artificial Sequence: Synthetic oligonucleotide
agauaaguuagcgucacca

SEQ ID NO: 1575578 - RNA, 19 nt, Artificial Sequence
  Description of Artificial Sequence: Synthetic oligonucleotide
aauaguuacuaagcuggug

SEQ ID NO: 1575579 - RNA, 19 nt, Artificial Sequence
  Description of Artificial Sequence: Synthetic oligonucleotide
acccaauaaacuaucauug

SEQ ID NO: 1575580 - RNA, 19 nt, Artificial Sequence
  Description of Artificial Sequence: Synthetic oligonucleotide
uauagugucugugucauua

SEQ ID NO: 1575581 - RNA, 19 nt, Artificial Sequence
  Description of Artificial Sequence: Synthetic oligonucleotide
ugucuaagaaguucuguuc

SEQ ID NO: 1575582 - RNA, 19 nt, Artificial Sequence
  Description of Artificial Sequence: Synthetic oligonucleotide
ucaguauagugucuguguc

SEQ ID NO: 1575583 - RNA, 19 nt, Artificial Sequence
  Description of Artificial Sequence: Synthetic oligonucleotide
ucuuuuaugcagaaccguu

SEQ ID NO: 1575584 - RNA, 19 nt, Artificial Sequence
  Description of Artificial Sequence: Synthetic oligonucleotide
agcacauggaaaaugcuag

SEQ ID NO: 1575585 - RNA, 19 nt, Artificial Sequence
  Description of Artificial Sequence: Synthetic oligonucleotide
aaucagcacauggaaaaug

SEQ ID NO: 1575586 - RNA, 19 nt, Artificial Sequence
  Description of Artificial Sequence: Synthetic oligonucleotide
uugguguagggaaauuaug

SEQ ID NO: 1575587 - RNA, 19 nt, Artificial Sequence
  Description of Artificial Sequence: Synthetic oligonucleotide
gagaaggauauaugaacac

SEQ ID NO: 1575588 - RNA, 19 nt, Artificial Sequence
  Description of Artificial Sequence: Synthetic oligonucleotide
uuauaggcagagcccagug

SEQ ID NO: 1575589 - RNA, 19 nt, Artificial Sequence
  Description of Artificial Sequence: Synthetic oligonucleotide
auaugaacacgaaagccag

SEQ ID NO: 1575590 - RNA, 19 nt, Artificial Sequence
  Description of Artificial Sequence: Synthetic oligonucleotide
gagugugauaauacaauug

SEQ ID NO: 1575591 - RNA, 19 nt, Artificial Sequence
  Description of Artificial Sequence: Synthetic oligonucleotide
uacauaucauacuccguga

SEQ ID NO: 1575592 - RNA, 19 nt, Artificial Sequence
  Description of Artificial Sequence: Synthetic oligonucleotide
uuggacaaaucacaggguu

SEQ ID NO: 1575593 - RNA, 19 nt, Artificial Sequence
  Description of Artificial Sequence: Synthetic oligonucleotide
caggaaaccaauauagaga

SEQ ID NO: 1575594 - RNA, 19 nt, Artificial Sequence
  Description of Artificial Sequence: Synthetic oligonucleotide
auuauugguucucaguaua

SEQ ID NO: 1575595 - RNA, 19 nt, Artificial Sequence
  Description of Artificial Sequence: Synthetic oligonucleotide
guucuuuuaugcagaaccg

SEQ ID NO: 1575596 - RNA, 19 nt, Artificial Sequence
  Description of Artificial Sequence: Synthetic oligonucleotide
agagauaaguuagcgucac

SEQ ID NO: 1575597 - RNA, 19 nt, Artificial Sequence
  Description of Artificial Sequence: Synthetic oligonucleotide
ucuuggacuuauuccacca

SEQ ID NO: 1575598 - RNA, 19 nt, Artificial Sequence
  Description of Artificial Sequence: Synthetic oligonucleotide
cuauagcagcaauacagug

SEQ ID NO: 1575599 - RNA, 19 nt, Artificial Sequence
  Description of Artificial Sequence: Synthetic oligonucleotide
agagaaggauauaugaaca

SEQ ID NO: 1575600 - RNA, 19 nt, Artificial Sequence
  Description of Artificial Sequence: Synthetic oligonucleotide
ugucaccgaagauauggcc

SEQ ID NO: 1575601 - RNA, 19 nt, Artificial Sequence
  Description of Artificial Sequence: Synthetic oligonucleotide
uuuuaccauagccuucagu

SEQ ID NO: 1575602 - RNA, 19 nt, Artificial Sequence
  Description of Artificial Sequence: Synthetic oligonucleotide
cuauuauugguucucagua

SEQ ID NO: 1575603 - RNA, 19 nt, Artificial Sequence
  Description of Artificial Sequence: Synthetic oligonucleotide
uuguguccgauguacauau

SEQ ID NO: 1575604 - RNA, 19 nt, Artificial Sequence
  Description of Artificial Sequence: Synthetic oligonucleotide
aggaauauccuugcaauga

SEQ ID NO: 1575605 - RNA, 19 nt, Artificial Sequence
  Description of Artificial Sequence: Synthetic oligonucleotide
caugagaaaucuugagaac

SEQ ID NO: 1575606 - RNA, 19 nt, Artificial Sequence
  Description of Artificial Sequence: Synthetic oligonucleotide
ugguucucaguauaguguc

SEQ ID NO: 1575607 - RNA, 19 nt, Artificial Sequence
  Description of Artificial Sequence: Synthetic oligonucleotide
uguacauaucauacuccgu

SEQ ID NO: 1575608 - RNA, 19 nt, Artificial Sequence
  Description of Artificial Sequence: Synthetic oligonucleotide
caaugcauaggucucucac

SEQ ID NO: 1575609 - RNA, 19 nt, Artificial Sequence
  Description of Artificial Sequence: Synthetic oligonucleotide
aaguucuuuuaugcagaac

SEQ ID NO: 1575610 - RNA, 19 nt, Artificial Sequence
  Description of Artificial Sequence: Synthetic oligonucleotide
uaugaucccuccuauguuu

SEQ ID NO: 1575611 - RNA, 19 nt, Artificial Sequence
  Description of Artificial Sequence: Synthetic oligonucleotide
gaguuuauaggcagagccc

SEQ ID NO: 1575612 - RNA, 19 nt, Artificial Sequence
  Description of Artificial Sequence: Synthetic oligonucleotide
agacauaagcacccaauaa

SEQ ID NO: 1575613 - RNA, 19 nt, Artificial Sequence
  Description of Artificial Sequence: Synthetic oligonucleotide
uauaagcaaugcauagguc

SEQ ID NO: 1575614 - RNA, 19 nt, Artificial Sequence
  Description of Artificial Sequence: Synthetic oligonucleotide
ucaccgaagauauggccca

SEQ ID NO: 1575615 - RNA, 19 nt, Artificial Sequence
  Description of Artificial Sequence: Synthetic oligonucleotide
caauaagagacaccaagga

SEQ ID NO: 1575616 - RNA, 19 nt, Artificial Sequence
  Description of Artificial Sequence: Synthetic oligonucleotide
cugucuuggacuuauucca

SEQ ID NO: 1575617 - RNA, 19 nt, Artificial Sequence
  Description of Artificial Sequence: Synthetic oligonucleotide
ugcuauuauugguucucag

SEQ ID NO: 1575618 - RNA, 19 nt, Artificial Sequence
  Description of Artificial Sequence: Synthetic oligonucleotide
accaucauucccuugguuu

SEQ ID NO: 1575619 - RNA, 19 nt, Artificial Sequence
  Description of Artificial Sequence: Synthetic oligonucleotide
caguagugaauccagccug

SEQ ID NO: 1575620 - RNA, 19 nt, Artificial Sequence
  Description of Artificial Sequence: Synthetic oligonucleotide
uaccauagccuucagugua

SEQ ID NO: 1575621 - RNA, 19 nt, Artificial Sequence
  Description of Artificial Sequence: Synthetic oligonucleotide
agguaguuguguccgaugu

SEQ ID NO: 1575622 - RNA, 19 nt, Artificial Sequence
  Description of Artificial Sequence: Synthetic oligonucleotide
uugugugucauuguagaaa

SEQ ID NO: 1575623 - RNA, 19 nt, Artificial Sequence
  Description of Artificial Sequence: Synthetic oligonucleotide
agagugugauaauacaauu

SEQ ID NO: 1575624 - RNA, 19 nt, Artificial Sequence
  Description of Artificial Sequence: Synthetic oligonucleotide
agaugagagaaggauauau

SEQ ID NO: 1575625 - RNA, 19 nt, Artificial Sequence
  Description of Artificial Sequence: Synthetic oligonucleotide
cuugagaacacaguuuuca

SEQ ID NO: 1575626 - RNA, 19 nt, Artificial Sequence
  Description of Artificial Sequence: Synthetic oligonucleotide
cagggugucacugcuaggg

SEQ ID NO: 1575627 - RNA, 19 nt, Artificial Sequence
  Description of Artificial Sequence: Synthetic oligonucleotide
uuaccauagccuucagugu

SEQ ID NO: 1575628 - RNA, 19 nt, Artificial Sequence
  Description of Artificial Sequence: Synthetic oligonucleotide
cuucaguguaacucuggag

SEQ ID NO: 1575629 - RNA, 19 nt, Artificial Sequence
  Description of Artificial Sequence: Synthetic oligonucleotide
auuauguagaugagagaag

SEQ ID NO: 1575630 - RNA, 19 nt, Artificial Sequence
  Description of Artificial Sequence: Synthetic oligonucleotide
ugaacacgaaagccaggcc

SEQ ID NO: 1575631 - RNA, 19 nt, Artificial Sequence
  Description of Artificial Sequence: Synthetic oligonucleotide
guaguuguguccgauguac

SEQ ID NO: 1575632 - RNA, 19 nt, Artificial Sequence
  Description of Artificial Sequence: Synthetic oligonucleotide
cacuuggacaaaucacagg

SEQ ID NO: 1575633 - RNA, 19 nt, Artificial Sequence
  Description of Artificial Sequence: Synthetic oligonucleotide
agcaggaauauccuugcaa

SEQ ID NO: 1575634 - RNA, 19 nt, Artificial Sequence
  Description of Artificial Sequence: Synthetic oligonucleotide
auccagccuguuuuaugcc

SEQ ID NO: 1575635 - RNA, 19 nt, Artificial Sequence
  Description of Artificial Sequence: Synthetic oligonucleotide
aaguugagcaguggcaaga

SEQ ID NO: 1575636 - RNA, 19 nt, Artificial Sequence
  Description of Artificial Sequence: Synthetic oligonucleotide
agguucagaauaccaugag

SEQ ID NO: 1575637 - RNA, 19 nt, Artificial Sequence
  Description of Artificial Sequence: Synthetic oligonucleotide
uguccgauguacauaucau

SEQ ID NO: 1575638 - RNA, 19 nt, Artificial Sequence
  Description of Artificial Sequence: Synthetic oligonucleotide
augcauaggucucucacau

SEQ ID NO: 1575639 - RNA, 19 nt, Artificial Sequence
  Description of Artificial Sequence: Synthetic oligonucleotide
gucaccgaagauauggccc

SEQ ID NO: 1575640 - RNA, 19 nt, Artificial Sequence
  Description of Artificial Sequence: Synthetic oligonucleotide
uaccuuaugaucccuccua

SEQ ID NO: 1575641 - RNA, 19 nt, Artificial Sequence
  Description of Artificial Sequence: Synthetic oligonucleotide
aauuagacauaagcaccca

SEQ ID NO: 1575642 - RNA, 19 nt, Artificial Sequence
  Description of Artificial Sequence: Synthetic oligonucleotide
caucaugguauuccaaauc

SEQ ID NO: 1575643 - RNA, 19 nt, Artificial Sequence
  Description of Artificial Sequence: Synthetic oligonucleotide
guagccuaggaguggguag

SEQ ID NO: 1575644 - RNA, 19 nt, Artificial Sequence
  Description of Artificial Sequence: Synthetic oligonucleotide
aaggaauacuuaguauaga

SEQ ID NO: 1575645 - RNA, 19 nt, Artificial Sequence
  Description of Artificial Sequence: Synthetic oligonucleotide
uucuuuuaugcagaaccgu

SEQ ID NO: 1575646 - RNA, 19 nt, Artificial Sequence
  Description of Artificial Sequence: Synthetic oligonucleotide
gacuugugugucauuguag

SEQ ID NO: 1575647 - RNA, 19 nt, Artificial Sequence
  Description of Artificial Sequence: Synthetic oligonucleotide
aguauagugucugugucau

SEQ ID NO: 1575648 - RNA, 19 nt, Artificial Sequence
  Description of Artificial Sequence: Synthetic oligonucleotide
auacaaucuuuggauagug

SEQ ID NO: 1575649 - RNA, 19 nt, Artificial Sequence
  Description of Artificial Sequence: Synthetic oligonucleotide
cacgaugacacacauucca

SEQ ID NO: 1575650 - RNA, 19 nt, Artificial Sequence
  Description of Artificial Sequence: Synthetic oligonucleotide
ugcuaggauaaaugucacc

SEQ ID NO: 1575651 - RNA, 19 nt, Artificial Sequence
  Description of Artificial Sequence: Synthetic oligonucleotide
gauauggcccaagagcuga

SEQ ID NO: 1575652 - RNA, 19 nt, Artificial Sequence
  Description of Artificial Sequence: Synthetic oligonucleotide
cuuuggauaguggagguga

SEQ ID NO: 1575653 - RNA, 19 nt, Artificial Sequence
  Description of Artificial Sequence: Synthetic oligonucleotide
uuccaguagugaauccagc

SEQ ID NO: 1575654 - RNA, 19 nt, Artificial Sequence
  Description of Artificial Sequence: Synthetic oligonucleotide
caaguagccuaggaguggg

SEQ ID NO: 1575655 - RNA, 19 nt, Artificial Sequence
  Description of Artificial Sequence: Synthetic oligonucleotide
cagcacuuggacaaaucac

SEQ ID NO: 1575656 - RNA, 19 nt, Artificial Sequence
  Description of Artificial Sequence: Synthetic oligonucleotide
auaauacaauugugaauaa

SEQ ID NO: 1575657 - RNA, 19 nt, Artificial Sequence
  Description of Artificial Sequence: Synthetic oligonucleotide
ucaguguaacucuggaguu

SEQ ID NO: 1575658 - RNA, 19 nt, Artificial Sequence
  Description of Artificial Sequence: Synthetic oligonucleotide
uagggaaauuauguagaug

SEQ ID NO: 1575659 - RNA, 19 nt, Artificial Sequence
  Description of Artificial Sequence: Synthetic oligonucleotide
cccgaguaccuuaugaucc

SEQ ID NO: 1575660 - RNA, 19 nt, Artificial Sequence
  Description of Artificial Sequence: Synthetic oligonucleotide
auaguuaucagcagaccau

SEQ ID NO: 1575661 - RNA, 19 nt, Artificial Sequence
  Description of Artificial Sequence: Synthetic oligonucleotide
aaauaguuacuaagcuggu

SEQ ID NO: 1575662 - RNA, 19 nt, Artificial Sequence
  Description of Artificial Sequence: Synthetic oligonucleotide
acauuaagaaucagcacau

SEQ ID NO: 1575663 - RNA, 19 nt, Artificial Sequence
  Description of Artificial Sequence: Synthetic oligonucleotide
guguccgauguacauauca

SEQ ID NO: 1575664 - RNA, 19 nt, Artificial Sequence
  Description of Artificial Sequence: Synthetic oligonucleotide
aguuguguccgauguacau

SEQ ID NO: 1575665 - RNA, 19 nt, Artificial Sequence
  Description of Artificial Sequence: Synthetic oligonucleotide
acauaucauacuccgugau

SEQ ID NO: 1575666 - RNA, 19 nt, Artificial Sequence
  Description of Artificial Sequence: Synthetic oligonucleotide
auaagguagaagggcacug

SEQ ID NO: 1575667 - RNA, 19 nt, Artificial Sequence
  Description of Artificial Sequence: Synthetic oligonucleotide
aacacgagccaaguagccu

SEQ ID NO: 1575668 - RNA, 19 nt, Artificial Sequence
  Description of Artificial Sequence: Synthetic oligonucleotide
caggaauauccuugcaaug

SEQ ID NO: 1575669 - RNA, 19 nt, Artificial Sequence
  Description of Artificial Sequence: Synthetic oligonucleotide
aggcccaagaugaugauga

SEQ ID NO: 1575670 - RNA, 19 nt, Artificial Sequence
  Description of Artificial Sequence: Synthetic oligonucleotide
aggucucucacauuauuuu

SEQ ID NO: 1575671 - RNA, 19 nt, Artificial Sequence
  Description of Artificial Sequence: Synthetic oligonucleotide
gauaguggaggugaaggaa

SEQ ID NO: 1575672 - RNA, 19 nt, Artificial Sequence
  Description of Artificial Sequence: Synthetic oligonucleotide
guucucaguauagugucug

SEQ ID NO: 1575673 - RNA, 19 nt, Artificial Sequence
  Description of Artificial Sequence: Synthetic oligonucleotide
uaguauagauguucccauc

SEQ ID NO: 1575674 - RNA, 19 nt, Artificial Sequence
  Description of Artificial Sequence: Synthetic oligonucleotide
ucccgaguaccuuaugauc

SEQ ID NO: 1575675 - RNA, 19 nt, Artificial Sequence
  Description of Artificial Sequence: Synthetic oligonucleotide
ggagacucgaccauugccc

SEQ ID NO: 1575676 - RNA, 19 nt, Artificial Sequence
  Description of Artificial Sequence: Synthetic oligonucleotide
auacuccgugauuucacca

SEQ ID NO: 1575677 - RNA, 19 nt, Artificial Sequence
  Description of Artificial Sequence: Synthetic oligonucleotide
uccuugcaaugaaggacag

SEQ ID NO: 1575678 - RNA, 19 nt, Artificial Sequence
  Description of Artificial Sequence: Synthetic oligonucleotide
aaggagauuugaaguugag

SEQ ID NO: 1575679 - RNA, 19 nt, Artificial Sequence
  Description of Artificial Sequence: Synthetic oligonucleotide
uaguuaucagcagaccauc

SEQ ID NO: 1575680 - RNA, 19 nt, Artificial Sequence
  Description of Artificial Sequence: Synthetic oligonucleotide
uccgugauuucaccacucu

SEQ ID NO: 1575681 - RNA, 19 nt, Artificial Sequence
  Description of Artificial Sequence: Synthetic oligonucleotide
gugugauaauacaauugug

SEQ ID NO: 1575682 - RNA, 19 nt, Artificial Sequence
  Description of Artificial Sequence: Synthetic oligonucleotide
gguuucaauuaucuuagaa

SEQ ID NO: 1575683 - RNA, 19 nt, Artificial Sequence
  Description of Artificial Sequence: Synthetic oligonucleotide
ggaaauuauguagaugaga

SEQ ID NO: 1575684 - RNA, 19 nt, Artificial Sequence
  Description of Artificial Sequence: Synthetic oligonucleotide
aggagaaaaggagacucga

SEQ ID NO: 1575685 - RNA, 19 nt, Artificial Sequence
  Description of Artificial Sequence: Synthetic oligonucleotide
acacgagccaaguagccua

SEQ ID NO: 1575686 - RNA, 19 nt, Artificial Sequence
  Description of Artificial Sequence: Synthetic oligonucleotide
gaacacgagccaaguagcc

SEQ ID NO: 1575687 - RNA, 19 nt, Artificial Sequence
  Description of Artificial Sequence: Synthetic oligonucleotide
uuggauaguggaggugaag

SEQ ID NO: 1575688 - RNA, 19 nt, Artificial Sequence
  Description of Artificial Sequence: Synthetic oligonucleotide
gagauaaguuagcgucacc

SEQ ID NO: 1575689 - RNA, 19 nt, Artificial Sequence
  Description of Artificial Sequence: Synthetic oligonucleotide
auaggucucucacauuauu

SEQ ID NO: 1575690 - RNA, 19 nt, Artificial Sequence
  Description of Artificial Sequence: Synthetic oligonucleotide
ucuuuggauaguggaggug

SEQ ID NO: 1575691 - RNA, 19 nt, Artificial Sequence
  Description of Artificial Sequence: Synthetic oligonucleotide
aaguuagcgucaccagcau

SEQ ID NO: 1575692 - RNA, 19 nt, Artificial Sequence
  Description of Artificial Sequence: Synthetic oligonucleotide
cccaauaaacuaucauugc

SEQ ID NO: 1575693 - RNA, 19 nt, Artificial Sequence
  Description of Artificial Sequence: Synthetic oligonucleotide
cuuggacuuauuccaccac

SEQ ID NO: 1575694 - RNA, 19 nt, Artificial Sequence
  Description of Artificial Sequence: Synthetic oligonucleotide
cuaggauaaaugucaccga

SEQ ID NO: 1575695 - RNA, 19 nt, Artificial Sequence
  Description of Artificial Sequence: Synthetic oligonucleotide
augcuaggauaaaugucac

SEQ ID NO: 1575696 - RNA, 19 nt, Artificial Sequence
  Description of Artificial Sequence: Synthetic oligonucleotide
uucucaguauagugucugu

SEQ ID NO: 1575697 - RNA, 19 nt, Artificial Sequence
  Description of Artificial Sequence: Synthetic oligonucleotide
auaccaugagaaaucuuga

SEQ ID NO: 1575698 - RNA, 19 nt, Artificial Sequence
  Description of Artificial Sequence: Synthetic oligonucleotide
aaaucacaggguugcuauu

SEQ ID NO: 1575699 - RNA, 19 nt, Artificial Sequence
  Description of Artificial Sequence: Synthetic oligonucleotide
ucaucuggaacagcaggaa

SEQ ID NO: 1575700 - RNA, 19 nt, Artificial Sequence
  Description of Artificial Sequence: Synthetic oligonucleotide
gagacucgaccauugccca

SEQ ID NO: 1575701 - RNA, 19 nt, Artificial Sequence
  Description of Artificial Sequence: Synthetic oligonucleotide
acuccgugauuucaccacu

SEQ ID NO: 1575702 - RNA, 19 nt, Artificial Sequence
  Description of Artificial Sequence: Synthetic oligonucleotide
agcaaugcauaggucucuc

SEQ ID NO: 1575703 - RNA, 19 nt, Artificial Sequence
  Description of Artificial Sequence: Synthetic oligonucleotide
uggaguuuauaggcagagc

SEQ ID NO: 1575704 - RNA, 19 nt, Artificial Sequence
  Description of Artificial Sequence: Synthetic oligonucleotide
gcaagaggagcccuauaag

SEQ ID NO: 1575705 - RNA, 19 nt, Artificial Sequence
  Description of Artificial Sequence: Synthetic oligonucleotide
uagcgucaccagcauauaa

SEQ ID NO: 1575706 - RNA, 19 nt, Artificial Sequence
  Description of Artificial Sequence: Synthetic oligonucleotide
accacucuauagcagcaau

SEQ ID NO: 1575707 - RNA, 19 nt, Artificial Sequence
  Description of Artificial Sequence: Synthetic oligonucleotide
gcacauggaaaaugcuagg

SEQ ID NO: 1575708 - RNA, 19 nt, Artificial Sequence
  Description of Artificial Sequence: Synthetic oligonucleotide
gucaggauggccaccacuc

SEQ ID NO: 1575709 - RNA, 19 nt, Artificial Sequence
  Description of Artificial Sequence: Synthetic oligonucleotide
uagugaauccagccuguuu

SEQ ID NO: 1575710 - RNA, 19 nt, Artificial Sequence
  Description of Artificial Sequence: Synthetic oligonucleotide
accuuaugaucccuccuau

SEQ ID NO: 1575711 - RNA, 19 nt, Artificial Sequence
  Description of Artificial Sequence: Synthetic oligonucleotide
gcgucaccagcauauaagc

SEQ ID NO: 1575712 - RNA, 19 nt, Artificial Sequence
  Description of Artificial Sequence: Synthetic oligonucleotide
ccaaggaauacuuaguaua

SEQ ID NO: 1575713 - RNA, 19 nt, Artificial Sequence
  Description of Artificial Sequence: Synthetic oligonucleotide
aguguaacucuggaguuua

SEQ ID NO: 1575714 - RNA, 19 nt, Artificial Sequence
  Description of Artificial Sequence: Synthetic oligonucleotide
agagcugaacacgagccaa

SEQ ID NO: 1575715 - RNA, 19 nt, Artificial Sequence
  Description of Artificial Sequence: Synthetic oligonucleotide
gcauaggucucucacauua

SEQ ID NO: 1575716 - RNA, 19 nt, Artificial Sequence
  Description of Artificial Sequence: Synthetic oligonucleotide
ccaagagcugaacacgagc

SEQ ID NO: 1575717 - RNA, 19 nt, Artificial Sequence
  Description of Artificial Sequence: Synthetic oligonucleotide
aaggcccaucagcacgaug

SEQ ID NO: 1575718 - RNA, 19 nt, Artificial Sequence
  Description of Artificial Sequence: Synthetic oligonucleotide
cucaguauagugucugugu

SEQ ID NO: 1575719 - RNA, 19 nt, Artificial Sequence
  Description of Artificial Sequence: Synthetic oligonucleotide
uggauauucccagguaguu

SEQ ID NO: 1575720 - RNA, 19 nt, Artificial Sequence
  Description of Artificial Sequence: Synthetic oligonucleotide
ugguuucaauuaucuuaga

SEQ ID NO: 1575721 - RNA, 19 nt, Artificial Sequence
  Description of Artificial Sequence: Synthetic oligonucleotide
aguagugaauccagccugu

SEQ ID NO: 1575722 - RNA, 19 nt, Artificial Sequence
  Description of Artificial Sequence: Synthetic oligonucleotide
ggcaagaggagcccuauaa

SEQ ID NO: 1575723 - RNA, 19 nt, Artificial Sequence
  Description of Artificial Sequence: Synthetic oligonucleotide
guuagcgucaccagcauau

SEQ ID NO: 1575724 - RNA, 19 nt, Artificial Sequence
  Description of Artificial Sequence: Synthetic oligonucleotide
cagguaguuguguccgaug

SEQ ID NO: 1575725 - RNA, 19 nt, Artificial Sequence
  Description of Artificial Sequence: Synthetic oligonucleotide
cacccaauaaacuaucauu

SEQ ID NO: 1575726 - RNA, 19 nt, Artificial Sequence
  Description of Artificial Sequence: Synthetic oligonucleotide
aucuggauauucccaggua

SEQ ID NO: 1575727 - RNA, 19 nt, Artificial Sequence
  Description of Artificial Sequence: Synthetic oligonucleotide
guuuuaugccccaaggaau

SEQ ID NO: 1575728 - RNA, 19 nt, Artificial Sequence
  Description of Artificial Sequence: Synthetic oligonucleotide
gguguagggaaauuaugua

SEQ ID NO: 1575729 - RNA, 19 nt, Artificial Sequence
  Description of Artificial Sequence: Synthetic oligonucleotide
ucccaucaugguauuccaa

SEQ ID NO: 1575730 - RNA, 19 nt, Artificial Sequence
  Description of Artificial Sequence: Synthetic oligonucleotide
cacgagccaaguagccuag

SEQ ID NO: 1575731 - RNA, 19 nt, Artificial Sequence
  Description of Artificial Sequence: Synthetic oligonucleotide
cucgaccauugcccaaagg

SEQ ID NO: 1575732 - RNA, 19 nt, Artificial Sequence
  Description of Artificial Sequence: Synthetic oligonucleotide
acaaaucacaggguugcua

SEQ ID NO: 1575733 - RNA, 19 nt, Artificial Sequence
  Description of Artificial Sequence: Synthetic oligonucleotide
caaucagguuugccaggcc

SEQ ID NO: 1575734 - RNA, 19 nt, Artificial Sequence
  Description of Artificial Sequence: Synthetic oligonucleotide
cuugugugucauuguagaa

SEQ ID NO: 1575735 - RNA, 19 nt, Artificial Sequence
  Description of Artificial Sequence: Synthetic oligonucleotide
gcuauuauugguucucagu

SEQ ID NO: 1575736 - RNA, 19 nt, Artificial Sequence
  Description of Artificial Sequence: Synthetic oligonucleotide
ugcagacaucuggauauuc

SEQ ID NO: 1575737 - RNA, 19 nt, Artificial Sequence
  Description of Artificial Sequence: Synthetic oligonucleotide
uccuauguuuggguagaaa

SEQ ID NO: 1575738 - RNA, 19 nt, Artificial Sequence
  Description of Artificial Sequence: Synthetic oligonucleotide
uucuugguucuuguuguuu

SEQ ID NO: 1575739 - RNA, 19 nt, Artificial Sequence
  Description of Artificial Sequence: Synthetic oligonucleotide
acucgaccauugcccaaag

SEQ ID NO: 1575740 - RNA, 19 nt, Artificial Sequence
  Description of Artificial Sequence: Synthetic oligonucleotide
agauauggcccaagagcug

SEQ ID NO: 1575741 - RNA, 19 nt, Artificial Sequence
  Description of Artificial Sequence: Synthetic oligonucleotide
gcacuuggacaaaucacag

SEQ ID NO: 1575742 - RNA, 19 nt, Artificial Sequence
  Description of Artificial Sequence: Synthetic oligonucleotide
augugaugaauaacauuaa

SEQ ID NO: 1575743 - RNA, 19 nt, Artificial Sequence
  Description of Artificial Sequence: Synthetic oligonucleotide
cuccgugauuucaccacuc

SEQ ID NO: 1575744 - RNA, 19 nt, Artificial Sequence
  Description of Artificial Sequence: Synthetic oligonucleotide
guagggaaauuauguagau

SEQ ID NO: 1575745 - RNA, 19 nt, Artificial Sequence
  Description of Artificial Sequence: Synthetic oligonucleotide
ucccuccuauguuugggua

SEQ ID NO: 1575746 - RNA, 19 nt, Artificial Sequence
  Description of Artificial Sequence: Synthetic oligonucleotide
gcuagggaaguugucuaag

SEQ ID NO: 1575747 - RNA, 19 nt, Artificial Sequence
  Description of Artificial Sequence: Synthetic oligonucleotide
gcaaucagguuugccaggc

SEQ ID NO: 1575748 - RNA, 19 nt, Artificial Sequence
  Description of Artificial Sequence: Synthetic oligonucleotide
aguagccuaggagugggua

SEQ ID NO: 1575749 - RNA, 19 nt, Artificial Sequence
  Description of Artificial Sequence: Synthetic oligonucleotide
aguuagcgucaccagcaua

SEQ ID NO: 1575750 - RNA, 19 nt, Artificial Sequence
  Description of Artificial Sequence: Synthetic oligonucleotide
gcccuauaagguagaaggg

SEQ ID NO: 1575751 - RNA, 19 nt, Artificial Sequence
  Description of Artificial Sequence: Synthetic oligonucleotide
agcugaacacgagccaagu

SEQ ID NO: 1575752 - RNA, 19 nt, Artificial Sequence
  Description of Artificial Sequence: Synthetic oligonucleotide
uauggcccaagagcugaac

SEQ ID NO: 1575753 - RNA, 19 nt, Artificial Sequence
  Description of Artificial Sequence: Synthetic oligonucleotide
gaguaccuuaugaucccuc

SEQ ID NO: 1575754 - RNA, 19 nt, Artificial Sequence
  Description of Artificial Sequence: Synthetic oligonucleotide
gacgcucuucuugguguag

SEQ ID NO: 1575755 - RNA, 19 nt, Artificial Sequence
  Description of Artificial Sequence: Synthetic oligonucleotide
gccaaguagccuaggagug

SEQ ID NO: 1575756 - RNA, 19 nt, Artificial Sequence
  Description of Artificial Sequence: Synthetic oligonucleotide
ggguugcuauuauugguuc

SEQ ID NO: 1575757 - RNA, 19 nt, Artificial Sequence
  Description of Artificial Sequence: Synthetic oligonucleotide
cuggauauucccagguagu

SEQ ID NO: 1575758 - RNA, 19 nt, Artificial Sequence
  Description of Artificial Sequence: Synthetic oligonucleotide
gacucgaccauugcccaaa

SEQ ID NO: 1575759 - RNA, 19 nt, Artificial Sequence
  Description of Artificial Sequence: Synthetic oligonucleotide
accgaagauauggcccaag

SEQ ID NO: 1575760 - RNA, 19 nt, Artificial Sequence
  Description of Artificial Sequence: Synthetic oligonucleotide
uguguccgauguacauauc

SEQ ID NO: 1575761 - RNA, 19 nt, Artificial Sequence
  Description of Artificial Sequence: Synthetic oligonucleotide
guauagauguucccaucau

SEQ ID NO: 1575762 - RNA, 19 nt, Artificial Sequence
  Description of Artificial Sequence: Synthetic oligonucleotide
ccgaguaccuuaugauccc

SEQ ID NO: 1575763 - RNA, 19 nt, Artificial Sequence
  Description of Artificial Sequence: Synthetic oligonucleotide
ccaccacuuuucaaacugc

SEQ ID NO: 1575764 - RNA, 19 nt, Artificial Sequence
  Description of Artificial Sequence: Synthetic oligonucleotide
cuuggacaaaucacagggu

SEQ ID NO: 1575765 - RNA, 19 nt, Artificial Sequence
  Description of Artificial Sequence: Synthetic oligonucleotide
guuguguccgauguacaua

SEQ ID NO: 1575766 - RNA, 19 nt, Artificial Sequence
  Description of Artificial Sequence: Synthetic oligonucleotide
cccuccuauguuuggguag

SEQ ID NO: 1575767 - RNA, 19 nt, Artificial Sequence
  Description of Artificial Sequence: Synthetic oligonucleotide
uugucaggauggccaccac

SEQ ID NO: 1575768 - RNA, 19 nt, Artificial Sequence
  Description of Artificial Sequence: Synthetic oligonucleotide
agcagaccaucauucccuu

SEQ ID NO: 1575769 - RNA, 19 nt, Artificial Sequence
  Description of Artificial Sequence: Synthetic oligonucleotide
ugcucccgaguaccuuaug

SEQ ID NO: 1575770 - RNA, 19 nt, Artificial Sequence
  Description of Artificial Sequence: Synthetic oligonucleotide
ugcauaggucucucacauu

SEQ ID NO: 1575771 - RNA, 19 nt, Artificial Sequence
  Description of Artificial Sequence: Synthetic oligonucleotide
ccuuaugaucccuccuaug

SEQ ID NO: 1575772 - RNA, 19 nt, Artificial Sequence
  Description of Artificial Sequence: Synthetic oligonucleotide
cagacgcucuucuuggugu

SEQ ID NO: 1575773 - RNA, 19 nt, Artificial Sequence
  Description of Artificial Sequence: Synthetic oligonucleotide
uuagcgucaccagcauaua

SEQ ID NO: 1575774 - RNA, 19 nt, Artificial Sequence
  Description of Artificial Sequence: Synthetic oligonucleotide
guaccuuaugaucccuccu

SEQ ID NO: 1575775 - RNA, 19 nt, Artificial Sequence
  Description of Artificial Sequence: Synthetic oligonucleotide
gaguggguagacagucauc

SEQ ID NO: 1575776 - RNA, 19 nt, Artificial Sequence
  Description of Artificial Sequence: Synthetic oligonucleotide
cacuuagaauuacagcaau

SEQ ID NO: 1575777 - RNA, 19 nt, Artificial Sequence
  Description of Artificial Sequence: Synthetic oligonucleotide
agacucgaccauugcccaa

SEQ ID NO: 1575778 - RNA, 19 nt, Artificial Sequence
  Description of Artificial Sequence: Synthetic oligonucleotide
aaguagccuaggagugggu

SEQ ID NO: 1575779 - RNA, 19 nt, Artificial Sequence
  Description of Artificial Sequence: Synthetic oligonucleotide
cauaucauacuccgugauu

SEQ ID NO: 1575780 - RNA, 19 nt, Artificial Sequence
  Description of Artificial Sequence: Synthetic oligonucleotide
uggcaagaggagcccuaua

SEQ ID NO: 1575781 - RNA, 19 nt, Artificial Sequence
  Description of Artificial Sequence: Synthetic oligonucleotide
acgagccaaguagccuagg

SEQ ID NO: 1575782 - RNA, 19 nt, Artificial Sequence
  Description of Artificial Sequence: Synthetic oligonucleotide
gguugcuauuauugguucu

SEQ ID NO: 1575783 - RNA, 19 nt, Artificial Sequence
  Description of Artificial Sequence: Synthetic oligonucleotide
cucccgaguaccuuaugau

SEQ ID NO: 1575784 - RNA, 19 nt, Artificial Sequence
  Description of Artificial Sequence: Synthetic oligonucleotide
gcaaugcauaggucucuca

SEQ ID NO: 1575785 - RNA, 19 nt, Artificial Sequence
  Description of Artificial Sequence: Synthetic oligonucleotide
uugcagacaucuggauauu

SEQ ID NO: 1575786 - RNA, 19 nt, Artificial Sequence
  Description of Artificial Sequence: Synthetic oligonucleotide
gguaguuguguccgaugua

SEQ ID NO: 1575787 - RNA, 19 nt, Artificial Sequence
  Description of Artificial Sequence: Synthetic oligonucleotide
aggagcccuauaagguaga

SEQ ID NO: 1575788 - RNA, 19 nt, Artificial Sequence
  Description of Artificial Sequence: Synthetic oligonucleotide
ccaagguucagaauaccau

SEQ ID NO: 1575789 - RNA, 19 nt, Artificial Sequence
  Description of Artificial Sequence: Synthetic oligonucleotide
cauaggucucucacauuau

SEQ ID NO: 1575790 - RNA, 19 nt, Artificial Sequence
  Description of Artificial Sequence: Synthetic oligonucleotide
cgugauuucaccacucuau

SEQ ID NO: 1575791 - RNA, 19 nt, Artificial Sequence
  Description of Artificial Sequence: Synthetic oligonucleotide
ccgaagauauggcccaaga

SEQ ID NO: 1575792 - RNA, 19 nt, Artificial Sequence
  Description of Artificial Sequence: Synthetic oligonucleotide
gcacgaugacacacauucc

SEQ ID NO: 1575793 - RNA, 19 nt, Artificial Sequence
  Description of Artificial Sequence: Synthetic oligonucleotide
ccaguagugaauccagccu

SEQ ID NO: 1575794 - RNA, 19 nt, Artificial Sequence
  Description of Artificial Sequence: Synthetic oligonucleotide
gcacccaauaaacuaucau

SEQ ID NO: 1575795 - RNA, 19 nt, Artificial Sequence
  Description of Artificial Sequence: Synthetic oligonucleotide
ccccaaggaauacuuagua

SEQ ID NO: 1575796 - RNA, 19 nt, Artificial Sequence
  Description of Artificial Sequence: Synthetic oligonucleotide
auauggcccaagagcugaa

SEQ ID NO: 1575797 - RNA, 19 nt, Artificial Sequence
  Description of Artificial Sequence: Synthetic oligonucleotide
gcugaacacgagccaagua

SEQ ID NO: 1575798 - RNA, 19 nt, Artificial Sequence
  Description of Artificial Sequence: Synthetic oligonucleotide
gucagacgcucuucuuggu

SEQ ID NO: 1575799 - RNA, 19 nt, Artificial Sequence
  Description of Artificial Sequence: Synthetic oligonucleotide
ccgauguacauaucauacu

SEQ ID NO: 1575800 - RNA, 19 nt, Artificial Sequence
  Description of Artificial Sequence: Synthetic oligonucleotide
ggacuuauuccaccacuuu

SEQ ID NO: 1575801 - RNA, 19 nt, Artificial Sequence
  Description of Artificial Sequence: Synthetic oligonucleotide
ccuccuauguuuggguaga

SEQ ID NO: 1575802 - RNA, 19 nt, Artificial Sequence
  Description of Artificial Sequence: Synthetic oligonucleotide
aggccgcaugcugcucccg

SEQ ID NO: 1575803 - RNA, 19 nt, Artificial Sequence
  Description of Artificial Sequence: Synthetic oligonucleotide
caccacucuauagcagcaa

SEQ ID NO: 1575804 - RNA, 19 nt, Artificial Sequence
  Description of Artificial Sequence: Synthetic oligonucleotide
guggguagacagucaucau

SEQ ID NO: 1575805 - RNA, 19 nt, Artificial Sequence
  Description of Artificial Sequence: Synthetic oligonucleotide
gguucucaguauagugucu

SEQ ID NO: 1575806 - RNA, 19 nt, Artificial Sequence
  Description of Artificial Sequence: Synthetic oligonucleotide
ggccgcaugcugcucccga

SEQ ID NO: 1575807 - RNA, 19 nt, Artificial Sequence
  Description of Artificial Sequence: Synthetic oligonucleotide
ggcccaagaugaugaugaa

SEQ ID NO: 1575808 - RNA, 19 nt, Artificial Sequence
  Description of Artificial Sequence: Synthetic oligonucleotide
ggagcccuauaagguagaa

SEQ ID NO: 1575809 - RNA, 19 nt, Artificial Sequence
  Description of Artificial Sequence: Synthetic oligonucleotide
ccaugucagacgcucuucu

SEQ ID NO: 1575810 - RNA, 19 nt, Artificial Sequence
  Description of Artificial Sequence: Synthetic oligonucleotide
guauagugucugugucauu

SEQ ID NO: 1575811 - RNA, 19 nt, Artificial Sequence
  Description of Artificial Sequence: Synthetic oligonucleotide
caguguaacucuggaguuu

SEQ ID NO: 1575812 - RNA, 19 nt, Artificial Sequence
  Description of Artificial Sequence: Synthetic oligonucleotide
guagugaauccagccuguu

SEQ ID NO: 1575813 - RNA, 19 nt, Artificial Sequence
  Description of Artificial Sequence: Synthetic oligonucleotide
cgaugacacacauuccagu

SEQ ID NO: 1575814 - RNA, 19 nt, Artificial Sequence
  Description of Artificial Sequence: Synthetic oligonucleotide
cccaguggacuguacacau

SEQ ID NO: 1575815 - RNA, 19 nt, Artificial Sequence
  Description of Artificial Sequence: Synthetic oligonucleotide
gccccaaggaauacuuagu

SEQ ID NO: 1575816 - RNA, 19 nt, Artificial Sequence
  Description of Artificial Sequence: Synthetic oligonucleotide
cugcucccgaguaccuuau

SEQ ID NO: 1575817 - RNA, 19 nt, Artificial Sequence
  Description of Artificial Sequence: Synthetic oligonucleotide
ccaguggacuguacacaua

SEQ ID NO: 1575818 - RNA, 19 nt, Artificial Sequence
  Description of Artificial Sequence: Synthetic oligonucleotide
cacgaaagccaggccgcau

SEQ ID NO: 1575819 - RNA, 19 nt, Artificial Sequence
  Description of Artificial Sequence: Synthetic oligonucleotide
cgaguaccuuaugaucccu

SEQ ID NO: 1575820 - RNA, 19 nt, Artificial Sequence
  Description of Artificial Sequence: Synthetic oligonucleotide
aaauuacauauguagggcc

SEQ ID NO: 1575821 - RNA, 19 nt, Artificial Sequence
  Description of Artificial Sequence: Synthetic oligonucleotide
aacaaaguuucucacuucc

SEQ ID NO: 1575822 - RNA, 19 nt, Artificial Sequence
  Description of Artificial Sequence: Synthetic oligonucleotide
aaaguauuaguaaauuucc

SEQ ID NO: 1575823 - RNA, 19 nt, Artificial Sequence
  Description of Artificial Sequence: Synthetic oligonucleotide
aguauuaguaaauuuccgc

SEQ ID NO: 1575824 - RNA, 19 nt, Artificial Sequence
  Description of Artificial Sequence: Synthetic oligonucleotide
uguuaugaaaagcaggucc

SEQ ID NO: 1575825 - RNA, 19 nt, Artificial Sequence
  Description of Artificial Sequence: Synthetic oligonucleotide
uaaaguauuaguaaauuuc

SEQ ID NO: 1575826 - RNA, 19 nt, Artificial Sequence
  Description of Artificial Sequence: Synthetic oligonucleotide
uuuaguuaacaucugcagg

SEQ ID NO: 1575827 - RNA, 19 nt, Artificial Sequence
  Description of Artificial Sequence: Synthetic oligonucleotide
uuagauaugauuaaccuuu

SEQ ID NO: 1575828 - RNA, 19 nt, Artificial Sequence
  Description of Artificial Sequence: Synthetic oligonucleotide
uuaguuaacaucugcaggc

SEQ ID NO: 1575829 - RNA, 19 nt, Artificial Sequence
  Description of Artificial Sequence: Synthetic oligonucleotide
uguugcuacaccuaaaggc

SEQ ID NO: 1575830 - RNA, 19 nt, Artificial Sequence
  Description of Artificial Sequence: Synthetic oligonucleotide
uauguuaugaaaagcaggu

SEQ ID NO: 1575831 - RNA, 19 nt, Artificial Sequence
  Description of Artificial Sequence: Synthetic oligonucleotide
uuuaauucuguguugcugc

SEQ ID NO: 1575832 - RNA, 19 nt, Artificial Sequence
  Description of Artificial Sequence: Synthetic oligonucleotide
guauaaagcaaccacuggg

SEQ ID NO: 1575833 - RNA, 19 nt, Artificial Sequence
  Description of Artificial Sequence: Synthetic oligonucleotide
aaagcaaccacuggguggc

SEQ ID NO: 1575834 - RNA, 19 nt, Artificial Sequence
  Description of Artificial Sequence: Synthetic oligonucleotide
aagaagacgugguaggcgg

SEQ ID NO: 1575835 - RNA, 19 nt, Artificial Sequence
  Description of Artificial Sequence: Synthetic oligonucleotide
uuuguauuaaauucugugu

SEQ ID NO: 1575836 - RNA, 19 nt, Artificial Sequence
  Description of Artificial Sequence: Synthetic oligonucleotide
auaugauuaaccuuuauua

SEQ ID NO: 1575837 - RNA, 19 nt, Artificial Sequence
  Description of Artificial Sequence: Synthetic oligonucleotide
ucuuguaaaaugauagucu

SEQ ID NO: 1575838 - RNA, 19 nt, Artificial Sequence
  Description of Artificial Sequence: Synthetic oligonucleotide
acaaguaccacauugucca

SEQ ID NO: 1575839 - RNA, 19 nt, Artificial Sequence
  Description of Artificial Sequence: Synthetic oligonucleotide
uauguugcuacaccuaaag

SEQ ID NO: 1575840 - RNA, 19 nt, Artificial Sequence
  Description of Artificial Sequence: Synthetic oligonucleotide
ugagcagucacaucagugg

SEQ ID NO: 1575841 - RNA, 19 nt, Artificial Sequence
  Description of Artificial Sequence: Synthetic oligonucleotide
auuuaguuaacaucugcag

SEQ ID NO: 1575842 - RNA, 19 nt, Artificial Sequence
  Description of Artificial Sequence: Synthetic oligonucleotide
guuuguauuaaauucugug

SEQ ID NO: 1575843 - RNA, 19 nt, Artificial Sequence
  Description of Artificial Sequence: Synthetic oligonucleotide
uguauaaagcaaccacugg

SEQ ID NO: 1575844 - RNA, 19 nt, Artificial Sequence
  Description of Artificial Sequence: Synthetic oligonucleotide
uuccuaagaaauuacauau

SEQ ID NO: 1575845 - RNA, 19 nt, Artificial Sequence
  Description of Artificial Sequence: Synthetic oligonucleotide
uuucauuugucuccugagg

SEQ ID NO: 1575846 - RNA, 19 nt, Artificial Sequence
  Description of Artificial Sequence: Synthetic oligonucleotide
aaaagcagguccacaaagc

SEQ ID NO: 1575847 - RNA, 19 nt, Artificial Sequence
  Description of Artificial Sequence: Synthetic oligonucleotide
uaaagcaaccacugggugg

SEQ ID NO: 1575848 - RNA, 19 nt, Artificial Sequence
  Description of Artificial Sequence: Synthetic oligonucleotide
uguaauguguucuuccuac

SEQ ID NO: 1575849 - RNA, 19 nt, Artificial Sequence
  Description of Artificial Sequence: Synthetic oligonucleotide
aaaccaauggcagcuuugc

SEQ ID NO: 1575850 - RNA, 19 nt, Artificial Sequence
  Description of Artificial Sequence: Synthetic oligonucleotide
uugguaauuccuaagacuu

SEQ ID NO: 1575851 - RNA, 19 nt, Artificial Sequence
  Description of Artificial Sequence: Synthetic oligonucleotide
ugaugaauuuucauagaca

SEQ ID NO: 1575852 - RNA, 19 nt, Artificial Sequence
  Description of Artificial Sequence: Synthetic oligonucleotide
ucauuauccagucauuguc

SEQ ID NO: 1575853 - RNA, 19 nt, Artificial Sequence
  Description of Artificial Sequence: Synthetic oligonucleotide
ugaaguguugguaccacug

SEQ ID NO: 1575854 - RNA, 19 nt, Artificial Sequence
  Description of Artificial Sequence: Synthetic oligonucleotide
aaggguuccauucuucacu

SEQ ID NO: 1575855 - RNA, 19 nt, Artificial Sequence
  Description of Artificial Sequence: Synthetic oligonucleotide
uaugauuaaccuuuauuau

SEQ ID NO: 1575856 - RNA, 19 nt, Artificial Sequence
  Description of Artificial Sequence: Synthetic oligonucleotide
auuauccagucauugucac

SEQ ID NO: 1575857 - RNA, 19 nt, Artificial Sequence
  Description of Artificial Sequence: Synthetic oligonucleotide
aaguauuaguaaauuuccg

SEQ ID NO: 1575858 - RNA, 19 nt, Artificial Sequence
  Description of Artificial Sequence: Synthetic oligonucleotide
aaacccaacaaaguuucuc

SEQ ID NO: 1575859 - RNA, 19 nt, Artificial Sequence
  Description of Artificial Sequence: Synthetic oligonucleotide
ugaagauaaagggagcccc

SEQ ID NO: 1575860 - RNA, 19 nt, Artificial Sequence
  Description of Artificial Sequence: Synthetic oligonucleotide
uacagggcgacgaggagcg

SEQ ID NO: 1575861 - RNA, 19 nt, Artificial Sequence
  Description of Artificial Sequence: Synthetic oligonucleotide
uccuacaggacacaaugug

SEQ ID NO: 1575862 - RNA, 19 nt, Artificial Sequence
  Description of Artificial Sequence: Synthetic oligonucleotide
acaauugacuguccuuccc

SEQ ID NO: 1575863 - RNA, 19 nt, Artificial Sequence
  Description of Artificial Sequence: Synthetic oligonucleotide
cuacaggacacaaugugag

SEQ ID NO: 1575864 - RNA, 19 nt, Artificial Sequence
  Description of Artificial Sequence: Synthetic oligonucleotide
agaaacccaacaaaguuuc

SEQ ID NO: 1575865 - RNA, 19 nt, Artificial Sequence
  Description of Artificial Sequence: Synthetic oligonucleotide
uuuagauaugauuaaccuu

SEQ ID NO: 1575866 - RNA, 19 nt, Artificial Sequence
  Description of Artificial Sequence: Synthetic oligonucleotide
uguauguugcuacaccuaa

SEQ ID NO: 1575867 - RNA, 19 nt, Artificial Sequence
  Description of Artificial Sequence: Synthetic oligonucleotide
guugcuacaccuaaaggcc

SEQ ID NO: 1575868 - RNA, 19 nt, Artificial Sequence
  Description of Artificial Sequence: Synthetic oligonucleotide
agaaguacccuggaaguac

SEQ ID NO: 1575869 - RNA, 19 nt, Artificial Sequence
  Description of Artificial Sequence: Synthetic oligonucleotide
augaagauaaagggagccc

SEQ ID NO: 1575870 - RNA, 19 nt, Artificial Sequence
  Description of Artificial Sequence: Synthetic oligonucleotide
aauuacauauguagggccu

SEQ ID NO: 1575871 - RNA, 19 nt, Artificial Sequence
  Description of Artificial Sequence: Synthetic oligonucleotide
uugaguaacugcagaggag

SEQ ID NO: 1575872 - RNA, 19 nt, Artificial Sequence
  Description of Artificial Sequence: Synthetic oligonucleotide
cuguguauaaagcaaccac

SEQ ID NO: 1575873 - RNA, 19 nt, Artificial Sequence
  Description of Artificial Sequence: Synthetic oligonucleotide
agauuuguauacugcgcuc

SEQ ID NO: 1575874 - RNA, 19 nt, Artificial Sequence
  Description of Artificial Sequence: Synthetic oligonucleotide
aucaagagugccuucaaaa

SEQ ID NO: 1575875 - RNA, 19 nt, Artificial Sequence
  Description of Artificial Sequence: Synthetic oligonucleotide
uggauguguuuccacagug

SEQ ID NO: 1575876 - RNA, 19 nt, Artificial Sequence
  Description of Artificial Sequence: Synthetic oligonucleotide
ucucuuguggauuuaguua

SEQ ID NO: 1575877 - RNA, 19 nt, Artificial Sequence
  Description of Artificial Sequence: Synthetic oligonucleotide
ucauuaaugcuugucuuga

SEQ ID NO: 1575878 - RNA, 19 nt, Artificial Sequence
  Description of Artificial Sequence: Synthetic oligonucleotide
uucauuauccagucauugu

SEQ ID NO: 1575879 - RNA, 19 nt, Artificial Sequence
  Description of Artificial Sequence: Synthetic oligonucleotide
agauacaaaccaauggcag

SEQ ID NO: 1575880 - RNA, 19 nt, Artificial Sequence
  Description of Artificial Sequence: Synthetic oligonucleotide
gagcagucacaucaguggg

SEQ ID NO: 1575881 - RNA, 19 nt, Artificial Sequence
  Description of Artificial Sequence: Synthetic oligonucleotide
uccgcuuuaguucuguuuu

SEQ ID NO: 1575882 - RNA, 19 nt, Artificial Sequence
  Description of Artificial Sequence: Synthetic oligonucleotide
uauuaguaaauuuccgcuu

SEQ ID NO: 1575883 - RNA, 19 nt, Artificial Sequence
  Description of Artificial Sequence: Synthetic oligonucleotide
aguaaauuuccgcuuuagu

SEQ ID NO: 1575884 - RNA, 19 nt, Artificial Sequence
  Description of Artificial Sequence: Synthetic oligonucleotide
uuguauacugcgcucaguu

SEQ ID NO: 1575885 - RNA, 19 nt, Artificial Sequence
  Description of Artificial Sequence: Synthetic oligonucleotide
guuaacaucugcaggcuag

SEQ ID NO: 1575886 - RNA, 19 nt, Artificial Sequence
  Description of Artificial Sequence: Synthetic oligonucleotide
auguugcuacaccuaaagg

SEQ ID NO: 1575887 - RNA, 19 nt, Artificial Sequence
  Description of Artificial Sequence: Synthetic oligonucleotide
uccuguauguugcuacacc

SEQ ID NO: 1575888 - RNA, 19 nt, Artificial Sequence
  Description of Artificial Sequence: Synthetic oligonucleotide
auaaagcaaccacugggug

SEQ ID NO: 1575889 - RNA, 19 nt, Artificial Sequence
  Description of Artificial Sequence: Synthetic oligonucleotide
gcaccauuaauccaggggc

SEQ ID NO: 1575890 - RNA, 19 nt, Artificial Sequence
  Description of Artificial Sequence: Synthetic oligonucleotide
ugaccagguggcuucaacc

SEQ ID NO: 1575891 - RNA, 19 nt, Artificial Sequence
  Description of Artificial Sequence: Synthetic oligonucleotide
guauuaguaaauuuccgcu

SEQ ID NO: 1575892 - RNA, 19 nt, Artificial Sequence
  Description of Artificial Sequence: Synthetic oligonucleotide
auucuucacucuccagggc

SEQ ID NO: 1575893 - RNA, 19 nt, Artificial Sequence
  Description of Artificial Sequence: Synthetic oligonucleotide
auacaaaccaauggcagcu

SEQ ID NO: 1575894 - RNA, 19 nt, Artificial Sequence
  Description of Artificial Sequence: Synthetic oligonucleotide
agcagguccacaaagccuc

SEQ ID NO: 1575895 - RNA, 19 nt, Artificial Sequence
  Description of Artificial Sequence: Synthetic oligonucleotide
uuguaaaaugauagucuuc

SEQ ID NO: 1575896 - RNA, 19 nt, Artificial Sequence
  Description of Artificial Sequence: Synthetic oligonucleotide
guguauaaagcaaccacug

SEQ ID NO: 1575897 - RNA, 19 nt, Artificial Sequence
  Description of Artificial Sequence: Synthetic oligonucleotide
cuacaauugacuguccuuc

SEQ ID NO: 1575898 - RNA, 19 nt, Artificial Sequence
  Description of Artificial Sequence: Synthetic oligonucleotide
acccaacaaaguuucucac

SEQ ID NO: 1575899 - RNA, 19 nt, Artificial Sequence
  Description of Artificial Sequence: Synthetic oligonucleotide
auuuguauacugcgcucag

SEQ ID NO: 1575900 - RNA, 19 nt, Artificial Sequence
  Description of Artificial Sequence: Synthetic oligonucleotide
gauaugauuaaccuuuauu

SEQ ID NO: 1575901 - RNA, 19 nt, Artificial Sequence
  Description of Artificial Sequence: Synthetic oligonucleotide
uacaauugacuguccuucc

SEQ ID NO: 1575902 - RNA, 19 nt, Artificial Sequence
  Description of Artificial Sequence: Synthetic oligonucleotide
uuugccuuuucucuuccau

SEQ ID NO: 1575903 - RNA, 19 nt, Artificial Sequence
  Description of Artificial Sequence: Synthetic oligonucleotide
guggauuuaguuaacaucu

SEQ ID NO: 1575904 - RNA, 19 nt, Artificial Sequence
  Description of Artificial Sequence: Synthetic oligonucleotide
aaaugauagucuucuccuu

SEQ ID NO: 1575905 - RNA, 19 nt, Artificial Sequence
  Description of Artificial Sequence: Synthetic oligonucleotide
aucggcaccauuaauccag

SEQ ID NO: 1575906 - RNA, 19 nt, Artificial Sequence
  Description of Artificial Sequence: Synthetic oligonucleotide
cugucauauguuaugaaaa

SEQ ID NO: 1575907 - RNA, 19 nt, Artificial Sequence
  Description of Artificial Sequence: Synthetic oligonucleotide
guuccuaagaaauuacaua

SEQ ID NO: 1575908 - RNA, 19 nt, Artificial Sequence
  Description of Artificial Sequence: Synthetic oligonucleotide
acuuucuaaaguauuagua

SEQ ID NO: 1575909 - RNA, 19 nt, Artificial Sequence
  Description of Artificial Sequence: Synthetic oligonucleotide
guuaugaaaagcaggucca

SEQ ID NO: 1575910 - RNA, 19 nt, Artificial Sequence
  Description of Artificial Sequence: Synthetic oligonucleotide
aggaacuucauuauccagu

SEQ ID NO: 1575911 - RNA, 19 nt, Artificial Sequence
  Description of Artificial Sequence: Synthetic oligonucleotide
gauuuguauacugcgcuca

SEQ ID NO: 1575912 - RNA, 19 nt, Artificial Sequence
  Description of Artificial Sequence: Synthetic oligonucleotide
caucuugguaauuccuaag

SEQ ID NO: 1575913 - RNA, 19 nt, Artificial Sequence
  Description of Artificial Sequence: Synthetic oligonucleotide
caucuucuaccacaggaac

SEQ ID NO: 1575914 - RNA, 19 nt, Artificial Sequence
  Description of Artificial Sequence: Synthetic oligonucleotide
cauuauccagucauuguca

SEQ ID NO: 1575915 - RNA, 19 nt, Artificial Sequence
  Description of Artificial Sequence: Synthetic oligonucleotide
gagcuggccucauauauuc

SEQ ID NO: 1575916 - RNA, 19 nt, Artificial Sequence
  Description of Artificial Sequence: Synthetic oligonucleotide
caaaccaauggcagcuuug

SEQ ID NO: 1575917 - RNA, 19 nt, Artificial Sequence
  Description of Artificial Sequence: Synthetic oligonucleotide
aaaauagcaggaagcuccu

SEQ ID NO: 1575918 - RNA, 19 nt, Artificial Sequence
  Description of Artificial Sequence: Synthetic oligonucleotide
uugcuacaccuaaaggcca

SEQ ID NO: 1575919 - RNA, 19 nt, Artificial Sequence
  Description of Artificial Sequence: Synthetic oligonucleotide
agaacaucggcaccauuaa

SEQ ID NO: 1575920 - RNA, 19 nt, Artificial Sequence
  Description of Artificial Sequence: Synthetic oligonucleotide
agcgagcacagccgugucc

SEQ ID NO: 1575921 - RNA, 19 nt, Artificial Sequence
  Description of Artificial Sequence: Synthetic oligonucleotide
cccagauuuguauacugcg

SEQ ID NO: 1575922 - RNA, 19 nt, Artificial Sequence
  Description of Artificial Sequence: Synthetic oligonucleotide
auguuaugaaaagcagguc

SEQ ID NO: 1575923 - RNA, 19 nt, Artificial Sequence
  Description of Artificial Sequence: Synthetic oligonucleotide
aggagcuggccucauauau

SEQ ID NO: 1575924 - RNA, 19 nt, Artificial Sequence
  Description of Artificial Sequence: Synthetic oligonucleotide
gaagacgugguaggcggcg

SEQ ID NO: 1575925 - RNA, 19 nt, Artificial Sequence
  Description of Artificial Sequence: Synthetic oligonucleotide
cuaaaauagcaggaagcuc

SEQ ID NO: 1575926 - RNA, 19 nt, Artificial Sequence
  Description of Artificial Sequence: Synthetic oligonucleotide
caggaacugagccaaagga

SEQ ID NO: 1575927 - RNA, 19 nt, Artificial Sequence
  Description of Artificial Sequence: Synthetic oligonucleotide
caccuaaaggccacuggag

SEQ ID NO: 1575928 - RNA, 19 nt, Artificial Sequence
  Description of Artificial Sequence: Synthetic oligonucleotide
agcaagacaacagcuagau

SEQ ID NO: 1575929 - RNA, 19 nt, Artificial Sequence
  Description of Artificial Sequence: Synthetic oligonucleotide
uaaugcuugucuugaugaa

SEQ ID NO: 1575930 - RNA, 19 nt, Artificial Sequence
  Description of Artificial Sequence: Synthetic oligonucleotide
ucggcaccauuaauccagg

SEQ ID NO: 1575931 - RNA, 19 nt, Artificial Sequence
  Description of Artificial Sequence: Synthetic oligonucleotide
uuaugaaaagcagguccac

SEQ ID NO: 1575932 - RNA, 19 nt, Artificial Sequence
  Description of Artificial Sequence: Synthetic oligonucleotide
gagaacaucggcaccauua

SEQ ID NO: 1575933 - RNA, 19 nt, Artificial Sequence
  Description of Artificial Sequence: Synthetic oligonucleotide
agcuagaugcugcaguuuu

SEQ ID NO: 1575934 - RNA, 19 nt, Artificial Sequence
  Description of Artificial Sequence: Synthetic oligonucleotide
agccgcaucccaccgcggc

SEQ ID NO: 1575935 - RNA, 19 nt, Artificial Sequence
  Description of Artificial Sequence: Synthetic oligonucleotide
cuugaugaauuuucauaga

SEQ ID NO: 1575936 - RNA, 19 nt, Artificial Sequence
  Description of Artificial Sequence: Synthetic oligonucleotide
ugcuacaccuaaaggccac

SEQ ID NO: 1575937 - RNA, 19 nt, Artificial Sequence
  Description of Artificial Sequence: Synthetic oligonucleotide
uuaauccaggggcugucau

SEQ ID NO: 1575938 - RNA, 19 nt, Artificial Sequence
  Description of Artificial Sequence: Synthetic oligonucleotide
agaggcaguacagggcgac

SEQ ID NO: 1575939 - RNA, 19 nt, Artificial Sequence
  Description of Artificial Sequence: Synthetic oligonucleotide
agcaaagcaucuugguaau

SEQ ID NO: 1575940 - RNA, 19 nt, Artificial Sequence
  Description of Artificial Sequence: Synthetic oligonucleotide
uugaccagguggcuucaac

SEQ ID NO: 1575941 - RNA, 19 nt, Artificial Sequence
  Description of Artificial Sequence: Synthetic oligonucleotide
ucccagagauacaaaccaa

SEQ ID NO: 1575942 - RNA, 19 nt, Artificial Sequence
  Description of Artificial Sequence: Synthetic oligonucleotide
guaaaaugauagucuucuc

SEQ ID NO: 1575943 - RNA, 19 nt, Artificial Sequence
  Description of Artificial Sequence: Synthetic oligonucleotide
uaguuaacaucugcaggcu

SEQ ID NO: 1575944 - RNA, 19 nt, Artificial Sequence
  Description of Artificial Sequence: Synthetic oligonucleotide
ccagauuuguauacugcgc

SEQ ID NO: 1575945 - RNA, 19 nt, Artificial Sequence
  Description of Artificial Sequence: Synthetic oligonucleotide
uaggcggcguagauggaga

SEQ ID NO: 1575946 - RNA, 19 nt, Artificial Sequence
  Description of Artificial Sequence: Synthetic oligonucleotide
uuaacaucugcaggcuagu

SEQ ID NO: 1575947 - RNA, 19 nt, Artificial Sequence
  Description of Artificial Sequence: Synthetic oligonucleotide
gccucauauauucuguaac

SEQ ID NO: 1575948 - RNA, 19 nt, Artificial Sequence
  Description of Artificial Sequence: Synthetic oligonucleotide
uguauacugcgcucaguuu

SEQ ID NO: 1575949 - RNA, 19 nt, Artificial Sequence
  Description of Artificial Sequence: Synthetic oligonucleotide
ggagaagaggcaguacagg

SEQ ID NO: 1575950 - RNA, 19 nt, Artificial Sequence
  Description of Artificial Sequence: Synthetic oligonucleotide
agggccgacugaucucggc

SEQ ID NO: 1575951 - RNA, 19 nt, Artificial Sequence
  Description of Artificial Sequence: Synthetic oligonucleotide
aagcaagacaacagcuaga

SEQ ID NO: 1575952 - RNA, 19 nt, Artificial Sequence
  Description of Artificial Sequence: Synthetic oligonucleotide
ucugcaggcuaguuuuaau

SEQ ID NO: 1575953 - RNA, 19 nt, Artificial Sequence
  Description of Artificial Sequence: Synthetic oligonucleotide
gaucaagagugccuucaaa

SEQ ID NO: 1575954 - RNA, 19 nt, Artificial Sequence
  Description of Artificial Sequence: Synthetic oligonucleotide
ggcauggacgaucuuugcc

SEQ ID NO: 1575955 - RNA, 19 nt, Artificial Sequence
  Description of Artificial Sequence: Synthetic oligonucleotide
ugguaauuccuaagacuuu

SEQ ID NO: 1575956 - RNA, 19 nt, Artificial Sequence
  Description of Artificial Sequence: Synthetic oligonucleotide
gccuugaguaacugcagag

SEQ ID NO: 1575957 - RNA, 19 nt, Artificial Sequence
  Description of Artificial Sequence: Synthetic oligonucleotide
aggacacaaugugagguca

SEQ ID NO: 1575958 - RNA, 19 nt, Artificial Sequence
  Description of Artificial Sequence: Synthetic oligonucleotide
uuccgcuuuaguucuguuu

SEQ ID NO: 1575959 - RNA, 19 nt, Artificial Sequence
  Description of Artificial Sequence: Synthetic oligonucleotide
agugggaucaagagugccu

SEQ ID NO: 1575960 - RNA, 19 nt, Artificial Sequence
  Description of Artificial Sequence: Synthetic oligonucleotide
guauacugcgcucaguuuu

SEQ ID NO: 1575961 - RNA, 19 nt, Artificial Sequence
  Description of Artificial Sequence: Synthetic oligonucleotide
gcagcauugaccagguggc

SEQ ID NO: 1575962 - RNA, 19 nt, Artificial Sequence
  Description of Artificial Sequence: Synthetic oligonucleotide
cagauuuguauacugcgcu

SEQ ID NO: 1575963 - RNA, 19 nt, Artificial Sequence
  Description of Artificial Sequence: Synthetic oligonucleotide
guaggcggcguagauggag

SEQ ID NO: 1575964 - RNA, 19 nt, Artificial Sequence
  Description of Artificial Sequence: Synthetic oligonucleotide
uaauccaggggcugucaua

SEQ ID NO: 1575965 - RNA, 19 nt, Artificial Sequence
  Description of Artificial Sequence: Synthetic oligonucleotide
acugaucucggccgcgccu

SEQ ID NO: 1575966 - RNA, 19 nt, Artificial Sequence
  Description of Artificial Sequence: Synthetic oligonucleotide
caguacagggcgacgagga

SEQ ID NO: 1575967 - RNA, 19 nt, Artificial Sequence
  Description of Artificial Sequence: Synthetic oligonucleotide
gaaguacccuggaaguaca

SEQ ID NO: 1575968 - RNA, 19 nt, Artificial Sequence
  Description of Artificial Sequence: Synthetic oligonucleotide
ccuaagacuuucauuuguc

SEQ ID NO: 1575969 - RNA, 19 nt, Artificial Sequence
  Description of Artificial Sequence: Synthetic oligonucleotide
gaacuucauuauccaguca

SEQ ID NO: 1575970 - RNA, 19 nt, Artificial Sequence
  Description of Artificial Sequence: Synthetic oligonucleotide
cuuguggauuuaguuaaca

SEQ ID NO: 1575971 - RNA, 19 nt, Artificial Sequence
  Description of Artificial Sequence: Synthetic oligonucleotide
ggguuuguauuaaauucug

SEQ ID NO: 1575972 - RNA, 19 nt, Artificial Sequence
  Description of Artificial Sequence: Synthetic oligonucleotide
ccucauauauucuguaaca

SEQ ID NO: 1575973 - RNA, 19 nt, Artificial Sequence
  Description of Artificial Sequence: Synthetic oligonucleotide
aaggagcuggccucauaua

SEQ ID NO: 1575974 - RNA, 19 nt, Artificial Sequence
  Description of Artificial Sequence: Synthetic oligonucleotide
uggcauggacgaucuuugc

SEQ ID NO: 1575975 - RNA, 19 nt, Artificial Sequence
  Description of Artificial Sequence: Synthetic oligonucleotide
acaaaguuucucacuucca

SEQ ID NO: 1575976 - RNA, 19 nt, Artificial Sequence
  Description of Artificial Sequence: Synthetic oligonucleotide
agggcgacgaggagcgagc

SEQ ID NO: 1575977 - RNA, 19 nt, Artificial Sequence
  Description of Artificial Sequence: Synthetic oligonucleotide
cacuggguggcauggacga

SEQ ID NO: 1575978 - RNA, 19 nt, Artificial Sequence
  Description of Artificial Sequence: Synthetic oligonucleotide
cuuccuguauguugcuaca

SEQ ID NO: 1575979 - RNA, 19 nt, Artificial Sequence
  Description of Artificial Sequence: Synthetic oligonucleotide
agcacagccguguccgcgu

SEQ ID NO: 1575980 - RNA, 19 nt, Artificial Sequence
  Description of Artificial Sequence: Synthetic oligonucleotide
augcuugucuugaugaauu

SEQ ID NO: 1575981 - RNA, 19 nt, Artificial Sequence
  Description of Artificial Sequence: Synthetic oligonucleotide
ggccgacugaucucggccg

SEQ ID NO: 1575982 - RNA, 19 nt, Artificial Sequence
  Description of Artificial Sequence: Synthetic oligonucleotide
gacgugguaggcggcguag

SEQ ID NO: 1575983 - RNA, 19 nt, Artificial Sequence
  Description of Artificial Sequence: Synthetic oligonucleotide
ggagaaguacccuggaagu

SEQ ID NO: 1575984 - RNA, 19 nt, Artificial Sequence
  Description of Artificial Sequence: Synthetic oligonucleotide
gcgagcacagccguguccg

SEQ ID NO: 1575985 - RNA, 19 nt, Artificial Sequence
  Description of Artificial Sequence: Synthetic oligonucleotide
gacugaucucggccgcgcc

SEQ ID NO: 1575986 - RNA, 19 nt, Artificial Sequence
  Description of Artificial Sequence: Synthetic oligonucleotide
aauuuccgcuuuaguucug

SEQ ID NO: 1575987 - RNA, 19 nt, Artificial Sequence
  Description of Artificial Sequence: Synthetic oligonucleotide
ucuccuucgccugcaccgc

SEQ ID NO: 1575988 - RNA, 19 nt, Artificial Sequence
  Description of Artificial Sequence: Synthetic oligonucleotide
cuacaccuaaaggccacug

SEQ ID NO: 1575989 - RNA, 19 nt, Artificial Sequence
  Description of Artificial Sequence: Synthetic oligonucleotide
cagugggaucaagagugcc

SEQ ID NO: 1575990 - RNA, 19 nt, Artificial Sequence
  Description of Artificial Sequence: Synthetic oligonucleotide
ucccaaggguuccauucuu

SEQ ID NO: 1575991 - RNA, 19 nt, Artificial Sequence
  Description of Artificial Sequence: Synthetic oligonucleotide
gacgaucuuugccuuuucu

SEQ ID NO: 1575992 - RNA, 19 nt, Artificial Sequence
  Description of Artificial Sequence: Synthetic oligonucleotide
aagacgugguaggcggcgu

SEQ ID NO: 1575993 - RNA, 19 nt, Artificial Sequence
  Description of Artificial Sequence: Synthetic oligonucleotide
aacuuccuguauguugcua

SEQ ID NO: 1575994 - RNA, 19 nt, Artificial Sequence
  Description of Artificial Sequence: Synthetic oligonucleotide
ccccagauuuguauacugc

SEQ ID NO: 1575995 - RNA, 19 nt, Artificial Sequence
  Description of Artificial Sequence: Synthetic oligonucleotide
uggacgaucuuugccuuuu

SEQ ID NO: 1575996 - RNA, 19 nt, Artificial Sequence
  Description of Artificial Sequence: Synthetic oligonucleotide
gcugucauuacaucuucua

SEQ ID NO: 1575997 - RNA, 19 nt, Artificial Sequence
  Description of Artificial Sequence: Synthetic oligonucleotide
cuguauguugcuacaccua

SEQ ID NO: 1575998 - RNA, 19 nt, Artificial Sequence
  Description of Artificial Sequence: Synthetic oligonucleotide
ugccccagauuuguauacu

SEQ ID NO: 1575999 - RNA, 19 nt, Artificial Sequence
  Description of Artificial Sequence: Synthetic oligonucleotide
caucccaccgcggcuuccg

SEQ ID NO: 1576000 - RNA, 19 nt, Artificial Sequence
  Description of Artificial Sequence: Synthetic oligonucleotide
gcaucuugguaauuccuaa

SEQ ID NO: 1576001 - RNA, 19 nt, Artificial Sequence
  Description of Artificial Sequence: Synthetic oligonucleotide
ggcaguacagggcgacgag

SEQ ID NO: 1576002 - RNA, 19 nt, Artificial Sequence
  Description of Artificial Sequence: Synthetic oligonucleotide
gcaguacagggcgacgagg

SEQ ID NO: 1576003 - RNA, 19 nt, Artificial Sequence
  Description of Artificial Sequence: Synthetic oligonucleotide
ugggaucaagagugccuuc

SEQ ID NO: 1576004 - RNA, 19 nt, Artificial Sequence
  Description of Artificial Sequence: Synthetic oligonucleotide
agcauugaccagguggcuu

SEQ ID NO: 1576005 - RNA, 19 nt, Artificial Sequence
  Description of Artificial Sequence: Synthetic oligonucleotide
gggccgacugaucucggcc

SEQ ID NO: 1576006 - RNA, 19 nt, Artificial Sequence
  Description of Artificial Sequence: Synthetic oligonucleotide
cccuccauugagcagucac

SEQ ID NO: 1576007 - RNA, 19 nt, Artificial Sequence
  Description of Artificial Sequence: Synthetic oligonucleotide
uccgcgucagccgcauccc

SEQ ID NO: 1576008 - RNA, 19 nt, Artificial Sequence
  Description of Artificial Sequence: Synthetic oligonucleotide
cagggcgacgaggagcgag

SEQ ID NO: 1576009 - RNA, 19 nt, Artificial Sequence
  Description of Artificial Sequence: Synthetic oligonucleotide
uucccuccauugagcaguc

SEQ ID NO: 1576010 - RNA, 19 nt, Artificial Sequence
  Description of Artificial Sequence: Synthetic oligonucleotide
caucggcaccauuaaucca

SEQ ID NO: 1576011 - RNA, 19 nt, Artificial Sequence
  Description of Artificial Sequence: Synthetic oligonucleotide
aaauagcaggaagcuccuu

SEQ ID NO: 1576012 - RNA, 19 nt, Artificial Sequence
  Description of Artificial Sequence: Synthetic oligonucleotide
cuuugccccagauuuguau

SEQ ID NO: 1576013 - RNA, 19 nt, Artificial Sequence
  Description of Artificial Sequence: Synthetic oligonucleotide
uuuccgcuuuaguucuguu

SEQ ID NO: 1576014 - RNA, 19 nt, Artificial Sequence
  Description of Artificial Sequence: Synthetic oligonucleotide
gcggcguagauggagaaga

SEQ ID NO: 1576015 - RNA, 19 nt, Artificial Sequence
  Description of Artificial Sequence: Synthetic oligonucleotide
uacaaaccaauggcagcuu

SEQ ID NO: 1576016 - RNA, 19 nt, Artificial Sequence
  Description of Artificial Sequence: Synthetic oligonucleotide
cugaucucggccgcgccuc

SEQ ID NO: 1576017 - RNA, 19 nt, Artificial Sequence
  Description of Artificial Sequence: Synthetic oligonucleotide
uaacaucugcaggcuaguu

SEQ ID NO: 1576018 - RNA, 19 nt, Artificial Sequence
  Description of Artificial Sequence: Synthetic oligonucleotide
ugaucucggccgcgccucu

SEQ ID NO: 1576019 - RNA, 19 nt, Artificial Sequence
  Description of Artificial Sequence: Synthetic oligonucleotide
caugcagcauugaccaggu

SEQ ID NO: 1576020 - RNA, 19 nt, Artificial Sequence
  Description of Artificial Sequence: Synthetic oligonucleotide
gacacaaugugaggucacu

SEQ ID NO: 1576021 - RNA, 19 nt, Artificial Sequence
  Description of Artificial Sequence: Synthetic oligonucleotide
guauguugcuacaccuaaa

SEQ ID NO: 1576022 - RNA, 19 nt, Artificial Sequence
  Description of Artificial Sequence: Synthetic oligonucleotide
caccauuaauccaggggcu

SEQ ID NO: 1576023 - RNA, 19 nt, Artificial Sequence
  Description of Artificial Sequence: Synthetic oligonucleotide
gcgacgaggagcgagcaca

SEQ ID NO: 1576024 - RNA, 19 nt, Artificial Sequence
  Description of Artificial Sequence: Synthetic oligonucleotide
gccagcugucauuacaucu

SEQ ID NO: 1576025 - RNA, 19 nt, Artificial Sequence
  Description of Artificial Sequence: Synthetic oligonucleotide
cugcaggcuaguuuuaauu

SEQ ID NO: 1576026 - RNA, 19 nt, Artificial Sequence
  Description of Artificial Sequence: Synthetic oligonucleotide
cuccuucgccugcaccgcc

SEQ ID NO: 1576027 - RNA, 19 nt, Artificial Sequence
  Description of Artificial Sequence: Synthetic oligonucleotide
auggacgaucuuugccuuu

SEQ ID NO: 1576028 - RNA, 19 nt, Artificial Sequence
  Description of Artificial Sequence: Synthetic oligonucleotide
gaacaucggcaccauuaau

SEQ ID NO: 1576029 - RNA, 19 nt, Artificial Sequence
  Description of Artificial Sequence: Synthetic oligonucleotide
gaacuuccuguauguugcu

SEQ ID NO: 1576030 - RNA, 19 nt, Artificial Sequence
  Description of Artificial Sequence: Synthetic oligonucleotide
uucgccugcaccgccgcuu

SEQ ID NO: 1576031 - RNA, 19 nt, Artificial Sequence
  Description of Artificial Sequence: Synthetic oligonucleotide
gacgaggagcgagcacagc

SEQ ID NO: 1576032 - RNA, 19 nt, Artificial Sequence
  Description of Artificial Sequence: Synthetic oligonucleotide
uggcagcuuugccccagau

SEQ ID NO: 1576033 - RNA, 19 nt, Artificial Sequence
  Description of Artificial Sequence: Synthetic oligonucleotide
gcgcccgaagaagacgugg

SEQ ID NO: 1576034 - RNA, 19 nt, Artificial Sequence
  Description of Artificial Sequence: Synthetic oligonucleotide
gcgucagccgcaucccacc

SEQ ID NO: 1576035 - RNA, 19 nt, Artificial Sequence
  Description of Artificial Sequence: Synthetic oligonucleotide
ccuccauugagcagucaca

SEQ ID NO: 1576036 - RNA, 19 nt, Artificial Sequence
  Description of Artificial Sequence: Synthetic oligonucleotide
cagggccgacugaucucgg

SEQ ID NO: 1576037 - RNA, 19 nt, Artificial Sequence
  Description of Artificial Sequence: Synthetic oligonucleotide
aggcggcguagauggagaa

SEQ ID NO: 1576038 - RNA, 19 nt, Artificial Sequence
  Description of Artificial Sequence: Synthetic oligonucleotide
agcuggcggccgucgcccg

SEQ ID NO: 1576039 - RNA, 19 nt, Artificial Sequence
  Description of Artificial Sequence: Synthetic oligonucleotide
ccagugauaaagcuguaau

SEQ ID NO: 1576040 - RNA, 19 nt, Artificial Sequence
  Description of Artificial Sequence: Synthetic oligonucleotide
cauuaaugcuugucuugau

SEQ ID NO: 1576041 - RNA, 19 nt, Artificial Sequence
  Description of Artificial Sequence: Synthetic oligonucleotide
gagcgagcacagccguguc

SEQ ID NO: 1576042 - RNA, 19 nt, Artificial Sequence
  Description of Artificial Sequence: Synthetic oligonucleotide
gaaacccaacaaaguuucu

SEQ ID NO: 1576043 - RNA, 19 nt, Artificial Sequence
  Description of Artificial Sequence: Synthetic oligonucleotide
uccuucccaaggguuccau

SEQ ID NO: 1576044 - RNA, 19 nt, Artificial Sequence
  Description of Artificial Sequence: Synthetic oligonucleotide
agcaaccacuggguggcau

SEQ ID NO: 1576045 - RNA, 19 nt, Artificial Sequence
  Description of Artificial Sequence: Synthetic oligonucleotide
ccgcuuuaguucuguuuug

SEQ ID NO: 1576046 - RNA, 19 nt, Artificial Sequence
  Description of Artificial Sequence: Synthetic oligonucleotide
agcuggccucauauauucu

SEQ ID NO: 1576047 - RNA, 19 nt, Artificial Sequence
  Description of Artificial Sequence: Synthetic oligonucleotide
acgugguaggcggcguaga

SEQ ID NO: 1576048 - RNA, 19 nt, Artificial Sequence
  Description of Artificial Sequence: Synthetic oligonucleotide
ggcggcguagauggagaag

SEQ ID NO: 1576049 - RNA, 19 nt, Artificial Sequence
  Description of Artificial Sequence: Synthetic oligonucleotide
gugggaucaagagugccuu

SEQ ID NO: 1576050 - RNA, 19 nt, Artificial Sequence
  Description of Artificial Sequence: Synthetic oligonucleotide
cagccgcaucccaccgcgg

SEQ ID NO: 1576051 - RNA, 19 nt, Artificial Sequence
  Description of Artificial Sequence: Synthetic oligonucleotide
caccgcggcuuccgguccc

SEQ ID NO: 1576052 - RNA, 19 nt, Artificial Sequence
  Description of Artificial Sequence: Synthetic oligonucleotide
gucacaucagugggaucaa

SEQ ID NO: 1576053 - RNA, 19 nt, Artificial Sequence
  Description of Artificial Sequence: Synthetic oligonucleotide
cauugaccagguggcuuca

SEQ ID NO: 1576054 - RNA, 19 nt, Artificial Sequence
  Description of Artificial Sequence: Synthetic oligonucleotide
auugaccagguggcuucaa

SEQ ID NO: 1576055 - RNA, 19 nt, Artificial Sequence
  Description of Artificial Sequence: Synthetic oligonucleotide
gccagugauaaagcuguaa

SEQ ID NO: 1576056 - RNA, 19 nt, Artificial Sequence
  Description of Artificial Sequence: Synthetic oligonucleotide
uuccggucccggcggccuc

SEQ ID NO: 1576057 - RNA, 19 nt, Artificial Sequence
  Description of Artificial Sequence: Synthetic oligonucleotide
gccugcaccgccgcuuucc

SEQ ID NO: 1576058 - RNA, 19 nt, Artificial Sequence
  Description of Artificial Sequence: Synthetic oligonucleotide
guggugacuggauguguuu

SEQ ID NO: 1576059 - RNA, 19 nt, Artificial Sequence
  Description of Artificial Sequence: Synthetic oligonucleotide
ccguguccgcgucagccgc

SEQ ID NO: 1576060 - RNA, 19 nt, Artificial Sequence
  Description of Artificial Sequence: Synthetic oligonucleotide
gcggccgucgcccggcggc

SEQ ID NO: 1576061 - RNA, 19 nt, Artificial Sequence
  Description of Artificial Sequence: Synthetic oligonucleotide
ggagcgagcacagccgugu

SEQ ID NO: 1576062 - RNA, 19 nt, Artificial Sequence
  Description of Artificial Sequence: Synthetic oligonucleotide
gggagcuggcggccgucgc

SEQ ID NO: 1576063 - RNA, 19 nt, Artificial Sequence
  Description of Artificial Sequence: Synthetic oligonucleotide
cgucagccgcaucccaccg

SEQ ID NO: 1576064 - RNA, 19 nt, Artificial Sequence
  Description of Artificial Sequence: Synthetic oligonucleotide
ccgcuuuccuggagccccg

SEQ ID NO: 1576065 - RNA, 19 nt, Artificial Sequence
  Description of Artificial Sequence: Synthetic oligonucleotide
cacagccguguccgcguca

SEQ ID NO: 1576066 - RNA, 19 nt, Artificial Sequence
  Description of Artificial Sequence: Synthetic oligonucleotide
cagccguguccgcgucagc

SEQ ID NO: 1576067 - RNA, 19 nt, Artificial Sequence
  Description of Artificial Sequence: Synthetic oligonucleotide
cgcgucagccgcaucccac

SEQ ID NO: 1576068 - RNA, 19 nt, Artificial Sequence
  Description of Artificial Sequence: Synthetic oligonucleotide
cacuuccauuuuguuucaa

SEQ ID NO: 1576069 - RNA, 19 nt, Artificial Sequence
  Description of Artificial Sequence: Synthetic oligonucleotide
cgcuuuaguucuguuuuga

SEQ ID NO: 1576070 - RNA, 19 nt, Artificial Sequence
  Description of Artificial Sequence: Synthetic oligonucleotide
gccgcgccucuccuucgcc

SEQ ID NO: 1576071 - RNA, 19 nt, Artificial Sequence
  Description of Artificial Sequence: Synthetic oligonucleotide
ggagcuggccucauauauu

SEQ ID NO: 1576072 - RNA, 19 nt, Artificial Sequence
  Description of Artificial Sequence: Synthetic oligonucleotide
ccauuaauccaggggcugu

SEQ ID NO: 1576073 - RNA, 19 nt, Artificial Sequence
  Description of Artificial Sequence: Synthetic oligonucleotide
gcuuccggucccggcggcc

SEQ ID NO: 1576074 - RNA, 19 nt, Artificial Sequence
  Description of Artificial Sequence: Synthetic oligonucleotide
ggguuccauucuucacucu

SEQ ID NO: 1576075 - RNA, 19 nt, Artificial Sequence
  Description of Artificial Sequence: Synthetic oligonucleotide
cuuccggucccggcggccu

SEQ ID NO: 1576076 - RNA, 19 nt, Artificial Sequence
  Description of Artificial Sequence: Synthetic oligonucleotide
acagggcgacgaggagcga

SEQ ID NO: 1576077 - RNA, 19 nt, Artificial Sequence
  Description of Artificial Sequence: Synthetic oligonucleotide
gcuacaccuaaaggccacu

SEQ ID NO: 1576078 - RNA, 19 nt, Artificial Sequence
  Description of Artificial Sequence: Synthetic oligonucleotide
ggagaacaucggcaccauu

SEQ ID NO: 1576079 - RNA, 19 nt, Artificial Sequence
  Description of Artificial Sequence: Synthetic oligonucleotide
gguaggcggcguagaugga

SEQ ID NO: 1576080 - RNA, 19 nt, Artificial Sequence
  Description of Artificial Sequence: Synthetic oligonucleotide
gccgucgcccggcggcggc

SEQ ID NO: 1576081 - RNA, 19 nt, Artificial Sequence
  Description of Artificial Sequence: Synthetic oligonucleotide
cgcggcuuccggucccggc

SEQ ID NO: 1576082 - RNA, 19 nt, Artificial Sequence
  Description of Artificial Sequence: Synthetic oligonucleotide
gcaccgccgcuuuccugga

SEQ ID NO: 1576083 - RNA, 19 nt, Artificial Sequence
  Description of Artificial Sequence: Synthetic oligonucleotide
gcuuugccccagauuugua

SEQ ID NO: 1576084 - RNA, 19 nt, Artificial Sequence
  Description of Artificial Sequence: Synthetic oligonucleotide
cuucgccugcaccgccgcu

SEQ ID NO: 1576085 - RNA, 19 nt, Artificial Sequence
  Description of Artificial Sequence: Synthetic oligonucleotide
ggccgucgcccggcggcgg

SEQ ID NO: 1576086 - RNA, 19 nt, Artificial Sequence
  Description of Artificial Sequence: Synthetic oligonucleotide
ccaggggcugucauauguu

SEQ ID NO: 1576087 - RNA, 19 nt, Artificial Sequence
  Description of Artificial Sequence: Synthetic oligonucleotide
guguccgcgucagccgcau

SEQ ID NO: 1576088 - RNA, 19 nt, Artificial Sequence
  Description of Artificial Sequence: Synthetic oligonucleotide
cguguccgcgucagccgca

SEQ ID NO: 1576089 - RNA, 19 nt, Artificial Sequence
  Description of Artificial Sequence: Synthetic oligonucleotide
cggcggcgcccgaagaaga

SEQ ID NO: 1576090 - RNA, 19 nt, Artificial Sequence
  Description of Artificial Sequence: Synthetic oligonucleotide
ccgcgucagccgcauccca

SEQ ID NO: 1576091 - RNA, 19 nt, Artificial Sequence
  Description of Artificial Sequence: Synthetic oligonucleotide
cgcaucccaccgcggcuuc

SEQ ID NO: 1576092 - RNA, 19 nt, Artificial Sequence
  Description of Artificial Sequence: Synthetic oligonucleotide
ccgcgccucuccuucgccu

SEQ ID NO: 1576093 - RNA, 19 nt, Artificial Sequence
  Description of Artificial Sequence: Synthetic oligonucleotide
auuucaauaauacuucugc

SEQ ID NO: 1576094 - RNA, 19 nt, Artificial Sequence
  Description of Artificial Sequence: Synthetic oligonucleotide
uauaggaugaccaugaugu

SEQ ID NO: 1576095 - RNA, 19 nt, Artificial Sequence
  Description of Artificial Sequence: Synthetic oligonucleotide
aaauuagugaaacuauaac

SEQ ID NO: 1576096 - RNA, 19 nt, Artificial Sequence
  Description of Artificial Sequence: Synthetic oligonucleotide
aaaauugugcauuuccugg

SEQ ID NO: 1576097 - RNA, 19 nt, Artificial Sequence
  Description of Artificial Sequence: Synthetic oligonucleotide
uccuuuaacaaauauaaag

SEQ ID NO: 1576098 - RNA, 19 nt, Artificial Sequence
  Description of Artificial Sequence: Synthetic oligonucleotide
ucaauaauugcucuuaaug

SEQ ID NO: 1576099 - RNA, 19 nt, Artificial Sequence
  Description of Artificial Sequence: Synthetic oligonucleotide
cuuaaugcaaaauuuacag

SEQ ID NO: 1576100 - RNA, 19 nt, Artificial Sequence
  Description of Artificial Sequence: Synthetic oligonucleotide
aauaagacgagugauaucu

SEQ ID NO: 1576101 - RNA, 19 nt, Artificial Sequence
  Description of Artificial Sequence: Synthetic oligonucleotide
uuuuaagucacauaaauua

SEQ ID NO: 1576102 - RNA, 19 nt, Artificial Sequence
  Description of Artificial Sequence: Synthetic oligonucleotide
uugauuuggguuuucaacg

SEQ ID NO: 1576103 - RNA, 19 nt, Artificial Sequence
  Description of Artificial Sequence: Synthetic oligonucleotide
caauaauugcucuuaaugc

SEQ ID NO: 1576104 - RNA, 19 nt, Artificial Sequence
  Description of Artificial Sequence: Synthetic oligonucleotide
uacaaaauguaugagagca

SEQ ID NO: 1576105 - RNA, 19 nt, Artificial Sequence
  Description of Artificial Sequence: Synthetic oligonucleotide
aguaucaacauuaauauca

SEQ ID NO: 1576106 - RNA, 19 nt, Artificial Sequence
  Description of Artificial Sequence: Synthetic oligonucleotide
aacauauugaagugauuuc

SEQ ID NO: 1576107 - RNA, 19 nt, Artificial Sequence
  Description of Artificial Sequence: Synthetic oligonucleotide
auuucuacaaaauguauga

SEQ ID NO: 1576108 - RNA, 19 nt, Artificial Sequence
  Description of Artificial Sequence: Synthetic oligonucleotide
uaucuaguagacaauaaac

SEQ ID NO: 1576109 - RNA, 19 nt, Artificial Sequence
  Description of Artificial Sequence: Synthetic oligonucleotide
aauaagcccacuuacaauu

SEQ ID NO: 1576110 - RNA, 19 nt, Artificial Sequence
  Description of Artificial Sequence: Synthetic oligonucleotide
aauaucacugaaauuagug

SEQ ID NO: 1576111 - RNA, 19 nt, Artificial Sequence
  Description of Artificial Sequence: Synthetic oligonucleotide
ucaauaauacuucugcagu

SEQ ID NO: 1576112 - RNA, 19 nt, Artificial Sequence
  Description of Artificial Sequence: Synthetic oligonucleotide
uauuagauaaacuuuggua

SEQ ID NO: 1576113 - RNA, 19 nt, Artificial Sequence
  Description of Artificial Sequence: Synthetic oligonucleotide
cuuacaauuguugauuugg

SEQ ID NO: 1576114 - RNA, 19 nt, Artificial Sequence
  Description of Artificial Sequence: Synthetic oligonucleotide
uugccuguaauguucaggg

SEQ ID NO: 1576115 - RNA, 19 nt, Artificial Sequence
  Description of Artificial Sequence: Synthetic oligonucleotide
uucuauaccaguugaagca

SEQ ID NO: 1576116 - RNA, 19 nt, Artificial Sequence
  Description of Artificial Sequence: Synthetic oligonucleotide
ucuuaaugcaaaauuuaca

SEQ ID NO: 1576117 - RNA, 19 nt, Artificial Sequence
  Description of Artificial Sequence: Synthetic oligonucleotide
uauaaaggauagcauacca

SEQ ID NO: 1576118 - RNA, 19 nt, Artificial Sequence
  Description of Artificial Sequence: Synthetic oligonucleotide
aaaguuaccagaugccuga

SEQ ID NO: 1576119 - RNA, 19 nt, Artificial Sequence
  Description of Artificial Sequence: Synthetic oligonucleotide
cuauaguaagacaauggcc

SEQ ID NO: 1576120 - RNA, 19 nt, Artificial Sequence
  Description of Artificial Sequence: Synthetic oligonucleotide
gauaaacuuugguaaacag

SEQ ID NO: 1576121 - RNA, 19 nt, Artificial Sequence
  Description of Artificial Sequence: Synthetic oligonucleotide
uggguuuucaacgagaaac

SEQ ID NO: 1576122 - RNA, 19 nt, Artificial Sequence
  Description of Artificial Sequence: Synthetic oligonucleotide
aucaguaagcuccuuaaag

SEQ ID NO: 1576123 - RNA, 19 nt, Artificial Sequence
  Description of Artificial Sequence: Synthetic oligonucleotide
ucaacgagaaacuauuuuc

SEQ ID NO: 1576124 - RNA, 19 nt, Artificial Sequence
  Description of Artificial Sequence: Synthetic oligonucleotide
aaacauauugaagugauuu

SEQ ID NO: 1576125 - RNA, 19 nt, Artificial Sequence
  Description of Artificial Sequence: Synthetic oligonucleotide
agacgagugauaucugucc

SEQ ID NO: 1576126 - RNA, 19 nt, Artificial Sequence
  Description of Artificial Sequence: Synthetic oligonucleotide
cugaauauacuuuaucuuc

SEQ ID NO: 1576127 - RNA, 19 nt, Artificial Sequence
  Description of Artificial Sequence: Synthetic oligonucleotide
uaauacuuugcuuacucga

SEQ ID NO: 1576128 - RNA, 19 nt, Artificial Sequence
  Description of Artificial Sequence: Synthetic oligonucleotide
auuuaugcuacccugacuu

SEQ ID NO: 1576129 - RNA, 19 nt, Artificial Sequence
  Description of Artificial Sequence: Synthetic oligonucleotide
ucuugauuaaucagcuugc

SEQ ID NO: 1576130 - RNA, 19 nt, Artificial Sequence
  Description of Artificial Sequence: Synthetic oligonucleotide
uaauguucagggcagguga

SEQ ID NO: 1576131 - RNA, 19 nt, Artificial Sequence
  Description of Artificial Sequence: Synthetic oligonucleotide
ugucauuaacucaaguugu

SEQ ID NO: 1576132 - RNA, 19 nt, Artificial Sequence
  Description of Artificial Sequence: Synthetic oligonucleotide
uuaucuaguagacaauaaa

SEQ ID NO: 1576133 - RNA, 19 nt, Artificial Sequence
  Description of Artificial Sequence: Synthetic oligonucleotide
cugucauuaacucaaguug

SEQ ID NO: 1576134 - RNA, 19 nt, Artificial Sequence
  Description of Artificial Sequence: Synthetic oligonucleotide
guucuaaugcaucaguaag

SEQ ID NO: 1576135 - RNA, 19 nt, Artificial Sequence
  Description of Artificial Sequence: Synthetic oligonucleotide
auauacuuuaucuucucca

SEQ ID NO: 1576136 - RNA, 19 nt, Artificial Sequence
  Description of Artificial Sequence: Synthetic oligonucleotide
ucauuuaagaaggugauua

SEQ ID NO: 1576137 - RNA, 19 nt, Artificial Sequence
  Description of Artificial Sequence: Synthetic oligonucleotide
uuuucaacgagaaacuauu

SEQ ID NO: 1576138 - RNA, 19 nt, Artificial Sequence
  Description of Artificial Sequence: Synthetic oligonucleotide
uuuaagucacauaaauuau

SEQ ID NO: 1576139 - RNA, 19 nt, Artificial Sequence
  Description of Artificial Sequence: Synthetic oligonucleotide
uuauuagauaaacuuuggu

SEQ ID NO: 1576140 - RNA, 19 nt, Artificial Sequence
  Description of Artificial Sequence: Synthetic oligonucleotide
uccuuuaauacuuugcuua

SEQ ID NO: 1576141 - RNA, 19 nt, Artificial Sequence
  Description of Artificial Sequence: Synthetic oligonucleotide
uacucgaggauaaauuuca

SEQ ID NO: 1576142 - RNA, 19 nt, Artificial Sequence
  Description of Artificial Sequence: Synthetic oligonucleotide
auuucaacaggcuuagccu

SEQ ID NO: 1576143 - RNA, 19 nt, Artificial Sequence
  Description of Artificial Sequence: Synthetic oligonucleotide
ugaagaacauuuuccaaac

SEQ ID NO: 1576144 - RNA, 19 nt, Artificial Sequence
  Description of Artificial Sequence: Synthetic oligonucleotide
uuaaugguugccuguaaug

SEQ ID NO: 1576145 - RNA, 19 nt, Artificial Sequence
  Description of Artificial Sequence: Synthetic oligonucleotide
uugaguggaauucgcaaag

SEQ ID NO: 1576146 - RNA, 19 nt, Artificial Sequence
  Description of Artificial Sequence: Synthetic oligonucleotide
uaaagaauaagcccacuua

SEQ ID NO: 1576147 - RNA, 19 nt, Artificial Sequence
  Description of Artificial Sequence: Synthetic oligonucleotide
aguacuggagaacaaccuc

SEQ ID NO: 1576148 - RNA, 19 nt, Artificial Sequence
  Description of Artificial Sequence: Synthetic oligonucleotide
aaaauguaugagagcaugg

SEQ ID NO: 1576149 - RNA, 19 nt, Artificial Sequence
  Description of Artificial Sequence: Synthetic oligonucleotide
auacugaauauacuuuauc

SEQ ID NO: 1576150 - RNA, 19 nt, Artificial Sequence
  Description of Artificial Sequence: Synthetic oligonucleotide
agagaaacauauugaagug

SEQ ID NO: 1576151 - RNA, 19 nt, Artificial Sequence
  Description of Artificial Sequence: Synthetic oligonucleotide
uaagaaggugauuaugugu

SEQ ID NO: 1576152 - RNA, 19 nt, Artificial Sequence
  Description of Artificial Sequence: Synthetic oligonucleotide
aauuuacagguaaggauuc

SEQ ID NO: 1576153 - RNA, 19 nt, Artificial Sequence
  Description of Artificial Sequence: Synthetic oligonucleotide
aaacauuuaaugguugccu

SEQ ID NO: 1576154 - RNA, 19 nt, Artificial Sequence
  Description of Artificial Sequence: Synthetic oligonucleotide
uaaauuucaacaggcuuag

SEQ ID NO: 1576155 - RNA, 19 nt, Artificial Sequence
  Description of Artificial Sequence: Synthetic oligonucleotide
guugauuuggguuuucaac

SEQ ID NO: 1576156 - RNA, 19 nt, Artificial Sequence
  Description of Artificial Sequence: Synthetic oligonucleotide
aauguguguccguuaacug

SEQ ID NO: 1576157 - RNA, 19 nt, Artificial Sequence
  Description of Artificial Sequence: Synthetic oligonucleotide
caacgagaaacuauuuucc

SEQ ID NO: 1576158 - RNA, 19 nt, Artificial Sequence
  Description of Artificial Sequence: Synthetic oligonucleotide
ucuagcaaugguaagccuc

SEQ ID NO: 1576159 - RNA, 19 nt, Artificial Sequence
  Description of Artificial Sequence: Synthetic oligonucleotide
guauucuugauuaaucagc

SEQ ID NO: 1576160 - RNA, 19 nt, Artificial Sequence
  Description of Artificial Sequence: Synthetic oligonucleotide
uuucauuuaagaaggugau

SEQ ID NO: 1576161 - RNA, 19 nt, Artificial Sequence
  Description of Artificial Sequence: Synthetic oligonucleotide
uggaguguauucuugauua

SEQ ID NO: 1576162 - RNA, 19 nt, Artificial Sequence
  Description of Artificial Sequence: Synthetic oligonucleotide
uuucaauaauacuucugca

SEQ ID NO: 1576163 - RNA, 19 nt, Artificial Sequence
  Description of Artificial Sequence: Synthetic oligonucleotide
ggugacaacaucugggugg

SEQ ID NO: 1576164 - RNA, 19 nt, Artificial Sequence
  Description of Artificial Sequence: Synthetic oligonucleotide
ucuagaaauuuaagaggag

SEQ ID NO: 1576165 - RNA, 19 nt, Artificial Sequence
  Description of Artificial Sequence: Synthetic oligonucleotide
auaguaagacaauggccac

SEQ ID NO: 1576166 - RNA, 19 nt, Artificial Sequence
  Description of Artificial Sequence: Synthetic oligonucleotide
uguugguugaaaaggagua

SEQ ID NO: 1576167 - RNA, 19 nt, Artificial Sequence
  Description of Artificial Sequence: Synthetic oligonucleotide
uuugcuuacucgaggauaa

SEQ ID NO: 1576168 - RNA, 19 nt, Artificial Sequence
  Description of Artificial Sequence: Synthetic oligonucleotide
cuuaauauguccaauuucu

SEQ ID NO: 1576169 - RNA, 19 nt, Artificial Sequence
  Description of Artificial Sequence: Synthetic oligonucleotide
aauuucaauaauacuucug

SEQ ID NO: 1576170 - RNA, 19 nt, Artificial Sequence
  Description of Artificial Sequence: Synthetic oligonucleotide
ugcuauuuaugcuacccug

SEQ ID NO: 1576171 - RNA, 19 nt, Artificial Sequence
  Description of Artificial Sequence: Synthetic oligonucleotide
ugaaauuagugaaacuaua

SEQ ID NO: 1576172 - RNA, 19 nt, Artificial Sequence
  Description of Artificial Sequence: Synthetic oligonucleotide
auaauacuucugcaguuag

SEQ ID NO: 1576173 - RNA, 19 nt, Artificial Sequence
  Description of Artificial Sequence: Synthetic oligonucleotide
uacucgaggaucuucaaaa

SEQ ID NO: 1576174 - RNA, 19 nt, Artificial Sequence
  Description of Artificial Sequence: Synthetic oligonucleotide
auguaugagagcaugguag

SEQ ID NO: 1576175 - RNA, 19 nt, Artificial Sequence
  Description of Artificial Sequence: Synthetic oligonucleotide
acugaaauuagugaaacua

SEQ ID NO: 1576176 - RNA, 19 nt, Artificial Sequence
  Description of Artificial Sequence: Synthetic oligonucleotide
agcaugguaguacucgagg

SEQ ID NO: 1576177 - RNA, 19 nt, Artificial Sequence
  Description of Artificial Sequence: Synthetic oligonucleotide
uuuaucuaguagacaauaa

SEQ ID NO: 1576178 - RNA, 19 nt, Artificial Sequence
  Description of Artificial Sequence: Synthetic oligonucleotide
aaaaguuaccagaugccug

SEQ ID NO: 1576179 - RNA, 19 nt, Artificial Sequence
  Description of Artificial Sequence: Synthetic oligonucleotide
auacuuugcuuacucgagg

SEQ ID NO: 1576180 - RNA, 19 nt, Artificial Sequence
  Description of Artificial Sequence: Synthetic oligonucleotide
uuguugaucuccugacugg

SEQ ID NO: 1576181 - RNA, 19 nt, Artificial Sequence
  Description of Artificial Sequence: Synthetic oligonucleotide
aauguaugagagcauggua

SEQ ID NO: 1576182 - RNA, 19 nt, Artificial Sequence
  Description of Artificial Sequence: Synthetic oligonucleotide
auauaaaaguuaccagaug

SEQ ID NO: 1576183 - RNA, 19 nt, Artificial Sequence
  Description of Artificial Sequence: Synthetic oligonucleotide
uaaaaguuaccagaugccu

SEQ ID NO: 1576184 - RNA, 19 nt, Artificial Sequence
  Description of Artificial Sequence: Synthetic oligonucleotide
uguucuaaugcaucaguaa

SEQ ID NO: 1576185 - RNA, 19 nt, Artificial Sequence
  Description of Artificial Sequence: Synthetic oligonucleotide
uuuggguuuucaacgagaa

SEQ ID NO: 1576186 - RNA, 19 nt, Artificial Sequence
  Description of Artificial Sequence: Synthetic oligonucleotide
ugcucuuaaugcaaaauuu

SEQ ID NO: 1576187 - RNA, 19 nt, Artificial Sequence
  Description of Artificial Sequence: Synthetic oligonucleotide
gagagcaugguaguacucg

SEQ ID NO: 1576188 - RNA, 19 nt, Artificial Sequence
  Description of Artificial Sequence: Synthetic oligonucleotide
aguaagcuccuuaaaguac

SEQ ID NO: 1576189 - RNA, 19 nt, Artificial Sequence
  Description of Artificial Sequence: Synthetic oligonucleotide
auugaagugauuucauuua

SEQ ID NO: 1576190 - RNA, 19 nt, Artificial Sequence
  Description of Artificial Sequence: Synthetic oligonucleotide
aaauuuaagaggagacuca

SEQ ID NO: 1576191 - RNA, 19 nt, Artificial Sequence
  Description of Artificial Sequence: Synthetic oligonucleotide
uuuaaugguugccuguaau

SEQ ID NO: 1576192 - RNA, 19 nt, Artificial Sequence
  Description of Artificial Sequence: Synthetic oligonucleotide
gacaaagagacuucagaga

SEQ ID NO: 1576193 - RNA, 19 nt, Artificial Sequence
  Description of Artificial Sequence: Synthetic oligonucleotide
gauuaaucagcuugccaac

SEQ ID NO: 1576194 - RNA, 19 nt, Artificial Sequence
  Description of Artificial Sequence: Synthetic oligonucleotide
acauauugaagugauuuca

SEQ ID NO: 1576195 - RNA, 19 nt, Artificial Sequence
  Description of Artificial Sequence: Synthetic oligonucleotide
uuagugaaacuauaacaau

SEQ ID NO: 1576196 - RNA, 19 nt, Artificial Sequence
  Description of Artificial Sequence: Synthetic oligonucleotide
uguaacaaaugggacacgu

SEQ ID NO: 1576197 - RNA, 19 nt, Artificial Sequence
  Description of Artificial Sequence: Synthetic oligonucleotide
guuaccagaugccugaaga

SEQ ID NO: 1576198 - RNA, 19 nt, Artificial Sequence
  Description of Artificial Sequence: Synthetic oligonucleotide
aaggucaucuauaggauga

SEQ ID NO: 1576199 - RNA, 19 nt, Artificial Sequence
  Description of Artificial Sequence: Synthetic oligonucleotide
gaaauucucauuucaggaa

SEQ ID NO: 1576200 - RNA, 19 nt, Artificial Sequence
  Description of Artificial Sequence: Synthetic oligonucleotide
uuuuaucuaguagacaaua

SEQ ID NO: 1576201 - RNA, 19 nt, Artificial Sequence
  Description of Artificial Sequence: Synthetic oligonucleotide
aggaguaucaacauuaaua

SEQ ID NO: 1576202 - RNA, 19 nt, Artificial Sequence
  Description of Artificial Sequence: Synthetic oligonucleotide
uaauaucacugaaauuagu

SEQ ID NO: 1576203 - RNA, 19 nt, Artificial Sequence
  Description of Artificial Sequence: Synthetic oligonucleotide
caaaauguaugagagcaug

SEQ ID NO: 1576204 - RNA, 19 nt, Artificial Sequence
  Description of Artificial Sequence: Synthetic oligonucleotide
uguaugagagcaugguagu

SEQ ID NO: 1576205 - RNA, 19 nt, Artificial Sequence
  Description of Artificial Sequence: Synthetic oligonucleotide
uaaaguacuggagaacaac

SEQ ID NO: 1576206 - RNA, 19 nt, Artificial Sequence
  Description of Artificial Sequence: Synthetic oligonucleotide
uucgcaaaggucuccauau

SEQ ID NO: 1576207 - RNA, 19 nt, Artificial Sequence
  Description of Artificial Sequence: Synthetic oligonucleotide
aagacgagugauaucuguc

SEQ ID NO: 1576208 - RNA, 19 nt, Artificial Sequence
  Description of Artificial Sequence: Synthetic oligonucleotide
aucuaguagacaauaaaca

SEQ ID NO: 1576209 - RNA, 19 nt, Artificial Sequence
  Description of Artificial Sequence: Synthetic oligonucleotide
uuacucgaggauaaauuuc

SEQ ID NO: 1576210 - RNA, 19 nt, Artificial Sequence
  Description of Artificial Sequence: Synthetic oligonucleotide
aauuuaagaggagacucau

SEQ ID NO: 1576211 - RNA, 19 nt, Artificial Sequence
  Description of Artificial Sequence: Synthetic oligonucleotide
auaaauuucaacaggcuua

SEQ ID NO: 1576212 - RNA, 19 nt, Artificial Sequence
  Description of Artificial Sequence: Synthetic oligonucleotide
caauaaagaauaagcccac

SEQ ID NO: 1576213 - RNA, 19 nt, Artificial Sequence
  Description of Artificial Sequence: Synthetic oligonucleotide
aauaggcaacuuugaaggu

SEQ ID NO: 1576214 - RNA, 19 nt, Artificial Sequence
  Description of Artificial Sequence: Synthetic oligonucleotide
gaaggucaucuauaggaug

SEQ ID NO: 1576215 - RNA, 19 nt, Artificial Sequence
  Description of Artificial Sequence: Synthetic oligonucleotide
auuuaagaaggugauuaug

SEQ ID NO: 1576216 - RNA, 19 nt, Artificial Sequence
  Description of Artificial Sequence: Synthetic oligonucleotide
uaugagagcaugguaguac

SEQ ID NO: 1576217 - RNA, 19 nt, Artificial Sequence
  Description of Artificial Sequence: Synthetic oligonucleotide
cuucguuucaacaucugca

SEQ ID NO: 1576218 - RNA, 19 nt, Artificial Sequence
  Description of Artificial Sequence: Synthetic oligonucleotide
uacuuugcuuacucgagga

SEQ ID NO: 1576219 - RNA, 19 nt, Artificial Sequence
  Description of Artificial Sequence: Synthetic oligonucleotide
uugcucuuaaugcaaaauu

SEQ ID NO: 1576220 - RNA, 19 nt, Artificial Sequence
  Description of Artificial Sequence: Synthetic oligonucleotide
uacccugacuuccaucuag

SEQ ID NO: 1576221 - RNA, 19 nt, Artificial Sequence
  Description of Artificial Sequence: Synthetic oligonucleotide
uucucagaaugacauuucu

SEQ ID NO: 1576222 - RNA, 19 nt, Artificial Sequence
  Description of Artificial Sequence: Synthetic oligonucleotide
uuucaauaagacgagugau

SEQ ID NO: 1576223 - RNA, 19 nt, Artificial Sequence
  Description of Artificial Sequence: Synthetic oligonucleotide
ucuguggaguguauucuug

SEQ ID NO: 1576224 - RNA, 19 nt, Artificial Sequence
  Description of Artificial Sequence: Synthetic oligonucleotide
uauguccaauuucuguucu

SEQ ID NO: 1576225 - RNA, 19 nt, Artificial Sequence
  Description of Artificial Sequence: Synthetic oligonucleotide
auaaacuuugguaaacaga

SEQ ID NO: 1576226 - RNA, 19 nt, Artificial Sequence
  Description of Artificial Sequence: Synthetic oligonucleotide
aggauucuauaccaguuga

SEQ ID NO: 1576227 - RNA, 19 nt, Artificial Sequence
  Description of Artificial Sequence: Synthetic oligonucleotide
ccuauaguaagacaauggc

SEQ ID NO: 1576228 - RNA, 19 nt, Artificial Sequence
  Description of Artificial Sequence: Synthetic oligonucleotide
ugaaggucaucuauaggau

SEQ ID NO: 1576229 - RNA, 19 nt, Artificial Sequence
  Description of Artificial Sequence: Synthetic oligonucleotide
gacuggauacugaauauac

SEQ ID NO: 1576230 - RNA, 19 nt, Artificial Sequence
  Description of Artificial Sequence: Synthetic oligonucleotide
gguucuuuuguuauucgcg

SEQ ID NO: 1576231 - RNA, 19 nt, Artificial Sequence
  Description of Artificial Sequence: Synthetic oligonucleotide
agugaaacuauaacaauau

SEQ ID NO: 1576232 - RNA, 19 nt, Artificial Sequence
  Description of Artificial Sequence: Synthetic oligonucleotide
gcaauaaagaauaagccca

SEQ ID NO: 1576233 - RNA, 19 nt, Artificial Sequence
  Description of Artificial Sequence: Synthetic oligonucleotide
uuacagguaaggauucuau

SEQ ID NO: 1576234 - RNA, 19 nt, Artificial Sequence
  Description of Artificial Sequence: Synthetic oligonucleotide
ucauuaacucaaguuguug

SEQ ID NO: 1576235 - RNA, 19 nt, Artificial Sequence
  Description of Artificial Sequence: Synthetic oligonucleotide
uuaugcuacccugacuucc

SEQ ID NO: 1576236 - RNA, 19 nt, Artificial Sequence
  Description of Artificial Sequence: Synthetic oligonucleotide
auacuguaacaaaugggac

SEQ ID NO: 1576237 - RNA, 19 nt, Artificial Sequence
  Description of Artificial Sequence: Synthetic oligonucleotide
uauuuaugcuacccugacu

SEQ ID NO: 1576238 - RNA, 19 nt, Artificial Sequence
  Description of Artificial Sequence: Synthetic oligonucleotide
uuaaaguacuggagaacaa

SEQ ID NO: 1576239 - RNA, 19 nt, Artificial Sequence
  Description of Artificial Sequence: Synthetic oligonucleotide
cuauaggaugaccaugaug

SEQ ID NO: 1576240 - RNA, 19 nt, Artificial Sequence
  Description of Artificial Sequence: Synthetic oligonucleotide
uggagaacaaccuccuuau

SEQ ID NO: 1576241 - RNA, 19 nt, Artificial Sequence
  Description of Artificial Sequence: Synthetic oligonucleotide
caucuagcaaugguaagcc

SEQ ID NO: 1576242 - RNA, 19 nt, Artificial Sequence
  Description of Artificial Sequence: Synthetic oligonucleotide
gauaucuguccaaugugug

SEQ ID NO: 1576243 - RNA, 19 nt, Artificial Sequence
  Description of Artificial Sequence: Synthetic oligonucleotide
aacagacaaagagacuuca

SEQ ID NO: 1576244 - RNA, 19 nt, Artificial Sequence
  Description of Artificial Sequence: Synthetic oligonucleotide
ugaucuccugacuggauac

SEQ ID NO: 1576245 - RNA, 19 nt, Artificial Sequence
  Description of Artificial Sequence: Synthetic oligonucleotide
gauaaauuucaacaggcuu

SEQ ID NO: 1576246 - RNA, 19 nt, Artificial Sequence
  Description of Artificial Sequence: Synthetic oligonucleotide
aauaaagaauaagcccacu

SEQ ID NO: 1576247 - RNA, 19 nt, Artificial Sequence
  Description of Artificial Sequence: Synthetic oligonucleotide
aagaauaagcccacuuaca

SEQ ID NO: 1576248 - RNA, 19 nt, Artificial Sequence
  Description of Artificial Sequence: Synthetic oligonucleotide
aguggucuucguuucaaca

SEQ ID NO: 1576249 - RNA, 19 nt, Artificial Sequence
  Description of Artificial Sequence: Synthetic oligonucleotide
caugaauuccuuuaacaaa

SEQ ID NO: 1576250 - RNA, 19 nt, Artificial Sequence
  Description of Artificial Sequence: Synthetic oligonucleotide
aacaaccuccuuaucaccu

SEQ ID NO: 1576251 - RNA, 19 nt, Artificial Sequence
  Description of Artificial Sequence: Synthetic oligonucleotide
uuaaucagcuugccaacau

SEQ ID NO: 1576252 - RNA, 19 nt, Artificial Sequence
  Description of Artificial Sequence: Synthetic oligonucleotide
caguuagggcacuugagug

SEQ ID NO: 1576253 - RNA, 19 nt, Artificial Sequence
  Description of Artificial Sequence: Synthetic oligonucleotide
uuaacucaaguuguuguuc

SEQ ID NO: 1576254 - RNA, 19 nt, Artificial Sequence
  Description of Artificial Sequence: Synthetic oligonucleotide
uaugcuacccugacuucca

SEQ ID NO: 1576255 - RNA, 19 nt, Artificial Sequence
  Description of Artificial Sequence: Synthetic oligonucleotide
acuugaguggaauucgcaa

SEQ ID NO: 1576256 - RNA, 19 nt, Artificial Sequence
  Description of Artificial Sequence: Synthetic oligonucleotide
ucaucuauaggaugaccau

SEQ ID NO: 1576257 - RNA, 19 nt, Artificial Sequence
  Description of Artificial Sequence: Synthetic oligonucleotide
aaaggauagcauaccauau

SEQ ID NO: 1576258 - RNA, 19 nt, Artificial Sequence
  Description of Artificial Sequence: Synthetic oligonucleotide
uaucuguccaauguguguc

SEQ ID NO: 1576259 - RNA, 19 nt, Artificial Sequence
  Description of Artificial Sequence: Synthetic oligonucleotide
caucugcacacguugucgg

SEQ ID NO: 1576260 - RNA, 19 nt, Artificial Sequence
  Description of Artificial Sequence: Synthetic oligonucleotide
gacacguuaacuccuccuc

SEQ ID NO: 1576261 - RNA, 19 nt, Artificial Sequence
  Description of Artificial Sequence: Synthetic oligonucleotide
uucaauaauugcucuuaau

SEQ ID NO: 1576262 - RNA, 19 nt, Artificial Sequence
  Description of Artificial Sequence: Synthetic oligonucleotide
guacuggagaacaaccucc

SEQ ID NO: 1576263 - RNA, 19 nt, Artificial Sequence
  Description of Artificial Sequence: Synthetic oligonucleotide
aaggaguaucaacauuaau

SEQ ID NO: 1576264 - RNA, 19 nt, Artificial Sequence
  Description of Artificial Sequence: Synthetic oligonucleotide
caaaggucuccauauauaa

SEQ ID NO: 1576265 - RNA, 19 nt, Artificial Sequence
  Description of Artificial Sequence: Synthetic oligonucleotide
accaguugaagcaauuuca

SEQ ID NO: 1576266 - RNA, 19 nt, Artificial Sequence
  Description of Artificial Sequence: Synthetic oligonucleotide
uggucuucguuucaacauc

SEQ ID NO: 1576267 - RNA, 19 nt, Artificial Sequence
  Description of Artificial Sequence: Synthetic oligonucleotide
uuaccagaugccugaagaa

SEQ ID NO: 1576268 - RNA, 19 nt, Artificial Sequence
  Description of Artificial Sequence: Synthetic oligonucleotide
uguccguuaacuguuuaaa

SEQ ID NO: 1576269 - RNA, 19 nt, Artificial Sequence
  Description of Artificial Sequence: Synthetic oligonucleotide
cuugauuaaucagcuugcc

SEQ ID NO: 1576270 - RNA, 19 nt, Artificial Sequence
  Description of Artificial Sequence: Synthetic oligonucleotide
guaucaacauuaauaucac

SEQ ID NO: 1576271 - RNA, 19 nt, Artificial Sequence
  Description of Artificial Sequence: Synthetic oligonucleotide
uaagcccacuuacaauugu

SEQ ID NO: 1576272 - RNA, 19 nt, Artificial Sequence
  Description of Artificial Sequence: Synthetic oligonucleotide
ggaguaucaacauuaauau

SEQ ID NO: 1576273 - RNA, 19 nt, Artificial Sequence
  Description of Artificial Sequence: Synthetic oligonucleotide
agaaggugauuauguguug

SEQ ID NO: 1576274 - RNA, 19 nt, Artificial Sequence
  Description of Artificial Sequence: Synthetic oligonucleotide
ucuguccaauguguguccg

SEQ ID NO: 1576275 - RNA, 19 nt, Artificial Sequence
  Description of Artificial Sequence: Synthetic oligonucleotide
ugcugguacuuuucaauaa

SEQ ID NO: 1576276 - RNA, 19 nt, Artificial Sequence
  Description of Artificial Sequence: Synthetic oligonucleotide
uuuacagguaaggauucua

SEQ ID NO: 1576277 - RNA, 19 nt, Artificial Sequence
  Description of Artificial Sequence: Synthetic oligonucleotide
uggaauucgcaaaggucuc

SEQ ID NO: 1576278 - RNA, 19 nt, Artificial Sequence
  Description of Artificial Sequence: Synthetic oligonucleotide
acacguuaacuccuccuca

SEQ ID NO: 1576279 - RNA, 19 nt, Artificial Sequence
  Description of Artificial Sequence: Synthetic oligonucleotide
guggaauucgcaaaggucu

SEQ ID NO: 1576280 - RNA, 19 nt, Artificial Sequence
  Description of Artificial Sequence: Synthetic oligonucleotide
uuucaacgagaaacuauuu

SEQ ID NO: 1576281 - RNA, 19 nt, Artificial Sequence
  Description of Artificial Sequence: Synthetic oligonucleotide
aguuaccagaugccugaag

SEQ ID NO: 1576282 - RNA, 19 nt, Artificial Sequence
  Description of Artificial Sequence: Synthetic oligonucleotide
gacgagugauaucugucca

SEQ ID NO: 1576283 - RNA, 19 nt, Artificial Sequence
  Description of Artificial Sequence: Synthetic oligonucleotide
auuuaagaggagacucauc

SEQ ID NO: 1576284 - RNA, 19 nt, Artificial Sequence
  Description of Artificial Sequence: Synthetic oligonucleotide
gccuauaguaagacaaugg

SEQ ID NO: 1576285 - RNA, 19 nt, Artificial Sequence
  Description of Artificial Sequence: Synthetic oligonucleotide
uucuuucaaauaggcaacu

SEQ ID NO: 1576286 - RNA, 19 nt, Artificial Sequence
  Description of Artificial Sequence: Synthetic oligonucleotide
auaaaggauagcauaccau

SEQ ID NO: 1576287 - RNA, 19 nt, Artificial Sequence
  Description of Artificial Sequence: Synthetic oligonucleotide
guaauguucagggcaggug

SEQ ID NO: 1576288 - RNA, 19 nt, Artificial Sequence
  Description of Artificial Sequence: Synthetic oligonucleotide
uguuggccuauaguaagac

SEQ ID NO: 1576289 - RNA, 19 nt, Artificial Sequence
  Description of Artificial Sequence: Synthetic oligonucleotide
cuugaguggaauucgcaaa

SEQ ID NO: 1576290 - RNA, 19 nt, Artificial Sequence
  Description of Artificial Sequence: Synthetic oligonucleotide
uguggaguguauucuugau

SEQ ID NO: 1576291 - RNA, 19 nt, Artificial Sequence
  Description of Artificial Sequence: Synthetic oligonucleotide
uuuaugcuacccugacuuc

SEQ ID NO: 1576292 - RNA, 19 nt, Artificial Sequence
  Description of Artificial Sequence: Synthetic oligonucleotide
caucuuguaaagauguagu

SEQ ID NO: 1576293 - RNA, 19 nt, Artificial Sequence
  Description of Artificial Sequence: Synthetic oligonucleotide
cgaggauaaauuucaacag

SEQ ID NO: 1576294 - RNA, 19 nt, Artificial Sequence
  Description of Artificial Sequence: Synthetic oligonucleotide
aaaggucuccauauauaaa

SEQ ID NO: 1576295 - RNA, 19 nt, Artificial Sequence
  Description of Artificial Sequence: Synthetic oligonucleotide
aauuguugauuuggguuuu

SEQ ID NO: 1576296 - RNA, 19 nt, Artificial Sequence
  Description of Artificial Sequence: Synthetic oligonucleotide
auuuaaugguugccuguaa

SEQ ID NO: 1576297 - RNA, 19 nt, Artificial Sequence
  Description of Artificial Sequence: Synthetic oligonucleotide
ucuauaggaugaccaugau

SEQ ID NO: 1576298 - RNA, 19 nt, Artificial Sequence
  Description of Artificial Sequence: Synthetic oligonucleotide
uucucauuucaggaaugac

SEQ ID NO: 1576299 - RNA, 19 nt, Artificial Sequence
  Description of Artificial Sequence: Synthetic oligonucleotide
ugcuccauucuuccuuuaa

SEQ ID NO: 1576300 - RNA, 19 nt, Artificial Sequence
  Description of Artificial Sequence: Synthetic oligonucleotide
uggccuauaguaagacaau

SEQ ID NO: 1576301 - RNA, 19 nt, Artificial Sequence
  Description of Artificial Sequence: Synthetic oligonucleotide
auucgcaaaggucuccaua

SEQ ID NO: 1576302 - RNA, 19 nt, Artificial Sequence
  Description of Artificial Sequence: Synthetic oligonucleotide
ggcacuugaguggaauucg

SEQ ID NO: 1576303 - RNA, 19 nt, Artificial Sequence
  Description of Artificial Sequence: Synthetic oligonucleotide
cuggauacugaauauacuu

SEQ ID NO: 1576304 - RNA, 19 nt, Artificial Sequence
  Description of Artificial Sequence: Synthetic oligonucleotide
agggcaggugacaacaucu

SEQ ID NO: 1576305 - RNA, 19 nt, Artificial Sequence
  Description of Artificial Sequence: Synthetic oligonucleotide
aggucaucuauaggaugac

SEQ ID NO: 1576306 - RNA, 19 nt, Artificial Sequence
  Description of Artificial Sequence: Synthetic oligonucleotide
guuaacuccuccucaaaau

SEQ ID NO: 1576307 - RNA, 19 nt, Artificial Sequence
  Description of Artificial Sequence: Synthetic oligonucleotide
gcaaugguaagccucugca

SEQ ID NO: 1576308 - RNA, 19 nt, Artificial Sequence
  Description of Artificial Sequence: Synthetic oligonucleotide
caguaagcuccuuaaagua

SEQ ID NO: 1576309 - RNA, 19 nt, Artificial Sequence
  Description of Artificial Sequence: Synthetic oligonucleotide
ccaucuagcaaugguaagc

SEQ ID NO: 1576310 - RNA, 19 nt, Artificial Sequence
  Description of Artificial Sequence: Synthetic oligonucleotide
gaauaagcccacuuacaau

SEQ ID NO: 1576311 - RNA, 19 nt, Artificial Sequence
  Description of Artificial Sequence: Synthetic oligonucleotide
ugccuguaauguucagggc

SEQ ID NO: 1576312 - RNA, 19 nt, Artificial Sequence
  Description of Artificial Sequence: Synthetic oligonucleotide
ugcuuacucgaggauaaau

SEQ ID NO: 1576313 - RNA, 19 nt, Artificial Sequence
  Description of Artificial Sequence: Synthetic oligonucleotide
cguuucaacaucugcacac

SEQ ID NO: 1576314 - RNA, 19 nt, Artificial Sequence
  Description of Artificial Sequence: Synthetic oligonucleotide
ugacuggauacugaauaua

SEQ ID NO: 1576315 - RNA, 19 nt, Artificial Sequence
  Description of Artificial Sequence: Synthetic oligonucleotide
cuuacucgaggauaaauuu

SEQ ID NO: 1576316 - RNA, 19 nt, Artificial Sequence
  Description of Artificial Sequence: Synthetic oligonucleotide
ugguaagccucugcaauaa

SEQ ID NO: 1576317 - RNA, 19 nt, Artificial Sequence
  Description of Artificial Sequence: Synthetic oligonucleotide
cuggagaacaaccuccuua

SEQ ID NO: 1576318 - RNA, 19 nt, Artificial Sequence
  Description of Artificial Sequence: Synthetic oligonucleotide
uucauuuaagaaggugauu

SEQ ID NO: 1576319 - RNA, 19 nt, Artificial Sequence
  Description of Artificial Sequence: Synthetic oligonucleotide
gagcaugguaguacucgag

SEQ ID NO: 1576320 - RNA, 19 nt, Artificial Sequence
  Description of Artificial Sequence: Synthetic oligonucleotide
guuagggcacuugagugga

SEQ ID NO: 1576321 - RNA, 19 nt, Artificial Sequence
  Description of Artificial Sequence: Synthetic oligonucleotide
aucuagcaaugguaagccu

SEQ ID NO: 1576322 - RNA, 19 nt, Artificial Sequence
  Description of Artificial Sequence: Synthetic oligonucleotide
cacacguugucggacauca

SEQ ID NO: 1576323 - RNA, 19 nt, Artificial Sequence
  Description of Artificial Sequence: Synthetic oligonucleotide
caauuguugauuuggguuu

SEQ ID NO: 1576324 - RNA, 19 nt, Artificial Sequence
  Description of Artificial Sequence: Synthetic oligonucleotide
gaguggaauucgcaaaggu

SEQ ID NO: 1576325 - RNA, 19 nt, Artificial Sequence
  Description of Artificial Sequence: Synthetic oligonucleotide
acgagugauaucuguccaa

SEQ ID NO: 1576326 - RNA, 19 nt, Artificial Sequence
  Description of Artificial Sequence: Synthetic oligonucleotide
cuuagccucaggaaguggu

SEQ ID NO: 1576327 - RNA, 19 nt, Artificial Sequence
  Description of Artificial Sequence: Synthetic oligonucleotide
cuagcaaugguaagccucu

SEQ ID NO: 1576328 - RNA, 19 nt, Artificial Sequence
  Description of Artificial Sequence: Synthetic oligonucleotide
uguccaauguguguccguu

SEQ ID NO: 1576329 - RNA, 19 nt, Artificial Sequence
  Description of Artificial Sequence: Synthetic oligonucleotide
agcccacuuacaauuguug

SEQ ID NO: 1576330 - RNA, 19 nt, Artificial Sequence
  Description of Artificial Sequence: Synthetic oligonucleotide
auccuugucaggccaggaa

SEQ ID NO: 1576331 - RNA, 19 nt, Artificial Sequence
  Description of Artificial Sequence: Synthetic oligonucleotide
ugggacacguuaacuccuc

SEQ ID NO: 1576332 - RNA, 19 nt, Artificial Sequence
  Description of Artificial Sequence: Synthetic oligonucleotide
gauacugaauauacuuuau

SEQ ID NO: 1576333 - RNA, 19 nt, Artificial Sequence
  Description of Artificial Sequence: Synthetic oligonucleotide
cauauugaagugauuucau

SEQ ID NO: 1576334 - RNA, 19 nt, Artificial Sequence
  Description of Artificial Sequence: Synthetic oligonucleotide
uccugacuggauacugaau

SEQ ID NO: 1576335 - RNA, 19 nt, Artificial Sequence
  Description of Artificial Sequence: Synthetic oligonucleotide
auaagacgagugauaucug

SEQ ID NO: 1576336 - RNA, 19 nt, Artificial Sequence
  Description of Artificial Sequence: Synthetic oligonucleotide
guaguacucgaggaucuuc

SEQ ID NO: 1576337 - RNA, 19 nt, Artificial Sequence
  Description of Artificial Sequence: Synthetic oligonucleotide
cuuugcuuacucgaggaua

SEQ ID NO: 1576338 - RNA, 19 nt, Artificial Sequence
  Description of Artificial Sequence: Synthetic oligonucleotide
cacuugaguggaauucgca

SEQ ID NO: 1576339 - RNA, 19 nt, Artificial Sequence
  Description of Artificial Sequence: Synthetic oligonucleotide
ccguuaacuguuuaaacaa

SEQ ID NO: 1576340 - RNA, 19 nt, Artificial Sequence
  Description of Artificial Sequence: Synthetic oligonucleotide
guuuucaacgagaaacuau

SEQ ID NO: 1576341 - RNA, 19 nt, Artificial Sequence
  Description of Artificial Sequence: Synthetic oligonucleotide
caaugguaagccucugcaa

SEQ ID NO: 1576342 - RNA, 19 nt, Artificial Sequence
  Description of Artificial Sequence: Synthetic oligonucleotide
caauguguguccguuaacu

SEQ ID NO: 1576343 - RNA, 19 nt, Artificial Sequence
  Description of Artificial Sequence: Synthetic oligonucleotide
guacucgaggaucuucaaa

SEQ ID NO: 1576344 - RNA, 19 nt, Artificial Sequence
  Description of Artificial Sequence: Synthetic oligonucleotide
guguccguuaacuguuuaa

SEQ ID NO: 1576345 - RNA, 19 nt, Artificial Sequence
  Description of Artificial Sequence: Synthetic oligonucleotide
gcuacccugacuuccaucu

SEQ ID NO: 1576346 - RNA, 19 nt, Artificial Sequence
  Description of Artificial Sequence: Synthetic oligonucleotide
ucgcaaaggucuccauaua

SEQ ID NO: 1576347 - RNA, 19 nt, Artificial Sequence
  Description of Artificial Sequence: Synthetic oligonucleotide
aagcccacuuacaauuguu

SEQ ID NO: 1576348 - RNA, 19 nt, Artificial Sequence
  Description of Artificial Sequence: Synthetic oligonucleotide
cacguuaacuccuccucaa

SEQ ID NO: 1576349 - RNA, 19 nt, Artificial Sequence
  Description of Artificial Sequence: Synthetic oligonucleotide
ugcuacccugacuuccauc

SEQ ID NO: 1576350 - RNA, 19 nt, Artificial Sequence
  Description of Artificial Sequence: Synthetic oligonucleotide
acguuaacuccuccucaaa

SEQ ID NO: 1576351 - RNA, 19 nt, Artificial Sequence
  Description of Artificial Sequence: Synthetic oligonucleotide
cauuuaaugguugccugua

SEQ ID NO: 1576352 - RNA, 19 nt, Artificial Sequence
  Description of Artificial Sequence: Synthetic oligonucleotide
gcuuucuuaauauguccaa

SEQ ID NO: 1576353 - RNA, 19 nt, Artificial Sequence
  Description of Artificial Sequence: Synthetic oligonucleotide
cauuuaagaaggugauuau

SEQ ID NO: 1576354 - RNA, 19 nt, Artificial Sequence
  Description of Artificial Sequence: Synthetic oligonucleotide
gaguguauucuugauuaau

SEQ ID NO: 1576355 - RNA, 19 nt, Artificial Sequence
  Description of Artificial Sequence: Synthetic oligonucleotide
auuucaggaaugacagcuu

SEQ ID NO: 1576356 - RNA, 19 nt, Artificial Sequence
  Description of Artificial Sequence: Synthetic oligonucleotide
ccuccuuaucaccuugaag

SEQ ID NO: 1576357 - RNA, 19 nt, Artificial Sequence
  Description of Artificial Sequence: Synthetic oligonucleotide
ggaauucgcaaaggucucc

SEQ ID NO: 1576358 - RNA, 19 nt, Artificial Sequence
  Description of Artificial Sequence: Synthetic oligonucleotide
caucaguaagcuccuuaaa

SEQ ID NO: 1576359 - RNA, 19 nt, Artificial Sequence
  Description of Artificial Sequence: Synthetic oligonucleotide
aaguuaccagaugccugaa

SEQ ID NO: 1576360 - RNA, 19 nt, Artificial Sequence
  Description of Artificial Sequence: Synthetic oligonucleotide
gcucuuaaugcaaaauuua

SEQ ID NO: 1576361 - RNA, 19 nt, Artificial Sequence
  Description of Artificial Sequence: Synthetic oligonucleotide
gcaguuagggcacuugagu

SEQ ID NO: 1576362 - RNA, 19 nt, Artificial Sequence
  Description of Artificial Sequence: Synthetic oligonucleotide
caucacagagagcugccua

SEQ ID NO: 1576363 - RNA, 19 nt, Artificial Sequence
  Description of Artificial Sequence: Synthetic oligonucleotide
caugguaguacucgaggau

SEQ ID NO: 1576364 - RNA, 19 nt, Artificial Sequence
  Description of Artificial Sequence: Synthetic oligonucleotide
cugcacacguugucggaca

SEQ ID NO: 1576365 - RNA, 19 nt, Artificial Sequence
  Description of Artificial Sequence: Synthetic oligonucleotide
guugucggacaucaucaau

SEQ ID NO: 1576366 - RNA, 19 nt, Artificial Sequence
  Description of Artificial Sequence: Synthetic oligonucleotide
guggaguguauucuugauu

SEQ ID NO: 1576367 - RNA, 19 nt, Artificial Sequence
  Description of Artificial Sequence: Synthetic oligonucleotide
cacuuacaauuguugauuu

SEQ ID NO: 1576368 - RNA, 19 nt, Artificial Sequence
  Description of Artificial Sequence: Synthetic oligonucleotide
gaugccugaagaacauuuu

SEQ ID NO: 1576369 - RNA, 19 nt, Artificial Sequence
  Description of Artificial Sequence: Synthetic oligonucleotide
ccuugucaggccaggaaca

SEQ ID NO: 1576370 - RNA, 19 nt, Artificial Sequence
  Description of Artificial Sequence: Synthetic oligonucleotide
guaugagagcaugguagua

SEQ ID NO: 1576371 - RNA, 19 nt, Artificial Sequence
  Description of Artificial Sequence: Synthetic oligonucleotide
ggaguguauucuugauuaa

SEQ ID NO: 1576372 - RNA, 19 nt, Artificial Sequence
  Description of Artificial Sequence: Synthetic oligonucleotide
gcacuugaguggaauucgc

SEQ ID NO: 1576373 - RNA, 19 nt, Artificial Sequence
  Description of Artificial Sequence: Synthetic oligonucleotide
gugacaacaucuggguggu

SEQ ID NO: 1576374 - RNA, 19 nt, Artificial Sequence
  Description of Artificial Sequence: Synthetic oligonucleotide
gguuuucaacgagaaacua

SEQ ID NO: 1576375 - RNA, 19 nt, Artificial Sequence
  Description of Artificial Sequence: Synthetic oligonucleotide
cuauaccaguugaagcaau

SEQ ID NO: 1576376 - RNA, 19 nt, Artificial Sequence
  Description of Artificial Sequence: Synthetic oligonucleotide
uugcuuacucgaggauaaa

SEQ ID NO: 1576377 - RNA, 19 nt, Artificial Sequence
  Description of Artificial Sequence: Synthetic oligonucleotide
augcuacccugacuuccau

SEQ ID NO: 1576378 - RNA, 19 nt, Artificial Sequence
  Description of Artificial Sequence: Synthetic oligonucleotide
ggacacguuaacuccuccu

SEQ ID NO: 1576379 - RNA, 19 nt, Artificial Sequence
  Description of Artificial Sequence: Synthetic oligonucleotide
gaucuccugacuggauacu

SEQ ID NO: 1576380 - RNA, 19 nt, Artificial Sequence
  Description of Artificial Sequence: Synthetic oligonucleotide
gcuuacucgaggauaaauu

SEQ ID NO: 1576381 - RNA, 19 nt, Artificial Sequence
  Description of Artificial Sequence: Synthetic oligonucleotide
ggucuucguuucaacaucu

SEQ ID NO: 1576382 - RNA, 19 nt, Artificial Sequence
  Description of Artificial Sequence: Synthetic oligonucleotide
gguaagccucugcaauaaa

SEQ ID NO: 1576383 - RNA, 19 nt, Artificial Sequence
  Description of Artificial Sequence: Synthetic oligonucleotide
cauccuugucaggccagga

SEQ ID NO: 1576384 - RNA, 19 nt, Artificial Sequence
  Description of Artificial Sequence: Synthetic oligonucleotide
cguuaacuccuccucaaaa

SEQ ID NO: 1576385 - RNA, 19 nt, Artificial Sequence
  Description of Artificial Sequence: Synthetic oligonucleotide
cuguccaauguguguccgu

SEQ ID NO: 1576386 - RNA, 19 nt, Artificial Sequence
  Description of Artificial Sequence: Synthetic oligonucleotide
gucggacaucaucaauuuu

SEQ ID NO: 1576387 - RNA, 19 nt, Artificial Sequence
  Description of Artificial Sequence: Synthetic oligonucleotide
cuacccugacuuccaucua

SEQ ID NO: 1576388 - RNA, 19 nt, Artificial Sequence
  Description of Artificial Sequence: Synthetic oligonucleotide
ccacuuacaauuguugauu

SEQ ID NO: 1576389 - RNA, 19 nt, Artificial Sequence
  Description of Artificial Sequence: Synthetic oligonucleotide
cugcuccauucuuccuuua

SEQ ID NO: 1576390 - RNA, 19 nt, Artificial Sequence
  Description of Artificial Sequence: Synthetic oligonucleotide
cguugucggacaucaucaa

SEQ ID NO: 1576391 - RNA, 19 nt, Artificial Sequence
  Description of Artificial Sequence: Synthetic oligonucleotide
ccuccucaaaauugugcau

SEQ ID NO: 1576392 - RNA, 19 nt, Artificial Sequence
  Description of Artificial Sequence: Synthetic oligonucleotide
gguaguacucgaggaucuu

SEQ ID NO: 1576393 - RNA, 19 nt, Artificial Sequence
  Description of Artificial Sequence: Synthetic oligonucleotide
cgagugauaucuguccaau

SEQ ID NO: 1576394 - RNA, 19 nt, Artificial Sequence
  Description of Artificial Sequence: Synthetic oligonucleotide
aaggaaucucgccagaccc

SEQ ID NO: 1576395 - RNA, 19 nt, Artificial Sequence
  Description of Artificial Sequence: Synthetic oligonucleotide
uguaagaugguacuuaaca

SEQ ID NO: 1576396 - RNA, 19 nt, Artificial Sequence
  Description of Artificial Sequence: Synthetic oligonucleotide
aaagggugcagacuggagc

SEQ ID NO: 1576397 - RNA, 19 nt, Artificial Sequence
  Description of Artificial Sequence: Synthetic oligonucleotide
ucaaaguauucuaugaagc

SEQ ID NO: 1576398 - RNA, 19 nt, Artificial Sequence
  Description of Artificial Sequence: Synthetic oligonucleotide
cuauggguuacuuuaaugg

SEQ ID NO: 1576399 - RNA, 19 nt, Artificial Sequence
  Description of Artificial Sequence: Synthetic oligonucleotide
uucuuaaagaguuugcggc

SEQ ID NO: 1576400 - RNA, 19 nt, Artificial Sequence
  Description of Artificial Sequence: Synthetic oligonucleotide
acacaaguccuucacacgc

SEQ ID NO: 1576401 - RNA, 19 nt, Artificial Sequence
  Description of Artificial Sequence: Synthetic oligonucleotide
aaucucguggucaaugugc

SEQ ID NO: 1576402 - RNA, 19 nt, Artificial Sequence
  Description of Artificial Sequence: Synthetic oligonucleotide
uauggguuacuuuaauggg

SEQ ID NO: 1576403 - RNA, 19 nt, Artificial Sequence
  Description of Artificial Sequence: Synthetic oligonucleotide
acacacaucaacuugggug

SEQ ID NO: 1576404 - RNA, 19 nt, Artificial Sequence
  Description of Artificial Sequence: Synthetic oligonucleotide
aauugcuagucauuggcug

SEQ ID NO: 1576405 - RNA, 19 nt, Artificial Sequence
  Description of Artificial Sequence: Synthetic oligonucleotide
ucuuaaagaguuugcggcg

SEQ ID NO: 1576406 - RNA, 19 nt, Artificial Sequence
  Description of Artificial Sequence: Synthetic oligonucleotide
aguuuguaguccccgacgc

SEQ ID NO: 1576407 - RNA, 19 nt, Artificial Sequence
  Description of Artificial Sequence: Synthetic oligonucleotide
uuuugugcuauugacugcg

SEQ ID NO: 1576408 - RNA, 19 nt, Artificial Sequence
  Description of Artificial Sequence: Synthetic oligonucleotide
aguucugggauggauaucg

SEQ ID NO: 1576409 - RNA, 19 nt, Artificial Sequence
  Description of Artificial Sequence: Synthetic oligonucleotide
aagggacuuucguugacac

SEQ ID NO: 1576410 - RNA, 19 nt, Artificial Sequence
  Description of Artificial Sequence: Synthetic oligonucleotide
guuacuuuaauggggauug

SEQ ID NO: 1576411 - RNA, 19 nt, Artificial Sequence
  Description of Artificial Sequence: Synthetic oligonucleotide
uaccucaccauccagcuca

SEQ ID NO: 1576412 - RNA, 19 nt, Artificial Sequence
  Description of Artificial Sequence: Synthetic oligonucleotide
uuuguaguccccgacgccg

SEQ ID NO: 1576413 - RNA, 19 nt, Artificial Sequence
  Description of Artificial Sequence: Synthetic oligonucleotide
uucucgaggauguagcacc

SEQ ID NO: 1576414 - RNA, 19 nt, Artificial Sequence
  Description of Artificial Sequence: Synthetic oligonucleotide
ucauucucgaggauguagc

SEQ ID NO: 1576415 - RNA, 19 nt, Artificial Sequence
  Description of Artificial Sequence: Synthetic oligonucleotide
gugagaguccccuaaagcc

SEQ ID NO: 1576416 - RNA, 19 nt, Artificial Sequence
  Description of Artificial Sequence: Synthetic oligonucleotide
ugagaguccccuaaagccc

SEQ ID NO: 1576417 - RNA, 19 nt, Artificial Sequence
  Description of Artificial Sequence: Synthetic oligonucleotide
aaugucauugaaacacagg

SEQ ID NO: 1576418 - RNA, 19 nt, Artificial Sequence
  Description of Artificial Sequence: Synthetic oligonucleotide
ucacauauguacagugaag

SEQ ID NO: 1576419 - RNA, 19 nt, Artificial Sequence
  Description of Artificial Sequence: Synthetic oligonucleotide
uaccuuagaaaacaucagu

SEQ ID NO: 1576420 - RNA, 19 nt, Artificial Sequence
  Description of Artificial Sequence: Synthetic oligonucleotide
uuugccucucuccaccagg

SEQ ID NO: 1576421 - RNA, 19 nt, Artificial Sequence
  Description of Artificial Sequence: Synthetic oligonucleotide
uuauccaagccuauauggu

SEQ ID NO: 1576422 - RNA, 19 nt, Artificial Sequence
  Description of Artificial Sequence: Synthetic oligonucleotide
acuuuaauggggauugggg

SEQ ID NO: 1576423 - RNA, 19 nt, Artificial Sequence
  Description of Artificial Sequence: Synthetic oligonucleotide
uggguuacuuuaaugggga

SEQ ID NO: 1576424 - RNA, 19 nt, Artificial Sequence
  Description of Artificial Sequence: Synthetic oligonucleotide
gucaaugugcagcuugugg

SEQ ID NO: 1576425 - RNA, 19 nt, Artificial Sequence
  Description of Artificial Sequence: Synthetic oligonucleotide
uccccuaaagcccugugug

SEQ ID NO: 1576426 - RNA, 19 nt, Artificial Sequence
  Description of Artificial Sequence: Synthetic oligonucleotide
aaucucgccagacccuuag

SEQ ID NO: 1576427 - RNA, 19 nt, Artificial Sequence
  Description of Artificial Sequence: Synthetic oligonucleotide
agagcguuuauugacacca

SEQ ID NO: 1576428 - RNA, 19 nt, Artificial Sequence
  Description of Artificial Sequence: Synthetic oligonucleotide
uacuugggcaagaaguucu

SEQ ID NO: 1576429 - RNA, 19 nt, Artificial Sequence
  Description of Artificial Sequence: Synthetic oligonucleotide
ucugguacugaggucaaag

SEQ ID NO: 1576430 - RNA, 19 nt, Artificial Sequence
  Description of Artificial Sequence: Synthetic oligonucleotide
gacacaaguccuucacacg

SEQ ID NO: 1576431 - RNA, 19 nt, Artificial Sequence
  Description of Artificial Sequence: Synthetic oligonucleotide
cagacuggagccuuugugc

SEQ ID NO: 1576432 - RNA, 19 nt, Artificial Sequence
  Description of Artificial Sequence: Synthetic oligonucleotide
acagagcguuuauugacac

SEQ ID NO: 1576433 - RNA, 19 nt, Artificial Sequence
  Description of Artificial Sequence: Synthetic oligonucleotide
uguguuguucagcuugcgc

SEQ ID NO: 1576434 - RNA, 19 nt, Artificial Sequence
  Description of Artificial Sequence: Synthetic oligonucleotide
augguauaccucaccaucc

SEQ ID NO: 1576435 - RNA, 19 nt, Artificial Sequence
  Description of Artificial Sequence: Synthetic oligonucleotide
uaagggucugguacugagg

SEQ ID NO: 1576436 - RNA, 19 nt, Artificial Sequence
  Description of Artificial Sequence: Synthetic oligonucleotide
agcguuuauugacaccacg

SEQ ID NO: 1576437 - RNA, 19 nt, Artificial Sequence
  Description of Artificial Sequence: Synthetic oligonucleotide
ggaguggucacauauguac

SEQ ID NO: 1576438 - RNA, 19 nt, Artificial Sequence
  Description of Artificial Sequence: Synthetic oligonucleotide
cuauugacugcguucauca

SEQ ID NO: 1576439 - RNA, 19 nt, Artificial Sequence
  Description of Artificial Sequence: Synthetic oligonucleotide
aggaauagucuggaaggcc

SEQ ID NO: 1576440 - RNA, 19 nt, Artificial Sequence
  Description of Artificial Sequence: Synthetic oligonucleotide
ugucccggaagcaucuucc

SEQ ID NO: 1576441 - RNA, 19 nt, Artificial Sequence
  Description of Artificial Sequence: Synthetic oligonucleotide
ggaagcaucuuccacacac

SEQ ID NO: 1576442 - RNA, 19 nt, Artificial Sequence
  Description of Artificial Sequence: Synthetic oligonucleotide
auggguuacuuuaaugggg

SEQ ID NO: 1576443 - RNA, 19 nt, Artificial Sequence
  Description of Artificial Sequence: Synthetic oligonucleotide
agaaaacaucaguucuggg

SEQ ID NO: 1576444 - RNA, 19 nt, Artificial Sequence
  Description of Artificial Sequence: Synthetic oligonucleotide
uaugaagccgguugcaaau

SEQ ID NO: 1576445 - RNA, 19 nt, Artificial Sequence
  Description of Artificial Sequence: Synthetic oligonucleotide
gguacuuaacacuacaaaa

SEQ ID NO: 1576446 - RNA, 19 nt, Artificial Sequence
  Description of Artificial Sequence: Synthetic oligonucleotide
uaucgggaaugacuccugg

SEQ ID NO: 1576447 - RNA, 19 nt, Artificial Sequence
  Description of Artificial Sequence: Synthetic oligonucleotide
cuuggguaagguuccgagg

SEQ ID NO: 1576448 - RNA, 19 nt, Artificial Sequence
  Description of Artificial Sequence: Synthetic oligonucleotide
cuauaugguauaccucacc

SEQ ID NO: 1576449 - RNA, 19 nt, Artificial Sequence
  Description of Artificial Sequence: Synthetic oligonucleotide
ugaggucaaaguauucuau

SEQ ID NO: 1576450 - RNA, 19 nt, Artificial Sequence
  Description of Artificial Sequence: Synthetic oligonucleotide
agaguuugcggcguccagc

SEQ ID NO: 1576451 - RNA, 19 nt, Artificial Sequence
  Description of Artificial Sequence: Synthetic oligonucleotide
ucuugcagacccuuccuga

SEQ ID NO: 1576452 - RNA, 19 nt, Artificial Sequence
  Description of Artificial Sequence: Synthetic oligonucleotide
guaagggucugguacugag

SEQ ID NO: 1576453 - RNA, 19 nt, Artificial Sequence
  Description of Artificial Sequence: Synthetic oligonucleotide
ugcgcaguuucuucuugcg

SEQ ID NO: 1576454 - RNA, 19 nt, Artificial Sequence
  Description of Artificial Sequence: Synthetic oligonucleotide
gaguuugcggcguccagcc

SEQ ID NO: 1576455 - RNA, 19 nt, Artificial Sequence
  Description of Artificial Sequence: Synthetic oligonucleotide
uuguauuggugagaguccc

SEQ ID NO: 1576456 - RNA, 19 nt, Artificial Sequence
  Description of Artificial Sequence: Synthetic oligonucleotide
uuauugacaccacgacucu

SEQ ID NO: 1576457 - RNA, 19 nt, Artificial Sequence
  Description of Artificial Sequence: Synthetic oligonucleotide
uucaggugaccucugacuu

SEQ ID NO: 1576458 - RNA, 19 nt, Artificial Sequence
  Description of Artificial Sequence: Synthetic oligonucleotide
aaccgcauggggcccuuac

SEQ ID NO: 1576459 - RNA, 19 nt, Artificial Sequence
  Description of Artificial Sequence: Synthetic oligonucleotide
guacuugggcaccagguug

SEQ ID NO: 1576460 - RNA, 19 nt, Artificial Sequence
  Description of Artificial Sequence: Synthetic oligonucleotide
aagccgguugcaaauucac

SEQ ID NO: 1576461 - RNA, 19 nt, Artificial Sequence
  Description of Artificial Sequence: Synthetic oligonucleotide
ugccgcuuggguaagguuc

SEQ ID NO: 1576462 - RNA, 19 nt, Artificial Sequence
  Description of Artificial Sequence: Synthetic oligonucleotide
gaacacuguaagaugguac

SEQ ID NO: 1576463 - RNA, 19 nt, Artificial Sequence
  Description of Artificial Sequence: Synthetic oligonucleotide
auggauaucgggaaugacu

SEQ ID NO: 1576464 - RNA, 19 nt, Artificial Sequence
  Description of Artificial Sequence: Synthetic oligonucleotide
uggugagaguccccuaaag

SEQ ID NO: 1576465 - RNA, 19 nt, Artificial Sequence
  Description of Artificial Sequence: Synthetic oligonucleotide
aagcucaagggacuuucgu

SEQ ID NO: 1576466 - RNA, 19 nt, Artificial Sequence
  Description of Artificial Sequence: Synthetic oligonucleotide
caguuuguaguccccgacg

SEQ ID NO: 1576467 - RNA, 19 nt, Artificial Sequence
  Description of Artificial Sequence: Synthetic oligonucleotide
caccaaaccgcauggggcc

SEQ ID NO: 1576468 - RNA, 19 nt, Artificial Sequence
  Description of Artificial Sequence: Synthetic oligonucleotide
ugguauaccucaccaucca

SEQ ID NO: 1576469 - RNA, 19 nt, Artificial Sequence
  Description of Artificial Sequence: Synthetic oligonucleotide
auucucgaggauguagcac

SEQ ID NO: 1576470 - RNA, 19 nt, Artificial Sequence
  Description of Artificial Sequence: Synthetic oligonucleotide
aagaguuugcggcguccag

SEQ ID NO: 1576471 - RNA, 19 nt, Artificial Sequence
  Description of Artificial Sequence: Synthetic oligonucleotide
cacauauguacagugaaga

SEQ ID NO: 1576472 - RNA, 19 nt, Artificial Sequence
  Description of Artificial Sequence: Synthetic oligonucleotide
gccgguugcaaauucacag

SEQ ID NO: 1576473 - RNA, 19 nt, Artificial Sequence
  Description of Artificial Sequence: Synthetic oligonucleotide
acauauguacagugaagaa

SEQ ID NO: 1576474 - RNA, 19 nt, Artificial Sequence
  Description of Artificial Sequence: Synthetic oligonucleotide
gcugguaagggucugguac

SEQ ID NO: 1576475 - RNA, 19 nt, Artificial Sequence
  Description of Artificial Sequence: Synthetic oligonucleotide
guauaccucaccauccagc

SEQ ID NO: 1576476 - RNA, 19 nt, Artificial Sequence
  Description of Artificial Sequence: Synthetic oligonucleotide
uuugcggcguccagccagg

SEQ ID NO: 1576477 - RNA, 19 nt, Artificial Sequence
  Description of Artificial Sequence: Synthetic oligonucleotide
gccuauaugguauaccuca

SEQ ID NO: 1576478 - RNA, 19 nt, Artificial Sequence
  Description of Artificial Sequence: Synthetic oligonucleotide
auuggugagaguccccuaa

SEQ ID NO: 1576479 - RNA, 19 nt, Artificial Sequence
  Description of Artificial Sequence: Synthetic oligonucleotide
guaccuuagaaaacaucag

SEQ ID NO: 1576480 - RNA, 19 nt, Artificial Sequence
  Description of Artificial Sequence: Synthetic oligonucleotide
ugggcgggaacagaaaugu

SEQ ID NO: 1576481 - RNA, 19 nt, Artificial Sequence
  Description of Artificial Sequence: Synthetic oligonucleotide
acguuauccaagccuauau

SEQ ID NO: 1576482 - RNA, 19 nt, Artificial Sequence
  Description of Artificial Sequence: Synthetic oligonucleotide
aaagaguuugcggcgucca

SEQ ID NO: 1576483 - RNA, 19 nt, Artificial Sequence
  Description of Artificial Sequence: Synthetic oligonucleotide
ggugagaguccccuaaagc

SEQ ID NO: 1576484 - RNA, 19 nt, Artificial Sequence
  Description of Artificial Sequence: Synthetic oligonucleotide
ucgaggauguagcaccuau

SEQ ID NO: 1576485 - RNA, 19 nt, Artificial Sequence
  Description of Artificial Sequence: Synthetic oligonucleotide
ucugcccguaguacuuggg

SEQ ID NO: 1576486 - RNA, 19 nt, Artificial Sequence
  Description of Artificial Sequence: Synthetic oligonucleotide
ccugaaagggugcagacug

SEQ ID NO: 1576487 - RNA, 19 nt, Artificial Sequence
  Description of Artificial Sequence: Synthetic oligonucleotide
cucgcaugcugucugguac

SEQ ID NO: 1576488 - RNA, 19 nt, Artificial Sequence
  Description of Artificial Sequence: Synthetic oligonucleotide
uggggcacguuauccaagc

SEQ ID NO: 1576489 - RNA, 19 nt, Artificial Sequence
  Description of Artificial Sequence: Synthetic oligonucleotide
gucauucucgaggauguag

SEQ ID NO: 1576490 - RNA, 19 nt, Artificial Sequence
  Description of Artificial Sequence: Synthetic oligonucleotide
gcucaagggacuuucguug

SEQ ID NO: 1576491 - RNA, 19 nt, Artificial Sequence
  Description of Artificial Sequence: Synthetic oligonucleotide
cuuguggucuuuccacgcc

SEQ ID NO: 1576492 - RNA, 19 nt, Artificial Sequence
  Description of Artificial Sequence: Synthetic oligonucleotide
aguugugggucucauugau

SEQ ID NO: 1576493 - RNA, 19 nt, Artificial Sequence
  Description of Artificial Sequence: Synthetic oligonucleotide
auaugguauaccucaccau

SEQ ID NO: 1576494 - RNA, 19 nt, Artificial Sequence
  Description of Artificial Sequence: Synthetic oligonucleotide
aggugaauggugcuguuuu

SEQ ID NO: 1576495 - RNA, 19 nt, Artificial Sequence
  Description of Artificial Sequence: Synthetic oligonucleotide
uaaagaguuugcggcgucc

SEQ ID NO: 1576496 - RNA, 19 nt, Artificial Sequence
  Description of Artificial Sequence: Synthetic oligonucleotide
uguagcaccuauggguuac

SEQ ID NO: 1576497 - RNA, 19 nt, Artificial Sequence
  Description of Artificial Sequence: Synthetic oligonucleotide
ugaaagggugcagacugga

SEQ ID NO: 1576498 - RNA, 19 nt, Artificial Sequence
  Description of Artificial Sequence: Synthetic oligonucleotide
acacuggacugugucauuc

SEQ ID NO: 1576499 - RNA, 19 nt, Artificial Sequence
  Description of Artificial Sequence: Synthetic oligonucleotide
ggcacgcugacacaagucc

SEQ ID NO: 1576500 - RNA, 19 nt, Artificial Sequence
  Description of Artificial Sequence: Synthetic oligonucleotide
agguccaagucacacugga

SEQ ID NO: 1576501 - RNA, 19 nt, Artificial Sequence
  Description of Artificial Sequence: Synthetic oligonucleotide
uguacagguccaagucaca

SEQ ID NO: 1576502 - RNA, 19 nt, Artificial Sequence
  Description of Artificial Sequence: Synthetic oligonucleotide
uuucguugacacuggccac

SEQ ID NO: 1576503 - RNA, 19 nt, Artificial Sequence
  Description of Artificial Sequence: Synthetic oligonucleotide
gucuuuccacgccugcagg

SEQ ID NO: 1576504 - RNA, 19 nt, Artificial Sequence
  Description of Artificial Sequence: Synthetic oligonucleotide
acucuugagaaugggauuu

SEQ ID NO: 1576505 - RNA, 19 nt, Artificial Sequence
  Description of Artificial Sequence: Synthetic oligonucleotide
acacgcugguacuugggca

SEQ ID NO: 1576506 - RNA, 19 nt, Artificial Sequence
  Description of Artificial Sequence: Synthetic oligonucleotide
cacacaucaacuugggugu

SEQ ID NO: 1576507 - RNA, 19 nt, Artificial Sequence
  Description of Artificial Sequence: Synthetic oligonucleotide
uuguaguccccgacgccgc

SEQ ID NO: 1576508 - RNA, 19 nt, Artificial Sequence
  Description of Artificial Sequence: Synthetic oligonucleotide
guacuuaacacuacaaaau

SEQ ID NO: 1576509 - RNA, 19 nt, Artificial Sequence
  Description of Artificial Sequence: Synthetic oligonucleotide
gcguucaucagcugguaag

SEQ ID NO: 1576510 - RNA, 19 nt, Artificial Sequence
  Description of Artificial Sequence: Synthetic oligonucleotide
gauaucgggaaugacuccu

SEQ ID NO: 1576511 - RNA, 19 nt, Artificial Sequence
  Description of Artificial Sequence: Synthetic oligonucleotide
agcucaagggacuuucguu

SEQ ID NO: 1576512 - RNA, 19 nt, Artificial Sequence
  Description of Artificial Sequence: Synthetic oligonucleotide
gcccugugugguuacaugg

SEQ ID NO: 1576513 - RNA, 19 nt, Artificial Sequence
  Description of Artificial Sequence: Synthetic oligonucleotide
cuguaagaugguacuuaac

SEQ ID NO: 1576514 - RNA, 19 nt, Artificial Sequence
  Description of Artificial Sequence: Synthetic oligonucleotide
aucucgccagacccuuagc

SEQ ID NO: 1576515 - RNA, 19 nt, Artificial Sequence
  Description of Artificial Sequence: Synthetic oligonucleotide
gaaagggugcagacuggag

SEQ ID NO: 1576516 - RNA, 19 nt, Artificial Sequence
  Description of Artificial Sequence: Synthetic oligonucleotide
ugaacacuguaagauggua

SEQ ID NO: 1576517 - RNA, 19 nt, Artificial Sequence
  Description of Artificial Sequence: Synthetic oligonucleotide
ugcguuucugcucccgcaa

SEQ ID NO: 1576518 - RNA, 19 nt, Artificial Sequence
  Description of Artificial Sequence: Synthetic oligonucleotide
guuuguaguccccgacgcc

SEQ ID NO: 1576519 - RNA, 19 nt, Artificial Sequence
  Description of Artificial Sequence: Synthetic oligonucleotide
auaccucaccauccagcuc

SEQ ID NO: 1576520 - RNA, 19 nt, Artificial Sequence
  Description of Artificial Sequence: Synthetic oligonucleotide
uucuaugaagccgguugca

SEQ ID NO: 1576521 - RNA, 19 nt, Artificial Sequence
  Description of Artificial Sequence: Synthetic oligonucleotide
cugcccguaguacuugggc

SEQ ID NO: 1576522 - RNA, 19 nt, Artificial Sequence
  Description of Artificial Sequence: Synthetic oligonucleotide
uuacaugggaguggucaca

SEQ ID NO: 1576523 - RNA, 19 nt, Artificial Sequence
  Description of Artificial Sequence: Synthetic oligonucleotide
gcuuggguaagguuccgag

SEQ ID NO: 1576524 - RNA, 19 nt, Artificial Sequence
  Description of Artificial Sequence: Synthetic oligonucleotide
gacuuucguugacacuggc

SEQ ID NO: 1576525 - RNA, 19 nt, Artificial Sequence
  Description of Artificial Sequence: Synthetic oligonucleotide
cacagagcguuuauugaca

SEQ ID NO: 1576526 - RNA, 19 nt, Artificial Sequence
  Description of Artificial Sequence: Synthetic oligonucleotide
uacugaggucaaaguauuc

SEQ ID NO: 1576527 - RNA, 19 nt, Artificial Sequence
  Description of Artificial Sequence: Synthetic oligonucleotide
uuugugcuauugacugcgu

SEQ ID NO: 1576528 - RNA, 19 nt, Artificial Sequence
  Description of Artificial Sequence: Synthetic oligonucleotide
uggguaagguuccgaggcu

SEQ ID NO: 1576529 - RNA, 19 nt, Artificial Sequence
  Description of Artificial Sequence: Synthetic oligonucleotide
aacggguggagcggcugcg

SEQ ID NO: 1576530 - RNA, 19 nt, Artificial Sequence
  Description of Artificial Sequence: Synthetic oligonucleotide
ucggcacgcugacacaagu

SEQ ID NO: 1576531 - RNA, 19 nt, Artificial Sequence
  Description of Artificial Sequence: Synthetic oligonucleotide
ggcccuuacacuugugcag

SEQ ID NO: 1576532 - RNA, 19 nt, Artificial Sequence
  Description of Artificial Sequence: Synthetic oligonucleotide
uuggugagaguccccuaaa

SEQ ID NO: 1576533 - RNA, 19 nt, Artificial Sequence
  Description of Artificial Sequence: Synthetic oligonucleotide
acgccgccgucacaugugc

SEQ ID NO: 1576534 - RNA, 19 nt, Artificial Sequence
  Description of Artificial Sequence: Synthetic oligonucleotide
ggucuuuccacgccugcag

SEQ ID NO: 1576535 - RNA, 19 nt, Artificial Sequence
  Description of Artificial Sequence: Synthetic oligonucleotide
cagagcguuuauugacacc

SEQ ID NO: 1576536 - RNA, 19 nt, Artificial Sequence
  Description of Artificial Sequence: Synthetic oligonucleotide
gauggauaucgggaaugac

SEQ ID NO: 1576537 - RNA, 19 nt, Artificial Sequence
  Description of Artificial Sequence: Synthetic oligonucleotide
ccaccaaaccgcauggggc

SEQ ID NO: 1576538 - RNA, 19 nt, Artificial Sequence
  Description of Artificial Sequence: Synthetic oligonucleotide
agccuauaugguauaccuc

SEQ ID NO: 1576539 - RNA, 19 nt, Artificial Sequence
  Description of Artificial Sequence: Synthetic oligonucleotide
ccuauggguuacuuuaaug

SEQ ID NO: 1576540 - RNA, 19 nt, Artificial Sequence
  Description of Artificial Sequence: Synthetic oligonucleotide
auccacuuugucaccaucu

SEQ ID NO: 1576541 - RNA, 19 nt, Artificial Sequence
  Description of Artificial Sequence: Synthetic oligonucleotide
ugggauggauaucgggaau

SEQ ID NO: 1576542 - RNA, 19 nt, Artificial Sequence
  Description of Artificial Sequence: Synthetic oligonucleotide
gugcuauugacugcguuca

SEQ ID NO: 1576543 - RNA, 19 nt, Artificial Sequence
  Description of Artificial Sequence: Synthetic oligonucleotide
gaacggguggagcggcugc

SEQ ID NO: 1576544 - RNA, 19 nt, Artificial Sequence
  Description of Artificial Sequence: Synthetic oligonucleotide
gaguggucacauauguaca

SEQ ID NO: 1576545 - RNA, 19 nt, Artificial Sequence
  Description of Artificial Sequence: Synthetic oligonucleotide
ugcguucaucagcugguaa

SEQ ID NO: 1576546 - RNA, 19 nt, Artificial Sequence
  Description of Artificial Sequence: Synthetic oligonucleotide
cacaugugcaggccucacc

SEQ ID NO: 1576547 - RNA, 19 nt, Artificial Sequence
  Description of Artificial Sequence: Synthetic oligonucleotide
cauugaaacacaggacaca

SEQ ID NO: 1576548 - RNA, 19 nt, Artificial Sequence
  Description of Artificial Sequence: Synthetic oligonucleotide
accaaaccgcauggggccc

SEQ ID NO: 1576549 - RNA, 19 nt, Artificial Sequence
  Description of Artificial Sequence: Synthetic oligonucleotide
cucuugcagacccuuccug

SEQ ID NO: 1576550 - RNA, 19 nt, Artificial Sequence
  Description of Artificial Sequence: Synthetic oligonucleotide
uguaguccccgacgccgcc

SEQ ID NO: 1576551 - RNA, 19 nt, Artificial Sequence
  Description of Artificial Sequence: Synthetic oligonucleotide
cuaugaagccgguugcaaa

SEQ ID NO: 1576552 - RNA, 19 nt, Artificial Sequence
  Description of Artificial Sequence: Synthetic oligonucleotide
caguauguguuguucagcu

SEQ ID NO: 1576553 - RNA, 19 nt, Artificial Sequence
  Description of Artificial Sequence: Synthetic oligonucleotide
agcccugugugguuacaug

SEQ ID NO: 1576554 - RNA, 19 nt, Artificial Sequence
  Description of Artificial Sequence: Synthetic oligonucleotide
ucgcaugcugucugguacu

SEQ ID NO: 1576555 - RNA, 19 nt, Artificial Sequence
  Description of Artificial Sequence: Synthetic oligonucleotide
cucugcccguaguacuugg

SEQ ID NO: 1576556 - RNA, 19 nt, Artificial Sequence
  Description of Artificial Sequence: Synthetic oligonucleotide
uccugaaagggugcagacu

SEQ ID NO: 1576557 - RNA, 19 nt, Artificial Sequence
  Description of Artificial Sequence: Synthetic oligonucleotide
caugugcaggccucaccgc

SEQ ID NO: 1576558 - RNA, 19 nt, Artificial Sequence
  Description of Artificial Sequence: Synthetic oligonucleotide
gcaccuauggguuacuuua

SEQ ID NO: 1576559 - RNA, 19 nt, Artificial Sequence
  Description of Artificial Sequence: Synthetic oligonucleotide
cacgacucuugagaauggg

SEQ ID NO: 1576560 - RNA, 19 nt, Artificial Sequence
  Description of Artificial Sequence: Synthetic oligonucleotide
aguuugccucucuccacca

SEQ ID NO: 1576561 - RNA, 19 nt, Artificial Sequence
  Description of Artificial Sequence: Synthetic oligonucleotide
gcugacacaaguccuucac

SEQ ID NO: 1576562 - RNA, 19 nt, Artificial Sequence
  Description of Artificial Sequence: Synthetic oligonucleotide
ugguacucggcacgcugac

SEQ ID NO: 1576563 - RNA, 19 nt, Artificial Sequence
  Description of Artificial Sequence: Synthetic oligonucleotide
cauucucgaggauguagca

SEQ ID NO: 1576564 - RNA, 19 nt, Artificial Sequence
  Description of Artificial Sequence: Synthetic oligonucleotide
ugugcaggccucaccgcuc

SEQ ID NO: 1576565 - RNA, 19 nt, Artificial Sequence
  Description of Artificial Sequence: Synthetic oligonucleotide
ucguugacacuggccacag

SEQ ID NO: 1576566 - RNA, 19 nt, Artificial Sequence
  Description of Artificial Sequence: Synthetic oligonucleotide
accuauggguuacuuuaau

SEQ ID NO: 1576567 - RNA, 19 nt, Artificial Sequence
  Description of Artificial Sequence: Synthetic oligonucleotide
gaagccgguugcaaauuca

SEQ ID NO: 1576568 - RNA, 19 nt, Artificial Sequence
  Description of Artificial Sequence: Synthetic oligonucleotide
ugcuagucauuggcugggg

SEQ ID NO: 1576569 - RNA, 19 nt, Artificial Sequence
  Description of Artificial Sequence: Synthetic oligonucleotide
cuagucauuggcuggggcu

SEQ ID NO: 1576570 - RNA, 19 nt, Artificial Sequence
  Description of Artificial Sequence: Synthetic oligonucleotide
cauggggcccuuacacuug

SEQ ID NO: 1576571 - RNA, 19 nt, Artificial Sequence
  Description of Artificial Sequence: Synthetic oligonucleotide
agcaccuauggguuacuuu

SEQ ID NO: 1576572 - RNA, 19 nt, Artificial Sequence
  Description of Artificial Sequence: Synthetic oligonucleotide
cuggggcacguuauccaag

SEQ ID NO: 1576573 - RNA, 19 nt, Artificial Sequence
  Description of Artificial Sequence: Synthetic oligonucleotide
gguaagguuccgaggcugg

SEQ ID NO: 1576574 - RNA, 19 nt, Artificial Sequence
  Description of Artificial Sequence: Synthetic oligonucleotide
uggucuuuccacgccugca

SEQ ID NO: 1576575 - RNA, 19 nt, Artificial Sequence
  Description of Artificial Sequence: Synthetic oligonucleotide
gauguagcaccuauggguu

SEQ ID NO: 1576576 - RNA, 19 nt, Artificial Sequence
  Description of Artificial Sequence: Synthetic oligonucleotide
uccugggcauccacuuugu

SEQ ID NO: 1576577 - RNA, 19 nt, Artificial Sequence
  Description of Artificial Sequence: Synthetic oligonucleotide
acuuggguguucaguaccu

SEQ ID NO: 1576578 - RNA, 19 nt, Artificial Sequence
  Description of Artificial Sequence: Synthetic oligonucleotide
gcuuguggucuuuccacgc

SEQ ID NO: 1576579 - RNA, 19 nt, Artificial Sequence
  Description of Artificial Sequence: Synthetic oligonucleotide
gguguucaguaccuuagaa

SEQ ID NO: 1576580 - RNA, 19 nt, Artificial Sequence
  Description of Artificial Sequence: Synthetic oligonucleotide
uauuggugagaguccccua

SEQ ID NO: 1576581 - RNA, 19 nt, Artificial Sequence
  Description of Artificial Sequence: Synthetic oligonucleotide
guacuugggcaagaaguuc

SEQ ID NO: 1576582 - RNA, 19 nt, Artificial Sequence
  Description of Artificial Sequence: Synthetic oligonucleotide
ccacggaacggguggagcg

SEQ ID NO: 1576583 - RNA, 19 nt, Artificial Sequence
  Description of Artificial Sequence: Synthetic oligonucleotide
acgacucuugagaauggga

SEQ ID NO: 1576584 - RNA, 19 nt, Artificial Sequence
  Description of Artificial Sequence: Synthetic oligonucleotide
ggacacacaucaacuuggg

SEQ ID NO: 1576585 - RNA, 19 nt, Artificial Sequence
  Description of Artificial Sequence: Synthetic oligonucleotide
uggagcaguuugccucucu

SEQ ID NO: 1576586 - RNA, 19 nt, Artificial Sequence
  Description of Artificial Sequence: Synthetic oligonucleotide
ggggcccuuacacuugugc

SEQ ID NO: 1576587 - RNA, 19 nt, Artificial Sequence
  Description of Artificial Sequence: Synthetic oligonucleotide
gggauggauaucgggaaug

SEQ ID NO: 1576588 - RNA, 19 nt, Artificial Sequence
  Description of Artificial Sequence: Synthetic oligonucleotide
guucugggauggauaucgg

SEQ ID NO: 1576589 - RNA, 19 nt, Artificial Sequence
  Description of Artificial Sequence: Synthetic oligonucleotide
auaucgggaaugacuccug

SEQ ID NO: 1576590 - RNA, 19 nt, Artificial Sequence
  Description of Artificial Sequence: Synthetic oligonucleotide
cacgcugguacuugggcaa

SEQ ID NO: 1576591 - RNA, 19 nt, Artificial Sequence
  Description of Artificial Sequence: Synthetic oligonucleotide
ugcuauugacugcguucau

SEQ ID NO: 1576592 - RNA, 19 nt, Artificial Sequence
  Description of Artificial Sequence: Synthetic oligonucleotide
gcuagucauuggcuggggc

SEQ ID NO: 1576593 - RNA, 19 nt, Artificial Sequence
  Description of Artificial Sequence: Synthetic oligonucleotide
gaaggcaguuucagaggca

SEQ ID NO: 1576594 - RNA, 19 nt, Artificial Sequence
  Description of Artificial Sequence: Synthetic oligonucleotide
gccgccgucacaugugcag

SEQ ID NO: 1576595 - RNA, 19 nt, Artificial Sequence
  Description of Artificial Sequence: Synthetic oligonucleotide
gcguuuauugacaccacga

SEQ ID NO: 1576596 - RNA, 19 nt, Artificial Sequence
  Description of Artificial Sequence: Synthetic oligonucleotide
uccugggcgggaacagaaa

SEQ ID NO: 1576597 - RNA, 19 nt, Artificial Sequence
  Description of Artificial Sequence: Synthetic oligonucleotide
cucggcacgcugacacaag

SEQ ID NO: 1576598 - RNA, 19 nt, Artificial Sequence
  Description of Artificial Sequence: Synthetic oligonucleotide
agugccgcuuggguaaggu

SEQ ID NO: 1576599 - RNA, 19 nt, Artificial Sequence
  Description of Artificial Sequence: Synthetic oligonucleotide
guauuggugagaguccccu

SEQ ID NO: 1576600 - RNA, 19 nt, Artificial Sequence
  Description of Artificial Sequence: Synthetic oligonucleotide
cguucaucagcugguaagg

SEQ ID NO: 1576601 - RNA, 19 nt, Artificial Sequence
  Description of Artificial Sequence: Synthetic oligonucleotide
cacuguaagaugguacuua

SEQ ID NO: 1576602 - RNA, 19 nt, Artificial Sequence
  Description of Artificial Sequence: Synthetic oligonucleotide
gcaguuucagaggcagcgg

SEQ ID NO: 1576603 - RNA, 19 nt, Artificial Sequence
  Description of Artificial Sequence: Synthetic oligonucleotide
gacgccgccgucacaugug

SEQ ID NO: 1576604 - RNA, 19 nt, Artificial Sequence
  Description of Artificial Sequence: Synthetic oligonucleotide
caagggacuuucguugaca

SEQ ID NO: 1576605 - RNA, 19 nt, Artificial Sequence
  Description of Artificial Sequence: Synthetic oligonucleotide
gcccguaguacuugggcac

SEQ ID NO: 1576606 - RNA, 19 nt, Artificial Sequence
  Description of Artificial Sequence: Synthetic oligonucleotide
cguuauccaagccuauaug

SEQ ID NO: 1576607 - RNA, 19 nt, Artificial Sequence
  Description of Artificial Sequence: Synthetic oligonucleotide
guaguccccgacgccgccg

SEQ ID NO: 1576608 - RNA, 19 nt, Artificial Sequence
  Description of Artificial Sequence: Synthetic oligonucleotide
gggcccuuacacuugugca

SEQ ID NO: 1576609 - RNA, 19 nt, Artificial Sequence
  Description of Artificial Sequence: Synthetic oligonucleotide
cgggaaugacuccugggcg

SEQ ID NO: 1576610 - RNA, 19 nt, Artificial Sequence
  Description of Artificial Sequence: Synthetic oligonucleotide
gagcguuuauugacaccac

SEQ ID NO: 1576611 - RNA, 19 nt, Artificial Sequence
  Description of Artificial Sequence: Synthetic oligonucleotide
auguagcaccuauggguua

SEQ ID NO: 1576612 - RNA, 19 nt, Artificial Sequence
  Description of Artificial Sequence: Synthetic oligonucleotide
ugacugcguucaucagcug

SEQ ID NO: 1576613 - RNA, 19 nt, Artificial Sequence
  Description of Artificial Sequence: Synthetic oligonucleotide
gcccuuacacuugugcagc

SEQ ID NO: 1576614 - RNA, 19 nt, Artificial Sequence
  Description of Artificial Sequence: Synthetic oligonucleotide
gcuauugacugcguucauc

SEQ ID NO: 1576615 - RNA, 19 nt, Artificial Sequence
  Description of Artificial Sequence: Synthetic oligonucleotide
cccggaagcaucuuccaca

SEQ ID NO: 1576616 - RNA, 19 nt, Artificial Sequence
  Description of Artificial Sequence: Synthetic oligonucleotide
cuaaagcccugugugguua

SEQ ID NO: 1576617 - RNA, 19 nt, Artificial Sequence
  Description of Artificial Sequence: Synthetic oligonucleotide
ggauggauaucgggaauga

SEQ ID NO: 1576618 - RNA, 19 nt, Artificial Sequence
  Description of Artificial Sequence: Synthetic oligonucleotide
guuccgaggcuggggcacg

SEQ ID NO: 1576619 - RNA, 19 nt, Artificial Sequence
  Description of Artificial Sequence: Synthetic oligonucleotide
ggcacguuauccaagccua

SEQ ID NO: 1576620 - RNA, 19 nt, Artificial Sequence
  Description of Artificial Sequence: Synthetic oligonucleotide
caccuauggguuacuuuaa

SEQ ID NO: 1576621 - RNA, 19 nt, Artificial Sequence
  Description of Artificial Sequence: Synthetic oligonucleotide
gugguuacaugggaguggu

SEQ ID NO: 1576622 - RNA, 19 nt, Artificial Sequence
  Description of Artificial Sequence: Synthetic oligonucleotide
agcugguaagggucuggua

SEQ ID NO: 1576623 - RNA, 19 nt, Artificial Sequence
  Description of Artificial Sequence: Synthetic oligonucleotide
ugguuacaugggagugguc

SEQ ID NO: 1576624 - RNA, 19 nt, Artificial Sequence
  Description of Artificial Sequence: Synthetic oligonucleotide
agccgguugcaaauucaca

SEQ ID NO: 1576625 - RNA, 19 nt, Artificial Sequence
  Description of Artificial Sequence: Synthetic oligonucleotide
acaaagcucaagggacuuu

SEQ ID NO: 1576626 - RNA, 19 nt, Artificial Sequence
  Description of Artificial Sequence: Synthetic oligonucleotide
ccgcauggggcccuuacac

SEQ ID NO: 1576627 - RNA, 19 nt, Artificial Sequence
  Description of Artificial Sequence: Synthetic oligonucleotide
uggggcccuuacacuugug

SEQ ID NO: 1576628 - RNA, 19 nt, Artificial Sequence
  Description of Artificial Sequence: Synthetic oligonucleotide
ggguguucaguaccuuaga

SEQ ID NO: 1576629 - RNA, 19 nt, Artificial Sequence
  Description of Artificial Sequence: Synthetic oligonucleotide
acggguggagcggcugcgg

SEQ ID NO: 1576630 - RNA, 19 nt, Artificial Sequence
  Description of Artificial Sequence: Synthetic oligonucleotide
gugcagacuggagccuuug

SEQ ID NO: 1576631 - RNA, 19 nt, Artificial Sequence
  Description of Artificial Sequence: Synthetic oligonucleotide
ggucaaugugcagcuugug

SEQ ID NO: 1576632 - RNA, 19 nt, Artificial Sequence
  Description of Artificial Sequence: Synthetic oligonucleotide
ccgguugcaaauucacaga

SEQ ID NO: 1576633 - RNA, 19 nt, Artificial Sequence
  Description of Artificial Sequence: Synthetic oligonucleotide
gguuccgaggcuggggcac

SEQ ID NO: 1576634 - RNA, 19 nt, Artificial Sequence
  Description of Artificial Sequence: Synthetic oligonucleotide
acuccugggcgggaacaga

SEQ ID NO: 1576635 - RNA, 19 nt, Artificial Sequence
  Description of Artificial Sequence: Synthetic oligonucleotide
gguccaagucacacuggac

SEQ ID NO: 1576636 - RNA, 19 nt, Artificial Sequence
  Description of Artificial Sequence: Synthetic oligonucleotide
gguggagcggcugcgggca

SEQ ID NO: 1576637 - RNA, 19 nt, Artificial Sequence
  Description of Artificial Sequence: Synthetic oligonucleotide
gcaugcugucugguacucg

SEQ ID NO: 1576638 - RNA, 19 nt, Artificial Sequence
  Description of Artificial Sequence: Synthetic oligonucleotide
aggugaccucugacuuccc

SEQ ID NO: 1576639 - RNA, 19 nt, Artificial Sequence
  Description of Artificial Sequence: Synthetic oligonucleotide
gcugcgggcauagcuggcc

SEQ ID NO: 1576640 - RNA, 19 nt, Artificial Sequence
  Description of Artificial Sequence: Synthetic oligonucleotide
ugcgggcauagcuggccuu

SEQ ID NO: 1576641 - RNA, 19 nt, Artificial Sequence
  Description of Artificial Sequence: Synthetic oligonucleotide
ccaagccuauaugguauac

SEQ ID NO: 1576642 - RNA, 19 nt, Artificial Sequence
  Description of Artificial Sequence: Synthetic oligonucleotide
uggccacggaacgggugga

SEQ ID NO: 1576643 - RNA, 19 nt, Artificial Sequence
  Description of Artificial Sequence: Synthetic oligonucleotide
cacguuauccaagccuaua

SEQ ID NO: 1576644 - RNA, 19 nt, Artificial Sequence
  Description of Artificial Sequence: Synthetic oligonucleotide
gguuacuuuaauggggauu

SEQ ID NO: 1576645 - RNA, 19 nt, Artificial Sequence
  Description of Artificial Sequence: Synthetic oligonucleotide
ggaacggguggagcggcug

SEQ ID NO: 1576646 - RNA, 19 nt, Artificial Sequence
  Description of Artificial Sequence: Synthetic oligonucleotide
ggucucauugaugguccuc

SEQ ID NO: 1576647 - RNA, 19 nt, Artificial Sequence
  Description of Artificial Sequence: Synthetic oligonucleotide
cagugucccggaagcaucu

SEQ ID NO: 1576648 - RNA, 19 nt, Artificial Sequence
  Description of Artificial Sequence: Synthetic oligonucleotide
cagcggcccggccagguga

SEQ ID NO: 1576649 - RNA, 19 nt, Artificial Sequence
  Description of Artificial Sequence: Synthetic oligonucleotide
cacuggacugugucauucu

SEQ ID NO: 1576650 - RNA, 19 nt, Artificial Sequence
  Description of Artificial Sequence: Synthetic oligonucleotide
gguaagggucugguacuga

SEQ ID NO: 1576651 - RNA, 19 nt, Artificial Sequence
  Description of Artificial Sequence: Synthetic oligonucleotide
acacaucaacuuggguguu

SEQ ID NO: 1576652 - RNA, 19 nt, Artificial Sequence
  Description of Artificial Sequence: Synthetic oligonucleotide
cccguaguacuugggcacc

SEQ ID NO: 1576653 - RNA, 19 nt, Artificial Sequence
  Description of Artificial Sequence: Synthetic oligonucleotide
guuguucagcuugcgcagu

SEQ ID NO: 1576654 - RNA, 19 nt, Artificial Sequence
  Description of Artificial Sequence: Synthetic oligonucleotide
gccgucacaugugcaggcc

SEQ ID NO: 1576655 - RNA, 19 nt, Artificial Sequence
  Description of Artificial Sequence: Synthetic oligonucleotide
gccacggaacggguggagc

SEQ ID NO: 1576656 - RNA, 19 nt, Artificial Sequence
  Description of Artificial Sequence: Synthetic oligonucleotide
gaaucucgccagacccuua

SEQ ID NO: 1576657 - RNA, 19 nt, Artificial Sequence
  Description of Artificial Sequence: Synthetic oligonucleotide
cagugccgcuuggguaagg

SEQ ID NO: 1576658 - RNA, 19 nt, Artificial Sequence
  Description of Artificial Sequence: Synthetic oligonucleotide
cgacucuugagaaugggau

SEQ ID NO: 1576659 - RNA, 19 nt, Artificial Sequence
  Description of Artificial Sequence: Synthetic oligonucleotide
ccgccgucacaugugcagg

SEQ ID NO: 1576660 - RNA, 19 nt, Artificial Sequence
  Description of Artificial Sequence: Synthetic oligonucleotide
cucccgcaacagccacacc

SEQ ID NO: 1576661 - RNA, 19 nt, Artificial Sequence
  Description of Artificial Sequence: Synthetic oligonucleotide
uugcggcguccagccaggc

SEQ ID NO: 1576662 - RNA, 19 nt, Artificial Sequence
  Description of Artificial Sequence: Synthetic oligonucleotide
gcucugcccguaguacuug

SEQ ID NO: 1576663 - RNA, 19 nt, Artificial Sequence
  Description of Artificial Sequence: Synthetic oligonucleotide
gggacuuguacagguccaa

SEQ ID NO: 1576664 - RNA, 19 nt, Artificial Sequence
  Description of Artificial Sequence: Synthetic oligonucleotide
cgccgucacaugugcaggc

SEQ ID NO: 1576665 - RNA, 19 nt, Artificial Sequence
  Description of Artificial Sequence: Synthetic oligonucleotide
cgggaacagaaauguccac

SEQ ID NO: 1576666 - RNA, 19 nt, Artificial Sequence
  Description of Artificial Sequence: Synthetic oligonucleotide
agugucccggaagcaucuu

SEQ ID NO: 1576667 - RNA, 19 nt, Artificial Sequence
  Description of Artificial Sequence: Synthetic oligonucleotide
caccgcucugcccguagua

SEQ ID NO: 1576668 - RNA, 19 nt, Artificial Sequence
  Description of Artificial Sequence: Synthetic oligonucleotide
aaaccgcauggggcccuua

SEQ ID NO: 1576669 - RNA, 19 nt, Artificial Sequence
  Description of Artificial Sequence: Synthetic oligonucleotide
gacuucccguagguucuua

SEQ ID NO: 1576670 - RNA, 19 nt, Artificial Sequence
  Description of Artificial Sequence: Synthetic oligonucleotide
gcucgcaugcugucuggua

SEQ ID NO: 1576671 - RNA, 19 nt, Artificial Sequence
  Description of Artificial Sequence: Synthetic oligonucleotide
ggccacggaacggguggag

SEQ ID NO: 1576672 - RNA, 19 nt, Artificial Sequence
  Description of Artificial Sequence: Synthetic oligonucleotide
gaguccccuaaagcccugu

SEQ ID NO: 1576673 - RNA, 19 nt, Artificial Sequence
  Description of Artificial Sequence: Synthetic oligonucleotide
ggaaucucgccagacccuu

SEQ ID NO: 1576674 - RNA, 19 nt, Artificial Sequence
  Description of Artificial Sequence: Synthetic oligonucleotide
cugcgggcauagcuggccu

SEQ ID NO: 1576675 - RNA, 19 nt, Artificial Sequence
  Description of Artificial Sequence: Synthetic oligonucleotide
cugcguucaucagcuggua

SEQ ID NO: 1576676 - RNA, 19 nt, Artificial Sequence
  Description of Artificial Sequence: Synthetic oligonucleotide
ggcaccaguauguguuguu

SEQ ID NO: 1576677 - RNA, 19 nt, Artificial Sequence
  Description of Artificial Sequence: Synthetic oligonucleotide
cggcacgcugacacaaguc

SEQ ID NO: 1576678 - RNA, 19 nt, Artificial Sequence
  Description of Artificial Sequence: Synthetic oligonucleotide
ggucugguacugaggucaa

SEQ ID NO: 1576679 - RNA, 19 nt, Artificial Sequence
  Description of Artificial Sequence: Synthetic oligonucleotide
cucgaggauguagcaccua

SEQ ID NO: 1576680 - RNA, 19 nt, Artificial Sequence
  Description of Artificial Sequence: Synthetic oligonucleotide
gugccgcuuggguaagguu

SEQ ID NO: 1576681 - RNA, 19 nt, Artificial Sequence
  Description of Artificial Sequence: Synthetic oligonucleotide
cuuggguguucaguaccuu

SEQ ID NO: 1576682 - RNA, 19 nt, Artificial Sequence
  Description of Artificial Sequence: Synthetic oligonucleotide
ccagugccgcuuggguaag

SEQ ID NO: 1576683 - RNA, 19 nt, Artificial Sequence
  Description of Artificial Sequence: Synthetic oligonucleotide
cugugucauucucgaggau

SEQ ID NO: 1576684 - RNA, 19 nt, Artificial Sequence
  Description of Artificial Sequence: Synthetic oligonucleotide
ccgccaccaccaaaccgca

SEQ ID NO: 1576685 - RNA, 19 nt, Artificial Sequence
  Description of Artificial Sequence: Synthetic oligonucleotide
cgcaugcugucugguacuc

SEQ ID NO: 1576686 - RNA, 19 nt, Artificial Sequence
  Description of Artificial Sequence: Synthetic oligonucleotide
ccguaguacuugggcacca

SEQ ID NO: 1576687 - RNA, 19 nt, Artificial Sequence
  Description of Artificial Sequence: Synthetic oligonucleotide
ccgaggcuggggcacguua

SEQ ID NO: 1576688 - RNA, 19 nt, Artificial Sequence
  Description of Artificial Sequence: Synthetic oligonucleotide
ccgcucugcccguaguacu

SEQ ID NO: 1576689 - RNA, 19 nt, Artificial Sequence
  Description of Artificial Sequence: Synthetic oligonucleotide
ccgacgccgccgucacaug

SEQ ID NO: 1576690 - RNA, 19 nt, Artificial Sequence
  Description of Artificial Sequence: Synthetic oligonucleotide
gcacguuauccaagccuau

SEQ ID NO: 1576691 - RNA, 19 nt, Artificial Sequence
  Description of Artificial Sequence: Synthetic oligonucleotide
cggcccggccaggugaaug

SEQ ID NO: 1576692 - RNA, 19 nt, Artificial Sequence
  Description of Artificial Sequence: Synthetic oligonucleotide
ggugcagacuggagccuuu

SEQ ID NO: 1576693 - RNA, 19 nt, Artificial Sequence
  Description of Artificial Sequence: Synthetic oligonucleotide
guggagcggcugcgggcau

SEQ ID NO: 1576694 - RNA, 19 nt, Artificial Sequence
  Description of Artificial Sequence: Synthetic oligonucleotide
cgcuuggguaagguuccga

SEQ ID NO: 1576695 - RNA, 19 nt, Artificial Sequence
  Description of Artificial Sequence: Synthetic oligonucleotide
caaaccgcauggggcccuu

SEQ ID NO: 1576696 - RNA, 19 nt, Artificial Sequence
  Description of Artificial Sequence: Synthetic oligonucleotide
ccaaaccgcauggggcccu

SEQ ID NO: 1576697 - RNA, 19 nt, Artificial Sequence
  Description of Artificial Sequence: Synthetic oligonucleotide
ccaggugaauggugcuguu

SEQ ID NO: 1576698 - RNA, 19 nt, Artificial Sequence
  Description of Artificial Sequence: Synthetic oligonucleotide
cgacgccgccgucacaugu

SEQ ID NO: 1576699 - RNA, 19 nt, Artificial Sequence
  Description of Artificial Sequence: Synthetic oligonucleotide
cgccgccgucacaugugca

SEQ ID NO: 1576700 - RNA, 19 nt, Artificial Sequence
  Description of Artificial Sequence: Synthetic oligonucleotide
gcccggccaggugaauggu

SEQ ID NO: 1576701 - RNA, 19 nt, Artificial Sequence
  Description of Artificial Sequence: Synthetic oligonucleotide
cggccaggugaauggugcu

SEQ ID NO: 1576702 - RNA, 19 nt, Artificial Sequence
  Description of Artificial Sequence: Synthetic oligonucleotide
cggaacggguggagcggcu

SEQ ID NO: 1576703 - RNA, 19 nt, Artificial Sequence
  Description of Artificial Sequence: Synthetic oligonucleotide
gcggcccggccaggugaau

SEQ ID NO: 1576704 - RNA, 19 nt, Artificial Sequence
  Description of Artificial Sequence: Synthetic oligonucleotide
uuaagaacagaauuguggg

SEQ ID NO: 1576705 - RNA, 19 nt, Artificial Sequence
  Description of Artificial Sequence: Synthetic oligonucleotide
aaagaagcuugucuuaagc

SEQ ID NO: 1576706 - RNA, 19 nt, Artificial Sequence
  Description of Artificial Sequence: Synthetic oligonucleotide
uguggauucgugcauaagg

SEQ ID NO: 1576707 - RNA, 19 nt, Artificial Sequence
  Description of Artificial Sequence: Synthetic oligonucleotide
cuugucuuaagcuuaauug

SEQ ID NO: 1576708 - RNA, 19 nt, Artificial Sequence
  Description of Artificial Sequence: Synthetic oligonucleotide
aaagacggagaggagaagc

SEQ ID NO: 1576709 - RNA, 19 nt, Artificial Sequence
  Description of Artificial Sequence: Synthetic oligonucleotide
aaagugggcacuaaaagag

SEQ ID NO: 1576710 - RNA, 19 nt, Artificial Sequence
  Description of Artificial Sequence: Synthetic oligonucleotide
aggauugucauacagccag

SEQ ID NO: 1576711 - RNA, 19 nt, Artificial Sequence
  Description of Artificial Sequence: Synthetic oligonucleotide
ugugaauacuccaggaugc

SEQ ID NO: 1576712 - RNA, 19 nt, Artificial Sequence
  Description of Artificial Sequence: Synthetic oligonucleotide
ucuuaagcuuaauuguugg

SEQ ID NO: 1576713 - RNA, 19 nt, Artificial Sequence
  Description of Artificial Sequence: Synthetic oligonucleotide
uuugauuccuuccuggaca

SEQ ID NO: 1576714 - RNA, 19 nt, Artificial Sequence
  Description of Artificial Sequence: Synthetic oligonucleotide
uuaaaucuguucaugcagc

SEQ ID NO: 1576715 - RNA, 19 nt, Artificial Sequence
  Description of Artificial Sequence: Synthetic oligonucleotide
ugugcauuaaguucuggag

SEQ ID NO: 1576716 - RNA, 19 nt, Artificial Sequence
  Description of Artificial Sequence: Synthetic oligonucleotide
uaagcuuaauuguuggugc

SEQ ID NO: 1576717 - RNA, 19 nt, Artificial Sequence
  Description of Artificial Sequence: Synthetic oligonucleotide
aguaacuggacucuguucu

SEQ ID NO: 1576718 - RNA, 19 nt, Artificial Sequence
  Description of Artificial Sequence: Synthetic oligonucleotide
agcacuuuuaaaucuguuc

SEQ ID NO: 1576719 - RNA, 19 nt, Artificial Sequence
  Description of Artificial Sequence: Synthetic oligonucleotide
uuuucaaccacgaguggag

SEQ ID NO: 1576720 - RNA, 19 nt, Artificial Sequence
  Description of Artificial Sequence: Synthetic oligonucleotide
aacaccaaucagcugaucu

SEQ ID NO: 1576721 - RNA, 19 nt, Artificial Sequence
  Description of Artificial Sequence: Synthetic oligonucleotide
aaagcguguggguacagag

SEQ ID NO: 1576722 - RNA, 19 nt, Artificial Sequence
  Description of Artificial Sequence: Synthetic oligonucleotide
uuuggcuugaacccauggg

SEQ ID NO: 1576723 - RNA, 19 nt, Artificial Sequence
  Description of Artificial Sequence: Synthetic oligonucleotide
auuauuucacugcuggcag

SEQ ID NO: 1576724 - RNA, 19 nt, Artificial Sequence
  Description of Artificial Sequence: Synthetic oligonucleotide
uuaagcuuaauuguuggug

SEQ ID NO: 1576725 - RNA, 19 nt, Artificial Sequence
  Description of Artificial Sequence: Synthetic oligonucleotide
uggcauaugacgcacuaag

SEQ ID NO: 1576726 - RNA, 19 nt, Artificial Sequence
  Description of Artificial Sequence: Synthetic oligonucleotide
acacaagagacuuuccagg

SEQ ID NO: 1576727 - RNA, 19 nt, Artificial Sequence
  Description of Artificial Sequence: Synthetic oligonucleotide
uaaaugauccugagcagcc

SEQ ID NO: 1576728 - RNA, 19 nt, Artificial Sequence
  Description of Artificial Sequence: Synthetic oligonucleotide
uugucuuaagcuuaauugu

SEQ ID NO: 1576729 - RNA, 19 nt, Artificial Sequence
  Description of Artificial Sequence: Synthetic oligonucleotide
aaaucagacagaauggcca

SEQ ID NO: 1576730 - RNA, 19 nt, Artificial Sequence
  Description of Artificial Sequence: Synthetic oligonucleotide
ucaugaagaucuuuggaga

SEQ ID NO: 1576731 - RNA, 19 nt, Artificial Sequence
  Description of Artificial Sequence: Synthetic oligonucleotide
ugacgcacuaagaugaaca

SEQ ID NO: 1576732 - RNA, 19 nt, Artificial Sequence
  Description of Artificial Sequence: Synthetic oligonucleotide
uagcuuuucaaccacgagu

SEQ ID NO: 1576733 - RNA, 19 nt, Artificial Sequence
  Description of Artificial Sequence: Synthetic oligonucleotide
ggauguaaggaguugaaag

SEQ ID NO: 1576734 - RNA, 19 nt, Artificial Sequence
  Description of Artificial Sequence: Synthetic oligonucleotide
aucgaaagugucacgaugc

SEQ ID NO: 1576735 - RNA, 19 nt, Artificial Sequence
  Description of Artificial Sequence: Synthetic oligonucleotide
gaacccaugggucacauga

SEQ ID NO: 1576736 - RNA, 19 nt, Artificial Sequence
  Description of Artificial Sequence: Synthetic oligonucleotide
gaguccgacaucuuaguag

SEQ ID NO: 1576737 - RNA, 19 nt, Artificial Sequence
  Description of Artificial Sequence: Synthetic oligonucleotide
cuaaugaguggauguaagg

SEQ ID NO: 1576738 - RNA, 19 nt, Artificial Sequence
  Description of Artificial Sequence: Synthetic oligonucleotide
ucuuucgacagccuuuagc

SEQ ID NO: 1576739 - RNA, 19 nt, Artificial Sequence
  Description of Artificial Sequence: Synthetic oligonucleotide
aaucagcugaucuucugca

SEQ ID NO: 1576740 - RNA, 19 nt, Artificial Sequence
  Description of Artificial Sequence: Synthetic oligonucleotide
ugcaauguggauucgugca

SEQ ID NO: 1576741 - RNA, 19 nt, Artificial Sequence
  Description of Artificial Sequence: Synthetic oligonucleotide
agccccgacaaucugcugc

SEQ ID NO: 1576742 - RNA, 19 nt, Artificial Sequence
  Description of Artificial Sequence: Synthetic oligonucleotide
caaaucagacagaauggcc

SEQ ID NO: 1576743 - RNA, 19 nt, Artificial Sequence
  Description of Artificial Sequence: Synthetic oligonucleotide
auguaaggaguugaaaggg

SEQ ID NO: 1576744 - RNA, 19 nt, Artificial Sequence
  Description of Artificial Sequence: Synthetic oligonucleotide
aggagaucaaagugggcac

SEQ ID NO: 1576745 - RNA, 19 nt, Artificial Sequence
  Description of Artificial Sequence: Synthetic oligonucleotide
ucuuaguagacaggugugg

SEQ ID NO: 1576746 - RNA, 19 nt, Artificial Sequence
  Description of Artificial Sequence: Synthetic oligonucleotide
aaggaguugaaagggcgcg

SEQ ID NO: 1576747 - RNA, 19 nt, Artificial Sequence
  Description of Artificial Sequence: Synthetic oligonucleotide
uucuccuaauguaggacag

SEQ ID NO: 1576748 - RNA, 19 nt, Artificial Sequence
  Description of Artificial Sequence: Synthetic oligonucleotide
auaugacgcacuaagauga

SEQ ID NO: 1576749 - RNA, 19 nt, Artificial Sequence
  Description of Artificial Sequence: Synthetic oligonucleotide
ccuauuauuucacugcugg

SEQ ID NO: 1576750 - RNA, 19 nt, Artificial Sequence
  Description of Artificial Sequence: Synthetic oligonucleotide
uaaaucuguucaugcagcc

SEQ ID NO: 1576751 - RNA, 19 nt, Artificial Sequence
  Description of Artificial Sequence: Synthetic oligonucleotide
uuagcuuuucaaccacgag

SEQ ID NO: 1576752 - RNA, 19 nt, Artificial Sequence
  Description of Artificial Sequence: Synthetic oligonucleotide
agaauugugggcaggauug

SEQ ID NO: 1576753 - RNA, 19 nt, Artificial Sequence
  Description of Artificial Sequence: Synthetic oligonucleotide
guaaggaguugaaagggcg

SEQ ID NO: 1576754 - RNA, 19 nt, Artificial Sequence
  Description of Artificial Sequence: Synthetic oligonucleotide
uaaggaguugaaagggcgc

SEQ ID NO: 1576755 - RNA, 19 nt, Artificial Sequence
  Description of Artificial Sequence: Synthetic oligonucleotide
uuucaguucgggagcagcc

SEQ ID NO: 1576756 - RNA, 19 nt, Artificial Sequence
  Description of Artificial Sequence: Synthetic oligonucleotide
cauuacugucuugaaagcg

SEQ ID NO: 1576757 - RNA, 19 nt, Artificial Sequence
  Description of Artificial Sequence: Synthetic oligonucleotide
agcgcaauggccgugagug

SEQ ID NO: 1576758 - RNA, 19 nt, Artificial Sequence
  Description of Artificial Sequence: Synthetic oligonucleotide
agguaggagaucaaagugg

SEQ ID NO: 1576759 - RNA, 19 nt, Artificial Sequence
  Description of Artificial Sequence: Synthetic oligonucleotide
aagaucuuuggagacagaa

SEQ ID NO: 1576760 - RNA, 19 nt, Artificial Sequence
  Description of Artificial Sequence: Synthetic oligonucleotide
cuuuagcuuuucaaccacg

SEQ ID NO: 1576761 - RNA, 19 nt, Artificial Sequence
  Description of Artificial Sequence: Synthetic oligonucleotide
aaucaucuggcugugaaua

SEQ ID NO: 1576762 - RNA, 19 nt, Artificial Sequence
  Description of Artificial Sequence: Synthetic oligonucleotide
cuugaaagcguguggguac

SEQ ID NO: 1576763 - RNA, 19 nt, Artificial Sequence
  Description of Artificial Sequence: Synthetic oligonucleotide
auuuggcuugaacccaugg

SEQ ID NO: 1576764 - RNA, 19 nt, Artificial Sequence
  Description of Artificial Sequence: Synthetic oligonucleotide
gauucgugcauaaggagac

SEQ ID NO: 1576765 - RNA, 19 nt, Artificial Sequence
  Description of Artificial Sequence: Synthetic oligonucleotide
cuuaauuguuggugcagag

SEQ ID NO: 1576766 - RNA, 19 nt, Artificial Sequence
  Description of Artificial Sequence: Synthetic oligonucleotide
uccggauuagagaugucca

SEQ ID NO: 1576767 - RNA, 19 nt, Artificial Sequence
  Description of Artificial Sequence: Synthetic oligonucleotide
ugaaagggcgcgauuggca

SEQ ID NO: 1576768 - RNA, 19 nt, Artificial Sequence
  Description of Artificial Sequence: Synthetic oligonucleotide
aguugaaagggcgcgauug

SEQ ID NO: 1576769 - RNA, 19 nt, Artificial Sequence
  Description of Artificial Sequence: Synthetic oligonucleotide
uuaguagacagguguggca

SEQ ID NO: 1576770 - RNA, 19 nt, Artificial Sequence
  Description of Artificial Sequence: Synthetic oligonucleotide
caaagggacggcaaaucag

SEQ ID NO: 1576771 - RNA, 19 nt, Artificial Sequence
  Description of Artificial Sequence: Synthetic oligonucleotide
uggauucgugcauaaggag

SEQ ID NO: 1576772 - RNA, 19 nt, Artificial Sequence
  Description of Artificial Sequence: Synthetic oligonucleotide
uugauuccuuccuggacag

SEQ ID NO: 1576773 - RNA, 19 nt, Artificial Sequence
  Description of Artificial Sequence: Synthetic oligonucleotide
ugacaggcgaguuuucgug

SEQ ID NO: 1576774 - RNA, 19 nt, Artificial Sequence
  Description of Artificial Sequence: Synthetic oligonucleotide
aucaucuggcugugaauac

SEQ ID NO: 1576775 - RNA, 19 nt, Artificial Sequence
  Description of Artificial Sequence: Synthetic oligonucleotide
caaucugcugcacaacccc

SEQ ID NO: 1576776 - RNA, 19 nt, Artificial Sequence
  Description of Artificial Sequence: Synthetic oligonucleotide
aguaagguguguaaggccu

SEQ ID NO: 1576777 - RNA, 19 nt, Artificial Sequence
  Description of Artificial Sequence: Synthetic oligonucleotide
caaucagcugaucuucugc

SEQ ID NO: 1576778 - RNA, 19 nt, Artificial Sequence
  Description of Artificial Sequence: Synthetic oligonucleotide
cacgaguggagcuaaugag

SEQ ID NO: 1576779 - RNA, 19 nt, Artificial Sequence
  Description of Artificial Sequence: Synthetic oligonucleotide
ucaugcagccauucuguag

SEQ ID NO: 1576780 - RNA, 19 nt, Artificial Sequence
  Description of Artificial Sequence: Synthetic oligonucleotide
acgagcacuuucuucugac

SEQ ID NO: 1576781 - RNA, 19 nt, Artificial Sequence
  Description of Artificial Sequence: Synthetic oligonucleotide
gacaggcgaguuuucgugg

SEQ ID NO: 1576782 - RNA, 19 nt, Artificial Sequence
  Description of Artificial Sequence: Synthetic oligonucleotide
aaugaggccaccgcuguca

SEQ ID NO: 1576783 - RNA, 19 nt, Artificial Sequence
  Description of Artificial Sequence: Synthetic oligonucleotide
agcguguggguacagaggu

SEQ ID NO: 1576784 - RNA, 19 nt, Artificial Sequence
  Description of Artificial Sequence: Synthetic oligonucleotide
acucaugaagaucuuugga

SEQ ID NO: 1576785 - RNA, 19 nt, Artificial Sequence
  Description of Artificial Sequence: Synthetic oligonucleotide
guugaaagggcgcgauugg

SEQ ID NO: 1576786 - RNA, 19 nt, Artificial Sequence
  Description of Artificial Sequence: Synthetic oligonucleotide
uguaggacaggacucuuuu

SEQ ID NO: 1576787 - RNA, 19 nt, Artificial Sequence
  Description of Artificial Sequence: Synthetic oligonucleotide
cuggcugugaauacuccag

SEQ ID NO: 1576788 - RNA, 19 nt, Artificial Sequence
  Description of Artificial Sequence: Synthetic oligonucleotide
auuacugucuugaaagcgu

SEQ ID NO: 1576789 - RNA, 19 nt, Artificial Sequence
  Description of Artificial Sequence: Synthetic oligonucleotide
acugacgggaggaggaacc

SEQ ID NO: 1576790 - RNA, 19 nt, Artificial Sequence
  Description of Artificial Sequence: Synthetic oligonucleotide
cuuaguagacagguguggc

SEQ ID NO: 1576791 - RNA, 19 nt, Artificial Sequence
  Description of Artificial Sequence: Synthetic oligonucleotide
acacacuaaaagaagcuug

SEQ ID NO: 1576792 - RNA, 19 nt, Artificial Sequence
  Description of Artificial Sequence: Synthetic oligonucleotide
ucuaggcgcacuuucaguu

SEQ ID NO: 1576793 - RNA, 19 nt, Artificial Sequence
  Description of Artificial Sequence: Synthetic oligonucleotide
uucgacagccuuuagcuuu

SEQ ID NO: 1576794 - RNA, 19 nt, Artificial Sequence
  Description of Artificial Sequence: Synthetic oligonucleotide
uuaauuguuggugcagagu

SEQ ID NO: 1576795 - RNA, 19 nt, Artificial Sequence
  Description of Artificial Sequence: Synthetic oligonucleotide
aauguggauucgugcauaa

SEQ ID NO: 1576796 - RNA, 19 nt, Artificial Sequence
  Description of Artificial Sequence: Synthetic oligonucleotide
ugggcacuaaaagagccag

SEQ ID NO: 1576797 - RNA, 19 nt, Artificial Sequence
  Description of Artificial Sequence: Synthetic oligonucleotide
uccuauuauuucacugcug

SEQ ID NO: 1576798 - RNA, 19 nt, Artificial Sequence
  Description of Artificial Sequence: Synthetic oligonucleotide
cacuaagaugaacaucaag

SEQ ID NO: 1576799 - RNA, 19 nt, Artificial Sequence
  Description of Artificial Sequence: Synthetic oligonucleotide
cuuucgacagccuuuagcu

SEQ ID NO: 1576800 - RNA, 19 nt, Artificial Sequence
  Description of Artificial Sequence: Synthetic oligonucleotide
agacagaauggccaccgug

SEQ ID NO: 1576801 - RNA, 19 nt, Artificial Sequence
  Description of Artificial Sequence: Synthetic oligonucleotide
gguguguaaggccugcagg

SEQ ID NO: 1576802 - RNA, 19 nt, Artificial Sequence
  Description of Artificial Sequence: Synthetic oligonucleotide
aaacgagcacuuucuucug

SEQ ID NO: 1576803 - RNA, 19 nt, Artificial Sequence
  Description of Artificial Sequence: Synthetic oligonucleotide
caucgaaagugucacgaug

SEQ ID NO: 1576804 - RNA, 19 nt, Artificial Sequence
  Description of Artificial Sequence: Synthetic oligonucleotide
cucuguucuggucuucucc

SEQ ID NO: 1576805 - RNA, 19 nt, Artificial Sequence
  Description of Artificial Sequence: Synthetic oligonucleotide
uaacuggacucuguucugg

SEQ ID NO: 1576806 - RNA, 19 nt, Artificial Sequence
  Description of Artificial Sequence: Synthetic oligonucleotide
gcgauuggcaugcugaaag

SEQ ID NO: 1576807 - RNA, 19 nt, Artificial Sequence
  Description of Artificial Sequence: Synthetic oligonucleotide
uucgugcauaaggagaccc

SEQ ID NO: 1576808 - RNA, 19 nt, Artificial Sequence
  Description of Artificial Sequence: Synthetic oligonucleotide
aagagccaguaacuggacu

SEQ ID NO: 1576809 - RNA, 19 nt, Artificial Sequence
  Description of Artificial Sequence: Synthetic oligonucleotide
ggcaaaucagacagaaugg

SEQ ID NO: 1576810 - RNA, 19 nt, Artificial Sequence
  Description of Artificial Sequence: Synthetic oligonucleotide
gaguggagcuaaugagugg

SEQ ID NO: 1576811 - RNA, 19 nt, Artificial Sequence
  Description of Artificial Sequence: Synthetic oligonucleotide
ucagcugaucuucugcaau

SEQ ID NO: 1576812 - RNA, 19 nt, Artificial Sequence
  Description of Artificial Sequence: Synthetic oligonucleotide
ugaauacuccaggaugcag

SEQ ID NO: 1576813 - RNA, 19 nt, Artificial Sequence
  Description of Artificial Sequence: Synthetic oligonucleotide
caguaagguguguaaggcc

SEQ ID NO: 1576814 - RNA, 19 nt, Artificial Sequence
  Description of Artificial Sequence: Synthetic oligonucleotide
agguccaaugugcauuaag

SEQ ID NO: 1576815 - RNA, 19 nt, Artificial Sequence
  Description of Artificial Sequence: Synthetic oligonucleotide
agagcaaccaauguuucaa

SEQ ID NO: 1576816 - RNA, 19 nt, Artificial Sequence
  Description of Artificial Sequence: Synthetic oligonucleotide
cuccggauuagagaugucc

SEQ ID NO: 1576817 - RNA, 19 nt, Artificial Sequence
  Description of Artificial Sequence: Synthetic oligonucleotide
cagacuuuauugcuguauc

SEQ ID NO: 1576818 - RNA, 19 nt, Artificial Sequence
  Description of Artificial Sequence: Synthetic oligonucleotide
cagagcacuuuuaaaucug

SEQ ID NO: 1576819 - RNA, 19 nt, Artificial Sequence
  Description of Artificial Sequence: Synthetic oligonucleotide
cuucuccuaauguaggaca

SEQ ID NO: 1576820 - RNA, 19 nt, Artificial Sequence
  Description of Artificial Sequence: Synthetic oligonucleotide
ggauuagagauguccacug

SEQ ID NO: 1576821 - RNA, 19 nt, Artificial Sequence
  Description of Artificial Sequence: Synthetic oligonucleotide
ucgcacagccguuucuagg

SEQ ID NO: 1576822 - RNA, 19 nt, Artificial Sequence
  Description of Artificial Sequence: Synthetic oligonucleotide
uuucgugguaccgugacuu

SEQ ID NO: 1576823 - RNA, 19 nt, Artificial Sequence
  Description of Artificial Sequence: Synthetic oligonucleotide
aacgagcacuuucuucuga

SEQ ID NO: 1576824 - RNA, 19 nt, Artificial Sequence
  Description of Artificial Sequence: Synthetic oligonucleotide
gucuuaagcuuaauuguug

SEQ ID NO: 1576825 - RNA, 19 nt, Artificial Sequence
  Description of Artificial Sequence: Synthetic oligonucleotide
aagggacggcaaaucagac

SEQ ID NO: 1576826 - RNA, 19 nt, Artificial Sequence
  Description of Artificial Sequence: Synthetic oligonucleotide
ucgugcauaaggagacccc

SEQ ID NO: 1576827 - RNA, 19 nt, Artificial Sequence
  Description of Artificial Sequence: Synthetic oligonucleotide
gacaucuuaguagacaggu

SEQ ID NO: 1576828 - RNA, 19 nt, Artificial Sequence
  Description of Artificial Sequence: Synthetic oligonucleotide
agcucaacaccaaucagcu

SEQ ID NO: 1576829 - RNA, 19 nt, Artificial Sequence
  Description of Artificial Sequence: Synthetic oligonucleotide
uguggcauaugacgcacua

SEQ ID NO: 1576830 - RNA, 19 nt, Artificial Sequence
  Description of Artificial Sequence: Synthetic oligonucleotide
uggcagaccacaggaagag

SEQ ID NO: 1576831 - RNA, 19 nt, Artificial Sequence
  Description of Artificial Sequence: Synthetic oligonucleotide
ucuugaaagcgugugggua

SEQ ID NO: 1576832 - RNA, 19 nt, Artificial Sequence
  Description of Artificial Sequence: Synthetic oligonucleotide
uucuggagugcaaacucau

SEQ ID NO: 1576833 - RNA, 19 nt, Artificial Sequence
  Description of Artificial Sequence: Synthetic oligonucleotide
caucuuaguagacaggugu

SEQ ID NO: 1576834 - RNA, 19 nt, Artificial Sequence
  Description of Artificial Sequence: Synthetic oligonucleotide
ucgaaagugucacgaugcu

SEQ ID NO: 1576835 - RNA, 19 nt, Artificial Sequence
  Description of Artificial Sequence: Synthetic oligonucleotide
gaguguguggcaggggccg

SEQ ID NO: 1576836 - RNA, 19 nt, Artificial Sequence
  Description of Artificial Sequence: Synthetic oligonucleotide
gguaccgugacuugggaga

SEQ ID NO: 1576837 - RNA, 19 nt, Artificial Sequence
  Description of Artificial Sequence: Synthetic oligonucleotide
ugcugaggcaaaagaauuu

SEQ ID NO: 1576838 - RNA, 19 nt, Artificial Sequence
  Description of Artificial Sequence: Synthetic oligonucleotide
caucuggcugugaauacuc

SEQ ID NO: 1576839 - RNA, 19 nt, Artificial Sequence
  Description of Artificial Sequence: Synthetic oligonucleotide
aagacggagaggagaagcu

SEQ ID NO: 1576840 - RNA, 19 nt, Artificial Sequence
  Description of Artificial Sequence: Synthetic oligonucleotide
ucaacaccaaucagcugau

SEQ ID NO: 1576841 - RNA, 19 nt, Artificial Sequence
  Description of Artificial Sequence: Synthetic oligonucleotide
uuuucgugguaccgugacu

SEQ ID NO: 1576842 - RNA, 19 nt, Artificial Sequence
  Description of Artificial Sequence: Synthetic oligonucleotide
accgugacuugggagaguc

SEQ ID NO: 1576843 - RNA, 19 nt, Artificial Sequence
  Description of Artificial Sequence: Synthetic oligonucleotide
uugaaagggcgcgauuggc

SEQ ID NO: 1576844 - RNA, 19 nt, Artificial Sequence
  Description of Artificial Sequence: Synthetic oligonucleotide
ucgugguaccgugacuugg

SEQ ID NO: 1576845 - RNA, 19 nt, Artificial Sequence
  Description of Artificial Sequence: Synthetic oligonucleotide
gaacagaauugugggcagg

SEQ ID NO: 1576846 - RNA, 19 nt, Artificial Sequence
  Description of Artificial Sequence: Synthetic oligonucleotide
uucuaggcgcacuuucagu

SEQ ID NO: 1576847 - RNA, 19 nt, Artificial Sequence
  Description of Artificial Sequence: Synthetic oligonucleotide
auucgugcauaaggagacc

SEQ ID NO: 1576848 - RNA, 19 nt, Artificial Sequence
  Description of Artificial Sequence: Synthetic oligonucleotide
agggacugcacuccuauua

SEQ ID NO: 1576849 - RNA, 19 nt, Artificial Sequence
  Description of Artificial Sequence: Synthetic oligonucleotide
uuuauccccugcagagcug

SEQ ID NO: 1576850 - RNA, 19 nt, Artificial Sequence
  Description of Artificial Sequence: Synthetic oligonucleotide
agccgcuuuggcuuggcug

SEQ ID NO: 1576851 - RNA, 19 nt, Artificial Sequence
  Description of Artificial Sequence: Synthetic oligonucleotide
uggagcuaaugaguggaug

SEQ ID NO: 1576852 - RNA, 19 nt, Artificial Sequence
  Description of Artificial Sequence: Synthetic oligonucleotide
agcuuaauuguuggugcag

SEQ ID NO: 1576853 - RNA, 19 nt, Artificial Sequence
  Description of Artificial Sequence: Synthetic oligonucleotide
cugaggcaaaagaauuuuc

SEQ ID NO: 1576854 - RNA, 19 nt, Artificial Sequence
  Description of Artificial Sequence: Synthetic oligonucleotide
cuugguuuuggccaucgaa

SEQ ID NO: 1576855 - RNA, 19 nt, Artificial Sequence
  Description of Artificial Sequence: Synthetic oligonucleotide
acaccaaucagcugaucuu

SEQ ID NO: 1576856 - RNA, 19 nt, Artificial Sequence
  Description of Artificial Sequence: Synthetic oligonucleotide
agcagccccgacaaucugc

SEQ ID NO: 1576857 - RNA, 19 nt, Artificial Sequence
  Description of Artificial Sequence: Synthetic oligonucleotide
cacaagagacuuuccagga

SEQ ID NO: 1576858 - RNA, 19 nt, Artificial Sequence
  Description of Artificial Sequence: Synthetic oligonucleotide
uuuggccaucgaaaguguc

SEQ ID NO: 1576859 - RNA, 19 nt, Artificial Sequence
  Description of Artificial Sequence: Synthetic oligonucleotide
uuucaaccacgaguggagc

SEQ ID NO: 1576860 - RNA, 19 nt, Artificial Sequence
  Description of Artificial Sequence: Synthetic oligonucleotide
uucaguucgggagcagccc

SEQ ID NO: 1576861 - RNA, 19 nt, Artificial Sequence
  Description of Artificial Sequence: Synthetic oligonucleotide
cagcugaucuucugcaaug

SEQ ID NO: 1576862 - RNA, 19 nt, Artificial Sequence
  Description of Artificial Sequence: Synthetic oligonucleotide
cgcacuaagaugaacauca

SEQ ID NO: 1576863 - RNA, 19 nt, Artificial Sequence
  Description of Artificial Sequence: Synthetic oligonucleotide
uccuugguuuuggccaucg

SEQ ID NO: 1576864 - RNA, 19 nt, Artificial Sequence
  Description of Artificial Sequence: Synthetic oligonucleotide
aggcgaguuuucgugguac

SEQ ID NO: 1576865 - RNA, 19 nt, Artificial Sequence
  Description of Artificial Sequence: Synthetic oligonucleotide
caauuaagaacagaauugu

SEQ ID NO: 1576866 - RNA, 19 nt, Artificial Sequence
  Description of Artificial Sequence: Synthetic oligonucleotide
augacgcacuaagaugaac

SEQ ID NO: 1576867 - RNA, 19 nt, Artificial Sequence
  Description of Artificial Sequence: Synthetic oligonucleotide
aucuuaguagacaggugug

SEQ ID NO: 1576868 - RNA, 19 nt, Artificial Sequence
  Description of Artificial Sequence: Synthetic oligonucleotide
cacuaaaagaagcuugucu

SEQ ID NO: 1576869 - RNA, 19 nt, Artificial Sequence
  Description of Artificial Sequence: Synthetic oligonucleotide
gcaaaucagacagaauggc

SEQ ID NO: 1576870 - RNA, 19 nt, Artificial Sequence
  Description of Artificial Sequence: Synthetic oligonucleotide
uggccaucgaaagugucac

SEQ ID NO: 1576871 - RNA, 19 nt, Artificial Sequence
  Description of Artificial Sequence: Synthetic oligonucleotide
auuucacugcuggcagacc

SEQ ID NO: 1576872 - RNA, 19 nt, Artificial Sequence
  Description of Artificial Sequence: Synthetic oligonucleotide
guggauucgugcauaagga

SEQ ID NO: 1576873 - RNA, 19 nt, Artificial Sequence
  Description of Artificial Sequence: Synthetic oligonucleotide
cccaguaagguguguaagg

SEQ ID NO: 1576874 - RNA, 19 nt, Artificial Sequence
  Description of Artificial Sequence: Synthetic oligonucleotide
ggugcaggacacuuagcag

SEQ ID NO: 1576875 - RNA, 19 nt, Artificial Sequence
  Description of Artificial Sequence: Synthetic oligonucleotide
cugaaagacggagaggaga

SEQ ID NO: 1576876 - RNA, 19 nt, Artificial Sequence
  Description of Artificial Sequence: Synthetic oligonucleotide
ugauugucugcagacuuua

SEQ ID NO: 1576877 - RNA, 19 nt, Artificial Sequence
  Description of Artificial Sequence: Synthetic oligonucleotide
ggagaguccgacaucuuag

SEQ ID NO: 1576878 - RNA, 19 nt, Artificial Sequence
  Description of Artificial Sequence: Synthetic oligonucleotide
agugaccagcagcuggaug

SEQ ID NO: 1576879 - RNA, 19 nt, Artificial Sequence
  Description of Artificial Sequence: Synthetic oligonucleotide
agggacggcaaaucagaca

SEQ ID NO: 1576880 - RNA, 19 nt, Artificial Sequence
  Description of Artificial Sequence: Synthetic oligonucleotide
acgaguggagcuaaugagu

SEQ ID NO: 1576881 - RNA, 19 nt, Artificial Sequence
  Description of Artificial Sequence: Synthetic oligonucleotide
gcuaaugaguggauguaag

SEQ ID NO: 1576882 - RNA, 19 nt, Artificial Sequence
  Description of Artificial Sequence: Synthetic oligonucleotide
uggauguaaggaguugaaa

SEQ ID NO: 1576883 - RNA, 19 nt, Artificial Sequence
  Description of Artificial Sequence: Synthetic oligonucleotide
auguuucaagaacuuugau

SEQ ID NO: 1576884 - RNA, 19 nt, Artificial Sequence
  Description of Artificial Sequence: Synthetic oligonucleotide
gggucacaugaauucagag

SEQ ID NO: 1576885 - RNA, 19 nt, Artificial Sequence
  Description of Artificial Sequence: Synthetic oligonucleotide
gaggaaccugauugucugc

SEQ ID NO: 1576886 - RNA, 19 nt, Artificial Sequence
  Description of Artificial Sequence: Synthetic oligonucleotide
acuuagcagcucaacacca

SEQ ID NO: 1576887 - RNA, 19 nt, Artificial Sequence
  Description of Artificial Sequence: Synthetic oligonucleotide
cacagccguuucuaggcgc

SEQ ID NO: 1576888 - RNA, 19 nt, Artificial Sequence
  Description of Artificial Sequence: Synthetic oligonucleotide
uggcuugcucgcacagccg

SEQ ID NO: 1576889 - RNA, 19 nt, Artificial Sequence
  Description of Artificial Sequence: Synthetic oligonucleotide
agagguccaaugugcauua

SEQ ID NO: 1576890 - RNA, 19 nt, Artificial Sequence
  Description of Artificial Sequence: Synthetic oligonucleotide
ucaaccacgaguggagcua

SEQ ID NO: 1576891 - RNA, 19 nt, Artificial Sequence
  Description of Artificial Sequence: Synthetic oligonucleotide
augggucacaugaauucag

SEQ ID NO: 1576892 - RNA, 19 nt, Artificial Sequence
  Description of Artificial Sequence: Synthetic oligonucleotide
acaggcgaguuuucguggu

SEQ ID NO: 1576893 - RNA, 19 nt, Artificial Sequence
  Description of Artificial Sequence: Synthetic oligonucleotide
aggaaccugauugucugca

SEQ ID NO: 1576894 - RNA, 19 nt, Artificial Sequence
  Description of Artificial Sequence: Synthetic oligonucleotide
uucgugguaccgugacuug

SEQ ID NO: 1576895 - RNA, 19 nt, Artificial Sequence
  Description of Artificial Sequence: Synthetic oligonucleotide
gcauggaaucaucuggcug

SEQ ID NO: 1576896 - RNA, 19 nt, Artificial Sequence
  Description of Artificial Sequence: Synthetic oligonucleotide
caccaaucagcugaucuuc

SEQ ID NO: 1576897 - RNA, 19 nt, Artificial Sequence
  Description of Artificial Sequence: Synthetic oligonucleotide
uucuuucgacagccuuuag

SEQ ID NO: 1576898 - RNA, 19 nt, Artificial Sequence
  Description of Artificial Sequence: Synthetic oligonucleotide
cuaggcgcacuuucaguuc

SEQ ID NO: 1576899 - RNA, 19 nt, Artificial Sequence
  Description of Artificial Sequence: Synthetic oligonucleotide
aggaaugaggccaccgcug

SEQ ID NO: 1576900 - RNA, 19 nt, Artificial Sequence
  Description of Artificial Sequence: Synthetic oligonucleotide
gauuagagauguccacugu

SEQ ID NO: 1576901 - RNA, 19 nt, Artificial Sequence
  Description of Artificial Sequence: Synthetic oligonucleotide
aauguaggacaggacucuu

SEQ ID NO: 1576902 - RNA, 19 nt, Artificial Sequence
  Description of Artificial Sequence: Synthetic oligonucleotide
agagcacuuuuaaaucugu

SEQ ID NO: 1576903 - RNA, 19 nt, Artificial Sequence
  Description of Artificial Sequence: Synthetic oligonucleotide
ggauucgugcauaaggaga

SEQ ID NO: 1576904 - RNA, 19 nt, Artificial Sequence
  Description of Artificial Sequence: Synthetic oligonucleotide
auacagccagcuggugagc

SEQ ID NO: 1576905 - RNA, 19 nt, Artificial Sequence
  Description of Artificial Sequence: Synthetic oligonucleotide
gacgggaggaggaaccuga

SEQ ID NO: 1576906 - RNA, 19 nt, Artificial Sequence
  Description of Artificial Sequence: Synthetic oligonucleotide
uuucgacagccuuuagcuu

SEQ ID NO: 1576907 - RNA, 19 nt, Artificial Sequence
  Description of Artificial Sequence: Synthetic oligonucleotide
ccaguaagguguguaaggc

SEQ ID NO: 1576908 - RNA, 19 nt, Artificial Sequence
  Description of Artificial Sequence: Synthetic oligonucleotide
agacggagaggagaagcug

SEQ ID NO: 1576909 - RNA, 19 nt, Artificial Sequence
  Description of Artificial Sequence: Synthetic oligonucleotide
ggagcuaaugaguggaugu

SEQ ID NO: 1576910 - RNA, 19 nt, Artificial Sequence
  Description of Artificial Sequence: Synthetic oligonucleotide
ggcuggucuguuucuuucg

SEQ ID NO: 1576911 - RNA, 19 nt, Artificial Sequence
  Description of Artificial Sequence: Synthetic oligonucleotide
acaucuuaguagacaggug

SEQ ID NO: 1576912 - RNA, 19 nt, Artificial Sequence
  Description of Artificial Sequence: Synthetic oligonucleotide
ggcaugcugaaagacggag

SEQ ID NO: 1576913 - RNA, 19 nt, Artificial Sequence
  Description of Artificial Sequence: Synthetic oligonucleotide
agaguccgacaucuuagua

SEQ ID NO: 1576914 - RNA, 19 nt, Artificial Sequence
  Description of Artificial Sequence: Synthetic oligonucleotide
ccuaauguaggacaggacu

SEQ ID NO: 1576915 - RNA, 19 nt, Artificial Sequence
  Description of Artificial Sequence: Synthetic oligonucleotide
aggaugcaggccagcgugc

SEQ ID NO: 1576916 - RNA, 19 nt, Artificial Sequence
  Description of Artificial Sequence: Synthetic oligonucleotide
cucacuucaucaggcgcag

SEQ ID NO: 1576917 - RNA, 19 nt, Artificial Sequence
  Description of Artificial Sequence: Synthetic oligonucleotide
guaccgugacuugggagag

SEQ ID NO: 1576918 - RNA, 19 nt, Artificial Sequence
  Description of Artificial Sequence: Synthetic oligonucleotide
gaaagggcgcgauuggcau

SEQ ID NO: 1576919 - RNA, 19 nt, Artificial Sequence
  Description of Artificial Sequence: Synthetic oligonucleotide
ucgacagccuuuagcuuuu

SEQ ID NO: 1576920 - RNA, 19 nt, Artificial Sequence
  Description of Artificial Sequence: Synthetic oligonucleotide
ugaacccaugggucacaug

SEQ ID NO: 1576921 - RNA, 19 nt, Artificial Sequence
  Description of Artificial Sequence: Synthetic oligonucleotide
guaagguguguaaggccug

SEQ ID NO: 1576922 - RNA, 19 nt, Artificial Sequence
  Description of Artificial Sequence: Synthetic oligonucleotide
accccagugaccagcagcu

SEQ ID NO: 1576923 - RNA, 19 nt, Artificial Sequence
  Description of Artificial Sequence: Synthetic oligonucleotide
ugaaagcguguggguacag

SEQ ID NO: 1576924 - RNA, 19 nt, Artificial Sequence
  Description of Artificial Sequence: Synthetic oligonucleotide
accacgaguggagcuaaug

SEQ ID NO: 1576925 - RNA, 19 nt, Artificial Sequence
  Description of Artificial Sequence: Synthetic oligonucleotide
gcuuuucaaccacgagugg

SEQ ID NO: 1576926 - RNA, 19 nt, Artificial Sequence
  Description of Artificial Sequence: Synthetic oligonucleotide
ggaaccugauugucugcag

SEQ ID NO: 1576927 - RNA, 19 nt, Artificial Sequence
  Description of Artificial Sequence: Synthetic oligonucleotide
cauuuggcuugaacccaug

SEQ ID NO: 1576928 - RNA, 19 nt, Artificial Sequence
  Description of Artificial Sequence: Synthetic oligonucleotide
accccaguaagguguguaa

SEQ ID NO: 1576929 - RNA, 19 nt, Artificial Sequence
  Description of Artificial Sequence: Synthetic oligonucleotide
gacgcacuaagaugaacau

SEQ ID NO: 1576930 - RNA, 19 nt, Artificial Sequence
  Description of Artificial Sequence: Synthetic oligonucleotide
gugcauaaggagaccccag

SEQ ID NO: 1576931 - RNA, 19 nt, Artificial Sequence
  Description of Artificial Sequence: Synthetic oligonucleotide
cuuggcuugcucgcacagc

SEQ ID NO: 1576932 - RNA, 19 nt, Artificial Sequence
  Description of Artificial Sequence: Synthetic oligonucleotide
gcauaugacgcacuaagau

SEQ ID NO: 1576933 - RNA, 19 nt, Artificial Sequence
  Description of Artificial Sequence: Synthetic oligonucleotide
gucugcagacuuuauugcu

SEQ ID NO: 1576934 - RNA, 19 nt, Artificial Sequence
  Description of Artificial Sequence: Synthetic oligonucleotide
cgaguggagcuaaugagug

SEQ ID NO: 1576935 - RNA, 19 nt, Artificial Sequence
  Description of Artificial Sequence: Synthetic oligonucleotide
aagguguguaaggccugca

SEQ ID NO: 1576936 - RNA, 19 nt, Artificial Sequence
  Description of Artificial Sequence: Synthetic oligonucleotide
auggaaucaucuggcugug

SEQ ID NO: 1576937 - RNA, 19 nt, Artificial Sequence
  Description of Artificial Sequence: Synthetic oligonucleotide
accaaacgagcacuuucuu

SEQ ID NO: 1576938 - RNA, 19 nt, Artificial Sequence
  Description of Artificial Sequence: Synthetic oligonucleotide
gagaguccgacaucuuagu

SEQ ID NO: 1576939 - RNA, 19 nt, Artificial Sequence
  Description of Artificial Sequence: Synthetic oligonucleotide
aguagacagguguggcaua

SEQ ID NO: 1576940 - RNA, 19 nt, Artificial Sequence
  Description of Artificial Sequence: Synthetic oligonucleotide
cgcacagccguuucuaggc

SEQ ID NO: 1576941 - RNA, 19 nt, Artificial Sequence
  Description of Artificial Sequence: Synthetic oligonucleotide
ugauccugagcagccccga

SEQ ID NO: 1576942 - RNA, 19 nt, Artificial Sequence
  Description of Artificial Sequence: Synthetic oligonucleotide
gaaugaggccaccgcuguc

SEQ ID NO: 1576943 - RNA, 19 nt, Artificial Sequence
  Description of Artificial Sequence: Synthetic oligonucleotide
gcgaguuuucgugguaccg

SEQ ID NO: 1576944 - RNA, 19 nt, Artificial Sequence
  Description of Artificial Sequence: Synthetic oligonucleotide
ggcacuaaaagagccagua

SEQ ID NO: 1576945 - RNA, 19 nt, Artificial Sequence
  Description of Artificial Sequence: Synthetic oligonucleotide
ggcugugaauacuccagga

SEQ ID NO: 1576946 - RNA, 19 nt, Artificial Sequence
  Description of Artificial Sequence: Synthetic oligonucleotide
gguccaaugugcauuaagu

SEQ ID NO: 1576947 - RNA, 19 nt, Artificial Sequence
  Description of Artificial Sequence: Synthetic oligonucleotide
caggauugucauacagcca

SEQ ID NO: 1576948 - RNA, 19 nt, Artificial Sequence
  Description of Artificial Sequence: Synthetic oligonucleotide
caccaaacgagcacuuucu

SEQ ID NO: 1576949 - RNA, 19 nt, Artificial Sequence
  Description of Artificial Sequence: Synthetic oligonucleotide
gagaccccaguaaggugug

SEQ ID NO: 1576950 - RNA, 19 nt, Artificial Sequence
  Description of Artificial Sequence: Synthetic oligonucleotide
agcgugcuccggauuagag

SEQ ID NO: 1576951 - RNA, 19 nt, Artificial Sequence
  Description of Artificial Sequence: Synthetic oligonucleotide
gccaucgaaagugucacga

SEQ ID NO: 1576952 - RNA, 19 nt, Artificial Sequence
  Description of Artificial Sequence: Synthetic oligonucleotide
gagaucaaagugggcacua

SEQ ID NO: 1576953 - RNA, 19 nt, Artificial Sequence
  Description of Artificial Sequence: Synthetic oligonucleotide
gagcuaaugaguggaugua

SEQ ID NO: 1576954 - RNA, 19 nt, Artificial Sequence
  Description of Artificial Sequence: Synthetic oligonucleotide
gcuuaauuguuggugcaga

SEQ ID NO: 1576955 - RNA, 19 nt, Artificial Sequence
  Description of Artificial Sequence: Synthetic oligonucleotide
ggcgaguuuucgugguacc

SEQ ID NO: 1576956 - RNA, 19 nt, Artificial Sequence
  Description of Artificial Sequence: Synthetic oligonucleotide
accaaucagcugaucuucu

SEQ ID NO: 1576957 - RNA, 19 nt, Artificial Sequence
  Description of Artificial Sequence: Synthetic oligonucleotide
aguuuucgugguaccguga

SEQ ID NO: 1576958 - RNA, 19 nt, Artificial Sequence
  Description of Artificial Sequence: Synthetic oligonucleotide
aacccaugggucacaugaa

SEQ ID NO: 1576959 - RNA, 19 nt, Artificial Sequence
  Description of Artificial Sequence: Synthetic oligonucleotide
cgugguaccgugacuuggg

SEQ ID NO: 1576960 - RNA, 19 nt, Artificial Sequence
  Description of Artificial Sequence: Synthetic oligonucleotide
aggaguugaaagggcgcga

SEQ ID NO: 1576961 - RNA, 19 nt, Artificial Sequence
  Description of Artificial Sequence: Synthetic oligonucleotide
uugaacccaugggucacau

SEQ ID NO: 1576962 - RNA, 19 nt, Artificial Sequence
  Description of Artificial Sequence: Synthetic oligonucleotide
gcacagccguuucuaggcg

SEQ ID NO: 1576963 - RNA, 19 nt, Artificial Sequence
  Description of Artificial Sequence: Synthetic oligonucleotide
ccggauuagagauguccac

SEQ ID NO: 1576964 - RNA, 19 nt, Artificial Sequence
  Description of Artificial Sequence: Synthetic oligonucleotide
ggcgcgauuggcaugcuga

SEQ ID NO: 1576965 - RNA, 19 nt, Artificial Sequence
  Description of Artificial Sequence: Synthetic oligonucleotide
uauccccugcagagcugca

SEQ ID NO: 1576966 - RNA, 19 nt, Artificial Sequence
  Description of Artificial Sequence: Synthetic oligonucleotide
ugauuccuuccuggacagc

SEQ ID NO: 1576967 - RNA, 19 nt, Artificial Sequence
  Description of Artificial Sequence: Synthetic oligonucleotide
ugccaccaaacgagcacuu

SEQ ID NO: 1576968 - RNA, 19 nt, Artificial Sequence
  Description of Artificial Sequence: Synthetic oligonucleotide
gugggcacuaaaagagcca

SEQ ID NO: 1576969 - RNA, 19 nt, Artificial Sequence
  Description of Artificial Sequence: Synthetic oligonucleotide
ggccaucgaaagugucacg

SEQ ID NO: 1576970 - RNA, 19 nt, Artificial Sequence
  Description of Artificial Sequence: Synthetic oligonucleotide
gucuugaaagcgugugggu

SEQ ID NO: 1576971 - RNA, 19 nt, Artificial Sequence
  Description of Artificial Sequence: Synthetic oligonucleotide
gugguaccgugacuuggga

SEQ ID NO: 1576972 - RNA, 19 nt, Artificial Sequence
  Description of Artificial Sequence: Synthetic oligonucleotide
ggcauaugacgcacuaaga

SEQ ID NO: 1576973 - RNA, 19 nt, Artificial Sequence
  Description of Artificial Sequence: Synthetic oligonucleotide
cacugacgggaggaggaac

SEQ ID NO: 1576974 - RNA, 19 nt, Artificial Sequence
  Description of Artificial Sequence: Synthetic oligonucleotide
ccacgaguggagcuaauga

SEQ ID NO: 1576975 - RNA, 19 nt, Artificial Sequence
  Description of Artificial Sequence: Synthetic oligonucleotide
gcugaaagacggagaggag

SEQ ID NO: 1576976 - RNA, 19 nt, Artificial Sequence
  Description of Artificial Sequence: Synthetic oligonucleotide
gcacuaaaagagccaguaa

SEQ ID NO: 1576977 - RNA, 19 nt, Artificial Sequence
  Description of Artificial Sequence: Synthetic oligonucleotide
ucuguacugcuggcugguc

SEQ ID NO: 1576978 - RNA, 19 nt, Artificial Sequence
  Description of Artificial Sequence: Synthetic oligonucleotide
caauguggauucgugcaua

SEQ ID NO: 1576979 - RNA, 19 nt, Artificial Sequence
  Description of Artificial Sequence: Synthetic oligonucleotide
uagggacugcacuccuauu

SEQ ID NO: 1576980 - RNA, 19 nt, Artificial Sequence
  Description of Artificial Sequence: Synthetic oligonucleotide
ccgacaaucugcugcacaa

SEQ ID NO: 1576981 - RNA, 19 nt, Artificial Sequence
  Description of Artificial Sequence: Synthetic oligonucleotide
gcaauggccgugagugugc

SEQ ID NO: 1576982 - RNA, 19 nt, Artificial Sequence
  Description of Artificial Sequence: Synthetic oligonucleotide
ggacacuuagcagcucaac

SEQ ID NO: 1576983 - RNA, 19 nt, Artificial Sequence
  Description of Artificial Sequence: Synthetic oligonucleotide
auguaggacaggacucuuu

SEQ ID NO: 1576984 - RNA, 19 nt, Artificial Sequence
  Description of Artificial Sequence: Synthetic oligonucleotide
gcucaacaccaaucagcug

SEQ ID NO: 1576985 - RNA, 19 nt, Artificial Sequence
  Description of Artificial Sequence: Synthetic oligonucleotide
ggcgcacuuucaguucggg

SEQ ID NO: 1576986 - RNA, 19 nt, Artificial Sequence
  Description of Artificial Sequence: Synthetic oligonucleotide
gcgugcuccggauuagaga

SEQ ID NO: 1576987 - RNA, 19 nt, Artificial Sequence
  Description of Artificial Sequence: Synthetic oligonucleotide
cuugaacccaugggucaca

SEQ ID NO: 1576988 - RNA, 19 nt, Artificial Sequence
  Description of Artificial Sequence: Synthetic oligonucleotide
caggccagcgugcuccgga

SEQ ID NO: 1576989 - RNA, 19 nt, Artificial Sequence
  Description of Artificial Sequence: Synthetic oligonucleotide
uggccgugagugugcucac

SEQ ID NO: 1576990 - RNA, 19 nt, Artificial Sequence
  Description of Artificial Sequence: Synthetic oligonucleotide
guagacagguguggcauau

SEQ ID NO: 1576991 - RNA, 19 nt, Artificial Sequence
  Description of Artificial Sequence: Synthetic oligonucleotide
ccccaguaagguguguaag

SEQ ID NO: 1576992 - RNA, 19 nt, Artificial Sequence
  Description of Artificial Sequence: Synthetic oligonucleotide
aggccagcgugcuccggau

SEQ ID NO: 1576993 - RNA, 19 nt, Artificial Sequence
  Description of Artificial Sequence: Synthetic oligonucleotide
cagagguccaaugugcauu

SEQ ID NO: 1576994 - RNA, 19 nt, Artificial Sequence
  Description of Artificial Sequence: Synthetic oligonucleotide
uaccgugacuugggagagu

SEQ ID NO: 1576995 - RNA, 19 nt, Artificial Sequence
  Description of Artificial Sequence: Synthetic oligonucleotide
acggcaaaucagacagaau

SEQ ID NO: 1576996 - RNA, 19 nt, Artificial Sequence
  Description of Artificial Sequence: Synthetic oligonucleotide
gccccgacaaucugcugca

SEQ ID NO: 1576997 - RNA, 19 nt, Artificial Sequence
  Description of Artificial Sequence: Synthetic oligonucleotide
guccgacaucuuaguagac

SEQ ID NO: 1576998 - RNA, 19 nt, Artificial Sequence
  Description of Artificial Sequence: Synthetic oligonucleotide
gggacugcacuccuauuau

SEQ ID NO: 1576999 - RNA, 19 nt, Artificial Sequence
  Description of Artificial Sequence: Synthetic oligonucleotide
gauugucugcagacuuuau

SEQ ID NO: 1577000 - RNA, 19 nt, Artificial Sequence
  Description of Artificial Sequence: Synthetic oligonucleotide
cgugcuccggauuagagau

SEQ ID NO: 1577001 - RNA, 19 nt, Artificial Sequence
  Description of Artificial Sequence: Synthetic oligonucleotide
gcaauguggauucgugcau

SEQ ID NO: 1577002 - RNA, 19 nt, Artificial Sequence
  Description of Artificial Sequence: Synthetic oligonucleotide
gaguugaaagggcgcgauu

SEQ ID NO: 1577003 - RNA, 19 nt, Artificial Sequence
  Description of Artificial Sequence: Synthetic oligonucleotide
caacaccaaucagcugauc

SEQ ID NO: 1577004 - RNA, 19 nt, Artificial Sequence
  Description of Artificial Sequence: Synthetic oligonucleotide
gagcacuuuuaaaucuguu

SEQ ID NO: 1577005 - RNA, 19 nt, Artificial Sequence
  Description of Artificial Sequence: Synthetic oligonucleotide
cgcaauggccgugagugug

SEQ ID NO: 1577006 - RNA, 19 nt, Artificial Sequence
  Description of Artificial Sequence: Synthetic oligonucleotide
agcuugucuuaagcuuaau

SEQ ID NO: 1577007 - RNA, 19 nt, Artificial Sequence
  Description of Artificial Sequence: Synthetic oligonucleotide
ggcuugcucgcacagccgu

SEQ ID NO: 1577008 - RNA, 19 nt, Artificial Sequence
  Description of Artificial Sequence: Synthetic oligonucleotide
caaccacgaguggagcuaa

SEQ ID NO: 1577009 - RNA, 19 nt, Artificial Sequence
  Description of Artificial Sequence: Synthetic oligonucleotide
ccguggcugccaccaaacg

SEQ ID NO: 1577010 - RNA, 19 nt, Artificial Sequence
  Description of Artificial Sequence: Synthetic oligonucleotide
gcugaggcaaaagaauuuu

SEQ ID NO: 1577011 - RNA, 19 nt, Artificial Sequence
  Description of Artificial Sequence: Synthetic oligonucleotide
gcgcacuuucaguucggga

SEQ ID NO: 1577012 - RNA, 19 nt, Artificial Sequence
  Description of Artificial Sequence: Synthetic oligonucleotide
aaccacgaguggagcuaau

SEQ ID NO: 1577013 - RNA, 19 nt, Artificial Sequence
  Description of Artificial Sequence: Synthetic oligonucleotide
ggagaucaaagugggcacu

SEQ ID NO: 1577014 - RNA, 19 nt, Artificial Sequence
  Description of Artificial Sequence: Synthetic oligonucleotide
cuguagggacugcacuccu

SEQ ID NO: 1577015 - RNA, 19 nt, Artificial Sequence
  Description of Artificial Sequence: Synthetic oligonucleotide
cgugcauaaggagacccca

SEQ ID NO: 1577016 - RNA, 19 nt, Artificial Sequence
  Description of Artificial Sequence: Synthetic oligonucleotide
gagguccaaugugcauuaa

SEQ ID NO: 1577017 - RNA, 19 nt, Artificial Sequence
  Description of Artificial Sequence: Synthetic oligonucleotide
cagccguuucuaggcgcac

SEQ ID NO: 1577018 - RNA, 19 nt, Artificial Sequence
  Description of Artificial Sequence: Synthetic oligonucleotide
gggcgcgauuggcaugcug

SEQ ID NO: 1577019 - RNA, 19 nt, Artificial Sequence
  Description of Artificial Sequence: Synthetic oligonucleotide
ggcugccaccaaacgagca

SEQ ID NO: 1577020 - RNA, 19 nt, Artificial Sequence
  Description of Artificial Sequence: Synthetic oligonucleotide
ggaguugaaagggcgcgau

SEQ ID NO: 1577021 - RNA, 19 nt, Artificial Sequence
  Description of Artificial Sequence: Synthetic oligonucleotide
gcgcgauuggcaugcugaa

SEQ ID NO: 1577022 - RNA, 19 nt, Artificial Sequence
  Description of Artificial Sequence: Synthetic oligonucleotide
gcacuaagaugaacaucaa

SEQ ID NO: 1577023 - RNA, 19 nt, Artificial Sequence
  Description of Artificial Sequence: Synthetic oligonucleotide
cuugcucgcacagccguuu

SEQ ID NO: 1577024 - RNA, 19 nt, Artificial Sequence
  Description of Artificial Sequence: Synthetic oligonucleotide
ccagcgugcuccggauuag

SEQ ID NO: 1577025 - RNA, 19 nt, Artificial Sequence
  Description of Artificial Sequence: Synthetic oligonucleotide
cagcgugcuccggauuaga

SEQ ID NO: 1577026 - RNA, 19 nt, Artificial Sequence
  Description of Artificial Sequence: Synthetic oligonucleotide
cgagcacuuucuucugaca

SEQ ID NO: 1577027 - RNA, 19 nt, Artificial Sequence
  Description of Artificial Sequence: Synthetic oligonucleotide
cugacgggaggaggaaccu

SEQ ID NO: 1577028 - RNA, 19 nt, Artificial Sequence
  Description of Artificial Sequence: Synthetic oligonucleotide
cuggcuggucuguuucuuu

SEQ ID NO: 1577029 - RNA, 19 nt, Artificial Sequence
  Description of Artificial Sequence: Synthetic oligonucleotide
gcucgcacagccguuucua

SEQ ID NO: 1577030 - RNA, 19 nt, Artificial Sequence
  Description of Artificial Sequence: Synthetic oligonucleotide
guggagcuaaugaguggau

SEQ ID NO: 1577031 - RNA, 19 nt, Artificial Sequence
  Description of Artificial Sequence: Synthetic oligonucleotide
ggacugcacuccuauuauu

SEQ ID NO: 1577032 - RNA, 19 nt, Artificial Sequence
  Description of Artificial Sequence: Synthetic oligonucleotide
caauggccgugagugugcu

SEQ ID NO: 1577033 - RNA, 19 nt, Artificial Sequence
  Description of Artificial Sequence: Synthetic oligonucleotide
gcauuuggcuugaacccau

SEQ ID NO: 1577034 - RNA, 19 nt, Artificial Sequence
  Description of Artificial Sequence: Synthetic oligonucleotide
cccaugggucacaugaauu

SEQ ID NO: 1577035 - RNA, 19 nt, Artificial Sequence
  Description of Artificial Sequence: Synthetic oligonucleotide
guguggcauaugacgcacu

SEQ ID NO: 1577036 - RNA, 19 nt, Artificial Sequence
  Description of Artificial Sequence: Synthetic oligonucleotide
gccguuucuaggcgcacuu

SEQ ID NO: 1577037 - RNA, 19 nt, Artificial Sequence
  Description of Artificial Sequence: Synthetic oligonucleotide
ccaucgaaagugucacgau

SEQ ID NO: 1577038 - RNA, 19 nt, Artificial Sequence
  Description of Artificial Sequence: Synthetic oligonucleotide
ccuugguuuuggccaucga

SEQ ID NO: 1577039 - RNA, 19 nt, Artificial Sequence
  Description of Artificial Sequence: Synthetic oligonucleotide
gcgcaggcauggaaucauc

SEQ ID NO: 1577040 - RNA, 19 nt, Artificial Sequence
  Description of Artificial Sequence: Synthetic oligonucleotide
cgaguuuucgugguaccgu

SEQ ID NO: 1577041 - RNA, 19 nt, Artificial Sequence
  Description of Artificial Sequence: Synthetic oligonucleotide
gggcacuaaaagagccagu

SEQ ID NO: 1577042 - RNA, 19 nt, Artificial Sequence
  Description of Artificial Sequence: Synthetic oligonucleotide
agggcgcgauuggcaugcu

SEQ ID NO: 1577043 - RNA, 19 nt, Artificial Sequence
  Description of Artificial Sequence: Synthetic oligonucleotide
gggccggcugccgggcagc

SEQ ID NO: 1577044 - RNA, 19 nt, Artificial Sequence
  Description of Artificial Sequence: Synthetic oligonucleotide
gcgcaauggccgugagugu

SEQ ID NO: 1577045 - RNA, 19 nt, Artificial Sequence
  Description of Artificial Sequence: Synthetic oligonucleotide
gcuccggauuagagauguc

SEQ ID NO: 1577046 - RNA, 19 nt, Artificial Sequence
  Description of Artificial Sequence: Synthetic oligonucleotide
ccccagugaccagcagcug

SEQ ID NO: 1577047 - RNA, 19 nt, Artificial Sequence
  Description of Artificial Sequence: Synthetic oligonucleotide
ggccggcugccgggcagcc

SEQ ID NO: 1577048 - RNA, 19 nt, Artificial Sequence
  Description of Artificial Sequence: Synthetic oligonucleotide
ccccgacaaucugcugcac

SEQ ID NO: 1577049 - RNA, 19 nt, Artificial Sequence
  Description of Artificial Sequence: Synthetic oligonucleotide
cgaaagugucacgaugcuu

SEQ ID NO: 1577050 - RNA, 19 nt, Artificial Sequence
  Description of Artificial Sequence: Synthetic oligonucleotide
gcuugcucgcacagccguu

SEQ ID NO: 1577051 - RNA, 19 nt, Artificial Sequence
  Description of Artificial Sequence: Synthetic oligonucleotide
ccguuucuaggcgcacuuu

SEQ ID NO: 1577052 - RNA, 19 nt, Artificial Sequence
  Description of Artificial Sequence: Synthetic oligonucleotide
uccacgaugacauaaagag

SEQ ID NO: 1577053 - RNA, 19 nt, Artificial Sequence
  Description of Artificial Sequence: Synthetic oligonucleotide
aaaugaagcaccuccaucu

SEQ ID NO: 1577054 - RNA, 19 nt, Artificial Sequence
  Description of Artificial Sequence: Synthetic oligonucleotide
aaugucucgagcuaggcca

SEQ ID NO: 1577055 - RNA, 19 nt, Artificial Sequence
  Description of Artificial Sequence: Synthetic oligonucleotide
cuucuuagaggcaagauac

SEQ ID NO: 1577056 - RNA, 19 nt, Artificial Sequence
  Description of Artificial Sequence: Synthetic oligonucleotide
cuuacuuccguucaccucg

SEQ ID NO: 1577057 - RNA, 19 nt, Artificial Sequence
  Description of Artificial Sequence: Synthetic oligonucleotide
cauugguacaguuaguggg

SEQ ID NO: 1577058 - RNA, 19 nt, Artificial Sequence
  Description of Artificial Sequence: Synthetic oligonucleotide
ucguaaaugaagcaccucc

SEQ ID NO: 1577059 - RNA, 19 nt, Artificial Sequence
  Description of Artificial Sequence: Synthetic oligonucleotide
gaucagaucugauaagucc

SEQ ID NO: 1577060 - RNA, 19 nt, Artificial Sequence
  Description of Artificial Sequence: Synthetic oligonucleotide
auaaagaggacccauccug

SEQ ID NO: 1577061 - RNA, 19 nt, Artificial Sequence
  Description of Artificial Sequence: Synthetic oligonucleotide
uguagauccggucaaacaa

SEQ ID NO: 1577062 - RNA, 19 nt, Artificial Sequence
  Description of Artificial Sequence: Synthetic oligonucleotide
uacaccuuacacaugaacu

SEQ ID NO: 1577063 - RNA, 19 nt, Artificial Sequence
  Description of Artificial Sequence: Synthetic oligonucleotide
guaugcacuucuuagaggc

SEQ ID NO: 1577064 - RNA, 19 nt, Artificial Sequence
  Description of Artificial Sequence: Synthetic oligonucleotide
aaucuuacuuccguucacc

SEQ ID NO: 1577065 - RNA, 19 nt, Artificial Sequence
  Description of Artificial Sequence: Synthetic oligonucleotide
uuugccuaagaccagucug

SEQ ID NO: 1577066 - RNA, 19 nt, Artificial Sequence
  Description of Artificial Sequence: Synthetic oligonucleotide
uuacacaugaacuccacgu

SEQ ID NO: 1577067 - RNA, 19 nt, Artificial Sequence
  Description of Artificial Sequence: Synthetic oligonucleotide
uauaguagucgauauggug

SEQ ID NO: 1577068 - RNA, 19 nt, Artificial Sequence
  Description of Artificial Sequence: Synthetic oligonucleotide
agaguuacccgccaagcac

SEQ ID NO: 1577069 - RNA, 19 nt, Artificial Sequence
  Description of Artificial Sequence: Synthetic oligonucleotide
acaguuagugggcuugucc

SEQ ID NO: 1577070 - RNA, 19 nt, Artificial Sequence
  Description of Artificial Sequence: Synthetic oligonucleotide
uguagcaauauuccagccc

SEQ ID NO: 1577071 - RNA, 19 nt, Artificial Sequence
  Description of Artificial Sequence: Synthetic oligonucleotide
agcucauugguacaguuag

SEQ ID NO: 1577072 - RNA, 19 nt, Artificial Sequence
  Description of Artificial Sequence: Synthetic oligonucleotide
gauccggucaaacaaggcc

SEQ ID NO: 1577073 - RNA, 19 nt, Artificial Sequence
  Description of Artificial Sequence: Synthetic oligonucleotide
aaaggagacauuucguaaa

SEQ ID NO: 1577074 - RNA, 19 nt, Artificial Sequence
  Description of Artificial Sequence: Synthetic oligonucleotide
cacgaugacauaaagagga

SEQ ID NO: 1577075 - RNA, 19 nt, Artificial Sequence
  Description of Artificial Sequence: Synthetic oligonucleotide
ucauugguacaguuagugg

SEQ ID NO: 1577076 - RNA, 19 nt, Artificial Sequence
  Description of Artificial Sequence: Synthetic oligonucleotide
ucugagaggguacugcgug

SEQ ID NO: 1577077 - RNA, 19 nt, Artificial Sequence
  Description of Artificial Sequence: Synthetic oligonucleotide
uguaugcacuucuuagagg

SEQ ID NO: 1577078 - RNA, 19 nt, Artificial Sequence
  Description of Artificial Sequence: Synthetic oligonucleotide
auaugcuucagccacugga

SEQ ID NO: 1577079 - RNA, 19 nt, Artificial Sequence
  Description of Artificial Sequence: Synthetic oligonucleotide
aagaccacacgucacucug

SEQ ID NO: 1577080 - RNA, 19 nt, Artificial Sequence
  Description of Artificial Sequence: Synthetic oligonucleotide
uagauccggucaaacaagg

SEQ ID NO: 1577081 - RNA, 19 nt, Artificial Sequence
  Description of Artificial Sequence: Synthetic oligonucleotide
agccacuuuggucacacgg

SEQ ID NO: 1577082 - RNA, 19 nt, Artificial Sequence
  Description of Artificial Sequence: Synthetic oligonucleotide
ggugguauuaacuuccagc

SEQ ID NO: 1577083 - RNA, 19 nt, Artificial Sequence
  Description of Artificial Sequence: Synthetic oligonucleotide
ucccgcaucaucauguaca

SEQ ID NO: 1577084 - RNA, 19 nt, Artificial Sequence
  Description of Artificial Sequence: Synthetic oligonucleotide
cucgauaugcuucagccac

SEQ ID NO: 1577085 - RNA, 19 nt, Artificial Sequence
  Description of Artificial Sequence: Synthetic oligonucleotide
auaguagucgauaugguga

SEQ ID NO: 1577086 - RNA, 19 nt, Artificial Sequence
  Description of Artificial Sequence: Synthetic oligonucleotide
guagcaauauuccagccca

SEQ ID NO: 1577087 - RNA, 19 nt, Artificial Sequence
  Description of Artificial Sequence: Synthetic oligonucleotide
gugguauuaacuuccagca

SEQ ID NO: 1577088 - RNA, 19 nt, Artificial Sequence
  Description of Artificial Sequence: Synthetic oligonucleotide
acggcaaguugucugggcc

SEQ ID NO: 1577089 - RNA, 19 nt, Artificial Sequence
  Description of Artificial Sequence: Synthetic oligonucleotide
cauuacauugucuucuguc

SEQ ID NO: 1577090 - RNA, 19 nt, Artificial Sequence
  Description of Artificial Sequence: Synthetic oligonucleotide
cuggaugugaggcuguggg

SEQ ID NO: 1577091 - RNA, 19 nt, Artificial Sequence
  Description of Artificial Sequence: Synthetic oligonucleotide
cacaagagcaccccaaaag

SEQ ID NO: 1577092 - RNA, 19 nt, Artificial Sequence
  Description of Artificial Sequence: Synthetic oligonucleotide
gagaguacugguccagagg

SEQ ID NO: 1577093 - RNA, 19 nt, Artificial Sequence
  Description of Artificial Sequence: Synthetic oligonucleotide
uaaaugaagcaccuccauc

SEQ ID NO: 1577094 - RNA, 19 nt, Artificial Sequence
  Description of Artificial Sequence: Synthetic oligonucleotide
uuucguaaaugaagcaccu

SEQ ID NO: 1577095 - RNA, 19 nt, Artificial Sequence
  Description of Artificial Sequence: Synthetic oligonucleotide
aggaucuggacauacggca

SEQ ID NO: 1577096 - RNA, 19 nt, Artificial Sequence
  Description of Artificial Sequence: Synthetic oligonucleotide
cauuucguaaaugaagcac

SEQ ID NO: 1577097 - RNA, 19 nt, Artificial Sequence
  Description of Artificial Sequence: Synthetic oligonucleotide
cucaugagagaagacagag

SEQ ID NO: 1577098 - RNA, 19 nt, Artificial Sequence
  Description of Artificial Sequence: Synthetic oligonucleotide
uaaagaggacccauccugu

SEQ ID NO: 1577099 - RNA, 19 nt, Artificial Sequence
  Description of Artificial Sequence: Synthetic oligonucleotide
uuauccagcccgauggccu

SEQ ID NO: 1577100 - RNA, 19 nt, Artificial Sequence
  Description of Artificial Sequence: Synthetic oligonucleotide
aagaccagucugucucucg

SEQ ID NO: 1577101 - RNA, 19 nt, Artificial Sequence
  Description of Artificial Sequence: Synthetic oligonucleotide
auuaacuuccagcagucuu

SEQ ID NO: 1577102 - RNA, 19 nt, Artificial Sequence
  Description of Artificial Sequence: Synthetic oligonucleotide
cuuacacaugaacuccacg

SEQ ID NO: 1577103 - RNA, 19 nt, Artificial Sequence
  Description of Artificial Sequence: Synthetic oligonucleotide
uucauuacauugucuucug

SEQ ID NO: 1577104 - RNA, 19 nt, Artificial Sequence
  Description of Artificial Sequence: Synthetic oligonucleotide
gauauggugaaugucucga

SEQ ID NO: 1577105 - RNA, 19 nt, Artificial Sequence
  Description of Artificial Sequence: Synthetic oligonucleotide
guugcgucggacuucaaca

SEQ ID NO: 1577106 - RNA, 19 nt, Artificial Sequence
  Description of Artificial Sequence: Synthetic oligonucleotide
uggguuuguccuuauccag

SEQ ID NO: 1577107 - RNA, 19 nt, Artificial Sequence
  Description of Artificial Sequence: Synthetic oligonucleotide
aggagagucgugaaggccg

SEQ ID NO: 1577108 - RNA, 19 nt, Artificial Sequence
  Description of Artificial Sequence: Synthetic oligonucleotide
cucauugguacaguuagug

SEQ ID NO: 1577109 - RNA, 19 nt, Artificial Sequence
  Description of Artificial Sequence: Synthetic oligonucleotide
gaucugauaaguccuucuc

SEQ ID NO: 1577110 - RNA, 19 nt, Artificial Sequence
  Description of Artificial Sequence: Synthetic oligonucleotide
gaguuacccgccaagcacg

SEQ ID NO: 1577111 - RNA, 19 nt, Artificial Sequence
  Description of Artificial Sequence: Synthetic oligonucleotide
gaucuggacauacggcaag

SEQ ID NO: 1577112 - RNA, 19 nt, Artificial Sequence
  Description of Artificial Sequence: Synthetic oligonucleotide
ucgugaaggccgaaccagg

SEQ ID NO: 1577113 - RNA, 19 nt, Artificial Sequence
  Description of Artificial Sequence: Synthetic oligonucleotide
gauauucuugugcuugcca

SEQ ID NO: 1577114 - RNA, 19 nt, Artificial Sequence
  Description of Artificial Sequence: Synthetic oligonucleotide
agucagcgucuuuugaguc

SEQ ID NO: 1577115 - RNA, 19 nt, Artificial Sequence
  Description of Artificial Sequence: Synthetic oligonucleotide
uccaucuccgagaucagau

SEQ ID NO: 1577116 - RNA, 19 nt, Artificial Sequence
  Description of Artificial Sequence: Synthetic oligonucleotide
aacggcucaugagagaaga

SEQ ID NO: 1577117 - RNA, 19 nt, Artificial Sequence
  Description of Artificial Sequence: Synthetic oligonucleotide
uacugguccagaggcaucg

SEQ ID NO: 1577118 - RNA, 19 nt, Artificial Sequence
  Description of Artificial Sequence: Synthetic oligonucleotide
gguuguagcaauauuccag

SEQ ID NO: 1577119 - RNA, 19 nt, Artificial Sequence
  Description of Artificial Sequence: Synthetic oligonucleotide
agaggacccauccugugug

SEQ ID NO: 1577120 - RNA, 19 nt, Artificial Sequence
  Description of Artificial Sequence: Synthetic oligonucleotide
uuagugggcuuguccaucc

SEQ ID NO: 1577121 - RNA, 19 nt, Artificial Sequence
  Description of Artificial Sequence: Synthetic oligonucleotide
caagagguuugccuaagac

SEQ ID NO: 1577122 - RNA, 19 nt, Artificial Sequence
  Description of Artificial Sequence: Synthetic oligonucleotide
caggacauuccuagcagcc

SEQ ID NO: 1577123 - RNA, 19 nt, Artificial Sequence
  Description of Artificial Sequence: Synthetic oligonucleotide
gagucgugaaggccgaacc

SEQ ID NO: 1577124 - RNA, 19 nt, Artificial Sequence
  Description of Artificial Sequence: Synthetic oligonucleotide
auauggugaaugucucgag

SEQ ID NO: 1577125 - RNA, 19 nt, Artificial Sequence
  Description of Artificial Sequence: Synthetic oligonucleotide
cugguuggaggucaaggcc

SEQ ID NO: 1577126 - RNA, 19 nt, Artificial Sequence
  Description of Artificial Sequence: Synthetic oligonucleotide
cuuguccauccgaugaccc

SEQ ID NO: 1577127 - RNA, 19 nt, Artificial Sequence
  Description of Artificial Sequence: Synthetic oligonucleotide
ucggccaauaccaccugcc

SEQ ID NO: 1577128 - RNA, 19 nt, Artificial Sequence
  Description of Artificial Sequence: Synthetic oligonucleotide
aaguugucugggccaaucu

SEQ ID NO: 1577129 - RNA, 19 nt, Artificial Sequence
  Description of Artificial Sequence: Synthetic oligonucleotide
acauuucguaaaugaagca

SEQ ID NO: 1577130 - RNA, 19 nt, Artificial Sequence
  Description of Artificial Sequence: Synthetic oligonucleotide
uuacccgccaagcacguau

SEQ ID NO: 1577131 - RNA, 19 nt, Artificial Sequence
  Description of Artificial Sequence: Synthetic oligonucleotide
cuguacaccuuacacauga

SEQ ID NO: 1577132 - RNA, 19 nt, Artificial Sequence
  Description of Artificial Sequence: Synthetic oligonucleotide
uccagcagucuucaggauc

SEQ ID NO: 1577133 - RNA, 19 nt, Artificial Sequence
  Description of Artificial Sequence: Synthetic oligonucleotide
acacgguuggguuuguccu

SEQ ID NO: 1577134 - RNA, 19 nt, Artificial Sequence
  Description of Artificial Sequence: Synthetic oligonucleotide
uagucgauauggugaaugu

SEQ ID NO: 1577135 - RNA, 19 nt, Artificial Sequence
  Description of Artificial Sequence: Synthetic oligonucleotide
uccgagaucagaucugaua

SEQ ID NO: 1577136 - RNA, 19 nt, Artificial Sequence
  Description of Artificial Sequence: Synthetic oligonucleotide
ugcagauauucccgaaggu

SEQ ID NO: 1577137 - RNA, 19 nt, Artificial Sequence
  Description of Artificial Sequence: Synthetic oligonucleotide
uacacaugaacuccacguu

SEQ ID NO: 1577138 - RNA, 19 nt, Artificial Sequence
  Description of Artificial Sequence: Synthetic oligonucleotide
guacaccuuacacaugaac

SEQ ID NO: 1577139 - RNA, 19 nt, Artificial Sequence
  Description of Artificial Sequence: Synthetic oligonucleotide
ucucgguguaugcacuucu

SEQ ID NO: 1577140 - RNA, 19 nt, Artificial Sequence
  Description of Artificial Sequence: Synthetic oligonucleotide
cuggacauacggcaaguug

SEQ ID NO: 1577141 - RNA, 19 nt, Artificial Sequence
  Description of Artificial Sequence: Synthetic oligonucleotide
guagauccggucaaacaag

SEQ ID NO: 1577142 - RNA, 19 nt, Artificial Sequence
  Description of Artificial Sequence: Synthetic oligonucleotide
uaccagaucuuuagaggac

SEQ ID NO: 1577143 - RNA, 19 nt, Artificial Sequence
  Description of Artificial Sequence: Synthetic oligonucleotide
uccguucaccucgauaugc

SEQ ID NO: 1577144 - RNA, 19 nt, Artificial Sequence
  Description of Artificial Sequence: Synthetic oligonucleotide
agucgauauggugaauguc

SEQ ID NO: 1577145 - RNA, 19 nt, Artificial Sequence
  Description of Artificial Sequence: Synthetic oligonucleotide
gguauuaacuuccagcagu

SEQ ID NO: 1577146 - RNA, 19 nt, Artificial Sequence
  Description of Artificial Sequence: Synthetic oligonucleotide
accugauaggcacaggaua

SEQ ID NO: 1577147 - RNA, 19 nt, Artificial Sequence
  Description of Artificial Sequence: Synthetic oligonucleotide
aggcacaggauaccagauc

SEQ ID NO: 1577148 - RNA, 19 nt, Artificial Sequence
  Description of Artificial Sequence: Synthetic oligonucleotide
ucuugugcuugccaaucau

SEQ ID NO: 1577149 - RNA, 19 nt, Artificial Sequence
  Description of Artificial Sequence: Synthetic oligonucleotide
ucuuacuuccguucaccuc

SEQ ID NO: 1577150 - RNA, 19 nt, Artificial Sequence
  Description of Artificial Sequence: Synthetic oligonucleotide
cuugugcuugccaaucauc

SEQ ID NO: 1577151 - RNA, 19 nt, Artificial Sequence
  Description of Artificial Sequence: Synthetic oligonucleotide
ucuguugcgucggacuuca

SEQ ID NO: 1577152 - RNA, 19 nt, Artificial Sequence
  Description of Artificial Sequence: Synthetic oligonucleotide
agagucgugaaggccgaac

SEQ ID NO: 1577153 - RNA, 19 nt, Artificial Sequence
  Description of Artificial Sequence: Synthetic oligonucleotide
ugucggugguauuaacuuc

SEQ ID NO: 1577154 - RNA, 19 nt, Artificial Sequence
  Description of Artificial Sequence: Synthetic oligonucleotide
uuuggucacacgguugggu

SEQ ID NO: 1577155 - RNA, 19 nt, Artificial Sequence
  Description of Artificial Sequence: Synthetic oligonucleotide
caguuagugggcuugucca

SEQ ID NO: 1577156 - RNA, 19 nt, Artificial Sequence
  Description of Artificial Sequence: Synthetic oligonucleotide
acccauccugugugcaugc

SEQ ID NO: 1577157 - RNA, 19 nt, Artificial Sequence
  Description of Artificial Sequence: Synthetic oligonucleotide
aggguauggggagccaccc

SEQ ID NO: 1577158 - RNA, 19 nt, Artificial Sequence
  Description of Artificial Sequence: Synthetic oligonucleotide
cuuccguucaccucgauau

SEQ ID NO: 1577159 - RNA, 19 nt, Artificial Sequence
  Description of Artificial Sequence: Synthetic oligonucleotide
aggccgaaccaggaggacc

SEQ ID NO: 1577160 - RNA, 19 nt, Artificial Sequence
  Description of Artificial Sequence: Synthetic oligonucleotide
agcgucuuuugaguccacc

SEQ ID NO: 1577161 - RNA, 19 nt, Artificial Sequence
  Description of Artificial Sequence: Synthetic oligonucleotide
agauccggucaaacaaggc

SEQ ID NO: 1577162 - RNA, 19 nt, Artificial Sequence
  Description of Artificial Sequence: Synthetic oligonucleotide
gucgggaaagcugggagag

SEQ ID NO: 1577163 - RNA, 19 nt, Artificial Sequence
  Description of Artificial Sequence: Synthetic oligonucleotide
agucgugaaggccgaacca

SEQ ID NO: 1577164 - RNA, 19 nt, Artificial Sequence
  Description of Artificial Sequence: Synthetic oligonucleotide
guggguguagauccgguca

SEQ ID NO: 1577165 - RNA, 19 nt, Artificial Sequence
  Description of Artificial Sequence: Synthetic oligonucleotide
auccggucaaacaaggccu

SEQ ID NO: 1577166 - RNA, 19 nt, Artificial Sequence
  Description of Artificial Sequence: Synthetic oligonucleotide
uagcaauauuccagcccag

SEQ ID NO: 1577167 - RNA, 19 nt, Artificial Sequence
  Description of Artificial Sequence: Synthetic oligonucleotide
cagauauuccugguuggag

SEQ ID NO: 1577168 - RNA, 19 nt, Artificial Sequence
  Description of Artificial Sequence: Synthetic oligonucleotide
gaugacccuccuucagcag

SEQ ID NO: 1577169 - RNA, 19 nt, Artificial Sequence
  Description of Artificial Sequence: Synthetic oligonucleotide
uggguguagauccggucaa

SEQ ID NO: 1577170 - RNA, 19 nt, Artificial Sequence
  Description of Artificial Sequence: Synthetic oligonucleotide
gucgugaaggccgaaccag

SEQ ID NO: 1577171 - RNA, 19 nt, Artificial Sequence
  Description of Artificial Sequence: Synthetic oligonucleotide
accagucugucucucggca

SEQ ID NO: 1577172 - RNA, 19 nt, Artificial Sequence
  Description of Artificial Sequence: Synthetic oligonucleotide
gucgauauggugaaugucu

SEQ ID NO: 1577173 - RNA, 19 nt, Artificial Sequence
  Description of Artificial Sequence: Synthetic oligonucleotide
ucucuguugcgucggacuu

SEQ ID NO: 1577174 - RNA, 19 nt, Artificial Sequence
  Description of Artificial Sequence: Synthetic oligonucleotide
aggaccccagaguuacccg

SEQ ID NO: 1577175 - RNA, 19 nt, Artificial Sequence
  Description of Artificial Sequence: Synthetic oligonucleotide
acgaugacauaaagaggac

SEQ ID NO: 1577176 - RNA, 19 nt, Artificial Sequence
  Description of Artificial Sequence: Synthetic oligonucleotide
guguagauccggucaaaca

SEQ ID NO: 1577177 - RNA, 19 nt, Artificial Sequence
  Description of Artificial Sequence: Synthetic oligonucleotide
ggugucggggcagacaggg

SEQ ID NO: 1577178 - RNA, 19 nt, Artificial Sequence
  Description of Artificial Sequence: Synthetic oligonucleotide
gaggagagucgugaaggcc

SEQ ID NO: 1577179 - RNA, 19 nt, Artificial Sequence
  Description of Artificial Sequence: Synthetic oligonucleotide
uacggcaaguugucugggc

SEQ ID NO: 1577180 - RNA, 19 nt, Artificial Sequence
  Description of Artificial Sequence: Synthetic oligonucleotide
uguccauccgaugacccuc

SEQ ID NO: 1577181 - RNA, 19 nt, Artificial Sequence
  Description of Artificial Sequence: Synthetic oligonucleotide
gugaaugucucgagcuagg

SEQ ID NO: 1577182 - RNA, 19 nt, Artificial Sequence
  Description of Artificial Sequence: Synthetic oligonucleotide
ggugaaugucucgagcuag

SEQ ID NO: 1577183 - RNA, 19 nt, Artificial Sequence
  Description of Artificial Sequence: Synthetic oligonucleotide
guagagcuccgugugucgg

SEQ ID NO: 1577184 - RNA, 19 nt, Artificial Sequence
  Description of Artificial Sequence: Synthetic oligonucleotide
ucgguguaugcacuucuua

SEQ ID NO: 1577185 - RNA, 19 nt, Artificial Sequence
  Description of Artificial Sequence: Synthetic oligonucleotide
gguacaguuagugggcuug

SEQ ID NO: 1577186 - RNA, 19 nt, Artificial Sequence
  Description of Artificial Sequence: Synthetic oligonucleotide
aguugucugggccaaucuu

SEQ ID NO: 1577187 - RNA, 19 nt, Artificial Sequence
  Description of Artificial Sequence: Synthetic oligonucleotide
cgugugucgggaaagcugg

SEQ ID NO: 1577188 - RNA, 19 nt, Artificial Sequence
  Description of Artificial Sequence: Synthetic oligonucleotide
cacuuuggucacacgguug

SEQ ID NO: 1577189 - RNA, 19 nt, Artificial Sequence
  Description of Artificial Sequence: Synthetic oligonucleotide
caggguauggggagccacc

SEQ ID NO: 1577190 - RNA, 19 nt, Artificial Sequence
  Description of Artificial Sequence: Synthetic oligonucleotide
cuccacgaugacauaaaga

SEQ ID NO: 1577191 - RNA, 19 nt, Artificial Sequence
  Description of Artificial Sequence: Synthetic oligonucleotide
aggcacaccaggguauggg

SEQ ID NO: 1577192 - RNA, 19 nt, Artificial Sequence
  Description of Artificial Sequence: Synthetic oligonucleotide
uagugggcuuguccauccg

SEQ ID NO: 1577193 - RNA, 19 nt, Artificial Sequence
  Description of Artificial Sequence: Synthetic oligonucleotide
ucgggguuguggcuggggu

SEQ ID NO: 1577194 - RNA, 19 nt, Artificial Sequence
  Description of Artificial Sequence: Synthetic oligonucleotide
uguacaccuuacacaugaa

SEQ ID NO: 1577195 - RNA, 19 nt, Artificial Sequence
  Description of Artificial Sequence: Synthetic oligonucleotide
agugggcuuguccauccga

SEQ ID NO: 1577196 - RNA, 19 nt, Artificial Sequence
  Description of Artificial Sequence: Synthetic oligonucleotide
aaggccgaaccaggaggac

SEQ ID NO: 1577197 - RNA, 19 nt, Artificial Sequence
  Description of Artificial Sequence: Synthetic oligonucleotide
ccacgaugacauaaagagg

SEQ ID NO: 1577198 - RNA, 19 nt, Artificial Sequence
  Description of Artificial Sequence: Synthetic oligonucleotide
uccuccccugaagagcagg

SEQ ID NO: 1577199 - RNA, 19 nt, Artificial Sequence
  Description of Artificial Sequence: Synthetic oligonucleotide
uuacuuccguucaccucga

SEQ ID NO: 1577200 - RNA, 19 nt, Artificial Sequence
  Description of Artificial Sequence: Synthetic oligonucleotide
ugggcuuguccauccgaug

SEQ ID NO: 1577201 - RNA, 19 nt, Artificial Sequence
  Description of Artificial Sequence: Synthetic oligonucleotide
uugcgucggacuucaacau

SEQ ID NO: 1577202 - RNA, 19 nt, Artificial Sequence
  Description of Artificial Sequence: Synthetic oligonucleotide
gaucucccacaagagcacc

SEQ ID NO: 1577203 - RNA, 19 nt, Artificial Sequence
  Description of Artificial Sequence: Synthetic oligonucleotide
cagaucuuuagaggacagc

SEQ ID NO: 1577204 - RNA, 19 nt, Artificial Sequence
  Description of Artificial Sequence: Synthetic oligonucleotide
cuugucggugguauuaacu

SEQ ID NO: 1577205 - RNA, 19 nt, Artificial Sequence
  Description of Artificial Sequence: Synthetic oligonucleotide
gaaggccgaaccaggagga

SEQ ID NO: 1577206 - RNA, 19 nt, Artificial Sequence
  Description of Artificial Sequence: Synthetic oligonucleotide
acuuccguucaccucgaua

SEQ ID NO: 1577207 - RNA, 19 nt, Artificial Sequence
  Description of Artificial Sequence: Synthetic oligonucleotide
acccgccaagcacguauac

SEQ ID NO: 1577208 - RNA, 19 nt, Artificial Sequence
  Description of Artificial Sequence: Synthetic oligonucleotide
uucguaaaugaagcaccuc

SEQ ID NO: 1577209 - RNA, 19 nt, Artificial Sequence
  Description of Artificial Sequence: Synthetic oligonucleotide
augcacuucuuagaggcaa

SEQ ID NO: 1577210 - RNA, 19 nt, Artificial Sequence
  Description of Artificial Sequence: Synthetic oligonucleotide
caccucgauaugcuucagc

SEQ ID NO: 1577211 - RNA, 19 nt, Artificial Sequence
  Description of Artificial Sequence: Synthetic oligonucleotide
auacggcaaguugucuggg

SEQ ID NO: 1577212 - RNA, 19 nt, Artificial Sequence
  Description of Artificial Sequence: Synthetic oligonucleotide
cagcagucccgcaucauca

SEQ ID NO: 1577213 - RNA, 19 nt, Artificial Sequence
  Description of Artificial Sequence: Synthetic oligonucleotide
gaggacccauccugugugc

SEQ ID NO: 1577214 - RNA, 19 nt, Artificial Sequence
  Description of Artificial Sequence: Synthetic oligonucleotide
caauaccaccugcccaaag

SEQ ID NO: 1577215 - RNA, 19 nt, Artificial Sequence
  Description of Artificial Sequence: Synthetic oligonucleotide
gccaaucuuacuuccguuc

SEQ ID NO: 1577216 - RNA, 19 nt, Artificial Sequence
  Description of Artificial Sequence: Synthetic oligonucleotide
auauucccgaagguugccu

SEQ ID NO: 1577217 - RNA, 19 nt, Artificial Sequence
  Description of Artificial Sequence: Synthetic oligonucleotide
gagguuugccuaagaccag

SEQ ID NO: 1577218 - RNA, 19 nt, Artificial Sequence
  Description of Artificial Sequence: Synthetic oligonucleotide
ccgccaagcacguauacuc

SEQ ID NO: 1577219 - RNA, 19 nt, Artificial Sequence
  Description of Artificial Sequence: Synthetic oligonucleotide
uauccagcccgauggccuc

SEQ ID NO: 1577220 - RNA, 19 nt, Artificial Sequence
  Description of Artificial Sequence: Synthetic oligonucleotide
cagaguuacccgccaagca

SEQ ID NO: 1577221 - RNA, 19 nt, Artificial Sequence
  Description of Artificial Sequence: Synthetic oligonucleotide
caucuccgagaucagaucu

SEQ ID NO: 1577222 - RNA, 19 nt, Artificial Sequence
  Description of Artificial Sequence: Synthetic oligonucleotide
caacggcucaugagagaag

SEQ ID NO: 1577223 - RNA, 19 nt, Artificial Sequence
  Description of Artificial Sequence: Synthetic oligonucleotide
agguuugccuaagaccagu

SEQ ID NO: 1577224 - RNA, 19 nt, Artificial Sequence
  Description of Artificial Sequence: Synthetic oligonucleotide
aggcaacggcucaugagag

SEQ ID NO: 1577225 - RNA, 19 nt, Artificial Sequence
  Description of Artificial Sequence: Synthetic oligonucleotide
ccugcagauauucccgaag

SEQ ID NO: 1577226 - RNA, 19 nt, Artificial Sequence
  Description of Artificial Sequence: Synthetic oligonucleotide
ccgagaucagaucugauaa

SEQ ID NO: 1577227 - RNA, 19 nt, Artificial Sequence
  Description of Artificial Sequence: Synthetic oligonucleotide
gccaagcacguauacuccc

SEQ ID NO: 1577228 - RNA, 19 nt, Artificial Sequence
  Description of Artificial Sequence: Synthetic oligonucleotide
auccgaugacccuccuuca

SEQ ID NO: 1577229 - RNA, 19 nt, Artificial Sequence
  Description of Artificial Sequence: Synthetic oligonucleotide
cgguguaugcacuucuuag

SEQ ID NO: 1577230 - RNA, 19 nt, Artificial Sequence
  Description of Artificial Sequence: Synthetic oligonucleotide
ccaagcacguauacucccc

SEQ ID NO: 1577231 - RNA, 19 nt, Artificial Sequence
  Description of Artificial Sequence: Synthetic oligonucleotide
uaagaccagucugucucuc

SEQ ID NO: 1577232 - RNA, 19 nt, Artificial Sequence
  Description of Artificial Sequence: Synthetic oligonucleotide
cauuggcaagcugggucgg

SEQ ID NO: 1577233 - RNA, 19 nt, Artificial Sequence
  Description of Artificial Sequence: Synthetic oligonucleotide
aucuccgagaucagaucug

SEQ ID NO: 1577234 - RNA, 19 nt, Artificial Sequence
  Description of Artificial Sequence: Synthetic oligonucleotide
uggucacacgguuggguuu

SEQ ID NO: 1577235 - RNA, 19 nt, Artificial Sequence
  Description of Artificial Sequence: Synthetic oligonucleotide
uccgugugucgggaaagcu

SEQ ID NO: 1577236 - RNA, 19 nt, Artificial Sequence
  Description of Artificial Sequence: Synthetic oligonucleotide
ggaagcucauacucagaga

SEQ ID NO: 1577237 - RNA, 19 nt, Artificial Sequence
  Description of Artificial Sequence: Synthetic oligonucleotide
uccuugucggugguauuaa

SEQ ID NO: 1577238 - RNA, 19 nt, Artificial Sequence
  Description of Artificial Sequence: Synthetic oligonucleotide
caagcugggucgggugucg

SEQ ID NO: 1577239 - RNA, 19 nt, Artificial Sequence
  Description of Artificial Sequence: Synthetic oligonucleotide
ggguuguagcaauauucca

SEQ ID NO: 1577240 - RNA, 19 nt, Artificial Sequence
  Description of Artificial Sequence: Synthetic oligonucleotide
uggaggcauacuccacgau

SEQ ID NO: 1577241 - RNA, 19 nt, Artificial Sequence
  Description of Artificial Sequence: Synthetic oligonucleotide
aagcugggucgggugucgg

SEQ ID NO: 1577242 - RNA, 19 nt, Artificial Sequence
  Description of Artificial Sequence: Synthetic oligonucleotide
guuugccuaagaccagucu

SEQ ID NO: 1577243 - RNA, 19 nt, Artificial Sequence
  Description of Artificial Sequence: Synthetic oligonucleotide
cgauauggugaaugucucg

SEQ ID NO: 1577244 - RNA, 19 nt, Artificial Sequence
  Description of Artificial Sequence: Synthetic oligonucleotide
gucucgagcuaggccaaag

SEQ ID NO: 1577245 - RNA, 19 nt, Artificial Sequence
  Description of Artificial Sequence: Synthetic oligonucleotide
acggcucaugagagaagac

SEQ ID NO: 1577246 - RNA, 19 nt, Artificial Sequence
  Description of Artificial Sequence: Synthetic oligonucleotide
agcagucccgcaucaucau

SEQ ID NO: 1577247 - RNA, 19 nt, Artificial Sequence
  Description of Artificial Sequence: Synthetic oligonucleotide
ucacucugguggguguaga

SEQ ID NO: 1577248 - RNA, 19 nt, Artificial Sequence
  Description of Artificial Sequence: Synthetic oligonucleotide
ggccgaaccaggaggaccc

SEQ ID NO: 1577249 - RNA, 19 nt, Artificial Sequence
  Description of Artificial Sequence: Synthetic oligonucleotide
cccgcaucaucauguacag

SEQ ID NO: 1577250 - RNA, 19 nt, Artificial Sequence
  Description of Artificial Sequence: Synthetic oligonucleotide
agcuccgugugucgggaaa

SEQ ID NO: 1577251 - RNA, 19 nt, Artificial Sequence
  Description of Artificial Sequence: Synthetic oligonucleotide
gguguagauccggucaaac

SEQ ID NO: 1577252 - RNA, 19 nt, Artificial Sequence
  Description of Artificial Sequence: Synthetic oligonucleotide
ccccgcauccucaaaggag

SEQ ID NO: 1577253 - RNA, 19 nt, Artificial Sequence
  Description of Artificial Sequence: Synthetic oligonucleotide
ggguuccucaggcaacggc

SEQ ID NO: 1577254 - RNA, 19 nt, Artificial Sequence
  Description of Artificial Sequence: Synthetic oligonucleotide
gcgucuuuugaguccacca

SEQ ID NO: 1577255 - RNA, 19 nt, Artificial Sequence
  Description of Artificial Sequence: Synthetic oligonucleotide
ccaaucuuacuuccguuca

SEQ ID NO: 1577256 - RNA, 19 nt, Artificial Sequence
  Description of Artificial Sequence: Synthetic oligonucleotide
ggucacacgguuggguuug

SEQ ID NO: 1577257 - RNA, 19 nt, Artificial Sequence
  Description of Artificial Sequence: Synthetic oligonucleotide
gacagcuguuccucggggu

SEQ ID NO: 1577258 - RNA, 19 nt, Artificial Sequence
  Description of Artificial Sequence: Synthetic oligonucleotide
ccgaugacccuccuucagc

SEQ ID NO: 1577259 - RNA, 19 nt, Artificial Sequence
  Description of Artificial Sequence: Synthetic oligonucleotide
ugguacaguuagugggcuu

SEQ ID NO: 1577260 - RNA, 19 nt, Artificial Sequence
  Description of Artificial Sequence: Synthetic oligonucleotide
uacaguuagugggcuuguc

SEQ ID NO: 1577261 - RNA, 19 nt, Artificial Sequence
  Description of Artificial Sequence: Synthetic oligonucleotide
cgaugacauaaagaggacc

SEQ ID NO: 1577262 - RNA, 19 nt, Artificial Sequence
  Description of Artificial Sequence: Synthetic oligonucleotide
ccagaguuacccgccaagc

SEQ ID NO: 1577263 - RNA, 19 nt, Artificial Sequence
  Description of Artificial Sequence: Synthetic oligonucleotide
gucuuuugaguccaccauu

SEQ ID NO: 1577264 - RNA, 19 nt, Artificial Sequence
  Description of Artificial Sequence: Synthetic oligonucleotide
agagcuccgugugucggga

SEQ ID NO: 1577265 - RNA, 19 nt, Artificial Sequence
  Description of Artificial Sequence: Synthetic oligonucleotide
uacccgccaagcacguaua

SEQ ID NO: 1577266 - RNA, 19 nt, Artificial Sequence
  Description of Artificial Sequence: Synthetic oligonucleotide
ggccaauaccaccugccca

SEQ ID NO: 1577267 - RNA, 19 nt, Artificial Sequence
  Description of Artificial Sequence: Synthetic oligonucleotide
acaggauaccagaucuuua

SEQ ID NO: 1577268 - RNA, 19 nt, Artificial Sequence
  Description of Artificial Sequence: Synthetic oligonucleotide
cuccgugugucgggaaagc

SEQ ID NO: 1577269 - RNA, 19 nt, Artificial Sequence
  Description of Artificial Sequence: Synthetic oligonucleotide
ggcuuguccauccgaugac

SEQ ID NO: 1577270 - RNA, 19 nt, Artificial Sequence
  Description of Artificial Sequence: Synthetic oligonucleotide
ucaccucgauaugcuucag

SEQ ID NO: 1577271 - RNA, 19 nt, Artificial Sequence
  Description of Artificial Sequence: Synthetic oligonucleotide
gcuuguccauccgaugacc

SEQ ID NO: 1577272 - RNA, 19 nt, Artificial Sequence
  Description of Artificial Sequence: Synthetic oligonucleotide
ucgggugucggggcagaca

SEQ ID NO: 1577273 - RNA, 19 nt, Artificial Sequence
  Description of Artificial Sequence: Synthetic oligonucleotide
gcaacggcucaugagagaa

SEQ ID NO: 1577274 - RNA, 19 nt, Artificial Sequence
  Description of Artificial Sequence: Synthetic oligonucleotide
gguggguguagauccgguc

SEQ ID NO: 1577275 - RNA, 19 nt, Artificial Sequence
  Description of Artificial Sequence: Synthetic oligonucleotide
ccaccugauaggcacagga

SEQ ID NO: 1577276 - RNA, 19 nt, Artificial Sequence
  Description of Artificial Sequence: Synthetic oligonucleotide
uccagcccgauggccucgg

SEQ ID NO: 1577277 - RNA, 19 nt, Artificial Sequence
  Description of Artificial Sequence: Synthetic oligonucleotide
guccauccgaugacccucc

SEQ ID NO: 1577278 - RNA, 19 nt, Artificial Sequence
  Description of Artificial Sequence: Synthetic oligonucleotide
ggacauacggcaaguuguc

SEQ ID NO: 1577279 - RNA, 19 nt, Artificial Sequence
  Description of Artificial Sequence: Synthetic oligonucleotide
agucccgcaucaucaugua

SEQ ID NO: 1577280 - RNA, 19 nt, Artificial Sequence
  Description of Artificial Sequence: Synthetic oligonucleotide
cagcucauugguacaguua

SEQ ID NO: 1577281 - RNA, 19 nt, Artificial Sequence
  Description of Artificial Sequence: Synthetic oligonucleotide
accccagaguuacccgcca

SEQ ID NO: 1577282 - RNA, 19 nt, Artificial Sequence
  Description of Artificial Sequence: Synthetic oligonucleotide
uguccuuauccagcccgau

SEQ ID NO: 1577283 - RNA, 19 nt, Artificial Sequence
  Description of Artificial Sequence: Synthetic oligonucleotide
ggacuucaacaucuucaca

SEQ ID NO: 1577284 - RNA, 19 nt, Artificial Sequence
  Description of Artificial Sequence: Synthetic oligonucleotide
aguuacccgccaagcacgu

SEQ ID NO: 1577285 - RNA, 19 nt, Artificial Sequence
  Description of Artificial Sequence: Synthetic oligonucleotide
aggacccauccugugugca

SEQ ID NO: 1577286 - RNA, 19 nt, Artificial Sequence
  Description of Artificial Sequence: Synthetic oligonucleotide
aggucucgguguaugcacu

SEQ ID NO: 1577287 - RNA, 19 nt, Artificial Sequence
  Description of Artificial Sequence: Synthetic oligonucleotide
caggcacaccaggguaugg

SEQ ID NO: 1577288 - RNA, 19 nt, Artificial Sequence
  Description of Artificial Sequence: Synthetic oligonucleotide
ccagucugucucucggcag

SEQ ID NO: 1577289 - RNA, 19 nt, Artificial Sequence
  Description of Artificial Sequence: Synthetic oligonucleotide
cucuguugcgucggacuuc

SEQ ID NO: 1577290 - RNA, 19 nt, Artificial Sequence
  Description of Artificial Sequence: Synthetic oligonucleotide
ccaucuccgagaucagauc

SEQ ID NO: 1577291 - RNA, 19 nt, Artificial Sequence
  Description of Artificial Sequence: Synthetic oligonucleotide
cgggugucggggcagacag

SEQ ID NO: 1577292 - RNA, 19 nt, Artificial Sequence
  Description of Artificial Sequence: Synthetic oligonucleotide
ccagcagucccgcaucauc

SEQ ID NO: 1577293 - RNA, 19 nt, Artificial Sequence
  Description of Artificial Sequence: Synthetic oligonucleotide
ucgggaaagcugggagagu

SEQ ID NO: 1577294 - RNA, 19 nt, Artificial Sequence
  Description of Artificial Sequence: Synthetic oligonucleotide
gacauacggcaaguugucu

SEQ ID NO: 1577295 - RNA, 19 nt, Artificial Sequence
  Description of Artificial Sequence: Synthetic oligonucleotide
ggagccacccagagugaag

SEQ ID NO: 1577296 - RNA, 19 nt, Artificial Sequence
  Description of Artificial Sequence: Synthetic oligonucleotide
cuccuugucggugguauua

SEQ ID NO: 1577297 - RNA, 19 nt, Artificial Sequence
  Description of Artificial Sequence: Synthetic oligonucleotide
cacuggaugugaggcugug

SEQ ID NO: 1577298 - RNA, 19 nt, Artificial Sequence
  Description of Artificial Sequence: Synthetic oligonucleotide
gcuccgugugucgggaaag

SEQ ID NO: 1577299 - RNA, 19 nt, Artificial Sequence
  Description of Artificial Sequence: Synthetic oligonucleotide
gucucgguguaugcacuuc

SEQ ID NO: 1577300 - RNA, 19 nt, Artificial Sequence
  Description of Artificial Sequence: Synthetic oligonucleotide
cgccaagcacguauacucc

SEQ ID NO: 1577301 - RNA, 19 nt, Artificial Sequence
  Description of Artificial Sequence: Synthetic oligonucleotide
gguuugccuaagaccaguc

SEQ ID NO: 1577302 - RNA, 19 nt, Artificial Sequence
  Description of Artificial Sequence: Synthetic oligonucleotide
gcuaggccaaagucugcga

SEQ ID NO: 1577303 - RNA, 19 nt, Artificial Sequence
  Description of Artificial Sequence: Synthetic oligonucleotide
ggaucuggacauacggcaa

SEQ ID NO: 1577304 - RNA, 19 nt, Artificial Sequence
  Description of Artificial Sequence: Synthetic oligonucleotide
ccuugucggugguauuaac

SEQ ID NO: 1577305 - RNA, 19 nt, Artificial Sequence
  Description of Artificial Sequence: Synthetic oligonucleotide
gcucaugagagaagacaga

SEQ ID NO: 1577306 - RNA, 19 nt, Artificial Sequence
  Description of Artificial Sequence: Synthetic oligonucleotide
uacuuccguucaccucgau

SEQ ID NO: 1577307 - RNA, 19 nt, Artificial Sequence
  Description of Artificial Sequence: Synthetic oligonucleotide
ggcaacggcucaugagaga

SEQ ID NO: 1577308 - RNA, 19 nt, Artificial Sequence
  Description of Artificial Sequence: Synthetic oligonucleotide
guacugguccagaggcauc

SEQ ID NO: 1577309 - RNA, 19 nt, Artificial Sequence
  Description of Artificial Sequence: Synthetic oligonucleotide
ccucgauaugcuucagcca

SEQ ID NO: 1577310 - RNA, 19 nt, Artificial Sequence
  Description of Artificial Sequence: Synthetic oligonucleotide
ggcaucgacagguccagau

SEQ ID NO: 1577311 - RNA, 19 nt, Artificial Sequence
  Description of Artificial Sequence: Synthetic oligonucleotide
gcagauauucccgaagguu

SEQ ID NO: 1577312 - RNA, 19 nt, Artificial Sequence
  Description of Artificial Sequence: Synthetic oligonucleotide
gcaucgacagguccagaua

SEQ ID NO: 1577313 - RNA, 19 nt, Artificial Sequence
  Description of Artificial Sequence: Synthetic oligonucleotide
cacaggauaccagaucuuu

SEQ ID NO: 1577314 - RNA, 19 nt, Artificial Sequence
  Description of Artificial Sequence: Synthetic oligonucleotide
augucucgagcuaggccaa

SEQ ID NO: 1577315 - RNA, 19 nt, Artificial Sequence
  Description of Artificial Sequence: Synthetic oligonucleotide
ucacacgguuggguuuguc

SEQ ID NO: 1577316 - RNA, 19 nt, Artificial Sequence
  Description of Artificial Sequence: Synthetic oligonucleotide
aucgacagguccagauauu

SEQ ID NO: 1577317 - RNA, 19 nt, Artificial Sequence
  Description of Artificial Sequence: Synthetic oligonucleotide
ggccugcagauauucccga

SEQ ID NO: 1577318 - RNA, 19 nt, Artificial Sequence
  Description of Artificial Sequence: Synthetic oligonucleotide
caccugauaggcacaggau

SEQ ID NO: 1577319 - RNA, 19 nt, Artificial Sequence
  Description of Artificial Sequence: Synthetic oligonucleotide
gggccaaucuuacuuccgu

SEQ ID NO: 1577320 - RNA, 19 nt, Artificial Sequence
  Description of Artificial Sequence: Synthetic oligonucleotide
cgaugacccuccuucagca

SEQ ID NO: 1577321 - RNA, 19 nt, Artificial Sequence
  Description of Artificial Sequence: Synthetic oligonucleotide
guacugcgugccagcaguc

SEQ ID NO: 1577322 - RNA, 19 nt, Artificial Sequence
  Description of Artificial Sequence: Synthetic oligonucleotide
gcgucggacuucaacaucu

SEQ ID NO: 1577323 - RNA, 19 nt, Artificial Sequence
  Description of Artificial Sequence: Synthetic oligonucleotide
ggagagucgugaaggccga

SEQ ID NO: 1577324 - RNA, 19 nt, Artificial Sequence
  Description of Artificial Sequence: Synthetic oligonucleotide
ccccugaagagcagguaga

SEQ ID NO: 1577325 - RNA, 19 nt, Artificial Sequence
  Description of Artificial Sequence: Synthetic oligonucleotide
guacaguuagugggcuugu

SEQ ID NO: 1577326 - RNA, 19 nt, Artificial Sequence
  Description of Artificial Sequence: Synthetic oligonucleotide
cagcgucuuuugaguccac

SEQ ID NO: 1577327 - RNA, 19 nt, Artificial Sequence
  Description of Artificial Sequence: Synthetic oligonucleotide
ccggucaaacaaggccucg

SEQ ID NO: 1577328 - RNA, 19 nt, Artificial Sequence
  Description of Artificial Sequence: Synthetic oligonucleotide
gggagaguacugguccaga

SEQ ID NO: 1577329 - RNA, 19 nt, Artificial Sequence
  Description of Artificial Sequence: Synthetic oligonucleotide
ggguauggggagccaccca

SEQ ID NO: 1577330 - RNA, 19 nt, Artificial Sequence
  Description of Artificial Sequence: Synthetic oligonucleotide
cgugaaggccgaaccagga

SEQ ID NO: 1577331 - RNA, 19 nt, Artificial Sequence
  Description of Artificial Sequence: Synthetic oligonucleotide
ccaagagguuugccuaaga

SEQ ID NO: 1577332 - RNA, 19 nt, Artificial Sequence
  Description of Artificial Sequence: Synthetic oligonucleotide
gagcuccgugugucgggaa

SEQ ID NO: 1577333 - RNA, 19 nt, Artificial Sequence
  Description of Artificial Sequence: Synthetic oligonucleotide
ggccucgggugccauccac

SEQ ID NO: 1577334 - RNA, 19 nt, Artificial Sequence
  Description of Artificial Sequence: Synthetic oligonucleotide
cucgguguaugcacuucuu

SEQ ID NO: 1577335 - RNA, 19 nt, Artificial Sequence
  Description of Artificial Sequence: Synthetic oligonucleotide
cggcucaugagagaagaca

SEQ ID NO: 1577336 - RNA, 19 nt, Artificial Sequence
  Description of Artificial Sequence: Synthetic oligonucleotide
gccugcagauauucccgaa

SEQ ID NO: 1577337 - RNA, 19 nt, Artificial Sequence
  Description of Artificial Sequence: Synthetic oligonucleotide
cccacaagagcaccccaaa

SEQ ID NO: 1577338 - RNA, 19 nt, Artificial Sequence
  Description of Artificial Sequence: Synthetic oligonucleotide
gagagucgugaaggccgaa

SEQ ID NO: 1577339 - RNA, 19 nt, Artificial Sequence
  Description of Artificial Sequence: Synthetic oligonucleotide
gggugucggggcagacagg

SEQ ID NO: 1577340 - RNA, 19 nt, Artificial Sequence
  Description of Artificial Sequence: Synthetic oligonucleotide
gggucgggugucggggcag

SEQ ID NO: 1577341 - RNA, 19 nt, Artificial Sequence
  Description of Artificial Sequence: Synthetic oligonucleotide
cacgguuggguuuguccuu

SEQ ID NO: 1577342 - RNA, 19 nt, Artificial Sequence
  Description of Artificial Sequence: Synthetic oligonucleotide
gucgggugucggggcagac

SEQ ID NO: 1577343 - RNA, 19 nt, Artificial Sequence
  Description of Artificial Sequence: Synthetic oligonucleotide
cggcaaguugucugggcca

SEQ ID NO: 1577344 - RNA, 19 nt, Artificial Sequence
  Description of Artificial Sequence: Synthetic oligonucleotide
ccgcaucaucauguacagc

SEQ ID NO: 1577345 - RNA, 19 nt, Artificial Sequence
  Description of Artificial Sequence: Synthetic oligonucleotide
cuccgagaucagaucugau

SEQ ID NO: 1577346 - RNA, 19 nt, Artificial Sequence
  Description of Artificial Sequence: Synthetic oligonucleotide
ccguucaccucgauaugcu

SEQ ID NO: 1577347 - RNA, 19 nt, Artificial Sequence
  Description of Artificial Sequence: Synthetic oligonucleotide
ggguguagauccggucaaa

SEQ ID NO: 1577348 - RNA, 19 nt, Artificial Sequence
  Description of Artificial Sequence: Synthetic oligonucleotide
guuacccgccaagcacgua

SEQ ID NO: 1577349 - RNA, 19 nt, Artificial Sequence
  Description of Artificial Sequence: Synthetic oligonucleotide
ggucucgguguaugcacuu

SEQ ID NO: 1577350 - RNA, 19 nt, Artificial Sequence
  Description of Artificial Sequence: Synthetic oligonucleotide
gcucauugguacaguuagu

SEQ ID NO: 1577351 - RNA, 19 nt, Artificial Sequence
  Description of Artificial Sequence: Synthetic oligonucleotide
gccgaaccaggaggacccc

SEQ ID NO: 1577352 - RNA, 19 nt, Artificial Sequence
  Description of Artificial Sequence: Synthetic oligonucleotide
ccuccgggccugcagauau

SEQ ID NO: 1577353 - RNA, 19 nt, Artificial Sequence
  Description of Artificial Sequence: Synthetic oligonucleotide
ccuccccugaagagcaggu

SEQ ID NO: 1577354 - RNA, 19 nt, Artificial Sequence
  Description of Artificial Sequence: Synthetic oligonucleotide
ggucgggugucggggcaga

SEQ ID NO: 1577355 - RNA, 19 nt, Artificial Sequence
  Description of Artificial Sequence: Synthetic oligonucleotide
cuguugcgucggacuucaa

SEQ ID NO: 1577356 - RNA, 19 nt, Artificial Sequence
  Description of Artificial Sequence: Synthetic oligonucleotide
gcccgauggccucggccaa

SEQ ID NO: 1577357 - RNA, 19 nt, Artificial Sequence
  Description of Artificial Sequence: Synthetic oligonucleotide
gucacacgguuggguuugu

SEQ ID NO: 1577358 - RNA, 19 nt, Artificial Sequence
  Description of Artificial Sequence: Synthetic oligonucleotide
ccaauaccaccugcccaaa

SEQ ID NO: 1577359 - RNA, 19 nt, Artificial Sequence
  Description of Artificial Sequence: Synthetic oligonucleotide
gccucgggugccauccacu

SEQ ID NO: 1577360 - RNA, 19 nt, Artificial Sequence
  Description of Artificial Sequence: Synthetic oligonucleotide
cgggugccauccacuucac

SEQ ID NO: 1577361 - RNA, 19 nt, Artificial Sequence
  Description of Artificial Sequence: Synthetic oligonucleotide
ccccagaguuacccgccaa

SEQ ID NO: 1577362 - RNA, 19 nt, Artificial Sequence
  Description of Artificial Sequence: Synthetic oligonucleotide
cccgccaagcacguauacu

SEQ ID NO: 1577363 - RNA, 19 nt, Artificial Sequence
  Description of Artificial Sequence: Synthetic oligonucleotide
cagccggccauuggugguu

SEQ ID NO: 1577364 - RNA, 19 nt, Artificial Sequence
  Description of Artificial Sequence: Synthetic oligonucleotide
cguucaccucgauaugcuu

SEQ ID NO: 1577365 - RNA, 19 nt, Artificial Sequence
  Description of Artificial Sequence: Synthetic oligonucleotide
cgucggacuucaacaucuu

SEQ ID NO: 1577366 - RNA, 19 nt, Artificial Sequence
  Description of Artificial Sequence: Synthetic oligonucleotide
aacacugcuacuucaaggc

SEQ ID NO: 1577367 - RNA, 19 nt, Artificial Sequence
  Description of Artificial Sequence: Synthetic oligonucleotide
ucacuuaucauuuccaggg

SEQ ID NO: 1577368 - RNA, 19 nt, Artificial Sequence
  Description of Artificial Sequence: Synthetic oligonucleotide
aaguagauacucugggugc

SEQ ID NO: 1577369 - RNA, 19 nt, Artificial Sequence
  Description of Artificial Sequence: Synthetic oligonucleotide
ucauuuaucuccaacagaa

SEQ ID NO: 1577370 - RNA, 19 nt, Artificial Sequence
  Description of Artificial Sequence: Synthetic oligonucleotide
ucuacuuccagucccaagc

SEQ ID NO: 1577371 - RNA, 19 nt, Artificial Sequence
  Description of Artificial Sequence: Synthetic oligonucleotide
aaauggggaaguaagcagc

SEQ ID NO: 1577372 - RNA, 19 nt, Artificial Sequence
  Description of Artificial Sequence: Synthetic oligonucleotide
uggucuuucacacugguga

SEQ ID NO: 1577373 - RNA, 19 nt, Artificial Sequence
  Description of Artificial Sequence: Synthetic oligonucleotide
agaccaaugccuccuaucc

SEQ ID NO: 1577374 - RNA, 19 nt, Artificial Sequence
  Description of Artificial Sequence: Synthetic oligonucleotide
agucgaaacacgaucaucc

SEQ ID NO: 1577375 - RNA, 19 nt, Artificial Sequence
  Description of Artificial Sequence: Synthetic oligonucleotide
uguccagagaaccacaaug

SEQ ID NO: 1577376 - RNA, 19 nt, Artificial Sequence
  Description of Artificial Sequence: Synthetic oligonucleotide
agaagaaccaugccaggcc

SEQ ID NO: 1577377 - RNA, 19 nt, Artificial Sequence
  Description of Artificial Sequence: Synthetic oligonucleotide
gaaguagauacucugggug

SEQ ID NO: 1577378 - RNA, 19 nt, Artificial Sequence
  Description of Artificial Sequence: Synthetic oligonucleotide
ucuaaaacaucuucaggcc

SEQ ID NO: 1577379 - RNA, 19 nt, Artificial Sequence
  Description of Artificial Sequence: Synthetic oligonucleotide
gaucgaauaagcaaaggcc

SEQ ID NO: 1577380 - RNA, 19 nt, Artificial Sequence
  Description of Artificial Sequence: Synthetic oligonucleotide
aagguugcaaggcagugag

SEQ ID NO: 1577381 - RNA, 19 nt, Artificial Sequence
  Description of Artificial Sequence: Synthetic oligonucleotide
accacaaugggugaaagcg

SEQ ID NO: 1577382 - RNA, 19 nt, Artificial Sequence
  Description of Artificial Sequence: Synthetic oligonucleotide
uaacuuacaaggaggaaca

SEQ ID NO: 1577383 - RNA, 19 nt, Artificial Sequence
  Description of Artificial Sequence: Synthetic oligonucleotide
ugagucuaaaacaucuuca

SEQ ID NO: 1577384 - RNA, 19 nt, Artificial Sequence
  Description of Artificial Sequence: Synthetic oligonucleotide
uucacuuaucauuuccagg

SEQ ID NO: 1577385 - RNA, 19 nt, Artificial Sequence
  Description of Artificial Sequence: Synthetic oligonucleotide
ugaccagugccucugacag

SEQ ID NO: 1577386 - RNA, 19 nt, Artificial Sequence
  Description of Artificial Sequence: Synthetic oligonucleotide
ugcacaauaaggccuguag

SEQ ID NO: 1577387 - RNA, 19 nt, Artificial Sequence
  Description of Artificial Sequence: Synthetic oligonucleotide
aacacgaucauccucucau

SEQ ID NO: 1577388 - RNA, 19 nt, Artificial Sequence
  Description of Artificial Sequence: Synthetic oligonucleotide
gugggcacgaucuugagag

SEQ ID NO: 1577389 - RNA, 19 nt, Artificial Sequence
  Description of Artificial Sequence: Synthetic oligonucleotide
gagucuaaaacaucuucag

SEQ ID NO: 1577390 - RNA, 19 nt, Artificial Sequence
  Description of Artificial Sequence: Synthetic oligonucleotide
guuuagguccuucacagcc

SEQ ID NO: 1577391 - RNA, 19 nt, Artificial Sequence
  Description of Artificial Sequence: Synthetic oligonucleotide
uacuucaaggcccuaagga

SEQ ID NO: 1577392 - RNA, 19 nt, Artificial Sequence
  Description of Artificial Sequence: Synthetic oligonucleotide
gacaggaaagguugcaagg

SEQ ID NO: 1577393 - RNA, 19 nt, Artificial Sequence
  Description of Artificial Sequence: Synthetic oligonucleotide
agacaacacagccccaucc

SEQ ID NO: 1577394 - RNA, 19 nt, Artificial Sequence
  Description of Artificial Sequence: Synthetic oligonucleotide
agucuaaaacaucuucagg

SEQ ID NO: 1577395 - RNA, 19 nt, Artificial Sequence
  Description of Artificial Sequence: Synthetic oligonucleotide
ucauaggugggcacgaucu

SEQ ID NO: 1577396 - RNA, 19 nt, Artificial Sequence
  Description of Artificial Sequence: Synthetic oligonucleotide
uccugguugagucuaaaac

SEQ ID NO: 1577397 - RNA, 19 nt, Artificial Sequence
  Description of Artificial Sequence: Synthetic oligonucleotide
ucauggauggacaaccaac

SEQ ID NO: 1577398 - RNA, 19 nt, Artificial Sequence
  Description of Artificial Sequence: Synthetic oligonucleotide
aguggccguguuuaggucc

SEQ ID NO: 1577399 - RNA, 19 nt, Artificial Sequence
  Description of Artificial Sequence: Synthetic oligonucleotide
ugaacugauagcaggcccc

SEQ ID NO: 1577400 - RNA, 19 nt, Artificial Sequence
  Description of Artificial Sequence: Synthetic oligonucleotide
uccagagaaccacaauggg

SEQ ID NO: 1577401 - RNA, 19 nt, Artificial Sequence
  Description of Artificial Sequence: Synthetic oligonucleotide
acguugaacugauagcagg

SEQ ID NO: 1577402 - RNA, 19 nt, Artificial Sequence
  Description of Artificial Sequence: Synthetic oligonucleotide
uugagucuaaaacaucuuc

SEQ ID NO: 1577403 - RNA, 19 nt, Artificial Sequence
  Description of Artificial Sequence: Synthetic oligonucleotide
acaggaaagguugcaaggc

SEQ ID NO: 1577404 - RNA, 19 nt, Artificial Sequence
  Description of Artificial Sequence: Synthetic oligonucleotide
uuaucagcuggguaggaca

SEQ ID NO: 1577405 - RNA, 19 nt, Artificial Sequence
  Description of Artificial Sequence: Synthetic oligonucleotide
aggucauggauggacaacc

SEQ ID NO: 1577406 - RNA, 19 nt, Artificial Sequence
  Description of Artificial Sequence: Synthetic oligonucleotide
acggucuacuuccaguccc

SEQ ID NO: 1577407 - RNA, 19 nt, Artificial Sequence
  Description of Artificial Sequence: Synthetic oligonucleotide
uuaucuccaacagaaguug

SEQ ID NO: 1577408 - RNA, 19 nt, Artificial Sequence
  Description of Artificial Sequence: Synthetic oligonucleotide
aaguuggucaccgaucuug

SEQ ID NO: 1577409 - RNA, 19 nt, Artificial Sequence
  Description of Artificial Sequence: Synthetic oligonucleotide
aaugccuccuaucccaaga

SEQ ID NO: 1577410 - RNA, 19 nt, Artificial Sequence
  Description of Artificial Sequence: Synthetic oligonucleotide
uguccagucagguuaucag

SEQ ID NO: 1577411 - RNA, 19 nt, Artificial Sequence
  Description of Artificial Sequence: Synthetic oligonucleotide
uggggaucgaauaagcaaa

SEQ ID NO: 1577412 - RNA, 19 nt, Artificial Sequence
  Description of Artificial Sequence: Synthetic oligonucleotide
caacacugcuacuucaagg

SEQ ID NO: 1577413 - RNA, 19 nt, Artificial Sequence
  Description of Artificial Sequence: Synthetic oligonucleotide
uuuguuggggaucgaauaa

SEQ ID NO: 1577414 - RNA, 19 nt, Artificial Sequence
  Description of Artificial Sequence: Synthetic oligonucleotide
uucaaggcccuaaggacag

SEQ ID NO: 1577415 - RNA, 19 nt, Artificial Sequence
  Description of Artificial Sequence: Synthetic oligonucleotide
uggauggacaaccaacacu

SEQ ID NO: 1577416 - RNA, 19 nt, Artificial Sequence
  Description of Artificial Sequence: Synthetic oligonucleotide
gucaauaaagggcaggaga

SEQ ID NO: 1577417 - RNA, 19 nt, Artificial Sequence
  Description of Artificial Sequence: Synthetic oligonucleotide
ugggcugucugucuucacg

SEQ ID NO: 1577418 - RNA, 19 nt, Artificial Sequence
  Description of Artificial Sequence: Synthetic oligonucleotide
uggucaccgaucuugagcu

SEQ ID NO: 1577419 - RNA, 19 nt, Artificial Sequence
  Description of Artificial Sequence: Synthetic oligonucleotide
ggaucgaauaagcaaaggc

SEQ ID NO: 1577420 - RNA, 19 nt, Artificial Sequence
  Description of Artificial Sequence: Synthetic oligonucleotide
aggacuaggcacuuuguug

SEQ ID NO: 1577421 - RNA, 19 nt, Artificial Sequence
  Description of Artificial Sequence: Synthetic oligonucleotide
aguagauacucugggugcc

SEQ ID NO: 1577422 - RNA, 19 nt, Artificial Sequence
  Description of Artificial Sequence: Synthetic oligonucleotide
uggggaaguaagcagcagc

SEQ ID NO: 1577423 - RNA, 19 nt, Artificial Sequence
  Description of Artificial Sequence: Synthetic oligonucleotide
gaagaaccaugccaggccc

SEQ ID NO: 1577424 - RNA, 19 nt, Artificial Sequence
  Description of Artificial Sequence: Synthetic oligonucleotide
uaucccaagaggcuucucu

SEQ ID NO: 1577425 - RNA, 19 nt, Artificial Sequence
  Description of Artificial Sequence: Synthetic oligonucleotide
ucgaauaagcaaaggccug

SEQ ID NO: 1577426 - RNA, 19 nt, Artificial Sequence
  Description of Artificial Sequence: Synthetic oligonucleotide
uaucagcuggguaggacag

SEQ ID NO: 1577427 - RNA, 19 nt, Artificial Sequence
  Description of Artificial Sequence: Synthetic oligonucleotide
ucacgcuguagcaagcuca

SEQ ID NO: 1577428 - RNA, 19 nt, Artificial Sequence
  Description of Artificial Sequence: Synthetic oligonucleotide
uuggggaucgaauaagcaa

SEQ ID NO: 1577429 - RNA, 19 nt, Artificial Sequence
  Description of Artificial Sequence: Synthetic oligonucleotide
acuuaucauuuccagggug

SEQ ID NO: 1577430 - RNA, 19 nt, Artificial Sequence
  Description of Artificial Sequence: Synthetic oligonucleotide
acacggucuacuuccaguc

SEQ ID NO: 1577431 - RNA, 19 nt, Artificial Sequence
  Description of Artificial Sequence: Synthetic oligonucleotide
acaaggaggaacauugaag

SEQ ID NO: 1577432 - RNA, 19 nt, Artificial Sequence
  Description of Artificial Sequence: Synthetic oligonucleotide
gauagcaggccccaaccug

SEQ ID NO: 1577433 - RNA, 19 nt, Artificial Sequence
  Description of Artificial Sequence: Synthetic oligonucleotide
acgaucuugagagcaaaac

SEQ ID NO: 1577434 - RNA, 19 nt, Artificial Sequence
  Description of Artificial Sequence: Synthetic oligonucleotide
uccaacagaaguuggucac

SEQ ID NO: 1577435 - RNA, 19 nt, Artificial Sequence
  Description of Artificial Sequence: Synthetic oligonucleotide
uacggauccggcccagucg

SEQ ID NO: 1577436 - RNA, 19 nt, Artificial Sequence
  Description of Artificial Sequence: Synthetic oligonucleotide
ucuugagagcaaaaccaac

SEQ ID NO: 1577437 - RNA, 19 nt, Artificial Sequence
  Description of Artificial Sequence: Synthetic oligonucleotide
uacaaggaggaacauugaa

SEQ ID NO: 1577438 - RNA, 19 nt, Artificial Sequence
  Description of Artificial Sequence: Synthetic oligonucleotide
aucgaauaagcaaaggccu

SEQ ID NO: 1577439 - RNA, 19 nt, Artificial Sequence
  Description of Artificial Sequence: Synthetic oligonucleotide
uuuagguccuucacagcca

SEQ ID NO: 1577440 - RNA, 19 nt, Artificial Sequence
  Description of Artificial Sequence: Synthetic oligonucleotide
ucauccucucauagguggg

SEQ ID NO: 1577441 - RNA, 19 nt, Artificial Sequence
  Description of Artificial Sequence: Synthetic oligonucleotide
accgaucuugagcuucucc

SEQ ID NO: 1577442 - RNA, 19 nt, Artificial Sequence
  Description of Artificial Sequence: Synthetic oligonucleotide
ucuggucacaucauuuauc

SEQ ID NO: 1577443 - RNA, 19 nt, Artificial Sequence
  Description of Artificial Sequence: Synthetic oligonucleotide
ggauggacaaccaacacug

SEQ ID NO: 1577444 - RNA, 19 nt, Artificial Sequence
  Description of Artificial Sequence: Synthetic oligonucleotide
ugcggaacuggacaucagc

SEQ ID NO: 1577445 - RNA, 19 nt, Artificial Sequence
  Description of Artificial Sequence: Synthetic oligonucleotide
ugaaagcgcaggaugccug

SEQ ID NO: 1577446 - RNA, 19 nt, Artificial Sequence
  Description of Artificial Sequence: Synthetic oligonucleotide
uggacaaccaacacugcua

SEQ ID NO: 1577447 - RNA, 19 nt, Artificial Sequence
  Description of Artificial Sequence: Synthetic oligonucleotide
ucuucaggccucaauuuuc

SEQ ID NO: 1577448 - RNA, 19 nt, Artificial Sequence
  Description of Artificial Sequence: Synthetic oligonucleotide
uguuggagggugcugucca

SEQ ID NO: 1577449 - RNA, 19 nt, Artificial Sequence
  Description of Artificial Sequence: Synthetic oligonucleotide
aguaagguccaggaaguag

SEQ ID NO: 1577450 - RNA, 19 nt, Artificial Sequence
  Description of Artificial Sequence: Synthetic oligonucleotide
aguucccugcacaauaagg

SEQ ID NO: 1577451 - RNA, 19 nt, Artificial Sequence
  Description of Artificial Sequence: Synthetic oligonucleotide
gugacauacaggcugcuuc

SEQ ID NO: 1577452 - RNA, 19 nt, Artificial Sequence
  Description of Artificial Sequence: Synthetic oligonucleotide
cauuuaucuccaacagaag

SEQ ID NO: 1577453 - RNA, 19 nt, Artificial Sequence
  Description of Artificial Sequence: Synthetic oligonucleotide
cagucagguuaucagcugg

SEQ ID NO: 1577454 - RNA, 19 nt, Artificial Sequence
  Description of Artificial Sequence: Synthetic oligonucleotide
ucccugcacaauaaggccu

SEQ ID NO: 1577455 - RNA, 19 nt, Artificial Sequence
  Description of Artificial Sequence: Synthetic oligonucleotide
cauggauggacaaccaaca

SEQ ID NO: 1577456 - RNA, 19 nt, Artificial Sequence
  Description of Artificial Sequence: Synthetic oligonucleotide
uguaggucugccucagcca

SEQ ID NO: 1577457 - RNA, 19 nt, Artificial Sequence
  Description of Artificial Sequence: Synthetic oligonucleotide
auggacaaccaacacugcu

SEQ ID NO: 1577458 - RNA, 19 nt, Artificial Sequence
  Description of Artificial Sequence: Synthetic oligonucleotide
cagggaugccaucaggugc

SEQ ID NO: 1577459 - RNA, 19 nt, Artificial Sequence
  Description of Artificial Sequence: Synthetic oligonucleotide
aaagguugcaaggcaguga

SEQ ID NO: 1577460 - RNA, 19 nt, Artificial Sequence
  Description of Artificial Sequence: Synthetic oligonucleotide
aauaaggccuguaggucug

SEQ ID NO: 1577461 - RNA, 19 nt, Artificial Sequence
  Description of Artificial Sequence: Synthetic oligonucleotide
uuacaaggaggaacauuga

SEQ ID NO: 1577462 - RNA, 19 nt, Artificial Sequence
  Description of Artificial Sequence: Synthetic oligonucleotide
uacacggucuacuuccagu

SEQ ID NO: 1577463 - RNA, 19 nt, Artificial Sequence
  Description of Artificial Sequence: Synthetic oligonucleotide
uuguuggggaucgaauaag

SEQ ID NO: 1577464 - RNA, 19 nt, Artificial Sequence
  Description of Artificial Sequence: Synthetic oligonucleotide
agcaagcucaggacuaggc

SEQ ID NO: 1577465 - RNA, 19 nt, Artificial Sequence
  Description of Artificial Sequence: Synthetic oligonucleotide
auagcaggccccaaccugg

SEQ ID NO: 1577466 - RNA, 19 nt, Artificial Sequence
  Description of Artificial Sequence: Synthetic oligonucleotide
ugaguucaugcuuccgccc

SEQ ID NO: 1577467 - RNA, 19 nt, Artificial Sequence
  Description of Artificial Sequence: Synthetic oligonucleotide
ugccuccuaucccaagagg

SEQ ID NO: 1577468 - RNA, 19 nt, Artificial Sequence
  Description of Artificial Sequence: Synthetic oligonucleotide
gcacaauaaggccuguagg

SEQ ID NO: 1577469 - RNA, 19 nt, Artificial Sequence
  Description of Artificial Sequence: Synthetic oligonucleotide
aauggggaaguaagcagca

SEQ ID NO: 1577470 - RNA, 19 nt, Artificial Sequence
  Description of Artificial Sequence: Synthetic oligonucleotide
cuucaugaccacagcuagg

SEQ ID NO: 1577471 - RNA, 19 nt, Artificial Sequence
  Description of Artificial Sequence: Synthetic oligonucleotide
aaggcucggguccucagau

SEQ ID NO: 1577472 - RNA, 19 nt, Artificial Sequence
  Description of Artificial Sequence: Synthetic oligonucleotide
uguuuagguccuucacagc

SEQ ID NO: 1577473 - RNA, 19 nt, Artificial Sequence
  Description of Artificial Sequence: Synthetic oligonucleotide
auccuuagaggcuaacuua

SEQ ID NO: 1577474 - RNA, 19 nt, Artificial Sequence
  Description of Artificial Sequence: Synthetic oligonucleotide
aaacacgaucauccucuca

SEQ ID NO: 1577475 - RNA, 19 nt, Artificial Sequence
  Description of Artificial Sequence: Synthetic oligonucleotide
gcuucaugaccacagcuag

SEQ ID NO: 1577476 - RNA, 19 nt, Artificial Sequence
  Description of Artificial Sequence: Synthetic oligonucleotide
acaaccaacacugcuacuu

SEQ ID NO: 1577477 - RNA, 19 nt, Artificial Sequence
  Description of Artificial Sequence: Synthetic oligonucleotide
cagcagaugucucccagcc

SEQ ID NO: 1577478 - RNA, 19 nt, Artificial Sequence
  Description of Artificial Sequence: Synthetic oligonucleotide
aggcccuaaggacagccuc

SEQ ID NO: 1577479 - RNA, 19 nt, Artificial Sequence
  Description of Artificial Sequence: Synthetic oligonucleotide
uuggucuuucacacuggug

SEQ ID NO: 1577480 - RNA, 19 nt, Artificial Sequence
  Description of Artificial Sequence: Synthetic oligonucleotide
ucagguuaucagcugggua

SEQ ID NO: 1577481 - RNA, 19 nt, Artificial Sequence
  Description of Artificial Sequence: Synthetic oligonucleotide
cacugccagcucuacacgg

SEQ ID NO: 1577482 - RNA, 19 nt, Artificial Sequence
  Description of Artificial Sequence: Synthetic oligonucleotide
uuagguccuucacagccau

SEQ ID NO: 1577483 - RNA, 19 nt, Artificial Sequence
  Description of Artificial Sequence: Synthetic oligonucleotide
cucagauccacccucugga

SEQ ID NO: 1577484 - RNA, 19 nt, Artificial Sequence
  Description of Artificial Sequence: Synthetic oligonucleotide
gacguugaacugauagcag

SEQ ID NO: 1577485 - RNA, 19 nt, Artificial Sequence
  Description of Artificial Sequence: Synthetic oligonucleotide
guugaacugauagcaggcc

SEQ ID NO: 1577486 - RNA, 19 nt, Artificial Sequence
  Description of Artificial Sequence: Synthetic oligonucleotide
gaccaaugccuccuauccc

SEQ ID NO: 1577487 - RNA, 19 nt, Artificial Sequence
  Description of Artificial Sequence: Synthetic oligonucleotide
cacaaugggugaaagcgca

SEQ ID NO: 1577488 - RNA, 19 nt, Artificial Sequence
  Description of Artificial Sequence: Synthetic oligonucleotide
aacagaaguuggucaccga

SEQ ID NO: 1577489 - RNA, 19 nt, Artificial Sequence
  Description of Artificial Sequence: Synthetic oligonucleotide
cacaauaaggccuguaggu

SEQ ID NO: 1577490 - RNA, 19 nt, Artificial Sequence
  Description of Artificial Sequence: Synthetic oligonucleotide
ucuguggcucagaccaaug

SEQ ID NO: 1577491 - RNA, 19 nt, Artificial Sequence
  Description of Artificial Sequence: Synthetic oligonucleotide
cuguggcucagaccaaugc

SEQ ID NO: 1577492 - RNA, 19 nt, Artificial Sequence
  Description of Artificial Sequence: Synthetic oligonucleotide
agucaauaaagggcaggag

SEQ ID NO: 1577493 - RNA, 19 nt, Artificial Sequence
  Description of Artificial Sequence: Synthetic oligonucleotide
agguuaucagcuggguagg

SEQ ID NO: 1577494 - RNA, 19 nt, Artificial Sequence
  Description of Artificial Sequence: Synthetic oligonucleotide
ucccagaugcggaacugga

SEQ ID NO: 1577495 - RNA, 19 nt, Artificial Sequence
  Description of Artificial Sequence: Synthetic oligonucleotide
ggaacauugaaggcucggg

SEQ ID NO: 1577496 - RNA, 19 nt, Artificial Sequence
  Description of Artificial Sequence: Synthetic oligonucleotide
gaaccacaaugggugaaag

SEQ ID NO: 1577497 - RNA, 19 nt, Artificial Sequence
  Description of Artificial Sequence: Synthetic oligonucleotide
ucuacacggucuacuucca

SEQ ID NO: 1577498 - RNA, 19 nt, Artificial Sequence
  Description of Artificial Sequence: Synthetic oligonucleotide
cuuuguuggggaucgaaua

SEQ ID NO: 1577499 - RNA, 19 nt, Artificial Sequence
  Description of Artificial Sequence: Synthetic oligonucleotide
ugucauucgaguggccgug

SEQ ID NO: 1577500 - RNA, 19 nt, Artificial Sequence
  Description of Artificial Sequence: Synthetic oligonucleotide
ugguugagucuaaaacauc

SEQ ID NO: 1577501 - RNA, 19 nt, Artificial Sequence
  Description of Artificial Sequence: Synthetic oligonucleotide
acuguuggagggugcuguc

SEQ ID NO: 1577502 - RNA, 19 nt, Artificial Sequence
  Description of Artificial Sequence: Synthetic oligonucleotide
ccucugacaggaaagguug

SEQ ID NO: 1577503 - RNA, 19 nt, Artificial Sequence
  Description of Artificial Sequence: Synthetic oligonucleotide
aggaacauugaaggcucgg

SEQ ID NO: 1577504 - RNA, 19 nt, Artificial Sequence
  Description of Artificial Sequence: Synthetic oligonucleotide
auacucugggugccacugg

SEQ ID NO: 1577505 - RNA, 19 nt, Artificial Sequence
  Description of Artificial Sequence: Synthetic oligonucleotide
aucuucaggccucaauuuu

SEQ ID NO: 1577506 - RNA, 19 nt, Artificial Sequence
  Description of Artificial Sequence: Synthetic oligonucleotide
cuaaggacagccuccagcu

SEQ ID NO: 1577507 - RNA, 19 nt, Artificial Sequence
  Description of Artificial Sequence: Synthetic oligonucleotide
cacgcuguagcaagcucag

SEQ ID NO: 1577508 - RNA, 19 nt, Artificial Sequence
  Description of Artificial Sequence: Synthetic oligonucleotide
gauccggcccagucgaaac

SEQ ID NO: 1577509 - RNA, 19 nt, Artificial Sequence
  Description of Artificial Sequence: Synthetic oligonucleotide
agucagguuaucagcuggg

SEQ ID NO: 1577510 - RNA, 19 nt, Artificial Sequence
  Description of Artificial Sequence: Synthetic oligonucleotide
ucgaguggccguguuuagg

SEQ ID NO: 1577511 - RNA, 19 nt, Artificial Sequence
  Description of Artificial Sequence: Synthetic oligonucleotide
ccugguugagucuaaaaca

SEQ ID NO: 1577512 - RNA, 19 nt, Artificial Sequence
  Description of Artificial Sequence: Synthetic oligonucleotide
aucagggaugccaucaggu

SEQ ID NO: 1577513 - RNA, 19 nt, Artificial Sequence
  Description of Artificial Sequence: Synthetic oligonucleotide
gcuacuucaaggcccuaag

SEQ ID NO: 1577514 - RNA, 19 nt, Artificial Sequence
  Description of Artificial Sequence: Synthetic oligonucleotide
auaggugggcacgaucuug

SEQ ID NO: 1577515 - RNA, 19 nt, Artificial Sequence
  Description of Artificial Sequence: Synthetic oligonucleotide
ggagucaauaaagggcagg

SEQ ID NO: 1577516 - RNA, 19 nt, Artificial Sequence
  Description of Artificial Sequence: Synthetic oligonucleotide
ccuaaggacagccuccagc

SEQ ID NO: 1577517 - RNA, 19 nt, Artificial Sequence
  Description of Artificial Sequence: Synthetic oligonucleotide
accaaccagaaaaugggga

SEQ ID NO: 1577518 - RNA, 19 nt, Artificial Sequence
  Description of Artificial Sequence: Synthetic oligonucleotide
cuaggcacuuuguugggga

SEQ ID NO: 1577519 - RNA, 19 nt, Artificial Sequence
  Description of Artificial Sequence: Synthetic oligonucleotide
uccuaucccaagaggcuuc

SEQ ID NO: 1577520 - RNA, 19 nt, Artificial Sequence
  Description of Artificial Sequence: Synthetic oligonucleotide
aggaugccugacucagcac

SEQ ID NO: 1577521 - RNA, 19 nt, Artificial Sequence
  Description of Artificial Sequence: Synthetic oligonucleotide
ggacaaccaacacugcuac

SEQ ID NO: 1577522 - RNA, 19 nt, Artificial Sequence
  Description of Artificial Sequence: Synthetic oligonucleotide
acggauccggcccagucga

SEQ ID NO: 1577523 - RNA, 19 nt, Artificial Sequence
  Description of Artificial Sequence: Synthetic oligonucleotide
uucacgcuguagcaagcuc

SEQ ID NO: 1577524 - RNA, 19 nt, Artificial Sequence
  Description of Artificial Sequence: Synthetic oligonucleotide
ggcucggguccucagaucc

SEQ ID NO: 1577525 - RNA, 19 nt, Artificial Sequence
  Description of Artificial Sequence: Synthetic oligonucleotide
uucaugcuuccgcccagca

SEQ ID NO: 1577526 - RNA, 19 nt, Artificial Sequence
  Description of Artificial Sequence: Synthetic oligonucleotide
ggagaagaaccaugccagg

SEQ ID NO: 1577527 - RNA, 19 nt, Artificial Sequence
  Description of Artificial Sequence: Synthetic oligonucleotide
uggaucuccugcagugacu

SEQ ID NO: 1577528 - RNA, 19 nt, Artificial Sequence
  Description of Artificial Sequence: Synthetic oligonucleotide
gcugucauucgaguggccg

SEQ ID NO: 1577529 - RNA, 19 nt, Artificial Sequence
  Description of Artificial Sequence: Synthetic oligonucleotide
cagaccaaugccuccuauc

SEQ ID NO: 1577530 - RNA, 19 nt, Artificial Sequence
  Description of Artificial Sequence: Synthetic oligonucleotide
caaccaacacugcuacuuc

SEQ ID NO: 1577531 - RNA, 19 nt, Artificial Sequence
  Description of Artificial Sequence: Synthetic oligonucleotide
gucuacuuccagucccaag

SEQ ID NO: 1577532 - RNA, 19 nt, Artificial Sequence
  Description of Artificial Sequence: Synthetic oligonucleotide
uucgaguggccguguuuag

SEQ ID NO: 1577533 - RNA, 19 nt, Artificial Sequence
  Description of Artificial Sequence: Synthetic oligonucleotide
ucagauccacccucuggaa

SEQ ID NO: 1577534 - RNA, 19 nt, Artificial Sequence
  Description of Artificial Sequence: Synthetic oligonucleotide
auucgaguggccguguuua

SEQ ID NO: 1577535 - RNA, 19 nt, Artificial Sequence
  Description of Artificial Sequence: Synthetic oligonucleotide
cuucgggcugggcucaggc

SEQ ID NO: 1577536 - RNA, 19 nt, Artificial Sequence
  Description of Artificial Sequence: Synthetic oligonucleotide
guuaucagcuggguaggac

SEQ ID NO: 1577537 - RNA, 19 nt, Artificial Sequence
  Description of Artificial Sequence: Synthetic oligonucleotide
aagcucuggucacaucauu

SEQ ID NO: 1577538 - RNA, 19 nt, Artificial Sequence
  Description of Artificial Sequence: Synthetic oligonucleotide
gaaacacgaucauccucuc

SEQ ID NO: 1577539 - RNA, 19 nt, Artificial Sequence
  Description of Artificial Sequence: Synthetic oligonucleotide
cuuccgcccagcaagugga

SEQ ID NO: 1577540 - RNA, 19 nt, Artificial Sequence
  Description of Artificial Sequence: Synthetic oligonucleotide
cuaaaacaucuucaggccu

SEQ ID NO: 1577541 - RNA, 19 nt, Artificial Sequence
  Description of Artificial Sequence: Synthetic oligonucleotide
agccacaggcugcuucggg

SEQ ID NO: 1577542 - RNA, 19 nt, Artificial Sequence
  Description of Artificial Sequence: Synthetic oligonucleotide
guuggucaccgaucuugag

SEQ ID NO: 1577543 - RNA, 19 nt, Artificial Sequence
  Description of Artificial Sequence: Synthetic oligonucleotide
guagcaagcucaggacuag

SEQ ID NO: 1577544 - RNA, 19 nt, Artificial Sequence
  Description of Artificial Sequence: Synthetic oligonucleotide
gcaagaugacguugaacug

SEQ ID NO: 1577545 - RNA, 19 nt, Artificial Sequence
  Description of Artificial Sequence: Synthetic oligonucleotide
agaggcuaacuuacaagga

SEQ ID NO: 1577546 - RNA, 19 nt, Artificial Sequence
  Description of Artificial Sequence: Synthetic oligonucleotide
uaggucauggauggacaac

SEQ ID NO: 1577547 - RNA, 19 nt, Artificial Sequence
  Description of Artificial Sequence: Synthetic oligonucleotide
gauggacaaccaacacugc

SEQ ID NO: 1577548 - RNA, 19 nt, Artificial Sequence
  Description of Artificial Sequence: Synthetic oligonucleotide
cugguugagucuaaaacau

SEQ ID NO: 1577549 - RNA, 19 nt, Artificial Sequence
  Description of Artificial Sequence: Synthetic oligonucleotide
gguugagucuaaaacaucu

SEQ ID NO: 1577550 - RNA, 19 nt, Artificial Sequence
  Description of Artificial Sequence: Synthetic oligonucleotide
caucagcucccacagacaa

SEQ ID NO: 1577551 - RNA, 19 nt, Artificial Sequence
  Description of Artificial Sequence: Synthetic oligonucleotide
cguugaacugauagcaggc

SEQ ID NO: 1577552 - RNA, 19 nt, Artificial Sequence
  Description of Artificial Sequence: Synthetic oligonucleotide
gcuuccgcccagcaagugg

SEQ ID NO: 1577553 - RNA, 19 nt, Artificial Sequence
  Description of Artificial Sequence: Synthetic oligonucleotide
cacggucuacuuccagucc

SEQ ID NO: 1577554 - RNA, 19 nt, Artificial Sequence
  Description of Artificial Sequence: Synthetic oligonucleotide
accacagcuaggucacccu

SEQ ID NO: 1577555 - RNA, 19 nt, Artificial Sequence
  Description of Artificial Sequence: Synthetic oligonucleotide
cagugagaagccccucagc

SEQ ID NO: 1577556 - RNA, 19 nt, Artificial Sequence
  Description of Artificial Sequence: Synthetic oligonucleotide
cauccucucauaggugggc

SEQ ID NO: 1577557 - RNA, 19 nt, Artificial Sequence
  Description of Artificial Sequence: Synthetic oligonucleotide
ugcuacuucaaggcccuaa

SEQ ID NO: 1577558 - RNA, 19 nt, Artificial Sequence
  Description of Artificial Sequence: Synthetic oligonucleotide
uucgggcugggcucaggcc

SEQ ID NO: 1577559 - RNA, 19 nt, Artificial Sequence
  Description of Artificial Sequence: Synthetic oligonucleotide
guuggggaucgaauaagca

SEQ ID NO: 1577560 - RNA, 19 nt, Artificial Sequence
  Description of Artificial Sequence: Synthetic oligonucleotide
acuuuguuggggaucgaau

SEQ ID NO: 1577561 - RNA, 19 nt, Artificial Sequence
  Description of Artificial Sequence: Synthetic oligonucleotide
gggcugucugucuucacgc

SEQ ID NO: 1577562 - RNA, 19 nt, Artificial Sequence
  Description of Artificial Sequence: Synthetic oligonucleotide
gaaggcucggguccucaga

SEQ ID NO: 1577563 - RNA, 19 nt, Artificial Sequence
  Description of Artificial Sequence: Synthetic oligonucleotide
ccacaaugggugaaagcgc

SEQ ID NO: 1577564 - RNA, 19 nt, Artificial Sequence
  Description of Artificial Sequence: Synthetic oligonucleotide
gccuccuaucccaagaggc

SEQ ID NO: 1577565 - RNA, 19 nt, Artificial Sequence
  Description of Artificial Sequence: Synthetic oligonucleotide
agcaaguggagggccaacu

SEQ ID NO: 1577566 - RNA, 19 nt, Artificial Sequence
  Description of Artificial Sequence: Synthetic oligonucleotide
aacuuacaaggaggaacau

SEQ ID NO: 1577567 - RNA, 19 nt, Artificial Sequence
  Description of Artificial Sequence: Synthetic oligonucleotide
guccaggaaguagauacuc

SEQ ID NO: 1577568 - RNA, 19 nt, Artificial Sequence
  Description of Artificial Sequence: Synthetic oligonucleotide
gucccagaugcggaacugg

SEQ ID NO: 1577569 - RNA, 19 nt, Artificial Sequence
  Description of Artificial Sequence: Synthetic oligonucleotide
ggucuuucacacuggugac

SEQ ID NO: 1577570 - RNA, 19 nt, Artificial Sequence
  Description of Artificial Sequence: Synthetic oligonucleotide
ggauggagcaccuccaacu

SEQ ID NO: 1577571 - RNA, 19 nt, Artificial Sequence
  Description of Artificial Sequence: Synthetic oligonucleotide
gaacugauagcaggcccca

SEQ ID NO: 1577572 - RNA, 19 nt, Artificial Sequence
  Description of Artificial Sequence: Synthetic oligonucleotide
gggaucgaauaagcaaagg

SEQ ID NO: 1577573 - RNA, 19 nt, Artificial Sequence
  Description of Artificial Sequence: Synthetic oligonucleotide
gucaccgaucuugagcuuc

SEQ ID NO: 1577574 - RNA, 19 nt, Artificial Sequence
  Description of Artificial Sequence: Synthetic oligonucleotide
ugggcaagaugacguugaa

SEQ ID NO: 1577575 - RNA, 19 nt, Artificial Sequence
  Description of Artificial Sequence: Synthetic oligonucleotide
gucauggauggacaaccaa

SEQ ID NO: 1577576 - RNA, 19 nt, Artificial Sequence
  Description of Artificial Sequence: Synthetic oligonucleotide
caccacaucagggaugcca

SEQ ID NO: 1577577 - RNA, 19 nt, Artificial Sequence
  Description of Artificial Sequence: Synthetic oligonucleotide
ugggcgacagcugggcugu

SEQ ID NO: 1577578 - RNA, 19 nt, Artificial Sequence
  Description of Artificial Sequence: Synthetic oligonucleotide
acaaugggugaaagcgcag

SEQ ID NO: 1577579 - RNA, 19 nt, Artificial Sequence
  Description of Artificial Sequence: Synthetic oligonucleotide
uccggcccagucgaaacac

SEQ ID NO: 1577580 - RNA, 19 nt, Artificial Sequence
  Description of Artificial Sequence: Synthetic oligonucleotide
ggggaaguaagcagcagca

SEQ ID NO: 1577581 - RNA, 19 nt, Artificial Sequence
  Description of Artificial Sequence: Synthetic oligonucleotide
ugccucugacaggaaaggu

SEQ ID NO: 1577582 - RNA, 19 nt, Artificial Sequence
  Description of Artificial Sequence: Synthetic oligonucleotide
uuccgcccagcaaguggag

SEQ ID NO: 1577583 - RNA, 19 nt, Artificial Sequence
  Description of Artificial Sequence: Synthetic oligonucleotide
guacggauccggcccaguc

SEQ ID NO: 1577584 - RNA, 19 nt, Artificial Sequence
  Description of Artificial Sequence: Synthetic oligonucleotide
ccagaugcggaacuggaca

SEQ ID NO: 1577585 - RNA, 19 nt, Artificial Sequence
  Description of Artificial Sequence: Synthetic oligonucleotide
aggcucggguccucagauc

SEQ ID NO: 1577586 - RNA, 19 nt, Artificial Sequence
  Description of Artificial Sequence: Synthetic oligonucleotide
ggcuaacuuacaaggagga

SEQ ID NO: 1577587 - RNA, 19 nt, Artificial Sequence
  Description of Artificial Sequence: Synthetic oligonucleotide
cauccuuagaggcuaacuu

SEQ ID NO: 1577588 - RNA, 19 nt, Artificial Sequence
  Description of Artificial Sequence: Synthetic oligonucleotide
gcaaguggagggccaacug

SEQ ID NO: 1577589 - RNA, 19 nt, Artificial Sequence
  Description of Artificial Sequence: Synthetic oligonucleotide
gcaggagaagaaccaugcc

SEQ ID NO: 1577590 - RNA, 19 nt, Artificial Sequence
  Description of Artificial Sequence: Synthetic oligonucleotide
ucauucgaguggccguguu

SEQ ID NO: 1577591 - RNA, 19 nt, Artificial Sequence
  Description of Artificial Sequence: Synthetic oligonucleotide
ccuuggucauggcauugcg

SEQ ID NO: 1577592 - RNA, 19 nt, Artificial Sequence
  Description of Artificial Sequence: Synthetic oligonucleotide
ggggaucgaauaagcaaag

SEQ ID NO: 1577593 - RNA, 19 nt, Artificial Sequence
  Description of Artificial Sequence: Synthetic oligonucleotide
auccggcccagucgaaaca

SEQ ID NO: 1577594 - RNA, 19 nt, Artificial Sequence
  Description of Artificial Sequence: Synthetic oligonucleotide
ggaugccugacucagcacu

SEQ ID NO: 1577595 - RNA, 19 nt, Artificial Sequence
  Description of Artificial Sequence: Synthetic oligonucleotide
gaguggccguguuuagguc

SEQ ID NO: 1577596 - RNA, 19 nt, Artificial Sequence
  Description of Artificial Sequence: Synthetic oligonucleotide
ccgcccagcaaguggaggg

SEQ ID NO: 1577597 - RNA, 19 nt, Artificial Sequence
  Description of Artificial Sequence: Synthetic oligonucleotide
ggaaguagauacucugggu

SEQ ID NO: 1577598 - RNA, 19 nt, Artificial Sequence
  Description of Artificial Sequence: Synthetic oligonucleotide
cuucaggccucaauuuucu

SEQ ID NO: 1577599 - RNA, 19 nt, Artificial Sequence
  Description of Artificial Sequence: Synthetic oligonucleotide
acacgaucauccucucaua

SEQ ID NO: 1577600 - RNA, 19 nt, Artificial Sequence
  Description of Artificial Sequence: Synthetic oligonucleotide
ggagggccaacuguuggag

SEQ ID NO: 1577601 - RNA, 19 nt, Artificial Sequence
  Description of Artificial Sequence: Synthetic oligonucleotide
augggugaaagcgcaggau

SEQ ID NO: 1577602 - RNA, 19 nt, Artificial Sequence
  Description of Artificial Sequence: Synthetic oligonucleotide
auccucucauaggugggca

SEQ ID NO: 1577603 - RNA, 19 nt, Artificial Sequence
  Description of Artificial Sequence: Synthetic oligonucleotide
gagaaccacaaugggugaa

SEQ ID NO: 1577604 - RNA, 19 nt, Artificial Sequence
  Description of Artificial Sequence: Synthetic oligonucleotide
cuguagcaagcucaggacu

SEQ ID NO: 1577605 - RNA, 19 nt, Artificial Sequence
  Description of Artificial Sequence: Synthetic oligonucleotide
guaggucugccucagccau

SEQ ID NO: 1577606 - RNA, 19 nt, Artificial Sequence
  Description of Artificial Sequence: Synthetic oligonucleotide
cccagucgaaacacgauca

SEQ ID NO: 1577607 - RNA, 19 nt, Artificial Sequence
  Description of Artificial Sequence: Synthetic oligonucleotide
cucggguccucagauccac

SEQ ID NO: 1577608 - RNA, 19 nt, Artificial Sequence
  Description of Artificial Sequence: Synthetic oligonucleotide
caaguggagggccaacugu

SEQ ID NO: 1577609 - RNA, 19 nt, Artificial Sequence
  Description of Artificial Sequence: Synthetic oligonucleotide
gcccagucgaaacacgauc

SEQ ID NO: 1577610 - RNA, 19 nt, Artificial Sequence
  Description of Artificial Sequence: Synthetic oligonucleotide
uaggucugccucagccauc

SEQ ID NO: 1577611 - RNA, 19 nt, Artificial Sequence
  Description of Artificial Sequence: Synthetic oligonucleotide
guucaugcuuccgcccagc

SEQ ID NO: 1577612 - RNA, 19 nt, Artificial Sequence
  Description of Artificial Sequence: Synthetic oligonucleotide
ugucugucuucacgcugua

SEQ ID NO: 1577613 - RNA, 19 nt, Artificial Sequence
  Description of Artificial Sequence: Synthetic oligonucleotide
gucgaaacacgaucauccu

SEQ ID NO: 1577614 - RNA, 19 nt, Artificial Sequence
  Description of Artificial Sequence: Synthetic oligonucleotide
ggcucagaccaaugccucc

SEQ ID NO: 1577615 - RNA, 19 nt, Artificial Sequence
  Description of Artificial Sequence: Synthetic oligonucleotide
guagauacucugggugcca

SEQ ID NO: 1577616 - RNA, 19 nt, Artificial Sequence
  Description of Artificial Sequence: Synthetic oligonucleotide
cugucuuggguggcugcag

SEQ ID NO: 1577617 - RNA, 19 nt, Artificial Sequence
  Description of Artificial Sequence: Synthetic oligonucleotide
cugacaggaaagguugcaa

SEQ ID NO: 1577618 - RNA, 19 nt, Artificial Sequence
  Description of Artificial Sequence: Synthetic oligonucleotide
cacgaucuugagagcaaaa

SEQ ID NO: 1577619 - RNA, 19 nt, Artificial Sequence
  Description of Artificial Sequence: Synthetic oligonucleotide
ccaacagaaguuggucacc

SEQ ID NO: 1577620 - RNA, 19 nt, Artificial Sequence
  Description of Artificial Sequence: Synthetic oligonucleotide
ggugggcacgaucuugaga

SEQ ID NO: 1577621 - RNA, 19 nt, Artificial Sequence
  Description of Artificial Sequence: Synthetic oligonucleotide
gcuaggucauggauggaca

SEQ ID NO: 1577622 - RNA, 19 nt, Artificial Sequence
  Description of Artificial Sequence: Synthetic oligonucleotide
agaugucucccagccugcu

SEQ ID NO: 1577623 - RNA, 19 nt, Artificial Sequence
  Description of Artificial Sequence: Synthetic oligonucleotide
ggcccuaaggacagccucc

SEQ ID NO: 1577624 - RNA, 19 nt, Artificial Sequence
  Description of Artificial Sequence: Synthetic oligonucleotide
agguucagggcuaggucau

SEQ ID NO: 1577625 - RNA, 19 nt, Artificial Sequence
  Description of Artificial Sequence: Synthetic oligonucleotide
cugucauucgaguggccgu

SEQ ID NO: 1577626 - RNA, 19 nt, Artificial Sequence
  Description of Artificial Sequence: Synthetic oligonucleotide
caggccccaaccuggcuga

SEQ ID NO: 1577627 - RNA, 19 nt, Artificial Sequence
  Description of Artificial Sequence: Synthetic oligonucleotide
ugggucccagaugcggaac

SEQ ID NO: 1577628 - RNA, 19 nt, Artificial Sequence
  Description of Artificial Sequence: Synthetic oligonucleotide
agccccauccuuagaggcu

SEQ ID NO: 1577629 - RNA, 19 nt, Artificial Sequence
  Description of Artificial Sequence: Synthetic oligonucleotide
gcgggcugucauucgagug

SEQ ID NO: 1577630 - RNA, 19 nt, Artificial Sequence
  Description of Artificial Sequence: Synthetic oligonucleotide
cguguuuagguccuucaca

SEQ ID NO: 1577631 - RNA, 19 nt, Artificial Sequence
  Description of Artificial Sequence: Synthetic oligonucleotide
ccacugccagcucuacacg

SEQ ID NO: 1577632 - RNA, 19 nt, Artificial Sequence
  Description of Artificial Sequence: Synthetic oligonucleotide
cacuuuguuggggaucgaa

SEQ ID NO: 1577633 - RNA, 19 nt, Artificial Sequence
  Description of Artificial Sequence: Synthetic oligonucleotide
ccguguuuagguccuucac

SEQ ID NO: 1577634 - RNA, 19 nt, Artificial Sequence
  Description of Artificial Sequence: Synthetic oligonucleotide
gggcacgaucuugagagca

SEQ ID NO: 1577635 - RNA, 19 nt, Artificial Sequence
  Description of Artificial Sequence: Synthetic oligonucleotide
gacaaccaacacugcuacu

SEQ ID NO: 1577636 - RNA, 19 nt, Artificial Sequence
  Description of Artificial Sequence: Synthetic oligonucleotide
ggugucgacuggcccugag

SEQ ID NO: 1577637 - RNA, 19 nt, Artificial Sequence
  Description of Artificial Sequence: Synthetic oligonucleotide
cacuuaucauuuccagggu

SEQ ID NO: 1577638 - RNA, 19 nt, Artificial Sequence
  Description of Artificial Sequence: Synthetic oligonucleotide
cccagaugcggaacuggac

SEQ ID NO: 1577639 - RNA, 19 nt, Artificial Sequence
  Description of Artificial Sequence: Synthetic oligonucleotide
cgcuguagcaagcucagga

SEQ ID NO: 1577640 - RNA, 19 nt, Artificial Sequence
  Description of Artificial Sequence: Synthetic oligonucleotide
gccguguuuagguccuuca

SEQ ID NO: 1577641 - RNA, 19 nt, Artificial Sequence
  Description of Artificial Sequence: Synthetic oligonucleotide
cagaugcggaacuggacau

SEQ ID NO: 1577642 - RNA, 19 nt, Artificial Sequence
  Description of Artificial Sequence: Synthetic oligonucleotide
caugcgcuuuggucuuuca

SEQ ID NO: 1577643 - RNA, 19 nt, Artificial Sequence
  Description of Artificial Sequence: Synthetic oligonucleotide
guugagucuaaaacaucuu

SEQ ID NO: 1577644 - RNA, 19 nt, Artificial Sequence
  Description of Artificial Sequence: Synthetic oligonucleotide
cggaacuggacaucagcuc

SEQ ID NO: 1577645 - RNA, 19 nt, Artificial Sequence
  Description of Artificial Sequence: Synthetic oligonucleotide
augcggaacuggacaucag

SEQ ID NO: 1577646 - RNA, 19 nt, Artificial Sequence
  Description of Artificial Sequence: Synthetic oligonucleotide
gcauugcgggcugucauuc

SEQ ID NO: 1577647 - RNA, 19 nt, Artificial Sequence
  Description of Artificial Sequence: Synthetic oligonucleotide
cugggcugucugucuucac

SEQ ID NO: 1577648 - RNA, 19 nt, Artificial Sequence
  Description of Artificial Sequence: Synthetic oligonucleotide
caucuggaucuccugcagu

SEQ ID NO: 1577649 - RNA, 19 nt, Artificial Sequence
  Description of Artificial Sequence: Synthetic oligonucleotide
ggucauggcauugcgggcu

SEQ ID NO: 1577650 - RNA, 19 nt, Artificial Sequence
  Description of Artificial Sequence: Synthetic oligonucleotide
ggucccagaugcggaacug

SEQ ID NO: 1577651 - RNA, 19 nt, Artificial Sequence
  Description of Artificial Sequence: Synthetic oligonucleotide
ucuguccagucagguuauc

SEQ ID NO: 1577652 - RNA, 19 nt, Artificial Sequence
  Description of Artificial Sequence: Synthetic oligonucleotide
ggccaacuguuggagggug

SEQ ID NO: 1577653 - RNA, 19 nt, Artificial Sequence
  Description of Artificial Sequence: Synthetic oligonucleotide
ggaaagguugcaaggcagu

SEQ ID NO: 1577654 - RNA, 19 nt, Artificial Sequence
  Description of Artificial Sequence: Synthetic oligonucleotide
gcuaacuuacaaggaggaa

SEQ ID NO: 1577655 - RNA, 19 nt, Artificial Sequence
  Description of Artificial Sequence: Synthetic oligonucleotide
augcuuccgcccagcaagu

SEQ ID NO: 1577656 - RNA, 19 nt, Artificial Sequence
  Description of Artificial Sequence: Synthetic oligonucleotide
gccucaauuuucuguggcu

SEQ ID NO: 1577657 - RNA, 19 nt, Artificial Sequence
  Description of Artificial Sequence: Synthetic oligonucleotide
aggucacccuucaccuuca

SEQ ID NO: 1577658 - RNA, 19 nt, Artificial Sequence
  Description of Artificial Sequence: Synthetic oligonucleotide
cagcaaguggagggccaac

SEQ ID NO: 1577659 - RNA, 19 nt, Artificial Sequence
  Description of Artificial Sequence: Synthetic oligonucleotide
aggcccagucccagcaaga

SEQ ID NO: 1577660 - RNA, 19 nt, Artificial Sequence
  Description of Artificial Sequence: Synthetic oligonucleotide
ccacugggcaagaugacgu

SEQ ID NO: 1577661 - RNA, 19 nt, Artificial Sequence
  Description of Artificial Sequence: Synthetic oligonucleotide
gaaguuggucaccgaucuu

SEQ ID NO: 1577662 - RNA, 19 nt, Artificial Sequence
  Description of Artificial Sequence: Synthetic oligonucleotide
caggacuaggcacuuuguu

SEQ ID NO: 1577663 - RNA, 19 nt, Artificial Sequence
  Description of Artificial Sequence: Synthetic oligonucleotide
cuaucccaagaggcuucuc

SEQ ID NO: 1577664 - RNA, 19 nt, Artificial Sequence
  Description of Artificial Sequence: Synthetic oligonucleotide
ggccgcaguucccugcaca

SEQ ID NO: 1577665 - RNA, 19 nt, Artificial Sequence
  Description of Artificial Sequence: Synthetic oligonucleotide
gccuguaggucugccucag

SEQ ID NO: 1577666 - RNA, 19 nt, Artificial Sequence
  Description of Artificial Sequence: Synthetic oligonucleotide
gcggaacuggacaucagcu

SEQ ID NO: 1577667 - RNA, 19 nt, Artificial Sequence
  Description of Artificial Sequence: Synthetic oligonucleotide
ccuguccagagaaccacaa

SEQ ID NO: 1577668 - RNA, 19 nt, Artificial Sequence
  Description of Artificial Sequence: Synthetic oligonucleotide
cauuuccagggugucgacu

SEQ ID NO: 1577669 - RNA, 19 nt, Artificial Sequence
  Description of Artificial Sequence: Synthetic oligonucleotide
gccgcaguucccugcacaa

SEQ ID NO: 1577670 - RNA, 19 nt, Artificial Sequence
  Description of Artificial Sequence: Synthetic oligonucleotide
gguuaucagcuggguagga

SEQ ID NO: 1577671 - RNA, 19 nt, Artificial Sequence
  Description of Artificial Sequence: Synthetic oligonucleotide
gccaacuguuggagggugc

SEQ ID NO: 1577672 - RNA, 19 nt, Artificial Sequence
  Description of Artificial Sequence: Synthetic oligonucleotide
cuuucacacuggugacaua

SEQ ID NO: 1577673 - RNA, 19 nt, Artificial Sequence
  Description of Artificial Sequence: Synthetic oligonucleotide
cauugaaggcucggguccu

SEQ ID NO: 1577674 - RNA, 19 nt, Artificial Sequence
  Description of Artificial Sequence: Synthetic oligonucleotide
gcaguucccugcacaauaa

SEQ ID NO: 1577675 - RNA, 19 nt, Artificial Sequence
  Description of Artificial Sequence: Synthetic oligonucleotide
gguucagggcuaggucaug

SEQ ID NO: 1577676 - RNA, 19 nt, Artificial Sequence
  Description of Artificial Sequence: Synthetic oligonucleotide
gacaggcagguggcuccac

SEQ ID NO: 1577677 - RNA, 19 nt, Artificial Sequence
  Description of Artificial Sequence: Synthetic oligonucleotide
guaggacaggcugggcugu

SEQ ID NO: 1577678 - RNA, 19 nt, Artificial Sequence
  Description of Artificial Sequence: Synthetic oligonucleotide
gggguacggauccggccca

SEQ ID NO: 1577679 - RNA, 19 nt, Artificial Sequence
  Description of Artificial Sequence: Synthetic oligonucleotide
cauucgaguggccguguuu

SEQ ID NO: 1577680 - RNA, 19 nt, Artificial Sequence
  Description of Artificial Sequence: Synthetic oligonucleotide
gccagcucuacacggucua

SEQ ID NO: 1577681 - RNA, 19 nt, Artificial Sequence
  Description of Artificial Sequence: Synthetic oligonucleotide
ccuccuaucccaagaggcu

SEQ ID NO: 1577682 - RNA, 19 nt, Artificial Sequence
  Description of Artificial Sequence: Synthetic oligonucleotide
ggcacgaucuugagagcaa

SEQ ID NO: 1577683 - RNA, 19 nt, Artificial Sequence
  Description of Artificial Sequence: Synthetic oligonucleotide
ggggccgcaguucccugca

SEQ ID NO: 1577684 - RNA, 19 nt, Artificial Sequence
  Description of Artificial Sequence: Synthetic oligonucleotide
cuguccagagaaccacaau

SEQ ID NO: 1577685 - RNA, 19 nt, Artificial Sequence
  Description of Artificial Sequence: Synthetic oligonucleotide
cuccuaucccaagaggcuu

SEQ ID NO: 1577686 - RNA, 19 nt, Artificial Sequence
  Description of Artificial Sequence: Synthetic oligonucleotide
cagcucuacacggucuacu

SEQ ID NO: 1577687 - RNA, 19 nt, Artificial Sequence
  Description of Artificial Sequence: Synthetic oligonucleotide
gcacgaucuugagagcaaa

SEQ ID NO: 1577688 - RNA, 19 nt, Artificial Sequence
  Description of Artificial Sequence: Synthetic oligonucleotide
gcucagaccaaugccuccu

SEQ ID NO: 1577689 - RNA, 19 nt, Artificial Sequence
  Description of Artificial Sequence: Synthetic oligonucleotide
gcccuaaggacagccucca

SEQ ID NO: 1577690 - RNA, 19 nt, Artificial Sequence
  Description of Artificial Sequence: Synthetic oligonucleotide
cauaggugggcacgaucuu

SEQ ID NO: 1577691 - RNA, 19 nt, Artificial Sequence
  Description of Artificial Sequence: Synthetic oligonucleotide
cugcacaauaaggccugua

SEQ ID NO: 1577692 - RNA, 19 nt, Artificial Sequence
  Description of Artificial Sequence: Synthetic oligonucleotide
caguaagguccaggaagua

SEQ ID NO: 1577693 - RNA, 19 nt, Artificial Sequence
  Description of Artificial Sequence: Synthetic oligonucleotide
uccaugcgcuuuggucuuu

SEQ ID NO: 1577694 - RNA, 19 nt, Artificial Sequence
  Description of Artificial Sequence: Synthetic oligonucleotide
gggucccagaugcggaacu

SEQ ID NO: 1577695 - RNA, 19 nt, Artificial Sequence
  Description of Artificial Sequence: Synthetic oligonucleotide
caccgaucuugagcuucuc

SEQ ID NO: 1577696 - RNA, 19 nt, Artificial Sequence
  Description of Artificial Sequence: Synthetic oligonucleotide
ggauccggcccagucgaaa

SEQ ID NO: 1577697 - RNA, 19 nt, Artificial Sequence
  Description of Artificial Sequence: Synthetic oligonucleotide
cugccuuguccugcaguaa

SEQ ID NO: 1577698 - RNA, 19 nt, Artificial Sequence
  Description of Artificial Sequence: Synthetic oligonucleotide
cugcuucgggcugggcuca

SEQ ID NO: 1577699 - RNA, 19 nt, Artificial Sequence
  Description of Artificial Sequence: Synthetic oligonucleotide
ccuucagccgcccacucau

SEQ ID NO: 1577700 - RNA, 19 nt, Artificial Sequence
  Description of Artificial Sequence: Synthetic oligonucleotide
gccucugacaggaaagguu

SEQ ID NO: 1577701 - RNA, 19 nt, Artificial Sequence
  Description of Artificial Sequence: Synthetic oligonucleotide
cccuaaggacagccuccag

SEQ ID NO: 1577702 - RNA, 19 nt, Artificial Sequence
  Description of Artificial Sequence: Synthetic oligonucleotide
cgaguggccguguuuaggu

SEQ ID NO: 1577703 - RNA, 19 nt, Artificial Sequence
  Description of Artificial Sequence: Synthetic oligonucleotide
ccagcucuacacggucuac

SEQ ID NO: 1577704 - RNA, 19 nt, Artificial Sequence
  Description of Artificial Sequence: Synthetic oligonucleotide
gcuguccaggcugggcgac

SEQ ID NO: 1577705 - RNA, 19 nt, Artificial Sequence
  Description of Artificial Sequence: Synthetic oligonucleotide
gucauucgaguggccgugu

SEQ ID NO: 1577706 - RNA, 19 nt, Artificial Sequence
  Description of Artificial Sequence: Synthetic oligonucleotide
ggccguguuuagguccuuc

SEQ ID NO: 1577707 - RNA, 19 nt, Artificial Sequence
  Description of Artificial Sequence: Synthetic oligonucleotide
cacugggcaagaugacguu

SEQ ID NO: 1577708 - RNA, 19 nt, Artificial Sequence
  Description of Artificial Sequence: Synthetic oligonucleotide
ggcauugcgggcugucauu

SEQ ID NO: 1577709 - RNA, 19 nt, Artificial Sequence
  Description of Artificial Sequence: Synthetic oligonucleotide
ggcugaccagugccucuga

SEQ ID NO: 1577710 - RNA, 19 nt, Artificial Sequence
  Description of Artificial Sequence: Synthetic oligonucleotide
ggguacggauccggcccag

SEQ ID NO: 1577711 - RNA, 19 nt, Artificial Sequence
  Description of Artificial Sequence: Synthetic oligonucleotide
cgaauaagcaaaggccugu

SEQ ID NO: 1577712 - RNA, 19 nt, Artificial Sequence
  Description of Artificial Sequence: Synthetic oligonucleotide
cggucuacuuccaguccca

SEQ ID NO: 1577713 - RNA, 19 nt, Artificial Sequence
  Description of Artificial Sequence: Synthetic oligonucleotide
ccaugcgcuuuggucuuuc

SEQ ID NO: 1577714 - RNA, 19 nt, Artificial Sequence
  Description of Artificial Sequence: Synthetic oligonucleotide
gcucggguccucagaucca

SEQ ID NO: 1577715 - RNA, 19 nt, Artificial Sequence
  Description of Artificial Sequence: Synthetic oligonucleotide
ggcccagucgaaacacgau

SEQ ID NO: 1577716 - RNA, 19 nt, Artificial Sequence
  Description of Artificial Sequence: Synthetic oligonucleotide
ggcgacagcugggcugucu

SEQ ID NO: 1577717 - RNA, 19 nt, Artificial Sequence
  Description of Artificial Sequence: Synthetic oligonucleotide
gcacuuuguuggggaucga

SEQ ID NO: 1577718 - RNA, 19 nt, Artificial Sequence
  Description of Artificial Sequence: Synthetic oligonucleotide
gguacggauccggcccagu

SEQ ID NO: 1577719 - RNA, 19 nt, Artificial Sequence
  Description of Artificial Sequence: Synthetic oligonucleotide
ggucaccgaucuugagcuu

SEQ ID NO: 1577720 - RNA, 19 nt, Artificial Sequence
  Description of Artificial Sequence: Synthetic oligonucleotide
ccacagcuaggucacccuu

SEQ ID NO: 1577721 - RNA, 19 nt, Artificial Sequence
  Description of Artificial Sequence: Synthetic oligonucleotide
ccaccacaucagggaugcc

SEQ ID NO: 1577722 - RNA, 19 nt, Artificial Sequence
  Description of Artificial Sequence: Synthetic oligonucleotide
cgcuuuggucuuucacacu

SEQ ID NO: 1577723 - RNA, 19 nt, Artificial Sequence
  Description of Artificial Sequence: Synthetic oligonucleotide
gggugucgacuggcccuga

SEQ ID NO: 1577724 - RNA, 19 nt, Artificial Sequence
  Description of Artificial Sequence: Synthetic oligonucleotide
ccugcacaauaaggccugu

SEQ ID NO: 1577725 - RNA, 19 nt, Artificial Sequence
  Description of Artificial Sequence: Synthetic oligonucleotide
cggauccggcccagucgaa

SEQ ID NO: 1577726 - RNA, 19 nt, Artificial Sequence
  Description of Artificial Sequence: Synthetic oligonucleotide
gggcgacagcugggcuguc

SEQ ID NO: 1577727 - RNA, 19 nt, Artificial Sequence
  Description of Artificial Sequence: Synthetic oligonucleotide
ccgcaguucccugcacaau

SEQ ID NO: 1577728 - RNA, 19 nt, Artificial Sequence
  Description of Artificial Sequence: Synthetic oligonucleotide
guaaacuugacccaaaugc

SEQ ID NO: 1577729 - RNA, 19 nt, Artificial Sequence
  Description of Artificial Sequence: Synthetic oligonucleotide
aauacaacagugaagaugu

SEQ ID NO: 1577730 - RNA, 19 nt, Artificial Sequence
  Description of Artificial Sequence: Synthetic oligonucleotide
uuagccauuaauacaacag

SEQ ID NO: 1577731 - RNA, 19 nt, Artificial Sequence
  Description of Artificial Sequence: Synthetic oligonucleotide
agauguuacaaccacauca

SEQ ID NO: 1577732 - RNA, 19 nt, Artificial Sequence
  Description of Artificial Sequence: Synthetic oligonucleotide
acagguuagccauuaauac

SEQ ID NO: 1577733 - RNA, 19 nt, Artificial Sequence
  Description of Artificial Sequence: Synthetic oligonucleotide
aagaaguagacagguagcc

SEQ ID NO: 1577734 - RNA, 19 nt, Artificial Sequence
  Description of Artificial Sequence: Synthetic oligonucleotide
uuaagaugauggcaaaucc

SEQ ID NO: 1577735 - RNA, 19 nt, Artificial Sequence
  Description of Artificial Sequence: Synthetic oligonucleotide
acuccuaggugauaguucc

SEQ ID NO: 1577736 - RNA, 19 nt, Artificial Sequence
  Description of Artificial Sequence: Synthetic oligonucleotide
acaggaaugauccaggaca

SEQ ID NO: 1577737 - RNA, 19 nt, Artificial Sequence
  Description of Artificial Sequence: Synthetic oligonucleotide
uucgucagcacauauacca

SEQ ID NO: 1577738 - RNA, 19 nt, Artificial Sequence
  Description of Artificial Sequence: Synthetic oligonucleotide
aaagaaguagacagguagc

SEQ ID NO: 1577739 - RNA, 19 nt, Artificial Sequence
  Description of Artificial Sequence: Synthetic oligonucleotide
acgaagacaggaaugaucc

SEQ ID NO: 1577740 - RNA, 19 nt, Artificial Sequence
  Description of Artificial Sequence: Synthetic oligonucleotide
acggcaaugaggaagaggc

SEQ ID NO: 1577741 - RNA, 19 nt, Artificial Sequence
  Description of Artificial Sequence: Synthetic oligonucleotide
uguuacaaccacaucacca

SEQ ID NO: 1577742 - RNA, 19 nt, Artificial Sequence
  Description of Artificial Sequence: Synthetic oligonucleotide
ucagacaucaacaucuggu

SEQ ID NO: 1577743 - RNA, 19 nt, Artificial Sequence
  Description of Artificial Sequence: Synthetic oligonucleotide
guucccaaaauccacagcc

SEQ ID NO: 1577744 - RNA, 19 nt, Artificial Sequence
  Description of Artificial Sequence: Synthetic oligonucleotide
gauucgucagcacauauac

SEQ ID NO: 1577745 - RNA, 19 nt, Artificial Sequence
  Description of Artificial Sequence: Synthetic oligonucleotide
ucuuccaaaggucaguugu

SEQ ID NO: 1577746 - RNA, 19 nt, Artificial Sequence
  Description of Artificial Sequence: Synthetic oligonucleotide
ugugcuacugaacaacagc

SEQ ID NO: 1577747 - RNA, 19 nt, Artificial Sequence
  Description of Artificial Sequence: Synthetic oligonucleotide
ucaguaguucuuuugaccu

SEQ ID NO: 1577748 - RNA, 19 nt, Artificial Sequence
  Description of Artificial Sequence: Synthetic oligonucleotide
auaugaaugaggcuggggu

SEQ ID NO: 1577749 - RNA, 19 nt, Artificial Sequence
  Description of Artificial Sequence: Synthetic oligonucleotide
aguucuuuugaccugguga

SEQ ID NO: 1577750 - RNA, 19 nt, Artificial Sequence
  Description of Artificial Sequence: Synthetic oligonucleotide
aaauccaaugccacacucc

SEQ ID NO: 1577751 - RNA, 19 nt, Artificial Sequence
  Description of Artificial Sequence: Synthetic oligonucleotide
aguagauggacccaaugug

SEQ ID NO: 1577752 - RNA, 19 nt, Artificial Sequence
  Description of Artificial Sequence: Synthetic oligonucleotide
gaugucauuggagaaggcg

SEQ ID NO: 1577753 - RNA, 19 nt, Artificial Sequence
  Description of Artificial Sequence: Synthetic oligonucleotide
gaucccacaaagaacagcc

SEQ ID NO: 1577754 - RNA, 19 nt, Artificial Sequence
  Description of Artificial Sequence: Synthetic oligonucleotide
agaaagaccaggccucagc

SEQ ID NO: 1577755 - RNA, 19 nt, Artificial Sequence
  Description of Artificial Sequence: Synthetic oligonucleotide
uaagaugauggcaaaucca

SEQ ID NO: 1577756 - RNA, 19 nt, Artificial Sequence
  Description of Artificial Sequence: Synthetic oligonucleotide
aaugauccaggacaugacu

SEQ ID NO: 1577757 - RNA, 19 nt, Artificial Sequence
  Description of Artificial Sequence: Synthetic oligonucleotide
ugccucauaugaaugaggc

SEQ ID NO: 1577758 - RNA, 19 nt, Artificial Sequence
  Description of Artificial Sequence: Synthetic oligonucleotide
uguggcaguccccugaaag

SEQ ID NO: 1577759 - RNA, 19 nt, Artificial Sequence
  Description of Artificial Sequence: Synthetic oligonucleotide
ucaguugucuugaaguaga

SEQ ID NO: 1577760 - RNA, 19 nt, Artificial Sequence
  Description of Artificial Sequence: Synthetic oligonucleotide
cagugaagauguuacaacc

SEQ ID NO: 1577761 - RNA, 19 nt, Artificial Sequence
  Description of Artificial Sequence: Synthetic oligonucleotide
auaugcgucauccaucugu

SEQ ID NO: 1577762 - RNA, 19 nt, Artificial Sequence
  Description of Artificial Sequence: Synthetic oligonucleotide
gaaguagacagguagccca

SEQ ID NO: 1577763 - RNA, 19 nt, Artificial Sequence
  Description of Artificial Sequence: Synthetic oligonucleotide
agucagaaagaccaggccu

SEQ ID NO: 1577764 - RNA, 19 nt, Artificial Sequence
  Description of Artificial Sequence: Synthetic oligonucleotide
uugaagcggagccacauca

SEQ ID NO: 1577765 - RNA, 19 nt, Artificial Sequence
  Description of Artificial Sequence: Synthetic oligonucleotide
cucaguaguucuuuugacc

SEQ ID NO: 1577766 - RNA, 19 nt, Artificial Sequence
  Description of Artificial Sequence: Synthetic oligonucleotide
gauaacaucugagucucag

SEQ ID NO: 1577767 - RNA, 19 nt, Artificial Sequence
  Description of Artificial Sequence: Synthetic oligonucleotide
aagauguuacaaccacauc

SEQ ID NO: 1577768 - RNA, 19 nt, Artificial Sequence
  Description of Artificial Sequence: Synthetic oligonucleotide
uagccauuaauacaacagu

SEQ ID NO: 1577769 - RNA, 19 nt, Artificial Sequence
  Description of Artificial Sequence: Synthetic oligonucleotide
ugguugguagacagggucg

SEQ ID NO: 1577770 - RNA, 19 nt, Artificial Sequence
  Description of Artificial Sequence: Synthetic oligonucleotide
acaucugguugguagacag

SEQ ID NO: 1577771 - RNA, 19 nt, Artificial Sequence
  Description of Artificial Sequence: Synthetic oligonucleotide
gacaagcccacgaagacag

SEQ ID NO: 1577772 - RNA, 19 nt, Artificial Sequence
  Description of Artificial Sequence: Synthetic oligonucleotide
cucauaugaaugaggcugg

SEQ ID NO: 1577773 - RNA, 19 nt, Artificial Sequence
  Description of Artificial Sequence: Synthetic oligonucleotide
ugaagauguuacaaccaca

SEQ ID NO: 1577774 - RNA, 19 nt, Artificial Sequence
  Description of Artificial Sequence: Synthetic oligonucleotide
gauguuacaaccacaucac

SEQ ID NO: 1577775 - RNA, 19 nt, Artificial Sequence
  Description of Artificial Sequence: Synthetic oligonucleotide
agcagcgucacauuuccag

SEQ ID NO: 1577776 - RNA, 19 nt, Artificial Sequence
  Description of Artificial Sequence: Synthetic oligonucleotide
ugacccaaaugcaagcuac

SEQ ID NO: 1577777 - RNA, 19 nt, Artificial Sequence
  Description of Artificial Sequence: Synthetic oligonucleotide
acagccuugggugaagagc

SEQ ID NO: 1577778 - RNA, 19 nt, Artificial Sequence
  Description of Artificial Sequence: Synthetic oligonucleotide
guagauggacccaaugugg

SEQ ID NO: 1577779 - RNA, 19 nt, Artificial Sequence
  Description of Artificial Sequence: Synthetic oligonucleotide
aagcggagccacaucaugc

SEQ ID NO: 1577780 - RNA, 19 nt, Artificial Sequence
  Description of Artificial Sequence: Synthetic oligonucleotide
ugauggcaaauccaaugcc

SEQ ID NO: 1577781 - RNA, 19 nt, Artificial Sequence
  Description of Artificial Sequence: Synthetic oligonucleotide
ucagggucaugacacaugu

SEQ ID NO: 1577782 - RNA, 19 nt, Artificial Sequence
  Description of Artificial Sequence: Synthetic oligonucleotide
caaagaacagccuggagga

SEQ ID NO: 1577783 - RNA, 19 nt, Artificial Sequence
  Description of Artificial Sequence: Synthetic oligonucleotide
uguggcacuaaggauagca

SEQ ID NO: 1577784 - RNA, 19 nt, Artificial Sequence
  Description of Artificial Sequence: Synthetic oligonucleotide
ugagggaccaccugcauaa

SEQ ID NO: 1577785 - RNA, 19 nt, Artificial Sequence
  Description of Artificial Sequence: Synthetic oligonucleotide
aaggucaguugucuugaag

SEQ ID NO: 1577786 - RNA, 19 nt, Artificial Sequence
  Description of Artificial Sequence: Synthetic oligonucleotide
auguuacaaccacaucacc

SEQ ID NO: 1577787 - RNA, 19 nt, Artificial Sequence
  Description of Artificial Sequence: Synthetic oligonucleotide
aucugguugguagacaggg

SEQ ID NO: 1577788 - RNA, 19 nt, Artificial Sequence
  Description of Artificial Sequence: Synthetic oligonucleotide
agaaguagacagguagccc

SEQ ID NO: 1577789 - RNA, 19 nt, Artificial Sequence
  Description of Artificial Sequence: Synthetic oligonucleotide
uugucuugaaguagaugcc

SEQ ID NO: 1577790 - RNA, 19 nt, Artificial Sequence
  Description of Artificial Sequence: Synthetic oligonucleotide
acaucugagucucaguagu

SEQ ID NO: 1577791 - RNA, 19 nt, Artificial Sequence
  Description of Artificial Sequence: Synthetic oligonucleotide
ugggguuccaucucuagga

SEQ ID NO: 1577792 - RNA, 19 nt, Artificial Sequence
  Description of Artificial Sequence: Synthetic oligonucleotide
agcggagccacaucaugcc

SEQ ID NO: 1577793 - RNA, 19 nt, Artificial Sequence
  Description of Artificial Sequence: Synthetic oligonucleotide
ugaacaccagugaugggca

SEQ ID NO: 1577794 - RNA, 19 nt, Artificial Sequence
  Description of Artificial Sequence: Synthetic oligonucleotide
uggucaguagagcacuugc

SEQ ID NO: 1577795 - RNA, 19 nt, Artificial Sequence
  Description of Artificial Sequence: Synthetic oligonucleotide
ugcagaagccacuugggcu

SEQ ID NO: 1577796 - RNA, 19 nt, Artificial Sequence
  Description of Artificial Sequence: Synthetic oligonucleotide
caaguucacaguagaacag

SEQ ID NO: 1577797 - RNA, 19 nt, Artificial Sequence
  Description of Artificial Sequence: Synthetic oligonucleotide
uccaaguucacaguagaac

SEQ ID NO: 1577798 - RNA, 19 nt, Artificial Sequence
  Description of Artificial Sequence: Synthetic oligonucleotide
acagguagcccacuuaaga

SEQ ID NO: 1577799 - RNA, 19 nt, Artificial Sequence
  Description of Artificial Sequence: Synthetic oligonucleotide
aggacaagcccacgaagac

SEQ ID NO: 1577800 - RNA, 19 nt, Artificial Sequence
  Description of Artificial Sequence: Synthetic oligonucleotide
uaaggauagcagcuaaguc

SEQ ID NO: 1577801 - RNA, 19 nt, Artificial Sequence
  Description of Artificial Sequence: Synthetic oligonucleotide
augccaaugauagccaggg

SEQ ID NO: 1577802 - RNA, 19 nt, Artificial Sequence
  Description of Artificial Sequence: Synthetic oligonucleotide
aggauagcagcuaagucuc

SEQ ID NO: 1577803 - RNA, 19 nt, Artificial Sequence
  Description of Artificial Sequence: Synthetic oligonucleotide
gaugggacgcuccaguuca

SEQ ID NO: 1577804 - RNA, 19 nt, Artificial Sequence
  Description of Artificial Sequence: Synthetic oligonucleotide
aacagguuagccauuaaua

SEQ ID NO: 1577805 - RNA, 19 nt, Artificial Sequence
  Description of Artificial Sequence: Synthetic oligonucleotide
agaauaugcgucauccauc

SEQ ID NO: 1577806 - RNA, 19 nt, Artificial Sequence
  Description of Artificial Sequence: Synthetic oligonucleotide
agggucgugaaguaggcca

SEQ ID NO: 1577807 - RNA, 19 nt, Artificial Sequence
  Description of Artificial Sequence: Synthetic oligonucleotide
gaaggcguacaucaggguc

SEQ ID NO: 1577808 - RNA, 19 nt, Artificial Sequence
  Description of Artificial Sequence: Synthetic oligonucleotide
cacaguagaacagauaaca

SEQ ID NO: 1577809 - RNA, 19 nt, Artificial Sequence
  Description of Artificial Sequence: Synthetic oligonucleotide
caugacuccuaggugauag

SEQ ID NO: 1577810 - RNA, 19 nt, Artificial Sequence
  Description of Artificial Sequence: Synthetic oligonucleotide
gugaagauguuacaaccac

SEQ ID NO: 1577811 - RNA, 19 nt, Artificial Sequence
  Description of Artificial Sequence: Synthetic oligonucleotide
agacaucaacaucugguug

SEQ ID NO: 1577812 - RNA, 19 nt, Artificial Sequence
  Description of Artificial Sequence: Synthetic oligonucleotide
uagauggacccaauguggu

SEQ ID NO: 1577813 - RNA, 19 nt, Artificial Sequence
  Description of Artificial Sequence: Synthetic oligonucleotide
cuugguaguguaaacuuga

SEQ ID NO: 1577814 - RNA, 19 nt, Artificial Sequence
  Description of Artificial Sequence: Synthetic oligonucleotide
uggcacaguagauggaccc

SEQ ID NO: 1577815 - RNA, 19 nt, Artificial Sequence
  Description of Artificial Sequence: Synthetic oligonucleotide
agguagcccacuuaagaug

SEQ ID NO: 1577816 - RNA, 19 nt, Artificial Sequence
  Description of Artificial Sequence: Synthetic oligonucleotide
gccaaugauagccagggcc

SEQ ID NO: 1577817 - RNA, 19 nt, Artificial Sequence
  Description of Artificial Sequence: Synthetic oligonucleotide
auaaucaucuugguagugu

SEQ ID NO: 1577818 - RNA, 19 nt, Artificial Sequence
  Description of Artificial Sequence: Synthetic oligonucleotide
cuggaggaugugaacaaag

SEQ ID NO: 1577819 - RNA, 19 nt, Artificial Sequence
  Description of Artificial Sequence: Synthetic oligonucleotide
agaaaggccagauguggca

SEQ ID NO: 1577820 - RNA, 19 nt, Artificial Sequence
  Description of Artificial Sequence: Synthetic oligonucleotide
ugacacaugugaacaccag

SEQ ID NO: 1577821 - RNA, 19 nt, Artificial Sequence
  Description of Artificial Sequence: Synthetic oligonucleotide
acaaaacagcccaagcuag

SEQ ID NO: 1577822 - RNA, 19 nt, Artificial Sequence
  Description of Artificial Sequence: Synthetic oligonucleotide
gcuagaauaugcgucaucc

SEQ ID NO: 1577823 - RNA, 19 nt, Artificial Sequence
  Description of Artificial Sequence: Synthetic oligonucleotide
agugaugugguccccuuga

SEQ ID NO: 1577824 - RNA, 19 nt, Artificial Sequence
  Description of Artificial Sequence: Synthetic oligonucleotide
aaguucacaguagaacaga

SEQ ID NO: 1577825 - RNA, 19 nt, Artificial Sequence
  Description of Artificial Sequence: Synthetic oligonucleotide
ggugauaguucccaaaauc

SEQ ID NO: 1577826 - RNA, 19 nt, Artificial Sequence
  Description of Artificial Sequence: Synthetic oligonucleotide
aguccaaguucacaguaga

SEQ ID NO: 1577827 - RNA, 19 nt, Artificial Sequence
  Description of Artificial Sequence: Synthetic oligonucleotide
agccacaucaugccaauga

SEQ ID NO: 1577828 - RNA, 19 nt, Artificial Sequence
  Description of Artificial Sequence: Synthetic oligonucleotide
gauggcacaguagauggac

SEQ ID NO: 1577829 - RNA, 19 nt, Artificial Sequence
  Description of Artificial Sequence: Synthetic oligonucleotide
caagcuagaauaugcguca

SEQ ID NO: 1577830 - RNA, 19 nt, Artificial Sequence
  Description of Artificial Sequence: Synthetic oligonucleotide
uaugcgucauccaucuguc

SEQ ID NO: 1577831 - RNA, 19 nt, Artificial Sequence
  Description of Artificial Sequence: Synthetic oligonucleotide
cacacugugcuacugaaca

SEQ ID NO: 1577832 - RNA, 19 nt, Artificial Sequence
  Description of Artificial Sequence: Synthetic oligonucleotide
uaggaucccagaaaacaaa

SEQ ID NO: 1577833 - RNA, 19 nt, Artificial Sequence
  Description of Artificial Sequence: Synthetic oligonucleotide
agggaccaccugcauaagc

SEQ ID NO: 1577834 - RNA, 19 nt, Artificial Sequence
  Description of Artificial Sequence: Synthetic oligonucleotide
cuacugaacaacagccuug

SEQ ID NO: 1577835 - RNA, 19 nt, Artificial Sequence
  Description of Artificial Sequence: Synthetic oligonucleotide
auggcaaauccaaugccac

SEQ ID NO: 1577836 - RNA, 19 nt, Artificial Sequence
  Description of Artificial Sequence: Synthetic oligonucleotide
gaaccauugacagagccaa

SEQ ID NO: 1577837 - RNA, 19 nt, Artificial Sequence
  Description of Artificial Sequence: Synthetic oligonucleotide
augauccaggacaugacuc

SEQ ID NO: 1577838 - RNA, 19 nt, Artificial Sequence
  Description of Artificial Sequence: Synthetic oligonucleotide
gguuccaucucuaggaucc

SEQ ID NO: 1577839 - RNA, 19 nt, Artificial Sequence
  Description of Artificial Sequence: Synthetic oligonucleotide
caaugugacaaugggcagg

SEQ ID NO: 1577840 - RNA, 19 nt, Artificial Sequence
  Description of Artificial Sequence: Synthetic oligonucleotide
uaaucaucuugguagugua

SEQ ID NO: 1577841 - RNA, 19 nt, Artificial Sequence
  Description of Artificial Sequence: Synthetic oligonucleotide
cugcauaagcuucuggcac

SEQ ID NO: 1577842 - RNA, 19 nt, Artificial Sequence
  Description of Artificial Sequence: Synthetic oligonucleotide
aaguagacagguagcccac

SEQ ID NO: 1577843 - RNA, 19 nt, Artificial Sequence
  Description of Artificial Sequence: Synthetic oligonucleotide
agccauuaauacaacagug

SEQ ID NO: 1577844 - RNA, 19 nt, Artificial Sequence
  Description of Artificial Sequence: Synthetic oligonucleotide
gugcuacugaacaacagcc

SEQ ID NO: 1577845 - RNA, 19 nt, Artificial Sequence
  Description of Artificial Sequence: Synthetic oligonucleotide
ucaccaacucagauggcac

SEQ ID NO: 1577846 - RNA, 19 nt, Artificial Sequence
  Description of Artificial Sequence: Synthetic oligonucleotide
ucucaguaguucuuuugac

SEQ ID NO: 1577847 - RNA, 19 nt, Artificial Sequence
  Description of Artificial Sequence: Synthetic oligonucleotide
acaaagaaccauugacaga

SEQ ID NO: 1577848 - RNA, 19 nt, Artificial Sequence
  Description of Artificial Sequence: Synthetic oligonucleotide
ugcuacugaacaacagccu

SEQ ID NO: 1577849 - RNA, 19 nt, Artificial Sequence
  Description of Artificial Sequence: Synthetic oligonucleotide
acaugugaacaccagugau

SEQ ID NO: 1577850 - RNA, 19 nt, Artificial Sequence
  Description of Artificial Sequence: Synthetic oligonucleotide
ugaaguaggccagauucgu

SEQ ID NO: 1577851 - RNA, 19 nt, Artificial Sequence
  Description of Artificial Sequence: Synthetic oligonucleotide
agguuagccauuaauacaa

SEQ ID NO: 1577852 - RNA, 19 nt, Artificial Sequence
  Description of Artificial Sequence: Synthetic oligonucleotide
acaguagauggacccaaug

SEQ ID NO: 1577853 - RNA, 19 nt, Artificial Sequence
  Description of Artificial Sequence: Synthetic oligonucleotide
ccucauaugaaugaggcug

SEQ ID NO: 1577854 - RNA, 19 nt, Artificial Sequence
  Description of Artificial Sequence: Synthetic oligonucleotide
aaggcguacaucaggguca

SEQ ID NO: 1577855 - RNA, 19 nt, Artificial Sequence
  Description of Artificial Sequence: Synthetic oligonucleotide
uucccaaaauccacagcca

SEQ ID NO: 1577856 - RNA, 19 nt, Artificial Sequence
  Description of Artificial Sequence: Synthetic oligonucleotide
gauggacccaaugugguca

SEQ ID NO: 1577857 - RNA, 19 nt, Artificial Sequence
  Description of Artificial Sequence: Synthetic oligonucleotide
agauggacccaaugugguc

SEQ ID NO: 1577858 - RNA, 19 nt, Artificial Sequence
  Description of Artificial Sequence: Synthetic oligonucleotide
ggagaaggcguacaucagg

SEQ ID NO: 1577859 - RNA, 19 nt, Artificial Sequence
  Description of Artificial Sequence: Synthetic oligonucleotide
aaaacagcccaagcuagaa

SEQ ID NO: 1577860 - RNA, 19 nt, Artificial Sequence
  Description of Artificial Sequence: Synthetic oligonucleotide
gaagcggagccacaucaug

SEQ ID NO: 1577861 - RNA, 19 nt, Artificial Sequence
  Description of Artificial Sequence: Synthetic oligonucleotide
guuagccauuaauacaaca

SEQ ID NO: 1577862 - RNA, 19 nt, Artificial Sequence
  Description of Artificial Sequence: Synthetic oligonucleotide
cagauaacaucugagucuc

SEQ ID NO: 1577863 - RNA, 19 nt, Artificial Sequence
  Description of Artificial Sequence: Synthetic oligonucleotide
aagcaggacaagcccacga

SEQ ID NO: 1577864 - RNA, 19 nt, Artificial Sequence
  Description of Artificial Sequence: Synthetic oligonucleotide
uuacaaccacaucaccaac

SEQ ID NO: 1577865 - RNA, 19 nt, Artificial Sequence
  Description of Artificial Sequence: Synthetic oligonucleotide
caucugucaguccaaguuc

SEQ ID NO: 1577866 - RNA, 19 nt, Artificial Sequence
  Description of Artificial Sequence: Synthetic oligonucleotide
agacagguagcccacuuaa

SEQ ID NO: 1577867 - RNA, 19 nt, Artificial Sequence
  Description of Artificial Sequence: Synthetic oligonucleotide
uuugaccuggugacaguga

SEQ ID NO: 1577868 - RNA, 19 nt, Artificial Sequence
  Description of Artificial Sequence: Synthetic oligonucleotide
aggacaugacuccuaggug

SEQ ID NO: 1577869 - RNA, 19 nt, Artificial Sequence
  Description of Artificial Sequence: Synthetic oligonucleotide
aggggcagguuccuguagg

SEQ ID NO: 1577870 - RNA, 19 nt, Artificial Sequence
  Description of Artificial Sequence: Synthetic oligonucleotide
caaagcaggacaagcccac

SEQ ID NO: 1577871 - RNA, 19 nt, Artificial Sequence
  Description of Artificial Sequence: Synthetic oligonucleotide
acagcaccgucacagagaa

SEQ ID NO: 1577872 - RNA, 19 nt, Artificial Sequence
  Description of Artificial Sequence: Synthetic oligonucleotide
uagcagcuaagucuccuga

SEQ ID NO: 1577873 - RNA, 19 nt, Artificial Sequence
  Description of Artificial Sequence: Synthetic oligonucleotide
gacaggaaugauccaggac

SEQ ID NO: 1577874 - RNA, 19 nt, Artificial Sequence
  Description of Artificial Sequence: Synthetic oligonucleotide
gucucaguaguucuuuuga

SEQ ID NO: 1577875 - RNA, 19 nt, Artificial Sequence
  Description of Artificial Sequence: Synthetic oligonucleotide
agcuagaauaugcgucauc

SEQ ID NO: 1577876 - RNA, 19 nt, Artificial Sequence
  Description of Artificial Sequence: Synthetic oligonucleotide
cuggcuacggagcuccugc

SEQ ID NO: 1577877 - RNA, 19 nt, Artificial Sequence
  Description of Artificial Sequence: Synthetic oligonucleotide
augucauuggagaaggcgu

SEQ ID NO: 1577878 - RNA, 19 nt, Artificial Sequence
  Description of Artificial Sequence: Synthetic oligonucleotide
aaacagcccaagcuagaau

SEQ ID NO: 1577879 - RNA, 19 nt, Artificial Sequence
  Description of Artificial Sequence: Synthetic oligonucleotide
uugaccuggugacagugau

SEQ ID NO: 1577880 - RNA, 19 nt, Artificial Sequence
  Description of Artificial Sequence: Synthetic oligonucleotide
agugaagauguuacaacca

SEQ ID NO: 1577881 - RNA, 19 nt, Artificial Sequence
  Description of Artificial Sequence: Synthetic oligonucleotide
ggacaugacuccuagguga

SEQ ID NO: 1577882 - RNA, 19 nt, Artificial Sequence
  Description of Artificial Sequence: Synthetic oligonucleotide
ugccacucacucucugugg

SEQ ID NO: 1577883 - RNA, 19 nt, Artificial Sequence
  Description of Artificial Sequence: Synthetic oligonucleotide
ucauaugaaugaggcuggg

SEQ ID NO: 1577884 - RNA, 19 nt, Artificial Sequence
  Description of Artificial Sequence: Synthetic oligonucleotide
cauaugaaugaggcugggg

SEQ ID NO: 1577885 - RNA, 19 nt, Artificial Sequence
  Description of Artificial Sequence: Synthetic oligonucleotide
gucaguugucuugaaguag

SEQ ID NO: 1577886 - RNA, 19 nt, Artificial Sequence
  Description of Artificial Sequence: Synthetic oligonucleotide
cagguuagccauuaauaca

SEQ ID NO: 1577887 - RNA, 19 nt, Artificial Sequence
  Description of Artificial Sequence: Synthetic oligonucleotide
agccaauugaagaaacuga

SEQ ID NO: 1577888 - RNA, 19 nt, Artificial Sequence
  Description of Artificial Sequence: Synthetic oligonucleotide
cugggguuccaucucuagg

SEQ ID NO: 1577889 - RNA, 19 nt, Artificial Sequence
  Description of Artificial Sequence: Synthetic oligonucleotide
agauguggcaguccccuga

SEQ ID NO: 1577890 - RNA, 19 nt, Artificial Sequence
  Description of Artificial Sequence: Synthetic oligonucleotide
gagaaaggccagauguggc

SEQ ID NO: 1577891 - RNA, 19 nt, Artificial Sequence
  Description of Artificial Sequence: Synthetic oligonucleotide
gaagauguuacaaccacau

SEQ ID NO: 1577892 - RNA, 19 nt, Artificial Sequence
  Description of Artificial Sequence: Synthetic oligonucleotide
ugugaacaccagugauggg

SEQ ID NO: 1577893 - RNA, 19 nt, Artificial Sequence
  Description of Artificial Sequence: Synthetic oligonucleotide
ccaagcuagaauaugcguc

SEQ ID NO: 1577894 - RNA, 19 nt, Artificial Sequence
  Description of Artificial Sequence: Synthetic oligonucleotide
uaagucuccugagggacca

SEQ ID NO: 1577895 - RNA, 19 nt, Artificial Sequence
  Description of Artificial Sequence: Synthetic oligonucleotide
agucuccugagggaccacc

SEQ ID NO: 1577896 - RNA, 19 nt, Artificial Sequence
  Description of Artificial Sequence: Synthetic oligonucleotide
uugacccaaaugcaagcua

SEQ ID NO: 1577897 - RNA, 19 nt, Artificial Sequence
  Description of Artificial Sequence: Synthetic oligonucleotide
cuccugagggaccaccugc

SEQ ID NO: 1577898 - RNA, 19 nt, Artificial Sequence
  Description of Artificial Sequence: Synthetic oligonucleotide
gaaugauccaggacaugac

SEQ ID NO: 1577899 - RNA, 19 nt, Artificial Sequence
  Description of Artificial Sequence: Synthetic oligonucleotide
cugugcuacugaacaacag

SEQ ID NO: 1577900 - RNA, 19 nt, Artificial Sequence
  Description of Artificial Sequence: Synthetic oligonucleotide
cuucuugaagcggagccac

SEQ ID NO: 1577901 - RNA, 19 nt, Artificial Sequence
  Description of Artificial Sequence: Synthetic oligonucleotide
cucacuggcgcgugugggg

SEQ ID NO: 1577902 - RNA, 19 nt, Artificial Sequence
  Description of Artificial Sequence: Synthetic oligonucleotide
agcuaagucuccugaggga

SEQ ID NO: 1577903 - RNA, 19 nt, Artificial Sequence
  Description of Artificial Sequence: Synthetic oligonucleotide
ccaaguucacaguagaaca

SEQ ID NO: 1577904 - RNA, 19 nt, Artificial Sequence
  Description of Artificial Sequence: Synthetic oligonucleotide
uccugagggaccaccugca

SEQ ID NO: 1577905 - RNA, 19 nt, Artificial Sequence
  Description of Artificial Sequence: Synthetic oligonucleotide
auggcacaguagauggacc

SEQ ID NO: 1577906 - RNA, 19 nt, Artificial Sequence
  Description of Artificial Sequence: Synthetic oligonucleotide
ggaaugauccaggacauga

SEQ ID NO: 1577907 - RNA, 19 nt, Artificial Sequence
  Description of Artificial Sequence: Synthetic oligonucleotide
acuaaggauagcagcuaag

SEQ ID NO: 1577908 - RNA, 19 nt, Artificial Sequence
  Description of Artificial Sequence: Synthetic oligonucleotide
ugcuacccuguuuuguuaa

SEQ ID NO: 1577909 - RNA, 19 nt, Artificial Sequence
  Description of Artificial Sequence: Synthetic oligonucleotide
agaaccauugacagagcca

SEQ ID NO: 1577910 - RNA, 19 nt, Artificial Sequence
  Description of Artificial Sequence: Synthetic oligonucleotide
ugggugucuuccagaagga

SEQ ID NO: 1577911 - RNA, 19 nt, Artificial Sequence
  Description of Artificial Sequence: Synthetic oligonucleotide
gacacggcaaugaggaaga

SEQ ID NO: 1577912 - RNA, 19 nt, Artificial Sequence
  Description of Artificial Sequence: Synthetic oligonucleotide
ggucaugacacaugugaac

SEQ ID NO: 1577913 - RNA, 19 nt, Artificial Sequence
  Description of Artificial Sequence: Synthetic oligonucleotide
aacaucugguugguagaca

SEQ ID NO: 1577914 - RNA, 19 nt, Artificial Sequence
  Description of Artificial Sequence: Synthetic oligonucleotide
cacugugcuacugaacaac

SEQ ID NO: 1577915 - RNA, 19 nt, Artificial Sequence
  Description of Artificial Sequence: Synthetic oligonucleotide
acugaacaacagccuuggg

SEQ ID NO: 1577916 - RNA, 19 nt, Artificial Sequence
  Description of Artificial Sequence: Synthetic oligonucleotide
gacagagccaaagcaggac

SEQ ID NO: 1577917 - RNA, 19 nt, Artificial Sequence
  Description of Artificial Sequence: Synthetic oligonucleotide
cugaacaacagccuugggu

SEQ ID NO: 1577918 - RNA, 19 nt, Artificial Sequence
  Description of Artificial Sequence: Synthetic oligonucleotide
uagacagguagcccacuua

SEQ ID NO: 1577919 - RNA, 19 nt, Artificial Sequence
  Description of Artificial Sequence: Synthetic oligonucleotide
ucuugaagcggagccacau

SEQ ID NO: 1577920 - RNA, 19 nt, Artificial Sequence
  Description of Artificial Sequence: Synthetic oligonucleotide
cucuaggaucccagaaaac

SEQ ID NO: 1577921 - RNA, 19 nt, Artificial Sequence
  Description of Artificial Sequence: Synthetic oligonucleotide
ccaaaggucaguugucuug

SEQ ID NO: 1577922 - RNA, 19 nt, Artificial Sequence
  Description of Artificial Sequence: Synthetic oligonucleotide
cucagcucacagcauggug

SEQ ID NO: 1577923 - RNA, 19 nt, Artificial Sequence
  Description of Artificial Sequence: Synthetic oligonucleotide
agaacagccuggaggaugu

SEQ ID NO: 1577924 - RNA, 19 nt, Artificial Sequence
  Description of Artificial Sequence: Synthetic oligonucleotide
guagacagggucgugaagu

SEQ ID NO: 1577925 - RNA, 19 nt, Artificial Sequence
  Description of Artificial Sequence: Synthetic oligonucleotide
caguaguucuuuugaccug

SEQ ID NO: 1577926 - RNA, 19 nt, Artificial Sequence
  Description of Artificial Sequence: Synthetic oligonucleotide
cacggcaaugaggaagagg

SEQ ID NO: 1577927 - RNA, 19 nt, Artificial Sequence
  Description of Artificial Sequence: Synthetic oligonucleotide
auggacccaauguggucag

SEQ ID NO: 1577928 - RNA, 19 nt, Artificial Sequence
  Description of Artificial Sequence: Synthetic oligonucleotide
gacacaugugaacaccagu

SEQ ID NO: 1577929 - RNA, 19 nt, Artificial Sequence
  Description of Artificial Sequence: Synthetic oligonucleotide
caggacaugacuccuaggu

SEQ ID NO: 1577930 - RNA, 19 nt, Artificial Sequence
  Description of Artificial Sequence: Synthetic oligonucleotide
augacacaugugaacacca

SEQ ID NO: 1577931 - RNA, 19 nt, Artificial Sequence
  Description of Artificial Sequence: Synthetic oligonucleotide
ugaagcggagccacaucau

SEQ ID NO: 1577932 - RNA, 19 nt, Artificial Sequence
  Description of Artificial Sequence: Synthetic oligonucleotide
agcaggacaagcccacgaa

SEQ ID NO: 1577933 - RNA, 19 nt, Artificial Sequence
  Description of Artificial Sequence: Synthetic oligonucleotide
agaaggcguacaucagggu

SEQ ID NO: 1577934 - RNA, 19 nt, Artificial Sequence
  Description of Artificial Sequence: Synthetic oligonucleotide
gacagguagcccacuuaag

SEQ ID NO: 1577935 - RNA, 19 nt, Artificial Sequence
  Description of Artificial Sequence: Synthetic oligonucleotide
cacaugugaacaccaguga

SEQ ID NO: 1577936 - RNA, 19 nt, Artificial Sequence
  Description of Artificial Sequence: Synthetic oligonucleotide
uagcccacuuaagaugaug

SEQ ID NO: 1577937 - RNA, 19 nt, Artificial Sequence
  Description of Artificial Sequence: Synthetic oligonucleotide
acaguagaacagauaacau

SEQ ID NO: 1577938 - RNA, 19 nt, Artificial Sequence
  Description of Artificial Sequence: Synthetic oligonucleotide
ccaccagacgccaaagaag

SEQ ID NO: 1577939 - RNA, 19 nt, Artificial Sequence
  Description of Artificial Sequence: Synthetic oligonucleotide
caaaauccacagccacagc

SEQ ID NO: 1577940 - RNA, 19 nt, Artificial Sequence
  Description of Artificial Sequence: Synthetic oligonucleotide
acugugcuacugaacaaca

SEQ ID NO: 1577941 - RNA, 19 nt, Artificial Sequence
  Description of Artificial Sequence: Synthetic oligonucleotide
uucuugaagcggagccaca

SEQ ID NO: 1577942 - RNA, 19 nt, Artificial Sequence
  Description of Artificial Sequence: Synthetic oligonucleotide
cuccuccgugacaaaauuc

SEQ ID NO: 1577943 - RNA, 19 nt, Artificial Sequence
  Description of Artificial Sequence: Synthetic oligonucleotide
ugccaaugauagccagggc

SEQ ID NO: 1577944 - RNA, 19 nt, Artificial Sequence
  Description of Artificial Sequence: Synthetic oligonucleotide
gguagcccacuuaagauga

SEQ ID NO: 1577945 - RNA, 19 nt, Artificial Sequence
  Description of Artificial Sequence: Synthetic oligonucleotide
uccaaaggucaguugucuu

SEQ ID NO: 1577946 - RNA, 19 nt, Artificial Sequence
  Description of Artificial Sequence: Synthetic oligonucleotide
ccuggaucccacaaagaac

SEQ ID NO: 1577947 - RNA, 19 nt, Artificial Sequence
  Description of Artificial Sequence: Synthetic oligonucleotide
ugacuccuaggugauaguu

SEQ ID NO: 1577948 - RNA, 19 nt, Artificial Sequence
  Description of Artificial Sequence: Synthetic oligonucleotide
caccagacgccaaagaagu

SEQ ID NO: 1577949 - RNA, 19 nt, Artificial Sequence
  Description of Artificial Sequence: Synthetic oligonucleotide
agaugccacucacucucug

SEQ ID NO: 1577950 - RNA, 19 nt, Artificial Sequence
  Description of Artificial Sequence: Synthetic oligonucleotide
gugaugugguccccuugag

SEQ ID NO: 1577951 - RNA, 19 nt, Artificial Sequence
  Description of Artificial Sequence: Synthetic oligonucleotide
aguccccugaaagucagaa

SEQ ID NO: 1577952 - RNA, 19 nt, Artificial Sequence
  Description of Artificial Sequence: Synthetic oligonucleotide
uagacagggucgugaagua

SEQ ID NO: 1577953 - RNA, 19 nt, Artificial Sequence
  Description of Artificial Sequence: Synthetic oligonucleotide
agcccacgaagacaggaau

SEQ ID NO: 1577954 - RNA, 19 nt, Artificial Sequence
  Description of Artificial Sequence: Synthetic oligonucleotide
aguucacaguagaacagau

SEQ ID NO: 1577955 - RNA, 19 nt, Artificial Sequence
  Description of Artificial Sequence: Synthetic oligonucleotide
gcuaagucuccugagggac

SEQ ID NO: 1577956 - RNA, 19 nt, Artificial Sequence
  Description of Artificial Sequence: Synthetic oligonucleotide
ccagcagcgucacauuucc

SEQ ID NO: 1577957 - RNA, 19 nt, Artificial Sequence
  Description of Artificial Sequence: Synthetic oligonucleotide
ccaaugauagccagggcca

SEQ ID NO: 1577958 - RNA, 19 nt, Artificial Sequence
  Description of Artificial Sequence: Synthetic oligonucleotide
cuugaagcggagccacauc

SEQ ID NO: 1577959 - RNA, 19 nt, Artificial Sequence
  Description of Artificial Sequence: Synthetic oligonucleotide
gcaggacaagcccacgaag

SEQ ID NO: 1577960 - RNA, 19 nt, Artificial Sequence
  Description of Artificial Sequence: Synthetic oligonucleotide
uugaugggacgcuccaguu

SEQ ID NO: 1577961 - RNA, 19 nt, Artificial Sequence
  Description of Artificial Sequence: Synthetic oligonucleotide
ugggacgcuccaguucagg

SEQ ID NO: 1577962 - RNA, 19 nt, Artificial Sequence
  Description of Artificial Sequence: Synthetic oligonucleotide
acagccaauugaagaaacu

SEQ ID NO: 1577963 - RNA, 19 nt, Artificial Sequence
  Description of Artificial Sequence: Synthetic oligonucleotide
uccuugcuacccuguuuug

SEQ ID NO: 1577964 - RNA, 19 nt, Artificial Sequence
  Description of Artificial Sequence: Synthetic oligonucleotide
cacagcaccgucacagaga

SEQ ID NO: 1577965 - RNA, 19 nt, Artificial Sequence
  Description of Artificial Sequence: Synthetic oligonucleotide
aucaugccaaugauagcca

SEQ ID NO: 1577966 - RNA, 19 nt, Artificial Sequence
  Description of Artificial Sequence: Synthetic oligonucleotide
gguucaccuugaugggacg

SEQ ID NO: 1577967 - RNA, 19 nt, Artificial Sequence
  Description of Artificial Sequence: Synthetic oligonucleotide
auuuccagcugggcugcuc

SEQ ID NO: 1577968 - RNA, 19 nt, Artificial Sequence
  Description of Artificial Sequence: Synthetic oligonucleotide
gauguggcaguccccugaa

SEQ ID NO: 1577969 - RNA, 19 nt, Artificial Sequence
  Description of Artificial Sequence: Synthetic oligonucleotide
ggccagauguggcaguccc

SEQ ID NO: 1577970 - RNA, 19 nt, Artificial Sequence
  Description of Artificial Sequence: Synthetic oligonucleotide
cuccuaggugauaguuccc

SEQ ID NO: 1577971 - RNA, 19 nt, Artificial Sequence
  Description of Artificial Sequence: Synthetic oligonucleotide
gaugccacucacucucugu

SEQ ID NO: 1577972 - RNA, 19 nt, Artificial Sequence
  Description of Artificial Sequence: Synthetic oligonucleotide
gaaggcagguggcccuccc

SEQ ID NO: 1577973 - RNA, 19 nt, Artificial Sequence
  Description of Artificial Sequence: Synthetic oligonucleotide
ccacuuaagaugauggcaa

SEQ ID NO: 1577974 - RNA, 19 nt, Artificial Sequence
  Description of Artificial Sequence: Synthetic oligonucleotide
augacuccuaggugauagu

SEQ ID NO: 1577975 - RNA, 19 nt, Artificial Sequence
  Description of Artificial Sequence: Synthetic oligonucleotide
gcgucacauuuccagcugg

SEQ ID NO: 1577976 - RNA, 19 nt, Artificial Sequence
  Description of Artificial Sequence: Synthetic oligonucleotide
gcguacaucagggucauga

SEQ ID NO: 1577977 - RNA, 19 nt, Artificial Sequence
  Description of Artificial Sequence: Synthetic oligonucleotide
cagccuugggugaagagcu

SEQ ID NO: 1577978 - RNA, 19 nt, Artificial Sequence
  Description of Artificial Sequence: Synthetic oligonucleotide
aagcuagaauaugcgucau

SEQ ID NO: 1577979 - RNA, 19 nt, Artificial Sequence
  Description of Artificial Sequence: Synthetic oligonucleotide
ucgugaaguaggccagauu

SEQ ID NO: 1577980 - RNA, 19 nt, Artificial Sequence
  Description of Artificial Sequence: Synthetic oligonucleotide
ucuggcuacggagcuccug

SEQ ID NO: 1577981 - RNA, 19 nt, Artificial Sequence
  Description of Artificial Sequence: Synthetic oligonucleotide
aagcccacgaagacaggaa

SEQ ID NO: 1577982 - RNA, 19 nt, Artificial Sequence
  Description of Artificial Sequence: Synthetic oligonucleotide
ccaaugugacaaugggcag

SEQ ID NO: 1577983 - RNA, 19 nt, Artificial Sequence
  Description of Artificial Sequence: Synthetic oligonucleotide
agauucgucagcacauaua

SEQ ID NO: 1577984 - RNA, 19 nt, Artificial Sequence
  Description of Artificial Sequence: Synthetic oligonucleotide
ggaucccacaaagaacagc

SEQ ID NO: 1577985 - RNA, 19 nt, Artificial Sequence
  Description of Artificial Sequence: Synthetic oligonucleotide
cacuaaggauagcagcuaa

SEQ ID NO: 1577986 - RNA, 19 nt, Artificial Sequence
  Description of Artificial Sequence: Synthetic oligonucleotide
gccaauugaagaaacugaa

SEQ ID NO: 1577987 - RNA, 19 nt, Artificial Sequence
  Description of Artificial Sequence: Synthetic oligonucleotide
gucauuggagaaggcguac

SEQ ID NO: 1577988 - RNA, 19 nt, Artificial Sequence
  Description of Artificial Sequence: Synthetic oligonucleotide
gggacgcuccaguucaggc

SEQ ID NO: 1577989 - RNA, 19 nt, Artificial Sequence
  Description of Artificial Sequence: Synthetic oligonucleotide
gcccaagcuagaauaugcg

SEQ ID NO: 1577990 - RNA, 19 nt, Artificial Sequence
  Description of Artificial Sequence: Synthetic oligonucleotide
ggccucagcucacagcaug

SEQ ID NO: 1577991 - RNA, 19 nt, Artificial Sequence
  Description of Artificial Sequence: Synthetic oligonucleotide
caucaccaacucagauggc

SEQ ID NO: 1577992 - RNA, 19 nt, Artificial Sequence
  Description of Artificial Sequence: Synthetic oligonucleotide
caagcccacgaagacagga

SEQ ID NO: 1577993 - RNA, 19 nt, Artificial Sequence
  Description of Artificial Sequence: Synthetic oligonucleotide
aguguaaacuugacccaaa

SEQ ID NO: 1577994 - RNA, 19 nt, Artificial Sequence
  Description of Artificial Sequence: Synthetic oligonucleotide
ucaccuugaugggacgcuc

SEQ ID NO: 1577995 - RNA, 19 nt, Artificial Sequence
  Description of Artificial Sequence: Synthetic oligonucleotide
caccaacucagauggcaca

SEQ ID NO: 1577996 - RNA, 19 nt, Artificial Sequence
  Description of Artificial Sequence: Synthetic oligonucleotide
gcccacuuaagaugauggc

SEQ ID NO: 1577997 - RNA, 19 nt, Artificial Sequence
  Description of Artificial Sequence: Synthetic oligonucleotide
guggucaguagagcacuug

SEQ ID NO: 1577998 - RNA, 19 nt, Artificial Sequence
  Description of Artificial Sequence: Synthetic oligonucleotide
cuugcuacccuguuuuguu

SEQ ID NO: 1577999 - RNA, 19 nt, Artificial Sequence
  Description of Artificial Sequence: Synthetic oligonucleotide
cagcccaagcuagaauaug

SEQ ID NO: 1578000 - RNA, 19 nt, Artificial Sequence
  Description of Artificial Sequence: Synthetic oligonucleotide
guggcaguccccugaaagu

SEQ ID NO: 1578001 - RNA, 19 nt, Artificial Sequence
  Description of Artificial Sequence: Synthetic oligonucleotide
aguagacagguagcccacu

SEQ ID NO: 1578002 - RNA, 19 nt, Artificial Sequence
  Description of Artificial Sequence: Synthetic oligonucleotide
gccaccagacgccaaagaa

SEQ ID NO: 1578003 - RNA, 19 nt, Artificial Sequence
  Description of Artificial Sequence: Synthetic oligonucleotide
gcauaagcuucuggcacag

SEQ ID NO: 1578004 - RNA, 19 nt, Artificial Sequence
  Description of Artificial Sequence: Synthetic oligonucleotide
gcugggguuccaucucuag

SEQ ID NO: 1578005 - RNA, 19 nt, Artificial Sequence
  Description of Artificial Sequence: Synthetic oligonucleotide
ccuccgugacaaaauucag

SEQ ID NO: 1578006 - RNA, 19 nt, Artificial Sequence
  Description of Artificial Sequence: Synthetic oligonucleotide
cagguagcccacuuaagau

SEQ ID NO: 1578007 - RNA, 19 nt, Artificial Sequence
  Description of Artificial Sequence: Synthetic oligonucleotide
augcgucauccaucuguca

SEQ ID NO: 1578008 - RNA, 19 nt, Artificial Sequence
  Description of Artificial Sequence: Synthetic oligonucleotide
uggcuacggagcuccugcu

SEQ ID NO: 1578009 - RNA, 19 nt, Artificial Sequence
  Description of Artificial Sequence: Synthetic oligonucleotide
guguaaacuugacccaaau

SEQ ID NO: 1578010 - RNA, 19 nt, Artificial Sequence
  Description of Artificial Sequence: Synthetic oligonucleotide
ccaauguggucaguagagc

SEQ ID NO: 1578011 - RNA, 19 nt, Artificial Sequence
  Description of Artificial Sequence: Synthetic oligonucleotide
cccacuuaagaugauggca

SEQ ID NO: 1578012 - RNA, 19 nt, Artificial Sequence
  Description of Artificial Sequence: Synthetic oligonucleotide
guucacaguagaacagaua

SEQ ID NO: 1578013 - RNA, 19 nt, Artificial Sequence
  Description of Artificial Sequence: Synthetic oligonucleotide
gcucacagcauggugcuca

SEQ ID NO: 1578014 - RNA, 19 nt, Artificial Sequence
  Description of Artificial Sequence: Synthetic oligonucleotide
cagauguggcaguccccug

SEQ ID NO: 1578015 - RNA, 19 nt, Artificial Sequence
  Description of Artificial Sequence: Synthetic oligonucleotide
cgccaaagaaguagacagg

SEQ ID NO: 1578016 - RNA, 19 nt, Artificial Sequence
  Description of Artificial Sequence: Synthetic oligonucleotide
gccaaagaaguagacaggu

SEQ ID NO: 1578017 - RNA, 19 nt, Artificial Sequence
  Description of Artificial Sequence: Synthetic oligonucleotide
cagggucgugaaguaggcc

SEQ ID NO: 1578018 - RNA, 19 nt, Artificial Sequence
  Description of Artificial Sequence: Synthetic oligonucleotide
gggucgugaaguaggccag

SEQ ID NO: 1578019 - RNA, 19 nt, Artificial Sequence
  Description of Artificial Sequence: Synthetic oligonucleotide
gccucagcucacagcaugg

SEQ ID NO: 1578020 - RNA, 19 nt, Artificial Sequence
  Description of Artificial Sequence: Synthetic oligonucleotide
ugggagggccagguucacc

SEQ ID NO: 1578021 - RNA, 19 nt, Artificial Sequence
  Description of Artificial Sequence: Synthetic oligonucleotide
cauccaucugucaguccaa

SEQ ID NO: 1578022 - RNA, 19 nt, Artificial Sequence
  Description of Artificial Sequence: Synthetic oligonucleotide
aucccacaaagaacagccu

SEQ ID NO: 1578023 - RNA, 19 nt, Artificial Sequence
  Description of Artificial Sequence: Synthetic oligonucleotide
ggguuccaucucuaggauc

SEQ ID NO: 1578024 - RNA, 19 nt, Artificial Sequence
  Description of Artificial Sequence: Synthetic oligonucleotide
cguacaucagggucaugac

SEQ ID NO: 1578025 - RNA, 19 nt, Artificial Sequence
  Description of Artificial Sequence: Synthetic oligonucleotide
gcuacugaacaacagccuu

SEQ ID NO: 1578026 - RNA, 19 nt, Artificial Sequence
  Description of Artificial Sequence: Synthetic oligonucleotide
gugaugggcacaggugguc

SEQ ID NO: 1578027 - RNA, 19 nt, Artificial Sequence
  Description of Artificial Sequence: Synthetic oligonucleotide
cccaaaauccacagccaca

SEQ ID NO: 1578028 - RNA, 19 nt, Artificial Sequence
  Description of Artificial Sequence: Synthetic oligonucleotide
gcaguccccugaaagucag

SEQ ID NO: 1578029 - RNA, 19 nt, Artificial Sequence
  Description of Artificial Sequence: Synthetic oligonucleotide
gguuagccauuaauacaac

SEQ ID NO: 1578030 - RNA, 19 nt, Artificial Sequence
  Description of Artificial Sequence: Synthetic oligonucleotide
gcucacuggcgcguguggg

SEQ ID NO: 1578031 - RNA, 19 nt, Artificial Sequence
  Description of Artificial Sequence: Synthetic oligonucleotide
acaagcccacgaagacagg

SEQ ID NO: 1578032 - RNA, 19 nt, Artificial Sequence
  Description of Artificial Sequence: Synthetic oligonucleotide
cugagggaccaccugcaua

SEQ ID NO: 1578033 - RNA, 19 nt, Artificial Sequence
  Description of Artificial Sequence: Synthetic oligonucleotide
gagggaccaccugcauaag

SEQ ID NO: 1578034 - RNA, 19 nt, Artificial Sequence
  Description of Artificial Sequence: Synthetic oligonucleotide
ccccuugaggcacacugug

SEQ ID NO: 1578035 - RNA, 19 nt, Artificial Sequence
  Description of Artificial Sequence: Synthetic oligonucleotide
agcucacagcauggugcuc

SEQ ID NO: 1578036 - RNA, 19 nt, Artificial Sequence
  Description of Artificial Sequence: Synthetic oligonucleotide
acacggcaaugaggaagag

SEQ ID NO: 1578037 - RNA, 19 nt, Artificial Sequence
  Description of Artificial Sequence: Synthetic oligonucleotide
ugcucuggcuacggagcuc

SEQ ID NO: 1578038 - RNA, 19 nt, Artificial Sequence
  Description of Artificial Sequence: Synthetic oligonucleotide
guucugccaccagacgcca

SEQ ID NO: 1578039 - RNA, 19 nt, Artificial Sequence
  Description of Artificial Sequence: Synthetic oligonucleotide
gagucucaguaguucuuuu

SEQ ID NO: 1578040 - RNA, 19 nt, Artificial Sequence
  Description of Artificial Sequence: Synthetic oligonucleotide
auguggcaguccccugaaa

SEQ ID NO: 1578041 - RNA, 19 nt, Artificial Sequence
  Description of Artificial Sequence: Synthetic oligonucleotide
gaggggagaaaggccagau

SEQ ID NO: 1578042 - RNA, 19 nt, Artificial Sequence
  Description of Artificial Sequence: Synthetic oligonucleotide
aggcguacaucagggucau

SEQ ID NO: 1578043 - RNA, 19 nt, Artificial Sequence
  Description of Artificial Sequence: Synthetic oligonucleotide
ggcacaguagauggaccca

SEQ ID NO: 1578044 - RNA, 19 nt, Artificial Sequence
  Description of Artificial Sequence: Synthetic oligonucleotide
gggcacagguggucaggag

SEQ ID NO: 1578045 - RNA, 19 nt, Artificial Sequence
  Description of Artificial Sequence: Synthetic oligonucleotide
cagauucgucagcacauau

SEQ ID NO: 1578046 - RNA, 19 nt, Artificial Sequence
  Description of Artificial Sequence: Synthetic oligonucleotide
ggcaguccccugaaaguca

SEQ ID NO: 1578047 - RNA, 19 nt, Artificial Sequence
  Description of Artificial Sequence: Synthetic oligonucleotide
ggacccaauguggucagua

SEQ ID NO: 1578048 - RNA, 19 nt, Artificial Sequence
  Description of Artificial Sequence: Synthetic oligonucleotide
agccuugggugaagagcug

SEQ ID NO: 1578049 - RNA, 19 nt, Artificial Sequence
  Description of Artificial Sequence: Synthetic oligonucleotide
uggacccaauguggucagu

SEQ ID NO: 1578050 - RNA, 19 nt, Artificial Sequence
  Description of Artificial Sequence: Synthetic oligonucleotide
augggacgcuccaguucag

SEQ ID NO: 1578051 - RNA, 19 nt, Artificial Sequence
  Description of Artificial Sequence: Synthetic oligonucleotide
gcacaguagauggacccaa

SEQ ID NO: 1578052 - RNA, 19 nt, Artificial Sequence
  Description of Artificial Sequence: Synthetic oligonucleotide
caucugagucucaguaguu

SEQ ID NO: 1578053 - RNA, 19 nt, Artificial Sequence
  Description of Artificial Sequence: Synthetic oligonucleotide
cagcaccgucacagagaag

SEQ ID NO: 1578054 - RNA, 19 nt, Artificial Sequence
  Description of Artificial Sequence: Synthetic oligonucleotide
cccaagcuagaauaugcgu

SEQ ID NO: 1578055 - RNA, 19 nt, Artificial Sequence
  Description of Artificial Sequence: Synthetic oligonucleotide
acaugacuccuaggugaua

SEQ ID NO: 1578056 - RNA, 19 nt, Artificial Sequence
  Description of Artificial Sequence: Synthetic oligonucleotide
ccacaaagaacagccugga

SEQ ID NO: 1578057 - RNA, 19 nt, Artificial Sequence
  Description of Artificial Sequence: Synthetic oligonucleotide
gguugguagacagggucgu

SEQ ID NO: 1578058 - RNA, 19 nt, Artificial Sequence
  Description of Artificial Sequence: Synthetic oligonucleotide
gccucauaugaaugaggcu

SEQ ID NO: 1578059 - RNA, 19 nt, Artificial Sequence
  Description of Artificial Sequence: Synthetic oligonucleotide
caucagggucaugacacau

SEQ ID NO: 1578060 - RNA, 19 nt, Artificial Sequence
  Description of Artificial Sequence: Synthetic oligonucleotide
gcggagccacaucaugcca

SEQ ID NO: 1578061 - RNA, 19 nt, Artificial Sequence
  Description of Artificial Sequence: Synthetic oligonucleotide
cacaguagauggacccaau

SEQ ID NO: 1578062 - RNA, 19 nt, Artificial Sequence
  Description of Artificial Sequence: Synthetic oligonucleotide
gcacuaaggauagcagcua

SEQ ID NO: 1578063 - RNA, 19 nt, Artificial Sequence
  Description of Artificial Sequence: Synthetic oligonucleotide
gccagauucgucagcacau

SEQ ID NO: 1578064 - RNA, 19 nt, Artificial Sequence
  Description of Artificial Sequence: Synthetic oligonucleotide
accagacgccaaagaagua

SEQ ID NO: 1578065 - RNA, 19 nt, Artificial Sequence
  Description of Artificial Sequence: Synthetic oligonucleotide
guagagcacuugccucaua

SEQ ID NO: 1578066 - RNA, 19 nt, Artificial Sequence
  Description of Artificial Sequence: Synthetic oligonucleotide
cagcagcgucacauuucca

SEQ ID NO: 1578067 - RNA, 19 nt, Artificial Sequence
  Description of Artificial Sequence: Synthetic oligonucleotide
ggagccacaucaugccaau

SEQ ID NO: 1578068 - RNA, 19 nt, Artificial Sequence
  Description of Artificial Sequence: Synthetic oligonucleotide
ggucgugaaguaggccaga

SEQ ID NO: 1578069 - RNA, 19 nt, Artificial Sequence
  Description of Artificial Sequence: Synthetic oligonucleotide
caucaacaucugguuggua

SEQ ID NO: 1578070 - RNA, 19 nt, Artificial Sequence
  Description of Artificial Sequence: Synthetic oligonucleotide
ccuugcuacccuguuuugu

SEQ ID NO: 1578071 - RNA, 19 nt, Artificial Sequence
  Description of Artificial Sequence: Synthetic oligonucleotide
ggugcucacuggcgcgugu

SEQ ID NO: 1578072 - RNA, 19 nt, Artificial Sequence
  Description of Artificial Sequence: Synthetic oligonucleotide
ccagauucgucagcacaua

SEQ ID NO: 1578073 - RNA, 19 nt, Artificial Sequence
  Description of Artificial Sequence: Synthetic oligonucleotide
cggcaaugaggaagaggca

SEQ ID NO: 1578074 - RNA, 19 nt, Artificial Sequence
  Description of Artificial Sequence: Synthetic oligonucleotide
cucuggcuacggagcuccu

SEQ ID NO: 1578075 - RNA, 19 nt, Artificial Sequence
  Description of Artificial Sequence: Synthetic oligonucleotide
ggcguacaucagggucaug

SEQ ID NO: 1578076 - RNA, 19 nt, Artificial Sequence
  Description of Artificial Sequence: Synthetic oligonucleotide
gcaccgucacagagaagau

SEQ ID NO: 1578077 - RNA, 19 nt, Artificial Sequence
  Description of Artificial Sequence: Synthetic oligonucleotide
ccucagcucacagcauggu

SEQ ID NO: 1578078 - RNA, 19 nt, Artificial Sequence
  Description of Artificial Sequence: Synthetic oligonucleotide
aagacacuaacuuaaaagg

SEQ ID NO: 1578079 - RNA, 19 nt, Artificial Sequence
  Description of Artificial Sequence: Synthetic oligonucleotide
aauauauuaguguuacuac

SEQ ID NO: 1578080 - RNA, 19 nt, Artificial Sequence
  Description of Artificial Sequence: Synthetic oligonucleotide
aguuaaagaaauuccaacc

SEQ ID NO: 1578081 - RNA, 19 nt, Artificial Sequence
  Description of Artificial Sequence: Synthetic oligonucleotide
aauuagcaaauacacacac

SEQ ID NO: 1578082 - RNA, 19 nt, Artificial Sequence
  Description of Artificial Sequence: Synthetic oligonucleotide
uguauugacucacaagggg

SEQ ID NO: 1578083 - RNA, 19 nt, Artificial Sequence
  Description of Artificial Sequence: Synthetic oligonucleotide
aagaggcauauuuacaagg

SEQ ID NO: 1578084 - RNA, 19 nt, Artificial Sequence
  Description of Artificial Sequence: Synthetic oligonucleotide
uguucaaaacacuaggcag

SEQ ID NO: 1578085 - RNA, 19 nt, Artificial Sequence
  Description of Artificial Sequence: Synthetic oligonucleotide
uuuauuuaccuucaugugu

SEQ ID NO: 1578086 - RNA, 19 nt, Artificial Sequence
  Description of Artificial Sequence: Synthetic oligonucleotide
aauugcgaagaacugcugg

SEQ ID NO: 1578087 - RNA, 19 nt, Artificial Sequence
  Description of Artificial Sequence: Synthetic oligonucleotide
uuuucagugguuuacguug

SEQ ID NO: 1578088 - RNA, 19 nt, Artificial Sequence
  Description of Artificial Sequence: Synthetic oligonucleotide
gaccauuuagcucaagucg

SEQ ID NO: 1578089 - RNA, 19 nt, Artificial Sequence
  Description of Artificial Sequence: Synthetic oligonucleotide
cuaacaugaaaugaaagcc

SEQ ID NO: 1578090 - RNA, 19 nt, Artificial Sequence
  Description of Artificial Sequence: Synthetic oligonucleotide
acuacaugcaacuguuucc

SEQ ID NO: 1578091 - RNA, 19 nt, Artificial Sequence
  Description of Artificial Sequence: Synthetic oligonucleotide
aauugauugaaggaaaaga

SEQ ID NO: 1578092 - RNA, 19 nt, Artificial Sequence
  Description of Artificial Sequence: Synthetic oligonucleotide
aaagaugcccaucuuaggu

SEQ ID NO: 1578093 - RNA, 19 nt, Artificial Sequence
  Description of Artificial Sequence: Synthetic oligonucleotide
uauuaguguuacuacaugc

SEQ ID NO: 1578094 - RNA, 19 nt, Artificial Sequence
  Description of Artificial Sequence: Synthetic oligonucleotide
ucaacaauacaaucaaucu

SEQ ID NO: 1578095 - RNA, 19 nt, Artificial Sequence
  Description of Artificial Sequence: Synthetic oligonucleotide
ugucaguuaaagaaauucc

SEQ ID NO: 1578096 - RNA, 19 nt, Artificial Sequence
  Description of Artificial Sequence: Synthetic oligonucleotide
aauggguggcaacacauag

SEQ ID NO: 1578097 - RNA, 19 nt, Artificial Sequence
  Description of Artificial Sequence: Synthetic oligonucleotide
caacaugugaguuuggggc

SEQ ID NO: 1578098 - RNA, 19 nt, Artificial Sequence
  Description of Artificial Sequence: Synthetic oligonucleotide
cuagcuucuaccuaccagg

SEQ ID NO: 1578099 - RNA, 19 nt, Artificial Sequence
  Description of Artificial Sequence: Synthetic oligonucleotide
uccaagacuaacaugaaau

SEQ ID NO: 1578100 - RNA, 19 nt, Artificial Sequence
  Description of Artificial Sequence: Synthetic oligonucleotide
aacaugugaguuuggggcg

SEQ ID NO: 1578101 - RNA, 19 nt, Artificial Sequence
  Description of Artificial Sequence: Synthetic oligonucleotide
aaagaaaguauguacucaa

SEQ ID NO: 1578102 - RNA, 19 nt, Artificial Sequence
  Description of Artificial Sequence: Synthetic oligonucleotide
uuauuuaccuucauguguc

SEQ ID NO: 1578103 - RNA, 19 nt, Artificial Sequence
  Description of Artificial Sequence: Synthetic oligonucleotide
auuuuaguuaguugucaac

SEQ ID NO: 1578104 - RNA, 19 nt, Artificial Sequence
  Description of Artificial Sequence: Synthetic oligonucleotide
acgaauguguagcacagac

SEQ ID NO: 1578105 - RNA, 19 nt, Artificial Sequence
  Description of Artificial Sequence: Synthetic oligonucleotide
uuuuaguuaguugucaaca

SEQ ID NO: 1578106 - RNA, 19 nt, Artificial Sequence
  Description of Artificial Sequence: Synthetic oligonucleotide
cuuacaggaagcaccaggg

SEQ ID NO: 1578107 - RNA, 19 nt, Artificial Sequence
  Description of Artificial Sequence: Synthetic oligonucleotide
uguauuaacagccuuucuu

SEQ ID NO: 1578108 - RNA, 19 nt, Artificial Sequence
  Description of Artificial Sequence: Synthetic oligonucleotide
uuuaccuucaugugucuag

SEQ ID NO: 1578109 - RNA, 19 nt, Artificial Sequence
  Description of Artificial Sequence: Synthetic oligonucleotide
uauauuaguguuacuacau

SEQ ID NO: 1578110 - RNA, 19 nt, Artificial Sequence
  Description of Artificial Sequence: Synthetic oligonucleotide
agaguuauuucacauccag

SEQ ID NO: 1578111 - RNA, 19 nt, Artificial Sequence
  Description of Artificial Sequence: Synthetic oligonucleotide
caaaagaugcccaucuuag

SEQ ID NO: 1578112 - RNA, 19 nt, Artificial Sequence
  Description of Artificial Sequence: Synthetic oligonucleotide
auguguagcacagacacac

SEQ ID NO: 1578113 - RNA, 19 nt, Artificial Sequence
  Description of Artificial Sequence: Synthetic oligonucleotide
aguguuacuacaugcaacu

SEQ ID NO: 1578114 - RNA, 19 nt, Artificial Sequence
  Description of Artificial Sequence: Synthetic oligonucleotide
uauguacucaacacaaacu

SEQ ID NO: 1578115 - RNA, 19 nt, Artificial Sequence
  Description of Artificial Sequence: Synthetic oligonucleotide
aaaagcugugcaaugcugg

SEQ ID NO: 1578116 - RNA, 19 nt, Artificial Sequence
  Description of Artificial Sequence: Synthetic oligonucleotide
agaacgaggagucgcuucc

SEQ ID NO: 1578117 - RNA, 19 nt, Artificial Sequence
  Description of Artificial Sequence: Synthetic oligonucleotide
auauauuaguguuacuaca

SEQ ID NO: 1578118 - RNA, 19 nt, Artificial Sequence
  Description of Artificial Sequence: Synthetic oligonucleotide
ucaaucgccgccuaugacc

SEQ ID NO: 1578119 - RNA, 19 nt, Artificial Sequence
  Description of Artificial Sequence: Synthetic oligonucleotide
uguuacuacaugcaacugu

SEQ ID NO: 1578120 - RNA, 19 nt, Artificial Sequence
  Description of Artificial Sequence: Synthetic oligonucleotide
cucaacacaaacuuuugac

SEQ ID NO: 1578121 - RNA, 19 nt, Artificial Sequence
  Description of Artificial Sequence: Synthetic oligonucleotide
aaauugauugaaggaaaag

SEQ ID NO: 1578122 - RNA, 19 nt, Artificial Sequence
  Description of Artificial Sequence: Synthetic oligonucleotide
aauuuuaguuaguugucaa

SEQ ID NO: 1578123 - RNA, 19 nt, Artificial Sequence
  Description of Artificial Sequence: Synthetic oligonucleotide
aguugcuacaaacaagaug

SEQ ID NO: 1578124 - RNA, 19 nt, Artificial Sequence
  Description of Artificial Sequence: Synthetic oligonucleotide
accaucuuacaccugcuac

SEQ ID NO: 1578125 - RNA, 19 nt, Artificial Sequence
  Description of Artificial Sequence: Synthetic oligonucleotide
uggcuugucaguuaaagaa

SEQ ID NO: 1578126 - RNA, 19 nt, Artificial Sequence
  Description of Artificial Sequence: Synthetic oligonucleotide
auacaaaagaugcccaucu

SEQ ID NO: 1578127 - RNA, 19 nt, Artificial Sequence
  Description of Artificial Sequence: Synthetic oligonucleotide
uccuguuucuccaagacua

SEQ ID NO: 1578128 - RNA, 19 nt, Artificial Sequence
  Description of Artificial Sequence: Synthetic oligonucleotide
uugacagcugcucucaugu

SEQ ID NO: 1578129 - RNA, 19 nt, Artificial Sequence
  Description of Artificial Sequence: Synthetic oligonucleotide
ucuagcuucuaccuaccag

SEQ ID NO: 1578130 - RNA, 19 nt, Artificial Sequence
  Description of Artificial Sequence: Synthetic oligonucleotide
uucacaaaagggcugaauu

SEQ ID NO: 1578131 - RNA, 19 nt, Artificial Sequence
  Description of Artificial Sequence: Synthetic oligonucleotide
uucccucgugaauagaacg

SEQ ID NO: 1578132 - RNA, 19 nt, Artificial Sequence
  Description of Artificial Sequence: Synthetic oligonucleotide
acaacaugugaguuugggg

SEQ ID NO: 1578133 - RNA, 19 nt, Artificial Sequence
  Description of Artificial Sequence: Synthetic oligonucleotide
uugauugaaggaaaagaaa

SEQ ID NO: 1578134 - RNA, 19 nt, Artificial Sequence
  Description of Artificial Sequence: Synthetic oligonucleotide
guagcacagacacacaccc

SEQ ID NO: 1578135 - RNA, 19 nt, Artificial Sequence
  Description of Artificial Sequence: Synthetic oligonucleotide
uaucagcuguacaauugcg

SEQ ID NO: 1578136 - RNA, 19 nt, Artificial Sequence
  Description of Artificial Sequence: Synthetic oligonucleotide
caaaacacuaggcagucac

SEQ ID NO: 1578137 - RNA, 19 nt, Artificial Sequence
  Description of Artificial Sequence: Synthetic oligonucleotide
gaauggaucccaaugggcc

SEQ ID NO: 1578138 - RNA, 19 nt, Artificial Sequence
  Description of Artificial Sequence: Synthetic oligonucleotide
aguuaguugucaacaauac

SEQ ID NO: 1578139 - RNA, 19 nt, Artificial Sequence
  Description of Artificial Sequence: Synthetic oligonucleotide
uaguuaguugucaacaaua

SEQ ID NO: 1578140 - RNA, 19 nt, Artificial Sequence
  Description of Artificial Sequence: Synthetic oligonucleotide
guauguacucaacacaaac

SEQ ID NO: 1578141 - RNA, 19 nt, Artificial Sequence
  Description of Artificial Sequence: Synthetic oligonucleotide
acacuaacuuaaaagguac

SEQ ID NO: 1578142 - RNA, 19 nt, Artificial Sequence
  Description of Artificial Sequence: Synthetic oligonucleotide
cuauguauugacucacaag

SEQ ID NO: 1578143 - RNA, 19 nt, Artificial Sequence
  Description of Artificial Sequence: Synthetic oligonucleotide
gaagaggcauauuuacaag

SEQ ID NO: 1578144 - RNA, 19 nt, Artificial Sequence
  Description of Artificial Sequence: Synthetic oligonucleotide
uuagcucaagucgauaagc

SEQ ID NO: 1578145 - RNA, 19 nt, Artificial Sequence
  Description of Artificial Sequence: Synthetic oligonucleotide
uacaauugcgaagaacugc

SEQ ID NO: 1578146 - RNA, 19 nt, Artificial Sequence
  Description of Artificial Sequence: Synthetic oligonucleotide
uacuacaugcaacuguuuc

SEQ ID NO: 1578147 - RNA, 19 nt, Artificial Sequence
  Description of Artificial Sequence: Synthetic oligonucleotide
aagaaaguauguacucaac

SEQ ID NO: 1578148 - RNA, 19 nt, Artificial Sequence
  Description of Artificial Sequence: Synthetic oligonucleotide
uacaaggggaaaaguacug

SEQ ID NO: 1578149 - RNA, 19 nt, Artificial Sequence
  Description of Artificial Sequence: Synthetic oligonucleotide
auagccaaguugcgaaugg

SEQ ID NO: 1578150 - RNA, 19 nt, Artificial Sequence
  Description of Artificial Sequence: Synthetic oligonucleotide
gaauagaacgaggagucgc

SEQ ID NO: 1578151 - RNA, 19 nt, Artificial Sequence
  Description of Artificial Sequence: Synthetic oligonucleotide
auauuaguguuacuacaug

SEQ ID NO: 1578152 - RNA, 19 nt, Artificial Sequence
  Description of Artificial Sequence: Synthetic oligonucleotide
uuuaguuaguugucaacaa

SEQ ID NO: 1578153 - RNA, 19 nt, Artificial Sequence
  Description of Artificial Sequence: Synthetic oligonucleotide
auuuagcucaagucgauaa

SEQ ID NO: 1578154 - RNA, 19 nt, Artificial Sequence
  Description of Artificial Sequence: Synthetic oligonucleotide
acaagaccaucuuacaccu

SEQ ID NO: 1578155 - RNA, 19 nt, Artificial Sequence
  Description of Artificial Sequence: Synthetic oligonucleotide
gacuaacaugaaaugaaag

SEQ ID NO: 1578156 - RNA, 19 nt, Artificial Sequence
  Description of Artificial Sequence: Synthetic oligonucleotide
cuugccacuuacaggaagc

SEQ ID NO: 1578157 - RNA, 19 nt, Artificial Sequence
  Description of Artificial Sequence: Synthetic oligonucleotide
uuaguuaguugucaacaau

SEQ ID NO: 1578158 - RNA, 19 nt, Artificial Sequence
  Description of Artificial Sequence: Synthetic oligonucleotide
aaauuagcaaauacacaca

SEQ ID NO: 1578159 - RNA, 19 nt, Artificial Sequence
  Description of Artificial Sequence: Synthetic oligonucleotide
aaugggccccggcaggucg

SEQ ID NO: 1578160 - RNA, 19 nt, Artificial Sequence
  Description of Artificial Sequence: Synthetic oligonucleotide
auaagcaauuaugaauauc

SEQ ID NO: 1578161 - RNA, 19 nt, Artificial Sequence
  Description of Artificial Sequence: Synthetic oligonucleotide
uaccaggaguuuuagguug

SEQ ID NO: 1578162 - RNA, 19 nt, Artificial Sequence
  Description of Artificial Sequence: Synthetic oligonucleotide
guuguaauggacuugugcu

SEQ ID NO: 1578163 - RNA, 19 nt, Artificial Sequence
  Description of Artificial Sequence: Synthetic oligonucleotide
uguaauggacuugugcuga

SEQ ID NO: 1578164 - RNA, 19 nt, Artificial Sequence
  Description of Artificial Sequence: Synthetic oligonucleotide
uguuuccuguauuaacagc

SEQ ID NO: 1578165 - RNA, 19 nt, Artificial Sequence
  Description of Artificial Sequence: Synthetic oligonucleotide
ucgugaauagaacgaggag

SEQ ID NO: 1578166 - RNA, 19 nt, Artificial Sequence
  Description of Artificial Sequence: Synthetic oligonucleotide
uauugacucacaaggggaa

SEQ ID NO: 1578167 - RNA, 19 nt, Artificial Sequence
  Description of Artificial Sequence: Synthetic oligonucleotide
aggaguuuuagguuggcaa

SEQ ID NO: 1578168 - RNA, 19 nt, Artificial Sequence
  Description of Artificial Sequence: Synthetic oligonucleotide
ucuuagguauauauauuuu

SEQ ID NO: 1578169 - RNA, 19 nt, Artificial Sequence
  Description of Artificial Sequence: Synthetic oligonucleotide
auugcgaagaacugcuggu

SEQ ID NO: 1578170 - RNA, 19 nt, Artificial Sequence
  Description of Artificial Sequence: Synthetic oligonucleotide
augaccauuuagcucaagu

SEQ ID NO: 1578171 - RNA, 19 nt, Artificial Sequence
  Description of Artificial Sequence: Synthetic oligonucleotide
ucaugugucuagcuucuac

SEQ ID NO: 1578172 - RNA, 19 nt, Artificial Sequence
  Description of Artificial Sequence: Synthetic oligonucleotide
uagcucaagucgauaagca

SEQ ID NO: 1578173 - RNA, 19 nt, Artificial Sequence
  Description of Artificial Sequence: Synthetic oligonucleotide
aggggaaaaguacugaauu

SEQ ID NO: 1578174 - RNA, 19 nt, Artificial Sequence
  Description of Artificial Sequence: Synthetic oligonucleotide
cugguguucaaaacacuag

SEQ ID NO: 1578175 - RNA, 19 nt, Artificial Sequence
  Description of Artificial Sequence: Synthetic oligonucleotide
ucacaaaagggcugaauua

SEQ ID NO: 1578176 - RNA, 19 nt, Artificial Sequence
  Description of Artificial Sequence: Synthetic oligonucleotide
uuuucugugugcggcagag

SEQ ID NO: 1578177 - RNA, 19 nt, Artificial Sequence
  Description of Artificial Sequence: Synthetic oligonucleotide
aauagaacgaggagucgcu

SEQ ID NO: 1578178 - RNA, 19 nt, Artificial Sequence
  Description of Artificial Sequence: Synthetic oligonucleotide
ccuaugaccauuuagcuca

SEQ ID NO: 1578179 - RNA, 19 nt, Artificial Sequence
  Description of Artificial Sequence: Synthetic oligonucleotide
auuaguguuacuacaugca

SEQ ID NO: 1578180 - RNA, 19 nt, Artificial Sequence
  Description of Artificial Sequence: Synthetic oligonucleotide
ucgcuucccaagucaaucg

SEQ ID NO: 1578181 - RNA, 19 nt, Artificial Sequence
  Description of Artificial Sequence: Synthetic oligonucleotide
uuuccuguauuaacagccu

SEQ ID NO: 1578182 - RNA, 19 nt, Artificial Sequence
  Description of Artificial Sequence: Synthetic oligonucleotide
aaggagccuugccacuuac

SEQ ID NO: 1578183 - RNA, 19 nt, Artificial Sequence
  Description of Artificial Sequence: Synthetic oligonucleotide
gguuguaauggacuugugc

SEQ ID NO: 1578184 - RNA, 19 nt, Artificial Sequence
  Description of Artificial Sequence: Synthetic oligonucleotide
ugaauagaacgaggagucg

SEQ ID NO: 1578185 - RNA, 19 nt, Artificial Sequence
  Description of Artificial Sequence: Synthetic oligonucleotide
cuugcguguuccuaucagc

SEQ ID NO: 1578186 - RNA, 19 nt, Artificial Sequence
  Description of Artificial Sequence: Synthetic oligonucleotide
ugcuacaaacaagauggcc

SEQ ID NO: 1578187 - RNA, 19 nt, Artificial Sequence
  Description of Artificial Sequence: Synthetic oligonucleotide
acaugcaacuguuuccugu

SEQ ID NO: 1578188 - RNA, 19 nt, Artificial Sequence
  Description of Artificial Sequence: Synthetic oligonucleotide
acuaacuuaaaagguacaa

SEQ ID NO: 1578189 - RNA, 19 nt, Artificial Sequence
  Description of Artificial Sequence: Synthetic oligonucleotide
acaauugcgaagaacugcu

SEQ ID NO: 1578190 - RNA, 19 nt, Artificial Sequence
  Description of Artificial Sequence: Synthetic oligonucleotide
gugucuagcuucuaccuac

SEQ ID NO: 1578191 - RNA, 19 nt, Artificial Sequence
  Description of Artificial Sequence: Synthetic oligonucleotide
agugguuuacguugaauua

SEQ ID NO: 1578192 - RNA, 19 nt, Artificial Sequence
  Description of Artificial Sequence: Synthetic oligonucleotide
ggaaacuaugucuucuccc

SEQ ID NO: 1578193 - RNA, 19 nt, Artificial Sequence
  Description of Artificial Sequence: Synthetic oligonucleotide
aauucccucgugaauagaa

SEQ ID NO: 1578194 - RNA, 19 nt, Artificial Sequence
  Description of Artificial Sequence: Synthetic oligonucleotide
ucccucgugaauagaacga

SEQ ID NO: 1578195 - RNA, 19 nt, Artificial Sequence
  Description of Artificial Sequence: Synthetic oligonucleotide
ccaaguugcgaauggaucc

SEQ ID NO: 1578196 - RNA, 19 nt, Artificial Sequence
  Description of Artificial Sequence: Synthetic oligonucleotide
acucaacacaaacuuuuga

SEQ ID NO: 1578197 - RNA, 19 nt, Artificial Sequence
  Description of Artificial Sequence: Synthetic oligonucleotide
auguauugacucacaaggg

SEQ ID NO: 1578198 - RNA, 19 nt, Artificial Sequence
  Description of Artificial Sequence: Synthetic oligonucleotide
augugucuagcuucuaccu

SEQ ID NO: 1578199 - RNA, 19 nt, Artificial Sequence
  Description of Artificial Sequence: Synthetic oligonucleotide
cucgugaauagaacgagga

SEQ ID NO: 1578200 - RNA, 19 nt, Artificial Sequence
  Description of Artificial Sequence: Synthetic oligonucleotide
aacacuaggcagucacuau

SEQ ID NO: 1578201 - RNA, 19 nt, Artificial Sequence
  Description of Artificial Sequence: Synthetic oligonucleotide
guaaggccugaacucacag

SEQ ID NO: 1578202 - RNA, 19 nt, Artificial Sequence
  Description of Artificial Sequence: Synthetic oligonucleotide
agacacuaacuuaaaaggu

SEQ ID NO: 1578203 - RNA, 19 nt, Artificial Sequence
  Description of Artificial Sequence: Synthetic oligonucleotide
gacacuaacuuaaaaggua

SEQ ID NO: 1578204 - RNA, 19 nt, Artificial Sequence
  Description of Artificial Sequence: Synthetic oligonucleotide
uccuguauuaacagccuuu

SEQ ID NO: 1578205 - RNA, 19 nt, Artificial Sequence
  Description of Artificial Sequence: Synthetic oligonucleotide
gguggcaacacauagucaa

SEQ ID NO: 1578206 - RNA, 19 nt, Artificial Sequence
  Description of Artificial Sequence: Synthetic oligonucleotide
ugcggcagaguuauuucac

SEQ ID NO: 1578207 - RNA, 19 nt, Artificial Sequence
  Description of Artificial Sequence: Synthetic oligonucleotide
auuucacauccagaagagg

SEQ ID NO: 1578208 - RNA, 19 nt, Artificial Sequence
  Description of Artificial Sequence: Synthetic oligonucleotide
gcuacaaacaagauggcca

SEQ ID NO: 1578209 - RNA, 19 nt, Artificial Sequence
  Description of Artificial Sequence: Synthetic oligonucleotide
uucaaaacacuaggcaguc

SEQ ID NO: 1578210 - RNA, 19 nt, Artificial Sequence
  Description of Artificial Sequence: Synthetic oligonucleotide
ugucuagcuucuaccuacc

SEQ ID NO: 1578211 - RNA, 19 nt, Artificial Sequence
  Description of Artificial Sequence: Synthetic oligonucleotide
auggaucccaaugggcccc

SEQ ID NO: 1578212 - RNA, 19 nt, Artificial Sequence
  Description of Artificial Sequence: Synthetic oligonucleotide
ucauguuaucuuuccuuuc

SEQ ID NO: 1578213 - RNA, 19 nt, Artificial Sequence
  Description of Artificial Sequence: Synthetic oligonucleotide
aucagguggggcauaacag

SEQ ID NO: 1578214 - RNA, 19 nt, Artificial Sequence
  Description of Artificial Sequence: Synthetic oligonucleotide
guauugacucacaagggga

SEQ ID NO: 1578215 - RNA, 19 nt, Artificial Sequence
  Description of Artificial Sequence: Synthetic oligonucleotide
ugguuuacguugaauuauu

SEQ ID NO: 1578216 - RNA, 19 nt, Artificial Sequence
  Description of Artificial Sequence: Synthetic oligonucleotide
aggucggacaacaugugag

SEQ ID NO: 1578217 - RNA, 19 nt, Artificial Sequence
  Description of Artificial Sequence: Synthetic oligonucleotide
ucccaaugggccccggcag

SEQ ID NO: 1578218 - RNA, 19 nt, Artificial Sequence
  Description of Artificial Sequence: Synthetic oligonucleotide
uagcuucuaccuaccagga

SEQ ID NO: 1578219 - RNA, 19 nt, Artificial Sequence
  Description of Artificial Sequence: Synthetic oligonucleotide
guugcaauucccucgugaa

SEQ ID NO: 1578220 - RNA, 19 nt, Artificial Sequence
  Description of Artificial Sequence: Synthetic oligonucleotide
ugugcggcagaguuauuuc

SEQ ID NO: 1578221 - RNA, 19 nt, Artificial Sequence
  Description of Artificial Sequence: Synthetic oligonucleotide
caaugcugguguucaaaac

SEQ ID NO: 1578222 - RNA, 19 nt, Artificial Sequence
  Description of Artificial Sequence: Synthetic oligonucleotide
agucaaucgccgccuauga

SEQ ID NO: 1578223 - RNA, 19 nt, Artificial Sequence
  Description of Artificial Sequence: Synthetic oligonucleotide
auucccucgugaauagaac

SEQ ID NO: 1578224 - RNA, 19 nt, Artificial Sequence
  Description of Artificial Sequence: Synthetic oligonucleotide
aacgaggagucgcuuccca

SEQ ID NO: 1578225 - RNA, 19 nt, Artificial Sequence
  Description of Artificial Sequence: Synthetic oligonucleotide
agguuggcaagauugccau

SEQ ID NO: 1578226 - RNA, 19 nt, Artificial Sequence
  Description of Artificial Sequence: Synthetic oligonucleotide
caaguugcgaauggauccc

SEQ ID NO: 1578227 - RNA, 19 nt, Artificial Sequence
  Description of Artificial Sequence: Synthetic oligonucleotide
cucaagucgauaagcaaaa

SEQ ID NO: 1578228 - RNA, 19 nt, Artificial Sequence
  Description of Artificial Sequence: Synthetic oligonucleotide
cucugacacugaagaaugg

SEQ ID NO: 1578229 - RNA, 19 nt, Artificial Sequence
  Description of Artificial Sequence: Synthetic oligonucleotide
gugguccaugaccacacag

SEQ ID NO: 1578230 - RNA, 19 nt, Artificial Sequence
  Description of Artificial Sequence: Synthetic oligonucleotide
aaggggaaaaguacugaau

SEQ ID NO: 1578231 - RNA, 19 nt, Artificial Sequence
  Description of Artificial Sequence: Synthetic oligonucleotide
ccgccuaugaccauuuagc

SEQ ID NO: 1578232 - RNA, 19 nt, Artificial Sequence
  Description of Artificial Sequence: Synthetic oligonucleotide
uagaacgaggagucgcuuc

SEQ ID NO: 1578233 - RNA, 19 nt, Artificial Sequence
  Description of Artificial Sequence: Synthetic oligonucleotide
agauugccauuuucuuguc

SEQ ID NO: 1578234 - RNA, 19 nt, Artificial Sequence
  Description of Artificial Sequence: Synthetic oligonucleotide
caucagguggggcauaaca

SEQ ID NO: 1578235 - RNA, 19 nt, Artificial Sequence
  Description of Artificial Sequence: Synthetic oligonucleotide
guacaauugcgaagaacug

SEQ ID NO: 1578236 - RNA, 19 nt, Artificial Sequence
  Description of Artificial Sequence: Synthetic oligonucleotide
agcucaagucgauaagcaa

SEQ ID NO: 1578237 - RNA, 19 nt, Artificial Sequence
  Description of Artificial Sequence: Synthetic oligonucleotide
acacuaggcagucacuauu

SEQ ID NO: 1578238 - RNA, 19 nt, Artificial Sequence
  Description of Artificial Sequence: Synthetic oligonucleotide
ucuaccuaccaggaguuuu

SEQ ID NO: 1578239 - RNA, 19 nt, Artificial Sequence
  Description of Artificial Sequence: Synthetic oligonucleotide
uggacuugugcugaugcau

SEQ ID NO: 1578240 - RNA, 19 nt, Artificial Sequence
  Description of Artificial Sequence: Synthetic oligonucleotide
acaaggggaaaaguacuga

SEQ ID NO: 1578241 - RNA, 19 nt, Artificial Sequence
  Description of Artificial Sequence: Synthetic oligonucleotide
acuaggcagucacuauuca

SEQ ID NO: 1578242 - RNA, 19 nt, Artificial Sequence
  Description of Artificial Sequence: Synthetic oligonucleotide
gacuugugcugaugcauca

SEQ ID NO: 1578243 - RNA, 19 nt, Artificial Sequence
  Description of Artificial Sequence: Synthetic oligonucleotide
aggagucgcuucccaaguc

SEQ ID NO: 1578244 - RNA, 19 nt, Artificial Sequence
  Description of Artificial Sequence: Synthetic oligonucleotide
agcuucuaccuaccaggag

SEQ ID NO: 1578245 - RNA, 19 nt, Artificial Sequence
  Description of Artificial Sequence: Synthetic oligonucleotide
cauagccaaguugcgaaug

SEQ ID NO: 1578246 - RNA, 19 nt, Artificial Sequence
  Description of Artificial Sequence: Synthetic oligonucleotide
uugcaauucccucgugaau

SEQ ID NO: 1578247 - RNA, 19 nt, Artificial Sequence
  Description of Artificial Sequence: Synthetic oligonucleotide
agaauggguggcaacacau

SEQ ID NO: 1578248 - RNA, 19 nt, Artificial Sequence
  Description of Artificial Sequence: Synthetic oligonucleotide
uggggcauaacagcaucca

SEQ ID NO: 1578249 - RNA, 19 nt, Artificial Sequence
  Description of Artificial Sequence: Synthetic oligonucleotide
aucagcuguacaauugcga

SEQ ID NO: 1578250 - RNA, 19 nt, Artificial Sequence
  Description of Artificial Sequence: Synthetic oligonucleotide
caaucgccgccuaugacca

SEQ ID NO: 1578251 - RNA, 19 nt, Artificial Sequence
  Description of Artificial Sequence: Synthetic oligonucleotide
uacaugcaacuguuuccug

SEQ ID NO: 1578252 - RNA, 19 nt, Artificial Sequence
  Description of Artificial Sequence: Synthetic oligonucleotide
ugcuugcguguuccuauca

SEQ ID NO: 1578253 - RNA, 19 nt, Artificial Sequence
  Description of Artificial Sequence: Synthetic oligonucleotide
uaauggacuugugcugaug

SEQ ID NO: 1578254 - RNA, 19 nt, Artificial Sequence
  Description of Artificial Sequence: Synthetic oligonucleotide
acaauacaaucaaucuaca

SEQ ID NO: 1578255 - RNA, 19 nt, Artificial Sequence
  Description of Artificial Sequence: Synthetic oligonucleotide
gucuguagcaaggaaacua

SEQ ID NO: 1578256 - RNA, 19 nt, Artificial Sequence
  Description of Artificial Sequence: Synthetic oligonucleotide
caauugcgaagaacugcug

SEQ ID NO: 1578257 - RNA, 19 nt, Artificial Sequence
  Description of Artificial Sequence: Synthetic oligonucleotide
cacuaacuuaaaagguaca

SEQ ID NO: 1578258 - RNA, 19 nt, Artificial Sequence
  Description of Artificial Sequence: Synthetic oligonucleotide
ccugaauuacagaaaagaa

SEQ ID NO: 1578259 - RNA, 19 nt, Artificial Sequence
  Description of Artificial Sequence: Synthetic oligonucleotide
gcucucauguuaucuuucc

SEQ ID NO: 1578260 - RNA, 19 nt, Artificial Sequence
  Description of Artificial Sequence: Synthetic oligonucleotide
gcaauucccucgugaauag

SEQ ID NO: 1578261 - RNA, 19 nt, Artificial Sequence
  Description of Artificial Sequence: Synthetic oligonucleotide
agcugcucucauguuaucu

SEQ ID NO: 1578262 - RNA, 19 nt, Artificial Sequence
  Description of Artificial Sequence: Synthetic oligonucleotide
gaucccaaugggccccggc

SEQ ID NO: 1578263 - RNA, 19 nt, Artificial Sequence
  Description of Artificial Sequence: Synthetic oligonucleotide
ucagugguuuacguugaau

SEQ ID NO: 1578264 - RNA, 19 nt, Artificial Sequence
  Description of Artificial Sequence: Synthetic oligonucleotide
gcuucuaccuaccaggagu

SEQ ID NO: 1578265 - RNA, 19 nt, Artificial Sequence
  Description of Artificial Sequence: Synthetic oligonucleotide
aaguugcgaauggauccca

SEQ ID NO: 1578266 - RNA, 19 nt, Artificial Sequence
  Description of Artificial Sequence: Synthetic oligonucleotide
gaguuuggggcgacaguug

SEQ ID NO: 1578267 - RNA, 19 nt, Artificial Sequence
  Description of Artificial Sequence: Synthetic oligonucleotide
ugucuguagcaaggaaacu

SEQ ID NO: 1578268 - RNA, 19 nt, Artificial Sequence
  Description of Artificial Sequence: Synthetic oligonucleotide
ccucgugaauagaacgagg

SEQ ID NO: 1578269 - RNA, 19 nt, Artificial Sequence
  Description of Artificial Sequence: Synthetic oligonucleotide
uggcuguugcaauucccuc

SEQ ID NO: 1578270 - RNA, 19 nt, Artificial Sequence
  Description of Artificial Sequence: Synthetic oligonucleotide
uucagugguuuacguugaa

SEQ ID NO: 1578271 - RNA, 19 nt, Artificial Sequence
  Description of Artificial Sequence: Synthetic oligonucleotide
gccgccuaugaccauuuag

SEQ ID NO: 1578272 - RNA, 19 nt, Artificial Sequence
  Description of Artificial Sequence: Synthetic oligonucleotide
gcuugcguguuccuaucag

SEQ ID NO: 1578273 - RNA, 19 nt, Artificial Sequence
  Description of Artificial Sequence: Synthetic oligonucleotide
acaaaagggcugaauuaaa

SEQ ID NO: 1578274 - RNA, 19 nt, Artificial Sequence
  Description of Artificial Sequence: Synthetic oligonucleotide
gucaaucgccgccuaugac

SEQ ID NO: 1578275 - RNA, 19 nt, Artificial Sequence
  Description of Artificial Sequence: Synthetic oligonucleotide
cagugguuuacguugaauu

SEQ ID NO: 1578276 - RNA, 19 nt, Artificial Sequence
  Description of Artificial Sequence: Synthetic oligonucleotide
aguauguacucaacacaaa

SEQ ID NO: 1578277 - RNA, 19 nt, Artificial Sequence
  Description of Artificial Sequence: Synthetic oligonucleotide
cuuuugacauaagcaauua

SEQ ID NO: 1578278 - RNA, 19 nt, Artificial Sequence
  Description of Artificial Sequence: Synthetic oligonucleotide
gugcggcagaguuauuuca

SEQ ID NO: 1578279 - RNA, 19 nt, Artificial Sequence
  Description of Artificial Sequence: Synthetic oligonucleotide
cagaguuauuucacaucca

SEQ ID NO: 1578280 - RNA, 19 nt, Artificial Sequence
  Description of Artificial Sequence: Synthetic oligonucleotide
ggcauauuuacaaggggaa

SEQ ID NO: 1578281 - RNA, 19 nt, Artificial Sequence
  Description of Artificial Sequence: Synthetic oligonucleotide
ggaguaaggccugaacuca

SEQ ID NO: 1578282 - RNA, 19 nt, Artificial Sequence
  Description of Artificial Sequence: Synthetic oligonucleotide
ucaagucgauaagcaaaau

SEQ ID NO: 1578283 - RNA, 19 nt, Artificial Sequence
  Description of Artificial Sequence: Synthetic oligonucleotide
accacacaugugcacgaau

SEQ ID NO: 1578284 - RNA, 19 nt, Artificial Sequence
  Description of Artificial Sequence: Synthetic oligonucleotide
uaugaccauuuagcucaag

SEQ ID NO: 1578285 - RNA, 19 nt, Artificial Sequence
  Description of Artificial Sequence: Synthetic oligonucleotide
cuaccuaccaggaguuuua

SEQ ID NO: 1578286 - RNA, 19 nt, Artificial Sequence
  Description of Artificial Sequence: Synthetic oligonucleotide
auugacucacaaggggaaa

SEQ ID NO: 1578287 - RNA, 19 nt, Artificial Sequence
  Description of Artificial Sequence: Synthetic oligonucleotide
gcucaagucgauaagcaaa

SEQ ID NO: 1578288 - RNA, 19 nt, Artificial Sequence
  Description of Artificial Sequence: Synthetic oligonucleotide
gccuaugaccauuuagcuc

SEQ ID NO: 1578289 - RNA, 19 nt, Artificial Sequence
  Description of Artificial Sequence: Synthetic oligonucleotide
acaugugaguuuggggcga

SEQ ID NO: 1578290 - RNA, 19 nt, Artificial Sequence
  Description of Artificial Sequence: Synthetic oligonucleotide
guguuacuacaugcaacug

SEQ ID NO: 1578291 - RNA, 19 nt, Artificial Sequence
  Description of Artificial Sequence: Synthetic oligonucleotide
uugcuugcguguuccuauc

SEQ ID NO: 1578292 - RNA, 19 nt, Artificial Sequence
  Description of Artificial Sequence: Synthetic oligonucleotide
cucauguuaucuuuccuuu

SEQ ID NO: 1578293 - RNA, 19 nt, Artificial Sequence
  Description of Artificial Sequence: Synthetic oligonucleotide
cuccaagacuaacaugaaa

SEQ ID NO: 1578294 - RNA, 19 nt, Artificial Sequence
  Description of Artificial Sequence: Synthetic oligonucleotide
cuacaugcaacuguuuccu

SEQ ID NO: 1578295 - RNA, 19 nt, Artificial Sequence
  Description of Artificial Sequence: Synthetic oligonucleotide
gaacgaggagucgcuuccc

SEQ ID NO: 1578296 - RNA, 19 nt, Artificial Sequence
  Description of Artificial Sequence: Synthetic oligonucleotide
caagucgauaagcaaaauu

SEQ ID NO: 1578297 - RNA, 19 nt, Artificial Sequence
  Description of Artificial Sequence: Synthetic oligonucleotide
gguggggcauaacagcauc

SEQ ID NO: 1578298 - RNA, 19 nt, Artificial Sequence
  Description of Artificial Sequence: Synthetic oligonucleotide
guggggcauaacagcaucc

SEQ ID NO: 1578299 - RNA, 19 nt, Artificial Sequence
  Description of Artificial Sequence: Synthetic oligonucleotide
ggccugaacucacagagcu

SEQ ID NO: 1578300 - RNA, 19 nt, Artificial Sequence
  Description of Artificial Sequence: Synthetic oligonucleotide
ccaucuuacaccugcuaca

SEQ ID NO: 1578301 - RNA, 19 nt, Artificial Sequence
  Description of Artificial Sequence: Synthetic oligonucleotide
ccuguauuaacagccuuuc

SEQ ID NO: 1578302 - RNA, 19 nt, Artificial Sequence
  Description of Artificial Sequence: Synthetic oligonucleotide
cacuauucauaauggcugu

SEQ ID NO: 1578303 - RNA, 19 nt, Artificial Sequence
  Description of Artificial Sequence: Synthetic oligonucleotide
auggguggcaacacauagu

SEQ ID NO: 1578304 - RNA, 19 nt, Artificial Sequence
  Description of Artificial Sequence: Synthetic oligonucleotide
agugguccaugaccacaca

SEQ ID NO: 1578305 - RNA, 19 nt, Artificial Sequence
  Description of Artificial Sequence: Synthetic oligonucleotide
caaggaaacuaugucuucu

SEQ ID NO: 1578306 - RNA, 19 nt, Artificial Sequence
  Description of Artificial Sequence: Synthetic oligonucleotide
gaggagucgcuucccaagu

SEQ ID NO: 1578307 - RNA, 19 nt, Artificial Sequence
  Description of Artificial Sequence: Synthetic oligonucleotide
acgaggagucgcuucccaa

SEQ ID NO: 1578308 - RNA, 19 nt, Artificial Sequence
  Description of Artificial Sequence: Synthetic oligonucleotide
uggaucccaaugggccccg

SEQ ID NO: 1578309 - RNA, 19 nt, Artificial Sequence
  Description of Artificial Sequence: Synthetic oligonucleotide
ugcaucagguggggcauaa

SEQ ID NO: 1578310 - RNA, 19 nt, Artificial Sequence
  Description of Artificial Sequence: Synthetic oligonucleotide
gugguuuacguugaauuau

SEQ ID NO: 1578311 - RNA, 19 nt, Artificial Sequence
  Description of Artificial Sequence: Synthetic oligonucleotide
aaccacacaugugcacgaa

SEQ ID NO: 1578312 - RNA, 19 nt, Artificial Sequence
  Description of Artificial Sequence: Synthetic oligonucleotide
gcacuauguauugacucac

SEQ ID NO: 1578313 - RNA, 19 nt, Artificial Sequence
  Description of Artificial Sequence: Synthetic oligonucleotide
cauaagcaauuaugaauau

SEQ ID NO: 1578314 - RNA, 19 nt, Artificial Sequence
  Description of Artificial Sequence: Synthetic oligonucleotide
ccuugccacuuacaggaag

SEQ ID NO: 1578315 - RNA, 19 nt, Artificial Sequence
  Description of Artificial Sequence: Synthetic oligonucleotide
gaauggguggcaacacaua

SEQ ID NO: 1578316 - RNA, 19 nt, Artificial Sequence
  Description of Artificial Sequence: Synthetic oligonucleotide
gccaaguugcgaauggauc

SEQ ID NO: 1578317 - RNA, 19 nt, Artificial Sequence
  Description of Artificial Sequence: Synthetic oligonucleotide
cacucugacacugaagaau

SEQ ID NO: 1578318 - RNA, 19 nt, Artificial Sequence
  Description of Artificial Sequence: Synthetic oligonucleotide
cugugcaaugcugguguuc

SEQ ID NO: 1578319 - RNA, 19 nt, Artificial Sequence
  Description of Artificial Sequence: Synthetic oligonucleotide
ggcuugucaguuaaagaaa

SEQ ID NO: 1578320 - RNA, 19 nt, Artificial Sequence
  Description of Artificial Sequence: Synthetic oligonucleotide
ggcaggucggacaacaugu

SEQ ID NO: 1578321 - RNA, 19 nt, Artificial Sequence
  Description of Artificial Sequence: Synthetic oligonucleotide
gcugguguucaaaacacua

SEQ ID NO: 1578322 - RNA, 19 nt, Artificial Sequence
  Description of Artificial Sequence: Synthetic oligonucleotide
auagaacgaggagucgcuu

SEQ ID NO: 1578323 - RNA, 19 nt, Artificial Sequence
  Description of Artificial Sequence: Synthetic oligonucleotide
gagucgcuucccaagucaa

SEQ ID NO: 1578324 - RNA, 19 nt, Artificial Sequence
  Description of Artificial Sequence: Synthetic oligonucleotide
agaccaucuuacaccugcu

SEQ ID NO: 1578325 - RNA, 19 nt, Artificial Sequence
  Description of Artificial Sequence: Synthetic oligonucleotide
cgaggagucgcuucccaag

SEQ ID NO: 1578326 - RNA, 19 nt, Artificial Sequence
  Description of Artificial Sequence: Synthetic oligonucleotide
ggacuugugcugaugcauc

SEQ ID NO: 1578327 - RNA, 19 nt, Artificial Sequence
  Description of Artificial Sequence: Synthetic oligonucleotide
guugcgaauggaucccaau

SEQ ID NO: 1578328 - RNA, 19 nt, Artificial Sequence
  Description of Artificial Sequence: Synthetic oligonucleotide
caugugaguuuggggcgac

SEQ ID NO: 1578329 - RNA, 19 nt, Artificial Sequence
  Description of Artificial Sequence: Synthetic oligonucleotide
cuucuaccuaccaggaguu

SEQ ID NO: 1578330 - RNA, 19 nt, Artificial Sequence
  Description of Artificial Sequence: Synthetic oligonucleotide
aaucgccgccuaugaccau

SEQ ID NO: 1578331 - RNA, 19 nt, Artificial Sequence
  Description of Artificial Sequence: Synthetic oligonucleotide
cccucgugaauagaacgag

SEQ ID NO: 1578332 - RNA, 19 nt, Artificial Sequence
  Description of Artificial Sequence: Synthetic oligonucleotide
gugcacgaauguguagcac

SEQ ID NO: 1578333 - RNA, 19 nt, Artificial Sequence
  Description of Artificial Sequence: Synthetic oligonucleotide
gcguguuccuaucagcugu

SEQ ID NO: 1578334 - RNA, 19 nt, Artificial Sequence
  Description of Artificial Sequence: Synthetic oligonucleotide
ggucggacaacaugugagu

SEQ ID NO: 1578335 - RNA, 19 nt, Artificial Sequence
  Description of Artificial Sequence: Synthetic oligonucleotide
cucucauguuaucuuuccu

SEQ ID NO: 1578336 - RNA, 19 nt, Artificial Sequence
  Description of Artificial Sequence: Synthetic oligonucleotide
ucgccgccuaugaccauuu

SEQ ID NO: 1578337 - RNA, 19 nt, Artificial Sequence
  Description of Artificial Sequence: Synthetic oligonucleotide
gcggcagaguuauuucaca

SEQ ID NO: 1578338 - RNA, 19 nt, Artificial Sequence
  Description of Artificial Sequence: Synthetic oligonucleotide
cuguauuaacagccuuucu

SEQ ID NO: 1578339 - RNA, 19 nt, Artificial Sequence
  Description of Artificial Sequence: Synthetic oligonucleotide
cccaaugggccccggcagg

SEQ ID NO: 1578340 - RNA, 19 nt, Artificial Sequence
  Description of Artificial Sequence: Synthetic oligonucleotide
aguugcgaauggaucccaa

SEQ ID NO: 1578341 - RNA, 19 nt, Artificial Sequence
  Description of Artificial Sequence: Synthetic oligonucleotide
cccaucuuagguauauaua

SEQ ID NO: 1578342 - RNA, 19 nt, Artificial Sequence
  Description of Artificial Sequence: Synthetic oligonucleotide
aucgccgccuaugaccauu

SEQ ID NO: 1578343 - RNA, 19 nt, Artificial Sequence
  Description of Artificial Sequence: Synthetic oligonucleotide
caccugcuacagcuuugac

SEQ ID NO: 1578344 - RNA, 19 nt, Artificial Sequence
  Description of Artificial Sequence: Synthetic oligonucleotide
cuaugaccauuuagcucaa

SEQ ID NO: 1578345 - RNA, 19 nt, Artificial Sequence
  Description of Artificial Sequence: Synthetic oligonucleotide
guguuccuaucagcuguac

SEQ ID NO: 1578346 - RNA, 19 nt, Artificial Sequence
  Description of Artificial Sequence: Synthetic oligonucleotide
cgugaauagaacgaggagu

SEQ ID NO: 1578347 - RNA, 19 nt, Artificial Sequence
  Description of Artificial Sequence: Synthetic oligonucleotide
uucuaccuaccaggaguuu

SEQ ID NO: 1578348 - RNA, 19 nt, Artificial Sequence
  Description of Artificial Sequence: Synthetic oligonucleotide
cuggugaccaucguauuuu

SEQ ID NO: 1578349 - RNA, 19 nt, Artificial Sequence
  Description of Artificial Sequence: Synthetic oligonucleotide
ggggcauaacagcauccaa

SEQ ID NO: 1578350 - RNA, 19 nt, Artificial Sequence
  Description of Artificial Sequence: Synthetic oligonucleotide
ggccacucugacacugaag

SEQ ID NO: 1578351 - RNA, 19 nt, Artificial Sequence
  Description of Artificial Sequence: Synthetic oligonucleotide
cacauccagaagaggcaua

SEQ ID NO: 1578352 - RNA, 19 nt, Artificial Sequence
  Description of Artificial Sequence: Synthetic oligonucleotide
aggagccuugccacuuaca

SEQ ID NO: 1578353 - RNA, 19 nt, Artificial Sequence
  Description of Artificial Sequence: Synthetic oligonucleotide
agucgcuucccaagucaau

SEQ ID NO: 1578354 - RNA, 19 nt, Artificial Sequence
  Description of Artificial Sequence: Synthetic oligonucleotide
ugcccaucuuagguauaua

SEQ ID NO: 1578355 - RNA, 19 nt, Artificial Sequence
  Description of Artificial Sequence: Synthetic oligonucleotide
agguggggcauaacagcau

SEQ ID NO: 1578356 - RNA, 19 nt, Artificial Sequence
  Description of Artificial Sequence: Synthetic oligonucleotide
ccugcaggguuguaaugga

SEQ ID NO: 1578357 - RNA, 19 nt, Artificial Sequence
  Description of Artificial Sequence: Synthetic oligonucleotide
caauucccucgugaauaga

SEQ ID NO: 1578358 - RNA, 19 nt, Artificial Sequence
  Description of Artificial Sequence: Synthetic oligonucleotide
augugaguuuggggcgaca

SEQ ID NO: 1578359 - RNA, 19 nt, Artificial Sequence
  Description of Artificial Sequence: Synthetic oligonucleotide
cacgaauguguagcacaga

SEQ ID NO: 1578360 - RNA, 19 nt, Artificial Sequence
  Description of Artificial Sequence: Synthetic oligonucleotide
uccucgugcucugccuuuu

SEQ ID NO: 1578361 - RNA, 19 nt, Artificial Sequence
  Description of Artificial Sequence: Synthetic oligonucleotide
gugugcggcagaguuauuu

SEQ ID NO: 1578362 - RNA, 19 nt, Artificial Sequence
  Description of Artificial Sequence: Synthetic oligonucleotide
cucgugcucugccuuuucu

SEQ ID NO: 1578363 - RNA, 19 nt, Artificial Sequence
  Description of Artificial Sequence: Synthetic oligonucleotide
ggguuguaauggacuugug

SEQ ID NO: 1578364 - RNA, 19 nt, Artificial Sequence
  Description of Artificial Sequence: Synthetic oligonucleotide
guuuggggcgacaguugcu

SEQ ID NO: 1578365 - RNA, 19 nt, Artificial Sequence
  Description of Artificial Sequence: Synthetic oligonucleotide
gcagcacuauguauugacu

SEQ ID NO: 1578366 - RNA, 19 nt, Artificial Sequence
  Description of Artificial Sequence: Synthetic oligonucleotide
ggguggcaacacauaguca

SEQ ID NO: 1578367 - RNA, 19 nt, Artificial Sequence
  Description of Artificial Sequence: Synthetic oligonucleotide
gguuuacguugaauuauuu

SEQ ID NO: 1578368 - RNA, 19 nt, Artificial Sequence
  Description of Artificial Sequence: Synthetic oligonucleotide
ggcagucacuauucauaau

SEQ ID NO: 1578369 - RNA, 19 nt, Artificial Sequence
  Description of Artificial Sequence: Synthetic oligonucleotide
augcaucagguggggcaua

SEQ ID NO: 1578370 - RNA, 19 nt, Artificial Sequence
  Description of Artificial Sequence: Synthetic oligonucleotide
ggaucccaaugggccccgg

SEQ ID NO: 1578371 - RNA, 19 nt, Artificial Sequence
  Description of Artificial Sequence: Synthetic oligonucleotide
ccauuuagcucaagucgau

SEQ ID NO: 1578372 - RNA, 19 nt, Artificial Sequence
  Description of Artificial Sequence: Synthetic oligonucleotide
gccccggcaggucggacaa

SEQ ID NO: 1578373 - RNA, 19 nt, Artificial Sequence
  Description of Artificial Sequence: Synthetic oligonucleotide
cgccuaugaccauuuagcu

SEQ ID NO: 1578374 - RNA, 19 nt, Artificial Sequence
  Description of Artificial Sequence: Synthetic oligonucleotide
cccggcaggucggacaaca

SEQ ID NO: 1578375 - RNA, 19 nt, Artificial Sequence
  Description of Artificial Sequence: Synthetic oligonucleotide
ccucgugcucugccuuuuc

SEQ ID NO: 1578376 - RNA, 19 nt, Artificial Sequence
  Description of Artificial Sequence: Synthetic oligonucleotide
gguuggcaagauugccauu

SEQ ID NO: 1578377 - RNA, 19 nt, Artificial Sequence
  Description of Artificial Sequence: Synthetic oligonucleotide
ccauagccaaguugcgaau

SEQ ID NO: 1578378 - RNA, 19 nt, Artificial Sequence
  Description of Artificial Sequence: Synthetic oligonucleotide
ccaagucaaucgccgccua

SEQ ID NO: 1578379 - RNA, 19 nt, Artificial Sequence
  Description of Artificial Sequence: Synthetic oligonucleotide
caacagcaccaggaagguu

SEQ ID NO: 1578380 - RNA, 19 nt, Artificial Sequence
  Description of Artificial Sequence: Synthetic oligonucleotide
gggccccggcaggucggac

SEQ ID NO: 1578381 - RNA, 19 nt, Artificial Sequence
  Description of Artificial Sequence: Synthetic oligonucleotide
ccccggcaggucggacaac

SEQ ID NO: 1578382 - RNA, 19 nt, Artificial Sequence
  Description of Artificial Sequence: Synthetic oligonucleotide
cgccgccuaugaccauuua

SEQ ID NO: 1578383 - RNA, 19 nt, Artificial Sequence
  Description of Artificial Sequence: Synthetic oligonucleotide
aaaccuacuaaagaaagcc

SEQ ID NO: 1578384 - RNA, 19 nt, Artificial Sequence
  Description of Artificial Sequence: Synthetic oligonucleotide
agucuaagggcauaggucc

SEQ ID NO: 1578385 - RNA, 19 nt, Artificial Sequence
  Description of Artificial Sequence: Synthetic oligonucleotide
uaugauuucagcccucugg

SEQ ID NO: 1578386 - RNA, 19 nt, Artificial Sequence
  Description of Artificial Sequence: Synthetic oligonucleotide
gauaagucagaccaaaggc

SEQ ID NO: 1578387 - RNA, 19 nt, Artificial Sequence
  Description of Artificial Sequence: Synthetic oligonucleotide
uacaauaugauuucagccc

SEQ ID NO: 1578388 - RNA, 19 nt, Artificial Sequence
  Description of Artificial Sequence: Synthetic oligonucleotide
gaucauaguggucagaacc

SEQ ID NO: 1578389 - RNA, 19 nt, Artificial Sequence
  Description of Artificial Sequence: Synthetic oligonucleotide
uaagauugacccaauauga

SEQ ID NO: 1578390 - RNA, 19 nt, Artificial Sequence
  Description of Artificial Sequence: Synthetic oligonucleotide
ucuacaauguuccuucuag

SEQ ID NO: 1578391 - RNA, 19 nt, Artificial Sequence
  Description of Artificial Sequence: Synthetic oligonucleotide
uauagugagucuaagggca

SEQ ID NO: 1578392 - RNA, 19 nt, Artificial Sequence
  Description of Artificial Sequence: Synthetic oligonucleotide
aaaaccaauggcaagcggg

SEQ ID NO: 1578393 - RNA, 19 nt, Artificial Sequence
  Description of Artificial Sequence: Synthetic oligonucleotide
ucaaagcucauccacaugu

SEQ ID NO: 1578394 - RNA, 19 nt, Artificial Sequence
  Description of Artificial Sequence: Synthetic oligonucleotide
cccaauaugaucuaguugg

SEQ ID NO: 1578395 - RNA, 19 nt, Artificial Sequence
  Description of Artificial Sequence: Synthetic oligonucleotide
uggauguugggaaagagcu

SEQ ID NO: 1578396 - RNA, 19 nt, Artificial Sequence
  Description of Artificial Sequence: Synthetic oligonucleotide
cuaagauugacccaauaug

SEQ ID NO: 1578397 - RNA, 19 nt, Artificial Sequence
  Description of Artificial Sequence: Synthetic oligonucleotide
gaucuaguugggcacaugg

SEQ ID NO: 1578398 - RNA, 19 nt, Artificial Sequence
  Description of Artificial Sequence: Synthetic oligonucleotide
ugaacuacaucucugcuuc

SEQ ID NO: 1578399 - RNA, 19 nt, Artificial Sequence
  Description of Artificial Sequence: Synthetic oligonucleotide
ucuaugaugggaauggaau

SEQ ID NO: 1578400 - RNA, 19 nt, Artificial Sequence
  Description of Artificial Sequence: Synthetic oligonucleotide
auaugaucuaguugggcac

SEQ ID NO: 1578401 - RNA, 19 nt, Artificial Sequence
  Description of Artificial Sequence: Synthetic oligonucleotide
guccuuaucuguuaagugg

SEQ ID NO: 1578402 - RNA, 19 nt, Artificial Sequence
  Description of Artificial Sequence: Synthetic oligonucleotide
uuaagugggcuacagugcc

SEQ ID NO: 1578403 - RNA, 19 nt, Artificial Sequence
  Description of Artificial Sequence: Synthetic oligonucleotide
aauggccccacccagaaaa

SEQ ID NO: 1578404 - RNA, 19 nt, Artificial Sequence
  Description of Artificial Sequence: Synthetic oligonucleotide
ugggacaauuucaaggucc

SEQ ID NO: 1578405 - RNA, 19 nt, Artificial Sequence
  Description of Artificial Sequence: Synthetic oligonucleotide
acaagaugccuacucaagg

SEQ ID NO: 1578406 - RNA, 19 nt, Artificial Sequence
  Description of Artificial Sequence: Synthetic oligonucleotide
acuaaagaaagccucucug

SEQ ID NO: 1578407 - RNA, 19 nt, Artificial Sequence
  Description of Artificial Sequence: Synthetic oligonucleotide
agcauccugaacuacaucu

SEQ ID NO: 1578408 - RNA, 19 nt, Artificial Sequence
  Description of Artificial Sequence: Synthetic oligonucleotide
cuauagugagucuaagggc

SEQ ID NO: 1578409 - RNA, 19 nt, Artificial Sequence
  Description of Artificial Sequence: Synthetic oligonucleotide
ugucagagcaucuacaaua

SEQ ID NO: 1578410 - RNA, 19 nt, Artificial Sequence
  Description of Artificial Sequence: Synthetic oligonucleotide
ucugagaccaggaaacaga

SEQ ID NO: 1578411 - RNA, 19 nt, Artificial Sequence
  Description of Artificial Sequence: Synthetic oligonucleotide
ucuaguugggcacaugggu

SEQ ID NO: 1578412 - RNA, 19 nt, Artificial Sequence
  Description of Artificial Sequence: Synthetic oligonucleotide
ccuauagugagucuaaggg

SEQ ID NO: 1578413 - RNA, 19 nt, Artificial Sequence
  Description of Artificial Sequence: Synthetic oligonucleotide
uccuauagugagucuaagg

SEQ ID NO: 1578414 - RNA, 19 nt, Artificial Sequence
  Description of Artificial Sequence: Synthetic oligonucleotide
cauacguggucacugaggc

SEQ ID NO: 1578415 - RNA, 19 nt, Artificial Sequence
  Description of Artificial Sequence: Synthetic oligonucleotide
augaucaaaggcacaaagc

SEQ ID NO: 1578416 - RNA, 19 nt, Artificial Sequence
  Description of Artificial Sequence: Synthetic oligonucleotide
agcagugcugucuacaaug

SEQ ID NO: 1578417 - RNA, 19 nt, Artificial Sequence
  Description of Artificial Sequence: Synthetic oligonucleotide
gguauguccacacuuaaug

SEQ ID NO: 1578418 - RNA, 19 nt, Artificial Sequence
  Description of Artificial Sequence: Synthetic oligonucleotide
agcgugugaacuuuucuuc

SEQ ID NO: 1578419 - RNA, 19 nt, Artificial Sequence
  Description of Artificial Sequence: Synthetic oligonucleotide
cuuccuagcacucucugag

SEQ ID NO: 1578420 - RNA, 19 nt, Artificial Sequence
  Description of Artificial Sequence: Synthetic oligonucleotide
ugagucuaagggcauaggu

SEQ ID NO: 1578421 - RNA, 19 nt, Artificial Sequence
  Description of Artificial Sequence: Synthetic oligonucleotide
uacaucucugcuucaaagc

SEQ ID NO: 1578422 - RNA, 19 nt, Artificial Sequence
  Description of Artificial Sequence: Synthetic oligonucleotide
acagcaaaccuacuaaaga

SEQ ID NO: 1578423 - RNA, 19 nt, Artificial Sequence
  Description of Artificial Sequence: Synthetic oligonucleotide
aaaccaauggcaagcgggg

SEQ ID NO: 1578424 - RNA, 19 nt, Artificial Sequence
  Description of Artificial Sequence: Synthetic oligonucleotide
cacuucauugaccagggag

SEQ ID NO: 1578425 - RNA, 19 nt, Artificial Sequence
  Description of Artificial Sequence: Synthetic oligonucleotide
uacguggucacugaggccc

SEQ ID NO: 1578426 - RNA, 19 nt, Artificial Sequence
  Description of Artificial Sequence: Synthetic oligonucleotide
gaugccuacucaaggaagg

SEQ ID NO: 1578427 - RNA, 19 nt, Artificial Sequence
  Description of Artificial Sequence: Synthetic oligonucleotide
gaagucauagaucagcacu

SEQ ID NO: 1578428 - RNA, 19 nt, Artificial Sequence
  Description of Artificial Sequence: Synthetic oligonucleotide
auagcaggugagcuccucc

SEQ ID NO: 1578429 - RNA, 19 nt, Artificial Sequence
  Description of Artificial Sequence: Synthetic oligonucleotide
guugggaaagagcucaggc

SEQ ID NO: 1578430 - RNA, 19 nt, Artificial Sequence
  Description of Artificial Sequence: Synthetic oligonucleotide
gaccacuucauugaccagg

SEQ ID NO: 1578431 - RNA, 19 nt, Artificial Sequence
  Description of Artificial Sequence: Synthetic oligonucleotide
uguccuuaucuguuaagug

SEQ ID NO: 1578432 - RNA, 19 nt, Artificial Sequence
  Description of Artificial Sequence: Synthetic oligonucleotide
cagagcaucuacaauauga

SEQ ID NO: 1578433 - RNA, 19 nt, Artificial Sequence
  Description of Artificial Sequence: Synthetic oligonucleotide
uuaaugaguccccguaacu

SEQ ID NO: 1578434 - RNA, 19 nt, Artificial Sequence
  Description of Artificial Sequence: Synthetic oligonucleotide
uaaugaguccccguaacug

SEQ ID NO: 1578435 - RNA, 19 nt, Artificial Sequence
  Description of Artificial Sequence: Synthetic oligonucleotide
uggaaugaggugcugaguu

SEQ ID NO: 1578436 - RNA, 19 nt, Artificial Sequence
  Description of Artificial Sequence: Synthetic oligonucleotide
aaaccggccuucauucugc

SEQ ID NO: 1578437 - RNA, 19 nt, Artificial Sequence
  Description of Artificial Sequence: Synthetic oligonucleotide
gauuucagcccucuggcca

SEQ ID NO: 1578438 - RNA, 19 nt, Artificial Sequence
  Description of Artificial Sequence: Synthetic oligonucleotide
uccugaacuacaucucugc

SEQ ID NO: 1578439 - RNA, 19 nt, Artificial Sequence
  Description of Artificial Sequence: Synthetic oligonucleotide
aggaaggucaugaucaaag

SEQ ID NO: 1578440 - RNA, 19 nt, Artificial Sequence
  Description of Artificial Sequence: Synthetic oligonucleotide
gaccacucaggucaggcag

SEQ ID NO: 1578441 - RNA, 19 nt, Artificial Sequence
  Description of Artificial Sequence: Synthetic oligonucleotide
agcuugucagagcaucuac

SEQ ID NO: 1578442 - RNA, 19 nt, Artificial Sequence
  Description of Artificial Sequence: Synthetic oligonucleotide
aauaugauuucagcccucu

SEQ ID NO: 1578443 - RNA, 19 nt, Artificial Sequence
  Description of Artificial Sequence: Synthetic oligonucleotide
cugucuacaauguuccuuc

SEQ ID NO: 1578444 - RNA, 19 nt, Artificial Sequence
  Description of Artificial Sequence: Synthetic oligonucleotide
agugauauugcugccccgg

SEQ ID NO: 1578445 - RNA, 19 nt, Artificial Sequence
  Description of Artificial Sequence: Synthetic oligonucleotide
aagaugccuacucaaggaa

SEQ ID NO: 1578446 - RNA, 19 nt, Artificial Sequence
  Description of Artificial Sequence: Synthetic oligonucleotide
accuacuaaagaaagccuc

SEQ ID NO: 1578447 - RNA, 19 nt, Artificial Sequence
  Description of Artificial Sequence: Synthetic oligonucleotide
cuuaaugaguccccguaac

SEQ ID NO: 1578448 - RNA, 19 nt, Artificial Sequence
  Description of Artificial Sequence: Synthetic oligonucleotide
auaagucagaccaaaggca

SEQ ID NO: 1578449 - RNA, 19 nt, Artificial Sequence
  Description of Artificial Sequence: Synthetic oligonucleotide
uugaucauaguggucagaa

SEQ ID NO: 1578450 - RNA, 19 nt, Artificial Sequence
  Description of Artificial Sequence: Synthetic oligonucleotide
caauuucaagguccuauag

SEQ ID NO: 1578451 - RNA, 19 nt, Artificial Sequence
  Description of Artificial Sequence: Synthetic oligonucleotide
uuaucuguuaagugggcua

SEQ ID NO: 1578452 - RNA, 19 nt, Artificial Sequence
  Description of Artificial Sequence: Synthetic oligonucleotide
aaaucuugauccccaggaa

SEQ ID NO: 1578453 - RNA, 19 nt, Artificial Sequence
  Description of Artificial Sequence: Synthetic oligonucleotide
gauugacccaauaugaucu

SEQ ID NO: 1578454 - RNA, 19 nt, Artificial Sequence
  Description of Artificial Sequence: Synthetic oligonucleotide
cacaaaccggccuucauuc

SEQ ID NO: 1578455 - RNA, 19 nt, Artificial Sequence
  Description of Artificial Sequence: Synthetic oligonucleotide
cauaguggucagaaccagg

SEQ ID NO: 1578456 - RNA, 19 nt, Artificial Sequence
  Description of Artificial Sequence: Synthetic oligonucleotide
ugacccaauaugaucuagu

SEQ ID NO: 1578457 - RNA, 19 nt, Artificial Sequence
  Description of Artificial Sequence: Synthetic oligonucleotide
ucuguuaagugggcuacag

SEQ ID NO: 1578458 - RNA, 19 nt, Artificial Sequence
  Description of Artificial Sequence: Synthetic oligonucleotide
ugaggugcugaguugguaa

SEQ ID NO: 1578459 - RNA, 19 nt, Artificial Sequence
  Description of Artificial Sequence: Synthetic oligonucleotide
guagucgaucgccagcagg

SEQ ID NO: 1578460 - RNA, 19 nt, Artificial Sequence
  Description of Artificial Sequence: Synthetic oligonucleotide
accugugguauguccacac

SEQ ID NO: 1578461 - RNA, 19 nt, Artificial Sequence
  Description of Artificial Sequence: Synthetic oligonucleotide
uggcaagcggggcugagcc

SEQ ID NO: 1578462 - RNA, 19 nt, Artificial Sequence
  Description of Artificial Sequence: Synthetic oligonucleotide
ugcuacagcaaaccuacua

SEQ ID NO: 1578463 - RNA, 19 nt, Artificial Sequence
  Description of Artificial Sequence: Synthetic oligonucleotide
acccaauaugaucuaguug

SEQ ID NO: 1578464 - RNA, 19 nt, Artificial Sequence
  Description of Artificial Sequence: Synthetic oligonucleotide
aaccaauggcaagcggggc

SEQ ID NO: 1578465 - RNA, 19 nt, Artificial Sequence
  Description of Artificial Sequence: Synthetic oligonucleotide
cuaguugggcacauggguc

SEQ ID NO: 1578466 - RNA, 19 nt, Artificial Sequence
  Description of Artificial Sequence: Synthetic oligonucleotide
acuugacauacguggucac

SEQ ID NO: 1578467 - RNA, 19 nt, Artificial Sequence
  Description of Artificial Sequence: Synthetic oligonucleotide
ucauucugcuacagcaaac

SEQ ID NO: 1578468 - RNA, 19 nt, Artificial Sequence
  Description of Artificial Sequence: Synthetic oligonucleotide
gaccgggcaggguugaucc

SEQ ID NO: 1578469 - RNA, 19 nt, Artificial Sequence
  Description of Artificial Sequence: Synthetic oligonucleotide
uuacccaggcagaaacuga

SEQ ID NO: 1578470 - RNA, 19 nt, Artificial Sequence
  Description of Artificial Sequence: Synthetic oligonucleotide
agccaaaugaccgggcagg

SEQ ID NO: 1578471 - RNA, 19 nt, Artificial Sequence
  Description of Artificial Sequence: Synthetic oligonucleotide
aguuucgggugaucacagc

SEQ ID NO: 1578472 - RNA, 19 nt, Artificial Sequence
  Description of Artificial Sequence: Synthetic oligonucleotide
agucacggcaccuccgguc

SEQ ID NO: 1578473 - RNA, 19 nt, Artificial Sequence
  Description of Artificial Sequence: Synthetic oligonucleotide
gaaguuucgggugaucaca

SEQ ID NO: 1578474 - RNA, 19 nt, Artificial Sequence
  Description of Artificial Sequence: Synthetic oligonucleotide
guuucgggugaucacagca

SEQ ID NO: 1578475 - RNA, 19 nt, Artificial Sequence
  Description of Artificial Sequence: Synthetic oligonucleotide
ugccgaugaucucaaugcc

SEQ ID NO: 1578476 - RNA, 19 nt, Artificial Sequence
  Description of Artificial Sequence: Synthetic oligonucleotide
gacauacguggucacugag

SEQ ID NO: 1578477 - RNA, 19 nt, Artificial Sequence
  Description of Artificial Sequence: Synthetic oligonucleotide
auacguggucacugaggcc

SEQ ID NO: 1578478 - RNA, 19 nt, Artificial Sequence
  Description of Artificial Sequence: Synthetic oligonucleotide
ugauauugcugccccggac

SEQ ID NO: 1578479 - RNA, 19 nt, Artificial Sequence
  Description of Artificial Sequence: Synthetic oligonucleotide
aaggcgggaccacucaggu

SEQ ID NO: 1578480 - RNA, 19 nt, Artificial Sequence
  Description of Artificial Sequence: Synthetic oligonucleotide
uucaaagcucauccacaug

SEQ ID NO: 1578481 - RNA, 19 nt, Artificial Sequence
  Description of Artificial Sequence: Synthetic oligonucleotide
cuaagucacggcaccuccg

SEQ ID NO: 1578482 - RNA, 19 nt, Artificial Sequence
  Description of Artificial Sequence: Synthetic oligonucleotide
ggaguggacagacaaggcc

SEQ ID NO: 1578483 - RNA, 19 nt, Artificial Sequence
  Description of Artificial Sequence: Synthetic oligonucleotide
auagaucagcacugccagg

SEQ ID NO: 1578484 - RNA, 19 nt, Artificial Sequence
  Description of Artificial Sequence: Synthetic oligonucleotide
auaguggucagaaccaggu

SEQ ID NO: 1578485 - RNA, 19 nt, Artificial Sequence
  Description of Artificial Sequence: Synthetic oligonucleotide
aguguccuuaucuguuaag

SEQ ID NO: 1578486 - RNA, 19 nt, Artificial Sequence
  Description of Artificial Sequence: Synthetic oligonucleotide
uuccuagcacucucugagg

SEQ ID NO: 1578487 - RNA, 19 nt, Artificial Sequence
  Description of Artificial Sequence: Synthetic oligonucleotide
gagucuaagggcauagguc

SEQ ID NO: 1578488 - RNA, 19 nt, Artificial Sequence
  Description of Artificial Sequence: Synthetic oligonucleotide
gcaaaccuacuaaagaaag

SEQ ID NO: 1578489 - RNA, 19 nt, Artificial Sequence
  Description of Artificial Sequence: Synthetic oligonucleotide
gagauaagucagaccaaag

SEQ ID NO: 1578490 - RNA, 19 nt, Artificial Sequence
  Description of Artificial Sequence: Synthetic oligonucleotide
aaguuucgggugaucacag

SEQ ID NO: 1578491 - RNA, 19 nt, Artificial Sequence
  Description of Artificial Sequence: Synthetic oligonucleotide
ucaagguccuauagugagu

SEQ ID NO: 1578492 - RNA, 19 nt, Artificial Sequence
  Description of Artificial Sequence: Synthetic oligonucleotide
gucggugguggccagcacg

SEQ ID NO: 1578493 - RNA, 19 nt, Artificial Sequence
  Description of Artificial Sequence: Synthetic oligonucleotide
aaccaggugggaugggccu

SEQ ID NO: 1578494 - RNA, 19 nt, Artificial Sequence
  Description of Artificial Sequence: Synthetic oligonucleotide
gaucccacagccaguguag

SEQ ID NO: 1578495 - RNA, 19 nt, Artificial Sequence
  Description of Artificial Sequence: Synthetic oligonucleotide
caauaugaucuaguugggc

SEQ ID NO: 1578496 - RNA, 19 nt, Artificial Sequence
  Description of Artificial Sequence: Synthetic oligonucleotide
agugagucuaagggcauag

SEQ ID NO: 1578497 - RNA, 19 nt, Artificial Sequence
  Description of Artificial Sequence: Synthetic oligonucleotide
uaugaucuaguugggcaca

SEQ ID NO: 1578498 - RNA, 19 nt, Artificial Sequence
  Description of Artificial Sequence: Synthetic oligonucleotide
uguugggaaagagcucagg

SEQ ID NO: 1578499 - RNA, 19 nt, Artificial Sequence
  Description of Artificial Sequence: Synthetic oligonucleotide
aagauugacccaauaugau

SEQ ID NO: 1578500 - RNA, 19 nt, Artificial Sequence
  Description of Artificial Sequence: Synthetic oligonucleotide
acuuaaugaguccccguaa

SEQ ID NO: 1578501 - RNA, 19 nt, Artificial Sequence
  Description of Artificial Sequence: Synthetic oligonucleotide
acauacguggucacugagg

SEQ ID NO: 1578502 - RNA, 19 nt, Artificial Sequence
  Description of Artificial Sequence: Synthetic oligonucleotide
gcagaaacugagaaacugg

SEQ ID NO: 1578503 - RNA, 19 nt, Artificial Sequence
  Description of Artificial Sequence: Synthetic oligonucleotide
ucccuuucaccccucuaug

SEQ ID NO: 1578504 - RNA, 19 nt, Artificial Sequence
  Description of Artificial Sequence: Synthetic oligonucleotide
auucugcuacagcaaaccu

SEQ ID NO: 1578505 - RNA, 19 nt, Artificial Sequence
  Description of Artificial Sequence: Synthetic oligonucleotide
cacacuuaaugaguccccg

SEQ ID NO: 1578506 - RNA, 19 nt, Artificial Sequence
  Description of Artificial Sequence: Synthetic oligonucleotide
ugaguccccguaacugucc

SEQ ID NO: 1578507 - RNA, 19 nt, Artificial Sequence
  Description of Artificial Sequence: Synthetic oligonucleotide
ugacauacguggucacuga

SEQ ID NO: 1578508 - RNA, 19 nt, Artificial Sequence
  Description of Artificial Sequence: Synthetic oligonucleotide
ucgggugaucacagcagag

SEQ ID NO: 1578509 - RNA, 19 nt, Artificial Sequence
  Description of Artificial Sequence: Synthetic oligonucleotide
gugcugucuacaauguucc

SEQ ID NO: 1578510 - RNA, 19 nt, Artificial Sequence
  Description of Artificial Sequence: Synthetic oligonucleotide
caggcggucugugaggucg

SEQ ID NO: 1578511 - RNA, 19 nt, Artificial Sequence
  Description of Artificial Sequence: Synthetic oligonucleotide
accaauggcaagcggggcu

SEQ ID NO: 1578512 - RNA, 19 nt, Artificial Sequence
  Description of Artificial Sequence: Synthetic oligonucleotide
ugaucauaguggucagaac

SEQ ID NO: 1578513 - RNA, 19 nt, Artificial Sequence
  Description of Artificial Sequence: Synthetic oligonucleotide
caagguccuauagugaguc

SEQ ID NO: 1578514 - RNA, 19 nt, Artificial Sequence
  Description of Artificial Sequence: Synthetic oligonucleotide
uagcaggugagcuccuccc

SEQ ID NO: 1578515 - RNA, 19 nt, Artificial Sequence
  Description of Artificial Sequence: Synthetic oligonucleotide
uugacccaauaugaucuag

SEQ ID NO: 1578516 - RNA, 19 nt, Artificial Sequence
  Description of Artificial Sequence: Synthetic oligonucleotide
augaugggaauggaaugag

SEQ ID NO: 1578517 - RNA, 19 nt, Artificial Sequence
  Description of Artificial Sequence: Synthetic oligonucleotide
ggcgggaccacucagguca

SEQ ID NO: 1578518 - RNA, 19 nt, Artificial Sequence
  Description of Artificial Sequence: Synthetic oligonucleotide
caugggcuuuggauguugg

SEQ ID NO: 1578519 - RNA, 19 nt, Artificial Sequence
  Description of Artificial Sequence: Synthetic oligonucleotide
ugcugaguugguaaaucuu

SEQ ID NO: 1578520 - RNA, 19 nt, Artificial Sequence
  Description of Artificial Sequence: Synthetic oligonucleotide
ggugggaugggccugcccc

SEQ ID NO: 1578521 - RNA, 19 nt, Artificial Sequence
  Description of Artificial Sequence: Synthetic oligonucleotide
caaaccggccuucauucug

SEQ ID NO: 1578522 - RNA, 19 nt, Artificial Sequence
  Description of Artificial Sequence: Synthetic oligonucleotide
uugucagagcaucuacaau

SEQ ID NO: 1578523 - RNA, 19 nt, Artificial Sequence
  Description of Artificial Sequence: Synthetic oligonucleotide
agaugccuacucaaggaag

SEQ ID NO: 1578524 - RNA, 19 nt, Artificial Sequence
  Description of Artificial Sequence: Synthetic oligonucleotide
gacuuccuagcacucucug

SEQ ID NO: 1578525 - RNA, 19 nt, Artificial Sequence
  Description of Artificial Sequence: Synthetic oligonucleotide
aucuaguugggcacauggg

SEQ ID NO: 1578526 - RNA, 19 nt, Artificial Sequence
  Description of Artificial Sequence: Synthetic oligonucleotide
agccaccuaagucacggca

SEQ ID NO: 1578527 - RNA, 19 nt, Artificial Sequence
  Description of Artificial Sequence: Synthetic oligonucleotide
agagcaucuacaauaugau

SEQ ID NO: 1578528 - RNA, 19 nt, Artificial Sequence
  Description of Artificial Sequence: Synthetic oligonucleotide
aaaugaccgggcaggguug

SEQ ID NO: 1578529 - RNA, 19 nt, Artificial Sequence
  Description of Artificial Sequence: Synthetic oligonucleotide
uguagucgaucgccagcag

SEQ ID NO: 1578530 - RNA, 19 nt, Artificial Sequence
  Description of Artificial Sequence: Synthetic oligonucleotide
acaaggcgggaccacucag

SEQ ID NO: 1578531 - RNA, 19 nt, Artificial Sequence
  Description of Artificial Sequence: Synthetic oligonucleotide
acuuccuagcacucucuga

SEQ ID NO: 1578532 - RNA, 19 nt, Artificial Sequence
  Description of Artificial Sequence: Synthetic oligonucleotide
cagcauugggacaauuuca

SEQ ID NO: 1578533 - RNA, 19 nt, Artificial Sequence
  Description of Artificial Sequence: Synthetic oligonucleotide
ugccugcuagggaauggag

SEQ ID NO: 1578534 - RNA, 19 nt, Artificial Sequence
  Description of Artificial Sequence: Synthetic oligonucleotide
ucuaagggcauagguccug

SEQ ID NO: 1578535 - RNA, 19 nt, Artificial Sequence
  Description of Artificial Sequence: Synthetic oligonucleotide
cuucauugaccagggagug

SEQ ID NO: 1578536 - RNA, 19 nt, Artificial Sequence
  Description of Artificial Sequence: Synthetic oligonucleotide
ucuugauccccaggaagcu

SEQ ID NO: 1578537 - RNA, 19 nt, Artificial Sequence
  Description of Artificial Sequence: Synthetic oligonucleotide
acacaccuuggcccuuagc

SEQ ID NO: 1578538 - RNA, 19 nt, Artificial Sequence
  Description of Artificial Sequence: Synthetic oligonucleotide
acuacaucucugcuucaaa

SEQ ID NO: 1578539 - RNA, 19 nt, Artificial Sequence
  Description of Artificial Sequence: Synthetic oligonucleotide
gaaccaggugggaugggcc

SEQ ID NO: 1578540 - RNA, 19 nt, Artificial Sequence
  Description of Artificial Sequence: Synthetic oligonucleotide
caaugaauggccccaccca

SEQ ID NO: 1578541 - RNA, 19 nt, Artificial Sequence
  Description of Artificial Sequence: Synthetic oligonucleotide
aagagcgugcagcguguga

SEQ ID NO: 1578542 - RNA, 19 nt, Artificial Sequence
  Description of Artificial Sequence: Synthetic oligonucleotide
acacuuaaugaguccccgu

SEQ ID NO: 1578543 - RNA, 19 nt, Artificial Sequence
  Description of Artificial Sequence: Synthetic oligonucleotide
uaagugggcuacagugccu

SEQ ID NO: 1578544 - RNA, 19 nt, Artificial Sequence
  Description of Artificial Sequence: Synthetic oligonucleotide
agucagaccaaaggcaaau

SEQ ID NO: 1578545 - RNA, 19 nt, Artificial Sequence
  Description of Artificial Sequence: Synthetic oligonucleotide
aagguccuauagugagucu

SEQ ID NO: 1578546 - RNA, 19 nt, Artificial Sequence
  Description of Artificial Sequence: Synthetic oligonucleotide
agcagaaucccaggcaccu

SEQ ID NO: 1578547 - RNA, 19 nt, Artificial Sequence
  Description of Artificial Sequence: Synthetic oligonucleotide
ugcuaagauugacccaaua

SEQ ID NO: 1578548 - RNA, 19 nt, Artificial Sequence
  Description of Artificial Sequence: Synthetic oligonucleotide
agcauugggacaauuucaa

SEQ ID NO: 1578549 - RNA, 19 nt, Artificial Sequence
  Description of Artificial Sequence: Synthetic oligonucleotide
gucgaucgccagcaggugc

SEQ ID NO: 1578550 - RNA, 19 nt, Artificial Sequence
  Description of Artificial Sequence: Synthetic oligonucleotide
cacaccuucaggcggucug

SEQ ID NO: 1578551 - RNA, 19 nt, Artificial Sequence
  Description of Artificial Sequence: Synthetic oligonucleotide
cuacaauguuccuucuaga

SEQ ID NO: 1578552 - RNA, 19 nt, Artificial Sequence
  Description of Artificial Sequence: Synthetic oligonucleotide
ccaauaugaucuaguuggg

SEQ ID NO: 1578553 - RNA, 19 nt, Artificial Sequence
  Description of Artificial Sequence: Synthetic oligonucleotide
accuaagucacggcaccuc

SEQ ID NO: 1578554 - RNA, 19 nt, Artificial Sequence
  Description of Artificial Sequence: Synthetic oligonucleotide
caauaugauuucagcccuc

SEQ ID NO: 1578555 - RNA, 19 nt, Artificial Sequence
  Description of Artificial Sequence: Synthetic oligonucleotide
ugucuacaauguuccuucu

SEQ ID NO: 1578556 - RNA, 19 nt, Artificial Sequence
  Description of Artificial Sequence: Synthetic oligonucleotide
auugaccagggaguggaca

SEQ ID NO: 1578557 - RNA, 19 nt, Artificial Sequence
  Description of Artificial Sequence: Synthetic oligonucleotide
caguguagucgaucgccag

SEQ ID NO: 1578558 - RNA, 19 nt, Artificial Sequence
  Description of Artificial Sequence: Synthetic oligonucleotide
ggaaugaggugcugaguug

SEQ ID NO: 1578559 - RNA, 19 nt, Artificial Sequence
  Description of Artificial Sequence: Synthetic oligonucleotide
cucuaugaugggaauggaa

SEQ ID NO: 1578560 - RNA, 19 nt, Artificial Sequence
  Description of Artificial Sequence: Synthetic oligonucleotide
cuuccuugccacuugacau

SEQ ID NO: 1578561 - RNA, 19 nt, Artificial Sequence
  Description of Artificial Sequence: Synthetic oligonucleotide
cuuggcugcuaagauugac

SEQ ID NO: 1578562 - RNA, 19 nt, Artificial Sequence
  Description of Artificial Sequence: Synthetic oligonucleotide
cuagcacucucugagggga

SEQ ID NO: 1578563 - RNA, 19 nt, Artificial Sequence
  Description of Artificial Sequence: Synthetic oligonucleotide
cuugccacuugacauacgu

SEQ ID NO: 1578564 - RNA, 19 nt, Artificial Sequence
  Description of Artificial Sequence: Synthetic oligonucleotide
gugggaugggccugccccg

SEQ ID NO: 1578565 - RNA, 19 nt, Artificial Sequence
  Description of Artificial Sequence: Synthetic oligonucleotide
aaugaggugcugaguuggu

SEQ ID NO: 1578566 - RNA, 19 nt, Artificial Sequence
  Description of Artificial Sequence: Synthetic oligonucleotide
ccggccuucauucugcuac

SEQ ID NO: 1578567 - RNA, 19 nt, Artificial Sequence
  Description of Artificial Sequence: Synthetic oligonucleotide
gacaaggcgggaccacuca

SEQ ID NO: 1578568 - RNA, 19 nt, Artificial Sequence
  Description of Artificial Sequence: Synthetic oligonucleotide
gcgugugaacuuuucuucc

SEQ ID NO: 1578569 - RNA, 19 nt, Artificial Sequence
  Description of Artificial Sequence: Synthetic oligonucleotide
aaugaccgggcaggguuga

SEQ ID NO: 1578570 - RNA, 19 nt, Artificial Sequence
  Description of Artificial Sequence: Synthetic oligonucleotide
gcccuuagccauuacccag

SEQ ID NO: 1578571 - RNA, 19 nt, Artificial Sequence
  Description of Artificial Sequence: Synthetic oligonucleotide
guguagucgaucgccagca

SEQ ID NO: 1578572 - RNA, 19 nt, Artificial Sequence
  Description of Artificial Sequence: Synthetic oligonucleotide
gugagucuaagggcauagg

SEQ ID NO: 1578573 - RNA, 19 nt, Artificial Sequence
  Description of Artificial Sequence: Synthetic oligonucleotide
cagagccaaaugaccgggc

SEQ ID NO: 1578574 - RNA, 19 nt, Artificial Sequence
  Description of Artificial Sequence: Synthetic oligonucleotide
ccuaagucacggcaccucc

SEQ ID NO: 1578575 - RNA, 19 nt, Artificial Sequence
  Description of Artificial Sequence: Synthetic oligonucleotide
cacuuaaugaguccccgua

SEQ ID NO: 1578576 - RNA, 19 nt, Artificial Sequence
  Description of Artificial Sequence: Synthetic oligonucleotide
ucaccccucuaugauggga

SEQ ID NO: 1578577 - RNA, 19 nt, Artificial Sequence
  Description of Artificial Sequence: Synthetic oligonucleotide
agaccacuucauugaccag

SEQ ID NO: 1578578 - RNA, 19 nt, Artificial Sequence
  Description of Artificial Sequence: Synthetic oligonucleotide
cccuuagccauuacccagg

SEQ ID NO: 1578579 - RNA, 19 nt, Artificial Sequence
  Description of Artificial Sequence: Synthetic oligonucleotide
ccuucaggcggucugugag

SEQ ID NO: 1578580 - RNA, 19 nt, Artificial Sequence
  Description of Artificial Sequence: Synthetic oligonucleotide
agguccuauagugagucua

SEQ ID NO: 1578581 - RNA, 19 nt, Artificial Sequence
  Description of Artificial Sequence: Synthetic oligonucleotide
gcuaagauugacccaauau

SEQ ID NO: 1578582 - RNA, 19 nt, Artificial Sequence
  Description of Artificial Sequence: Synthetic oligonucleotide
gccaguguagucgaucgcc

SEQ ID NO: 1578583 - RNA, 19 nt, Artificial Sequence
  Description of Artificial Sequence: Synthetic oligonucleotide
aaccggccuucauucugcu

SEQ ID NO: 1578584 - RNA, 19 nt, Artificial Sequence
  Description of Artificial Sequence: Synthetic oligonucleotide
gggacaagaugccuacuca

SEQ ID NO: 1578585 - RNA, 19 nt, Artificial Sequence
  Description of Artificial Sequence: Synthetic oligonucleotide
ugaucuaguugggcacaug

SEQ ID NO: 1578586 - RNA, 19 nt, Artificial Sequence
  Description of Artificial Sequence: Synthetic oligonucleotide
ggggacaagaugccuacuc

SEQ ID NO: 1578587 - RNA, 19 nt, Artificial Sequence
  Description of Artificial Sequence: Synthetic oligonucleotide
guccuauagugagucuaag

SEQ ID NO: 1578588 - RNA, 19 nt, Artificial Sequence
  Description of Artificial Sequence: Synthetic oligonucleotide
ugcugucuacaauguuccu

SEQ ID NO: 1578589 - RNA, 19 nt, Artificial Sequence
  Description of Artificial Sequence: Synthetic oligonucleotide
ucacggcaccuccggucgg

SEQ ID NO: 1578590 - RNA, 19 nt, Artificial Sequence
  Description of Artificial Sequence: Synthetic oligonucleotide
ggagauaagucagaccaaa

SEQ ID NO: 1578591 - RNA, 19 nt, Artificial Sequence
  Description of Artificial Sequence: Synthetic oligonucleotide
ccuagcacucucugagggg

SEQ ID NO: 1578592 - RNA, 19 nt, Artificial Sequence
  Description of Artificial Sequence: Synthetic oligonucleotide
gugguauguccacacuuaa

SEQ ID NO: 1578593 - RNA, 19 nt, Artificial Sequence
  Description of Artificial Sequence: Synthetic oligonucleotide
ggacaagaugccuacucaa

SEQ ID NO: 1578594 - RNA, 19 nt, Artificial Sequence
  Description of Artificial Sequence: Synthetic oligonucleotide
auggaaugaggugcugagu

SEQ ID NO: 1578595 - RNA, 19 nt, Artificial Sequence
  Description of Artificial Sequence: Synthetic oligonucleotide
cugcguggggccaggauga

SEQ ID NO: 1578596 - RNA, 19 nt, Artificial Sequence
  Description of Artificial Sequence: Synthetic oligonucleotide
ccuuaucuguuaagugggc

SEQ ID NO: 1578597 - RNA, 19 nt, Artificial Sequence
  Description of Artificial Sequence: Synthetic oligonucleotide
guguccuuaucuguuaagu

SEQ ID NO: 1578598 - RNA, 19 nt, Artificial Sequence
  Description of Artificial Sequence: Synthetic oligonucleotide
cuacucaaggaaggucaug

SEQ ID NO: 1578599 - RNA, 19 nt, Artificial Sequence
  Description of Artificial Sequence: Synthetic oligonucleotide
gugauauugcugccccgga

SEQ ID NO: 1578600 - RNA, 19 nt, Artificial Sequence
  Description of Artificial Sequence: Synthetic oligonucleotide
accuccggucggugguggc

SEQ ID NO: 1578601 - RNA, 19 nt, Artificial Sequence
  Description of Artificial Sequence: Synthetic oligonucleotide
gagccaccuaagucacggc

SEQ ID NO: 1578602 - RNA, 19 nt, Artificial Sequence
  Description of Artificial Sequence: Synthetic oligonucleotide
aggcaccugagguggguga

SEQ ID NO: 1578603 - RNA, 19 nt, Artificial Sequence
  Description of Artificial Sequence: Synthetic oligonucleotide
agaagagcgugcagcgugu

SEQ ID NO: 1578604 - RNA, 19 nt, Artificial Sequence
  Description of Artificial Sequence: Synthetic oligonucleotide
aggcgggaccacucagguc

SEQ ID NO: 1578605 - RNA, 19 nt, Artificial Sequence
  Description of Artificial Sequence: Synthetic oligonucleotide
gggcuuuggauguugggaa

SEQ ID NO: 1578606 - RNA, 19 nt, Artificial Sequence
  Description of Artificial Sequence: Synthetic oligonucleotide
gccgaugaucucaaugccc

SEQ ID NO: 1578607 - RNA, 19 nt, Artificial Sequence
  Description of Artificial Sequence: Synthetic oligonucleotide
agcgugcagcgugugaacu

SEQ ID NO: 1578608 - RNA, 19 nt, Artificial Sequence
  Description of Artificial Sequence: Synthetic oligonucleotide
ggugcugaguugguaaauc

SEQ ID NO: 1578609 - RNA, 19 nt, Artificial Sequence
  Description of Artificial Sequence: Synthetic oligonucleotide
cuuaucuguuaagugggcu

SEQ ID NO: 1578610 - RNA, 19 nt, Artificial Sequence
  Description of Artificial Sequence: Synthetic oligonucleotide
gaagagcgugcagcgugug

SEQ ID NO: 1578611 - RNA, 19 nt, Artificial Sequence
  Description of Artificial Sequence: Synthetic oligonucleotide
auagugagucuaagggcau

SEQ ID NO: 1578612 - RNA, 19 nt, Artificial Sequence
  Description of Artificial Sequence: Synthetic oligonucleotide
cugccccggacaaggcggg

SEQ ID NO: 1578613 - RNA, 19 nt, Artificial Sequence
  Description of Artificial Sequence: Synthetic oligonucleotide
ggggagugacuuuggucag

SEQ ID NO: 1578614 - RNA, 19 nt, Artificial Sequence
  Description of Artificial Sequence: Synthetic oligonucleotide
ucuggugaacaggcacuuc

SEQ ID NO: 1578615 - RNA, 19 nt, Artificial Sequence
  Description of Artificial Sequence: Synthetic oligonucleotide
agucgaucgccagcaggug

SEQ ID NO: 1578616 - RNA, 19 nt, Artificial Sequence
  Description of Artificial Sequence: Synthetic oligonucleotide
ugaccgggcaggguugauc

SEQ ID NO: 1578617 - RNA, 19 nt, Artificial Sequence
  Description of Artificial Sequence: Synthetic oligonucleotide
uagugagucuaagggcaua

SEQ ID NO: 1578618 - RNA, 19 nt, Artificial Sequence
  Description of Artificial Sequence: Synthetic oligonucleotide
cggucugugaggucgcugc

SEQ ID NO: 1578619 - RNA, 19 nt, Artificial Sequence
  Description of Artificial Sequence: Synthetic oligonucleotide
aguccccguaacugucccu

SEQ ID NO: 1578620 - RNA, 19 nt, Artificial Sequence
  Description of Artificial Sequence: Synthetic oligonucleotide
ugcugcguggggccaggau

SEQ ID NO: 1578621 - RNA, 19 nt, Artificial Sequence
  Description of Artificial Sequence: Synthetic oligonucleotide
augaucuaguugggcacau

SEQ ID NO: 1578622 - RNA, 19 nt, Artificial Sequence
  Description of Artificial Sequence: Synthetic oligonucleotide
ggcccuuagccauuaccca

SEQ ID NO: 1578623 - RNA, 19 nt, Artificial Sequence
  Description of Artificial Sequence: Synthetic oligonucleotide
cauuacccaggcagaaacu

SEQ ID NO: 1578624 - RNA, 19 nt, Artificial Sequence
  Description of Artificial Sequence: Synthetic oligonucleotide
ccuacuaaagaaagccucu

SEQ ID NO: 1578625 - RNA, 19 nt, Artificial Sequence
  Description of Artificial Sequence: Synthetic oligonucleotide
gcuagggaauggagaagag

SEQ ID NO: 1578626 - RNA, 19 nt, Artificial Sequence
  Description of Artificial Sequence: Synthetic oligonucleotide
caagcggggcugagccacc

SEQ ID NO: 1578627 - RNA, 19 nt, Artificial Sequence
  Description of Artificial Sequence: Synthetic oligonucleotide
accccucuaugaugggaau

SEQ ID NO: 1578628 - RNA, 19 nt, Artificial Sequence
  Description of Artificial Sequence: Synthetic oligonucleotide
cuuagccauuacccaggca

SEQ ID NO: 1578629 - RNA, 19 nt, Artificial Sequence
  Description of Artificial Sequence: Synthetic oligonucleotide
gcuugucagagcaucuaca

SEQ ID NO: 1578630 - RNA, 19 nt, Artificial Sequence
  Description of Artificial Sequence: Synthetic oligonucleotide
gcaagcggggcugagccac

SEQ ID NO: 1578631 - RNA, 19 nt, Artificial Sequence
  Description of Artificial Sequence: Synthetic oligonucleotide
gagaggagaccacuucauu

SEQ ID NO: 1578632 - RNA, 19 nt, Artificial Sequence
  Description of Artificial Sequence: Synthetic oligonucleotide
aggguugaucccacagcca

SEQ ID NO: 1578633 - RNA, 19 nt, Artificial Sequence
  Description of Artificial Sequence: Synthetic oligonucleotide
ccacuugacauacgugguc

SEQ ID NO: 1578634 - RNA, 19 nt, Artificial Sequence
  Description of Artificial Sequence: Synthetic oligonucleotide
caguguccuuaucuguuaa

SEQ ID NO: 1578635 - RNA, 19 nt, Artificial Sequence
  Description of Artificial Sequence: Synthetic oligonucleotide
cacuuccagcauccugaac

SEQ ID NO: 1578636 - RNA, 19 nt, Artificial Sequence
  Description of Artificial Sequence: Synthetic oligonucleotide
uggccccacccagaaaauc

SEQ ID NO: 1578637 - RNA, 19 nt, Artificial Sequence
  Description of Artificial Sequence: Synthetic oligonucleotide
aggugcugaguugguaaau

SEQ ID NO: 1578638 - RNA, 19 nt, Artificial Sequence
  Description of Artificial Sequence: Synthetic oligonucleotide
aggcggucugugaggucgc

SEQ ID NO: 1578639 - RNA, 19 nt, Artificial Sequence
  Description of Artificial Sequence: Synthetic oligonucleotide
agcucaggccagguagaca

SEQ ID NO: 1578640 - RNA, 19 nt, Artificial Sequence
  Description of Artificial Sequence: Synthetic oligonucleotide
cagcgugugaacuuuucuu

SEQ ID NO: 1578641 - RNA, 19 nt, Artificial Sequence
  Description of Artificial Sequence: Synthetic oligonucleotide
uccccguaacugucccuuc

SEQ ID NO: 1578642 - RNA, 19 nt, Artificial Sequence
  Description of Artificial Sequence: Synthetic oligonucleotide
uccggucggugguggccag

SEQ ID NO: 1578643 - RNA, 19 nt, Artificial Sequence
  Description of Artificial Sequence: Synthetic oligonucleotide
cacacaccuuggcccuuag

SEQ ID NO: 1578644 - RNA, 19 nt, Artificial Sequence
  Description of Artificial Sequence: Synthetic oligonucleotide
gugccugcuagggaaugga

SEQ ID NO: 1578645 - RNA, 19 nt, Artificial Sequence
  Description of Artificial Sequence: Synthetic oligonucleotide
augaggugcugaguuggua

SEQ ID NO: 1578646 - RNA, 19 nt, Artificial Sequence
  Description of Artificial Sequence: Synthetic oligonucleotide
gguccuauagugagucuaa

SEQ ID NO: 1578647 - RNA, 19 nt, Artificial Sequence
  Description of Artificial Sequence: Synthetic oligonucleotide
aagcggggcugagccaccu

SEQ ID NO: 1578648 - RNA, 19 nt, Artificial Sequence
  Description of Artificial Sequence: Synthetic oligonucleotide
gaauggccccacccagaaa

SEQ ID NO: 1578649 - RNA, 19 nt, Artificial Sequence
  Description of Artificial Sequence: Synthetic oligonucleotide
gccagaguucacaccauga

SEQ ID NO: 1578650 - RNA, 19 nt, Artificial Sequence
  Description of Artificial Sequence: Synthetic oligonucleotide
ggcuuuggauguugggaaa

SEQ ID NO: 1578651 - RNA, 19 nt, Artificial Sequence
  Description of Artificial Sequence: Synthetic oligonucleotide
cuguuaagugggcuacagu

SEQ ID NO: 1578652 - RNA, 19 nt, Artificial Sequence
  Description of Artificial Sequence: Synthetic oligonucleotide
cccaaugaauggccccacc

SEQ ID NO: 1578653 - RNA, 19 nt, Artificial Sequence
  Description of Artificial Sequence: Synthetic oligonucleotide
cgggugaucacagcagagc

SEQ ID NO: 1578654 - RNA, 19 nt, Artificial Sequence
  Description of Artificial Sequence: Synthetic oligonucleotide
gccugcuagggaauggaga

SEQ ID NO: 1578655 - RNA, 19 nt, Artificial Sequence
  Description of Artificial Sequence: Synthetic oligonucleotide
ccaguguagucgaucgcca

SEQ ID NO: 1578656 - RNA, 19 nt, Artificial Sequence
  Description of Artificial Sequence: Synthetic oligonucleotide
caccuccggucgguggugg

SEQ ID NO: 1578657 - RNA, 19 nt, Artificial Sequence
  Description of Artificial Sequence: Synthetic oligonucleotide
caccuucaggcggucugug

SEQ ID NO: 1578658 - RNA, 19 nt, Artificial Sequence
  Description of Artificial Sequence: Synthetic oligonucleotide
cccuuucaccccucuauga

SEQ ID NO: 1578659 - RNA, 19 nt, Artificial Sequence
  Description of Artificial Sequence: Synthetic oligonucleotide
ccuugccacuugacauacg

SEQ ID NO: 1578660 - RNA, 19 nt, Artificial Sequence
  Description of Artificial Sequence: Synthetic oligonucleotide
gggaauggaaugaggugcu

SEQ ID NO: 1578661 - RNA, 19 nt, Artificial Sequence
  Description of Artificial Sequence: Synthetic oligonucleotide
ggacaaggcgggaccacuc

SEQ ID NO: 1578662 - RNA, 19 nt, Artificial Sequence
  Description of Artificial Sequence: Synthetic oligonucleotide
gucuaagggcauagguccu

SEQ ID NO: 1578663 - RNA, 19 nt, Artificial Sequence
  Description of Artificial Sequence: Synthetic oligonucleotide
ccccucuaugaugggaaug

SEQ ID NO: 1578664 - RNA, 19 nt, Artificial Sequence
  Description of Artificial Sequence: Synthetic oligonucleotide
cugaggugggugacuugcu

SEQ ID NO: 1578665 - RNA, 19 nt, Artificial Sequence
  Description of Artificial Sequence: Synthetic oligonucleotide
auggccccacccagaaaau

SEQ ID NO: 1578666 - RNA, 19 nt, Artificial Sequence
  Description of Artificial Sequence: Synthetic oligonucleotide
ggagaggagaccacuucau

SEQ ID NO: 1578667 - RNA, 19 nt, Artificial Sequence
  Description of Artificial Sequence: Synthetic oligonucleotide
guccccguaacugucccuu

SEQ ID NO: 1578668 - RNA, 19 nt, Artificial Sequence
  Description of Artificial Sequence: Synthetic oligonucleotide
caggugggaugggccugcc

SEQ ID NO: 1578669 - RNA, 19 nt, Artificial Sequence
  Description of Artificial Sequence: Synthetic oligonucleotide
ccuccggucggugguggcc

SEQ ID NO: 1578670 - RNA, 19 nt, Artificial Sequence
  Description of Artificial Sequence: Synthetic oligonucleotide
ccuuucaccccucuaugau

SEQ ID NO: 1578671 - RNA, 19 nt, Artificial Sequence
  Description of Artificial Sequence: Synthetic oligonucleotide
ggcaagcggggcugagcca

SEQ ID NO: 1578672 - RNA, 19 nt, Artificial Sequence
  Description of Artificial Sequence: Synthetic oligonucleotide
gccauuacccaggcagaaa

SEQ ID NO: 1578673 - RNA, 19 nt, Artificial Sequence
  Description of Artificial Sequence: Synthetic oligonucleotide
agcggggcugagccaccua

SEQ ID NO: 1578674 - RNA, 19 nt, Artificial Sequence
  Description of Artificial Sequence: Synthetic oligonucleotide
cugcuaagauugacccaau

SEQ ID NO: 1578675 - RNA, 19 nt, Artificial Sequence
  Description of Artificial Sequence: Synthetic oligonucleotide
agcacacaccuuggcccuu

SEQ ID NO: 1578676 - RNA, 19 nt, Artificial Sequence
  Description of Artificial Sequence: Synthetic oligonucleotide
gguugaucccacagccagu

SEQ ID NO: 1578677 - RNA, 19 nt, Artificial Sequence
  Description of Artificial Sequence: Synthetic oligonucleotide
gagugacuuuggucagcuu

SEQ ID NO: 1578678 - RNA, 19 nt, Artificial Sequence
  Description of Artificial Sequence: Synthetic oligonucleotide
augaccgggcaggguugau

SEQ ID NO: 1578679 - RNA, 19 nt, Artificial Sequence
  Description of Artificial Sequence: Synthetic oligonucleotide
caccuaagucacggcaccu

SEQ ID NO: 1578680 - RNA, 19 nt, Artificial Sequence
  Description of Artificial Sequence: Synthetic oligonucleotide
ccucuaugaugggaaugga

SEQ ID NO: 1578681 - RNA, 19 nt, Artificial Sequence
  Description of Artificial Sequence: Synthetic oligonucleotide
cugcuacagcaaaccuacu

SEQ ID NO: 1578682 - RNA, 19 nt, Artificial Sequence
  Description of Artificial Sequence: Synthetic oligonucleotide
ccuacucaaggaaggucau

SEQ ID NO: 1578683 - RNA, 19 nt, Artificial Sequence
  Description of Artificial Sequence: Synthetic oligonucleotide
gcaccuccggucgguggug

SEQ ID NO: 1578684 - RNA, 19 nt, Artificial Sequence
  Description of Artificial Sequence: Synthetic oligonucleotide
ggggacuuccuagcacucu

SEQ ID NO: 1578685 - RNA, 19 nt, Artificial Sequence
  Description of Artificial Sequence: Synthetic oligonucleotide
gcgugcagcgugugaacuu

SEQ ID NO: 1578686 - RNA, 19 nt, Artificial Sequence
  Description of Artificial Sequence: Synthetic oligonucleotide
cacggcaccuccggucggu

SEQ ID NO: 1578687 - RNA, 19 nt, Artificial Sequence
  Description of Artificial Sequence: Synthetic oligonucleotide
cccggacaaggcgggacca

SEQ ID NO: 1578688 - RNA, 19 nt, Artificial Sequence
  Description of Artificial Sequence: Synthetic oligonucleotide
gugcagcgugugaacuuuu

SEQ ID NO: 1578689 - RNA, 19 nt, Artificial Sequence
  Description of Artificial Sequence: Synthetic oligonucleotide
cgugcagcgugugaacuuu

SEQ ID NO: 1578690 - RNA, 19 nt, Artificial Sequence
  Description of Artificial Sequence: Synthetic oligonucleotide
ccccagcauugggacaauu

SEQ ID NO: 1578691 - RNA, 19 nt, Artificial Sequence
  Description of Artificial Sequence: Synthetic oligonucleotide
aaagcggacaggaacaggc

SEQ ID NO: 1578692 - RNA, 19 nt, Artificial Sequence
  Description of Artificial Sequence: Synthetic oligonucleotide
ucaccuuugagucuucacg

SEQ ID NO: 1578693 - RNA, 19 nt, Artificial Sequence
  Description of Artificial Sequence: Synthetic oligonucleotide
gaugaagcggcucaucucg

SEQ ID NO: 1578694 - RNA, 19 nt, Artificial Sequence
  Description of Artificial Sequence: Synthetic oligonucleotide
ucuuccacgaaccagcacu

SEQ ID NO: 1578695 - RNA, 19 nt, Artificial Sequence
  Description of Artificial Sequence: Synthetic oligonucleotide
cuugaugagucccaggagg

SEQ ID NO: 1578696 - RNA, 19 nt, Artificial Sequence
  Description of Artificial Sequence: Synthetic oligonucleotide
guaggcaaagcucaggucc

SEQ ID NO: 1578697 - RNA, 19 nt, Artificial Sequence
  Description of Artificial Sequence: Synthetic oligonucleotide
cuugaaguacagcuuaggg

SEQ ID NO: 1578698 - RNA, 19 nt, Artificial Sequence
  Description of Artificial Sequence: Synthetic oligonucleotide
uucacggaaggucacguag

SEQ ID NO: 1578699 - RNA, 19 nt, Artificial Sequence
  Description of Artificial Sequence: Synthetic oligonucleotide
uugcagauagggcaggugc

SEQ ID NO: 1578700 - RNA, 19 nt, Artificial Sequence
  Description of Artificial Sequence: Synthetic oligonucleotide
acgguggagagccacgucc

SEQ ID NO: 1578701 - RNA, 19 nt, Artificial Sequence
  Description of Artificial Sequence: Synthetic oligonucleotide
acagcuuagggucaaggug

SEQ ID NO: 1578702 - RNA, 19 nt, Artificial Sequence
  Description of Artificial Sequence: Synthetic oligonucleotide
guagacacccuccugaaac

SEQ ID NO: 1578703 - RNA, 19 nt, Artificial Sequence
  Description of Artificial Sequence: Synthetic oligonucleotide
aggagucgcagccagcagc

SEQ ID NO: 1578704 - RNA, 19 nt, Artificial Sequence
  Description of Artificial Sequence: Synthetic oligonucleotide
uaggcagccauccagccca

SEQ ID NO: 1578705 - RNA, 19 nt, Artificial Sequence
  Description of Artificial Sequence: Synthetic oligonucleotide
aaugcggcaggcuucuugu

SEQ ID NO: 1578706 - RNA, 19 nt, Artificial Sequence
  Description of Artificial Sequence: Synthetic oligonucleotide
cuggagaggcugaagaccg

SEQ ID NO: 1578707 - RNA, 19 nt, Artificial Sequence
  Description of Artificial Sequence: Synthetic oligonucleotide
gacaggaacaggccuaugc

SEQ ID NO: 1578708 - RNA, 19 nt, Artificial Sequence
  Description of Artificial Sequence: Synthetic oligonucleotide
caccuuugagucuucacgg

SEQ ID NO: 1578709 - RNA, 19 nt, Artificial Sequence
  Description of Artificial Sequence: Synthetic oligonucleotide
acucaaucgccuccggccc

SEQ ID NO: 1578710 - RNA, 19 nt, Artificial Sequence
  Description of Artificial Sequence: Synthetic oligonucleotide
uuaccgucaccuuugaguc

SEQ ID NO: 1578711 - RNA, 19 nt, Artificial Sequence
  Description of Artificial Sequence: Synthetic oligonucleotide
uucuggaaccgccuucugg

SEQ ID NO: 1578712 - RNA, 19 nt, Artificial Sequence
  Description of Artificial Sequence: Synthetic oligonucleotide
caucacugcaucuuuuccc

SEQ ID NO: 1578713 - RNA, 19 nt, Artificial Sequence
  Description of Artificial Sequence: Synthetic oligonucleotide
ucagaaugguggcggacgg

SEQ ID NO: 1578714 - RNA, 19 nt, Artificial Sequence
  Description of Artificial Sequence: Synthetic oligonucleotide
uguggccggagacagagca

SEQ ID NO: 1578715 - RNA, 19 nt, Artificial Sequence
  Description of Artificial Sequence: Synthetic oligonucleotide
ugggucauccaccuugaag

SEQ ID NO: 1578716 - RNA, 19 nt, Artificial Sequence
  Description of Artificial Sequence: Synthetic oligonucleotide
uccucaaccagcccaggag

SEQ ID NO: 1578717 - RNA, 19 nt, Artificial Sequence
  Description of Artificial Sequence: Synthetic oligonucleotide
gagggguaccgccugaagg

SEQ ID NO: 1578718 - RNA, 19 nt, Artificial Sequence
  Description of Artificial Sequence: Synthetic oligonucleotide
ucacggaaggucacguagg

SEQ ID NO: 1578719 - RNA, 19 nt, Artificial Sequence
  Description of Artificial Sequence: Synthetic oligonucleotide
auagcggacuccaugcugc

SEQ ID NO: 1578720 - RNA, 19 nt, Artificial Sequence
  Description of Artificial Sequence: Synthetic oligonucleotide
uggcauuuccucaaccagc

SEQ ID NO: 1578721 - RNA, 19 nt, Artificial Sequence
  Description of Artificial Sequence: Synthetic oligonucleotide
gacuucagcacugcgaccc

SEQ ID NO: 1578722 - RNA, 19 nt, Artificial Sequence
  Description of Artificial Sequence: Synthetic oligonucleotide
aacgggaugaagcggcuca

SEQ ID NO: 1578723 - RNA, 19 nt, Artificial Sequence
  Description of Artificial Sequence: Synthetic oligonucleotide
uuccgcaggguagaaaugg

SEQ ID NO: 1578724 - RNA, 19 nt, Artificial Sequence
  Description of Artificial Sequence: Synthetic oligonucleotide
cacucaaucgccuccggcc

SEQ ID NO: 1578725 - RNA, 19 nt, Artificial Sequence
  Description of Artificial Sequence: Synthetic oligonucleotide
ucuuguucaggccgccccg

SEQ ID NO: 1578726 - RNA, 19 nt, Artificial Sequence
  Description of Artificial Sequence: Synthetic oligonucleotide
uggaccaccucugagcucc

SEQ ID NO: 1578727 - RNA, 19 nt, Artificial Sequence
  Description of Artificial Sequence: Synthetic oligonucleotide
ugccacagccuuuucuugg

SEQ ID NO: 1578728 - RNA, 19 nt, Artificial Sequence
  Description of Artificial Sequence: Synthetic oligonucleotide
ugcuguccucgacugaagg

SEQ ID NO: 1578729 - RNA, 19 nt, Artificial Sequence
  Description of Artificial Sequence: Synthetic oligonucleotide
agcacugcgacccgaugcg

SEQ ID NO: 1578730 - RNA, 19 nt, Artificial Sequence
  Description of Artificial Sequence: Synthetic oligonucleotide
ugaggucgcagcaggcugg

SEQ ID NO: 1578731 - RNA, 19 nt, Artificial Sequence
  Description of Artificial Sequence: Synthetic oligonucleotide
auguaggcaaagcucaggu

SEQ ID NO: 1578732 - RNA, 19 nt, Artificial Sequence
  Description of Artificial Sequence: Synthetic oligonucleotide
ucaagguguggccggggcg

SEQ ID NO: 1578733 - RNA, 19 nt, Artificial Sequence
  Description of Artificial Sequence: Synthetic oligonucleotide
aacgguuucacagcuggca

SEQ ID NO: 1578734 - RNA, 19 nt, Artificial Sequence
  Description of Artificial Sequence: Synthetic oligonucleotide
aucagaaugguggcggacg

SEQ ID NO: 1578735 - RNA, 19 nt, Artificial Sequence
  Description of Artificial Sequence: Synthetic oligonucleotide
uggugucagagacacuuug

SEQ ID NO: 1578736 - RNA, 19 nt, Artificial Sequence
  Description of Artificial Sequence: Synthetic oligonucleotide
guuaccgucaccuuugagu

SEQ ID NO: 1578737 - RNA, 19 nt, Artificial Sequence
  Description of Artificial Sequence: Synthetic oligonucleotide
uuagggucaagguguggcc

SEQ ID NO: 1578738 - RNA, 19 nt, Artificial Sequence
  Description of Artificial Sequence: Synthetic oligonucleotide
agauagggcaggugcacag

SEQ ID NO: 1578739 - RNA, 19 nt, Artificial Sequence
  Description of Artificial Sequence: Synthetic oligonucleotide
acugcgacccgaugcgggc

SEQ ID NO: 1578740 - RNA, 19 nt, Artificial Sequence
  Description of Artificial Sequence: Synthetic oligonucleotide
acgaaccagcacucaaucg

SEQ ID NO: 1578741 - RNA, 19 nt, Artificial Sequence
  Description of Artificial Sequence: Synthetic oligonucleotide
aaugguggcggacggugga

SEQ ID NO: 1578742 - RNA, 19 nt, Artificial Sequence
  Description of Artificial Sequence: Synthetic oligonucleotide
ugcggcgucagaugucugg

SEQ ID NO: 1578743 - RNA, 19 nt, Artificial Sequence
  Description of Artificial Sequence: Synthetic oligonucleotide
uccgcaggguagaaauggg

SEQ ID NO: 1578744 - RNA, 19 nt, Artificial Sequence
  Description of Artificial Sequence: Synthetic oligonucleotide
ugcagauagggcaggugca

SEQ ID NO: 1578745 - RNA, 19 nt, Artificial Sequence
  Description of Artificial Sequence: Synthetic oligonucleotide
guggcauuuccucaaccag

SEQ ID NO: 1578746 - RNA, 19 nt, Artificial Sequence
  Description of Artificial Sequence: Synthetic oligonucleotide
gaccccuggguccugggcg

SEQ ID NO: 1578747 - RNA, 19 nt, Artificial Sequence
  Description of Artificial Sequence: Synthetic oligonucleotide
cuguccucgacugaaggcc

SEQ ID NO: 1578748 - RNA, 19 nt, Artificial Sequence
  Description of Artificial Sequence: Synthetic oligonucleotide
uucccaguuggauccgagg

SEQ ID NO: 1578749 - RNA, 19 nt, Artificial Sequence
  Description of Artificial Sequence: Synthetic oligonucleotide
ggacccgacaggcauagcg

SEQ ID NO: 1578750 - RNA, 19 nt, Artificial Sequence
  Description of Artificial Sequence: Synthetic oligonucleotide
agucgcagccagcagcagg

SEQ ID NO: 1578751 - RNA, 19 nt, Artificial Sequence
  Description of Artificial Sequence: Synthetic oligonucleotide
auugucaucccaagaagca

SEQ ID NO: 1578752 - RNA, 19 nt, Artificial Sequence
  Description of Artificial Sequence: Synthetic oligonucleotide
acgguuucacagcuggcag

SEQ ID NO: 1578753 - RNA, 19 nt, Artificial Sequence
  Description of Artificial Sequence: Synthetic oligonucleotide
ucaaccagcccaggagucg

SEQ ID NO: 1578754 - RNA, 19 nt, Artificial Sequence
  Description of Artificial Sequence: Synthetic oligonucleotide
aagcggacaggaacaggcc

SEQ ID NO: 1578755 - RNA, 19 nt, Artificial Sequence
  Description of Artificial Sequence: Synthetic oligonucleotide
uagggucaagguguggccg

SEQ ID NO: 1578756 - RNA, 19 nt, Artificial Sequence
  Description of Artificial Sequence: Synthetic oligonucleotide
aaacgguuucacagcuggc

SEQ ID NO: 1578757 - RNA, 19 nt, Artificial Sequence
  Description of Artificial Sequence: Synthetic oligonucleotide
uuucccaguuggauccgag

SEQ ID NO: 1578758 - RNA, 19 nt, Artificial Sequence
  Description of Artificial Sequence: Synthetic oligonucleotide
ucgacugaaggcccagaga

SEQ ID NO: 1578759 - RNA, 19 nt, Artificial Sequence
  Description of Artificial Sequence: Synthetic oligonucleotide
uguccucgacugaaggccc

SEQ ID NO: 1578760 - RNA, 19 nt, Artificial Sequence
  Description of Artificial Sequence: Synthetic oligonucleotide
cacguaggcagccauccag

SEQ ID NO: 1578761 - RNA, 19 nt, Artificial Sequence
  Description of Artificial Sequence: Synthetic oligonucleotide
uggaaccgccuucuggacc

SEQ ID NO: 1578762 - RNA, 19 nt, Artificial Sequence
  Description of Artificial Sequence: Synthetic oligonucleotide
cacgaggcagagcagcucc

SEQ ID NO: 1578763 - RNA, 19 nt, Artificial Sequence
  Description of Artificial Sequence: Synthetic oligonucleotide
gacccgacaggcauagcgg

SEQ ID NO: 1578764 - RNA, 19 nt, Artificial Sequence
  Description of Artificial Sequence: Synthetic oligonucleotide
gacuccaugcugcugggca

SEQ ID NO: 1578765 - RNA, 19 nt, Artificial Sequence
  Description of Artificial Sequence: Synthetic oligonucleotide
ugaagaccgugcuggacac

SEQ ID NO: 1578766 - RNA, 19 nt, Artificial Sequence
  Description of Artificial Sequence: Synthetic oligonucleotide
agaaugguggcggacggug

SEQ ID NO: 1578767 - RNA, 19 nt, Artificial Sequence
  Description of Artificial Sequence: Synthetic oligonucleotide
ggcauagcggacuccaugc

SEQ ID NO: 1578768 - RNA, 19 nt, Artificial Sequence
  Description of Artificial Sequence: Synthetic oligonucleotide
ugaaggcccagagaggccu

SEQ ID NO: 1578769 - RNA, 19 nt, Artificial Sequence
  Description of Artificial Sequence: Synthetic oligonucleotide
agggucaagguguggccgg

SEQ ID NO: 1578770 - RNA, 19 nt, Artificial Sequence
  Description of Artificial Sequence: Synthetic oligonucleotide
uguuaccgucaccuuugag

SEQ ID NO: 1578771 - RNA, 19 nt, Artificial Sequence
  Description of Artificial Sequence: Synthetic oligonucleotide
auuuccucaaccagcccag

SEQ ID NO: 1578772 - RNA, 19 nt, Artificial Sequence
  Description of Artificial Sequence: Synthetic oligonucleotide
acccgcgucuuccacgaac

SEQ ID NO: 1578773 - RNA, 19 nt, Artificial Sequence
  Description of Artificial Sequence: Synthetic oligonucleotide
uccacgaaccagcacucaa

SEQ ID NO: 1578774 - RNA, 19 nt, Artificial Sequence
  Description of Artificial Sequence: Synthetic oligonucleotide
uagggcaggugcacaguag

SEQ ID NO: 1578775 - RNA, 19 nt, Artificial Sequence
  Description of Artificial Sequence: Synthetic oligonucleotide
gaaagcggacaggaacagg

SEQ ID NO: 1578776 - RNA, 19 nt, Artificial Sequence
  Description of Artificial Sequence: Synthetic oligonucleotide
cugaagaccgugcuggaca

SEQ ID NO: 1578777 - RNA, 19 nt, Artificial Sequence
  Description of Artificial Sequence: Synthetic oligonucleotide
agaggcugaagaccgugcu

SEQ ID NO: 1578778 - RNA, 19 nt, Artificial Sequence
  Description of Artificial Sequence: Synthetic oligonucleotide
uguaggcaaagcucagguc

SEQ ID NO: 1578779 - RNA, 19 nt, Artificial Sequence
  Description of Artificial Sequence: Synthetic oligonucleotide
cagccuuucuggaaccgcc

SEQ ID NO: 1578780 - RNA, 19 nt, Artificial Sequence
  Description of Artificial Sequence: Synthetic oligonucleotide
ucccguucccaguccacgg

SEQ ID NO: 1578781 - RNA, 19 nt, Artificial Sequence
  Description of Artificial Sequence: Synthetic oligonucleotide
cauagcggacuccaugcug

SEQ ID NO: 1578782 - RNA, 19 nt, Artificial Sequence
  Description of Artificial Sequence: Synthetic oligonucleotide
gauccgaggggcaggacug

SEQ ID NO: 1578783 - RNA, 19 nt, Artificial Sequence
  Description of Artificial Sequence: Synthetic oligonucleotide
aggcauagcggacuccaug

SEQ ID NO: 1578784 - RNA, 19 nt, Artificial Sequence
  Description of Artificial Sequence: Synthetic oligonucleotide
caguccacgggccccaggg

SEQ ID NO: 1578785 - RNA, 19 nt, Artificial Sequence
  Description of Artificial Sequence: Synthetic oligonucleotide
acguaggcagccauccagc

SEQ ID NO: 1578786 - RNA, 19 nt, Artificial Sequence
  Description of Artificial Sequence: Synthetic oligonucleotide
aaaugggacacgaggcaga

SEQ ID NO: 1578787 - RNA, 19 nt, Artificial Sequence
  Description of Artificial Sequence: Synthetic oligonucleotide
cucgacugaaggcccagag

SEQ ID NO: 1578788 - RNA, 19 nt, Artificial Sequence
  Description of Artificial Sequence: Synthetic oligonucleotide
aggaaagcggacaggaaca

SEQ ID NO: 1578789 - RNA, 19 nt, Artificial Sequence
  Description of Artificial Sequence: Synthetic oligonucleotide
cagaaggucccguucccag

SEQ ID NO: 1578790 - RNA, 19 nt, Artificial Sequence
  Description of Artificial Sequence: Synthetic oligonucleotide
uguucaggccgccccgacc

SEQ ID NO: 1578791 - RNA, 19 nt, Artificial Sequence
  Description of Artificial Sequence: Synthetic oligonucleotide
agucagcaccacuguugcc

SEQ ID NO: 1578792 - RNA, 19 nt, Artificial Sequence
  Description of Artificial Sequence: Synthetic oligonucleotide
gggucauccaccuugaagu

SEQ ID NO: 1578793 - RNA, 19 nt, Artificial Sequence
  Description of Artificial Sequence: Synthetic oligonucleotide
gucacguaggcagccaucc

SEQ ID NO: 1578794 - RNA, 19 nt, Artificial Sequence
  Description of Artificial Sequence: Synthetic oligonucleotide
uccggcccggcagagacgg

SEQ ID NO: 1578795 - RNA, 19 nt, Artificial Sequence
  Description of Artificial Sequence: Synthetic oligonucleotide
acuccaugcugcugggcag

SEQ ID NO: 1578796 - RNA, 19 nt, Artificial Sequence
  Description of Artificial Sequence: Synthetic oligonucleotide
uuccucaaccagcccagga

SEQ ID NO: 1578797 - RNA, 19 nt, Artificial Sequence
  Description of Artificial Sequence: Synthetic oligonucleotide
ugguggcauuuccucaacc

SEQ ID NO: 1578798 - RNA, 19 nt, Artificial Sequence
  Description of Artificial Sequence: Synthetic oligonucleotide
ucuucacggaaggucacgu

SEQ ID NO: 1578799 - RNA, 19 nt, Artificial Sequence
  Description of Artificial Sequence: Synthetic oligonucleotide
gacugaaggcccagagagg

SEQ ID NO: 1578800 - RNA, 19 nt, Artificial Sequence
  Description of Artificial Sequence: Synthetic oligonucleotide
gugcuggacacgcugacca

SEQ ID NO: 1578801 - RNA, 19 nt, Artificial Sequence
  Description of Artificial Sequence: Synthetic oligonucleotide
cgaaccagcacucaaucgc

SEQ ID NO: 1578802 - RNA, 19 nt, Artificial Sequence
  Description of Artificial Sequence: Synthetic oligonucleotide
cacggaaggucacguaggc

SEQ ID NO: 1578803 - RNA, 19 nt, Artificial Sequence
  Description of Artificial Sequence: Synthetic oligonucleotide
agcggacaggaacaggccu

SEQ ID NO: 1578804 - RNA, 19 nt, Artificial Sequence
  Description of Artificial Sequence: Synthetic oligonucleotide
cacgaaccagcacucaauc

SEQ ID NO: 1578805 - RNA, 19 nt, Artificial Sequence
  Description of Artificial Sequence: Synthetic oligonucleotide
gaaugguggcggacggugg

SEQ ID NO: 1578806 - RNA, 19 nt, Artificial Sequence
  Description of Artificial Sequence: Synthetic oligonucleotide
uugucaucccaagaagcaa

SEQ ID NO: 1578807 - RNA, 19 nt, Artificial Sequence
  Description of Artificial Sequence: Synthetic oligonucleotide
ugggcugguggcauuuccu

SEQ ID NO: 1578808 - RNA, 19 nt, Artificial Sequence
  Description of Artificial Sequence: Synthetic oligonucleotide
agacacccuccugaaacgg

SEQ ID NO: 1578809 - RNA, 19 nt, Artificial Sequence
  Description of Artificial Sequence: Synthetic oligonucleotide
gaccgugcuggacacgcug

SEQ ID NO: 1578810 - RNA, 19 nt, Artificial Sequence
  Description of Artificial Sequence: Synthetic oligonucleotide
ggugucagagacacuuugg

SEQ ID NO: 1578811 - RNA, 19 nt, Artificial Sequence
  Description of Artificial Sequence: Synthetic oligonucleotide
cggaaggucacguaggcag

SEQ ID NO: 1578812 - RNA, 19 nt, Artificial Sequence
  Description of Artificial Sequence: Synthetic oligonucleotide
cacugcgacccgaugcggg

SEQ ID NO: 1578813 - RNA, 19 nt, Artificial Sequence
  Description of Artificial Sequence: Synthetic oligonucleotide
accuuugagucuucacgga

SEQ ID NO: 1578814 - RNA, 19 nt, Artificial Sequence
  Description of Artificial Sequence: Synthetic oligonucleotide
aguuggauccgaggggcag

SEQ ID NO: 1578815 - RNA, 19 nt, Artificial Sequence
  Description of Artificial Sequence: Synthetic oligonucleotide
agcuguuaccgucaccuuu

SEQ ID NO: 1578816 - RNA, 19 nt, Artificial Sequence
  Description of Artificial Sequence: Synthetic oligonucleotide
ucagccuuucuggaaccgc

SEQ ID NO: 1578817 - RNA, 19 nt, Artificial Sequence
  Description of Artificial Sequence: Synthetic oligonucleotide
caaugcggcaggcuucuug

SEQ ID NO: 1578818 - RNA, 19 nt, Artificial Sequence
  Description of Artificial Sequence: Synthetic oligonucleotide
caggccuaugcuguccucg

SEQ ID NO: 1578819 - RNA, 19 nt, Artificial Sequence
  Description of Artificial Sequence: Synthetic oligonucleotide
cugaggucgcagcaggcug

SEQ ID NO: 1578820 - RNA, 19 nt, Artificial Sequence
  Description of Artificial Sequence: Synthetic oligonucleotide
gguggcauuuccucaacca

SEQ ID NO: 1578821 - RNA, 19 nt, Artificial Sequence
  Description of Artificial Sequence: Synthetic oligonucleotide
agaaggucccguucccagu

SEQ ID NO: 1578822 - RNA, 19 nt, Artificial Sequence
  Description of Artificial Sequence: Synthetic oligonucleotide
gacuugugcacagucagcu

SEQ ID NO: 1578823 - RNA, 19 nt, Artificial Sequence
  Description of Artificial Sequence: Synthetic oligonucleotide
ccuuuucuugggcuggugg

SEQ ID NO: 1578824 - RNA, 19 nt, Artificial Sequence
  Description of Artificial Sequence: Synthetic oligonucleotide
ugggcgcagcagcaaugcg

SEQ ID NO: 1578825 - RNA, 19 nt, Artificial Sequence
  Description of Artificial Sequence: Synthetic oligonucleotide
ucgggcugaggucgcagca

SEQ ID NO: 1578826 - RNA, 19 nt, Artificial Sequence
  Description of Artificial Sequence: Synthetic oligonucleotide
cagcuuagggucaaggugu

SEQ ID NO: 1578827 - RNA, 19 nt, Artificial Sequence
  Description of Artificial Sequence: Synthetic oligonucleotide
agggugacuucagcacugc

SEQ ID NO: 1578828 - RNA, 19 nt, Artificial Sequence
  Description of Artificial Sequence: Synthetic oligonucleotide
agcggcucaucucgcagug

SEQ ID NO: 1578829 - RNA, 19 nt, Artificial Sequence
  Description of Artificial Sequence: Synthetic oligonucleotide
ucaaucgccuccggcccgg

SEQ ID NO: 1578830 - RNA, 19 nt, Artificial Sequence
  Description of Artificial Sequence: Synthetic oligonucleotide
cagccaggagcauucccgc

SEQ ID NO: 1578831 - RNA, 19 nt, Artificial Sequence
  Description of Artificial Sequence: Synthetic oligonucleotide
gucaccuuugagucuucac

SEQ ID NO: 1578832 - RNA, 19 nt, Artificial Sequence
  Description of Artificial Sequence: Synthetic oligonucleotide
ggggugguggacccgacag

SEQ ID NO: 1578833 - RNA, 19 nt, Artificial Sequence
  Description of Artificial Sequence: Synthetic oligonucleotide
ugugcuggcgucgccacuc

SEQ ID NO: 1578834 - RNA, 19 nt, Artificial Sequence
  Description of Artificial Sequence: Synthetic oligonucleotide
auagggcaggugcacagua

SEQ ID NO: 1578835 - RNA, 19 nt, Artificial Sequence
  Description of Artificial Sequence: Synthetic oligonucleotide
ggagcauucccgcuggguc

SEQ ID NO: 1578836 - RNA, 19 nt, Artificial Sequence
  Description of Artificial Sequence: Synthetic oligonucleotide
ugcgacccgaugcgggcag

SEQ ID NO: 1578837 - RNA, 19 nt, Artificial Sequence
  Description of Artificial Sequence: Synthetic oligonucleotide
uucccgcugggucauccac

SEQ ID NO: 1578838 - RNA, 19 nt, Artificial Sequence
  Description of Artificial Sequence: Synthetic oligonucleotide
cucgcaguguggugcgggg

SEQ ID NO: 1578839 - RNA, 19 nt, Artificial Sequence
  Description of Artificial Sequence: Synthetic oligonucleotide
agcacucaaucgccuccgg

SEQ ID NO: 1578840 - RNA, 19 nt, Artificial Sequence
  Description of Artificial Sequence: Synthetic oligonucleotide
acccgaugcgggcaggcug

SEQ ID NO: 1578841 - RNA, 19 nt, Artificial Sequence
  Description of Artificial Sequence: Synthetic oligonucleotide
ucacguaggcagccaucca

SEQ ID NO: 1578842 - RNA, 19 nt, Artificial Sequence
  Description of Artificial Sequence: Synthetic oligonucleotide
cucaaucgccuccggcccg

SEQ ID NO: 1578843 - RNA, 19 nt, Artificial Sequence
  Description of Artificial Sequence: Synthetic oligonucleotide
gucuucacggaaggucacg

SEQ ID NO: 1578844 - RNA, 19 nt, Artificial Sequence
  Description of Artificial Sequence: Synthetic oligonucleotide
cuuccgcaggguagaaaug

SEQ ID NO: 1578845 - RNA, 19 nt, Artificial Sequence
  Description of Artificial Sequence: Synthetic oligonucleotide
gaugcgggcaggcuggggu

SEQ ID NO: 1578846 - RNA, 19 nt, Artificial Sequence
  Description of Artificial Sequence: Synthetic oligonucleotide
ugucuggcccaggucgccg

SEQ ID NO: 1578847 - RNA, 19 nt, Artificial Sequence
  Description of Artificial Sequence: Synthetic oligonucleotide
ggugguggacccgacaggc

SEQ ID NO: 1578848 - RNA, 19 nt, Artificial Sequence
  Description of Artificial Sequence: Synthetic oligonucleotide
acccgacaggcauagcgga

SEQ ID NO: 1578849 - RNA, 19 nt, Artificial Sequence
  Description of Artificial Sequence: Synthetic oligonucleotide
ggaaccgccuucuggacca

SEQ ID NO: 1578850 - RNA, 19 nt, Artificial Sequence
  Description of Artificial Sequence: Synthetic oligonucleotide
gcuguuaccgucaccuuug

SEQ ID NO: 1578851 - RNA, 19 nt, Artificial Sequence
  Description of Artificial Sequence: Synthetic oligonucleotide
gggaacgggaugaagcggc

SEQ ID NO: 1578852 - RNA, 19 nt, Artificial Sequence
  Description of Artificial Sequence: Synthetic oligonucleotide
ccuaugcuguccucgacug

SEQ ID NO: 1578853 - RNA, 19 nt, Artificial Sequence
  Description of Artificial Sequence: Synthetic oligonucleotide
agguagacacccuccugaa

SEQ ID NO: 1578854 - RNA, 19 nt, Artificial Sequence
  Description of Artificial Sequence: Synthetic oligonucleotide
gguagaaaugggacacgag

SEQ ID NO: 1578855 - RNA, 19 nt, Artificial Sequence
  Description of Artificial Sequence: Synthetic oligonucleotide
cuggcgucgccacuccagc

SEQ ID NO: 1578856 - RNA, 19 nt, Artificial Sequence
  Description of Artificial Sequence: Synthetic oligonucleotide
uggccggagacagagcauc

SEQ ID NO: 1578857 - RNA, 19 nt, Artificial Sequence
  Description of Artificial Sequence: Synthetic oligonucleotide
ucgccacuccagcccaaag

SEQ ID NO: 1578858 - RNA, 19 nt, Artificial Sequence
  Description of Artificial Sequence: Synthetic oligonucleotide
agugccuugaugaguccca

SEQ ID NO: 1578859 - RNA, 19 nt, Artificial Sequence
  Description of Artificial Sequence: Synthetic oligonucleotide
caaccagcccaggagucgc

SEQ ID NO: 1578860 - RNA, 19 nt, Artificial Sequence
  Description of Artificial Sequence: Synthetic oligonucleotide
gaggcggggaacgggauga

SEQ ID NO: 1578861 - RNA, 19 nt, Artificial Sequence
  Description of Artificial Sequence: Synthetic oligonucleotide
uucaggccgccccgacccg

SEQ ID NO: 1578862 - RNA, 19 nt, Artificial Sequence
  Description of Artificial Sequence: Synthetic oligonucleotide
cugggcgcagcagcaaugc

SEQ ID NO: 1578863 - RNA, 19 nt, Artificial Sequence
  Description of Artificial Sequence: Synthetic oligonucleotide
cagcacucaaucgccuccg

SEQ ID NO: 1578864 - RNA, 19 nt, Artificial Sequence
  Description of Artificial Sequence: Synthetic oligonucleotide
gucgccgaggcggggaacg

SEQ ID NO: 1578865 - RNA, 19 nt, Artificial Sequence
  Description of Artificial Sequence: Synthetic oligonucleotide
ggugacuucagcacugcga

SEQ ID NO: 1578866 - RNA, 19 nt, Artificial Sequence
  Description of Artificial Sequence: Synthetic oligonucleotide
gcugacagagccaucagaa

SEQ ID NO: 1578867 - RNA, 19 nt, Artificial Sequence
  Description of Artificial Sequence: Synthetic oligonucleotide
cucagccuuucuggaaccg

SEQ ID NO: 1578868 - RNA, 19 nt, Artificial Sequence
  Description of Artificial Sequence: Synthetic oligonucleotide
agcaaugcggcaggcuucu

SEQ ID NO: 1578869 - RNA, 19 nt, Artificial Sequence
  Description of Artificial Sequence: Synthetic oligonucleotide
uuggauccgaggggcagga

SEQ ID NO: 1578870 - RNA, 19 nt, Artificial Sequence
  Description of Artificial Sequence: Synthetic oligonucleotide
gcgucuuccacgaaccagc

SEQ ID NO: 1578871 - RNA, 19 nt, Artificial Sequence
  Description of Artificial Sequence: Synthetic oligonucleotide
cagucagcugcagggagac

SEQ ID NO: 1578872 - RNA, 19 nt, Artificial Sequence
  Description of Artificial Sequence: Synthetic oligonucleotide
aggccuaugcuguccucga

SEQ ID NO: 1578873 - RNA, 19 nt, Artificial Sequence
  Description of Artificial Sequence: Synthetic oligonucleotide
cccagugccuugaugaguc

SEQ ID NO: 1578874 - RNA, 19 nt, Artificial Sequence
  Description of Artificial Sequence: Synthetic oligonucleotide
gaagaccgugcuggacacg

SEQ ID NO: 1578875 - RNA, 19 nt, Artificial Sequence
  Description of Artificial Sequence: Synthetic oligonucleotide
guggacccgacaggcauag

SEQ ID NO: 1578876 - RNA, 19 nt, Artificial Sequence
  Description of Artificial Sequence: Synthetic oligonucleotide
aggacgggcucccgcuggg

SEQ ID NO: 1578877 - RNA, 19 nt, Artificial Sequence
  Description of Artificial Sequence: Synthetic oligonucleotide
cuggacacgcugaccagca

SEQ ID NO: 1578878 - RNA, 19 nt, Artificial Sequence
  Description of Artificial Sequence: Synthetic oligonucleotide
acacgaggcagagcagcuc

SEQ ID NO: 1578879 - RNA, 19 nt, Artificial Sequence
  Description of Artificial Sequence: Synthetic oligonucleotide
ggggcucgggcugaggucg

SEQ ID NO: 1578880 - RNA, 19 nt, Artificial Sequence
  Description of Artificial Sequence: Synthetic oligonucleotide
cuggaaccgccuucuggac

SEQ ID NO: 1578881 - RNA, 19 nt, Artificial Sequence
  Description of Artificial Sequence: Synthetic oligonucleotide
uuguucaggccgccccgac

SEQ ID NO: 1578882 - RNA, 19 nt, Artificial Sequence
  Description of Artificial Sequence: Synthetic oligonucleotide
ccaguuggauccgaggggc

SEQ ID NO: 1578883 - RNA, 19 nt, Artificial Sequence
  Description of Artificial Sequence: Synthetic oligonucleotide
caccacuguugccauggug

SEQ ID NO: 1578884 - RNA, 19 nt, Artificial Sequence
  Description of Artificial Sequence: Synthetic oligonucleotide
aaccagcacucaaucgccu

SEQ ID NO: 1578885 - RNA, 19 nt, Artificial Sequence
  Description of Artificial Sequence: Synthetic oligonucleotide
cugugggugaggacaguca

SEQ ID NO: 1578886 - RNA, 19 nt, Artificial Sequence
  Description of Artificial Sequence: Synthetic oligonucleotide
cccaguuggauccgagggg

SEQ ID NO: 1578887 - RNA, 19 nt, Artificial Sequence
  Description of Artificial Sequence: Synthetic oligonucleotide
uaccgucaccuuugagucu

SEQ ID NO: 1578888 - RNA, 19 nt, Artificial Sequence
  Description of Artificial Sequence: Synthetic oligonucleotide
uccugggcgcagcagcaau

SEQ ID NO: 1578889 - RNA, 19 nt, Artificial Sequence
  Description of Artificial Sequence: Synthetic oligonucleotide
aguacagcuuagggucaag

SEQ ID NO: 1578890 - RNA, 19 nt, Artificial Sequence
  Description of Artificial Sequence: Synthetic oligonucleotide
accgucaccuuugagucuu

SEQ ID NO: 1578891 - RNA, 19 nt, Artificial Sequence
  Description of Artificial Sequence: Synthetic oligonucleotide
agguccaucacugcaucuu

SEQ ID NO: 1578892 - RNA, 19 nt, Artificial Sequence
  Description of Artificial Sequence: Synthetic oligonucleotide
ggaugaagcggcucaucuc

SEQ ID NO: 1578893 - RNA, 19 nt, Artificial Sequence
  Description of Artificial Sequence: Synthetic oligonucleotide
cagagccaucagaauggug

SEQ ID NO: 1578894 - RNA, 19 nt, Artificial Sequence
  Description of Artificial Sequence: Synthetic oligonucleotide
ugaugaggacgggcucccg

SEQ ID NO: 1578895 - RNA, 19 nt, Artificial Sequence
  Description of Artificial Sequence: Synthetic oligonucleotide
uggcgucgccacuccagcc

SEQ ID NO: 1578896 - RNA, 19 nt, Artificial Sequence
  Description of Artificial Sequence: Synthetic oligonucleotide
augggacacgaggcagagc

SEQ ID NO: 1578897 - RNA, 19 nt, Artificial Sequence
  Description of Artificial Sequence: Synthetic oligonucleotide
cacaaggggugcugguguc

SEQ ID NO: 1578898 - RNA, 19 nt, Artificial Sequence
  Description of Artificial Sequence: Synthetic oligonucleotide
augcgggcaggcuggggug

SEQ ID NO: 1578899 - RNA, 19 nt, Artificial Sequence
  Description of Artificial Sequence: Synthetic oligonucleotide
uccucgacugaaggcccag

SEQ ID NO: 1578900 - RNA, 19 nt, Artificial Sequence
  Description of Artificial Sequence: Synthetic oligonucleotide
uccacgggccccagggcuc

SEQ ID NO: 1578901 - RNA, 19 nt, Artificial Sequence
  Description of Artificial Sequence: Synthetic oligonucleotide
ggcgucgccacuccagccc

SEQ ID NO: 1578902 - RNA, 19 nt, Artificial Sequence
  Description of Artificial Sequence: Synthetic oligonucleotide
aaucgccuccggcccggca

SEQ ID NO: 1578903 - RNA, 19 nt, Artificial Sequence
  Description of Artificial Sequence: Synthetic oligonucleotide
cucugagcucccacuccac

SEQ ID NO: 1578904 - RNA, 19 nt, Artificial Sequence
  Description of Artificial Sequence: Synthetic oligonucleotide
gggagaccuguccuugcag

SEQ ID NO: 1578905 - RNA, 19 nt, Artificial Sequence
  Description of Artificial Sequence: Synthetic oligonucleotide
auucccgcugggucaucca

SEQ ID NO: 1578906 - RNA, 19 nt, Artificial Sequence
  Description of Artificial Sequence: Synthetic oligonucleotide
aggucccguucccagucca

SEQ ID NO: 1578907 - RNA, 19 nt, Artificial Sequence
  Description of Artificial Sequence: Synthetic oligonucleotide
cggggaacgggaugaagcg

SEQ ID NO: 1578908 - RNA, 19 nt, Artificial Sequence
  Description of Artificial Sequence: Synthetic oligonucleotide
cccgcgucuuccacgaacc

SEQ ID NO: 1578909 - RNA, 19 nt, Artificial Sequence
  Description of Artificial Sequence: Synthetic oligonucleotide
uggcagcuguuaccgucac

SEQ ID NO: 1578910 - RNA, 19 nt, Artificial Sequence
  Description of Artificial Sequence: Synthetic oligonucleotide
aggagcauucccgcugggu

SEQ ID NO: 1578911 - RNA, 19 nt, Artificial Sequence
  Description of Artificial Sequence: Synthetic oligonucleotide
gggugacuucagcacugcg

SEQ ID NO: 1578912 - RNA, 19 nt, Artificial Sequence
  Description of Artificial Sequence: Synthetic oligonucleotide
acaaggggugcugguguca

SEQ ID NO: 1578913 - RNA, 19 nt, Artificial Sequence
  Description of Artificial Sequence: Synthetic oligonucleotide
ggggaacgggaugaagcgg

SEQ ID NO: 1578914 - RNA, 19 nt, Artificial Sequence
  Description of Artificial Sequence: Synthetic oligonucleotide
uuccacgaaccagcacuca

SEQ ID NO: 1578915 - RNA, 19 nt, Artificial Sequence
  Description of Artificial Sequence: Synthetic oligonucleotide
guggccggggcggaggacc

SEQ ID NO: 1578916 - RNA, 19 nt, Artificial Sequence
  Description of Artificial Sequence: Synthetic oligonucleotide
uagcggacuccaugcugcu

SEQ ID NO: 1578917 - RNA, 19 nt, Artificial Sequence
  Description of Artificial Sequence: Synthetic oligonucleotide
aggcccagagaggccugcc

SEQ ID NO: 1578918 - RNA, 19 nt, Artificial Sequence
  Description of Artificial Sequence: Synthetic oligonucleotide
agcuuagggucaaggugug

SEQ ID NO: 1578919 - RNA, 19 nt, Artificial Sequence
  Description of Artificial Sequence: Synthetic oligonucleotide
uggggcucgggcugagguc

SEQ ID NO: 1578920 - RNA, 19 nt, Artificial Sequence
  Description of Artificial Sequence: Synthetic oligonucleotide
cacagcuggcagccagaag

SEQ ID NO: 1578921 - RNA, 19 nt, Artificial Sequence
  Description of Artificial Sequence: Synthetic oligonucleotide
gugccuugaugagucccag

SEQ ID NO: 1578922 - RNA, 19 nt, Artificial Sequence
  Description of Artificial Sequence: Synthetic oligonucleotide
gacgguggagagccacguc

SEQ ID NO: 1578923 - RNA, 19 nt, Artificial Sequence
  Description of Artificial Sequence: Synthetic oligonucleotide
gagaccuguccuugcagau

SEQ ID NO: 1578924 - RNA, 19 nt, Artificial Sequence
  Description of Artificial Sequence: Synthetic oligonucleotide
ggacugugggugaggacag

SEQ ID NO: 1578925 - RNA, 19 nt, Artificial Sequence
  Description of Artificial Sequence: Synthetic oligonucleotide
ggguagaaaugggacacga

SEQ ID NO: 1578926 - RNA, 19 nt, Artificial Sequence
  Description of Artificial Sequence: Synthetic oligonucleotide
caguccccguccagggccc

SEQ ID NO: 1578927 - RNA, 19 nt, Artificial Sequence
  Description of Artificial Sequence: Synthetic oligonucleotide
caggagucgcagccagcag

SEQ ID NO: 1578928 - RNA, 19 nt, Artificial Sequence
  Description of Artificial Sequence: Synthetic oligonucleotide
augguggcggacgguggag

SEQ ID NO: 1578929 - RNA, 19 nt, Artificial Sequence
  Description of Artificial Sequence: Synthetic oligonucleotide
gucuuccacgaaccagcac

SEQ ID NO: 1578930 - RNA, 19 nt, Artificial Sequence
  Description of Artificial Sequence: Synthetic oligonucleotide
acggaaggucacguaggca

SEQ ID NO: 1578931 - RNA, 19 nt, Artificial Sequence
  Description of Artificial Sequence: Synthetic oligonucleotide
acgaggcagagcagcuccg

SEQ ID NO: 1578932 - RNA, 19 nt, Artificial Sequence
  Description of Artificial Sequence: Synthetic oligonucleotide
gaacgggaugaagcggcuc

SEQ ID NO: 1578933 - RNA, 19 nt, Artificial Sequence
  Description of Artificial Sequence: Synthetic oligonucleotide
gcggcaggcuucuuguuca

SEQ ID NO: 1578934 - RNA, 19 nt, Artificial Sequence
  Description of Artificial Sequence: Synthetic oligonucleotide
gguaccgccugaaggcagc

SEQ ID NO: 1578935 - RNA, 19 nt, Artificial Sequence
  Description of Artificial Sequence: Synthetic oligonucleotide
aggugcccggccuggcuga

SEQ ID NO: 1578936 - RNA, 19 nt, Artificial Sequence
  Description of Artificial Sequence: Synthetic oligonucleotide
cuguggccggagacagagc

SEQ ID NO: 1578937 - RNA, 19 nt, Artificial Sequence
  Description of Artificial Sequence: Synthetic oligonucleotide
ggagucgcagccagcagca

SEQ ID NO: 1578938 - RNA, 19 nt, Artificial Sequence
  Description of Artificial Sequence: Synthetic oligonucleotide
agaccuguccuugcagaua

SEQ ID NO: 1578939 - RNA, 19 nt, Artificial Sequence
  Description of Artificial Sequence: Synthetic oligonucleotide
gcagauagggcaggugcac

SEQ ID NO: 1578940 - RNA, 19 nt, Artificial Sequence
  Description of Artificial Sequence: Synthetic oligonucleotide
acacccuccugaaacgguu

SEQ ID NO: 1578941 - RNA, 19 nt, Artificial Sequence
  Description of Artificial Sequence: Synthetic oligonucleotide
cuaugcuguccucgacuga

SEQ ID NO: 1578942 - RNA, 19 nt, Artificial Sequence
  Description of Artificial Sequence: Synthetic oligonucleotide
agcauucccgcugggucau

SEQ ID NO: 1578943 - RNA, 19 nt, Artificial Sequence
  Description of Artificial Sequence: Synthetic oligonucleotide
ggauccgaggggcaggacu

SEQ ID NO: 1578944 - RNA, 19 nt, Artificial Sequence
  Description of Artificial Sequence: Synthetic oligonucleotide
ucgccgaggcggggaacgg

SEQ ID NO: 1578945 - RNA, 19 nt, Artificial Sequence
  Description of Artificial Sequence: Synthetic oligonucleotide
ccuuucuggaaccgccuuc

SEQ ID NO: 1578946 - RNA, 19 nt, Artificial Sequence
  Description of Artificial Sequence: Synthetic oligonucleotide
ccuccugaaacgguuucac

SEQ ID NO: 1578947 - RNA, 19 nt, Artificial Sequence
  Description of Artificial Sequence: Synthetic oligonucleotide
gauagggcaggugcacagu

SEQ ID NO: 1578948 - RNA, 19 nt, Artificial Sequence
  Description of Artificial Sequence: Synthetic oligonucleotide
ggggcggaggaccccuggg

SEQ ID NO: 1578949 - RNA, 19 nt, Artificial Sequence
  Description of Artificial Sequence: Synthetic oligonucleotide
cuccggcccggcagagacg

SEQ ID NO: 1578950 - RNA, 19 nt, Artificial Sequence
  Description of Artificial Sequence: Synthetic oligonucleotide
gacacgaggcagagcagcu

SEQ ID NO: 1578951 - RNA, 19 nt, Artificial Sequence
  Description of Artificial Sequence: Synthetic oligonucleotide
accgugcuggacacgcuga

SEQ ID NO: 1578952 - RNA, 19 nt, Artificial Sequence
  Description of Artificial Sequence: Synthetic oligonucleotide
aucucgcaguguggugcgg

SEQ ID NO: 1578953 - RNA, 19 nt, Artificial Sequence
  Description of Artificial Sequence: Synthetic oligonucleotide
cagauagggcaggugcaca

SEQ ID NO: 1578954 - RNA, 19 nt, Artificial Sequence
  Description of Artificial Sequence: Synthetic oligonucleotide
gcuggcgucgccacuccag

SEQ ID NO: 1578955 - RNA, 19 nt, Artificial Sequence
  Description of Artificial Sequence: Synthetic oligonucleotide
ucccaguccacgggcccca

SEQ ID NO: 1578956 - RNA, 19 nt, Artificial Sequence
  Description of Artificial Sequence: Synthetic oligonucleotide
cuucacggaaggucacgua

SEQ ID NO: 1578957 - RNA, 19 nt, Artificial Sequence
  Description of Artificial Sequence: Synthetic oligonucleotide
ggcggaggaccccuggguc

SEQ ID NO: 1578958 - RNA, 19 nt, Artificial Sequence
  Description of Artificial Sequence: Synthetic oligonucleotide
ggugccucuccuggggcag

SEQ ID NO: 1578959 - RNA, 19 nt, Artificial Sequence
  Description of Artificial Sequence: Synthetic oligonucleotide
ccuccggcccggcagagac

SEQ ID NO: 1578960 - RNA, 19 nt, Artificial Sequence
  Description of Artificial Sequence: Synthetic oligonucleotide
ccgacccgcgucuuccacg

SEQ ID NO: 1578961 - RNA, 19 nt, Artificial Sequence
  Description of Artificial Sequence: Synthetic oligonucleotide
ugccacuuccagggugacu

SEQ ID NO: 1578962 - RNA, 19 nt, Artificial Sequence
  Description of Artificial Sequence: Synthetic oligonucleotide
guaccgccugaaggcagcc

SEQ ID NO: 1578963 - RNA, 19 nt, Artificial Sequence
  Description of Artificial Sequence: Synthetic oligonucleotide
aaccagcccaggagucgca

SEQ ID NO: 1578964 - RNA, 19 nt, Artificial Sequence
  Description of Artificial Sequence: Synthetic oligonucleotide
cccguucccaguccacggg

SEQ ID NO: 1578965 - RNA, 19 nt, Artificial Sequence
  Description of Artificial Sequence: Synthetic oligonucleotide
uugccccugugcuggcguc

SEQ ID NO: 1578966 - RNA, 19 nt, Artificial Sequence
  Description of Artificial Sequence: Synthetic oligonucleotide
cuguuaccgucaccuuuga

SEQ ID NO: 1578967 - RNA, 19 nt, Artificial Sequence
  Description of Artificial Sequence: Synthetic oligonucleotide
agcggacuccaugcugcug

SEQ ID NO: 1578968 - RNA, 19 nt, Artificial Sequence
  Description of Artificial Sequence: Synthetic oligonucleotide
gcuuagggucaaggugugg

SEQ ID NO: 1578969 - RNA, 19 nt, Artificial Sequence
  Description of Artificial Sequence: Synthetic oligonucleotide
caguuggauccgaggggca

SEQ ID NO: 1578970 - RNA, 19 nt, Artificial Sequence
  Description of Artificial Sequence: Synthetic oligonucleotide
guccacgggccccagggcu

SEQ ID NO: 1578971 - RNA, 19 nt, Artificial Sequence
  Description of Artificial Sequence: Synthetic oligonucleotide
cuuguucaggccgccccga

SEQ ID NO: 1578972 - RNA, 19 nt, Artificial Sequence
  Description of Artificial Sequence: Synthetic oligonucleotide
agccuuuucuugggcuggu

SEQ ID NO: 1578973 - RNA, 19 nt, Artificial Sequence
  Description of Artificial Sequence: Synthetic oligonucleotide
gacacccuccugaaacggu

SEQ ID NO: 1578974 - RNA, 19 nt, Artificial Sequence
  Description of Artificial Sequence: Synthetic oligonucleotide
ggucaagguguggccgggg

SEQ ID NO: 1578975 - RNA, 19 nt, Artificial Sequence
  Description of Artificial Sequence: Synthetic oligonucleotide
ccguucccaguccacgggc

SEQ ID NO: 1578976 - RNA, 19 nt, Artificial Sequence
  Description of Artificial Sequence: Synthetic oligonucleotide
gcggcgucagaugucuggc

SEQ ID NO: 1578977 - RNA, 19 nt, Artificial Sequence
  Description of Artificial Sequence: Synthetic oligonucleotide
gggucaagguguggccggg

SEQ ID NO: 1578978 - RNA, 19 nt, Artificial Sequence
  Description of Artificial Sequence: Synthetic oligonucleotide
ccuuccgcaggguagaaau

SEQ ID NO: 1578979 - RNA, 19 nt, Artificial Sequence
  Description of Artificial Sequence: Synthetic oligonucleotide
ccugggcgcagcagcaaug

SEQ ID NO: 1578980 - RNA, 19 nt, Artificial Sequence
  Description of Artificial Sequence: Synthetic oligonucleotide
gaggucgcagcaggcugga

SEQ ID NO: 1578981 - RNA, 19 nt, Artificial Sequence
  Description of Artificial Sequence: Synthetic oligonucleotide
gccuaugcuguccucgacu

SEQ ID NO: 1578982 - RNA, 19 nt, Artificial Sequence
  Description of Artificial Sequence: Synthetic oligonucleotide
gcgucagaugucuggccca

SEQ ID NO: 1578983 - RNA, 19 nt, Artificial Sequence
  Description of Artificial Sequence: Synthetic oligonucleotide
aggucgccgaggcggggaa

SEQ ID NO: 1578984 - RNA, 19 nt, Artificial Sequence
  Description of Artificial Sequence: Synthetic oligonucleotide
ggguaccgccugaaggcag

SEQ ID NO: 1578985 - RNA, 19 nt, Artificial Sequence
  Description of Artificial Sequence: Synthetic oligonucleotide
cggcucaucucgcagugug

SEQ ID NO: 1578986 - RNA, 19 nt, Artificial Sequence
  Description of Artificial Sequence: Synthetic oligonucleotide
cccacuccaccuccaggcc

SEQ ID NO: 1578987 - RNA, 19 nt, Artificial Sequence
  Description of Artificial Sequence: Synthetic oligonucleotide
acgggaugaagcggcucau

SEQ ID NO: 1578988 - RNA, 19 nt, Artificial Sequence
  Description of Artificial Sequence: Synthetic oligonucleotide
agcccacacaaggggugcu

SEQ ID NO: 1578989 - RNA, 19 nt, Artificial Sequence
  Description of Artificial Sequence: Synthetic oligonucleotide
acacgcugaccagcagcca

SEQ ID NO: 1578990 - RNA, 19 nt, Artificial Sequence
  Description of Artificial Sequence: Synthetic oligonucleotide
cuucagcacugcgacccga

SEQ ID NO: 1578991 - RNA, 19 nt, Artificial Sequence
  Description of Artificial Sequence: Synthetic oligonucleotide
cagcagcaaugcggcaggc

SEQ ID NO: 1578992 - RNA, 19 nt, Artificial Sequence
  Description of Artificial Sequence: Synthetic oligonucleotide
cccgacaggcauagcggac

SEQ ID NO: 1578993 - RNA, 19 nt, Artificial Sequence
  Description of Artificial Sequence: Synthetic oligonucleotide
ccaggagucgcagccagca

SEQ ID NO: 1578994 - RNA, 19 nt, Artificial Sequence
  Description of Artificial Sequence: Synthetic oligonucleotide
cccaggucgccgaggcggg

SEQ ID NO: 1578995 - RNA, 19 nt, Artificial Sequence
  Description of Artificial Sequence: Synthetic oligonucleotide
gcgcccgagggguaccgcc

SEQ ID NO: 1578996 - RNA, 19 nt, Artificial Sequence
  Description of Artificial Sequence: Synthetic oligonucleotide
ggccuaugcuguccucgac

SEQ ID NO: 1578997 - RNA, 19 nt, Artificial Sequence
  Description of Artificial Sequence: Synthetic oligonucleotide
aggcaaagcucagguccau

SEQ ID NO: 1578998 - RNA, 19 nt, Artificial Sequence
  Description of Artificial Sequence: Synthetic oligonucleotide
ggcggggaacgggaugaag

SEQ ID NO: 1578999 - RNA, 19 nt, Artificial Sequence
  Description of Artificial Sequence: Synthetic oligonucleotide
guguggccggggcggagga

SEQ ID NO: 1579000 - RNA, 19 nt, Artificial Sequence
  Description of Artificial Sequence: Synthetic oligonucleotide
gcacugcgacccgaugcgg

SEQ ID NO: 1579001 - RNA, 19 nt, Artificial Sequence
  Description of Artificial Sequence: Synthetic oligonucleotide
uggauccgaggggcaggac

SEQ ID NO: 1579002 - RNA, 19 nt, Artificial Sequence
  Description of Artificial Sequence: Synthetic oligonucleotide
cugcggcgucagaugucug

SEQ ID NO: 1579003 - RNA, 19 nt, Artificial Sequence
  Description of Artificial Sequence: Synthetic oligonucleotide
ggcccggcagagacggcgg

SEQ ID NO: 1579004 - RNA, 19 nt, Artificial Sequence
  Description of Artificial Sequence: Synthetic oligonucleotide
gugguggacccgacaggca

SEQ ID NO: 1579005 - RNA, 19 nt, Artificial Sequence
  Description of Artificial Sequence: Synthetic oligonucleotide
cggacgguggagagccacg

SEQ ID NO: 1579006 - RNA, 19 nt, Artificial Sequence
  Description of Artificial Sequence: Synthetic oligonucleotide
uggacccgacaggcauagc

SEQ ID NO: 1579007 - RNA, 19 nt, Artificial Sequence
  Description of Artificial Sequence: Synthetic oligonucleotide
gcucaucucgcaguguggu

SEQ ID NO: 1579008 - RNA, 19 nt, Artificial Sequence
  Description of Artificial Sequence: Synthetic oligonucleotide
ggcccaggucgccgaggcg

SEQ ID NO: 1579009 - RNA, 19 nt, Artificial Sequence
  Description of Artificial Sequence: Synthetic oligonucleotide
guccucgacugaaggccca

SEQ ID NO: 1579010 - RNA, 19 nt, Artificial Sequence
  Description of Artificial Sequence: Synthetic oligonucleotide
agaccgugcuggacacgcu

SEQ ID NO: 1579011 - RNA, 19 nt, Artificial Sequence
  Description of Artificial Sequence: Synthetic oligonucleotide
cagguccaucacugcaucu

SEQ ID NO: 1579012 - RNA, 19 nt, Artificial Sequence
  Description of Artificial Sequence: Synthetic oligonucleotide
gggguaccgccugaaggca

SEQ ID NO: 1579013 - RNA, 19 nt, Artificial Sequence
  Description of Artificial Sequence: Synthetic oligonucleotide
gcuggggugguggacccga

SEQ ID NO: 1579014 - RNA, 19 nt, Artificial Sequence
  Description of Artificial Sequence: Synthetic oligonucleotide
ccucaaccagcccaggagu

SEQ ID NO: 1579015 - RNA, 19 nt, Artificial Sequence
  Description of Artificial Sequence: Synthetic oligonucleotide
gaaccgccuucuggaccac

SEQ ID NO: 1579016 - RNA, 19 nt, Artificial Sequence
  Description of Artificial Sequence: Synthetic oligonucleotide
gccccgacccgcgucuucc

SEQ ID NO: 1579017 - RNA, 19 nt, Artificial Sequence
  Description of Artificial Sequence: Synthetic oligonucleotide
gcugcggcgucagaugucu

SEQ ID NO: 1579018 - RNA, 19 nt, Artificial Sequence
  Description of Artificial Sequence: Synthetic oligonucleotide
cacuccaccuccaggccuu

SEQ ID NO: 1579019 - RNA, 19 nt, Artificial Sequence
  Description of Artificial Sequence: Synthetic oligonucleotide
gcggacgguggagagccac

SEQ ID NO: 1579020 - RNA, 19 nt, Artificial Sequence
  Description of Artificial Sequence: Synthetic oligonucleotide
gaccaccucugagcuccca

SEQ ID NO: 1579021 - RNA, 19 nt, Artificial Sequence
  Description of Artificial Sequence: Synthetic oligonucleotide
gcgucgccacuccagccca

SEQ ID NO: 1579022 - RNA, 19 nt, Artificial Sequence
  Description of Artificial Sequence: Synthetic oligonucleotide
cgaggcagagcagcuccgg

SEQ ID NO: 1579023 - RNA, 19 nt, Artificial Sequence
  Description of Artificial Sequence: Synthetic oligonucleotide
cgucagaugucuggcccag

SEQ ID NO: 1579024 - RNA, 19 nt, Artificial Sequence
  Description of Artificial Sequence: Synthetic oligonucleotide
gcaggugaccuuugccccu

SEQ ID NO: 1579025 - RNA, 19 nt, Artificial Sequence
  Description of Artificial Sequence: Synthetic oligonucleotide
gcccgagggguaccgccug

SEQ ID NO: 1579026 - RNA, 19 nt, Artificial Sequence
  Description of Artificial Sequence: Synthetic oligonucleotide
gccuuuucuugggcuggug

SEQ ID NO: 1579027 - RNA, 19 nt, Artificial Sequence
  Description of Artificial Sequence: Synthetic oligonucleotide
caaucgccuccggcccggc

SEQ ID NO: 1579028 - RNA, 19 nt, Artificial Sequence
  Description of Artificial Sequence: Synthetic oligonucleotide
cugcgacccgaugcgggca

SEQ ID NO: 1579029 - RNA, 19 nt, Artificial Sequence
  Description of Artificial Sequence: Synthetic oligonucleotide
ggucccguucccaguccac

SEQ ID NO: 1579030 - RNA, 19 nt, Artificial Sequence
  Description of Artificial Sequence: Synthetic oligonucleotide
gcggacaggaacaggccua

SEQ ID NO: 1579031 - RNA, 19 nt, Artificial Sequence
  Description of Artificial Sequence: Synthetic oligonucleotide
ccaguccacgggccccagg

SEQ ID NO: 1579032 - RNA, 19 nt, Artificial Sequence
  Description of Artificial Sequence: Synthetic oligonucleotide
cgagggguaccgccugaag

SEQ ID NO: 1579033 - RNA, 19 nt, Artificial Sequence
  Description of Artificial Sequence: Synthetic oligonucleotide
cugggucauccaccuugaa

SEQ ID NO: 1579034 - RNA, 19 nt, Artificial Sequence
  Description of Artificial Sequence: Synthetic oligonucleotide
gucgccacuccagcccaaa

SEQ ID NO: 1579035 - RNA, 19 nt, Artificial Sequence
  Description of Artificial Sequence: Synthetic oligonucleotide
gacccgaugcgggcaggcu

SEQ ID NO: 1579036 - RNA, 19 nt, Artificial Sequence
  Description of Artificial Sequence: Synthetic oligonucleotide
ccacgaaccagcacucaau

SEQ ID NO: 1579037 - RNA, 19 nt, Artificial Sequence
  Description of Artificial Sequence: Synthetic oligonucleotide
cccagggcucauugucauc

SEQ ID NO: 1579038 - RNA, 19 nt, Artificial Sequence
  Description of Artificial Sequence: Synthetic oligonucleotide
gacugugggugaggacagu

SEQ ID NO: 1579039 - RNA, 19 nt, Artificial Sequence
  Description of Artificial Sequence: Synthetic oligonucleotide
cgucuuccacgaaccagca

SEQ ID NO: 1579040 - RNA, 19 nt, Artificial Sequence
  Description of Artificial Sequence: Synthetic oligonucleotide
cacccuccugaaacgguuu

SEQ ID NO: 1579041 - RNA, 19 nt, Artificial Sequence
  Description of Artificial Sequence: Synthetic oligonucleotide
gguggacccgacaggcaua

SEQ ID NO: 1579042 - RNA, 19 nt, Artificial Sequence
  Description of Artificial Sequence: Synthetic oligonucleotide
ggacgguggagagccacgu

SEQ ID NO: 1579043 - RNA, 19 nt, Artificial Sequence
  Description of Artificial Sequence: Synthetic oligonucleotide
gcagccagaaggucccguu

SEQ ID NO: 1579044 - RNA, 19 nt, Artificial Sequence
  Description of Artificial Sequence: Synthetic oligonucleotide
cgacccgcgucuuccacga

SEQ ID NO: 1579045 - RNA, 19 nt, Artificial Sequence
  Description of Artificial Sequence: Synthetic oligonucleotide
cagaaugguggcggacggu

SEQ ID NO: 1579046 - RNA, 19 nt, Artificial Sequence
  Description of Artificial Sequence: Synthetic oligonucleotide
gggcgcccgagggguaccg

SEQ ID NO: 1579047 - RNA, 19 nt, Artificial Sequence
  Description of Artificial Sequence: Synthetic oligonucleotide
guccccguccagggcccgc

SEQ ID NO: 1579048 - RNA, 19 nt, Artificial Sequence
  Description of Artificial Sequence: Synthetic oligonucleotide
gccccugugcuggcgucgc

SEQ ID NO: 1579049 - RNA, 19 nt, Artificial Sequence
  Description of Artificial Sequence: Synthetic oligonucleotide
caggcauagcggacuccau

SEQ ID NO: 1579050 - RNA, 19 nt, Artificial Sequence
  Description of Artificial Sequence: Synthetic oligonucleotide
gacccgcgucuuccacgaa

SEQ ID NO: 1579051 - RNA, 19 nt, Artificial Sequence
  Description of Artificial Sequence: Synthetic oligonucleotide
cccgacccgcgucuuccac

SEQ ID NO: 1579052 - RNA, 19 nt, Artificial Sequence
  Description of Artificial Sequence: Synthetic oligonucleotide
aggcggggaacgggaugaa

SEQ ID NO: 1579053 - RNA, 19 nt, Artificial Sequence
  Description of Artificial Sequence: Synthetic oligonucleotide
gcgacccgaugcgggcagg

SEQ ID NO: 1579054 - RNA, 19 nt, Artificial Sequence
  Description of Artificial Sequence: Synthetic oligonucleotide
gccuuucuggaaccgccuu

SEQ ID NO: 1579055 - RNA, 19 nt, Artificial Sequence
  Description of Artificial Sequence: Synthetic oligonucleotide
cagcuguuaccgucaccuu

SEQ ID NO: 1579056 - RNA, 19 nt, Artificial Sequence
  Description of Artificial Sequence: Synthetic oligonucleotide
guggccggagacagagcau

SEQ ID NO: 1579057 - RNA, 19 nt, Artificial Sequence
  Description of Artificial Sequence: Synthetic oligonucleotide
ggaccaccucugagcuccc

SEQ ID NO: 1579058 - RNA, 19 nt, Artificial Sequence
  Description of Artificial Sequence: Synthetic oligonucleotide
cggggcggaggaccccugg

SEQ ID NO: 1579059 - RNA, 19 nt, Artificial Sequence
  Description of Artificial Sequence: Synthetic oligonucleotide
gcccagugccuugaugagu

SEQ ID NO: 1579060 - RNA, 19 nt, Artificial Sequence
  Description of Artificial Sequence: Synthetic oligonucleotide
ggucgccgaggcggggaac

SEQ ID NO: 1579061 - RNA, 19 nt, Artificial Sequence
  Description of Artificial Sequence: Synthetic oligonucleotide
cgacccgaugcgggcaggc

SEQ ID NO: 1579062 - RNA, 19 nt, Artificial Sequence
  Description of Artificial Sequence: Synthetic oligonucleotide
ccacacaaggggugcuggu

SEQ ID NO: 1579063 - RNA, 19 nt, Artificial Sequence
  Description of Artificial Sequence: Synthetic oligonucleotide
ggcgcccgagggguaccgc

SEQ ID NO: 1579064 - RNA, 19 nt, Artificial Sequence
  Description of Artificial Sequence: Synthetic oligonucleotide
ggaggaccccuggguccug

SEQ ID NO: 1579065 - RNA, 19 nt, Artificial Sequence
  Description of Artificial Sequence: Synthetic oligonucleotide
ggcagccagaaggucccgu

SEQ ID NO: 1579066 - RNA, 19 nt, Artificial Sequence
  Description of Artificial Sequence: Synthetic oligonucleotide
gccuuccgcaggguagaaa

SEQ ID NO: 1579067 - RNA, 19 nt, Artificial Sequence
  Description of Artificial Sequence: Synthetic oligonucleotide
cgccgaggcggggaacggg

SEQ ID NO: 1579068 - RNA, 19 nt, Artificial Sequence
  Description of Artificial Sequence: Synthetic oligonucleotide
ggccggagacagagcaucu

SEQ ID NO: 1579069 - RNA, 19 nt, Artificial Sequence
  Description of Artificial Sequence: Synthetic oligonucleotide
ccgcgucuuccacgaacca

SEQ ID NO: 1579070 - RNA, 19 nt, Artificial Sequence
  Description of Artificial Sequence: Synthetic oligonucleotide
ccccugugcuggcgucgcc

SEQ ID NO: 1579071 - RNA, 19 nt, Artificial Sequence
  Description of Artificial Sequence: Synthetic oligonucleotide
acgggccccagggcucauu

SEQ ID NO: 1579072 - RNA, 19 nt, Artificial Sequence
  Description of Artificial Sequence: Synthetic oligonucleotide
cgaugcgggcaggcugggg

SEQ ID NO: 1579073 - RNA, 19 nt, Artificial Sequence
  Description of Artificial Sequence: Synthetic oligonucleotide
ccucgacugaaggcccaga

SEQ ID NO: 1579074 - RNA, 19 nt, Artificial Sequence
  Description of Artificial Sequence: Synthetic oligonucleotide
cgucaccuuugagucuuca

SEQ ID NO: 1579075 - RNA, 19 nt, Artificial Sequence
  Description of Artificial Sequence: Synthetic oligonucleotide
cccgagggguaccgccuga

SEQ ID NO: 1579076 - RNA, 19 nt, Artificial Sequence
  Description of Artificial Sequence: Synthetic oligonucleotide
ccggggcggaggaccccug

SEQ ID NO: 1579077 - RNA, 19 nt, Artificial Sequence
  Description of Artificial Sequence: Synthetic oligonucleotide
cagggcccgcgggcagcuc

SEQ ID NO: 1579078 - RNA, 19 nt, Artificial Sequence
  Description of Artificial Sequence: Synthetic oligonucleotide
ccgagggguaccgccugaa

SEQ ID NO: 1579079 - RNA, 19 nt, Artificial Sequence
  Description of Artificial Sequence: Synthetic oligonucleotide
cgggcucccgcuggggcuc

SEQ ID NO: 1579080 - RNA, 19 nt, Artificial Sequence
  Description of Artificial Sequence: Synthetic oligonucleotide
ccccgacccgcgucuucca

SEQ ID NO: 1579081 - RNA, 19 nt, Artificial Sequence
  Description of Artificial Sequence: Synthetic oligonucleotide
gcauucccgcugggucauc

SEQ ID NO: 1579082 - RNA, 19 nt, Artificial Sequence
  Description of Artificial Sequence: Synthetic oligonucleotide
ggcggacgguggagagcca

SEQ ID NO: 1579083 - RNA, 19 nt, Artificial Sequence
  Description of Artificial Sequence: Synthetic oligonucleotide
gccggggcggaggaccccu

SEQ ID NO: 1579084 - RNA, 19 nt, Artificial Sequence
  Description of Artificial Sequence: Synthetic oligonucleotide
gccuccggcccggcagaga

SEQ ID NO: 1579085 - RNA, 19 nt, Artificial Sequence
  Description of Artificial Sequence: Synthetic oligonucleotide
gcggcucaucucgcagugu

SEQ ID NO: 1579086 - RNA, 19 nt, Artificial Sequence
  Description of Artificial Sequence: Synthetic oligonucleotide
cgccccgacccgcgucuuc

SEQ ID NO: 1579087 - RNA, 19 nt, Artificial Sequence
  Description of Artificial Sequence: Synthetic oligonucleotide
cgucgccacuccagcccaa

SEQ ID NO: 1579088 - RNA, 19 nt, Artificial Sequence
  Description of Artificial Sequence: Synthetic oligonucleotide
ccgcugggucauccaccuu

SEQ ID NO: 1579089 - RNA, 19 nt, Artificial Sequence
  Description of Artificial Sequence: Synthetic oligonucleotide
ccgccccgacccgcgucuu

SEQ ID NO: 1579090 - RNA, 19 nt, Artificial Sequence
  Description of Artificial Sequence: Synthetic oligonucleotide
aacucugcgaucuccaucc

SEQ ID NO: 1579091 - RNA, 19 nt, Artificial Sequence
  Description of Artificial Sequence: Synthetic oligonucleotide
aaccuuuggauccagguuc

SEQ ID NO: 1579092 - RNA, 19 nt, Artificial Sequence
  Description of Artificial Sequence: Synthetic oligonucleotide
aguuuuaccagccaaagga

SEQ ID NO: 1579093 - RNA, 19 nt, Artificial Sequence
  Description of Artificial Sequence: Synthetic oligonucleotide
aaaauuaaggauacauugg

SEQ ID NO: 1579094 - RNA, 19 nt, Artificial Sequence
  Description of Artificial Sequence: Synthetic oligonucleotide
auuaaggauacauuggcag

SEQ ID NO: 1579095 - RNA, 19 nt, Artificial Sequence
  Description of Artificial Sequence: Synthetic oligonucleotide
uauagggagagagagagag

SEQ ID NO: 1579096 - RNA, 19 nt, Artificial Sequence
  Description of Artificial Sequence: Synthetic oligonucleotide
uugucguaagagaagauac

SEQ ID NO: 1579097 - RNA, 19 nt, Artificial Sequence
  Description of Artificial Sequence: Synthetic oligonucleotide
gagagagagagagagagag

SEQ ID NO: 1579098 - RNA, 19 nt, Artificial Sequence
  Description of Artificial Sequence: Synthetic oligonucleotide
uuuaccagccaaaggaaca

SEQ ID NO: 1579099 - RNA, 19 nt, Artificial Sequence
  Description of Artificial Sequence: Synthetic oligonucleotide
ugauagaccuucucggccg

SEQ ID NO: 1579100 - RNA, 19 nt, Artificial Sequence
  Description of Artificial Sequence: Synthetic oligonucleotide
ugaucaugaugacauuggg

SEQ ID NO: 1579101 - RNA, 19 nt, Artificial Sequence
  Description of Artificial Sequence: Synthetic oligonucleotide
ucgucuaaccuuuggaucc

SEQ ID NO: 1579102 - RNA, 19 nt, Artificial Sequence
  Description of Artificial Sequence: Synthetic oligonucleotide
uuaaggauacauuggcagc

SEQ ID NO: 1579103 - RNA, 19 nt, Artificial Sequence
  Description of Artificial Sequence: Synthetic oligonucleotide
ucugcgaucuccauccgag

SEQ ID NO: 1579104 - RNA, 19 nt, Artificial Sequence
  Description of Artificial Sequence: Synthetic oligonucleotide
agagaagaacgucuccagc

SEQ ID NO: 1579105 - RNA, 19 nt, Artificial Sequence
  Description of Artificial Sequence: Synthetic oligonucleotide
uagggagagagagagagag

SEQ ID NO: 1579106 - RNA, 19 nt, Artificial Sequence
  Description of Artificial Sequence: Synthetic oligonucleotide
ugagcguugugcaaaguca

SEQ ID NO: 1579107 - RNA, 19 nt, Artificial Sequence
  Description of Artificial Sequence: Synthetic oligonucleotide
aguauccaaaaugccaacc

SEQ ID NO: 1579108 - RNA, 19 nt, Artificial Sequence
  Description of Artificial Sequence: Synthetic oligonucleotide
uccgcguugauaaacuucu

SEQ ID NO: 1579109 - RNA, 19 nt, Artificial Sequence
  Description of Artificial Sequence: Synthetic oligonucleotide
guaggugaggcugugauag

SEQ ID NO: 1579110 - RNA, 19 nt, Artificial Sequence
  Description of Artificial Sequence: Synthetic oligonucleotide
ucucguagaacucugcgau

SEQ ID NO: 1579111 - RNA, 19 nt, Artificial Sequence
  Description of Artificial Sequence: Synthetic oligonucleotide
aaaugggagucucucucag

SEQ ID NO: 1579112 - RNA, 19 nt, Artificial Sequence
  Description of Artificial Sequence: Synthetic oligonucleotide
aaagaauuuccgaaguggu

SEQ ID NO: 1579113 - RNA, 19 nt, Artificial Sequence
  Description of Artificial Sequence: Synthetic oligonucleotide
gauaggauggugaaaucug

SEQ ID NO: 1579114 - RNA, 19 nt, Artificial Sequence
  Description of Artificial Sequence: Synthetic oligonucleotide
cuugcaaacacuuuggggu

SEQ ID NO: 1579115 - RNA, 19 nt, Artificial Sequence
  Description of Artificial Sequence: Synthetic oligonucleotide
ugugauagaccuucucggc

SEQ ID NO: 1579116 - RNA, 19 nt, Artificial Sequence
  Description of Artificial Sequence: Synthetic oligonucleotide
ucagacaagcuccucgucu

SEQ ID NO: 1579117 - RNA, 19 nt, Artificial Sequence
  Description of Artificial Sequence: Synthetic oligonucleotide
aagaacgucuccagcaccg

SEQ ID NO: 1579118 - RNA, 19 nt, Artificial Sequence
  Description of Artificial Sequence: Synthetic oligonucleotide
uguucaggucagauguccg

SEQ ID NO: 1579119 - RNA, 19 nt, Artificial Sequence
  Description of Artificial Sequence: Synthetic oligonucleotide
ugaguuuuaccagccaaag

SEQ ID NO: 1579120 - RNA, 19 nt, Artificial Sequence
  Description of Artificial Sequence: Synthetic oligonucleotide
acuucugcguacugagggc

SEQ ID NO: 1579121 - RNA, 19 nt, Artificial Sequence
  Description of Artificial Sequence: Synthetic oligonucleotide
aauuaaggauacauuggca

SEQ ID NO: 1579122 - RNA, 19 nt, Artificial Sequence
  Description of Artificial Sequence: Synthetic oligonucleotide
gagagagagagagagaguc

SEQ ID NO: 1579123 - RNA, 19 nt, Artificial Sequence
  Description of Artificial Sequence: Synthetic oligonucleotide
gacaacgauggugaagugg

SEQ ID NO: 1579124 - RNA, 19 nt, Artificial Sequence
  Description of Artificial Sequence: Synthetic oligonucleotide
aagaauuuccgaagugguc

SEQ ID NO: 1579125 - RNA, 19 nt, Artificial Sequence
  Description of Artificial Sequence: Synthetic oligonucleotide
uugauaaacuucugcguac

SEQ ID NO: 1579126 - RNA, 19 nt, Artificial Sequence
  Description of Artificial Sequence: Synthetic oligonucleotide
gauggugaaaucuggagcu

SEQ ID NO: 1579127 - RNA, 19 nt, Artificial Sequence
  Description of Artificial Sequence: Synthetic oligonucleotide
cuuggaaacccucagacaa

SEQ ID NO: 1579128 - RNA, 19 nt, Artificial Sequence
  Description of Artificial Sequence: Synthetic oligonucleotide
uggagaucuuuccaaagaa

SEQ ID NO: 1579129 - RNA, 19 nt, Artificial Sequence
  Description of Artificial Sequence: Synthetic oligonucleotide
gagagagagagagucuugg

SEQ ID NO: 1579130 - RNA, 19 nt, Artificial Sequence
  Description of Artificial Sequence: Synthetic oligonucleotide
gacuugcaaacacuuuggg

SEQ ID NO: 1579131 - RNA, 19 nt, Artificial Sequence
  Description of Artificial Sequence: Synthetic oligonucleotide
gacaguauccaaaaugcca

SEQ ID NO: 1579132 - RNA, 19 nt, Artificial Sequence
  Description of Artificial Sequence: Synthetic oligonucleotide
cucucgguaggaauguggg

SEQ ID NO: 1579133 - RNA, 19 nt, Artificial Sequence
  Description of Artificial Sequence: Synthetic oligonucleotide
gagagaagaacgucuccag

SEQ ID NO: 1579134 - RNA, 19 nt, Artificial Sequence
  Description of Artificial Sequence: Synthetic oligonucleotide
gcguugauaaacuucugcg

SEQ ID NO: 1579135 - RNA, 19 nt, Artificial Sequence
  Description of Artificial Sequence: Synthetic oligonucleotide
gaugacauugggccagugc

SEQ ID NO: 1579136 - RNA, 19 nt, Artificial Sequence
  Description of Artificial Sequence: Synthetic oligonucleotide
caagcgagagcucauugag

SEQ ID NO: 1579137 - RNA, 19 nt, Artificial Sequence
  Description of Artificial Sequence: Synthetic oligonucleotide
ugcgaucuccauccgagcc

SEQ ID NO: 1579138 - RNA, 19 nt, Artificial Sequence
  Description of Artificial Sequence: Synthetic oligonucleotide
ucgguaggaaugugggugg

SEQ ID NO: 1579139 - RNA, 19 nt, Artificial Sequence
  Description of Artificial Sequence: Synthetic oligonucleotide
uucuccaaacuguucaggu

SEQ ID NO: 1579140 - RNA, 19 nt, Artificial Sequence
  Description of Artificial Sequence: Synthetic oligonucleotide
gucguaagagaagauaccc

SEQ ID NO: 1579141 - RNA, 19 nt, Artificial Sequence
  Description of Artificial Sequence: Synthetic oligonucleotide
gucuuggaaacccucagac

SEQ ID NO: 1579142 - RNA, 19 nt, Artificial Sequence
  Description of Artificial Sequence: Synthetic oligonucleotide
cuucucguagaacucugcg

SEQ ID NO: 1579143 - RNA, 19 nt, Artificial Sequence
  Description of Artificial Sequence: Synthetic oligonucleotide
caguucguuaugcagggcc

SEQ ID NO: 1579144 - RNA, 19 nt, Artificial Sequence
  Description of Artificial Sequence: Synthetic oligonucleotide
gagagagucuuggaaaccc

SEQ ID NO: 1579145 - RNA, 19 nt, Artificial Sequence
  Description of Artificial Sequence: Synthetic oligonucleotide
ucuuccgcguugauaaacu

SEQ ID NO: 1579146 - RNA, 19 nt, Artificial Sequence
  Description of Artificial Sequence: Synthetic oligonucleotide
gauggaguccuuccggcug

SEQ ID NO: 1579147 - RNA, 19 nt, Artificial Sequence
  Description of Artificial Sequence: Synthetic oligonucleotide
ugaaccucgguugucaaaa

SEQ ID NO: 1579148 - RNA, 19 nt, Artificial Sequence
  Description of Artificial Sequence: Synthetic oligonucleotide
uucucguagaacucugcga

SEQ ID NO: 1579149 - RNA, 19 nt, Artificial Sequence
  Description of Artificial Sequence: Synthetic oligonucleotide
ugcggauggaguccuuccg

SEQ ID NO: 1579150 - RNA, 19 nt, Artificial Sequence
  Description of Artificial Sequence: Synthetic oligonucleotide
uuaggggccucucgguagg

SEQ ID NO: 1579151 - RNA, 19 nt, Artificial Sequence
  Description of Artificial Sequence: Synthetic oligonucleotide
guugauaaacuucugcgua

SEQ ID NO: 1579152 - RNA, 19 nt, Artificial Sequence
  Description of Artificial Sequence: Synthetic oligonucleotide
ucuuaagggcaagcgagag

SEQ ID NO: 1579153 - RNA, 19 nt, Artificial Sequence
  Description of Artificial Sequence: Synthetic oligonucleotide
agagagagucuuggaaacc

SEQ ID NO: 1579154 - RNA, 19 nt, Artificial Sequence
  Description of Artificial Sequence: Synthetic oligonucleotide
ucuuggaaacccucagaca

SEQ ID NO: 1579155 - RNA, 19 nt, Artificial Sequence
  Description of Artificial Sequence: Synthetic oligonucleotide
guaagagaagauacccagg

SEQ ID NO: 1579156 - RNA, 19 nt, Artificial Sequence
  Description of Artificial Sequence: Synthetic oligonucleotide
ggauggugaaaucuggagc

SEQ ID NO: 1579157 - RNA, 19 nt, Artificial Sequence
  Description of Artificial Sequence: Synthetic oligonucleotide
uccucgucuaaccuuugga

SEQ ID NO: 1579158 - RNA, 19 nt, Artificial Sequence
  Description of Artificial Sequence: Synthetic oligonucleotide
ggauacauuggcagcaucg

SEQ ID NO: 1579159 - RNA, 19 nt, Artificial Sequence
  Description of Artificial Sequence: Synthetic oligonucleotide
gugauagaccuucucggcc

SEQ ID NO: 1579160 - RNA, 19 nt, Artificial Sequence
  Description of Artificial Sequence: Synthetic oligonucleotide
agacuugcaaacacuuugg

SEQ ID NO: 1579161 - RNA, 19 nt, Artificial Sequence
  Description of Artificial Sequence: Synthetic oligonucleotide
cucgguaggaaugugggug

SEQ ID NO: 1579162 - RNA, 19 nt, Artificial Sequence
  Description of Artificial Sequence: Synthetic oligonucleotide
auaaacuucugcguacuga

SEQ ID NO: 1579163 - RNA, 19 nt, Artificial Sequence
  Description of Artificial Sequence: Synthetic oligonucleotide
agaaugacuggccgccuag

SEQ ID NO: 1579164 - RNA, 19 nt, Artificial Sequence
  Description of Artificial Sequence: Synthetic oligonucleotide
ucaugaugacauugggcca

SEQ ID NO: 1579165 - RNA, 19 nt, Artificial Sequence
  Description of Artificial Sequence: Synthetic oligonucleotide
caugaugacauugggccag

SEQ ID NO: 1579166 - RNA, 19 nt, Artificial Sequence
  Description of Artificial Sequence: Synthetic oligonucleotide
gggagagagagagagagag

SEQ ID NO: 1579167 - RNA, 19 nt, Artificial Sequence
  Description of Artificial Sequence: Synthetic oligonucleotide
cucgucuaaccuuuggauc

SEQ ID NO: 1579168 - RNA, 19 nt, Artificial Sequence
  Description of Artificial Sequence: Synthetic oligonucleotide
gaaguggucgucugccggc

SEQ ID NO: 1579169 - RNA, 19 nt, Artificial Sequence
  Description of Artificial Sequence: Synthetic oligonucleotide
uggaaacccucagacaagc

SEQ ID NO: 1579170 - RNA, 19 nt, Artificial Sequence
  Description of Artificial Sequence: Synthetic oligonucleotide
cugggcagagacaccacgg

SEQ ID NO: 1579171 - RNA, 19 nt, Artificial Sequence
  Description of Artificial Sequence: Synthetic oligonucleotide
uggaccacuuucuccaaac

SEQ ID NO: 1579172 - RNA, 19 nt, Artificial Sequence
  Description of Artificial Sequence: Synthetic oligonucleotide
ugauaaacuucugcguacu

SEQ ID NO: 1579173 - RNA, 19 nt, Artificial Sequence
  Description of Artificial Sequence: Synthetic oligonucleotide
agggaggaacuuccacucc

SEQ ID NO: 1579174 - RNA, 19 nt, Artificial Sequence
  Description of Artificial Sequence: Synthetic oligonucleotide
agccuggacaaagaaacag

SEQ ID NO: 1579175 - RNA, 19 nt, Artificial Sequence
  Description of Artificial Sequence: Synthetic oligonucleotide
aaugggagucucucucaga

SEQ ID NO: 1579176 - RNA, 19 nt, Artificial Sequence
  Description of Artificial Sequence: Synthetic oligonucleotide
cuuaagggcaagcgagagc

SEQ ID NO: 1579177 - RNA, 19 nt, Artificial Sequence
  Description of Artificial Sequence: Synthetic oligonucleotide
aucauagaaauggaccacu

SEQ ID NO: 1579178 - RNA, 19 nt, Artificial Sequence
  Description of Artificial Sequence: Synthetic oligonucleotide
aagauacccaggugagaga

SEQ ID NO: 1579179 - RNA, 19 nt, Artificial Sequence
  Description of Artificial Sequence: Synthetic oligonucleotide
agggcguacaucuucucgu

SEQ ID NO: 1579180 - RNA, 19 nt, Artificial Sequence
  Description of Artificial Sequence: Synthetic oligonucleotide
uguccggucugucaugauc

SEQ ID NO: 1579181 - RNA, 19 nt, Artificial Sequence
  Description of Artificial Sequence: Synthetic oligonucleotide
aguucguuaugcagggccg

SEQ ID NO: 1579182 - RNA, 19 nt, Artificial Sequence
  Description of Artificial Sequence: Synthetic oligonucleotide
gguacucuggacuuuguca

SEQ ID NO: 1579183 - RNA, 19 nt, Artificial Sequence
  Description of Artificial Sequence: Synthetic oligonucleotide
uccacuccgagaucugggc

SEQ ID NO: 1579184 - RNA, 19 nt, Artificial Sequence
  Description of Artificial Sequence: Synthetic oligonucleotide
aggauaggauggugaaauc

SEQ ID NO: 1579185 - RNA, 19 nt, Artificial Sequence
  Description of Artificial Sequence: Synthetic oligonucleotide
uuccgcguugauaaacuuc

SEQ ID NO: 1579186 - RNA, 19 nt, Artificial Sequence
  Description of Artificial Sequence: Synthetic oligonucleotide
caaagaaacagagcugcuc

SEQ ID NO: 1579187 - RNA, 19 nt, Artificial Sequence
  Description of Artificial Sequence: Synthetic oligonucleotide
gggcuaaaggauaggaugg

SEQ ID NO: 1579188 - RNA, 19 nt, Artificial Sequence
  Description of Artificial Sequence: Synthetic oligonucleotide
cuucugcguacugagggcg

SEQ ID NO: 1579189 - RNA, 19 nt, Artificial Sequence
  Description of Artificial Sequence: Synthetic oligonucleotide
uccgaaguggucgucugcc

SEQ ID NO: 1579190 - RNA, 19 nt, Artificial Sequence
  Description of Artificial Sequence: Synthetic oligonucleotide
auacccaggugagagaaga

SEQ ID NO: 1579191 - RNA, 19 nt, Artificial Sequence
  Description of Artificial Sequence: Synthetic oligonucleotide
cccaggugagagaagaacg

SEQ ID NO: 1579192 - RNA, 19 nt, Artificial Sequence
  Description of Artificial Sequence: Synthetic oligonucleotide
uuuccgaaguggucgucug

SEQ ID NO: 1579193 - RNA, 19 nt, Artificial Sequence
  Description of Artificial Sequence: Synthetic oligonucleotide
cuguucaggucagaugucc

SEQ ID NO: 1579194 - RNA, 19 nt, Artificial Sequence
  Description of Artificial Sequence: Synthetic oligonucleotide
cacggcuggguacuggucc

SEQ ID NO: 1579195 - RNA, 19 nt, Artificial Sequence
  Description of Artificial Sequence: Synthetic oligonucleotide
aauuuccgaaguggucguc

SEQ ID NO: 1579196 - RNA, 19 nt, Artificial Sequence
  Description of Artificial Sequence: Synthetic oligonucleotide
aggauacauuggcagcauc

SEQ ID NO: 1579197 - RNA, 19 nt, Artificial Sequence
  Description of Artificial Sequence: Synthetic oligonucleotide
gauggugcggauggagucc

SEQ ID NO: 1579198 - RNA, 19 nt, Artificial Sequence
  Description of Artificial Sequence: Synthetic oligonucleotide
gggaggaacuuccacuccg

SEQ ID NO: 1579199 - RNA, 19 nt, Artificial Sequence
  Description of Artificial Sequence: Synthetic oligonucleotide
gaacuuggccaagagcaug

SEQ ID NO: 1579200 - RNA, 19 nt, Artificial Sequence
  Description of Artificial Sequence: Synthetic oligonucleotide
uagccaugacccugaaagc

SEQ ID NO: 1579201 - RNA, 19 nt, Artificial Sequence
  Description of Artificial Sequence: Synthetic oligonucleotide
aaaggauaggauggugaaa

SEQ ID NO: 1579202 - RNA, 19 nt, Artificial Sequence
  Description of Artificial Sequence: Synthetic oligonucleotide
gugagcguugugcaaaguc

SEQ ID NO: 1579203 - RNA, 19 nt, Artificial Sequence
  Description of Artificial Sequence: Synthetic oligonucleotide
agagagagagagucuugga

SEQ ID NO: 1579204 - RNA, 19 nt, Artificial Sequence
  Description of Artificial Sequence: Synthetic oligonucleotide
gugaagugggguucugggc

SEQ ID NO: 1579205 - RNA, 19 nt, Artificial Sequence
  Description of Artificial Sequence: Synthetic oligonucleotide
agagggcuaaaggauagga

SEQ ID NO: 1579206 - RNA, 19 nt, Artificial Sequence
  Description of Artificial Sequence: Synthetic oligonucleotide
ugugaggggccguuccacc

SEQ ID NO: 1579207 - RNA, 19 nt, Artificial Sequence
  Description of Artificial Sequence: Synthetic oligonucleotide
gauagaccuucucggccgc

SEQ ID NO: 1579208 - RNA, 19 nt, Artificial Sequence
  Description of Artificial Sequence: Synthetic oligonucleotide
gaacucugcgaucuccauc

SEQ ID NO: 1579209 - RNA, 19 nt, Artificial Sequence
  Description of Artificial Sequence: Synthetic oligonucleotide
agccaugacccugaaagcu

SEQ ID NO: 1579210 - RNA, 19 nt, Artificial Sequence
  Description of Artificial Sequence: Synthetic oligonucleotide
agauacccaggugagagaa

SEQ ID NO: 1579211 - RNA, 19 nt, Artificial Sequence
  Description of Artificial Sequence: Synthetic oligonucleotide
gugagagaagaacgucucc

SEQ ID NO: 1579212 - RNA, 19 nt, Artificial Sequence
  Description of Artificial Sequence: Synthetic oligonucleotide
aagaaugacuggccgccua

SEQ ID NO: 1579213 - RNA, 19 nt, Artificial Sequence
  Description of Artificial Sequence: Synthetic oligonucleotide
uucuuccgcguugauaaac

SEQ ID NO: 1579214 - RNA, 19 nt, Artificial Sequence
  Description of Artificial Sequence: Synthetic oligonucleotide
aacgucuccagcaccgccu

SEQ ID NO: 1579215 - RNA, 19 nt, Artificial Sequence
  Description of Artificial Sequence: Synthetic oligonucleotide
guuaugcagggccguguag

SEQ ID NO: 1579216 - RNA, 19 nt, Artificial Sequence
  Description of Artificial Sequence: Synthetic oligonucleotide
ugaaagcucucugaaccuc

SEQ ID NO: 1579217 - RNA, 19 nt, Artificial Sequence
  Description of Artificial Sequence: Synthetic oligonucleotide
aggugagagaagaacgucu

SEQ ID NO: 1579218 - RNA, 19 nt, Artificial Sequence
  Description of Artificial Sequence: Synthetic oligonucleotide
uucaggucagauguccggu

SEQ ID NO: 1579219 - RNA, 19 nt, Artificial Sequence
  Description of Artificial Sequence: Synthetic oligonucleotide
agcguugugcaaagucacc

SEQ ID NO: 1579220 - RNA, 19 nt, Artificial Sequence
  Description of Artificial Sequence: Synthetic oligonucleotide
uugcaaacacuuugggguu

SEQ ID NO: 1579221 - RNA, 19 nt, Artificial Sequence
  Description of Artificial Sequence: Synthetic oligonucleotide
uuccgaaguggucgucugc

SEQ ID NO: 1579222 - RNA, 19 nt, Artificial Sequence
  Description of Artificial Sequence: Synthetic oligonucleotide
gagcguugugcaaagucac

SEQ ID NO: 1579223 - RNA, 19 nt, Artificial Sequence
  Description of Artificial Sequence: Synthetic oligonucleotide
gguucuuaagggcaagcga

SEQ ID NO: 1579224 - RNA, 19 nt, Artificial Sequence
  Description of Artificial Sequence: Synthetic oligonucleotide
uggacagccuucugagacu

SEQ ID NO: 1579225 - RNA, 19 nt, Artificial Sequence
  Description of Artificial Sequence: Synthetic oligonucleotide
ugucaccacuuucuucagu

SEQ ID NO: 1579226 - RNA, 19 nt, Artificial Sequence
  Description of Artificial Sequence: Synthetic oligonucleotide
aagcuccucgucuaaccuu

SEQ ID NO: 1579227 - RNA, 19 nt, Artificial Sequence
  Description of Artificial Sequence: Synthetic oligonucleotide
ucucgguaggaaugugggu

SEQ ID NO: 1579228 - RNA, 19 nt, Artificial Sequence
  Description of Artificial Sequence: Synthetic oligonucleotide
ucaggucagauguccgguc

SEQ ID NO: 1579229 - RNA, 19 nt, Artificial Sequence
  Description of Artificial Sequence: Synthetic oligonucleotide
auacauuggcagcaucgua

SEQ ID NO: 1579230 - RNA, 19 nt, Artificial Sequence
  Description of Artificial Sequence: Synthetic oligonucleotide
acgauggugaagugggguu

SEQ ID NO: 1579231 - RNA, 19 nt, Artificial Sequence
  Description of Artificial Sequence: Synthetic oligonucleotide
aagcucucugaaccucggu

SEQ ID NO: 1579232 - RNA, 19 nt, Artificial Sequence
  Description of Artificial Sequence: Synthetic oligonucleotide
ucugaaccucgguugucaa

SEQ ID NO: 1579233 - RNA, 19 nt, Artificial Sequence
  Description of Artificial Sequence: Synthetic oligonucleotide
gugugagcguugugcaaag

SEQ ID NO: 1579234 - RNA, 19 nt, Artificial Sequence
  Description of Artificial Sequence: Synthetic oligonucleotide
cuccucgucuaaccuuugg

SEQ ID NO: 1579235 - RNA, 19 nt, Artificial Sequence
  Description of Artificial Sequence: Synthetic oligonucleotide
acauugggccagugcauga

SEQ ID NO: 1579236 - RNA, 19 nt, Artificial Sequence
  Description of Artificial Sequence: Synthetic oligonucleotide
gauacauuggcagcaucgu

SEQ ID NO: 1579237 - RNA, 19 nt, Artificial Sequence
  Description of Artificial Sequence: Synthetic oligonucleotide
uccgagaucugggccugcg

SEQ ID NO: 1579238 - RNA, 19 nt, Artificial Sequence
  Description of Artificial Sequence: Synthetic oligonucleotide
auggaguccuuccggcuga

SEQ ID NO: 1579239 - RNA, 19 nt, Artificial Sequence
  Description of Artificial Sequence: Synthetic oligonucleotide
gauguccggucugucauga

SEQ ID NO: 1579240 - RNA, 19 nt, Artificial Sequence
  Description of Artificial Sequence: Synthetic oligonucleotide
aggucagauguccggucug

SEQ ID NO: 1579241 - RNA, 19 nt, Artificial Sequence
  Description of Artificial Sequence: Synthetic oligonucleotide
aaaaugccaaccaguucuu

SEQ ID NO: 1579242 - RNA, 19 nt, Artificial Sequence
  Description of Artificial Sequence: Synthetic oligonucleotide
gauacccaggugagagaag

SEQ ID NO: 1579243 - RNA, 19 nt, Artificial Sequence
  Description of Artificial Sequence: Synthetic oligonucleotide
cugaugaaacuggagaucu

SEQ ID NO: 1579244 - RNA, 19 nt, Artificial Sequence
  Description of Artificial Sequence: Synthetic oligonucleotide
cugcagcuucgugugagcg

SEQ ID NO: 1579245 - RNA, 19 nt, Artificial Sequence
  Description of Artificial Sequence: Synthetic oligonucleotide
guccggucugucaugauca

SEQ ID NO: 1579246 - RNA, 19 nt, Artificial Sequence
  Description of Artificial Sequence: Synthetic oligonucleotide
gaugaaacuggagaucuuu

SEQ ID NO: 1579247 - RNA, 19 nt, Artificial Sequence
  Description of Artificial Sequence: Synthetic oligonucleotide
uucguuaugcagggccgug

SEQ ID NO: 1579248 - RNA, 19 nt, Artificial Sequence
  Description of Artificial Sequence: Synthetic oligonucleotide
ugacaacgauggugaagug

SEQ ID NO: 1579249 - RNA, 19 nt, Artificial Sequence
  Description of Artificial Sequence: Synthetic oligonucleotide
gugcggauggaguccuucc

SEQ ID NO: 1579250 - RNA, 19 nt, Artificial Sequence
  Description of Artificial Sequence: Synthetic oligonucleotide
gaauuuccgaaguggucgu

SEQ ID NO: 1579251 - RNA, 19 nt, Artificial Sequence
  Description of Artificial Sequence: Synthetic oligonucleotide
ccucucgguaggaaugugg

SEQ ID NO: 1579252 - RNA, 19 nt, Artificial Sequence
  Description of Artificial Sequence: Synthetic oligonucleotide
cuccauccgagccuggaca

SEQ ID NO: 1579253 - RNA, 19 nt, Artificial Sequence
  Description of Artificial Sequence: Synthetic oligonucleotide
agagagagagagagagucu

SEQ ID NO: 1579254 - RNA, 19 nt, Artificial Sequence
  Description of Artificial Sequence: Synthetic oligonucleotide
gcggauggaguccuuccgg

SEQ ID NO: 1579255 - RNA, 19 nt, Artificial Sequence
  Description of Artificial Sequence: Synthetic oligonucleotide
cucguagaacucugcgauc

SEQ ID NO: 1579256 - RNA, 19 nt, Artificial Sequence
  Description of Artificial Sequence: Synthetic oligonucleotide
agagagagagagagucuug

SEQ ID NO: 1579257 - RNA, 19 nt, Artificial Sequence
  Description of Artificial Sequence: Synthetic oligonucleotide
agacugcccuccaaacagg

SEQ ID NO: 1579258 - RNA, 19 nt, Artificial Sequence
  Description of Artificial Sequence: Synthetic oligonucleotide
ugcaaacacuuugggguuc

SEQ ID NO: 1579259 - RNA, 19 nt, Artificial Sequence
  Description of Artificial Sequence: Synthetic oligonucleotide
gcagcaucguacuuccuga

SEQ ID NO: 1579260 - RNA, 19 nt, Artificial Sequence
  Description of Artificial Sequence: Synthetic oligonucleotide
ggaaauaaaaugggagucu

SEQ ID NO: 1579261 - RNA, 19 nt, Artificial Sequence
  Description of Artificial Sequence: Synthetic oligonucleotide
cauugggccagugcaugac

SEQ ID NO: 1579262 - RNA, 19 nt, Artificial Sequence
  Description of Artificial Sequence: Synthetic oligonucleotide
aaguggucgucugccggcu

SEQ ID NO: 1579263 - RNA, 19 nt, Artificial Sequence
  Description of Artificial Sequence: Synthetic oligonucleotide
aguggucgucugccggcuc

SEQ ID NO: 1579264 - RNA, 19 nt, Artificial Sequence
  Description of Artificial Sequence: Synthetic oligonucleotide
ucaguucguuaugcagggc

SEQ ID NO: 1579265 - RNA, 19 nt, Artificial Sequence
  Description of Artificial Sequence: Synthetic oligonucleotide
agagagagagagagagaga

SEQ ID NO: 1579266 - RNA, 19 nt, Artificial Sequence
  Description of Artificial Sequence: Synthetic oligonucleotide
agagagagagagagagagu

SEQ ID NO: 1579267 - RNA, 19 nt, Artificial Sequence
  Description of Artificial Sequence: Synthetic oligonucleotide
gagagagagagagagucuu

SEQ ID NO: 1579268 - RNA, 19 nt, Artificial Sequence
  Description of Artificial Sequence: Synthetic oligonucleotide
cgcguugauaaacuucugc

SEQ ID NO: 1579269 - RNA, 19 nt, Artificial Sequence
  Description of Artificial Sequence: Synthetic oligonucleotide
acggcuggguacuggucca

SEQ ID NO: 1579270 - RNA, 19 nt, Artificial Sequence
  Description of Artificial Sequence: Synthetic oligonucleotide
gcaagcgagagcucauuga

SEQ ID NO: 1579271 - RNA, 19 nt, Artificial Sequence
  Description of Artificial Sequence: Synthetic oligonucleotide
cagacaagcuccucgucua

SEQ ID NO: 1579272 - RNA, 19 nt, Artificial Sequence
  Description of Artificial Sequence: Synthetic oligonucleotide
agauggcucagcacgccca

SEQ ID NO: 1579273 - RNA, 19 nt, Artificial Sequence
  Description of Artificial Sequence: Synthetic oligonucleotide
ggcguacaucuucucguag

SEQ ID NO: 1579274 - RNA, 19 nt, Artificial Sequence
  Description of Artificial Sequence: Synthetic oligonucleotide
ugagggcguacaucuucuc

SEQ ID NO: 1579275 - RNA, 19 nt, Artificial Sequence
  Description of Artificial Sequence: Synthetic oligonucleotide
agacaagcuccucgucuaa

SEQ ID NO: 1579276 - RNA, 19 nt, Artificial Sequence
  Description of Artificial Sequence: Synthetic oligonucleotide
cggucugucaugaucauga

SEQ ID NO: 1579277 - RNA, 19 nt, Artificial Sequence
  Description of Artificial Sequence: Synthetic oligonucleotide
auggaccacuuucuccaaa

SEQ ID NO: 1579278 - RNA, 19 nt, Artificial Sequence
  Description of Artificial Sequence: Synthetic oligonucleotide
ggauaggauggugaaaucu

SEQ ID NO: 1579279 - RNA, 19 nt, Artificial Sequence
  Description of Artificial Sequence: Synthetic oligonucleotide
auagggagagagagagaga

SEQ ID NO: 1579280 - RNA, 19 nt, Artificial Sequence
  Description of Artificial Sequence: Synthetic oligonucleotide
gagaagggaggaacuucca

SEQ ID NO: 1579281 - RNA, 19 nt, Artificial Sequence
  Description of Artificial Sequence: Synthetic oligonucleotide
ugggcgggucaggaaguag

SEQ ID NO: 1579282 - RNA, 19 nt, Artificial Sequence
  Description of Artificial Sequence: Synthetic oligonucleotide
auauagggagagagagaga

SEQ ID NO: 1579283 - RNA, 19 nt, Artificial Sequence
  Description of Artificial Sequence: Synthetic oligonucleotide
gggagucucucucagauuu

SEQ ID NO: 1579284 - RNA, 19 nt, Artificial Sequence
  Description of Artificial Sequence: Synthetic oligonucleotide
ggacagccuucugagacug

SEQ ID NO: 1579285 - RNA, 19 nt, Artificial Sequence
  Description of Artificial Sequence: Synthetic oligonucleotide
ugugagcguugugcaaagu

SEQ ID NO: 1579286 - RNA, 19 nt, Artificial Sequence
  Description of Artificial Sequence: Synthetic oligonucleotide
ugggagucucucucagauu

SEQ ID NO: 1579287 - RNA, 19 nt, Artificial Sequence
  Description of Artificial Sequence: Synthetic oligonucleotide
gccuugucguaagagaaga

SEQ ID NO: 1579288 - RNA, 19 nt, Artificial Sequence
  Description of Artificial Sequence: Synthetic oligonucleotide
gacaccacggcuggguacu

SEQ ID NO: 1579289 - RNA, 19 nt, Artificial Sequence
  Description of Artificial Sequence: Synthetic oligonucleotide
guggucgucugccggcuca

SEQ ID NO: 1579290 - RNA, 19 nt, Artificial Sequence
  Description of Artificial Sequence: Synthetic oligonucleotide
agcuucgugugagcguugu

SEQ ID NO: 1579291 - RNA, 19 nt, Artificial Sequence
  Description of Artificial Sequence: Synthetic oligonucleotide
cguugugcaaagucaccag

SEQ ID NO: 1579292 - RNA, 19 nt, Artificial Sequence
  Description of Artificial Sequence: Synthetic oligonucleotide
cgaaguggucgucugccgg

SEQ ID NO: 1579293 - RNA, 19 nt, Artificial Sequence
  Description of Artificial Sequence: Synthetic oligonucleotide
caccgccuguuccaccggc

SEQ ID NO: 1579294 - RNA, 19 nt, Artificial Sequence
  Description of Artificial Sequence: Synthetic oligonucleotide
gcguugugcaaagucacca

SEQ ID NO: 1579295 - RNA, 19 nt, Artificial Sequence
  Description of Artificial Sequence: Synthetic oligonucleotide
uccggucugucaugaucau

SEQ ID NO: 1579296 - RNA, 19 nt, Artificial Sequence
  Description of Artificial Sequence: Synthetic oligonucleotide
ucugcguacugagggcgua

SEQ ID NO: 1579297 - RNA, 19 nt, Artificial Sequence
  Description of Artificial Sequence: Synthetic oligonucleotide
cacugggcagagacaccac

SEQ ID NO: 1579298 - RNA, 19 nt, Artificial Sequence
  Description of Artificial Sequence: Synthetic oligonucleotide
guacugguccacucccuua

SEQ ID NO: 1579299 - RNA, 19 nt, Artificial Sequence
  Description of Artificial Sequence: Synthetic oligonucleotide
cagauguccggucugucau

SEQ ID NO: 1579300 - RNA, 19 nt, Artificial Sequence
  Description of Artificial Sequence: Synthetic oligonucleotide
caagcuccucgucuaaccu

SEQ ID NO: 1579301 - RNA, 19 nt, Artificial Sequence
  Description of Artificial Sequence: Synthetic oligonucleotide
uccaugugaggggccguuc

SEQ ID NO: 1579302 - RNA, 19 nt, Artificial Sequence
  Description of Artificial Sequence: Synthetic oligonucleotide
cugagggcguacaucuucu

SEQ ID NO: 1579303 - RNA, 19 nt, Artificial Sequence
  Description of Artificial Sequence: Synthetic oligonucleotide
cucugcgaucuccauccga

SEQ ID NO: 1579304 - RNA, 19 nt, Artificial Sequence
  Description of Artificial Sequence: Synthetic oligonucleotide
ggauccagguucagacuug

SEQ ID NO: 1579305 - RNA, 19 nt, Artificial Sequence
  Description of Artificial Sequence: Synthetic oligonucleotide
ccacuccgagaucugggcc

SEQ ID NO: 1579306 - RNA, 19 nt, Artificial Sequence
  Description of Artificial Sequence: Synthetic oligonucleotide
agggagagagagagagaga

SEQ ID NO: 1579307 - RNA, 19 nt, Artificial Sequence
  Description of Artificial Sequence: Synthetic oligonucleotide
ggccguguagauggugcgg

SEQ ID NO: 1579308 - RNA, 19 nt, Artificial Sequence
  Description of Artificial Sequence: Synthetic oligonucleotide
gggguucuuaagggcaagc

SEQ ID NO: 1579309 - RNA, 19 nt, Artificial Sequence
  Description of Artificial Sequence: Synthetic oligonucleotide
gggccucucgguaggaaug

SEQ ID NO: 1579310 - RNA, 19 nt, Artificial Sequence
  Description of Artificial Sequence: Synthetic oligonucleotide
gggccguuccacccggggc

SEQ ID NO: 1579311 - RNA, 19 nt, Artificial Sequence
  Description of Artificial Sequence: Synthetic oligonucleotide
cugcguacugagggcguac

SEQ ID NO: 1579312 - RNA, 19 nt, Artificial Sequence
  Description of Artificial Sequence: Synthetic oligonucleotide
caccacggcuggguacugg

SEQ ID NO: 1579313 - RNA, 19 nt, Artificial Sequence
  Description of Artificial Sequence: Synthetic oligonucleotide
gaagaaugacuggccgccu

SEQ ID NO: 1579314 - RNA, 19 nt, Artificial Sequence
  Description of Artificial Sequence: Synthetic oligonucleotide
caggucagauguccggucu

SEQ ID NO: 1579315 - RNA, 19 nt, Artificial Sequence
  Description of Artificial Sequence: Synthetic oligonucleotide
gacugcccuccaaacaggu

SEQ ID NO: 1579316 - RNA, 19 nt, Artificial Sequence
  Description of Artificial Sequence: Synthetic oligonucleotide
gguucugggcgggucagga

SEQ ID NO: 1579317 - RNA, 19 nt, Artificial Sequence
  Description of Artificial Sequence: Synthetic oligonucleotide
guucuuccgcguugauaaa

SEQ ID NO: 1579318 - RNA, 19 nt, Artificial Sequence
  Description of Artificial Sequence: Synthetic oligonucleotide
ggucaggaaguagguacuc

SEQ ID NO: 1579319 - RNA, 19 nt, Artificial Sequence
  Description of Artificial Sequence: Synthetic oligonucleotide
ggagagagagagagagaga

SEQ ID NO: 1579320 - RNA, 19 nt, Artificial Sequence
  Description of Artificial Sequence: Synthetic oligonucleotide
cgucugccggcucagugcc

SEQ ID NO: 1579321 - RNA, 19 nt, Artificial Sequence
  Description of Artificial Sequence: Synthetic oligonucleotide
gaaugacuggccgccuagu

SEQ ID NO: 1579322 - RNA, 19 nt, Artificial Sequence
  Description of Artificial Sequence: Synthetic oligonucleotide
ggaggaacuuccacuccga

SEQ ID NO: 1579323 - RNA, 19 nt, Artificial Sequence
  Description of Artificial Sequence: Synthetic oligonucleotide
acuggccgccuaguuucug

SEQ ID NO: 1579324 - RNA, 19 nt, Artificial Sequence
  Description of Artificial Sequence: Synthetic oligonucleotide
ggagaucuuuccaaagaau

SEQ ID NO: 1579325 - RNA, 19 nt, Artificial Sequence
  Description of Artificial Sequence: Synthetic oligonucleotide
gugaaaucuggagcuguau

SEQ ID NO: 1579326 - RNA, 19 nt, Artificial Sequence
  Description of Artificial Sequence: Synthetic oligonucleotide
gccguguagauggugcgga

SEQ ID NO: 1579327 - RNA, 19 nt, Artificial Sequence
  Description of Artificial Sequence: Synthetic oligonucleotide
auguccggucugucaugau

SEQ ID NO: 1579328 - RNA, 19 nt, Artificial Sequence
  Description of Artificial Sequence: Synthetic oligonucleotide
aggugcgccaaggccgcca

SEQ ID NO: 1579329 - RNA, 19 nt, Artificial Sequence
  Description of Artificial Sequence: Synthetic oligonucleotide
guucguuaugcagggccgu

SEQ ID NO: 1579330 - RNA, 19 nt, Artificial Sequence
  Description of Artificial Sequence: Synthetic oligonucleotide
cguacuuccugaugaaacu

SEQ ID NO: 1579331 - RNA, 19 nt, Artificial Sequence
  Description of Artificial Sequence: Synthetic oligonucleotide
uguuggccucccguuccuu

SEQ ID NO: 1579332 - RNA, 19 nt, Artificial Sequence
  Description of Artificial Sequence: Synthetic oligonucleotide
gggcguacaucuucucgua

SEQ ID NO: 1579333 - RNA, 19 nt, Artificial Sequence
  Description of Artificial Sequence: Synthetic oligonucleotide
ccucgucuaaccuuuggau

SEQ ID NO: 1579334 - RNA, 19 nt, Artificial Sequence
  Description of Artificial Sequence: Synthetic oligonucleotide
ccgagaucugggccugcgc

SEQ ID NO: 1579335 - RNA, 19 nt, Artificial Sequence
  Description of Artificial Sequence: Synthetic oligonucleotide
uggaguccuuccggcugaa

SEQ ID NO: 1579336 - RNA, 19 nt, Artificial Sequence
  Description of Artificial Sequence: Synthetic oligonucleotide
ccgagccuggacaaagaaa

SEQ ID NO: 1579337 - RNA, 19 nt, Artificial Sequence
  Description of Artificial Sequence: Synthetic oligonucleotide
ggcuaaaggauaggauggu

SEQ ID NO: 1579338 - RNA, 19 nt, Artificial Sequence
  Description of Artificial Sequence: Synthetic oligonucleotide
cuccaaacagguguuucuu

SEQ ID NO: 1579339 - RNA, 19 nt, Artificial Sequence
  Description of Artificial Sequence: Synthetic oligonucleotide
cuuccgcguugauaaacuu

SEQ ID NO: 1579340 - RNA, 19 nt, Artificial Sequence
  Description of Artificial Sequence: Synthetic oligonucleotide
acaccacggcuggguacug

SEQ ID NO: 1579341 - RNA, 19 nt, Artificial Sequence
  Description of Artificial Sequence: Synthetic oligonucleotide
ccucagacaagcuccucgu

SEQ ID NO: 1579342 - RNA, 19 nt, Artificial Sequence
  Description of Artificial Sequence: Synthetic oligonucleotide
cgauggugaagugggguuc

SEQ ID NO: 1579343 - RNA, 19 nt, Artificial Sequence
  Description of Artificial Sequence: Synthetic oligonucleotide
ggguucugggcgggucagg

SEQ ID NO: 1579344 - RNA, 19 nt, Artificial Sequence
  Description of Artificial Sequence: Synthetic oligonucleotide
ccgcguugauaaacuucug

SEQ ID NO: 1579345 - RNA, 19 nt, Artificial Sequence
  Description of Artificial Sequence: Synthetic oligonucleotide
uggugcggauggaguccuu

SEQ ID NO: 1579346 - RNA, 19 nt, Artificial Sequence
  Description of Artificial Sequence: Synthetic oligonucleotide
aggggccucucgguaggaa

SEQ ID NO: 1579347 - RNA, 19 nt, Artificial Sequence
  Description of Artificial Sequence: Synthetic oligonucleotide
ggucagauguccggucugu

SEQ ID NO: 1579348 - RNA, 19 nt, Artificial Sequence
  Description of Artificial Sequence: Synthetic oligonucleotide
cagcaucguacuuccugau

SEQ ID NO: 1579349 - RNA, 19 nt, Artificial Sequence
  Description of Artificial Sequence: Synthetic oligonucleotide
ccggucugucaugaucaug

SEQ ID NO: 1579350 - RNA, 19 nt, Artificial Sequence
  Description of Artificial Sequence: Synthetic oligonucleotide
aggggccguuccacccggg

SEQ ID NO: 1579351 - RNA, 19 nt, Artificial Sequence
  Description of Artificial Sequence: Synthetic oligonucleotide
ccuuaggggccucucggua

SEQ ID NO: 1579352 - RNA, 19 nt, Artificial Sequence
  Description of Artificial Sequence: Synthetic oligonucleotide
ggggccucucgguaggaau

SEQ ID NO: 1579353 - RNA, 19 nt, Artificial Sequence
  Description of Artificial Sequence: Synthetic oligonucleotide
cucuggacuuugucaucau

SEQ ID NO: 1579354 - RNA, 19 nt, Artificial Sequence
  Description of Artificial Sequence: Synthetic oligonucleotide
ccagcaccgccuguuccac

SEQ ID NO: 1579355 - RNA, 19 nt, Artificial Sequence
  Description of Artificial Sequence: Synthetic oligonucleotide
ccacggcuggguacugguc

SEQ ID NO: 1579356 - RNA, 19 nt, Artificial Sequence
  Description of Artificial Sequence: Synthetic oligonucleotide
gccucucgguaggaaugug

SEQ ID NO: 1579357 - RNA, 19 nt, Artificial Sequence
  Description of Artificial Sequence: Synthetic oligonucleotide
ggaaacccucagacaagcu

SEQ ID NO: 1579358 - RNA, 19 nt, Artificial Sequence
  Description of Artificial Sequence: Synthetic oligonucleotide
gacuggccgccuaguuucu

SEQ ID NO: 1579359 - RNA, 19 nt, Artificial Sequence
  Description of Artificial Sequence: Synthetic oligonucleotide
gcuccucgucuaaccuuug

SEQ ID NO: 1579360 - RNA, 19 nt, Artificial Sequence
  Description of Artificial Sequence: Synthetic oligonucleotide
gccguuccacccggggcgc

SEQ ID NO: 1579361 - RNA, 19 nt, Artificial Sequence
  Description of Artificial Sequence: Synthetic oligonucleotide
ggccucucgguaggaaugu

SEQ ID NO: 1579362 - RNA, 19 nt, Artificial Sequence
  Description of Artificial Sequence: Synthetic oligonucleotide
ccaaacuguucaggucaga

SEQ ID NO: 1579363 - RNA, 19 nt, Artificial Sequence
  Description of Artificial Sequence: Synthetic oligonucleotide
ccuugucguaagagaagau

SEQ ID NO: 1579364 - RNA, 19 nt, Artificial Sequence
  Description of Artificial Sequence: Synthetic oligonucleotide
cugggcgggucaggaagua

SEQ ID NO: 1579365 - RNA, 19 nt, Artificial Sequence
  Description of Artificial Sequence: Synthetic oligonucleotide
ccccgcgcucuuguuggcc

SEQ ID NO: 1579366 - RNA, 19 nt, Artificial Sequence
  Description of Artificial Sequence: Synthetic oligonucleotide
gcgcucuuguuggccuccc

SEQ ID NO: 1579367 - RNA, 19 nt, Artificial Sequence
  Description of Artificial Sequence: Synthetic oligonucleotide
ccgccuaguuucugcccca

SEQ ID NO: 1579368 - RNA, 19 nt, Artificial Sequence
  Description of Artificial Sequence: Synthetic oligonucleotide
gcgccucggccugucacca

SEQ ID NO: 1579369 - RNA, 19 nt, Artificial Sequence
  Description of Artificial Sequence: Synthetic oligonucleotide
gcguacugagggcguacau

SEQ ID NO: 1579370 - RNA, 19 nt, Artificial Sequence
  Description of Artificial Sequence: Synthetic oligonucleotide
cgccuaguuucugccccag

SEQ ID NO: 1579371 - RNA, 19 nt, Artificial Sequence
  Description of Artificial Sequence: Synthetic oligonucleotide
ccauccgagccuggacaaa

SEQ ID NO: 1579372 - RNA, 19 nt, Artificial Sequence
  Description of Artificial Sequence: Synthetic oligonucleotide
ccguguagauggugcggau

SEQ ID NO: 1579373 - RNA, 19 nt, Artificial Sequence
  Description of Artificial Sequence: Synthetic oligonucleotide
ggucgucugccggcucagu

SEQ ID NO: 1579374 - RNA, 19 nt, Artificial Sequence
  Description of Artificial Sequence: Synthetic oligonucleotide
cggggcgccucggccuguc

SEQ ID NO: 1579375 - RNA, 19 nt, Artificial Sequence
  Description of Artificial Sequence: Synthetic oligonucleotide
cgcccacuuccagcuggaa

SEQ ID NO: 1579376 - RNA, 19 nt, Artificial Sequence
  Description of Artificial Sequence: Synthetic oligonucleotide
ccggggcgccucggccugu

SEQ ID NO: 1579377 - RNA, 19 nt, Artificial Sequence
  Description of Artificial Sequence: Synthetic oligonucleotide
aaauuuaacuaagagacgc

SEQ ID NO: 1579378 - RNA, 19 nt, Artificial Sequence
  Description of Artificial Sequence: Synthetic oligonucleotide
aauguagcucuucagaccg

SEQ ID NO: 1579379 - RNA, 19 nt, Artificial Sequence
  Description of Artificial Sequence: Synthetic oligonucleotide
aacuaagagacgcucauac

SEQ ID NO: 1579380 - RNA, 19 nt, Artificial Sequence
  Description of Artificial Sequence: Synthetic oligonucleotide
aaagcauaagacauggugc

SEQ ID NO: 1579381 - RNA, 19 nt, Artificial Sequence
  Description of Artificial Sequence: Synthetic oligonucleotide
aaagcgaccugucaccugc

SEQ ID NO: 1579382 - RNA, 19 nt, Artificial Sequence
  Description of Artificial Sequence: Synthetic oligonucleotide
uaucauaacacccaccagc

SEQ ID NO: 1579383 - RNA, 19 nt, Artificial Sequence
  Description of Artificial Sequence: Synthetic oligonucleotide
cauacaaccagucaaagug

SEQ ID NO: 1579384 - RNA, 19 nt, Artificial Sequence
  Description of Artificial Sequence: Synthetic oligonucleotide
gauuuuacuaguugcaacc

SEQ ID NO: 1579385 - RNA, 19 nt, Artificial Sequence
  Description of Artificial Sequence: Synthetic oligonucleotide
guuaagggcagcuucaugg

SEQ ID NO: 1579386 - RNA, 19 nt, Artificial Sequence
  Description of Artificial Sequence: Synthetic oligonucleotide
uguggaaaauaucauaaca

SEQ ID NO: 1579387 - RNA, 19 nt, Artificial Sequence
  Description of Artificial Sequence: Synthetic oligonucleotide
uguugcuaaacucugcaag

SEQ ID NO: 1579388 - RNA, 19 nt, Artificial Sequence
  Description of Artificial Sequence: Synthetic oligonucleotide
acaaguauuguuccaugcc

SEQ ID NO: 1579389 - RNA, 19 nt, Artificial Sequence
  Description of Artificial Sequence: Synthetic oligonucleotide
auugcauuggcccagguca

SEQ ID NO: 1579390 - RNA, 19 nt, Artificial Sequence
  Description of Artificial Sequence: Synthetic oligonucleotide
agaccguacauuuuggaac

SEQ ID NO: 1579391 - RNA, 19 nt, Artificial Sequence
  Description of Artificial Sequence: Synthetic oligonucleotide
gaucgauuaguguugguag

SEQ ID NO: 1579392 - RNA, 19 nt, Artificial Sequence
  Description of Artificial Sequence: Synthetic oligonucleotide
uacauaacagggaagcggc

SEQ ID NO: 1579393 - RNA, 19 nt, Artificial Sequence
  Description of Artificial Sequence: Synthetic oligonucleotide
ucuguuauugcaucguuca

SEQ ID NO: 1579394 - RNA, 19 nt, Artificial Sequence
  Description of Artificial Sequence: Synthetic oligonucleotide
ugagcaccaauaauguccg

SEQ ID NO: 1579395 - RNA, 19 nt, Artificial Sequence
  Description of Artificial Sequence: Synthetic oligonucleotide
ugauacucaauguagcucu

SEQ ID NO: 1579396 - RNA, 19 nt, Artificial Sequence
  Description of Artificial Sequence: Synthetic oligonucleotide
uguuagcugauacucaaug

SEQ ID NO: 1579397 - RNA, 19 nt, Artificial Sequence
  Description of Artificial Sequence: Synthetic oligonucleotide
cauuuuggaaccuuuccgg

SEQ ID NO: 1579398 - RNA, 19 nt, Artificial Sequence
  Description of Artificial Sequence: Synthetic oligonucleotide
aauugcauuggcccagguc

SEQ ID NO: 1579399 - RNA, 19 nt, Artificial Sequence
  Description of Artificial Sequence: Synthetic oligonucleotide
aauaauguccgggaagcag

SEQ ID NO: 1579400 - RNA, 19 nt, Artificial Sequence
  Description of Artificial Sequence: Synthetic oligonucleotide
uuugcuagcugcuuggcca

SEQ ID NO: 1579401 - RNA, 19 nt, Artificial Sequence
  Description of Artificial Sequence: Synthetic oligonucleotide
guugcuaaacucugcaagg

SEQ ID NO: 1579402 - RNA, 19 nt, Artificial Sequence
  Description of Artificial Sequence: Synthetic oligonucleotide
uuuggguuuugcuagcugc

SEQ ID NO: 1579403 - RNA, 19 nt, Artificial Sequence
  Description of Artificial Sequence: Synthetic oligonucleotide
uuuaacuaagagacgcuca

SEQ ID NO: 1579404 - RNA, 19 nt, Artificial Sequence
  Description of Artificial Sequence: Synthetic oligonucleotide
uaaucauagauccgguuac

SEQ ID NO: 1579405 - RNA, 19 nt, Artificial Sequence
  Description of Artificial Sequence: Synthetic oligonucleotide
acuguuguaaucauagauc

SEQ ID NO: 1579406 - RNA, 19 nt, Artificial Sequence
  Description of Artificial Sequence: Synthetic oligonucleotide
uagcugauacucaauguag

SEQ ID NO: 1579407 - RNA, 19 nt, Artificial Sequence
  Description of Artificial Sequence: Synthetic oligonucleotide
gaucguuucauagaacugc

SEQ ID NO: 1579408 - RNA, 19 nt, Artificial Sequence
  Description of Artificial Sequence: Synthetic oligonucleotide
uuagcugauacucaaugua

SEQ ID NO: 1579409 - RNA, 19 nt, Artificial Sequence
  Description of Artificial Sequence: Synthetic oligonucleotide
auaaucuccaacaaugaug

SEQ ID NO: 1579410 - RNA, 19 nt, Artificial Sequence
  Description of Artificial Sequence: Synthetic oligonucleotide
auuuuggaaccuuuccggg

SEQ ID NO: 1579411 - RNA, 19 nt, Artificial Sequence
  Description of Artificial Sequence: Synthetic oligonucleotide
auaauguccgggaagcagc

SEQ ID NO: 1579412 - RNA, 19 nt, Artificial Sequence
  Description of Artificial Sequence: Synthetic oligonucleotide
guaagcagcuccuucaccc

SEQ ID NO: 1579413 - RNA, 19 nt, Artificial Sequence
  Description of Artificial Sequence: Synthetic oligonucleotide
uacagaucgauuaguguug

SEQ ID NO: 1579414 - RNA, 19 nt, Artificial Sequence
  Description of Artificial Sequence: Synthetic oligonucleotide
aacacuguugcuaaacucu

SEQ ID NO: 1579415 - RNA, 19 nt, Artificial Sequence
  Description of Artificial Sequence: Synthetic oligonucleotide
cauagauccgguuacugug

SEQ ID NO: 1579416 - RNA, 19 nt, Artificial Sequence
  Description of Artificial Sequence: Synthetic oligonucleotide
guugcaaccagcuuaucac

SEQ ID NO: 1579417 - RNA, 19 nt, Artificial Sequence
  Description of Artificial Sequence: Synthetic oligonucleotide
uucuaucaaguccaaguca

SEQ ID NO: 1579418 - RNA, 19 nt, Artificial Sequence
  Description of Artificial Sequence: Synthetic oligonucleotide
gaagggaucggaauggcag

SEQ ID NO: 1579419 - RNA, 19 nt, Artificial Sequence
  Description of Artificial Sequence: Synthetic oligonucleotide
auuuaacuaagagacgcuc

SEQ ID NO: 1579420 - RNA, 19 nt, Artificial Sequence
  Description of Artificial Sequence: Synthetic oligonucleotide
acccaaauuuaacuaagag

SEQ ID NO: 1579421 - RNA, 19 nt, Artificial Sequence
  Description of Artificial Sequence: Synthetic oligonucleotide
uuuggaaccuuuccgggga

SEQ ID NO: 1579422 - RNA, 19 nt, Artificial Sequence
  Description of Artificial Sequence: Synthetic oligonucleotide
ugauuuuacuaguugcaac

SEQ ID NO: 1579423 - RNA, 19 nt, Artificial Sequence
  Description of Artificial Sequence: Synthetic oligonucleotide
cuacauaacagggaagcgg

SEQ ID NO: 1579424 - RNA, 19 nt, Artificial Sequence
  Description of Artificial Sequence: Synthetic oligonucleotide
aucguucagaucuguuucc

SEQ ID NO: 1579425 - RNA, 19 nt, Artificial Sequence
  Description of Artificial Sequence: Synthetic oligonucleotide
gguaaacccacauugggcc

SEQ ID NO: 1579426 - RNA, 19 nt, Artificial Sequence
  Description of Artificial Sequence: Synthetic oligonucleotide
ugguuuacagaucgauuag

SEQ ID NO: 1579427 - RNA, 19 nt, Artificial Sequence
  Description of Artificial Sequence: Synthetic oligonucleotide
uuguaaagcauaagacaug

SEQ ID NO: 1579428 - RNA, 19 nt, Artificial Sequence
  Description of Artificial Sequence: Synthetic oligonucleotide
uuacuaguugcaaccagcu

SEQ ID NO: 1579429 - RNA, 19 nt, Artificial Sequence
  Description of Artificial Sequence: Synthetic oligonucleotide
ucgucuguuugucuugggg

SEQ ID NO: 1579430 - RNA, 19 nt, Artificial Sequence
  Description of Artificial Sequence: Synthetic oligonucleotide
aguauuguuccaugccagg

SEQ ID NO: 1579431 - RNA, 19 nt, Artificial Sequence
  Description of Artificial Sequence: Synthetic oligonucleotide
gaccguacauuuuggaacc

SEQ ID NO: 1579432 - RNA, 19 nt, Artificial Sequence
  Description of Artificial Sequence: Synthetic oligonucleotide
guggaaaauaucauaacac

SEQ ID NO: 1579433 - RNA, 19 nt, Artificial Sequence
  Description of Artificial Sequence: Synthetic oligonucleotide
gaugacacuguuguaauca

SEQ ID NO: 1579434 - RNA, 19 nt, Artificial Sequence
  Description of Artificial Sequence: Synthetic oligonucleotide
cuugucuggaagagaaggg

SEQ ID NO: 1579435 - RNA, 19 nt, Artificial Sequence
  Description of Artificial Sequence: Synthetic oligonucleotide
aucgauuaguguugguagg

SEQ ID NO: 1579436 - RNA, 19 nt, Artificial Sequence
  Description of Artificial Sequence: Synthetic oligonucleotide
aaccuuuccggggaucugc

SEQ ID NO: 1579437 - RNA, 19 nt, Artificial Sequence
  Description of Artificial Sequence: Synthetic oligonucleotide
uucagaccguacauuuugg

SEQ ID NO: 1579438 - RNA, 19 nt, Artificial Sequence
  Description of Artificial Sequence: Synthetic oligonucleotide
ucugauacuccuuggguaa

SEQ ID NO: 1579439 - RNA, 19 nt, Artificial Sequence
  Description of Artificial Sequence: Synthetic oligonucleotide
gucuacauaacagggaagc

SEQ ID NO: 1579440 - RNA, 19 nt, Artificial Sequence
  Description of Artificial Sequence: Synthetic oligonucleotide
aucuguuuccccuugguaa

SEQ ID NO: 1579441 - RNA, 19 nt, Artificial Sequence
  Description of Artificial Sequence: Synthetic oligonucleotide
uccaugcgcaucuugauaa

SEQ ID NO: 1579442 - RNA, 19 nt, Artificial Sequence
  Description of Artificial Sequence: Synthetic oligonucleotide
gauccgguuacuguggaag

SEQ ID NO: 1579443 - RNA, 19 nt, Artificial Sequence
  Description of Artificial Sequence: Synthetic oligonucleotide
ugcuaaacucugcaaggcc

SEQ ID NO: 1579444 - RNA, 19 nt, Artificial Sequence
  Description of Artificial Sequence: Synthetic oligonucleotide
aguugcaaccagcuuauca

SEQ ID NO: 1579445 - RNA, 19 nt, Artificial Sequence
  Description of Artificial Sequence: Synthetic oligonucleotide
uucugcgaucguuucauag

SEQ ID NO: 1579446 - RNA, 19 nt, Artificial Sequence
  Description of Artificial Sequence: Synthetic oligonucleotide
ucuacauaacagggaagcg

SEQ ID NO: 1579447 - RNA, 19 nt, Artificial Sequence
  Description of Artificial Sequence: Synthetic oligonucleotide
guugguagguguuagcuga

SEQ ID NO: 1579448 - RNA, 19 nt, Artificial Sequence
  Description of Artificial Sequence: Synthetic oligonucleotide
acuguaagcagcuccuuca

SEQ ID NO: 1579449 - RNA, 19 nt, Artificial Sequence
  Description of Artificial Sequence: Synthetic oligonucleotide
ucugcgaucguuucauaga

SEQ ID NO: 1579450 - RNA, 19 nt, Artificial Sequence
  Description of Artificial Sequence: Synthetic oligonucleotide
aagacauggugccgacucg

SEQ ID NO: 1579451 - RNA, 19 nt, Artificial Sequence
  Description of Artificial Sequence: Synthetic oligonucleotide
uauugcucccuugugagca

SEQ ID NO: 1579452 - RNA, 19 nt, Artificial Sequence
  Description of Artificial Sequence: Synthetic oligonucleotide
caauguagcucuucagacc

SEQ ID NO: 1579453 - RNA, 19 nt, Artificial Sequence
  Description of Artificial Sequence: Synthetic oligonucleotide
uagagguaggguaaaccca

SEQ ID NO: 1579454 - RNA, 19 nt, Artificial Sequence
  Description of Artificial Sequence: Synthetic oligonucleotide
gagacgcucauacaaccag

SEQ ID NO: 1579455 - RNA, 19 nt, Artificial Sequence
  Description of Artificial Sequence: Synthetic oligonucleotide
aagccuuuguauucguggu

SEQ ID NO: 1579456 - RNA, 19 nt, Artificial Sequence
  Description of Artificial Sequence: Synthetic oligonucleotide
uugcacuccaucaggaagu

SEQ ID NO: 1579457 - RNA, 19 nt, Artificial Sequence
  Description of Artificial Sequence: Synthetic oligonucleotide
cauaacacccaccagcuca

SEQ ID NO: 1579458 - RNA, 19 nt, Artificial Sequence
  Description of Artificial Sequence: Synthetic oligonucleotide
auacuccuuggguaagggc

SEQ ID NO: 1579459 - RNA, 19 nt, Artificial Sequence
  Description of Artificial Sequence: Synthetic oligonucleotide
ucauagauccgguuacugu

SEQ ID NO: 1579460 - RNA, 19 nt, Artificial Sequence
  Description of Artificial Sequence: Synthetic oligonucleotide
gucaaaaguagagguaggg

SEQ ID NO: 1579461 - RNA, 19 nt, Artificial Sequence
  Description of Artificial Sequence: Synthetic oligonucleotide
agagguaggguaaacccac

SEQ ID NO: 1579462 - RNA, 19 nt, Artificial Sequence
  Description of Artificial Sequence: Synthetic oligonucleotide
guuacuguggaagugguuc

SEQ ID NO: 1579463 - RNA, 19 nt, Artificial Sequence
  Description of Artificial Sequence: Synthetic oligonucleotide
agcgcuguuuucucugagc

SEQ ID NO: 1579464 - RNA, 19 nt, Artificial Sequence
  Description of Artificial Sequence: Synthetic oligonucleotide
agcaccaauaauguccggg

SEQ ID NO: 1579465 - RNA, 19 nt, Artificial Sequence
  Description of Artificial Sequence: Synthetic oligonucleotide
cuucauacgucuucccagc

SEQ ID NO: 1579466 - RNA, 19 nt, Artificial Sequence
  Description of Artificial Sequence: Synthetic oligonucleotide
ucauacaaccagucaaagu

SEQ ID NO: 1579467 - RNA, 19 nt, Artificial Sequence
  Description of Artificial Sequence: Synthetic oligonucleotide
ugcgcaucuugauaaauuc

SEQ ID NO: 1579468 - RNA, 19 nt, Artificial Sequence
  Description of Artificial Sequence: Synthetic oligonucleotide
acgacuguuuccguguccc

SEQ ID NO: 1579469 - RNA, 19 nt, Artificial Sequence
  Description of Artificial Sequence: Synthetic oligonucleotide
aauuuaacuaagagacgcu

SEQ ID NO: 1579470 - RNA, 19 nt, Artificial Sequence
  Description of Artificial Sequence: Synthetic oligonucleotide
uguugguagguguuagcug

SEQ ID NO: 1579471 - RNA, 19 nt, Artificial Sequence
  Description of Artificial Sequence: Synthetic oligonucleotide
uagguguuagcugauacuc

SEQ ID NO: 1579472 - RNA, 19 nt, Artificial Sequence
  Description of Artificial Sequence: Synthetic oligonucleotide
acacagucaaaaguagagg

SEQ ID NO: 1579473 - RNA, 19 nt, Artificial Sequence
  Description of Artificial Sequence: Synthetic oligonucleotide
guaaucauagauccgguua

SEQ ID NO: 1579474 - RNA, 19 nt, Artificial Sequence
  Description of Artificial Sequence: Synthetic oligonucleotide
aguuguuagcgcuguuuuc

SEQ ID NO: 1579475 - RNA, 19 nt, Artificial Sequence
  Description of Artificial Sequence: Synthetic oligonucleotide
ucuguuuccccuugguaac

SEQ ID NO: 1579476 - RNA, 19 nt, Artificial Sequence
  Description of Artificial Sequence: Synthetic oligonucleotide
cauaacagggaagcggccg

SEQ ID NO: 1579477 - RNA, 19 nt, Artificial Sequence
  Description of Artificial Sequence: Synthetic oligonucleotide
caucguucagaucuguuuc

SEQ ID NO: 1579478 - RNA, 19 nt, Artificial Sequence
  Description of Artificial Sequence: Synthetic oligonucleotide
gaacacuguugcuaaacuc

SEQ ID NO: 1579479 - RNA, 19 nt, Artificial Sequence
  Description of Artificial Sequence: Synthetic oligonucleotide
cauacgucuucccagcuuc

SEQ ID NO: 1579480 - RNA, 19 nt, Artificial Sequence
  Description of Artificial Sequence: Synthetic oligonucleotide
ucauagaacugcacuugcu

SEQ ID NO: 1579481 - RNA, 19 nt, Artificial Sequence
  Description of Artificial Sequence: Synthetic oligonucleotide
cuucccgaucuucugauac

SEQ ID NO: 1579482 - RNA, 19 nt, Artificial Sequence
  Description of Artificial Sequence: Synthetic oligonucleotide
aagggaucggaauggcaga

SEQ ID NO: 1579483 - RNA, 19 nt, Artificial Sequence
  Description of Artificial Sequence: Synthetic oligonucleotide
accgggugccggcacaucc

SEQ ID NO: 1579484 - RNA, 19 nt, Artificial Sequence
  Description of Artificial Sequence: Synthetic oligonucleotide
uuuucugcgaucguuucau

SEQ ID NO: 1579485 - RNA, 19 nt, Artificial Sequence
  Description of Artificial Sequence: Synthetic oligonucleotide
caaguauuguuccaugcca

SEQ ID NO: 1579486 - RNA, 19 nt, Artificial Sequence
  Description of Artificial Sequence: Synthetic oligonucleotide
uuacuguggaagugguuca

SEQ ID NO: 1579487 - RNA, 19 nt, Artificial Sequence
  Description of Artificial Sequence: Synthetic oligonucleotide
cagaggaagcacuucggag

SEQ ID NO: 1579488 - RNA, 19 nt, Artificial Sequence
  Description of Artificial Sequence: Synthetic oligonucleotide
uuucucugagcaccagccc

SEQ ID NO: 1579489 - RNA, 19 nt, Artificial Sequence
  Description of Artificial Sequence: Synthetic oligonucleotide
gugguugcacuccaucagg

SEQ ID NO: 1579490 - RNA, 19 nt, Artificial Sequence
  Description of Artificial Sequence: Synthetic oligonucleotide
uccgugucccaguuguuag

SEQ ID NO: 1579491 - RNA, 19 nt, Artificial Sequence
  Description of Artificial Sequence: Synthetic oligonucleotide
aaguagagguaggguaaac

SEQ ID NO: 1579492 - RNA, 19 nt, Artificial Sequence
  Description of Artificial Sequence: Synthetic oligonucleotide
uauucgugguugcacucca

SEQ ID NO: 1579493 - RNA, 19 nt, Artificial Sequence
  Description of Artificial Sequence: Synthetic oligonucleotide
ugugguuuacagaucgauu

SEQ ID NO: 1579494 - RNA, 19 nt, Artificial Sequence
  Description of Artificial Sequence: Synthetic oligonucleotide
cuuuccggggaucugcuac

SEQ ID NO: 1579495 - RNA, 19 nt, Artificial Sequence
  Description of Artificial Sequence: Synthetic oligonucleotide
cacacuucuguucuauuuc

SEQ ID NO: 1579496 - RNA, 19 nt, Artificial Sequence
  Description of Artificial Sequence: Synthetic oligonucleotide
uugcuaaacucugcaaggc

SEQ ID NO: 1579497 - RNA, 19 nt, Artificial Sequence
  Description of Artificial Sequence: Synthetic oligonucleotide
aaccagucaaagugcuugu

SEQ ID NO: 1579498 - RNA, 19 nt, Artificial Sequence
  Description of Artificial Sequence: Synthetic oligonucleotide
auggaauugcauuggccca

SEQ ID NO: 1579499 - RNA, 19 nt, Artificial Sequence
  Description of Artificial Sequence: Synthetic oligonucleotide
ucgugguugcacuccauca

SEQ ID NO: 1579500 - RNA, 19 nt, Artificial Sequence
  Description of Artificial Sequence: Synthetic oligonucleotide
uugcaaauccaggaacuug

SEQ ID NO: 1579501 - RNA, 19 nt, Artificial Sequence
  Description of Artificial Sequence: Synthetic oligonucleotide
cuuguuaagggcagcuuca

SEQ ID NO: 1579502 - RNA, 19 nt, Artificial Sequence
  Description of Artificial Sequence: Synthetic oligonucleotide
ucacacuucuguucuauuu

SEQ ID NO: 1579503 - RNA, 19 nt, Artificial Sequence
  Description of Artificial Sequence: Synthetic oligonucleotide
acuaagagacgcucauaca

SEQ ID NO: 1579504 - RNA, 19 nt, Artificial Sequence
  Description of Artificial Sequence: Synthetic oligonucleotide
aucauaacacccaccagcu

SEQ ID NO: 1579505 - RNA, 19 nt, Artificial Sequence
  Description of Artificial Sequence: Synthetic oligonucleotide
uguaaucauagauccgguu

SEQ ID NO: 1579506 - RNA, 19 nt, Artificial Sequence
  Description of Artificial Sequence: Synthetic oligonucleotide
agacccaaauuuaacuaag

SEQ ID NO: 1579507 - RNA, 19 nt, Artificial Sequence
  Description of Artificial Sequence: Synthetic oligonucleotide
uggagguccuucuuuggcu

SEQ ID NO: 1579508 - RNA, 19 nt, Artificial Sequence
  Description of Artificial Sequence: Synthetic oligonucleotide
auaacagggaagcggccga

SEQ ID NO: 1579509 - RNA, 19 nt, Artificial Sequence
  Description of Artificial Sequence: Synthetic oligonucleotide
acagaucgauuaguguugg

SEQ ID NO: 1579510 - RNA, 19 nt, Artificial Sequence
  Description of Artificial Sequence: Synthetic oligonucleotide
acucgcuucaccaucgucu

SEQ ID NO: 1579511 - RNA, 19 nt, Artificial Sequence
  Description of Artificial Sequence: Synthetic oligonucleotide
guauuguuccaugccaggc

SEQ ID NO: 1579512 - RNA, 19 nt, Artificial Sequence
  Description of Artificial Sequence: Synthetic oligonucleotide
cauggugccgacucgcuuc

SEQ ID NO: 1579513 - RNA, 19 nt, Artificial Sequence
  Description of Artificial Sequence: Synthetic oligonucleotide
ugguugcacuccaucagga

SEQ ID NO: 1579514 - RNA, 19 nt, Artificial Sequence
  Description of Artificial Sequence: Synthetic oligonucleotide
ucgauuaguguugguaggu

SEQ ID NO: 1579515 - RNA, 19 nt, Artificial Sequence
  Description of Artificial Sequence: Synthetic oligonucleotide
ugugcugucccaguuccca

SEQ ID NO: 1579516 - RNA, 19 nt, Artificial Sequence
  Description of Artificial Sequence: Synthetic oligonucleotide
uguauucgugguugcacuc

SEQ ID NO: 1579517 - RNA, 19 nt, Artificial Sequence
  Description of Artificial Sequence: Synthetic oligonucleotide
uuuccggggaucugcuacc

SEQ ID NO: 1579518 - RNA, 19 nt, Artificial Sequence
  Description of Artificial Sequence: Synthetic oligonucleotide
cacauugggccauaaucuc

SEQ ID NO: 1579519 - RNA, 19 nt, Artificial Sequence
  Description of Artificial Sequence: Synthetic oligonucleotide
uucccagcuucuguuauug

SEQ ID NO: 1579520 - RNA, 19 nt, Artificial Sequence
  Description of Artificial Sequence: Synthetic oligonucleotide
gauuaguguugguaggugu

SEQ ID NO: 1579521 - RNA, 19 nt, Artificial Sequence
  Description of Artificial Sequence: Synthetic oligonucleotide
ucucagcuuguaaagcaua

SEQ ID NO: 1579522 - RNA, 19 nt, Artificial Sequence
  Description of Artificial Sequence: Synthetic oligonucleotide
cacagucaaaaguagaggu

SEQ ID NO: 1579523 - RNA, 19 nt, Artificial Sequence
  Description of Artificial Sequence: Synthetic oligonucleotide
gggaucugcuaccacacag

SEQ ID NO: 1579524 - RNA, 19 nt, Artificial Sequence
  Description of Artificial Sequence: Synthetic oligonucleotide
uaguguugguagguguuag

SEQ ID NO: 1579525 - RNA, 19 nt, Artificial Sequence
  Description of Artificial Sequence: Synthetic oligonucleotide
agaucgauuaguguuggua

SEQ ID NO: 1579526 - RNA, 19 nt, Artificial Sequence
  Description of Artificial Sequence: Synthetic oligonucleotide
cuugguaaccacuggagcu

SEQ ID NO: 1579527 - RNA, 19 nt, Artificial Sequence
  Description of Artificial Sequence: Synthetic oligonucleotide
ucggaguccauguuguguu

SEQ ID NO: 1579528 - RNA, 19 nt, Artificial Sequence
  Description of Artificial Sequence: Synthetic oligonucleotide
ugccggcacauccugguca

SEQ ID NO: 1579529 - RNA, 19 nt, Artificial Sequence
  Description of Artificial Sequence: Synthetic oligonucleotide
uguuagcgcuguuuucucu

SEQ ID NO: 1579530 - RNA, 19 nt, Artificial Sequence
  Description of Artificial Sequence: Synthetic oligonucleotide
uggcagacccaaauuuaac

SEQ ID NO: 1579531 - RNA, 19 nt, Artificial Sequence
  Description of Artificial Sequence: Synthetic oligonucleotide
cugauacucaauguagcuc

SEQ ID NO: 1579532 - RNA, 19 nt, Artificial Sequence
  Description of Artificial Sequence: Synthetic oligonucleotide
cauaagacauggugccgac

SEQ ID NO: 1579533 - RNA, 19 nt, Artificial Sequence
  Description of Artificial Sequence: Synthetic oligonucleotide
uucggaguccauguugugu

SEQ ID NO: 1579534 - RNA, 19 nt, Artificial Sequence
  Description of Artificial Sequence: Synthetic oligonucleotide
cacuucggaguccauguug

SEQ ID NO: 1579535 - RNA, 19 nt, Artificial Sequence
  Description of Artificial Sequence: Synthetic oligonucleotide
uuagcgcuguuuucucuga

SEQ ID NO: 1579536 - RNA, 19 nt, Artificial Sequence
  Description of Artificial Sequence: Synthetic oligonucleotide
ucugugguuuacagaucga

SEQ ID NO: 1579537 - RNA, 19 nt, Artificial Sequence
  Description of Artificial Sequence: Synthetic oligonucleotide
cuauugcucccuugugagc

SEQ ID NO: 1579538 - RNA, 19 nt, Artificial Sequence
  Description of Artificial Sequence: Synthetic oligonucleotide
gguagguguuagcugauac

SEQ ID NO: 1579539 - RNA, 19 nt, Artificial Sequence
  Description of Artificial Sequence: Synthetic oligonucleotide
uucauacgucuucccagcu

SEQ ID NO: 1579540 - RNA, 19 nt, Artificial Sequence
  Description of Artificial Sequence: Synthetic oligonucleotide
cugucccacuguaagcagc

SEQ ID NO: 1579541 - RNA, 19 nt, Artificial Sequence
  Description of Artificial Sequence: Synthetic oligonucleotide
gaauggcagacccaaauuu

SEQ ID NO: 1579542 - RNA, 19 nt, Artificial Sequence
  Description of Artificial Sequence: Synthetic oligonucleotide
auacucaauguagcucuuc

SEQ ID NO: 1579543 - RNA, 19 nt, Artificial Sequence
  Description of Artificial Sequence: Synthetic oligonucleotide
acauaacagggaagcggcc

SEQ ID NO: 1579544 - RNA, 19 nt, Artificial Sequence
  Description of Artificial Sequence: Synthetic oligonucleotide
cacuguugcuaaacucugc

SEQ ID NO: 1579545 - RNA, 19 nt, Artificial Sequence
  Description of Artificial Sequence: Synthetic oligonucleotide
cuguuauugcaucguucag

SEQ ID NO: 1579546 - RNA, 19 nt, Artificial Sequence
  Description of Artificial Sequence: Synthetic oligonucleotide
ucaaagcgaccugucaccu

SEQ ID NO: 1579547 - RNA, 19 nt, Artificial Sequence
  Description of Artificial Sequence: Synthetic oligonucleotide
ucguucagaucuguuuccc

SEQ ID NO: 1579548 - RNA, 19 nt, Artificial Sequence
  Description of Artificial Sequence: Synthetic oligonucleotide
uagauccgguuacugugga

SEQ ID NO: 1579549 - RNA, 19 nt, Artificial Sequence
  Description of Artificial Sequence: Synthetic oligonucleotide
cugcuugucuggaagagaa

SEQ ID NO: 1579550 - RNA, 19 nt, Artificial Sequence
  Description of Artificial Sequence: Synthetic oligonucleotide
uaucugugguuuacagauc

SEQ ID NO: 1579551 - RNA, 19 nt, Artificial Sequence
  Description of Artificial Sequence: Synthetic oligonucleotide
ucuucagaccguacauuuu

SEQ ID NO: 1579552 - RNA, 19 nt, Artificial Sequence
  Description of Artificial Sequence: Synthetic oligonucleotide
uguuguguucuguccuggu

SEQ ID NO: 1579553 - RNA, 19 nt, Artificial Sequence
  Description of Artificial Sequence: Synthetic oligonucleotide
ugcgaucguuucauagaac

SEQ ID NO: 1579554 - RNA, 19 nt, Artificial Sequence
  Description of Artificial Sequence: Synthetic oligonucleotide
agccucagguuccauugug

SEQ ID NO: 1579555 - RNA, 19 nt, Artificial Sequence
  Description of Artificial Sequence: Synthetic oligonucleotide
cagacccaaauuuaacuaa

SEQ ID NO: 1579556 - RNA, 19 nt, Artificial Sequence
  Description of Artificial Sequence: Synthetic oligonucleotide
acuucggaguccauguugu

SEQ ID NO: 1579557 - RNA, 19 nt, Artificial Sequence
  Description of Artificial Sequence: Synthetic oligonucleotide
cuggacgacuguuuccgug

SEQ ID NO: 1579558 - RNA, 19 nt, Artificial Sequence
  Description of Artificial Sequence: Synthetic oligonucleotide
guuguuagcgcuguuuucu

SEQ ID NO: 1579559 - RNA, 19 nt, Artificial Sequence
  Description of Artificial Sequence: Synthetic oligonucleotide
acacuguuguaaucauaga

SEQ ID NO: 1579560 - RNA, 19 nt, Artificial Sequence
  Description of Artificial Sequence: Synthetic oligonucleotide
ucauacgucuucccagcuu

SEQ ID NO: 1579561 - RNA, 19 nt, Artificial Sequence
  Description of Artificial Sequence: Synthetic oligonucleotide
caucgucuguuugucuugg

SEQ ID NO: 1579562 - RNA, 19 nt, Artificial Sequence
  Description of Artificial Sequence: Synthetic oligonucleotide
acuguggaagugguucauc

SEQ ID NO: 1579563 - RNA, 19 nt, Artificial Sequence
  Description of Artificial Sequence: Synthetic oligonucleotide
gacaccaccgggugccggc

SEQ ID NO: 1579564 - RNA, 19 nt, Artificial Sequence
  Description of Artificial Sequence: Synthetic oligonucleotide
gacgacuguuuccgugucc

SEQ ID NO: 1579565 - RNA, 19 nt, Artificial Sequence
  Description of Artificial Sequence: Synthetic oligonucleotide
uuguuagcgcuguuuucuc

SEQ ID NO: 1579566 - RNA, 19 nt, Artificial Sequence
  Description of Artificial Sequence: Synthetic oligonucleotide
uccgguuacuguggaagug

SEQ ID NO: 1579567 - RNA, 19 nt, Artificial Sequence
  Description of Artificial Sequence: Synthetic oligonucleotide
auccgguuacuguggaagu

SEQ ID NO: 1579568 - RNA, 19 nt, Artificial Sequence
  Description of Artificial Sequence: Synthetic oligonucleotide
aucgucuguuugucuuggg

SEQ ID NO: 1579569 - RNA, 19 nt, Artificial Sequence
  Description of Artificial Sequence: Synthetic oligonucleotide
ucauaacacccaccagcuc

SEQ ID NO: 1579570 - RNA, 19 nt, Artificial Sequence
  Description of Artificial Sequence: Synthetic oligonucleotide
gguguuagcugauacucaa

SEQ ID NO: 1579571 - RNA, 19 nt, Artificial Sequence
  Description of Artificial Sequence: Synthetic oligonucleotide
gacgcucauacaaccaguc

SEQ ID NO: 1579572 - RNA, 19 nt, Artificial Sequence
  Description of Artificial Sequence: Synthetic oligonucleotide
acacuguugcuaaacucug

SEQ ID NO: 1579573 - RNA, 19 nt, Artificial Sequence
  Description of Artificial Sequence: Synthetic oligonucleotide
cagaucuguuuccccuugg

SEQ ID NO: 1579574 - RNA, 19 nt, Artificial Sequence
  Description of Artificial Sequence: Synthetic oligonucleotide
gacccaaauuuaacuaaga

SEQ ID NO: 1579575 - RNA, 19 nt, Artificial Sequence
  Description of Artificial Sequence: Synthetic oligonucleotide
uacuaguugcaaccagcuu

SEQ ID NO: 1579576 - RNA, 19 nt, Artificial Sequence
  Description of Artificial Sequence: Synthetic oligonucleotide
cuucaccccgucauccaug

SEQ ID NO: 1579577 - RNA, 19 nt, Artificial Sequence
  Description of Artificial Sequence: Synthetic oligonucleotide
ggguaaacccacauugggc

SEQ ID NO: 1579578 - RNA, 19 nt, Artificial Sequence
  Description of Artificial Sequence: Synthetic oligonucleotide
acgcucauacaaccaguca

SEQ ID NO: 1579579 - RNA, 19 nt, Artificial Sequence
  Description of Artificial Sequence: Synthetic oligonucleotide
accagcuuaucacuuucuu

SEQ ID NO: 1579580 - RNA, 19 nt, Artificial Sequence
  Description of Artificial Sequence: Synthetic oligonucleotide
uguuuccccuugguaacca

SEQ ID NO: 1579581 - RNA, 19 nt, Artificial Sequence
  Description of Artificial Sequence: Synthetic oligonucleotide
cuccuucaccccgucaucc

SEQ ID NO: 1579582 - RNA, 19 nt, Artificial Sequence
  Description of Artificial Sequence: Synthetic oligonucleotide
agcuuaucacuuucuuuua

SEQ ID NO: 1579583 - RNA, 19 nt, Artificial Sequence
  Description of Artificial Sequence: Synthetic oligonucleotide
ucccgaucuucugauacuc

SEQ ID NO: 1579584 - RNA, 19 nt, Artificial Sequence
  Description of Artificial Sequence: Synthetic oligonucleotide
uguagcucuucagaccgua

SEQ ID NO: 1579585 - RNA, 19 nt, Artificial Sequence
  Description of Artificial Sequence: Synthetic oligonucleotide
ucucgucccggaaguucag

SEQ ID NO: 1579586 - RNA, 19 nt, Artificial Sequence
  Description of Artificial Sequence: Synthetic oligonucleotide
cuuuucugcgaucguuuca

SEQ ID NO: 1579587 - RNA, 19 nt, Artificial Sequence
  Description of Artificial Sequence: Synthetic oligonucleotide
ccuugguaaccacuggagc

SEQ ID NO: 1579588 - RNA, 19 nt, Artificial Sequence
  Description of Artificial Sequence: Synthetic oligonucleotide
uccuucaccccgucaucca

SEQ ID NO: 1579589 - RNA, 19 nt, Artificial Sequence
  Description of Artificial Sequence: Synthetic oligonucleotide
agaggcaccuggacgacug

SEQ ID NO: 1579590 - RNA, 19 nt, Artificial Sequence
  Description of Artificial Sequence: Synthetic oligonucleotide
aagggccccgugcaucgcu

SEQ ID NO: 1579591 - RNA, 19 nt, Artificial Sequence
  Description of Artificial Sequence: Synthetic oligonucleotide
caccuggacgacuguuucc

SEQ ID NO: 1579592 - RNA, 19 nt, Artificial Sequence
  Description of Artificial Sequence: Synthetic oligonucleotide
aggaagcacuucggagucc

SEQ ID NO: 1579593 - RNA, 19 nt, Artificial Sequence
  Description of Artificial Sequence: Synthetic oligonucleotide
acagucaaaaguagaggua

SEQ ID NO: 1579594 - RNA, 19 nt, Artificial Sequence
  Description of Artificial Sequence: Synthetic oligonucleotide
guagguguuagcugauacu

SEQ ID NO: 1579595 - RNA, 19 nt, Artificial Sequence
  Description of Artificial Sequence: Synthetic oligonucleotide
ugcacuccaucaggaagug

SEQ ID NO: 1579596 - RNA, 19 nt, Artificial Sequence
  Description of Artificial Sequence: Synthetic oligonucleotide
cugcgaucguuucauagaa

SEQ ID NO: 1579597 - RNA, 19 nt, Artificial Sequence
  Description of Artificial Sequence: Synthetic oligonucleotide
gcaccaauaauguccggga

SEQ ID NO: 1579598 - RNA, 19 nt, Artificial Sequence
  Description of Artificial Sequence: Synthetic oligonucleotide
agagacgcucauacaacca

SEQ ID NO: 1579599 - RNA, 19 nt, Artificial Sequence
  Description of Artificial Sequence: Synthetic oligonucleotide
gcgaucguuucauagaacu

SEQ ID NO: 1579600 - RNA, 19 nt, Artificial Sequence
  Description of Artificial Sequence: Synthetic oligonucleotide
uugguagguguuagcugau

SEQ ID NO: 1579601 - RNA, 19 nt, Artificial Sequence
  Description of Artificial Sequence: Synthetic oligonucleotide
auggcagacccaaauuuaa

SEQ ID NO: 1579602 - RNA, 19 nt, Artificial Sequence
  Description of Artificial Sequence: Synthetic oligonucleotide
uacgucuucccagcuucug

SEQ ID NO: 1579603 - RNA, 19 nt, Artificial Sequence
  Description of Artificial Sequence: Synthetic oligonucleotide
ccgugcaucgcuuccagug

SEQ ID NO: 1579604 - RNA, 19 nt, Artificial Sequence
  Description of Artificial Sequence: Synthetic oligonucleotide
caaagcgaccugucaccug

SEQ ID NO: 1579605 - RNA, 19 nt, Artificial Sequence
  Description of Artificial Sequence: Synthetic oligonucleotide
cauaaucuccaacaaugau

SEQ ID NO: 1579606 - RNA, 19 nt, Artificial Sequence
  Description of Artificial Sequence: Synthetic oligonucleotide
gcagacccaaauuuaacua

SEQ ID NO: 1579607 - RNA, 19 nt, Artificial Sequence
  Description of Artificial Sequence: Synthetic oligonucleotide
uuccgugucccaguuguua

SEQ ID NO: 1579608 - RNA, 19 nt, Artificial Sequence
  Description of Artificial Sequence: Synthetic oligonucleotide
cuaguugcaaccagcuuau

SEQ ID NO: 1579609 - RNA, 19 nt, Artificial Sequence
  Description of Artificial Sequence: Synthetic oligonucleotide
uagaggcggaugacacugu

SEQ ID NO: 1579610 - RNA, 19 nt, Artificial Sequence
  Description of Artificial Sequence: Synthetic oligonucleotide
agaagggaucggaauggca

SEQ ID NO: 1579611 - RNA, 19 nt, Artificial Sequence
  Description of Artificial Sequence: Synthetic oligonucleotide
cugauacuccuuggguaag

SEQ ID NO: 1579612 - RNA, 19 nt, Artificial Sequence
  Description of Artificial Sequence: Synthetic oligonucleotide
auggugccgacucgcuuca

SEQ ID NO: 1579613 - RNA, 19 nt, Artificial Sequence
  Description of Artificial Sequence: Synthetic oligonucleotide
gacucgcuucaccaucguc

SEQ ID NO: 1579614 - RNA, 19 nt, Artificial Sequence
  Description of Artificial Sequence: Synthetic oligonucleotide
cuguuuccccuugguaacc

SEQ ID NO: 1579615 - RNA, 19 nt, Artificial Sequence
  Description of Artificial Sequence: Synthetic oligonucleotide
ucgcuuccagugcuccugu

SEQ ID NO: 1579616 - RNA, 19 nt, Artificial Sequence
  Description of Artificial Sequence: Synthetic oligonucleotide
cuuuguauucgugguugca

SEQ ID NO: 1579617 - RNA, 19 nt, Artificial Sequence
  Description of Artificial Sequence: Synthetic oligonucleotide
aagaggcaccuggacgacu

SEQ ID NO: 1579618 - RNA, 19 nt, Artificial Sequence
  Description of Artificial Sequence: Synthetic oligonucleotide
auaacacccaccagcucau

SEQ ID NO: 1579619 - RNA, 19 nt, Artificial Sequence
  Description of Artificial Sequence: Synthetic oligonucleotide
cuucggaguccauguugug

SEQ ID NO: 1579620 - RNA, 19 nt, Artificial Sequence
  Description of Artificial Sequence: Synthetic oligonucleotide
agccuuuguauucgugguu

SEQ ID NO: 1579621 - RNA, 19 nt, Artificial Sequence
  Description of Artificial Sequence: Synthetic oligonucleotide
agacgcucauacaaccagu

SEQ ID NO: 1579622 - RNA, 19 nt, Artificial Sequence
  Description of Artificial Sequence: Synthetic oligonucleotide
auaagacauggugccgacu

SEQ ID NO: 1579623 - RNA, 19 nt, Artificial Sequence
  Description of Artificial Sequence: Synthetic oligonucleotide
gcgcuguuuucucugagca

SEQ ID NO: 1579624 - RNA, 19 nt, Artificial Sequence
  Description of Artificial Sequence: Synthetic oligonucleotide
gaagcagcccagaaagccu

SEQ ID NO: 1579625 - RNA, 19 nt, Artificial Sequence
  Description of Artificial Sequence: Synthetic oligonucleotide
ccgguuacuguggaagugg

SEQ ID NO: 1579626 - RNA, 19 nt, Artificial Sequence
  Description of Artificial Sequence: Synthetic oligonucleotide
ggugccgacucgcuucacc

SEQ ID NO: 1579627 - RNA, 19 nt, Artificial Sequence
  Description of Artificial Sequence: Synthetic oligonucleotide
gcauaagacauggugccga

SEQ ID NO: 1579628 - RNA, 19 nt, Artificial Sequence
  Description of Artificial Sequence: Synthetic oligonucleotide
agaggcggaugacacuguu

SEQ ID NO: 1579629 - RNA, 19 nt, Artificial Sequence
  Description of Artificial Sequence: Synthetic oligonucleotide
uuguuccaugccaggcuuu

SEQ ID NO: 1579630 - RNA, 19 nt, Artificial Sequence
  Description of Artificial Sequence: Synthetic oligonucleotide
ccgacucgcuucaccaucg

SEQ ID NO: 1579631 - RNA, 19 nt, Artificial Sequence
  Description of Artificial Sequence: Synthetic oligonucleotide
augcgcaucuugauaaauu

SEQ ID NO: 1579632 - RNA, 19 nt, Artificial Sequence
  Description of Artificial Sequence: Synthetic oligonucleotide
agauccgguuacuguggaa

SEQ ID NO: 1579633 - RNA, 19 nt, Artificial Sequence
  Description of Artificial Sequence: Synthetic oligonucleotide
gaacuuccccacggcauca

SEQ ID NO: 1579634 - RNA, 19 nt, Artificial Sequence
  Description of Artificial Sequence: Synthetic oligonucleotide
gcgcaucuugauaaauucc

SEQ ID NO: 1579635 - RNA, 19 nt, Artificial Sequence
  Description of Artificial Sequence: Synthetic oligonucleotide
acauggugccgacucgcuu

SEQ ID NO: 1579636 - RNA, 19 nt, Artificial Sequence
  Description of Artificial Sequence: Synthetic oligonucleotide
uuucugcgaucguuucaua

SEQ ID NO: 1579637 - RNA, 19 nt, Artificial Sequence
  Description of Artificial Sequence: Synthetic oligonucleotide
ggaugacacuguuguaauc

SEQ ID NO: 1579638 - RNA, 19 nt, Artificial Sequence
  Description of Artificial Sequence: Synthetic oligonucleotide
aagcggccgagggccugcc

SEQ ID NO: 1579639 - RNA, 19 nt, Artificial Sequence
  Description of Artificial Sequence: Synthetic oligonucleotide
gccaacaaguauuguucca

SEQ ID NO: 1579640 - RNA, 19 nt, Artificial Sequence
  Description of Artificial Sequence: Synthetic oligonucleotide
uccggggaucugcuaccac

SEQ ID NO: 1579641 - RNA, 19 nt, Artificial Sequence
  Description of Artificial Sequence: Synthetic oligonucleotide
uuuccgugucccaguuguu

SEQ ID NO: 1579642 - RNA, 19 nt, Artificial Sequence
  Description of Artificial Sequence: Synthetic oligonucleotide
auugggccauaaucuccaa

SEQ ID NO: 1579643 - RNA, 19 nt, Artificial Sequence
  Description of Artificial Sequence: Synthetic oligonucleotide
caccaauaauguccgggaa

SEQ ID NO: 1579644 - RNA, 19 nt, Artificial Sequence
  Description of Artificial Sequence: Synthetic oligonucleotide
uuccggggaucugcuacca

SEQ ID NO: 1579645 - RNA, 19 nt, Artificial Sequence
  Description of Artificial Sequence: Synthetic oligonucleotide
gcgaccugucaccugcuug

SEQ ID NO: 1579646 - RNA, 19 nt, Artificial Sequence
  Description of Artificial Sequence: Synthetic oligonucleotide
gcuaaacucugcaaggccu

SEQ ID NO: 1579647 - RNA, 19 nt, Artificial Sequence
  Description of Artificial Sequence: Synthetic oligonucleotide
caccugcuugucuggaaga

SEQ ID NO: 1579648 - RNA, 19 nt, Artificial Sequence
  Description of Artificial Sequence: Synthetic oligonucleotide
ugccacgaggcuggcaauc

SEQ ID NO: 1579649 - RNA, 19 nt, Artificial Sequence
  Description of Artificial Sequence: Synthetic oligonucleotide
guagcucuucagaccguac

SEQ ID NO: 1579650 - RNA, 19 nt, Artificial Sequence
  Description of Artificial Sequence: Synthetic oligonucleotide
caauaauguccgggaagca

SEQ ID NO: 1579651 - RNA, 19 nt, Artificial Sequence
  Description of Artificial Sequence: Synthetic oligonucleotide
cuagcugcuuggccaacaa

SEQ ID NO: 1579652 - RNA, 19 nt, Artificial Sequence
  Description of Artificial Sequence: Synthetic oligonucleotide
gcucauacaaccagucaaa

SEQ ID NO: 1579653 - RNA, 19 nt, Artificial Sequence
  Description of Artificial Sequence: Synthetic oligonucleotide
acccacauugggccauaau

SEQ ID NO: 1579654 - RNA, 19 nt, Artificial Sequence
  Description of Artificial Sequence: Synthetic oligonucleotide
cacgaggcuggcaaucucu

SEQ ID NO: 1579655 - RNA, 19 nt, Artificial Sequence
  Description of Artificial Sequence: Synthetic oligonucleotide
cgugucccaguuguuagcg

SEQ ID NO: 1579656 - RNA, 19 nt, Artificial Sequence
  Description of Artificial Sequence: Synthetic oligonucleotide
cacuucuguucuauuucua

SEQ ID NO: 1579657 - RNA, 19 nt, Artificial Sequence
  Description of Artificial Sequence: Synthetic oligonucleotide
cccgaucuucugauacucc

SEQ ID NO: 1579658 - RNA, 19 nt, Artificial Sequence
  Description of Artificial Sequence: Synthetic oligonucleotide
accaccgggugccggcaca

SEQ ID NO: 1579659 - RNA, 19 nt, Artificial Sequence
  Description of Artificial Sequence: Synthetic oligonucleotide
ugguagguguuagcugaua

SEQ ID NO: 1579660 - RNA, 19 nt, Artificial Sequence
  Description of Artificial Sequence: Synthetic oligonucleotide
cucuccgacaccaccgggu

SEQ ID NO: 1579661 - RNA, 19 nt, Artificial Sequence
  Description of Artificial Sequence: Synthetic oligonucleotide
cgugcaucgcuuccagugc

SEQ ID NO: 1579662 - RNA, 19 nt, Artificial Sequence
  Description of Artificial Sequence: Synthetic oligonucleotide
caguuguuagcgcuguuuu

SEQ ID NO: 1579663 - RNA, 19 nt, Artificial Sequence
  Description of Artificial Sequence: Synthetic oligonucleotide
aaacccacauugggccaua

SEQ ID NO: 1579664 - RNA, 19 nt, Artificial Sequence
  Description of Artificial Sequence: Synthetic oligonucleotide
accguacauuuuggaaccu

SEQ ID NO: 1579665 - RNA, 19 nt, Artificial Sequence
  Description of Artificial Sequence: Synthetic oligonucleotide
auacgucuucccagcuucu

SEQ ID NO: 1579666 - RNA, 19 nt, Artificial Sequence
  Description of Artificial Sequence: Synthetic oligonucleotide
cgcaucuugauaaauuccu

SEQ ID NO: 1579667 - RNA, 19 nt, Artificial Sequence
  Description of Artificial Sequence: Synthetic oligonucleotide
cguuucauagaacugcacu

SEQ ID NO: 1579668 - RNA, 19 nt, Artificial Sequence
  Description of Artificial Sequence: Synthetic oligonucleotide
gcaucgcuuccagugcucc

SEQ ID NO: 1579669 - RNA, 19 nt, Artificial Sequence
  Description of Artificial Sequence: Synthetic oligonucleotide
gugcaucgcuuccagugcu

SEQ ID NO: 1579670 - RNA, 19 nt, Artificial Sequence
  Description of Artificial Sequence: Synthetic oligonucleotide
accuuuccggggaucugcu

SEQ ID NO: 1579671 - RNA, 19 nt, Artificial Sequence
  Description of Artificial Sequence: Synthetic oligonucleotide
cugugguuuacagaucgau

SEQ ID NO: 1579672 - RNA, 19 nt, Artificial Sequence
  Description of Artificial Sequence: Synthetic oligonucleotide
aagcgaccugucaccugcu

SEQ ID NO: 1579673 - RNA, 19 nt, Artificial Sequence
  Description of Artificial Sequence: Synthetic oligonucleotide
aacccacauugggccauaa

SEQ ID NO: 1579674 - RNA, 19 nt, Artificial Sequence
  Description of Artificial Sequence: Synthetic oligonucleotide
gguaggguaaacccacauu

SEQ ID NO: 1579675 - RNA, 19 nt, Artificial Sequence
  Description of Artificial Sequence: Synthetic oligonucleotide
ccgugucccaguuguuagc

SEQ ID NO: 1579676 - RNA, 19 nt, Artificial Sequence
  Description of Artificial Sequence: Synthetic oligonucleotide
ccggggaucugcuaccaca

SEQ ID NO: 1579677 - RNA, 19 nt, Artificial Sequence
  Description of Artificial Sequence: Synthetic oligonucleotide
ccaacaaugauggggauuu

SEQ ID NO: 1579678 - RNA, 19 nt, Artificial Sequence
  Description of Artificial Sequence: Synthetic oligonucleotide
ggagcugaacacuguugcu

SEQ ID NO: 1579679 - RNA, 19 nt, Artificial Sequence
  Description of Artificial Sequence: Synthetic oligonucleotide
ggaaccuuuccggggaucu

SEQ ID NO: 1579680 - RNA, 19 nt, Artificial Sequence
  Description of Artificial Sequence: Synthetic oligonucleotide
ggacgacuguuuccguguc

SEQ ID NO: 1579681 - RNA, 19 nt, Artificial Sequence
  Description of Artificial Sequence: Synthetic oligonucleotide
ggaucugcuaccacacagu

SEQ ID NO: 1579682 - RNA, 19 nt, Artificial Sequence
  Description of Artificial Sequence: Synthetic oligonucleotide
gguagaggcggaugacacu

SEQ ID NO: 1579683 - RNA, 19 nt, Artificial Sequence
  Description of Artificial Sequence: Synthetic oligonucleotide
cugcuuggccaacaaguau

SEQ ID NO: 1579684 - RNA, 19 nt, Artificial Sequence
  Description of Artificial Sequence: Synthetic oligonucleotide
caucacacuucuguucuau

SEQ ID NO: 1579685 - RNA, 19 nt, Artificial Sequence
  Description of Artificial Sequence: Synthetic oligonucleotide
gacauggugccgacucgcu

SEQ ID NO: 1579686 - RNA, 19 nt, Artificial Sequence
  Description of Artificial Sequence: Synthetic oligonucleotide
ggugccggcacauccuggu

SEQ ID NO: 1579687 - RNA, 19 nt, Artificial Sequence
  Description of Artificial Sequence: Synthetic oligonucleotide
uaguugcaaccagcuuauc

SEQ ID NO: 1579688 - RNA, 19 nt, Artificial Sequence
  Description of Artificial Sequence: Synthetic oligonucleotide
guguucuguccuggucuac

SEQ ID NO: 1579689 - RNA, 19 nt, Artificial Sequence
  Description of Artificial Sequence: Synthetic oligonucleotide
cgauuaguguugguaggug

SEQ ID NO: 1579690 - RNA, 19 nt, Artificial Sequence
  Description of Artificial Sequence: Synthetic oligonucleotide
ggccccgugcaucgcuucc

SEQ ID NO: 1579691 - RNA, 19 nt, Artificial Sequence
  Description of Artificial Sequence: Synthetic oligonucleotide
auucgugguugcacuccau

SEQ ID NO: 1579692 - RNA, 19 nt, Artificial Sequence
  Description of Artificial Sequence: Synthetic oligonucleotide
caugcgcaucuugauaaau

SEQ ID NO: 1579693 - RNA, 19 nt, Artificial Sequence
  Description of Artificial Sequence: Synthetic oligonucleotide
ggggaucugcuaccacaca

SEQ ID NO: 1579694 - RNA, 19 nt, Artificial Sequence
  Description of Artificial Sequence: Synthetic oligonucleotide
gcggccgagggccugccuc

SEQ ID NO: 1579695 - RNA, 19 nt, Artificial Sequence
  Description of Artificial Sequence: Synthetic oligonucleotide
caccaccgggugccggcac

SEQ ID NO: 1579696 - RNA, 19 nt, Artificial Sequence
  Description of Artificial Sequence: Synthetic oligonucleotide
guguuagcugauacucaau

SEQ ID NO: 1579697 - RNA, 19 nt, Artificial Sequence
  Description of Artificial Sequence: Synthetic oligonucleotide
cagaucgauuaguguuggu

SEQ ID NO: 1579698 - RNA, 19 nt, Artificial Sequence
  Description of Artificial Sequence: Synthetic oligonucleotide
ccccgugcaucgcuuccag

SEQ ID NO: 1579699 - RNA, 19 nt, Artificial Sequence
  Description of Artificial Sequence: Synthetic oligonucleotide
ccugcuugucuggaagaga

SEQ ID NO: 1579700 - RNA, 19 nt, Artificial Sequence
  Description of Artificial Sequence: Synthetic oligonucleotide
ccuugugagcaccaauaau

SEQ ID NO: 1579701 - RNA, 19 nt, Artificial Sequence
  Description of Artificial Sequence: Synthetic oligonucleotide
cuccaacaaugauggggau

SEQ ID NO: 1579702 - RNA, 19 nt, Artificial Sequence
  Description of Artificial Sequence: Synthetic oligonucleotide
ccucagcuuuucugcgauc

SEQ ID NO: 1579703 - RNA, 19 nt, Artificial Sequence
  Description of Artificial Sequence: Synthetic oligonucleotide
ccgggaagcagcccagaaa

SEQ ID NO: 1579704 - RNA, 19 nt, Artificial Sequence
  Description of Artificial Sequence: Synthetic oligonucleotide
uggugccgacucgcuucac

SEQ ID NO: 1579705 - RNA, 19 nt, Artificial Sequence
  Description of Artificial Sequence: Synthetic oligonucleotide
ccuggugccccagggcauc

SEQ ID NO: 1579706 - RNA, 19 nt, Artificial Sequence
  Description of Artificial Sequence: Synthetic oligonucleotide
agggccccgugcaucgcuu

SEQ ID NO: 1579707 - RNA, 19 nt, Artificial Sequence
  Description of Artificial Sequence: Synthetic oligonucleotide
gguaaccacuggagcugaa

SEQ ID NO: 1579708 - RNA, 19 nt, Artificial Sequence
  Description of Artificial Sequence: Synthetic oligonucleotide
ggcaccuggacgacuguuu

SEQ ID NO: 1579709 - RNA, 19 nt, Artificial Sequence
  Description of Artificial Sequence: Synthetic oligonucleotide
ccaguuguuagcgcuguuu

SEQ ID NO: 1579710 - RNA, 19 nt, Artificial Sequence
  Description of Artificial Sequence: Synthetic oligonucleotide
caccgggugccggcacauc

SEQ ID NO: 1579711 - RNA, 19 nt, Artificial Sequence
  Description of Artificial Sequence: Synthetic oligonucleotide
gccccgugcaucgcuucca

SEQ ID NO: 1579712 - RNA, 19 nt, Artificial Sequence
  Description of Artificial Sequence: Synthetic oligonucleotide
ccgacaccaccgggugccg

SEQ ID NO: 1579713 - RNA, 19 nt, Artificial Sequence
  Description of Artificial Sequence: Synthetic oligonucleotide
ccuuuccggggaucugcua

SEQ ID NO: 1579714 - RNA, 19 nt, Artificial Sequence
  Description of Artificial Sequence: Synthetic oligonucleotide
cgacuguuuccguguccca

SEQ ID NO: 1579715 - RNA, 19 nt, Artificial Sequence
  Description of Artificial Sequence: Synthetic oligonucleotide
ccuggacgacuguuuccgu

SEQ ID NO: 1579716 - RNA, 19 nt, Artificial Sequence
  Description of Artificial Sequence: Synthetic oligonucleotide
ccgggugccggcacauccu

SEQ ID NO: 1579717 - RNA, 19 nt, Artificial Sequence
  Description of Artificial Sequence: Synthetic oligonucleotide
ccguacauuuuggaaccuu

SEQ ID NO: 1579718 - RNA, 19 nt, Artificial Sequence
  Description of Artificial Sequence: Synthetic oligonucleotide
cccgugcaucgcuuccagu

SEQ ID NO: 1579719 - RNA, 19 nt, Artificial Sequence
  Description of Artificial Sequence: Synthetic oligonucleotide
cgacucgcuucaccaucgu

SEQ ID NO: 1579720 - RNA, 19 nt, Artificial Sequence
  Description of Artificial Sequence: Synthetic oligonucleotide
cccaguuguuagcgcuguu

SEQ ID NO: 1579721 - RNA, 19 nt, Artificial Sequence
  Description of Artificial Sequence: Synthetic oligonucleotide
ccaccgggugccggcacau

SEQ ID NO: 1579722 - RNA, 19 nt, Artificial Sequence
  Description of Artificial Sequence: Synthetic oligonucleotide
gccgcuccaugcgcaucuu

SEQ ID NO: 1579723 - RNA, 19 nt, Artificial Sequence
  Description of Artificial Sequence: Synthetic oligonucleotide
aauguuauaggugaugaac

SEQ ID NO: 1579724 - RNA, 19 nt, Artificial Sequence
  Description of Artificial Sequence: Synthetic oligonucleotide
uuauaggugaugaacagga

SEQ ID NO: 1579725 - RNA, 19 nt, Artificial Sequence
  Description of Artificial Sequence: Synthetic oligonucleotide
aaauaaaugaaggacgaga

SEQ ID NO: 1579726 - RNA, 19 nt, Artificial Sequence
  Description of Artificial Sequence: Synthetic oligonucleotide
aguauacuguccuuuaguc

SEQ ID NO: 1579727 - RNA, 19 nt, Artificial Sequence
  Description of Artificial Sequence: Synthetic oligonucleotide
aaugguaucagaagucuuc

SEQ ID NO: 1579728 - RNA, 19 nt, Artificial Sequence
  Description of Artificial Sequence: Synthetic oligonucleotide
aagucuucaucccauggag

SEQ ID NO: 1579729 - RNA, 19 nt, Artificial Sequence
  Description of Artificial Sequence: Synthetic oligonucleotide
ugaaggacgagacacccag

SEQ ID NO: 1579730 - RNA, 19 nt, Artificial Sequence
  Description of Artificial Sequence: Synthetic oligonucleotide
uccaugucaaucacggccg

SEQ ID NO: 1579731 - RNA, 19 nt, Artificial Sequence
  Description of Artificial Sequence: Synthetic oligonucleotide
uuucaugcccagaaacucg

SEQ ID NO: 1579732 - RNA, 19 nt, Artificial Sequence
  Description of Artificial Sequence: Synthetic oligonucleotide
augaaggugaauguuauag

SEQ ID NO: 1579733 - RNA, 19 nt, Artificial Sequence
  Description of Artificial Sequence: Synthetic oligonucleotide
guagaagagggcaugaagg

SEQ ID NO: 1579734 - RNA, 19 nt, Artificial Sequence
  Description of Artificial Sequence: Synthetic oligonucleotide
uguuuaggcagcaaaggcu

SEQ ID NO: 1579735 - RNA, 19 nt, Artificial Sequence
  Description of Artificial Sequence: Synthetic oligonucleotide
cuuaaagccuuucaugccc

SEQ ID NO: 1579736 - RNA, 19 nt, Artificial Sequence
  Description of Artificial Sequence: Synthetic oligonucleotide
cuugauagggaucauggac

SEQ ID NO: 1579737 - RNA, 19 nt, Artificial Sequence
  Description of Artificial Sequence: Synthetic oligonucleotide
uguuauaggugaugaacag

SEQ ID NO: 1579738 - RNA, 19 nt, Artificial Sequence
  Description of Artificial Sequence: Synthetic oligonucleotide
gaagagcugacccacauuc

SEQ ID NO: 1579739 - RNA, 19 nt, Artificial Sequence
  Description of Artificial Sequence: Synthetic oligonucleotide
aauacagugcccaaagaga

SEQ ID NO: 1579740 - RNA, 19 nt, Artificial Sequence
  Description of Artificial Sequence: Synthetic oligonucleotide
uccacaucaaaguaggguc

SEQ ID NO: 1579741 - RNA, 19 nt, Artificial Sequence
  Description of Artificial Sequence: Synthetic oligonucleotide
ugacgugucauccauguuc

SEQ ID NO: 1579742 - RNA, 19 nt, Artificial Sequence
  Description of Artificial Sequence: Synthetic oligonucleotide
aggugaauguuauagguga

SEQ ID NO: 1579743 - RNA, 19 nt, Artificial Sequence
  Description of Artificial Sequence: Synthetic oligonucleotide
ugaauguuauaggugauga

SEQ ID NO: 1579744 - RNA, 19 nt, Artificial Sequence
  Description of Artificial Sequence: Synthetic oligonucleotide
aaggcucagugguugcugc

SEQ ID NO: 1579745 - RNA, 19 nt, Artificial Sequence
  Description of Artificial Sequence: Synthetic oligonucleotide
uuuucuucgaagccucccc

SEQ ID NO: 1579746 - RNA, 19 nt, Artificial Sequence
  Description of Artificial Sequence: Synthetic oligonucleotide
agcaggaaugucucuaggg

SEQ ID NO: 1579747 - RNA, 19 nt, Artificial Sequence
  Description of Artificial Sequence: Synthetic oligonucleotide
cagaccucaucaaagagac

SEQ ID NO: 1579748 - RNA, 19 nt, Artificial Sequence
  Description of Artificial Sequence: Synthetic oligonucleotide
uggcauacaagcugaaggc

SEQ ID NO: 1579749 - RNA, 19 nt, Artificial Sequence
  Description of Artificial Sequence: Synthetic oligonucleotide
aucuugauagggaucaugg

SEQ ID NO: 1579750 - RNA, 19 nt, Artificial Sequence
  Description of Artificial Sequence: Synthetic oligonucleotide
ucaaucacggccgagcccc

SEQ ID NO: 1579751 - RNA, 19 nt, Artificial Sequence
  Description of Artificial Sequence: Synthetic oligonucleotide
caaaaugcagauagagcag

SEQ ID NO: 1579752 - RNA, 19 nt, Artificial Sequence
  Description of Artificial Sequence: Synthetic oligonucleotide
ucaguauacuguccuuuag

SEQ ID NO: 1579753 - RNA, 19 nt, Artificial Sequence
  Description of Artificial Sequence: Synthetic oligonucleotide
agagcaugugcagagcagc

SEQ ID NO: 1579754 - RNA, 19 nt, Artificial Sequence
  Description of Artificial Sequence: Synthetic oligonucleotide
aggaaugucucuagggacc

SEQ ID NO: 1579755 - RNA, 19 nt, Artificial Sequence
  Description of Artificial Sequence: Synthetic oligonucleotide
aaugucucuagggacccuc

SEQ ID NO: 1579756 - RNA, 19 nt, Artificial Sequence
  Description of Artificial Sequence: Synthetic oligonucleotide
caugagagguccauagagc

SEQ ID NO: 1579757 - RNA, 19 nt, Artificial Sequence
  Description of Artificial Sequence: Synthetic oligonucleotide
uuucggacgccgcuggccg

SEQ ID NO: 1579758 - RNA, 19 nt, Artificial Sequence
  Description of Artificial Sequence: Synthetic oligonucleotide
gagggcaugaaggugaaug

SEQ ID NO: 1579759 - RNA, 19 nt, Artificial Sequence
  Description of Artificial Sequence: Synthetic oligonucleotide
ugugaagaccagcaugaga

SEQ ID NO: 1579760 - RNA, 19 nt, Artificial Sequence
  Description of Artificial Sequence: Synthetic oligonucleotide
augucaaucacggccgagc

SEQ ID NO: 1579761 - RNA, 19 nt, Artificial Sequence
  Description of Artificial Sequence: Synthetic oligonucleotide
guuauaggugaugaacagg

SEQ ID NO: 1579762 - RNA, 19 nt, Artificial Sequence
  Description of Artificial Sequence: Synthetic oligonucleotide
ucugaucagccaccugucg

SEQ ID NO: 1579763 - RNA, 19 nt, Artificial Sequence
  Description of Artificial Sequence: Synthetic oligonucleotide
uucaugcccagaaacucgc

SEQ ID NO: 1579764 - RNA, 19 nt, Artificial Sequence
  Description of Artificial Sequence: Synthetic oligonucleotide
ugucccucgaggcuuuccg

SEQ ID NO: 1579765 - RNA, 19 nt, Artificial Sequence
  Description of Artificial Sequence: Synthetic oligonucleotide
aagaccggugccaagcagg

SEQ ID NO: 1579766 - RNA, 19 nt, Artificial Sequence
  Description of Artificial Sequence: Synthetic oligonucleotide
guaggcaaggaaauaaaug

SEQ ID NO: 1579767 - RNA, 19 nt, Artificial Sequence
  Description of Artificial Sequence: Synthetic oligonucleotide
aucauggacuccaggagcc

SEQ ID NO: 1579768 - RNA, 19 nt, Artificial Sequence
  Description of Artificial Sequence: Synthetic oligonucleotide
auacgcaggguggacagcc

SEQ ID NO: 1579769 - RNA, 19 nt, Artificial Sequence
  Description of Artificial Sequence: Synthetic oligonucleotide
uagaagagggcaugaaggu

SEQ ID NO: 1579770 - RNA, 19 nt, Artificial Sequence
  Description of Artificial Sequence: Synthetic oligonucleotide
auaaugguaucagaagucu

SEQ ID NO: 1579771 - RNA, 19 nt, Artificial Sequence
  Description of Artificial Sequence: Synthetic oligonucleotide
uuuagucuuccuccagagc

SEQ ID NO: 1579772 - RNA, 19 nt, Artificial Sequence
  Description of Artificial Sequence: Synthetic oligonucleotide
aaggugaauguuauaggug

SEQ ID NO: 1579773 - RNA, 19 nt, Artificial Sequence
  Description of Artificial Sequence: Synthetic oligonucleotide
ucucuagggacccucugca

SEQ ID NO: 1579774 - RNA, 19 nt, Artificial Sequence
  Description of Artificial Sequence: Synthetic oligonucleotide
uuaaagccuuucaugccca

SEQ ID NO: 1579775 - RNA, 19 nt, Artificial Sequence
  Description of Artificial Sequence: Synthetic oligonucleotide
gaaauaaaugaaggacgag

SEQ ID NO: 1579776 - RNA, 19 nt, Artificial Sequence
  Description of Artificial Sequence: Synthetic oligonucleotide
ugaucagccaccugucggc

SEQ ID NO: 1579777 - RNA, 19 nt, Artificial Sequence
  Description of Artificial Sequence: Synthetic oligonucleotide
guccuugacaccaacacug

SEQ ID NO: 1579778 - RNA, 19 nt, Artificial Sequence
  Description of Artificial Sequence: Synthetic oligonucleotide
caguauccgaagcaggugc

SEQ ID NO: 1579779 - RNA, 19 nt, Artificial Sequence
  Description of Artificial Sequence: Synthetic oligonucleotide
accaacacugccaccauac

SEQ ID NO: 1579780 - RNA, 19 nt, Artificial Sequence
  Description of Artificial Sequence: Synthetic oligonucleotide
gauuucagggaggucagug

SEQ ID NO: 1579781 - RNA, 19 nt, Artificial Sequence
  Description of Artificial Sequence: Synthetic oligonucleotide
accagcgugagacccgggc

SEQ ID NO: 1579782 - RNA, 19 nt, Artificial Sequence
  Description of Artificial Sequence: Synthetic oligonucleotide
agggaggucagugugacug

SEQ ID NO: 1579783 - RNA, 19 nt, Artificial Sequence
  Description of Artificial Sequence: Synthetic oligonucleotide
auggcgaccagugugaaga

SEQ ID NO: 1579784 - RNA, 19 nt, Artificial Sequence
  Description of Artificial Sequence: Synthetic oligonucleotide
gcagauagagcagaaagag

SEQ ID NO: 1579785 - RNA, 19 nt, Artificial Sequence
  Description of Artificial Sequence: Synthetic oligonucleotide
cagauagagcagaaagagc

SEQ ID NO: 1579786 - RNA, 19 nt, Artificial Sequence
  Description of Artificial Sequence: Synthetic oligonucleotide
caacacugccaccauacgc

SEQ ID NO: 1579787 - RNA, 19 nt, Artificial Sequence
  Description of Artificial Sequence: Synthetic oligonucleotide
auguuauaggugaugaaca

SEQ ID NO: 1579788 - RNA, 19 nt, Artificial Sequence
  Description of Artificial Sequence: Synthetic oligonucleotide
acacauguccucaguauac

SEQ ID NO: 1579789 - RNA, 19 nt, Artificial Sequence
  Description of Artificial Sequence: Synthetic oligonucleotide
cuugacaccaacacugcca

SEQ ID NO: 1579790 - RNA, 19 nt, Artificial Sequence
  Description of Artificial Sequence: Synthetic oligonucleotide
uuucuucgaagccucccca

SEQ ID NO: 1579791 - RNA, 19 nt, Artificial Sequence
  Description of Artificial Sequence: Synthetic oligonucleotide
gagaccauagcccagcagu

SEQ ID NO: 1579792 - RNA, 19 nt, Artificial Sequence
  Description of Artificial Sequence: Synthetic oligonucleotide
ucuugauagggaucaugga

SEQ ID NO: 1579793 - RNA, 19 nt, Artificial Sequence
  Description of Artificial Sequence: Synthetic oligonucleotide
ugcgucggcauccacuucu

SEQ ID NO: 1579794 - RNA, 19 nt, Artificial Sequence
  Description of Artificial Sequence: Synthetic oligonucleotide
cauugcacagguaggcaag

SEQ ID NO: 1579795 - RNA, 19 nt, Artificial Sequence
  Description of Artificial Sequence: Synthetic oligonucleotide
ucacggauaaugguaucag

SEQ ID NO: 1579796 - RNA, 19 nt, Artificial Sequence
  Description of Artificial Sequence: Synthetic oligonucleotide
ugugccuuucagaagccaa

SEQ ID NO: 1579797 - RNA, 19 nt, Artificial Sequence
  Description of Artificial Sequence: Synthetic oligonucleotide
aggaugucgauguuggcau

SEQ ID NO: 1579798 - RNA, 19 nt, Artificial Sequence
  Description of Artificial Sequence: Synthetic oligonucleotide
uagggucucaggaugucga

SEQ ID NO: 1579799 - RNA, 19 nt, Artificial Sequence
  Description of Artificial Sequence: Synthetic oligonucleotide
ugcccaaagagaccauagc

SEQ ID NO: 1579800 - RNA, 19 nt, Artificial Sequence
  Description of Artificial Sequence: Synthetic oligonucleotide
auuucagggaggucagugu

SEQ ID NO: 1579801 - RNA, 19 nt, Artificial Sequence
  Description of Artificial Sequence: Synthetic oligonucleotide
ugaccaucuugauagggau

SEQ ID NO: 1579802 - RNA, 19 nt, Artificial Sequence
  Description of Artificial Sequence: Synthetic oligonucleotide
ccuugugccuuucagaagc

SEQ ID NO: 1579803 - RNA, 19 nt, Artificial Sequence
  Description of Artificial Sequence: Synthetic oligonucleotide
caucagggugcccucacgg

SEQ ID NO: 1579804 - RNA, 19 nt, Artificial Sequence
  Description of Artificial Sequence: Synthetic oligonucleotide
caaagagacacauguccuc

SEQ ID NO: 1579805 - RNA, 19 nt, Artificial Sequence
  Description of Artificial Sequence: Synthetic oligonucleotide
guuuaggcagcaaaggcuc

SEQ ID NO: 1579806 - RNA, 19 nt, Artificial Sequence
  Description of Artificial Sequence: Synthetic oligonucleotide
uucgaagccuccccacucc

SEQ ID NO: 1579807 - RNA, 19 nt, Artificial Sequence
  Description of Artificial Sequence: Synthetic oligonucleotide
ugagacccgggccggagag

SEQ ID NO: 1579808 - RNA, 19 nt, Artificial Sequence
  Description of Artificial Sequence: Synthetic oligonucleotide
aguauccgaagcaggugcc

SEQ ID NO: 1579809 - RNA, 19 nt, Artificial Sequence
  Description of Artificial Sequence: Synthetic oligonucleotide
cccaaagagaccauagccc

SEQ ID NO: 1579810 - RNA, 19 nt, Artificial Sequence
  Description of Artificial Sequence: Synthetic oligonucleotide
aagccuccccacuccgggc

SEQ ID NO: 1579811 - RNA, 19 nt, Artificial Sequence
  Description of Artificial Sequence: Synthetic oligonucleotide
ggacgagacacccagccag

SEQ ID NO: 1579812 - RNA, 19 nt, Artificial Sequence
  Description of Artificial Sequence: Synthetic oligonucleotide
uccuugacaccaacacugc

SEQ ID NO: 1579813 - RNA, 19 nt, Artificial Sequence
  Description of Artificial Sequence: Synthetic oligonucleotide
uggccaaggauuucaggga

SEQ ID NO: 1579814 - RNA, 19 nt, Artificial Sequence
  Description of Artificial Sequence: Synthetic oligonucleotide
uccuuuagucuuccuccag

SEQ ID NO: 1579815 - RNA, 19 nt, Artificial Sequence
  Description of Artificial Sequence: Synthetic oligonucleotide
agcaucugcagcaugguga

SEQ ID NO: 1579816 - RNA, 19 nt, Artificial Sequence
  Description of Artificial Sequence: Synthetic oligonucleotide
gaagcuggagccugacgug

SEQ ID NO: 1579817 - RNA, 19 nt, Artificial Sequence
  Description of Artificial Sequence: Synthetic oligonucleotide
ucagugugacugcaggguc

SEQ ID NO: 1579818 - RNA, 19 nt, Artificial Sequence
  Description of Artificial Sequence: Synthetic oligonucleotide
ugggcagucagggauggcc

SEQ ID NO: 1579819 - RNA, 19 nt, Artificial Sequence
  Description of Artificial Sequence: Synthetic oligonucleotide
aguccuugacaccaacacu

SEQ ID NO: 1579820 - RNA, 19 nt, Artificial Sequence
  Description of Artificial Sequence: Synthetic oligonucleotide
auguuuucuucgaagccuc

SEQ ID NO: 1579821 - RNA, 19 nt, Artificial Sequence
  Description of Artificial Sequence: Synthetic oligonucleotide
cagugugacugcagggucg

SEQ ID NO: 1579822 - RNA, 19 nt, Artificial Sequence
  Description of Artificial Sequence: Synthetic oligonucleotide
gaaguugaccaucuugaua

SEQ ID NO: 1579823 - RNA, 19 nt, Artificial Sequence
  Description of Artificial Sequence: Synthetic oligonucleotide
ucuucgaagccuccccacu

SEQ ID NO: 1579824 - RNA, 19 nt, Artificial Sequence
  Description of Artificial Sequence: Synthetic oligonucleotide
ugguaggcaaaaugcagau

SEQ ID NO: 1579825 - RNA, 19 nt, Artificial Sequence
  Description of Artificial Sequence: Synthetic oligonucleotide
ugcaugggugggacguugg

SEQ ID NO: 1579826 - RNA, 19 nt, Artificial Sequence
  Description of Artificial Sequence: Synthetic oligonucleotide
ucgaagccuccccacuccg

SEQ ID NO: 1579827 - RNA, 19 nt, Artificial Sequence
  Description of Artificial Sequence: Synthetic oligonucleotide
uguccaagauccccucuac

SEQ ID NO: 1579828 - RNA, 19 nt, Artificial Sequence
  Description of Artificial Sequence: Synthetic oligonucleotide
uuuaggcagcaaaggcuca

SEQ ID NO: 1579829 - RNA, 19 nt, Artificial Sequence
  Description of Artificial Sequence: Synthetic oligonucleotide
ggaucauggacuccaggag

SEQ ID NO: 1579830 - RNA, 19 nt, Artificial Sequence
  Description of Artificial Sequence: Synthetic oligonucleotide
ggaaauaaaugaaggacga

SEQ ID NO: 1579831 - RNA, 19 nt, Artificial Sequence
  Description of Artificial Sequence: Synthetic oligonucleotide
ugccugccacaucugauca

SEQ ID NO: 1579832 - RNA, 19 nt, Artificial Sequence
  Description of Artificial Sequence: Synthetic oligonucleotide
ucgaagcuggagccugacg

SEQ ID NO: 1579833 - RNA, 19 nt, Artificial Sequence
  Description of Artificial Sequence: Synthetic oligonucleotide
acggauaaugguaucagaa

SEQ ID NO: 1579834 - RNA, 19 nt, Artificial Sequence
  Description of Artificial Sequence: Synthetic oligonucleotide
agaaacucgccauccuccu

SEQ ID NO: 1579835 - RNA, 19 nt, Artificial Sequence
  Description of Artificial Sequence: Synthetic oligonucleotide
agcaaaggcucagugguug

SEQ ID NO: 1579836 - RNA, 19 nt, Artificial Sequence
  Description of Artificial Sequence: Synthetic oligonucleotide
ugcuucggaccugagcagg

SEQ ID NO: 1579837 - RNA, 19 nt, Artificial Sequence
  Description of Artificial Sequence: Synthetic oligonucleotide
ucggaccugagcaggcucc

SEQ ID NO: 1579838 - RNA, 19 nt, Artificial Sequence
  Description of Artificial Sequence: Synthetic oligonucleotide
ugucgauguuggcauacaa

SEQ ID NO: 1579839 - RNA, 19 nt, Artificial Sequence
  Description of Artificial Sequence: Synthetic oligonucleotide
gauccccucuaccaccuug

SEQ ID NO: 1579840 - RNA, 19 nt, Artificial Sequence
  Description of Artificial Sequence: Synthetic oligonucleotide
aagcaggugccaauggcug

SEQ ID NO: 1579841 - RNA, 19 nt, Artificial Sequence
  Description of Artificial Sequence: Synthetic oligonucleotide
ugugacugcagggucgcug

SEQ ID NO: 1579842 - RNA, 19 nt, Artificial Sequence
  Description of Artificial Sequence: Synthetic oligonucleotide
ugccaagcagguguuuagg

SEQ ID NO: 1579843 - RNA, 19 nt, Artificial Sequence
  Description of Artificial Sequence: Synthetic oligonucleotide
ugccaccauacgcagggug

SEQ ID NO: 1579844 - RNA, 19 nt, Artificial Sequence
  Description of Artificial Sequence: Synthetic oligonucleotide
ggauaaugguaucagaagu

SEQ ID NO: 1579845 - RNA, 19 nt, Artificial Sequence
  Description of Artificial Sequence: Synthetic oligonucleotide
gucucuagggacccucugc

SEQ ID NO: 1579846 - RNA, 19 nt, Artificial Sequence
  Description of Artificial Sequence: Synthetic oligonucleotide
aggcuugcaguccuggcca

SEQ ID NO: 1579847 - RNA, 19 nt, Artificial Sequence
  Description of Artificial Sequence: Synthetic oligonucleotide
gaugucgauguuggcauac

SEQ ID NO: 1579848 - RNA, 19 nt, Artificial Sequence
  Description of Artificial Sequence: Synthetic oligonucleotide
gacacauguccucaguaua

SEQ ID NO: 1579849 - RNA, 19 nt, Artificial Sequence
  Description of Artificial Sequence: Synthetic oligonucleotide
ugcugcagaccucaucaaa

SEQ ID NO: 1579850 - RNA, 19 nt, Artificial Sequence
  Description of Artificial Sequence: Synthetic oligonucleotide
gaauguuauaggugaugaa

SEQ ID NO: 1579851 - RNA, 19 nt, Artificial Sequence
  Description of Artificial Sequence: Synthetic oligonucleotide
ucgccaugucccucgaggc

SEQ ID NO: 1579852 - RNA, 19 nt, Artificial Sequence
  Description of Artificial Sequence: Synthetic oligonucleotide
ugucucuagggacccucug

SEQ ID NO: 1579853 - RNA, 19 nt, Artificial Sequence
  Description of Artificial Sequence: Synthetic oligonucleotide
guuuucuucgaagccuccc

SEQ ID NO: 1579854 - RNA, 19 nt, Artificial Sequence
  Description of Artificial Sequence: Synthetic oligonucleotide
acguuggggcccuccaggg

SEQ ID NO: 1579855 - RNA, 19 nt, Artificial Sequence
  Description of Artificial Sequence: Synthetic oligonucleotide
gauggcgaccagugugaag

SEQ ID NO: 1579856 - RNA, 19 nt, Artificial Sequence
  Description of Artificial Sequence: Synthetic oligonucleotide
uucuucgaagccuccccac

SEQ ID NO: 1579857 - RNA, 19 nt, Artificial Sequence
  Description of Artificial Sequence: Synthetic oligonucleotide
agcaugagagguccauaga

SEQ ID NO: 1579858 - RNA, 19 nt, Artificial Sequence
  Description of Artificial Sequence: Synthetic oligonucleotide
auggaggaggauggcgacc

SEQ ID NO: 1579859 - RNA, 19 nt, Artificial Sequence
  Description of Artificial Sequence: Synthetic oligonucleotide
ggagucgccaugucccucg

SEQ ID NO: 1579860 - RNA, 19 nt, Artificial Sequence
  Description of Artificial Sequence: Synthetic oligonucleotide
ucagggaggucagugugac

SEQ ID NO: 1579861 - RNA, 19 nt, Artificial Sequence
  Description of Artificial Sequence: Synthetic oligonucleotide
ucuccaugucaaucacggc

SEQ ID NO: 1579862 - RNA, 19 nt, Artificial Sequence
  Description of Artificial Sequence: Synthetic oligonucleotide
gccagcuccguuucggacg

SEQ ID NO: 1579863 - RNA, 19 nt, Artificial Sequence
  Description of Artificial Sequence: Synthetic oligonucleotide
gugccaagcagguguuuag

SEQ ID NO: 1579864 - RNA, 19 nt, Artificial Sequence
  Description of Artificial Sequence: Synthetic oligonucleotide
guauacuguccuuuagucu

SEQ ID NO: 1579865 - RNA, 19 nt, Artificial Sequence
  Description of Artificial Sequence: Synthetic oligonucleotide
aucugaucagccaccuguc

SEQ ID NO: 1579866 - RNA, 19 nt, Artificial Sequence
  Description of Artificial Sequence: Synthetic oligonucleotide
gugguaggcaaaaugcaga

SEQ ID NO: 1579867 - RNA, 19 nt, Artificial Sequence
  Description of Artificial Sequence: Synthetic oligonucleotide
aagcuggagccugacgugu

SEQ ID NO: 1579868 - RNA, 19 nt, Artificial Sequence
  Description of Artificial Sequence: Synthetic oligonucleotide
ccugcuucggaccugagca

SEQ ID NO: 1579869 - RNA, 19 nt, Artificial Sequence
  Description of Artificial Sequence: Synthetic oligonucleotide
aagauccccucuaccaccu

SEQ ID NO: 1579870 - RNA, 19 nt, Artificial Sequence
  Description of Artificial Sequence: Synthetic oligonucleotide
ugcccucacggauaauggu

SEQ ID NO: 1579871 - RNA, 19 nt, Artificial Sequence
  Description of Artificial Sequence: Synthetic oligonucleotide
gccagugugccacaaagga

SEQ ID NO: 1579872 - RNA, 19 nt, Artificial Sequence
  Description of Artificial Sequence: Synthetic oligonucleotide
uucggaccugagcaggcuc

SEQ ID NO: 1579873 - RNA, 19 nt, Artificial Sequence
  Description of Artificial Sequence: Synthetic oligonucleotide
gguccauagagcucaccug

SEQ ID NO: 1579874 - RNA, 19 nt, Artificial Sequence
  Description of Artificial Sequence: Synthetic oligonucleotide
gaccauagcccagcagugc

SEQ ID NO: 1579875 - RNA, 19 nt, Artificial Sequence
  Description of Artificial Sequence: Synthetic oligonucleotide
agggccucagaagagcuga

SEQ ID NO: 1579876 - RNA, 19 nt, Artificial Sequence
  Description of Artificial Sequence: Synthetic oligonucleotide
ucgcugaagcucgcgggcg

SEQ ID NO: 1579877 - RNA, 19 nt, Artificial Sequence
  Description of Artificial Sequence: Synthetic oligonucleotide
ggugcccucacggauaaug

SEQ ID NO: 1579878 - RNA, 19 nt, Artificial Sequence
  Description of Artificial Sequence: Synthetic oligonucleotide
acacccagccaguauccga

SEQ ID NO: 1579879 - RNA, 19 nt, Artificial Sequence
  Description of Artificial Sequence: Synthetic oligonucleotide
cacgcaggcgcugaugcag

SEQ ID NO: 1579880 - RNA, 19 nt, Artificial Sequence
  Description of Artificial Sequence: Synthetic oligonucleotide
gaagaccagcaugagaggu

SEQ ID NO: 1579881 - RNA, 19 nt, Artificial Sequence
  Description of Artificial Sequence: Synthetic oligonucleotide
gacacccagccaguauccg

SEQ ID NO: 1579882 - RNA, 19 nt, Artificial Sequence
  Description of Artificial Sequence: Synthetic oligonucleotide
gaagcaggugccaauggcu

SEQ ID NO: 1579883 - RNA, 19 nt, Artificial Sequence
  Description of Artificial Sequence: Synthetic oligonucleotide
agccaguauccgaagcagg

SEQ ID NO: 1579884 - RNA, 19 nt, Artificial Sequence
  Description of Artificial Sequence: Synthetic oligonucleotide
caagaccggugccaagcag

SEQ ID NO: 1579885 - RNA, 19 nt, Artificial Sequence
  Description of Artificial Sequence: Synthetic oligonucleotide
cagccaguauccgaagcag

SEQ ID NO: 1579886 - RNA, 19 nt, Artificial Sequence
  Description of Artificial Sequence: Synthetic oligonucleotide
cucacggauaaugguauca

SEQ ID NO: 1579887 - RNA, 19 nt, Artificial Sequence
  Description of Artificial Sequence: Synthetic oligonucleotide
gagcucaccugcaacuuuc

SEQ ID NO: 1579888 - RNA, 19 nt, Artificial Sequence
  Description of Artificial Sequence: Synthetic oligonucleotide
agaccauagcccagcagug

SEQ ID NO: 1579889 - RNA, 19 nt, Artificial Sequence
  Description of Artificial Sequence: Synthetic oligonucleotide
agcuccguuucggacgccg

SEQ ID NO: 1579890 - RNA, 19 nt, Artificial Sequence
  Description of Artificial Sequence: Synthetic oligonucleotide
ucccucgaggcuuuccguc

SEQ ID NO: 1579891 - RNA, 19 nt, Artificial Sequence
  Description of Artificial Sequence: Synthetic oligonucleotide
uccguuucggacgccgcug

SEQ ID NO: 1579892 - RNA, 19 nt, Artificial Sequence
  Description of Artificial Sequence: Synthetic oligonucleotide
aggacgagacacccagcca

SEQ ID NO: 1579893 - RNA, 19 nt, Artificial Sequence
  Description of Artificial Sequence: Synthetic oligonucleotide
ugguaucagaagucuucau

SEQ ID NO: 1579894 - RNA, 19 nt, Artificial Sequence
  Description of Artificial Sequence: Synthetic oligonucleotide
agcucgcgggcgugggacc

SEQ ID NO: 1579895 - RNA, 19 nt, Artificial Sequence
  Description of Artificial Sequence: Synthetic oligonucleotide
agcaggugccaauggcugu

SEQ ID NO: 1579896 - RNA, 19 nt, Artificial Sequence
  Description of Artificial Sequence: Synthetic oligonucleotide
aggagccugcuucggaccu

SEQ ID NO: 1579897 - RNA, 19 nt, Artificial Sequence
  Description of Artificial Sequence: Synthetic oligonucleotide
gaccagugugaagaccagc

SEQ ID NO: 1579898 - RNA, 19 nt, Artificial Sequence
  Description of Artificial Sequence: Synthetic oligonucleotide
ggcuuuccgucgcugaagc

SEQ ID NO: 1579899 - RNA, 19 nt, Artificial Sequence
  Description of Artificial Sequence: Synthetic oligonucleotide
guuucggacgccgcuggcc

SEQ ID NO: 1579900 - RNA, 19 nt, Artificial Sequence
  Description of Artificial Sequence: Synthetic oligonucleotide
uacgcaggguggacagccc

SEQ ID NO: 1579901 - RNA, 19 nt, Artificial Sequence
  Description of Artificial Sequence: Synthetic oligonucleotide
gccaagcagguguuuaggc

SEQ ID NO: 1579902 - RNA, 19 nt, Artificial Sequence
  Description of Artificial Sequence: Synthetic oligonucleotide
gacgugucauccauguucu

SEQ ID NO: 1579903 - RNA, 19 nt, Artificial Sequence
  Description of Artificial Sequence: Synthetic oligonucleotide
cacggauaaugguaucaga

SEQ ID NO: 1579904 - RNA, 19 nt, Artificial Sequence
  Description of Artificial Sequence: Synthetic oligonucleotide
gcugcagaggcuugcaguc

SEQ ID NO: 1579905 - RNA, 19 nt, Artificial Sequence
  Description of Artificial Sequence: Synthetic oligonucleotide
gagaaaagggguagguggu

SEQ ID NO: 1579906 - RNA, 19 nt, Artificial Sequence
  Description of Artificial Sequence: Synthetic oligonucleotide
cagcauggugaucugggca

SEQ ID NO: 1579907 - RNA, 19 nt, Artificial Sequence
  Description of Artificial Sequence: Synthetic oligonucleotide
gaggucagugugacugcag

SEQ ID NO: 1579908 - RNA, 19 nt, Artificial Sequence
  Description of Artificial Sequence: Synthetic oligonucleotide
ggugaucugggcauugcac

SEQ ID NO: 1579909 - RNA, 19 nt, Artificial Sequence
  Description of Artificial Sequence: Synthetic oligonucleotide
cugcuucggaccugagcag

SEQ ID NO: 1579910 - RNA, 19 nt, Artificial Sequence
  Description of Artificial Sequence: Synthetic oligonucleotide
agccugacgugucauccau

SEQ ID NO: 1579911 - RNA, 19 nt, Artificial Sequence
  Description of Artificial Sequence: Synthetic oligonucleotide
aggauggcgaccaguguga

SEQ ID NO: 1579912 - RNA, 19 nt, Artificial Sequence
  Description of Artificial Sequence: Synthetic oligonucleotide
ugucggcucagcugucccu

SEQ ID NO: 1579913 - RNA, 19 nt, Artificial Sequence
  Description of Artificial Sequence: Synthetic oligonucleotide
ggucucaggaugucgaugu

SEQ ID NO: 1579914 - RNA, 19 nt, Artificial Sequence
  Description of Artificial Sequence: Synthetic oligonucleotide
accauacgcaggguggaca

SEQ ID NO: 1579915 - RNA, 19 nt, Artificial Sequence
  Description of Artificial Sequence: Synthetic oligonucleotide
uugugccuuucagaagcca

SEQ ID NO: 1579916 - RNA, 19 nt, Artificial Sequence
  Description of Artificial Sequence: Synthetic oligonucleotide
uucggacgccgcuggccgg

SEQ ID NO: 1579917 - RNA, 19 nt, Artificial Sequence
  Description of Artificial Sequence: Synthetic oligonucleotide
caguauacuguccuuuagu

SEQ ID NO: 1579918 - RNA, 19 nt, Artificial Sequence
  Description of Artificial Sequence: Synthetic oligonucleotide
gaaggacgagacacccagc

SEQ ID NO: 1579919 - RNA, 19 nt, Artificial Sequence
  Description of Artificial Sequence: Synthetic oligonucleotide
aagccaagaccggugccaa

SEQ ID NO: 1579920 - RNA, 19 nt, Artificial Sequence
  Description of Artificial Sequence: Synthetic oligonucleotide
ccauacgcaggguggacag

SEQ ID NO: 1579921 - RNA, 19 nt, Artificial Sequence
  Description of Artificial Sequence: Synthetic oligonucleotide
uccccucuaccaccuugug

SEQ ID NO: 1579922 - RNA, 19 nt, Artificial Sequence
  Description of Artificial Sequence: Synthetic oligonucleotide
gcauacaagcugaaggcuc

SEQ ID NO: 1579923 - RNA, 19 nt, Artificial Sequence
  Description of Artificial Sequence: Synthetic oligonucleotide
cgugggaccagcgugagac

SEQ ID NO: 1579924 - RNA, 19 nt, Artificial Sequence
  Description of Artificial Sequence: Synthetic oligonucleotide
caugucaaucacggccgag

SEQ ID NO: 1579925 - RNA, 19 nt, Artificial Sequence
  Description of Artificial Sequence: Synthetic oligonucleotide
gaggcuuuccgucgcugaa

SEQ ID NO: 1579926 - RNA, 19 nt, Artificial Sequence
  Description of Artificial Sequence: Synthetic oligonucleotide
uugcacagguaggcaagga

SEQ ID NO: 1579927 - RNA, 19 nt, Artificial Sequence
  Description of Artificial Sequence: Synthetic oligonucleotide
gacccucugcauggguggg

SEQ ID NO: 1579928 - RNA, 19 nt, Artificial Sequence
  Description of Artificial Sequence: Synthetic oligonucleotide
caccugcaacuuucugggg

SEQ ID NO: 1579929 - RNA, 19 nt, Artificial Sequence
  Description of Artificial Sequence: Synthetic oligonucleotide
gagccugacgugucaucca

SEQ ID NO: 1579930 - RNA, 19 nt, Artificial Sequence
  Description of Artificial Sequence: Synthetic oligonucleotide
acgcaggguggacagccca

SEQ ID NO: 1579931 - RNA, 19 nt, Artificial Sequence
  Description of Artificial Sequence: Synthetic oligonucleotide
ggguggacagcccacccac

SEQ ID NO: 1579932 - RNA, 19 nt, Artificial Sequence
  Description of Artificial Sequence: Synthetic oligonucleotide
cacccagccaguauccgaa

SEQ ID NO: 1579933 - RNA, 19 nt, Artificial Sequence
  Description of Artificial Sequence: Synthetic oligonucleotide
acgugucauccauguucuc

SEQ ID NO: 1579934 - RNA, 19 nt, Artificial Sequence
  Description of Artificial Sequence: Synthetic oligonucleotide
gccaagaccggugccaagc

SEQ ID NO: 1579935 - RNA, 19 nt, Artificial Sequence
  Description of Artificial Sequence: Synthetic oligonucleotide
gugugaagaccagcaugag

SEQ ID NO: 1579936 - RNA, 19 nt, Artificial Sequence
  Description of Artificial Sequence: Synthetic oligonucleotide
gcgaccagugugaagacca

SEQ ID NO: 1579937 - RNA, 19 nt, Artificial Sequence
  Description of Artificial Sequence: Synthetic oligonucleotide
cuccacaucaaaguagggu

SEQ ID NO: 1579938 - RNA, 19 nt, Artificial Sequence
  Description of Artificial Sequence: Synthetic oligonucleotide
cagugguugcugcagaccu

SEQ ID NO: 1579939 - RNA, 19 nt, Artificial Sequence
  Description of Artificial Sequence: Synthetic oligonucleotide
agggauggccaaggauuuc

SEQ ID NO: 1579940 - RNA, 19 nt, Artificial Sequence
  Description of Artificial Sequence: Synthetic oligonucleotide
aagagggcaugaaggugaa

SEQ ID NO: 1579941 - RNA, 19 nt, Artificial Sequence
  Description of Artificial Sequence: Synthetic oligonucleotide
gcaaaggcucagugguugc

SEQ ID NO: 1579942 - RNA, 19 nt, Artificial Sequence
  Description of Artificial Sequence: Synthetic oligonucleotide
agcugcgucggcauccacu

SEQ ID NO: 1579943 - RNA, 19 nt, Artificial Sequence
  Description of Artificial Sequence: Synthetic oligonucleotide
gagggccucagaagagcug

SEQ ID NO: 1579944 - RNA, 19 nt, Artificial Sequence
  Description of Artificial Sequence: Synthetic oligonucleotide
ucgaggcuuuccgucgcug

SEQ ID NO: 1579945 - RNA, 19 nt, Artificial Sequence
  Description of Artificial Sequence: Synthetic oligonucleotide
ggugaugaacaggacaaua

SEQ ID NO: 1579946 - RNA, 19 nt, Artificial Sequence
  Description of Artificial Sequence: Synthetic oligonucleotide
agccaagaccggugccaag

SEQ ID NO: 1579947 - RNA, 19 nt, Artificial Sequence
  Description of Artificial Sequence: Synthetic oligonucleotide
agucgccaugucccucgag

SEQ ID NO: 1579948 - RNA, 19 nt, Artificial Sequence
  Description of Artificial Sequence: Synthetic oligonucleotide
ggcaugaaggugaauguua

SEQ ID NO: 1579949 - RNA, 19 nt, Artificial Sequence
  Description of Artificial Sequence: Synthetic oligonucleotide
caugaaggugaauguuaua

SEQ ID NO: 1579950 - RNA, 19 nt, Artificial Sequence
  Description of Artificial Sequence: Synthetic oligonucleotide
uggcgaccagugugaagac

SEQ ID NO: 1579951 - RNA, 19 nt, Artificial Sequence
  Description of Artificial Sequence: Synthetic oligonucleotide
cauacgcaggguggacagc

SEQ ID NO: 1579952 - RNA, 19 nt, Artificial Sequence
  Description of Artificial Sequence: Synthetic oligonucleotide
cccucgaggcuuuccgucg

SEQ ID NO: 1579953 - RNA, 19 nt, Artificial Sequence
  Description of Artificial Sequence: Synthetic oligonucleotide
ucgcugcuauugccuuugc

SEQ ID NO: 1579954 - RNA, 19 nt, Artificial Sequence
  Description of Artificial Sequence: Synthetic oligonucleotide
gggauggccaaggauuuca

SEQ ID NO: 1579955 - RNA, 19 nt, Artificial Sequence
  Description of Artificial Sequence: Synthetic oligonucleotide
gagcaggcuccacaucaaa

SEQ ID NO: 1579956 - RNA, 19 nt, Artificial Sequence
  Description of Artificial Sequence: Synthetic oligonucleotide
agaccggugccaagcaggu

SEQ ID NO: 1579957 - RNA, 19 nt, Artificial Sequence
  Description of Artificial Sequence: Synthetic oligonucleotide
agacccgggccggagagaa

SEQ ID NO: 1579958 - RNA, 19 nt, Artificial Sequence
  Description of Artificial Sequence: Synthetic oligonucleotide
cuaccaccuugugguaggc

SEQ ID NO: 1579959 - RNA, 19 nt, Artificial Sequence
  Description of Artificial Sequence: Synthetic oligonucleotide
gugggaccagcgugagacc

SEQ ID NO: 1579960 - RNA, 19 nt, Artificial Sequence
  Description of Artificial Sequence: Synthetic oligonucleotide
ggaccagcgugagacccgg

SEQ ID NO: 1579961 - RNA, 19 nt, Artificial Sequence
  Description of Artificial Sequence: Synthetic oligonucleotide
guauccgaagcaggugcca

SEQ ID NO: 1579962 - RNA, 19 nt, Artificial Sequence
  Description of Artificial Sequence: Synthetic oligonucleotide
ugggacguuggggcccucc

SEQ ID NO: 1579963 - RNA, 19 nt, Artificial Sequence
  Description of Artificial Sequence: Synthetic oligonucleotide
gcagggucgcugcuauugc

SEQ ID NO: 1579964 - RNA, 19 nt, Artificial Sequence
  Description of Artificial Sequence: Synthetic oligonucleotide
ccaccugucggcucagcug

SEQ ID NO: 1579965 - RNA, 19 nt, Artificial Sequence
  Description of Artificial Sequence: Synthetic oligonucleotide
ggacguuggggcccuccag

SEQ ID NO: 1579966 - RNA, 19 nt, Artificial Sequence
  Description of Artificial Sequence: Synthetic oligonucleotide
agggacccucugcaugggu

SEQ ID NO: 1579967 - RNA, 19 nt, Artificial Sequence
  Description of Artificial Sequence: Synthetic oligonucleotide
gaagcucgcgggcguggga

SEQ ID NO: 1579968 - RNA, 19 nt, Artificial Sequence
  Description of Artificial Sequence: Synthetic oligonucleotide
ccgaagcaggugccaaugg

SEQ ID NO: 1579969 - RNA, 19 nt, Artificial Sequence
  Description of Artificial Sequence: Synthetic oligonucleotide
ccagccaguauccgaagca

SEQ ID NO: 1579970 - RNA, 19 nt, Artificial Sequence
  Description of Artificial Sequence: Synthetic oligonucleotide
ucggacgccgcuggccggc

SEQ ID NO: 1579971 - RNA, 19 nt, Artificial Sequence
  Description of Artificial Sequence: Synthetic oligonucleotide
uggggccuacaguccuuga

SEQ ID NO: 1579972 - RNA, 19 nt, Artificial Sequence
  Description of Artificial Sequence: Synthetic oligonucleotide
gucagggauggccaaggau

SEQ ID NO: 1579973 - RNA, 19 nt, Artificial Sequence
  Description of Artificial Sequence: Synthetic oligonucleotide
gccugcuucggaccugagc

SEQ ID NO: 1579974 - RNA, 19 nt, Artificial Sequence
  Description of Artificial Sequence: Synthetic oligonucleotide
gccuacaguccuugacacc

SEQ ID NO: 1579975 - RNA, 19 nt, Artificial Sequence
  Description of Artificial Sequence: Synthetic oligonucleotide
agcccggcagcagggagca

SEQ ID NO: 1579976 - RNA, 19 nt, Artificial Sequence
  Description of Artificial Sequence: Synthetic oligonucleotide
augucucuagggacccucu

SEQ ID NO: 1579977 - RNA, 19 nt, Artificial Sequence
  Description of Artificial Sequence: Synthetic oligonucleotide
guggggccuacaguccuug

SEQ ID NO: 1579978 - RNA, 19 nt, Artificial Sequence
  Description of Artificial Sequence: Synthetic oligonucleotide
gggucucaggaugucgaug

SEQ ID NO: 1579979 - RNA, 19 nt, Artificial Sequence
  Description of Artificial Sequence: Synthetic oligonucleotide
gggaccagcgugagacccg

SEQ ID NO: 1579980 - RNA, 19 nt, Artificial Sequence
  Description of Artificial Sequence: Synthetic oligonucleotide
ccuuucaugcccagaaacu

SEQ ID NO: 1579981 - RNA, 19 nt, Artificial Sequence
  Description of Artificial Sequence: Synthetic oligonucleotide
caccauacgcaggguggac

SEQ ID NO: 1579982 - RNA, 19 nt, Artificial Sequence
  Description of Artificial Sequence: Synthetic oligonucleotide
ggccucagaagagcugacc

SEQ ID NO: 1579983 - RNA, 19 nt, Artificial Sequence
  Description of Artificial Sequence: Synthetic oligonucleotide
aggcgcugaugcagcuccc

SEQ ID NO: 1579984 - RNA, 19 nt, Artificial Sequence
  Description of Artificial Sequence: Synthetic oligonucleotide
gugagacccgggccggaga

SEQ ID NO: 1579985 - RNA, 19 nt, Artificial Sequence
  Description of Artificial Sequence: Synthetic oligonucleotide
ggcauugcacagguaggca

SEQ ID NO: 1579986 - RNA, 19 nt, Artificial Sequence
  Description of Artificial Sequence: Synthetic oligonucleotide
ccguuucggacgccgcugg

SEQ ID NO: 1579987 - RNA, 19 nt, Artificial Sequence
  Description of Artificial Sequence: Synthetic oligonucleotide
ggcuugcaguccuggccag

SEQ ID NO: 1579988 - RNA, 19 nt, Artificial Sequence
  Description of Artificial Sequence: Synthetic oligonucleotide
cagggugcccucacggaua

SEQ ID NO: 1579989 - RNA, 19 nt, Artificial Sequence
  Description of Artificial Sequence: Synthetic oligonucleotide
ggaaguugaccaucuugau

SEQ ID NO: 1579990 - RNA, 19 nt, Artificial Sequence
  Description of Artificial Sequence: Synthetic oligonucleotide
gcuucggaccugagcaggc

SEQ ID NO: 1579991 - RNA, 19 nt, Artificial Sequence
  Description of Artificial Sequence: Synthetic oligonucleotide
ggugccaagcagguguuua

SEQ ID NO: 1579992 - RNA, 19 nt, Artificial Sequence
  Description of Artificial Sequence: Synthetic oligonucleotide
gacgagacacccagccagu

SEQ ID NO: 1579993 - RNA, 19 nt, Artificial Sequence
  Description of Artificial Sequence: Synthetic oligonucleotide
cgaagcuggagccugacgu

SEQ ID NO: 1579994 - RNA, 19 nt, Artificial Sequence
  Description of Artificial Sequence: Synthetic oligonucleotide
gaccggugccaagcaggug

SEQ ID NO: 1579995 - RNA, 19 nt, Artificial Sequence
  Description of Artificial Sequence: Synthetic oligonucleotide
ccucgaggcuuuccgucgc

SEQ ID NO: 1579996 - RNA, 19 nt, Artificial Sequence
  Description of Artificial Sequence: Synthetic oligonucleotide
gagucgccaugucccucga

SEQ ID NO: 1579997 - RNA, 19 nt, Artificial Sequence
  Description of Artificial Sequence: Synthetic oligonucleotide
cagggauggccaaggauuu

SEQ ID NO: 1579998 - RNA, 19 nt, Artificial Sequence
  Description of Artificial Sequence: Synthetic oligonucleotide
gaccagcgugagacccggg

SEQ ID NO: 1579999 - RNA, 19 nt, Artificial Sequence
  Description of Artificial Sequence: Synthetic oligonucleotide
gcuugcaguccuggccagg

SEQ ID NO: 1580000 - RNA, 19 nt, Artificial Sequence
  Description of Artificial Sequence: Synthetic oligonucleotide
gacccacauucugcaccug

SEQ ID NO: 1580001 - RNA, 19 nt, Artificial Sequence
  Description of Artificial Sequence: Synthetic oligonucleotide
gccaguauccgaagcaggu

SEQ ID NO: 1580002 - RNA, 19 nt, Artificial Sequence
  Description of Artificial Sequence: Synthetic oligonucleotide
guagguggugagggccuca

SEQ ID NO: 1580003 - RNA, 19 nt, Artificial Sequence
  Description of Artificial Sequence: Synthetic oligonucleotide
ggcgcugaugcagcucccc

SEQ ID NO: 1580004 - RNA, 19 nt, Artificial Sequence
  Description of Artificial Sequence: Synthetic oligonucleotide
acuccgggccagcuccguu

SEQ ID NO: 1580005 - RNA, 19 nt, Artificial Sequence
  Description of Artificial Sequence: Synthetic oligonucleotide
ccucugcaugggugggacg

SEQ ID NO: 1580006 - RNA, 19 nt, Artificial Sequence
  Description of Artificial Sequence: Synthetic oligonucleotide
cgcgggagucgccaugucc

SEQ ID NO: 1580007 - RNA, 19 nt, Artificial Sequence
  Description of Artificial Sequence: Synthetic oligonucleotide
gggugggacguuggggccc

SEQ ID NO: 1580008 - RNA, 19 nt, Artificial Sequence
  Description of Artificial Sequence: Synthetic oligonucleotide
acgagacacccagccagua

SEQ ID NO: 1580009 - RNA, 19 nt, Artificial Sequence
  Description of Artificial Sequence: Synthetic oligonucleotide
ucgcgggcgugggaccagc

SEQ ID NO: 1580010 - RNA, 19 nt, Artificial Sequence
  Description of Artificial Sequence: Synthetic oligonucleotide
gcccucacggauaauggua

SEQ ID NO: 1580011 - RNA, 19 nt, Artificial Sequence
  Description of Artificial Sequence: Synthetic oligonucleotide
caaaggcucagugguugcu

SEQ ID NO: 1580012 - RNA, 19 nt, Artificial Sequence
  Description of Artificial Sequence: Synthetic oligonucleotide
gacccgggccggagagaag

SEQ ID NO: 1580013 - RNA, 19 nt, Artificial Sequence
  Description of Artificial Sequence: Synthetic oligonucleotide
gcugcgucggcauccacuu

SEQ ID NO: 1580014 - RNA, 19 nt, Artificial Sequence
  Description of Artificial Sequence: Synthetic oligonucleotide
gaaugucucuagggacccu

SEQ ID NO: 1580015 - RNA, 19 nt, Artificial Sequence
  Description of Artificial Sequence: Synthetic oligonucleotide
ccaagaccggugccaagca

SEQ ID NO: 1580016 - RNA, 19 nt, Artificial Sequence
  Description of Artificial Sequence: Synthetic oligonucleotide
cccaucagggugcccucac

SEQ ID NO: 1580017 - RNA, 19 nt, Artificial Sequence
  Description of Artificial Sequence: Synthetic oligonucleotide
gagacccgggccggagaga

SEQ ID NO: 1580018 - RNA, 19 nt, Artificial Sequence
  Description of Artificial Sequence: Synthetic oligonucleotide
cugcgucggcauccacuuc

SEQ ID NO: 1580019 - RNA, 19 nt, Artificial Sequence
  Description of Artificial Sequence: Synthetic oligonucleotide
cuccguuucggacgccgcu

SEQ ID NO: 1580020 - RNA, 19 nt, Artificial Sequence
  Description of Artificial Sequence: Synthetic oligonucleotide
ggaugucgauguuggcaua

SEQ ID NO: 1580021 - RNA, 19 nt, Artificial Sequence
  Description of Artificial Sequence: Synthetic oligonucleotide
ggcgugggaccagcgugag

SEQ ID NO: 1580022 - RNA, 19 nt, Artificial Sequence
  Description of Artificial Sequence: Synthetic oligonucleotide
ccaaggauuucagggaggu

SEQ ID NO: 1580023 - RNA, 19 nt, Artificial Sequence
  Description of Artificial Sequence: Synthetic oligonucleotide
cucuagggacccucugcau

SEQ ID NO: 1580024 - RNA, 19 nt, Artificial Sequence
  Description of Artificial Sequence: Synthetic oligonucleotide
gcuccguuucggacgccgc

SEQ ID NO: 1580025 - RNA, 19 nt, Artificial Sequence
  Description of Artificial Sequence: Synthetic oligonucleotide
ccacaaaggagcagccgcu

SEQ ID NO: 1580026 - RNA, 19 nt, Artificial Sequence
  Description of Artificial Sequence: Synthetic oligonucleotide
cucgcgggcgugggaccag

SEQ ID NO: 1580027 - RNA, 19 nt, Artificial Sequence
  Description of Artificial Sequence: Synthetic oligonucleotide
caugucccucgaggcuuuc

SEQ ID NO: 1580028 - RNA, 19 nt, Artificial Sequence
  Description of Artificial Sequence: Synthetic oligonucleotide
gccugacgugucauccaug

SEQ ID NO: 1580029 - RNA, 19 nt, Artificial Sequence
  Description of Artificial Sequence: Synthetic oligonucleotide
cagcugcgucggcauccac

SEQ ID NO: 1580030 - RNA, 19 nt, Artificial Sequence
  Description of Artificial Sequence: Synthetic oligonucleotide
ccaugucaaucacggccga

SEQ ID NO: 1580031 - RNA, 19 nt, Artificial Sequence
  Description of Artificial Sequence: Synthetic oligonucleotide
cgaggcuuuccgucgcuga

SEQ ID NO: 1580032 - RNA, 19 nt, Artificial Sequence
  Description of Artificial Sequence: Synthetic oligonucleotide
ccaccauacgcagggugga

SEQ ID NO: 1580033 - RNA, 19 nt, Artificial Sequence
  Description of Artificial Sequence: Synthetic oligonucleotide
ggaccugagcaggcuccac

SEQ ID NO: 1580034 - RNA, 19 nt, Artificial Sequence
  Description of Artificial Sequence: Synthetic oligonucleotide
cucgaggcuuuccgucgcu

SEQ ID NO: 1580035 - RNA, 19 nt, Artificial Sequence
  Description of Artificial Sequence: Synthetic oligonucleotide
ggauggcgaccagugugaa

SEQ ID NO: 1580036 - RNA, 19 nt, Artificial Sequence
  Description of Artificial Sequence: Synthetic oligonucleotide
gggcaugaaggugaauguu

SEQ ID NO: 1580037 - RNA, 19 nt, Artificial Sequence
  Description of Artificial Sequence: Synthetic oligonucleotide
ccucgaagcuggagccuga

SEQ ID NO: 1580038 - RNA, 19 nt, Artificial Sequence
  Description of Artificial Sequence: Synthetic oligonucleotide
cugacgugucauccauguu

SEQ ID NO: 1580039 - RNA, 19 nt, Artificial Sequence
  Description of Artificial Sequence: Synthetic oligonucleotide
gcuuuccgucgcugaagcu

SEQ ID NO: 1580040 - RNA, 19 nt, Artificial Sequence
  Description of Artificial Sequence: Synthetic oligonucleotide
uggggcccuccaggguguc

SEQ ID NO: 1580041 - RNA, 19 nt, Artificial Sequence
  Description of Artificial Sequence: Synthetic oligonucleotide
ccgggccagcuccguuucg

SEQ ID NO: 1580042 - RNA, 19 nt, Artificial Sequence
  Description of Artificial Sequence: Synthetic oligonucleotide
gggucgcugcuauugccuu

SEQ ID NO: 1580043 - RNA, 19 nt, Artificial Sequence
  Description of Artificial Sequence: Synthetic oligonucleotide
ccucaguauacuguccuuu

SEQ ID NO: 1580044 - RNA, 19 nt, Artificial Sequence
  Description of Artificial Sequence: Synthetic oligonucleotide
cagcuccguuucggacgcc

SEQ ID NO: 1580045 - RNA, 19 nt, Artificial Sequence
  Description of Artificial Sequence: Synthetic oligonucleotide
gcucgcgggcgugggacca

SEQ ID NO: 1580046 - RNA, 19 nt, Artificial Sequence
  Description of Artificial Sequence: Synthetic oligonucleotide
ccagcaugagagguccaua

SEQ ID NO: 1580047 - RNA, 19 nt, Artificial Sequence
  Description of Artificial Sequence: Synthetic oligonucleotide
ggggcccuccagggugucc

SEQ ID NO: 1580048 - RNA, 19 nt, Artificial Sequence
  Description of Artificial Sequence: Synthetic oligonucleotide
ggugggacguuggggcccu

SEQ ID NO: 1580049 - RNA, 19 nt, Artificial Sequence
  Description of Artificial Sequence: Synthetic oligonucleotide
ccccacuccgggccagcuc

SEQ ID NO: 1580050 - RNA, 19 nt, Artificial Sequence
  Description of Artificial Sequence: Synthetic oligonucleotide
cgcgggcgugggaccagcg

SEQ ID NO: 1580051 - RNA, 19 nt, Artificial Sequence
  Description of Artificial Sequence: Synthetic oligonucleotide
gcgugggaccagcgugaga

SEQ ID NO: 1580052 - RNA, 19 nt, Artificial Sequence
  Description of Artificial Sequence: Synthetic oligonucleotide
gcgggcgugggaccagcgu

SEQ ID NO: 1580053 - RNA, 19 nt, Artificial Sequence
  Description of Artificial Sequence: Synthetic oligonucleotide
cccgggccggagagaagga

SEQ ID NO: 1580054 - RNA, 19 nt, Artificial Sequence
  Description of Artificial Sequence: Synthetic oligonucleotide
cccgcccuggauguuuucu

SEQ ID NO: 1580055 - RNA, 19 nt, Artificial Sequence
  Description of Artificial Sequence: Synthetic oligonucleotide
ccccgcccuggauguuuuc

SEQ ID NO: 1580056 - RNA, 19 nt, Artificial Sequence
  Description of Artificial Sequence: Synthetic oligonucleotide
cgccgcgggagucgccaug

SEQ ID NO: 1580057 - RNA, 19 nt, Artificial Sequence
  Description of Artificial Sequence: Synthetic oligonucleotide
cgccaugucccucgaggcu

SEQ ID NO: 1580058 - RNA, 19 nt, Artificial Sequence
  Description of Artificial Sequence: Synthetic oligonucleotide
gguggggccuacaguccuu

SEQ ID NO: 1580059 - RNA, 19 nt, Artificial Sequence
  Description of Artificial Sequence: Synthetic oligonucleotide
ccgcgggagucgccauguc

SEQ ID NO: 1580060 - RNA, 19 nt, Artificial Sequence
  Description of Artificial Sequence: Synthetic oligonucleotide
cggaccugagcaggcucca

SEQ ID NO: 1580061 - RNA, 19 nt, Artificial Sequence
  Description of Artificial Sequence: Synthetic oligonucleotide
cguuggggcccuccagggu

SEQ ID NO: 1580062 - RNA, 19 nt, Artificial Sequence
  Description of Artificial Sequence: Synthetic oligonucleotide
cggacgccgcuggccggcg

SEQ ID NO: 1580063 - RNA, 19 nt, Artificial Sequence
  Description of Artificial Sequence: Synthetic oligonucleotide
gcgucggcauccacuucuu

SEQ ID NO: 1580064 - RNA, 19 nt, Artificial Sequence
  Description of Artificial Sequence: Synthetic oligonucleotide
gcccggcagcagggagcac

SEQ ID NO: 1580065 - RNA, 19 nt, Artificial Sequence
  Description of Artificial Sequence: Synthetic oligonucleotide
gcgccgcgggagucgccau

SEQ ID NO: 1580066 - RNA, 19 nt, Artificial Sequence
  Description of Artificial Sequence: Synthetic oligonucleotide
gggugcccucacggauaau

SEQ ID NO: 1580067 - RNA, 19 nt, Artificial Sequence
  Description of Artificial Sequence: Synthetic oligonucleotide
auugaaauuacaaaacugg

SEQ ID NO: 1580068 - RNA, 19 nt, Artificial Sequence
  Description of Artificial Sequence: Synthetic oligonucleotide
ucaagcaucaccauggaga

SEQ ID NO: 1580069 - RNA, 19 nt, Artificial Sequence
  Description of Artificial Sequence: Synthetic oligonucleotide
gagauuucuacaaagacag

SEQ ID NO: 1580070 - RNA, 19 nt, Artificial Sequence
  Description of Artificial Sequence: Synthetic oligonucleotide
gcuaccauaaucuugauag

SEQ ID NO: 1580071 - RNA, 19 nt, Artificial Sequence
  Description of Artificial Sequence: Synthetic oligonucleotide
guauuugucacacaggagc

SEQ ID NO: 1580072 - RNA, 19 nt, Artificial Sequence
  Description of Artificial Sequence: Synthetic oligonucleotide
aaacuggcuauguacauag

SEQ ID NO: 1580073 - RNA, 19 nt, Artificial Sequence
  Description of Artificial Sequence: Synthetic oligonucleotide
aucagauacagccaucccc

SEQ ID NO: 1580074 - RNA, 19 nt, Artificial Sequence
  Description of Artificial Sequence: Synthetic oligonucleotide
ucucauuucaucuauuuac

SEQ ID NO: 1580075 - RNA, 19 nt, Artificial Sequence
  Description of Artificial Sequence: Synthetic oligonucleotide
cagauuggcacuuagagac

SEQ ID NO: 1580076 - RNA, 19 nt, Artificial Sequence
  Description of Artificial Sequence: Synthetic oligonucleotide
gacagauuggcacuuagag

SEQ ID NO: 1580077 - RNA, 19 nt, Artificial Sequence
  Description of Artificial Sequence: Synthetic oligonucleotide
uucuuaacaucaacaaagg

SEQ ID NO: 1580078 - RNA, 19 nt, Artificial Sequence
  Description of Artificial Sequence: Synthetic oligonucleotide
uaguauuugucacacagga

SEQ ID NO: 1580079 - RNA, 19 nt, Artificial Sequence
  Description of Artificial Sequence: Synthetic oligonucleotide
uugaaauuacaaaacuggc

SEQ ID NO: 1580080 - RNA, 19 nt, Artificial Sequence
  Description of Artificial Sequence: Synthetic oligonucleotide
uguacauagaauguucuag

SEQ ID NO: 1580081 - RNA, 19 nt, Artificial Sequence
  Description of Artificial Sequence: Synthetic oligonucleotide
uauaugacagcaucugucc

SEQ ID NO: 1580082 - RNA, 19 nt, Artificial Sequence
  Description of Artificial Sequence: Synthetic oligonucleotide
gauacagccauccccaacc

SEQ ID NO: 1580083 - RNA, 19 nt, Artificial Sequence
  Description of Artificial Sequence: Synthetic oligonucleotide
uagagaccaccacagaugg

SEQ ID NO: 1580084 - RNA, 19 nt, Artificial Sequence
  Description of Artificial Sequence: Synthetic oligonucleotide
aauguucuagggaugaguc

SEQ ID NO: 1580085 - RNA, 19 nt, Artificial Sequence
  Description of Artificial Sequence: Synthetic oligonucleotide
uacaaaacuggcuauguac

SEQ ID NO: 1580086 - RNA, 19 nt, Artificial Sequence
  Description of Artificial Sequence: Synthetic oligonucleotide
guuguagacaggcagacgc

SEQ ID NO: 1580087 - RNA, 19 nt, Artificial Sequence
  Description of Artificial Sequence: Synthetic oligonucleotide
acuuccaucaaagaugagg

SEQ ID NO: 1580088 - RNA, 19 nt, Artificial Sequence
  Description of Artificial Sequence: Synthetic oligonucleotide
uacauagaauguucuaggg

SEQ ID NO: 1580089 - RNA, 19 nt, Artificial Sequence
  Description of Artificial Sequence: Synthetic oligonucleotide
uuagagaccaccacagaug

SEQ ID NO: 1580090 - RNA, 19 nt, Artificial Sequence
  Description of Artificial Sequence: Synthetic oligonucleotide
uuuaccacaucagacacgc

SEQ ID NO: 1580091 - RNA, 19 nt, Artificial Sequence
  Description of Artificial Sequence: Synthetic oligonucleotide
uggcuauguacauagaaug

SEQ ID NO: 1580092 - RNA, 19 nt, Artificial Sequence
  Description of Artificial Sequence: Synthetic oligonucleotide
gauuucuacaaagacagac

SEQ ID NO: 1580093 - RNA, 19 nt, Artificial Sequence
  Description of Artificial Sequence: Synthetic oligonucleotide
guacauagaauguucuagg

SEQ ID NO: 1580094 - RNA, 19 nt, Artificial Sequence
  Description of Artificial Sequence: Synthetic oligonucleotide
aagggugaggcauugaaau

SEQ ID NO: 1580095 - RNA, 19 nt, Artificial Sequence
  Description of Artificial Sequence: Synthetic oligonucleotide
uguguuuggggugagcugg

SEQ ID NO: 1580096 - RNA, 19 nt, Artificial Sequence
  Description of Artificial Sequence: Synthetic oligonucleotide
agggccuugagauauauga

SEQ ID NO: 1580097 - RNA, 19 nt, Artificial Sequence
  Description of Artificial Sequence: Synthetic oligonucleotide
uaaagcucaggcaggagug

SEQ ID NO: 1580098 - RNA, 19 nt, Artificial Sequence
  Description of Artificial Sequence: Synthetic oligonucleotide
aucaggugaagccauguag

SEQ ID NO: 1580099 - RNA, 19 nt, Artificial Sequence
  Description of Artificial Sequence: Synthetic oligonucleotide
auauaugacagcaucuguc

SEQ ID NO: 1580100 - RNA, 19 nt, Artificial Sequence
  Description of Artificial Sequence: Synthetic oligonucleotide
acguagaccaugugaaugg

SEQ ID NO: 1580101 - RNA, 19 nt, Artificial Sequence
  Description of Artificial Sequence: Synthetic oligonucleotide
uuuuaccacaucagacacg

SEQ ID NO: 1580102 - RNA, 19 nt, Artificial Sequence
  Description of Artificial Sequence: Synthetic oligonucleotide
acacgcugcaguuaggguc

SEQ ID NO: 1580103 - RNA, 19 nt, Artificial Sequence
  Description of Artificial Sequence: Synthetic oligonucleotide
aaauuacaaaacuggcuau

SEQ ID NO: 1580104 - RNA, 19 nt, Artificial Sequence
  Description of Artificial Sequence: Synthetic oligonucleotide
aauguguuuggggugagcu

SEQ ID NO: 1580105 - RNA, 19 nt, Artificial Sequence
  Description of Artificial Sequence: Synthetic oligonucleotide
aggcauugaaauuacaaaa

SEQ ID NO: 1580106 - RNA, 19 nt, Artificial Sequence
  Description of Artificial Sequence: Synthetic oligonucleotide
ucaggugaagccauguagu

SEQ ID NO: 1580107 - RNA, 19 nt, Artificial Sequence
  Description of Artificial Sequence: Synthetic oligonucleotide
guugguacuuccaucaaag

SEQ ID NO: 1580108 - RNA, 19 nt, Artificial Sequence
  Description of Artificial Sequence: Synthetic oligonucleotide
aaggacacagcccaguaua

SEQ ID NO: 1580109 - RNA, 19 nt, Artificial Sequence
  Description of Artificial Sequence: Synthetic oligonucleotide
aguauaccuguacagggug

SEQ ID NO: 1580110 - RNA, 19 nt, Artificial Sequence
  Description of Artificial Sequence: Synthetic oligonucleotide
uccaccguggcccgcaugg

SEQ ID NO: 1580111 - RNA, 19 nt, Artificial Sequence
  Description of Artificial Sequence: Synthetic oligonucleotide
ugguacuuccaucaaagau

SEQ ID NO: 1580112 - RNA, 19 nt, Artificial Sequence
  Description of Artificial Sequence: Synthetic oligonucleotide
uguacacucggcaggggag

SEQ ID NO: 1580113 - RNA, 19 nt, Artificial Sequence
  Description of Artificial Sequence: Synthetic oligonucleotide
ucauuucaucuauuuacug

SEQ ID NO: 1580114 - RNA, 19 nt, Artificial Sequence
  Description of Artificial Sequence: Synthetic oligonucleotide
caggggauagggaaggucc

SEQ ID NO: 1580115 - RNA, 19 nt, Artificial Sequence
  Description of Artificial Sequence: Synthetic oligonucleotide
uucaucuauuuacugugga

SEQ ID NO: 1580116 - RNA, 19 nt, Artificial Sequence
  Description of Artificial Sequence: Synthetic oligonucleotide
acauagaauguucuaggga

SEQ ID NO: 1580117 - RNA, 19 nt, Artificial Sequence
  Description of Artificial Sequence: Synthetic oligonucleotide
ucuagaucaggugaagcca

SEQ ID NO: 1580118 - RNA, 19 nt, Artificial Sequence
  Description of Artificial Sequence: Synthetic oligonucleotide
uagcugacccgauacgugg

SEQ ID NO: 1580119 - RNA, 19 nt, Artificial Sequence
  Description of Artificial Sequence: Synthetic oligonucleotide
uggguugguacuuccauca

SEQ ID NO: 1580120 - RNA, 19 nt, Artificial Sequence
  Description of Artificial Sequence: Synthetic oligonucleotide
aaucuugauaggagggagg

SEQ ID NO: 1580121 - RNA, 19 nt, Artificial Sequence
  Description of Artificial Sequence: Synthetic oligonucleotide
cagggugugggaauaaggc

SEQ ID NO: 1580122 - RNA, 19 nt, Artificial Sequence
  Description of Artificial Sequence: Synthetic oligonucleotide
cacuuagagaccaccacag

SEQ ID NO: 1580123 - RNA, 19 nt, Artificial Sequence
  Description of Artificial Sequence: Synthetic oligonucleotide
agcaucaccauggagacca

SEQ ID NO: 1580124 - RNA, 19 nt, Artificial Sequence
  Description of Artificial Sequence: Synthetic oligonucleotide
uggggucuaaagcucaggc

SEQ ID NO: 1580125 - RNA, 19 nt, Artificial Sequence
  Description of Artificial Sequence: Synthetic oligonucleotide
gggucuaaagcucaggcag

SEQ ID NO: 1580126 - RNA, 19 nt, Artificial Sequence
  Description of Artificial Sequence: Synthetic oligonucleotide
uccacccuucuuaacauca

SEQ ID NO: 1580127 - RNA, 19 nt, Artificial Sequence
  Description of Artificial Sequence: Synthetic oligonucleotide
cauagagaagagcugcaag

SEQ ID NO: 1580128 - RNA, 19 nt, Artificial Sequence
  Description of Artificial Sequence: Synthetic oligonucleotide
cuugagauauaugacagca

SEQ ID NO: 1580129 - RNA, 19 nt, Artificial Sequence
  Description of Artificial Sequence: Synthetic oligonucleotide
aucuugauaggagggaggg

SEQ ID NO: 1580130 - RNA, 19 nt, Artificial Sequence
  Description of Artificial Sequence: Synthetic oligonucleotide
cauacccaaagccagccag

SEQ ID NO: 1580131 - RNA, 19 nt, Artificial Sequence
  Description of Artificial Sequence: Synthetic oligonucleotide
cacugagauuucuacaaag

SEQ ID NO: 1580132 - RNA, 19 nt, Artificial Sequence
  Description of Artificial Sequence: Synthetic oligonucleotide
gcagacuuguuguagacag

SEQ ID NO: 1580133 - RNA, 19 nt, Artificial Sequence
  Description of Artificial Sequence: Synthetic oligonucleotide
gaaauggggaguccauacc

SEQ ID NO: 1580134 - RNA, 19 nt, Artificial Sequence
  Description of Artificial Sequence: Synthetic oligonucleotide
caagcaucaccauggagac

SEQ ID NO: 1580135 - RNA, 19 nt, Artificial Sequence
  Description of Artificial Sequence: Synthetic oligonucleotide
acaucagacacgcugcagu

SEQ ID NO: 1580136 - RNA, 19 nt, Artificial Sequence
  Description of Artificial Sequence: Synthetic oligonucleotide
ucacccaaggcuaccauaa

SEQ ID NO: 1580137 - RNA, 19 nt, Artificial Sequence
  Description of Artificial Sequence: Synthetic oligonucleotide
ucaccggccuccuggaugg

SEQ ID NO: 1580138 - RNA, 19 nt, Artificial Sequence
  Description of Artificial Sequence: Synthetic oligonucleotide
agacgcuccacugaguccg

SEQ ID NO: 1580139 - RNA, 19 nt, Artificial Sequence
  Description of Artificial Sequence: Synthetic oligonucleotide
acagaugggucacugagau

SEQ ID NO: 1580140 - RNA, 19 nt, Artificial Sequence
  Description of Artificial Sequence: Synthetic oligonucleotide
gaggcauugaaauuacaaa

SEQ ID NO: 1580141 - RNA, 19 nt, Artificial Sequence
  Description of Artificial Sequence: Synthetic oligonucleotide
cauguaguauuugucacac

SEQ ID NO: 1580142 - RNA, 19 nt, Artificial Sequence
  Description of Artificial Sequence: Synthetic oligonucleotide
uucagagguggcagcaucc

SEQ ID NO: 1580143 - RNA, 19 nt, Artificial Sequence
  Description of Artificial Sequence: Synthetic oligonucleotide
gaaggccaggacuaugcag

SEQ ID NO: 1580144 - RNA, 19 nt, Artificial Sequence
  Description of Artificial Sequence: Synthetic oligonucleotide
acagauuggcacuuagaga

SEQ ID NO: 1580145 - RNA, 19 nt, Artificial Sequence
  Description of Artificial Sequence: Synthetic oligonucleotide
uacguggauguguucuugg

SEQ ID NO: 1580146 - RNA, 19 nt, Artificial Sequence
  Description of Artificial Sequence: Synthetic oligonucleotide
cacucauuuugauggacag

SEQ ID NO: 1580147 - RNA, 19 nt, Artificial Sequence
  Description of Artificial Sequence: Synthetic oligonucleotide
acuggcuauguacauagaa

SEQ ID NO: 1580148 - RNA, 19 nt, Artificial Sequence
  Description of Artificial Sequence: Synthetic oligonucleotide
aagccauguaguauuuguc

SEQ ID NO: 1580149 - RNA, 19 nt, Artificial Sequence
  Description of Artificial Sequence: Synthetic oligonucleotide
cucaaagagcaugugguag

SEQ ID NO: 1580150 - RNA, 19 nt, Artificial Sequence
  Description of Artificial Sequence: Synthetic oligonucleotide
acagaccuggccauuaggg

SEQ ID NO: 1580151 - RNA, 19 nt, Artificial Sequence
  Description of Artificial Sequence: Synthetic oligonucleotide
caaggcuaccauaaucuug

SEQ ID NO: 1580152 - RNA, 19 nt, Artificial Sequence
  Description of Artificial Sequence: Synthetic oligonucleotide
uguaccccaggggauaggg

SEQ ID NO: 1580153 - RNA, 19 nt, Artificial Sequence
  Description of Artificial Sequence: Synthetic oligonucleotide
cuccauagagaagagcugc

SEQ ID NO: 1580154 - RNA, 19 nt, Artificial Sequence
  Description of Artificial Sequence: Synthetic oligonucleotide
guaguauuugucacacagg

SEQ ID NO: 1580155 - RNA, 19 nt, Artificial Sequence
  Description of Artificial Sequence: Synthetic oligonucleotide
auacagccauccccaaccc

SEQ ID NO: 1580156 - RNA, 19 nt, Artificial Sequence
  Description of Artificial Sequence: Synthetic oligonucleotide
cuaccauaaucuugauagg

SEQ ID NO: 1580157 - RNA, 19 nt, Artificial Sequence
  Description of Artificial Sequence: Synthetic oligonucleotide
cauagaauguucuagggau

SEQ ID NO: 1580158 - RNA, 19 nt, Artificial Sequence
  Description of Artificial Sequence: Synthetic oligonucleotide
acugucaccaucccagcca

SEQ ID NO: 1580159 - RNA, 19 nt, Artificial Sequence
  Description of Artificial Sequence: Synthetic oligonucleotide
guggaugucacugucacca

SEQ ID NO: 1580160 - RNA, 19 nt, Artificial Sequence
  Description of Artificial Sequence: Synthetic oligonucleotide
uuaacuuccuggaucucua

SEQ ID NO: 1580161 - RNA, 19 nt, Artificial Sequence
  Description of Artificial Sequence: Synthetic oligonucleotide
agggagacccagcuucacc

SEQ ID NO: 1580162 - RNA, 19 nt, Artificial Sequence
  Description of Artificial Sequence: Synthetic oligonucleotide
gucacugagauuucuacaa

SEQ ID NO: 1580163 - RNA, 19 nt, Artificial Sequence
  Description of Artificial Sequence: Synthetic oligonucleotide
ucugggguaccccaucaga

SEQ ID NO: 1580164 - RNA, 19 nt, Artificial Sequence
  Description of Artificial Sequence: Synthetic oligonucleotide
acuuccuggaucucuagau

SEQ ID NO: 1580165 - RNA, 19 nt, Artificial Sequence
  Description of Artificial Sequence: Synthetic oligonucleotide
uggaucucuagaucaggug

SEQ ID NO: 1580166 - RNA, 19 nt, Artificial Sequence
  Description of Artificial Sequence: Synthetic oligonucleotide
gacagaccuggccauuagg

SEQ ID NO: 1580167 - RNA, 19 nt, Artificial Sequence
  Description of Artificial Sequence: Synthetic oligonucleotide
gucccaaagcccuccauag

SEQ ID NO: 1580168 - RNA, 19 nt, Artificial Sequence
  Description of Artificial Sequence: Synthetic oligonucleotide
caguuagggucaaugcugc

SEQ ID NO: 1580169 - RNA, 19 nt, Artificial Sequence
  Description of Artificial Sequence: Synthetic oligonucleotide
ccaguauaccuguacaggg

SEQ ID NO: 1580170 - RNA, 19 nt, Artificial Sequence
  Description of Artificial Sequence: Synthetic oligonucleotide
agcucaaagagcauguggu

SEQ ID NO: 1580171 - RNA, 19 nt, Artificial Sequence
  Description of Artificial Sequence: Synthetic oligonucleotide
acacguugugagcacgggg

SEQ ID NO: 1580172 - RNA, 19 nt, Artificial Sequence
  Description of Artificial Sequence: Synthetic oligonucleotide
gauggucugguaguggcgc

SEQ ID NO: 1580173 - RNA, 19 nt, Artificial Sequence
  Description of Artificial Sequence: Synthetic oligonucleotide
auaaucuugauaggaggga

SEQ ID NO: 1580174 - RNA, 19 nt, Artificial Sequence
  Description of Artificial Sequence: Synthetic oligonucleotide
aguuagggucaaugcugcc

SEQ ID NO: 1580175 - RNA, 19 nt, Artificial Sequence
  Description of Artificial Sequence: Synthetic oligonucleotide
uauaccuguacagggugug

SEQ ID NO: 1580176 - RNA, 19 nt, Artificial Sequence
  Description of Artificial Sequence: Synthetic oligonucleotide
ugacccgauacguggaugu

SEQ ID NO: 1580177 - RNA, 19 nt, Artificial Sequence
  Description of Artificial Sequence: Synthetic oligonucleotide
uccauagagaagagcugca

SEQ ID NO: 1580178 - RNA, 19 nt, Artificial Sequence
  Description of Artificial Sequence: Synthetic oligonucleotide
caacccucaagcaucacca

SEQ ID NO: 1580179 - RNA, 19 nt, Artificial Sequence
  Description of Artificial Sequence: Synthetic oligonucleotide
cugcaguuagggucaaugc

SEQ ID NO: 1580180 - RNA, 19 nt, Artificial Sequence
  Description of Artificial Sequence: Synthetic oligonucleotide
agccucucaaucuuccuca

SEQ ID NO: 1580181 - RNA, 19 nt, Artificial Sequence
  Description of Artificial Sequence: Synthetic oligonucleotide
uaccuguacaggguguggg

SEQ ID NO: 1580182 - RNA, 19 nt, Artificial Sequence
  Description of Artificial Sequence: Synthetic oligonucleotide
uugauaggagggaggguga

SEQ ID NO: 1580183 - RNA, 19 nt, Artificial Sequence
  Description of Artificial Sequence: Synthetic oligonucleotide
gaagccauguaguauuugu

SEQ ID NO: 1580184 - RNA, 19 nt, Artificial Sequence
  Description of Artificial Sequence: Synthetic oligonucleotide
uugucacacaggagcuugg

SEQ ID NO: 1580185 - RNA, 19 nt, Artificial Sequence
  Description of Artificial Sequence: Synthetic oligonucleotide
uugagauauaugacagcau

SEQ ID NO: 1580186 - RNA, 19 nt, Artificial Sequence
  Description of Artificial Sequence: Synthetic oligonucleotide
aguggcgccaggcagacuu

SEQ ID NO: 1580187 - RNA, 19 nt, Artificial Sequence
  Description of Artificial Sequence: Synthetic oligonucleotide
acugagauuucuacaaaga

SEQ ID NO: 1580188 - RNA, 19 nt, Artificial Sequence
  Description of Artificial Sequence: Synthetic oligonucleotide
uccccaacccucaagcauc

SEQ ID NO: 1580189 - RNA, 19 nt, Artificial Sequence
  Description of Artificial Sequence: Synthetic oligonucleotide
cauugguggcauuaacuuc

SEQ ID NO: 1580190 - RNA, 19 nt, Artificial Sequence
  Description of Artificial Sequence: Synthetic oligonucleotide
cccucaagcaucaccaugg

SEQ ID NO: 1580191 - RNA, 19 nt, Artificial Sequence
  Description of Artificial Sequence: Synthetic oligonucleotide
uuagggagacccagcuuca

SEQ ID NO: 1580192 - RNA, 19 nt, Artificial Sequence
  Description of Artificial Sequence: Synthetic oligonucleotide
ggcauuaacuuccuggauc

SEQ ID NO: 1580193 - RNA, 19 nt, Artificial Sequence
  Description of Artificial Sequence: Synthetic oligonucleotide
agggugugggaauaaggca

SEQ ID NO: 1580194 - RNA, 19 nt, Artificial Sequence
  Description of Artificial Sequence: Synthetic oligonucleotide
uaccccaggggauagggaa

SEQ ID NO: 1580195 - RNA, 19 nt, Artificial Sequence
  Description of Artificial Sequence: Synthetic oligonucleotide
uggcacuuagagaccacca

SEQ ID NO: 1580196 - RNA, 19 nt, Artificial Sequence
  Description of Artificial Sequence: Synthetic oligonucleotide
aaaacuggcuauguacaua

SEQ ID NO: 1580197 - RNA, 19 nt, Artificial Sequence
  Description of Artificial Sequence: Synthetic oligonucleotide
ugagucaccugugcacacg

SEQ ID NO: 1580198 - RNA, 19 nt, Artificial Sequence
  Description of Artificial Sequence: Synthetic oligonucleotide
ggcauugaaauuacaaaac

SEQ ID NO: 1580199 - RNA, 19 nt, Artificial Sequence
  Description of Artificial Sequence: Synthetic oligonucleotide
ucaaugcugccaauguguu

SEQ ID NO: 1580200 - RNA, 19 nt, Artificial Sequence
  Description of Artificial Sequence: Synthetic oligonucleotide
cuagcugacccgauacgug

SEQ ID NO: 1580201 - RNA, 19 nt, Artificial Sequence
  Description of Artificial Sequence: Synthetic oligonucleotide
gagcuuggccaugucauag

SEQ ID NO: 1580202 - RNA, 19 nt, Artificial Sequence
  Description of Artificial Sequence: Synthetic oligonucleotide
uugguacuuccaucaaaga

SEQ ID NO: 1580203 - RNA, 19 nt, Artificial Sequence
  Description of Artificial Sequence: Synthetic oligonucleotide
aguauuugucacacaggag

SEQ ID NO: 1580204 - RNA, 19 nt, Artificial Sequence
  Description of Artificial Sequence: Synthetic oligonucleotide
cagaucuucuucacccaag

SEQ ID NO: 1580205 - RNA, 19 nt, Artificial Sequence
  Description of Artificial Sequence: Synthetic oligonucleotide
gacacagcccaguauaccu

SEQ ID NO: 1580206 - RNA, 19 nt, Artificial Sequence
  Description of Artificial Sequence: Synthetic oligonucleotide
aucuuccucaaggggacac

SEQ ID NO: 1580207 - RNA, 19 nt, Artificial Sequence
  Description of Artificial Sequence: Synthetic oligonucleotide
uuggcacuuagagaccacc

SEQ ID NO: 1580208 - RNA, 19 nt, Artificial Sequence
  Description of Artificial Sequence: Synthetic oligonucleotide
agauuggcacuuagagacc

SEQ ID NO: 1580209 - RNA, 19 nt, Artificial Sequence
  Description of Artificial Sequence: Synthetic oligonucleotide
uggcucuccaccguggccc

SEQ ID NO: 1580210 - RNA, 19 nt, Artificial Sequence
  Description of Artificial Sequence: Synthetic oligonucleotide
agugucucugggguacccc

SEQ ID NO: 1580211 - RNA, 19 nt, Artificial Sequence
  Description of Artificial Sequence: Synthetic oligonucleotide
aauggggaguccauaccca

SEQ ID NO: 1580212 - RNA, 19 nt, Artificial Sequence
  Description of Artificial Sequence: Synthetic oligonucleotide
uagggaugagucaccugug

SEQ ID NO: 1580213 - RNA, 19 nt, Artificial Sequence
  Description of Artificial Sequence: Synthetic oligonucleotide
cugaggggaagggugaggc

SEQ ID NO: 1580214 - RNA, 19 nt, Artificial Sequence
  Description of Artificial Sequence: Synthetic oligonucleotide
cuagggaugagucaccugu

SEQ ID NO: 1580215 - RNA, 19 nt, Artificial Sequence
  Description of Artificial Sequence: Synthetic oligonucleotide
acaggcagacgcuccacug

SEQ ID NO: 1580216 - RNA, 19 nt, Artificial Sequence
  Description of Artificial Sequence: Synthetic oligonucleotide
auaaggcaagcagggcagc

SEQ ID NO: 1580217 - RNA, 19 nt, Artificial Sequence
  Description of Artificial Sequence: Synthetic oligonucleotide
agaccaugugaaugggcug

SEQ ID NO: 1580218 - RNA, 19 nt, Artificial Sequence
  Description of Artificial Sequence: Synthetic oligonucleotide
aagcaucaccauggagacc

SEQ ID NO: 1580219 - RNA, 19 nt, Artificial Sequence
  Description of Artificial Sequence: Synthetic oligonucleotide
guagaggugggaggggacg

SEQ ID NO: 1580220 - RNA, 19 nt, Artificial Sequence
  Description of Artificial Sequence: Synthetic oligonucleotide
ucauuuugauggacagauc

SEQ ID NO: 1580221 - RNA, 19 nt, Artificial Sequence
  Description of Artificial Sequence: Synthetic oligonucleotide
aggcagacgcuccacugag

SEQ ID NO: 1580222 - RNA, 19 nt, Artificial Sequence
  Description of Artificial Sequence: Synthetic oligonucleotide
auuuacuguggaugucacu

SEQ ID NO: 1580223 - RNA, 19 nt, Artificial Sequence
  Description of Artificial Sequence: Synthetic oligonucleotide
uacuuggcguagaggcggg

SEQ ID NO: 1580224 - RNA, 19 nt, Artificial Sequence
  Description of Artificial Sequence: Synthetic oligonucleotide
auagaauguucuagggaug

SEQ ID NO: 1580225 - RNA, 19 nt, Artificial Sequence
  Description of Artificial Sequence: Synthetic oligonucleotide
cuccuggauggucugguag

SEQ ID NO: 1580226 - RNA, 19 nt, Artificial Sequence
  Description of Artificial Sequence: Synthetic oligonucleotide
ugcacacguugugagcacg

SEQ ID NO: 1580227 - RNA, 19 nt, Artificial Sequence
  Description of Artificial Sequence: Synthetic oligonucleotide
gccaggacuaugcaggcag

SEQ ID NO: 1580228 - RNA, 19 nt, Artificial Sequence
  Description of Artificial Sequence: Synthetic oligonucleotide
uagaucaggugaagccaug

SEQ ID NO: 1580229 - RNA, 19 nt, Artificial Sequence
  Description of Artificial Sequence: Synthetic oligonucleotide
cagacuuguuguagacagg

SEQ ID NO: 1580230 - RNA, 19 nt, Artificial Sequence
  Description of Artificial Sequence: Synthetic oligonucleotide
aacaaaggacacagcccag

SEQ ID NO: 1580231 - RNA, 19 nt, Artificial Sequence
  Description of Artificial Sequence: Synthetic oligonucleotide
ggaugagucaccugugcac

SEQ ID NO: 1580232 - RNA, 19 nt, Artificial Sequence
  Description of Artificial Sequence: Synthetic oligonucleotide
ucuagggaugagucaccug

SEQ ID NO: 1580233 - RNA, 19 nt, Artificial Sequence
  Description of Artificial Sequence: Synthetic oligonucleotide
ucuauuuacuguggauguc

SEQ ID NO: 1580234 - RNA, 19 nt, Artificial Sequence
  Description of Artificial Sequence: Synthetic oligonucleotide
ggggaguccauacccaaag

SEQ ID NO: 1580235 - RNA, 19 nt, Artificial Sequence
  Description of Artificial Sequence: Synthetic oligonucleotide
guggauguguucuugggcu

SEQ ID NO: 1580236 - RNA, 19 nt, Artificial Sequence
  Description of Artificial Sequence: Synthetic oligonucleotide
cacuccacccuucuuaaca

SEQ ID NO: 1580237 - RNA, 19 nt, Artificial Sequence
  Description of Artificial Sequence: Synthetic oligonucleotide
aggugccagggagagaagg

SEQ ID NO: 1580238 - RNA, 19 nt, Artificial Sequence
  Description of Artificial Sequence: Synthetic oligonucleotide
gagaccaccacagaugggu

SEQ ID NO: 1580239 - RNA, 19 nt, Artificial Sequence
  Description of Artificial Sequence: Synthetic oligonucleotide
caucaacaaaggacacagc

SEQ ID NO: 1580240 - RNA, 19 nt, Artificial Sequence
  Description of Artificial Sequence: Synthetic oligonucleotide
cuuccucaaggggacaccc

SEQ ID NO: 1580241 - RNA, 19 nt, Artificial Sequence
  Description of Artificial Sequence: Synthetic oligonucleotide
ugauaggagggagggugag

SEQ ID NO: 1580242 - RNA, 19 nt, Artificial Sequence
  Description of Artificial Sequence: Synthetic oligonucleotide
ggccuugagauauaugaca

SEQ ID NO: 1580243 - RNA, 19 nt, Artificial Sequence
  Description of Artificial Sequence: Synthetic oligonucleotide
uguagacaggcagacgcuc

SEQ ID NO: 1580244 - RNA, 19 nt, Artificial Sequence
  Description of Artificial Sequence: Synthetic oligonucleotide
aggggcacacggcuuuaac

SEQ ID NO: 1580245 - RNA, 19 nt, Artificial Sequence
  Description of Artificial Sequence: Synthetic oligonucleotide
gccuugagauauaugacag

SEQ ID NO: 1580246 - RNA, 19 nt, Artificial Sequence
  Description of Artificial Sequence: Synthetic oligonucleotide
acuuagagaccaccacaga

SEQ ID NO: 1580247 - RNA, 19 nt, Artificial Sequence
  Description of Artificial Sequence: Synthetic oligonucleotide
aaagcccuccauagagaag

SEQ ID NO: 1580248 - RNA, 19 nt, Artificial Sequence
  Description of Artificial Sequence: Synthetic oligonucleotide
cuuggaaguacuuggcgua

SEQ ID NO: 1580249 - RNA, 19 nt, Artificial Sequence
  Description of Artificial Sequence: Synthetic oligonucleotide
cucauuucaucuauuuacu

SEQ ID NO: 1580250 - RNA, 19 nt, Artificial Sequence
  Description of Artificial Sequence: Synthetic oligonucleotide
ucguggcucuccaccgugg

SEQ ID NO: 1580251 - RNA, 19 nt, Artificial Sequence
  Description of Artificial Sequence: Synthetic oligonucleotide
gagguggcagcauccuccc

SEQ ID NO: 1580252 - RNA, 19 nt, Artificial Sequence
  Description of Artificial Sequence: Synthetic oligonucleotide
caaagcccuccauagagaa

SEQ ID NO: 1580253 - RNA, 19 nt, Artificial Sequence
  Description of Artificial Sequence: Synthetic oligonucleotide
agacagaccuggccauuag

SEQ ID NO: 1580254 - RNA, 19 nt, Artificial Sequence
  Description of Artificial Sequence: Synthetic oligonucleotide
ucuguaccccaggggauag

SEQ ID NO: 1580255 - RNA, 19 nt, Artificial Sequence
  Description of Artificial Sequence: Synthetic oligonucleotide
uucuagggaugagucaccu

SEQ ID NO: 1580256 - RNA, 19 nt, Artificial Sequence
  Description of Artificial Sequence: Synthetic oligonucleotide
uucacccaaggcuaccaua

SEQ ID NO: 1580257 - RNA, 19 nt, Artificial Sequence
  Description of Artificial Sequence: Synthetic oligonucleotide
cuuagagaccaccacagau

SEQ ID NO: 1580258 - RNA, 19 nt, Artificial Sequence
  Description of Artificial Sequence: Synthetic oligonucleotide
gucaccggccuccuggaug

SEQ ID NO: 1580259 - RNA, 19 nt, Artificial Sequence
  Description of Artificial Sequence: Synthetic oligonucleotide
cuaaagcucaggcaggagu

SEQ ID NO: 1580260 - RNA, 19 nt, Artificial Sequence
  Description of Artificial Sequence: Synthetic oligonucleotide
ugucacacaggagcuuggc

SEQ ID NO: 1580261 - RNA, 19 nt, Artificial Sequence
  Description of Artificial Sequence: Synthetic oligonucleotide
auaccuguacagggugugg

SEQ ID NO: 1580262 - RNA, 19 nt, Artificial Sequence
  Description of Artificial Sequence: Synthetic oligonucleotide
gaucucuagaucaggugaa

SEQ ID NO: 1580263 - RNA, 19 nt, Artificial Sequence
  Description of Artificial Sequence: Synthetic oligonucleotide
cuucuucacccaaggcuac

SEQ ID NO: 1580264 - RNA, 19 nt, Artificial Sequence
  Description of Artificial Sequence: Synthetic oligonucleotide
uggcauuaacuuccuggau

SEQ ID NO: 1580265 - RNA, 19 nt, Artificial Sequence
  Description of Artificial Sequence: Synthetic oligonucleotide
agaauguucuagggaugag

SEQ ID NO: 1580266 - RNA, 19 nt, Artificial Sequence
  Description of Artificial Sequence: Synthetic oligonucleotide
ccacagaugggucacugag

SEQ ID NO: 1580267 - RNA, 19 nt, Artificial Sequence
  Description of Artificial Sequence: Synthetic oligonucleotide
cuggguugguacuuccauc

SEQ ID NO: 1580268 - RNA, 19 nt, Artificial Sequence
  Description of Artificial Sequence: Synthetic oligonucleotide
ucuuccucaaggggacacc

SEQ ID NO: 1580269 - RNA, 19 nt, Artificial Sequence
  Description of Artificial Sequence: Synthetic oligonucleotide
cacccuucuuaacaucaac

SEQ ID NO: 1580270 - RNA, 19 nt, Artificial Sequence
  Description of Artificial Sequence: Synthetic oligonucleotide
guagacaggcagacgcucc

SEQ ID NO: 1580271 - RNA, 19 nt, Artificial Sequence
  Description of Artificial Sequence: Synthetic oligonucleotide
ggggcacacggcuuuaacc

SEQ ID NO: 1580272 - RNA, 19 nt, Artificial Sequence
  Description of Artificial Sequence: Synthetic oligonucleotide
agaucaggugaagccaugu

SEQ ID NO: 1580273 - RNA, 19 nt, Artificial Sequence
  Description of Artificial Sequence: Synthetic oligonucleotide
ugggucacugagauuucua

SEQ ID NO: 1580274 - RNA, 19 nt, Artificial Sequence
  Description of Artificial Sequence: Synthetic oligonucleotide
guagaccaugugaaugggc

SEQ ID NO: 1580275 - RNA, 19 nt, Artificial Sequence
  Description of Artificial Sequence: Synthetic oligonucleotide
gguaccccaucagauacag

SEQ ID NO: 1580276 - RNA, 19 nt, Artificial Sequence
  Description of Artificial Sequence: Synthetic oligonucleotide
ggucuaaagcucaggcagg

SEQ ID NO: 1580277 - RNA, 19 nt, Artificial Sequence
  Description of Artificial Sequence: Synthetic oligonucleotide
ggacucguggcucuccacc

SEQ ID NO: 1580278 - RNA, 19 nt, Artificial Sequence
  Description of Artificial Sequence: Synthetic oligonucleotide
ugggguaccccaucagaua

SEQ ID NO: 1580279 - RNA, 19 nt, Artificial Sequence
  Description of Artificial Sequence: Synthetic oligonucleotide
guguacacucggcagggga

SEQ ID NO: 1580280 - RNA, 19 nt, Artificial Sequence
  Description of Artificial Sequence: Synthetic oligonucleotide
cacccucuguaccccaggg

SEQ ID NO: 1580281 - RNA, 19 nt, Artificial Sequence
  Description of Artificial Sequence: Synthetic oligonucleotide
cagacgcuccacugagucc

SEQ ID NO: 1580282 - RNA, 19 nt, Artificial Sequence
  Description of Artificial Sequence: Synthetic oligonucleotide
cccaguauaccuguacagg

SEQ ID NO: 1580283 - RNA, 19 nt, Artificial Sequence
  Description of Artificial Sequence: Synthetic oligonucleotide
ggggacguagaccauguga

SEQ ID NO: 1580284 - RNA, 19 nt, Artificial Sequence
  Description of Artificial Sequence: Synthetic oligonucleotide
cauccucccaggugccagg

SEQ ID NO: 1580285 - RNA, 19 nt, Artificial Sequence
  Description of Artificial Sequence: Synthetic oligonucleotide
ccaacccucaagcaucacc

SEQ ID NO: 1580286 - RNA, 19 nt, Artificial Sequence
  Description of Artificial Sequence: Synthetic oligonucleotide
acucauuuugauggacaga

SEQ ID NO: 1580287 - RNA, 19 nt, Artificial Sequence
  Description of Artificial Sequence: Synthetic oligonucleotide
ggagaagugucucuggggu

SEQ ID NO: 1580288 - RNA, 19 nt, Artificial Sequence
  Description of Artificial Sequence: Synthetic oligonucleotide
uucuucacccaaggcuacc

SEQ ID NO: 1580289 - RNA, 19 nt, Artificial Sequence
  Description of Artificial Sequence: Synthetic oligonucleotide
uggggaguccauacccaaa

SEQ ID NO: 1580290 - RNA, 19 nt, Artificial Sequence
  Description of Artificial Sequence: Synthetic oligonucleotide
auguaguauuugucacaca

SEQ ID NO: 1580291 - RNA, 19 nt, Artificial Sequence
  Description of Artificial Sequence: Synthetic oligonucleotide
ucuugauaggagggagggu

SEQ ID NO: 1580292 - RNA, 19 nt, Artificial Sequence
  Description of Artificial Sequence: Synthetic oligonucleotide
cuggauggucugguagugg

SEQ ID NO: 1580293 - RNA, 19 nt, Artificial Sequence
  Description of Artificial Sequence: Synthetic oligonucleotide
auuggcacuuagagaccac

SEQ ID NO: 1580294 - RNA, 19 nt, Artificial Sequence
  Description of Artificial Sequence: Synthetic oligonucleotide
agagcucaaagagcaugug

SEQ ID NO: 1580295 - RNA, 19 nt, Artificial Sequence
  Description of Artificial Sequence: Synthetic oligonucleotide
ccuugagauauaugacagc

SEQ ID NO: 1580296 - RNA, 19 nt, Artificial Sequence
  Description of Artificial Sequence: Synthetic oligonucleotide
gaucaggugaagccaugua

SEQ ID NO: 1580297 - RNA, 19 nt, Artificial Sequence
  Description of Artificial Sequence: Synthetic oligonucleotide
ggaagggugaggcauugaa

SEQ ID NO: 1580298 - RNA, 19 nt, Artificial Sequence
  Description of Artificial Sequence: Synthetic oligonucleotide
aaagacagaccuggccauu

SEQ ID NO: 1580299 - RNA, 19 nt, Artificial Sequence
  Description of Artificial Sequence: Synthetic oligonucleotide
ggugugggaauaaggcaag

SEQ ID NO: 1580300 - RNA, 19 nt, Artificial Sequence
  Description of Artificial Sequence: Synthetic oligonucleotide
guucuagggaugagucacc

SEQ ID NO: 1580301 - RNA, 19 nt, Artificial Sequence
  Description of Artificial Sequence: Synthetic oligonucleotide
cacacguugugagcacggg

SEQ ID NO: 1580302 - RNA, 19 nt, Artificial Sequence
  Description of Artificial Sequence: Synthetic oligonucleotide
acuaugcaggcaggagaag

SEQ ID NO: 1580303 - RNA, 19 nt, Artificial Sequence
  Description of Artificial Sequence: Synthetic oligonucleotide
uagagacagauuggcacuu

SEQ ID NO: 1580304 - RNA, 19 nt, Artificial Sequence
  Description of Artificial Sequence: Synthetic oligonucleotide
agggaaggucccuguggug

SEQ ID NO: 1580305 - RNA, 19 nt, Artificial Sequence
  Description of Artificial Sequence: Synthetic oligonucleotide
uagaggugggaggggacgu

SEQ ID NO: 1580306 - RNA, 19 nt, Artificial Sequence
  Description of Artificial Sequence: Synthetic oligonucleotide
gcuguggaguacauguagc

SEQ ID NO: 1580307 - RNA, 19 nt, Artificial Sequence
  Description of Artificial Sequence: Synthetic oligonucleotide
cacaucagacacgcugcag

SEQ ID NO: 1580308 - RNA, 19 nt, Artificial Sequence
  Description of Artificial Sequence: Synthetic oligonucleotide
ggagagaaggccccuagcu

SEQ ID NO: 1580309 - RNA, 19 nt, Artificial Sequence
  Description of Artificial Sequence: Synthetic oligonucleotide
ugagcuggguugguacuuc

SEQ ID NO: 1580310 - RNA, 19 nt, Artificial Sequence
  Description of Artificial Sequence: Synthetic oligonucleotide
gggagugcacaugugagga

SEQ ID NO: 1580311 - RNA, 19 nt, Artificial Sequence
  Description of Artificial Sequence: Synthetic oligonucleotide
gcguagaggcgggaaaugg

SEQ ID NO: 1580312 - RNA, 19 nt, Artificial Sequence
  Description of Artificial Sequence: Synthetic oligonucleotide
gagaagugucucuggggua

SEQ ID NO: 1580313 - RNA, 19 nt, Artificial Sequence
  Description of Artificial Sequence: Synthetic oligonucleotide
gggacguagaccaugugaa

SEQ ID NO: 1580314 - RNA, 19 nt, Artificial Sequence
  Description of Artificial Sequence: Synthetic oligonucleotide
ucggaaggccaggacuaug

SEQ ID NO: 1580315 - RNA, 19 nt, Artificial Sequence
  Description of Artificial Sequence: Synthetic oligonucleotide
uggacagggccuugagaua

SEQ ID NO: 1580316 - RNA, 19 nt, Artificial Sequence
  Description of Artificial Sequence: Synthetic oligonucleotide
guuggcauugguggcauua

SEQ ID NO: 1580317 - RNA, 19 nt, Artificial Sequence
  Description of Artificial Sequence: Synthetic oligonucleotide
cuguggaguacauguagcu

SEQ ID NO: 1580318 - RNA, 19 nt, Artificial Sequence
  Description of Artificial Sequence: Synthetic oligonucleotide
gugggaggggacguagacc

SEQ ID NO: 1580319 - RNA, 19 nt, Artificial Sequence
  Description of Artificial Sequence: Synthetic oligonucleotide
uacacucggcaggggagug

SEQ ID NO: 1580320 - RNA, 19 nt, Artificial Sequence
  Description of Artificial Sequence: Synthetic oligonucleotide
acccgauacguggaugugu

SEQ ID NO: 1580321 - RNA, 19 nt, Artificial Sequence
  Description of Artificial Sequence: Synthetic oligonucleotide
uggcguagaggcgggaaau

SEQ ID NO: 1580322 - RNA, 19 nt, Artificial Sequence
  Description of Artificial Sequence: Synthetic oligonucleotide
ggggucuaaagcucaggca

SEQ ID NO: 1580323 - RNA, 19 nt, Artificial Sequence
  Description of Artificial Sequence: Synthetic oligonucleotide
uggucugguaguggcgcca

SEQ ID NO: 1580324 - RNA, 19 nt, Artificial Sequence
  Description of Artificial Sequence: Synthetic oligonucleotide
gagaaggccccuagcugac

SEQ ID NO: 1580325 - RNA, 19 nt, Artificial Sequence
  Description of Artificial Sequence: Synthetic oligonucleotide
gguugguacuuccaucaaa

SEQ ID NO: 1580326 - RNA, 19 nt, Artificial Sequence
  Description of Artificial Sequence: Synthetic oligonucleotide
cuagaucaggugaagccau

SEQ ID NO: 1580327 - RNA, 19 nt, Artificial Sequence
  Description of Artificial Sequence: Synthetic oligonucleotide
gggaguccauacccaaagc

SEQ ID NO: 1580328 - RNA, 19 nt, Artificial Sequence
  Description of Artificial Sequence: Synthetic oligonucleotide
caauguguuuggggugagc

SEQ ID NO: 1580329 - RNA, 19 nt, Artificial Sequence
  Description of Artificial Sequence: Synthetic oligonucleotide
cuggaucucuagaucaggu

SEQ ID NO: 1580330 - RNA, 19 nt, Artificial Sequence
  Description of Artificial Sequence: Synthetic oligonucleotide
uuaccacaucagacacgcu

SEQ ID NO: 1580331 - RNA, 19 nt, Artificial Sequence
  Description of Artificial Sequence: Synthetic oligonucleotide
ggauguguucuugggcucc

SEQ ID NO: 1580332 - RNA, 19 nt, Artificial Sequence
  Description of Artificial Sequence: Synthetic oligonucleotide
guguuuggggugagcuggg

SEQ ID NO: 1580333 - RNA, 19 nt, Artificial Sequence
  Description of Artificial Sequence: Synthetic oligonucleotide
caguauaccuguacagggu

SEQ ID NO: 1580334 - RNA, 19 nt, Artificial Sequence
  Description of Artificial Sequence: Synthetic oligonucleotide
ucggcaggggagugcacau

SEQ ID NO: 1580335 - RNA, 19 nt, Artificial Sequence
  Description of Artificial Sequence: Synthetic oligonucleotide
gauacguggauguguucuu

SEQ ID NO: 1580336 - RNA, 19 nt, Artificial Sequence
  Description of Artificial Sequence: Synthetic oligonucleotide
acucguggcucuccaccgu

SEQ ID NO: 1580337 - RNA, 19 nt, Artificial Sequence
  Description of Artificial Sequence: Synthetic oligonucleotide
uggacucguggcucuccac

SEQ ID NO: 1580338 - RNA, 19 nt, Artificial Sequence
  Description of Artificial Sequence: Synthetic oligonucleotide
caccugugcacacguugug

SEQ ID NO: 1580339 - RNA, 19 nt, Artificial Sequence
  Description of Artificial Sequence: Synthetic oligonucleotide
gggugaggcauugaaauua

SEQ ID NO: 1580340 - RNA, 19 nt, Artificial Sequence
  Description of Artificial Sequence: Synthetic oligonucleotide
cacacggcuuuaaccccug

SEQ ID NO: 1580341 - RNA, 19 nt, Artificial Sequence
  Description of Artificial Sequence: Synthetic oligonucleotide
cguggauguguucuugggc

SEQ ID NO: 1580342 - RNA, 19 nt, Artificial Sequence
  Description of Artificial Sequence: Synthetic oligonucleotide
aacuggcuauguacauaga

SEQ ID NO: 1580343 - RNA, 19 nt, Artificial Sequence
  Description of Artificial Sequence: Synthetic oligonucleotide
cagccacucggaaggccag

SEQ ID NO: 1580344 - RNA, 19 nt, Artificial Sequence
  Description of Artificial Sequence: Synthetic oligonucleotide
gacccgauacguggaugug

SEQ ID NO: 1580345 - RNA, 19 nt, Artificial Sequence
  Description of Artificial Sequence: Synthetic oligonucleotide
ugggcuccgugcugggcac

SEQ ID NO: 1580346 - RNA, 19 nt, Artificial Sequence
  Description of Artificial Sequence: Synthetic oligonucleotide
gaggggaagggugaggcau

SEQ ID NO: 1580347 - RNA, 19 nt, Artificial Sequence
  Description of Artificial Sequence: Synthetic oligonucleotide
uggcagcauccucccaggu

SEQ ID NO: 1580348 - RNA, 19 nt, Artificial Sequence
  Description of Artificial Sequence: Synthetic oligonucleotide
ccuggaucucuagaucagg

SEQ ID NO: 1580349 - RNA, 19 nt, Artificial Sequence
  Description of Artificial Sequence: Synthetic oligonucleotide
ggacacagcccaguauacc

SEQ ID NO: 1580350 - RNA, 19 nt, Artificial Sequence
  Description of Artificial Sequence: Synthetic oligonucleotide
uguuuggggugagcugggu

SEQ ID NO: 1580351 - RNA, 19 nt, Artificial Sequence
  Description of Artificial Sequence: Synthetic oligonucleotide
gcauugguggcauuaacuu

SEQ ID NO: 1580352 - RNA, 19 nt, Artificial Sequence
  Description of Artificial Sequence: Synthetic oligonucleotide
ggaggggacguagaccaug

SEQ ID NO: 1580353 - RNA, 19 nt, Artificial Sequence
  Description of Artificial Sequence: Synthetic oligonucleotide
acagggccuugagauauau

SEQ ID NO: 1580354 - RNA, 19 nt, Artificial Sequence
  Description of Artificial Sequence: Synthetic oligonucleotide
aggggacguagaccaugug

SEQ ID NO: 1580355 - RNA, 19 nt, Artificial Sequence
  Description of Artificial Sequence: Synthetic oligonucleotide
gugcacacguugugagcac

SEQ ID NO: 1580356 - RNA, 19 nt, Artificial Sequence
  Description of Artificial Sequence: Synthetic oligonucleotide
gcacacguugugagcacgg

SEQ ID NO: 1580357 - RNA, 19 nt, Artificial Sequence
  Description of Artificial Sequence: Synthetic oligonucleotide
agccacucggaaggccagg

SEQ ID NO: 1580358 - RNA, 19 nt, Artificial Sequence
  Description of Artificial Sequence: Synthetic oligonucleotide
gggccuugagauauaugac

SEQ ID NO: 1580359 - RNA, 19 nt, Artificial Sequence
  Description of Artificial Sequence: Synthetic oligonucleotide
ccaggcagacuuguuguag

SEQ ID NO: 1580360 - RNA, 19 nt, Artificial Sequence
  Description of Artificial Sequence: Synthetic oligonucleotide
uagggagacccagcuucac

SEQ ID NO: 1580361 - RNA, 19 nt, Artificial Sequence
  Description of Artificial Sequence: Synthetic oligonucleotide
ccaggacuaugcaggcagg

SEQ ID NO: 1580362 - RNA, 19 nt, Artificial Sequence
  Description of Artificial Sequence: Synthetic oligonucleotide
cucccuagguuucucugua

SEQ ID NO: 1580363 - RNA, 19 nt, Artificial Sequence
  Description of Artificial Sequence: Synthetic oligonucleotide
cugggguaccccaucagau

SEQ ID NO: 1580364 - RNA, 19 nt, Artificial Sequence
  Description of Artificial Sequence: Synthetic oligonucleotide
cugugguggcuggauucag

SEQ ID NO: 1580365 - RNA, 19 nt, Artificial Sequence
  Description of Artificial Sequence: Synthetic oligonucleotide
uagggucaaugcugccaau

SEQ ID NO: 1580366 - RNA, 19 nt, Artificial Sequence
  Description of Artificial Sequence: Synthetic oligonucleotide
cucggcaggggagugcaca

SEQ ID NO: 1580367 - RNA, 19 nt, Artificial Sequence
  Description of Artificial Sequence: Synthetic oligonucleotide
ccccuagcugacccgauac

SEQ ID NO: 1580368 - RNA, 19 nt, Artificial Sequence
  Description of Artificial Sequence: Synthetic oligonucleotide
cccuagcugacccgauacg

SEQ ID NO: 1580369 - RNA, 19 nt, Artificial Sequence
  Description of Artificial Sequence: Synthetic oligonucleotide
gcuccacugaguccgugga

SEQ ID NO: 1580370 - RNA, 19 nt, Artificial Sequence
  Description of Artificial Sequence: Synthetic oligonucleotide
agcugacccgauacgugga

SEQ ID NO: 1580371 - RNA, 19 nt, Artificial Sequence
  Description of Artificial Sequence: Synthetic oligonucleotide
cuucacccucuguacccca

SEQ ID NO: 1580372 - RNA, 19 nt, Artificial Sequence
  Description of Artificial Sequence: Synthetic oligonucleotide
gggcacuccacccuucuua

SEQ ID NO: 1580373 - RNA, 19 nt, Artificial Sequence
  Description of Artificial Sequence: Synthetic oligonucleotide
ccuuggaaguacuuggcgu

SEQ ID NO: 1580374 - RNA, 19 nt, Artificial Sequence
  Description of Artificial Sequence: Synthetic oligonucleotide
gaggggacguagaccaugu

SEQ ID NO: 1580375 - RNA, 19 nt, Artificial Sequence
  Description of Artificial Sequence: Synthetic oligonucleotide
agcuggguugguacuucca

SEQ ID NO: 1580376 - RNA, 19 nt, Artificial Sequence
  Description of Artificial Sequence: Synthetic oligonucleotide
cuguaccccaggggauagg

SEQ ID NO: 1580377 - RNA, 19 nt, Artificial Sequence
  Description of Artificial Sequence: Synthetic oligonucleotide
ggcuaccauaaucuugaua

SEQ ID NO: 1580378 - RNA, 19 nt, Artificial Sequence
  Description of Artificial Sequence: Synthetic oligonucleotide
ggcaggggagugcacaugu

SEQ ID NO: 1580379 - RNA, 19 nt, Artificial Sequence
  Description of Artificial Sequence: Synthetic oligonucleotide
acacggcuuuaaccccugu

SEQ ID NO: 1580380 - RNA, 19 nt, Artificial Sequence
  Description of Artificial Sequence: Synthetic oligonucleotide
ggcagacuuguuguagaca

SEQ ID NO: 1580381 - RNA, 19 nt, Artificial Sequence
  Description of Artificial Sequence: Synthetic oligonucleotide
cuuggcguagaggcgggaa

SEQ ID NO: 1580382 - RNA, 19 nt, Artificial Sequence
  Description of Artificial Sequence: Synthetic oligonucleotide
gcuucacccucuguacccc

SEQ ID NO: 1580383 - RNA, 19 nt, Artificial Sequence
  Description of Artificial Sequence: Synthetic oligonucleotide
cguagaccaugugaauggg

SEQ ID NO: 1580384 - RNA, 19 nt, Artificial Sequence
  Description of Artificial Sequence: Synthetic oligonucleotide
accaucccagccacuggga

SEQ ID NO: 1580385 - RNA, 19 nt, Artificial Sequence
  Description of Artificial Sequence: Synthetic oligonucleotide
cugggaggggcacacggcu

SEQ ID NO: 1580386 - RNA, 19 nt, Artificial Sequence
  Description of Artificial Sequence: Synthetic oligonucleotide
aggcuaccauaaucuugau

SEQ ID NO: 1580387 - RNA, 19 nt, Artificial Sequence
  Description of Artificial Sequence: Synthetic oligonucleotide
uggcccgcauggcauucuu

SEQ ID NO: 1580388 - RNA, 19 nt, Artificial Sequence
  Description of Artificial Sequence: Synthetic oligonucleotide
caucagacacgcugcaguu

SEQ ID NO: 1580389 - RNA, 19 nt, Artificial Sequence
  Description of Artificial Sequence: Synthetic oligonucleotide
ggcguagaggcgggaaaug

SEQ ID NO: 1580390 - RNA, 19 nt, Artificial Sequence
  Description of Artificial Sequence: Synthetic oligonucleotide
aguccguggacagggccuu

SEQ ID NO: 1580391 - RNA, 19 nt, Artificial Sequence
  Description of Artificial Sequence: Synthetic oligonucleotide
agaccaggcuccacagaaa

SEQ ID NO: 1580392 - RNA, 19 nt, Artificial Sequence
  Description of Artificial Sequence: Synthetic oligonucleotide
agucaccggccuccuggau

SEQ ID NO: 1580393 - RNA, 19 nt, Artificial Sequence
  Description of Artificial Sequence: Synthetic oligonucleotide
cagucaccggccuccugga

SEQ ID NO: 1580394 - RNA, 19 nt, Artificial Sequence
  Description of Artificial Sequence: Synthetic oligonucleotide
cccuagguuucucuguaga

SEQ ID NO: 1580395 - RNA, 19 nt, Artificial Sequence
  Description of Artificial Sequence: Synthetic oligonucleotide
ccuggauggucugguagug

SEQ ID NO: 1580396 - RNA, 19 nt, Artificial Sequence
  Description of Artificial Sequence: Synthetic oligonucleotide
guuuggggugagcuggguu

SEQ ID NO: 1580397 - RNA, 19 nt, Artificial Sequence
  Description of Artificial Sequence: Synthetic oligonucleotide
ggcuggauucagagguggc

SEQ ID NO: 1580398 - RNA, 19 nt, Artificial Sequence
  Description of Artificial Sequence: Synthetic oligonucleotide
cucuguaccccaggggaua

SEQ ID NO: 1580399 - RNA, 19 nt, Artificial Sequence
  Description of Artificial Sequence: Synthetic oligonucleotide
ggacagggccuugagauau

SEQ ID NO: 1580400 - RNA, 19 nt, Artificial Sequence
  Description of Artificial Sequence: Synthetic oligonucleotide
guacacucggcaggggagu

SEQ ID NO: 1580401 - RNA, 19 nt, Artificial Sequence
  Description of Artificial Sequence: Synthetic oligonucleotide
gggguggggucuaaagcuc

SEQ ID NO: 1580402 - RNA, 19 nt, Artificial Sequence
  Description of Artificial Sequence: Synthetic oligonucleotide
auguguucuugggcuccgu

SEQ ID NO: 1580403 - RNA, 19 nt, Artificial Sequence
  Description of Artificial Sequence: Synthetic oligonucleotide
gcgggaaauggggagucca

SEQ ID NO: 1580404 - RNA, 19 nt, Artificial Sequence
  Description of Artificial Sequence: Synthetic oligonucleotide
cucggucacucauuuugau

SEQ ID NO: 1580405 - RNA, 19 nt, Artificial Sequence
  Description of Artificial Sequence: Synthetic oligonucleotide
ccauuagggagacccagcu

SEQ ID NO: 1580406 - RNA, 19 nt, Artificial Sequence
  Description of Artificial Sequence: Synthetic oligonucleotide
gcacuccacccuucuuaac

SEQ ID NO: 1580407 - RNA, 19 nt, Artificial Sequence
  Description of Artificial Sequence: Synthetic oligonucleotide
ggcgggaaauggggagucc

SEQ ID NO: 1580408 - RNA, 19 nt, Artificial Sequence
  Description of Artificial Sequence: Synthetic oligonucleotide
cguggcucuccaccguggc

SEQ ID NO: 1580409 - RNA, 19 nt, Artificial Sequence
  Description of Artificial Sequence: Synthetic oligonucleotide
ccaauguguuuggggugag

SEQ ID NO: 1580410 - RNA, 19 nt, Artificial Sequence
  Description of Artificial Sequence: Synthetic oligonucleotide
gcacaugugaggacaugcu

SEQ ID NO: 1580411 - RNA, 19 nt, Artificial Sequence
  Description of Artificial Sequence: Synthetic oligonucleotide
gacagggccuugagauaua

SEQ ID NO: 1580412 - RNA, 19 nt, Artificial Sequence
  Description of Artificial Sequence: Synthetic oligonucleotide
ccuagcugacccgauacgu

SEQ ID NO: 1580413 - RNA, 19 nt, Artificial Sequence
  Description of Artificial Sequence: Synthetic oligonucleotide
gcaggggagugcacaugug

SEQ ID NO: 1580414 - RNA, 19 nt, Artificial Sequence
  Description of Artificial Sequence: Synthetic oligonucleotide
ccacaucagacacgcugca

SEQ ID NO: 1580415 - RNA, 19 nt, Artificial Sequence
  Description of Artificial Sequence: Synthetic oligonucleotide
acgcuccacugaguccgug

SEQ ID NO: 1580416 - RNA, 19 nt, Artificial Sequence
  Description of Artificial Sequence: Synthetic oligonucleotide
ccgauacguggauguguuc

SEQ ID NO: 1580417 - RNA, 19 nt, Artificial Sequence
  Description of Artificial Sequence: Synthetic oligonucleotide
ccucaagcaucaccaugga

SEQ ID NO: 1580418 - RNA, 19 nt, Artificial Sequence
  Description of Artificial Sequence: Synthetic oligonucleotide
ccuguacagggugugggaa

SEQ ID NO: 1580419 - RNA, 19 nt, Artificial Sequence
  Description of Artificial Sequence: Synthetic oligonucleotide
cgauacguggauguguucu

SEQ ID NO: 1580420 - RNA, 19 nt, Artificial Sequence
  Description of Artificial Sequence: Synthetic oligonucleotide
gccaggcagacuuguugua

SEQ ID NO: 1580421 - RNA, 19 nt, Artificial Sequence
  Description of Artificial Sequence: Synthetic oligonucleotide
ggcccgcauggcauucuug

SEQ ID NO: 1580422 - RNA, 19 nt, Artificial Sequence
  Description of Artificial Sequence: Synthetic oligonucleotide
ggcuccgugcugggcacac

SEQ ID NO: 1580423 - RNA, 19 nt, Artificial Sequence
  Description of Artificial Sequence: Synthetic oligonucleotide
cguggacagggccuugaga

SEQ ID NO: 1580424 - RNA, 19 nt, Artificial Sequence
  Description of Artificial Sequence: Synthetic oligonucleotide
gcacacggcuuuaaccccu

SEQ ID NO: 1580425 - RNA, 19 nt, Artificial Sequence
  Description of Artificial Sequence: Synthetic oligonucleotide
cccgauacguggauguguu

SEQ ID NO: 1580426 - RNA, 19 nt, Artificial Sequence
  Description of Artificial Sequence: Synthetic oligonucleotide
gcugacccgauacguggau

SEQ ID NO: 1580427 - RNA, 19 nt, Artificial Sequence
  Description of Artificial Sequence: Synthetic oligonucleotide
cccgcauggcauucuugaa

SEQ ID NO: 1580428 - RNA, 19 nt, Artificial Sequence
  Description of Artificial Sequence: Synthetic oligonucleotide
gggugaggcuggacucgug

SEQ ID NO: 1580429 - RNA, 19 nt, Artificial Sequence
  Description of Artificial Sequence: Synthetic oligonucleotide
ccaaggcuaccauaaucuu

SEQ ID NO: 1580430 - RNA, 19 nt, Artificial Sequence
  Description of Artificial Sequence: Synthetic oligonucleotide
ggggugggguggggugggg

SEQ ID NO: 1580431 - RNA, 19 nt, Artificial Sequence
  Description of Artificial Sequence: Synthetic oligonucleotide
ggucccugugguggcugga

SEQ ID NO: 1580432 - RNA, 19 nt, Artificial Sequence
  Description of Artificial Sequence: Synthetic oligonucleotide
cucggaaggccaggacuau

SEQ ID NO: 1580433 - RNA, 19 nt, Artificial Sequence
  Description of Artificial Sequence: Synthetic oligonucleotide
ccucuguaccccaggggau

SEQ ID NO: 1580434 - RNA, 19 nt, Artificial Sequence
  Description of Artificial Sequence: Synthetic oligonucleotide
caccucggucacucauuuu

SEQ ID NO: 1580435 - RNA, 19 nt, Artificial Sequence
  Description of Artificial Sequence: Synthetic oligonucleotide
ccaccucggucacucauuu

SEQ ID NO: 1580436 - RNA, 19 nt, Artificial Sequence
  Description of Artificial Sequence: Synthetic oligonucleotide
ggguggggugggguggggu

SEQ ID NO: 1580437 - RNA, 19 nt, Artificial Sequence
  Description of Artificial Sequence: Synthetic oligonucleotide
cggcaggggagugcacaug

SEQ ID NO: 1580438 - RNA, 19 nt, Artificial Sequence
  Description of Artificial Sequence: Synthetic oligonucleotide
caccagucaccggccuccu

SEQ ID NO: 1580439 - RNA, 19 nt, Artificial Sequence
  Description of Artificial Sequence: Synthetic oligonucleotide
gggcuccgugcugggcaca

SEQ ID NO: 1580440 - RNA, 19 nt, Artificial Sequence
  Description of Artificial Sequence: Synthetic oligonucleotide
gggaggggacguagaccau

SEQ ID NO: 1580441 - RNA, 19 nt, Artificial Sequence
  Description of Artificial Sequence: Synthetic oligonucleotide
ccaccacagaugggucacu

SEQ ID NO: 1580442 - RNA, 19 nt, Artificial Sequence
  Description of Artificial Sequence: Synthetic oligonucleotide
caccggccuccuggauggu

SEQ ID NO: 1580443 - RNA, 19 nt, Artificial Sequence
  Description of Artificial Sequence: Synthetic oligonucleotide
uuaaauaacaucuucagug

SEQ ID NO: 1580444 - RNA, 19 nt, Artificial Sequence
  Description of Artificial Sequence: Synthetic oligonucleotide
uuuaaaacaacauuuccug

SEQ ID NO: 1580445 - RNA, 19 nt, Artificial Sequence
  Description of Artificial Sequence: Synthetic oligonucleotide
auagacauauuauuucucc

SEQ ID NO: 1580446 - RNA, 19 nt, Artificial Sequence
  Description of Artificial Sequence: Synthetic oligonucleotide
auugccuugggucagauuc

SEQ ID NO: 1580447 - RNA, 19 nt, Artificial Sequence
  Description of Artificial Sequence: Synthetic oligonucleotide
aauguaaugcacaaguuuc

SEQ ID NO: 1580448 - RNA, 19 nt, Artificial Sequence
  Description of Artificial Sequence: Synthetic oligonucleotide
aaauacaugaaauggugug

SEQ ID NO: 1580449 - RNA, 19 nt, Artificial Sequence
  Description of Artificial Sequence: Synthetic oligonucleotide
ucuacaaguaucuauggcc

SEQ ID NO: 1580450 - RNA, 19 nt, Artificial Sequence
  Description of Artificial Sequence: Synthetic oligonucleotide
ucugaaguaacacaucugc

SEQ ID NO: 1580451 - RNA, 19 nt, Artificial Sequence
  Description of Artificial Sequence: Synthetic oligonucleotide
uuaaaugcaauaagagucc

SEQ ID NO: 1580452 - RNA, 19 nt, Artificial Sequence
  Description of Artificial Sequence: Synthetic oligonucleotide
uuuaacuuuauauuccaga

SEQ ID NO: 1580453 - RNA, 19 nt, Artificial Sequence
  Description of Artificial Sequence: Synthetic oligonucleotide
uaaaacaacauuuccuggc

SEQ ID NO: 1580454 - RNA, 19 nt, Artificial Sequence
  Description of Artificial Sequence: Synthetic oligonucleotide
aacagcacgucccagcacg

SEQ ID NO: 1580455 - RNA, 19 nt, Artificial Sequence
  Description of Artificial Sequence: Synthetic oligonucleotide
aaugcaauaagaguccuug

SEQ ID NO: 1580456 - RNA, 19 nt, Artificial Sequence
  Description of Artificial Sequence: Synthetic oligonucleotide
uauuuuaaagucugaagga

SEQ ID NO: 1580457 - RNA, 19 nt, Artificial Sequence
  Description of Artificial Sequence: Synthetic oligonucleotide
uaaauaacaucuucagugc

SEQ ID NO: 1580458 - RNA, 19 nt, Artificial Sequence
  Description of Artificial Sequence: Synthetic oligonucleotide
uuuaacuuuaaaacaacau

SEQ ID NO: 1580459 - RNA, 19 nt, Artificial Sequence
  Description of Artificial Sequence: Synthetic oligonucleotide
uaaaacauacuugagggug

SEQ ID NO: 1580460 - RNA, 19 nt, Artificial Sequence
  Description of Artificial Sequence: Synthetic oligonucleotide
uuaaaacaacauuuccugg

SEQ ID NO: 1580461 - RNA, 19 nt, Artificial Sequence
  Description of Artificial Sequence: Synthetic oligonucleotide
aaguaacacaucugcauuc

SEQ ID NO: 1580462 - RNA, 19 nt, Artificial Sequence
  Description of Artificial Sequence: Synthetic oligonucleotide
uucucuacaaguaucuaug

SEQ ID NO: 1580463 - RNA, 19 nt, Artificial Sequence
  Description of Artificial Sequence: Synthetic oligonucleotide
agcugcuaaagguagauag

SEQ ID NO: 1580464 - RNA, 19 nt, Artificial Sequence
  Description of Artificial Sequence: Synthetic oligonucleotide
aacuuuaaaacaacauuuc

SEQ ID NO: 1580465 - RNA, 19 nt, Artificial Sequence
  Description of Artificial Sequence: Synthetic oligonucleotide
aaaugcgggacacccauuc

SEQ ID NO: 1580466 - RNA, 19 nt, Artificial Sequence
  Description of Artificial Sequence: Synthetic oligonucleotide
uuuaaauaacaucuucagu

SEQ ID NO: 1580467 - RNA, 19 nt, Artificial Sequence
  Description of Artificial Sequence: Synthetic oligonucleotide
auagguuucuguuuguuug

SEQ ID NO: 1580468 - RNA, 19 nt, Artificial Sequence
  Description of Artificial Sequence: Synthetic oligonucleotide
gacggugaccccuacaugg

SEQ ID NO: 1580469 - RNA, 19 nt, Artificial Sequence
  Description of Artificial Sequence: Synthetic oligonucleotide
uuuuaaagucugaaggaga

SEQ ID NO: 1580470 - RNA, 19 nt, Artificial Sequence
  Description of Artificial Sequence: Synthetic oligonucleotide
uuaacuuuauauuccagau

SEQ ID NO: 1580471 - RNA, 19 nt, Artificial Sequence
  Description of Artificial Sequence: Synthetic oligonucleotide
auauuauuucuccagagau

SEQ ID NO: 1580472 - RNA, 19 nt, Artificial Sequence
  Description of Artificial Sequence: Synthetic oligonucleotide
aagacaaccgacagagucc

SEQ ID NO: 1580473 - RNA, 19 nt, Artificial Sequence
  Description of Artificial Sequence: Synthetic oligonucleotide
aguucacaagggcugaggc

SEQ ID NO: 1580474 - RNA, 19 nt, Artificial Sequence
  Description of Artificial Sequence: Synthetic oligonucleotide
ucaacaacaguuuuguuuu

SEQ ID NO: 1580475 - RNA, 19 nt, Artificial Sequence
  Description of Artificial Sequence: Synthetic oligonucleotide
agacauauuauuucuccag

SEQ ID NO: 1580476 - RNA, 19 nt, Artificial Sequence
  Description of Artificial Sequence: Synthetic oligonucleotide
aagacagagaccacacugc

SEQ ID NO: 1580477 - RNA, 19 nt, Artificial Sequence
  Description of Artificial Sequence: Synthetic oligonucleotide
gaagacaaccgacagaguc

SEQ ID NO: 1580478 - RNA, 19 nt, Artificial Sequence
  Description of Artificial Sequence: Synthetic oligonucleotide
uagcacgugacacugacca

SEQ ID NO: 1580479 - RNA, 19 nt, Artificial Sequence
  Description of Artificial Sequence: Synthetic oligonucleotide
cugaaggagagaaaaugcg

SEQ ID NO: 1580480 - RNA, 19 nt, Artificial Sequence
  Description of Artificial Sequence: Synthetic oligonucleotide
agauagacauauuauuucu

SEQ ID NO: 1580481 - RNA, 19 nt, Artificial Sequence
  Description of Artificial Sequence: Synthetic oligonucleotide
aaaaccagcguuucucugu

SEQ ID NO: 1580482 - RNA, 19 nt, Artificial Sequence
  Description of Artificial Sequence: Synthetic oligonucleotide
uuauauuccagaugggaaa

SEQ ID NO: 1580483 - RNA, 19 nt, Artificial Sequence
  Description of Artificial Sequence: Synthetic oligonucleotide
aguugugcauaguucacgg

SEQ ID NO: 1580484 - RNA, 19 nt, Artificial Sequence
  Description of Artificial Sequence: Synthetic oligonucleotide
ugcacaaguuuccugacca

SEQ ID NO: 1580485 - RNA, 19 nt, Artificial Sequence
  Description of Artificial Sequence: Synthetic oligonucleotide
accccaaugacggugaccc

SEQ ID NO: 1580486 - RNA, 19 nt, Artificial Sequence
  Description of Artificial Sequence: Synthetic oligonucleotide
uaaagguagauagacauau

SEQ ID NO: 1580487 - RNA, 19 nt, Artificial Sequence
  Description of Artificial Sequence: Synthetic oligonucleotide
uauuccagaugggaaaugg

SEQ ID NO: 1580488 - RNA, 19 nt, Artificial Sequence
  Description of Artificial Sequence: Synthetic oligonucleotide
ugaaguaacacaucugcau

SEQ ID NO: 1580489 - RNA, 19 nt, Artificial Sequence
  Description of Artificial Sequence: Synthetic oligonucleotide
ugcaauaagaguccuugcu

SEQ ID NO: 1580490 - RNA, 19 nt, Artificial Sequence
  Description of Artificial Sequence: Synthetic oligonucleotide
uguaacuuuaaaugcaaua

SEQ ID NO: 1580491 - RNA, 19 nt, Artificial Sequence
  Description of Artificial Sequence: Synthetic oligonucleotide
uagauagacauauuauuuc

SEQ ID NO: 1580492 - RNA, 19 nt, Artificial Sequence
  Description of Artificial Sequence: Synthetic oligonucleotide
gacagagguacuccaaggg

SEQ ID NO: 1580493 - RNA, 19 nt, Artificial Sequence
  Description of Artificial Sequence: Synthetic oligonucleotide
uaaucuucuugcauuaguc

SEQ ID NO: 1580494 - RNA, 19 nt, Artificial Sequence
  Description of Artificial Sequence: Synthetic oligonucleotide
uucaacaguucacaagggc

SEQ ID NO: 1580495 - RNA, 19 nt, Artificial Sequence
  Description of Artificial Sequence: Synthetic oligonucleotide
gaaauggugcaauacucug

SEQ ID NO: 1580496 - RNA, 19 nt, Artificial Sequence
  Description of Artificial Sequence: Synthetic oligonucleotide
cuuccuuggagcuguaacg

SEQ ID NO: 1580497 - RNA, 19 nt, Artificial Sequence
  Description of Artificial Sequence: Synthetic oligonucleotide
aacauuuccuggcguuagc

SEQ ID NO: 1580498 - RNA, 19 nt, Artificial Sequence
  Description of Artificial Sequence: Synthetic oligonucleotide
cauuaguccacaaugaaaa

SEQ ID NO: 1580499 - RNA, 19 nt, Artificial Sequence
  Description of Artificial Sequence: Synthetic oligonucleotide
uaucuauggccacaguuca

SEQ ID NO: 1580500 - RNA, 19 nt, Artificial Sequence
  Description of Artificial Sequence: Synthetic oligonucleotide
uuuccugagagcuggccgg

SEQ ID NO: 1580501 - RNA, 19 nt, Artificial Sequence
  Description of Artificial Sequence: Synthetic oligonucleotide
gaaaagcugcuaaagguag

SEQ ID NO: 1580502 - RNA, 19 nt, Artificial Sequence
  Description of Artificial Sequence: Synthetic oligonucleotide
auggccacaguucaacaac

SEQ ID NO: 1580503 - RNA, 19 nt, Artificial Sequence
  Description of Artificial Sequence: Synthetic oligonucleotide
auaggcagggaguacaaug

SEQ ID NO: 1580504 - RNA, 19 nt, Artificial Sequence
  Description of Artificial Sequence: Synthetic oligonucleotide
ucucuacaaguaucuaugg

SEQ ID NO: 1580505 - RNA, 19 nt, Artificial Sequence
  Description of Artificial Sequence: Synthetic oligonucleotide
acagagguacuccaagggg

SEQ ID NO: 1580506 - RNA, 19 nt, Artificial Sequence
  Description of Artificial Sequence: Synthetic oligonucleotide
aaauggugcaauacucugg

SEQ ID NO: 1580507 - RNA, 19 nt, Artificial Sequence
  Description of Artificial Sequence: Synthetic oligonucleotide
gugugugcaagacagagac

SEQ ID NO: 1580508 - RNA, 19 nt, Artificial Sequence
  Description of Artificial Sequence: Synthetic oligonucleotide
gucagauucagguggaaug

SEQ ID NO: 1580509 - RNA, 19 nt, Artificial Sequence
  Description of Artificial Sequence: Synthetic oligonucleotide
uucacaagggcugaggcca

SEQ ID NO: 1580510 - RNA, 19 nt, Artificial Sequence
  Description of Artificial Sequence: Synthetic oligonucleotide
gagaaaaugcgggacaccc

SEQ ID NO: 1580511 - RNA, 19 nt, Artificial Sequence
  Description of Artificial Sequence: Synthetic oligonucleotide
aagggugaagacaaccgac

SEQ ID NO: 1580512 - RNA, 19 nt, Artificial Sequence
  Description of Artificial Sequence: Synthetic oligonucleotide
uacucugguaauaaucuuc

SEQ ID NO: 1580513 - RNA, 19 nt, Artificial Sequence
  Description of Artificial Sequence: Synthetic oligonucleotide
aguguugagaggugugggg

SEQ ID NO: 1580514 - RNA, 19 nt, Artificial Sequence
  Description of Artificial Sequence: Synthetic oligonucleotide
aauagguuucuguuuguuu

SEQ ID NO: 1580515 - RNA, 19 nt, Artificial Sequence
  Description of Artificial Sequence: Synthetic oligonucleotide
guuuccugaccacauaggc

SEQ ID NO: 1580516 - RNA, 19 nt, Artificial Sequence
  Description of Artificial Sequence: Synthetic oligonucleotide
auaaucuucuugcauuagu

SEQ ID NO: 1580517 - RNA, 19 nt, Artificial Sequence
  Description of Artificial Sequence: Synthetic oligonucleotide
uugcauuaguccacaauga

SEQ ID NO: 1580518 - RNA, 19 nt, Artificial Sequence
  Description of Artificial Sequence: Synthetic oligonucleotide
auaacaucuucagugcuag

SEQ ID NO: 1580519 - RNA, 19 nt, Artificial Sequence
  Description of Artificial Sequence: Synthetic oligonucleotide
uauuauuucuccagagaua

SEQ ID NO: 1580520 - RNA, 19 nt, Artificial Sequence
  Description of Artificial Sequence: Synthetic oligonucleotide
ugucuugauaaaaccauua

SEQ ID NO: 1580521 - RNA, 19 nt, Artificial Sequence
  Description of Artificial Sequence: Synthetic oligonucleotide
uugaggguguguuauuuca

SEQ ID NO: 1580522 - RNA, 19 nt, Artificial Sequence
  Description of Artificial Sequence: Synthetic oligonucleotide
uagacauauuauuucucca

SEQ ID NO: 1580523 - RNA, 19 nt, Artificial Sequence
  Description of Artificial Sequence: Synthetic oligonucleotide
auguaaugcacaaguuucc

SEQ ID NO: 1580524 - RNA, 19 nt, Artificial Sequence
  Description of Artificial Sequence: Synthetic oligonucleotide
cagagauauacacuguaac

SEQ ID NO: 1580525 - RNA, 19 nt, Artificial Sequence
  Description of Artificial Sequence: Synthetic oligonucleotide
aggaagggugaagacaacc

SEQ ID NO: 1580526 - RNA, 19 nt, Artificial Sequence
  Description of Artificial Sequence: Synthetic oligonucleotide
augcaauaagaguccuugc

SEQ ID NO: 1580527 - RNA, 19 nt, Artificial Sequence
  Description of Artificial Sequence: Synthetic oligonucleotide
aguaucuauggccacaguu

SEQ ID NO: 1580528 - RNA, 19 nt, Artificial Sequence
  Description of Artificial Sequence: Synthetic oligonucleotide
aauaaucuucuugcauuag

SEQ ID NO: 1580529 - RNA, 19 nt, Artificial Sequence
  Description of Artificial Sequence: Synthetic oligonucleotide
aaaccagcguuucucugug

SEQ ID NO: 1580530 - RNA, 19 nt, Artificial Sequence
  Description of Artificial Sequence: Synthetic oligonucleotide
uggacagagguacuccaag

SEQ ID NO: 1580531 - RNA, 19 nt, Artificial Sequence
  Description of Artificial Sequence: Synthetic oligonucleotide
agcuguaacggaccacagc

SEQ ID NO: 1580532 - RNA, 19 nt, Artificial Sequence
  Description of Artificial Sequence: Synthetic oligonucleotide
uuccuuggagcuguaacgg

SEQ ID NO: 1580533 - RNA, 19 nt, Artificial Sequence
  Description of Artificial Sequence: Synthetic oligonucleotide
caaugaaaagcugcuaaag

SEQ ID NO: 1580534 - RNA, 19 nt, Artificial Sequence
  Description of Artificial Sequence: Synthetic oligonucleotide
cuuuccugagagcuggccg

SEQ ID NO: 1580535 - RNA, 19 nt, Artificial Sequence
  Description of Artificial Sequence: Synthetic oligonucleotide
augcacaaguuuccugacc

SEQ ID NO: 1580536 - RNA, 19 nt, Artificial Sequence
  Description of Artificial Sequence: Synthetic oligonucleotide
aacaacauuuccuggcguu

SEQ ID NO: 1580537 - RNA, 19 nt, Artificial Sequence
  Description of Artificial Sequence: Synthetic oligonucleotide
ucucuccaccccaaugacg

SEQ ID NO: 1580538 - RNA, 19 nt, Artificial Sequence
  Description of Artificial Sequence: Synthetic oligonucleotide
aaacaacauuuccuggcgu

SEQ ID NO: 1580539 - RNA, 19 nt, Artificial Sequence
  Description of Artificial Sequence: Synthetic oligonucleotide
uuuuacguauggaagucuu

SEQ ID NO: 1580540 - RNA, 19 nt, Artificial Sequence
  Description of Artificial Sequence: Synthetic oligonucleotide
uacuccaaggggcagccug

SEQ ID NO: 1580541 - RNA, 19 nt, Artificial Sequence
  Description of Artificial Sequence: Synthetic oligonucleotide
caacaguucacaagggcug

SEQ ID NO: 1580542 - RNA, 19 nt, Artificial Sequence
  Description of Artificial Sequence: Synthetic oligonucleotide
gcaucaucagcacugggcg

SEQ ID NO: 1580543 - RNA, 19 nt, Artificial Sequence
  Description of Artificial Sequence: Synthetic oligonucleotide
ugcuaaagguagauagaca

SEQ ID NO: 1580544 - RNA, 19 nt, Artificial Sequence
  Description of Artificial Sequence: Synthetic oligonucleotide
uguggggcugccaaucacc

SEQ ID NO: 1580545 - RNA, 19 nt, Artificial Sequence
  Description of Artificial Sequence: Synthetic oligonucleotide
cuacaaguaucuauggcca

SEQ ID NO: 1580546 - RNA, 19 nt, Artificial Sequence
  Description of Artificial Sequence: Synthetic oligonucleotide
auggacucgccacugagca

SEQ ID NO: 1580547 - RNA, 19 nt, Artificial Sequence
  Description of Artificial Sequence: Synthetic oligonucleotide
auaguucacgguccucugg

SEQ ID NO: 1580548 - RNA, 19 nt, Artificial Sequence
  Description of Artificial Sequence: Synthetic oligonucleotide
cagaacuggacagagguac

SEQ ID NO: 1580549 - RNA, 19 nt, Artificial Sequence
  Description of Artificial Sequence: Synthetic oligonucleotide
uaguucacgguccucugga

SEQ ID NO: 1580550 - RNA, 19 nt, Artificial Sequence
  Description of Artificial Sequence: Synthetic oligonucleotide
aacaacaguuuuguuuucu

SEQ ID NO: 1580551 - RNA, 19 nt, Artificial Sequence
  Description of Artificial Sequence: Synthetic oligonucleotide
cuuggagcuguaacggacc

SEQ ID NO: 1580552 - RNA, 19 nt, Artificial Sequence
  Description of Artificial Sequence: Synthetic oligonucleotide
ucagauucagguggaaugu

SEQ ID NO: 1580553 - RNA, 19 nt, Artificial Sequence
  Description of Artificial Sequence: Synthetic oligonucleotide
cuucaacaguucacaaggg

SEQ ID NO: 1580554 - RNA, 19 nt, Artificial Sequence
  Description of Artificial Sequence: Synthetic oligonucleotide
cauauuauuucuccagaga

SEQ ID NO: 1580555 - RNA, 19 nt, Artificial Sequence
  Description of Artificial Sequence: Synthetic oligonucleotide
accgacagaguccaugaug

SEQ ID NO: 1580556 - RNA, 19 nt, Artificial Sequence
  Description of Artificial Sequence: Synthetic oligonucleotide
aucaucagcacugggcggg

SEQ ID NO: 1580557 - RNA, 19 nt, Artificial Sequence
  Description of Artificial Sequence: Synthetic oligonucleotide
ucuauggccacaguucaac

SEQ ID NO: 1580558 - RNA, 19 nt, Artificial Sequence
  Description of Artificial Sequence: Synthetic oligonucleotide
uuucucugugguccugcgg

SEQ ID NO: 1580559 - RNA, 19 nt, Artificial Sequence
  Description of Artificial Sequence: Synthetic oligonucleotide
agaguguugagaggugugg

SEQ ID NO: 1580560 - RNA, 19 nt, Artificial Sequence
  Description of Artificial Sequence: Synthetic oligonucleotide
cuuuauauuccagauggga

SEQ ID NO: 1580561 - RNA, 19 nt, Artificial Sequence
  Description of Artificial Sequence: Synthetic oligonucleotide
cugcuaaagguagauagac

SEQ ID NO: 1580562 - RNA, 19 nt, Artificial Sequence
  Description of Artificial Sequence: Synthetic oligonucleotide
guuagcacgugacacugac

SEQ ID NO: 1580563 - RNA, 19 nt, Artificial Sequence
  Description of Artificial Sequence: Synthetic oligonucleotide
ugcaauacucugguaauaa

SEQ ID NO: 1580564 - RNA, 19 nt, Artificial Sequence
  Description of Artificial Sequence: Synthetic oligonucleotide
guaucuauggccacaguuc

SEQ ID NO: 1580565 - RNA, 19 nt, Artificial Sequence
  Description of Artificial Sequence: Synthetic oligonucleotide
uggcuuuccugagagcugg

SEQ ID NO: 1580566 - RNA, 19 nt, Artificial Sequence
  Description of Artificial Sequence: Synthetic oligonucleotide
guaauaaucuucuugcauu

SEQ ID NO: 1580567 - RNA, 19 nt, Artificial Sequence
  Description of Artificial Sequence: Synthetic oligonucleotide
augacggugaccccuacau

SEQ ID NO: 1580568 - RNA, 19 nt, Artificial Sequence
  Description of Artificial Sequence: Synthetic oligonucleotide
gauagacauauuauuucuc

SEQ ID NO: 1580569 - RNA, 19 nt, Artificial Sequence
  Description of Artificial Sequence: Synthetic oligonucleotide
agugucgcugcgcaccagg

SEQ ID NO: 1580570 - RNA, 19 nt, Artificial Sequence
  Description of Artificial Sequence: Synthetic oligonucleotide
agagaaaaugcgggacacc

SEQ ID NO: 1580571 - RNA, 19 nt, Artificial Sequence
  Description of Artificial Sequence: Synthetic oligonucleotide
cacuguaacuuuaaaugca

SEQ ID NO: 1580572 - RNA, 19 nt, Artificial Sequence
  Description of Artificial Sequence: Synthetic oligonucleotide
uauauuccagaugggaaau

SEQ ID NO: 1580573 - RNA, 19 nt, Artificial Sequence
  Description of Artificial Sequence: Synthetic oligonucleotide
auucagguggaaugugaug

SEQ ID NO: 1580574 - RNA, 19 nt, Artificial Sequence
  Description of Artificial Sequence: Synthetic oligonucleotide
uauggccacaguucaacaa

SEQ ID NO: 1580575 - RNA, 19 nt, Artificial Sequence
  Description of Artificial Sequence: Synthetic oligonucleotide
gaggccaagggucaucuuc

SEQ ID NO: 1580576 - RNA, 19 nt, Artificial Sequence
  Description of Artificial Sequence: Synthetic oligonucleotide
aaugacggugaccccuaca

SEQ ID NO: 1580577 - RNA, 19 nt, Artificial Sequence
  Description of Artificial Sequence: Synthetic oligonucleotide
caggggaacagcacguccc

SEQ ID NO: 1580578 - RNA, 19 nt, Artificial Sequence
  Description of Artificial Sequence: Synthetic oligonucleotide
aaacauacuugagggugug

SEQ ID NO: 1580579 - RNA, 19 nt, Artificial Sequence
  Description of Artificial Sequence: Synthetic oligonucleotide
cugccuuugccacucagac

SEQ ID NO: 1580580 - RNA, 19 nt, Artificial Sequence
  Description of Artificial Sequence: Synthetic oligonucleotide
gguggaaugugaugagagg

SEQ ID NO: 1580581 - RNA, 19 nt, Artificial Sequence
  Description of Artificial Sequence: Synthetic oligonucleotide
agguggaaugugaugagag

SEQ ID NO: 1580582 - RNA, 19 nt, Artificial Sequence
  Description of Artificial Sequence: Synthetic oligonucleotide
ucacccuggcaucaucagc

SEQ ID NO: 1580583 - RNA, 19 nt, Artificial Sequence
  Description of Artificial Sequence: Synthetic oligonucleotide
uguugagagguguggggcu

SEQ ID NO: 1580584 - RNA, 19 nt, Artificial Sequence
  Description of Artificial Sequence: Synthetic oligonucleotide
aaucacccuggcaucauca

SEQ ID NO: 1580585 - RNA, 19 nt, Artificial Sequence
  Description of Artificial Sequence: Synthetic oligonucleotide
uuagcacgugacacugacc

SEQ ID NO: 1580586 - RNA, 19 nt, Artificial Sequence
  Description of Artificial Sequence: Synthetic oligonucleotide
caaguaucuauggccacag

SEQ ID NO: 1580587 - RNA, 19 nt, Artificial Sequence
  Description of Artificial Sequence: Synthetic oligonucleotide
cucugaaguaacacaucug

SEQ ID NO: 1580588 - RNA, 19 nt, Artificial Sequence
  Description of Artificial Sequence: Synthetic oligonucleotide
aguaacacaucugcauucu

SEQ ID NO: 1580589 - RNA, 19 nt, Artificial Sequence
  Description of Artificial Sequence: Synthetic oligonucleotide
ugugugcaagacagagacc

SEQ ID NO: 1580590 - RNA, 19 nt, Artificial Sequence
  Description of Artificial Sequence: Synthetic oligonucleotide
gcugcaggggaacagcacg

SEQ ID NO: 1580591 - RNA, 19 nt, Artificial Sequence
  Description of Artificial Sequence: Synthetic oligonucleotide
uuaaagucugaaggagaga

SEQ ID NO: 1580592 - RNA, 19 nt, Artificial Sequence
  Description of Artificial Sequence: Synthetic oligonucleotide
gacugcuggaguacugggg

SEQ ID NO: 1580593 - RNA, 19 nt, Artificial Sequence
  Description of Artificial Sequence: Synthetic oligonucleotide
ugcucagcucucuccaccc

SEQ ID NO: 1580594 - RNA, 19 nt, Artificial Sequence
  Description of Artificial Sequence: Synthetic oligonucleotide
gagauauacacuguaacuu

SEQ ID NO: 1580595 - RNA, 19 nt, Artificial Sequence
  Description of Artificial Sequence: Synthetic oligonucleotide
cauuuccuggcguuagcac

SEQ ID NO: 1580596 - RNA, 19 nt, Artificial Sequence
  Description of Artificial Sequence: Synthetic oligonucleotide
ugucuucaacaguucacaa

SEQ ID NO: 1580597 - RNA, 19 nt, Artificial Sequence
  Description of Artificial Sequence: Synthetic oligonucleotide
gucuugauaaaaccauuaa

SEQ ID NO: 1580598 - RNA, 19 nt, Artificial Sequence
  Description of Artificial Sequence: Synthetic oligonucleotide
acuuuauauuccagauggg

SEQ ID NO: 1580599 - RNA, 19 nt, Artificial Sequence
  Description of Artificial Sequence: Synthetic oligonucleotide
caguugugcauaguucacg

SEQ ID NO: 1580600 - RNA, 19 nt, Artificial Sequence
  Description of Artificial Sequence: Synthetic oligonucleotide
cacggggugcuccaguggg

SEQ ID NO: 1580601 - RNA, 19 nt, Artificial Sequence
  Description of Artificial Sequence: Synthetic oligonucleotide
caucaucagcacugggcgg

SEQ ID NO: 1580602 - RNA, 19 nt, Artificial Sequence
  Description of Artificial Sequence: Synthetic oligonucleotide
acaguucaacaacaguuuu

SEQ ID NO: 1580603 - RNA, 19 nt, Artificial Sequence
  Description of Artificial Sequence: Synthetic oligonucleotide
acaaccgacagaguccaug

SEQ ID NO: 1580604 - RNA, 19 nt, Artificial Sequence
  Description of Artificial Sequence: Synthetic oligonucleotide
gaaaaugcgggacacccau

SEQ ID NO: 1580605 - RNA, 19 nt, Artificial Sequence
  Description of Artificial Sequence: Synthetic oligonucleotide
cacccuggcaucaucagca

SEQ ID NO: 1580606 - RNA, 19 nt, Artificial Sequence
  Description of Artificial Sequence: Synthetic oligonucleotide
uaacaucuucagugcuagg

SEQ ID NO: 1580607 - RNA, 19 nt, Artificial Sequence
  Description of Artificial Sequence: Synthetic oligonucleotide
gaaguaacacaucugcauu

SEQ ID NO: 1580608 - RNA, 19 nt, Artificial Sequence
  Description of Artificial Sequence: Synthetic oligonucleotide
agagucgggccuggcaugc

SEQ ID NO: 1580609 - RNA, 19 nt, Artificial Sequence
  Description of Artificial Sequence: Synthetic oligonucleotide
agguagauagacauauuau

SEQ ID NO: 1580610 - RNA, 19 nt, Artificial Sequence
  Description of Artificial Sequence: Synthetic oligonucleotide
gacacccauucucuacaag

SEQ ID NO: 1580611 - RNA, 19 nt, Artificial Sequence
  Description of Artificial Sequence: Synthetic oligonucleotide
gguguguuauuucauuguc

SEQ ID NO: 1580612 - RNA, 19 nt, Artificial Sequence
  Description of Artificial Sequence: Synthetic oligonucleotide
aucacccuggcaucaucag

SEQ ID NO: 1580613 - RNA, 19 nt, Artificial Sequence
  Description of Artificial Sequence: Synthetic oligonucleotide
aaccagcguuucucugugg

SEQ ID NO: 1580614 - RNA, 19 nt, Artificial Sequence
  Description of Artificial Sequence: Synthetic oligonucleotide
auacuugaggguguguuau

SEQ ID NO: 1580615 - RNA, 19 nt, Artificial Sequence
  Description of Artificial Sequence: Synthetic oligonucleotide
gacacggggugcuccagug

SEQ ID NO: 1580616 - RNA, 19 nt, Artificial Sequence
  Description of Artificial Sequence: Synthetic oligonucleotide
guguugagagguguggggc

SEQ ID NO: 1580617 - RNA, 19 nt, Artificial Sequence
  Description of Artificial Sequence: Synthetic oligonucleotide
cagacugcuggaguacugg

SEQ ID NO: 1580618 - RNA, 19 nt, Artificial Sequence
  Description of Artificial Sequence: Synthetic oligonucleotide
agacaaccgacagagucca

SEQ ID NO: 1580619 - RNA, 19 nt, Artificial Sequence
  Description of Artificial Sequence: Synthetic oligonucleotide
ugagcccaguugugcauag

SEQ ID NO: 1580620 - RNA, 19 nt, Artificial Sequence
  Description of Artificial Sequence: Synthetic oligonucleotide
cauaguucacgguccucug

SEQ ID NO: 1580621 - RNA, 19 nt, Artificial Sequence
  Description of Artificial Sequence: Synthetic oligonucleotide
uccugaccacauaggcagg

SEQ ID NO: 1580622 - RNA, 19 nt, Artificial Sequence
  Description of Artificial Sequence: Synthetic oligonucleotide
uggcguuagcacgugacac

SEQ ID NO: 1580623 - RNA, 19 nt, Artificial Sequence
  Description of Artificial Sequence: Synthetic oligonucleotide
ugugcaagacagagaccac

SEQ ID NO: 1580624 - RNA, 19 nt, Artificial Sequence
  Description of Artificial Sequence: Synthetic oligonucleotide
ugggucagauucaggugga

SEQ ID NO: 1580625 - RNA, 19 nt, Artificial Sequence
  Description of Artificial Sequence: Synthetic oligonucleotide
guagauagacauauuauuu

SEQ ID NO: 1580626 - RNA, 19 nt, Artificial Sequence
  Description of Artificial Sequence: Synthetic oligonucleotide
uacuggggcaccccacccc

SEQ ID NO: 1580627 - RNA, 19 nt, Artificial Sequence
  Description of Artificial Sequence: Synthetic oligonucleotide
ugacggugaccccuacaug

SEQ ID NO: 1580628 - RNA, 19 nt, Artificial Sequence
  Description of Artificial Sequence: Synthetic oligonucleotide
ugcuccagugggcaguguc

SEQ ID NO: 1580629 - RNA, 19 nt, Artificial Sequence
  Description of Artificial Sequence: Synthetic oligonucleotide
acgugacacugaccaaacg

SEQ ID NO: 1580630 - RNA, 19 nt, Artificial Sequence
  Description of Artificial Sequence: Synthetic oligonucleotide
gggaguacaauguucauau

SEQ ID NO: 1580631 - RNA, 19 nt, Artificial Sequence
  Description of Artificial Sequence: Synthetic oligonucleotide
acccauucucuacaaguau

SEQ ID NO: 1580632 - RNA, 19 nt, Artificial Sequence
  Description of Artificial Sequence: Synthetic oligonucleotide
caacauuuccuggcguuag

SEQ ID NO: 1580633 - RNA, 19 nt, Artificial Sequence
  Description of Artificial Sequence: Synthetic oligonucleotide
cagaguguugagaggugug

SEQ ID NO: 1580634 - RNA, 19 nt, Artificial Sequence
  Description of Artificial Sequence: Synthetic oligonucleotide
aaguaucuauggccacagu

SEQ ID NO: 1580635 - RNA, 19 nt, Artificial Sequence
  Description of Artificial Sequence: Synthetic oligonucleotide
acauacuugaggguguguu

SEQ ID NO: 1580636 - RNA, 19 nt, Artificial Sequence
  Description of Artificial Sequence: Synthetic oligonucleotide
ugcgcaccaggccaugggu

SEQ ID NO: 1580637 - RNA, 19 nt, Artificial Sequence
  Description of Artificial Sequence: Synthetic oligonucleotide
uccuuggagcuguaacgga

SEQ ID NO: 1580638 - RNA, 19 nt, Artificial Sequence
  Description of Artificial Sequence: Synthetic oligonucleotide
acauuuccuggcguuagca

SEQ ID NO: 1580639 - RNA, 19 nt, Artificial Sequence
  Description of Artificial Sequence: Synthetic oligonucleotide
cacgugacacugaccaaac

SEQ ID NO: 1580640 - RNA, 19 nt, Artificial Sequence
  Description of Artificial Sequence: Synthetic oligonucleotide
gguagauagacauauuauu

SEQ ID NO: 1580641 - RNA, 19 nt, Artificial Sequence
  Description of Artificial Sequence: Synthetic oligonucleotide
ucgccacugagcagguccc

SEQ ID NO: 1580642 - RNA, 19 nt, Artificial Sequence
  Description of Artificial Sequence: Synthetic oligonucleotide
caaccgacagaguccauga

SEQ ID NO: 1580643 - RNA, 19 nt, Artificial Sequence
  Description of Artificial Sequence: Synthetic oligonucleotide
gccggugugugcaagacag

SEQ ID NO: 1580644 - RNA, 19 nt, Artificial Sequence
  Description of Artificial Sequence: Synthetic oligonucleotide
gaaaugguguggagcugcc

SEQ ID NO: 1580645 - RNA, 19 nt, Artificial Sequence
  Description of Artificial Sequence: Synthetic oligonucleotide
gucgcugcgcaccaggcca

SEQ ID NO: 1580646 - RNA, 19 nt, Artificial Sequence
  Description of Artificial Sequence: Synthetic oligonucleotide
agucgggccuggcaugcuc

SEQ ID NO: 1580647 - RNA, 19 nt, Artificial Sequence
  Description of Artificial Sequence: Synthetic oligonucleotide
gaccccuacauggacucgc

SEQ ID NO: 1580648 - RNA, 19 nt, Artificial Sequence
  Description of Artificial Sequence: Synthetic oligonucleotide
agcccaguugugcauaguu

SEQ ID NO: 1580649 - RNA, 19 nt, Artificial Sequence
  Description of Artificial Sequence: Synthetic oligonucleotide
ugccuuugccacucagaca

SEQ ID NO: 1580650 - RNA, 19 nt, Artificial Sequence
  Description of Artificial Sequence: Synthetic oligonucleotide
ugcgggacuugcuuucuuc

SEQ ID NO: 1580651 - RNA, 19 nt, Artificial Sequence
  Description of Artificial Sequence: Synthetic oligonucleotide
cuaaagguagauagacaua

SEQ ID NO: 1580652 - RNA, 19 nt, Artificial Sequence
  Description of Artificial Sequence: Synthetic oligonucleotide
acacggggugcuccagugg

SEQ ID NO: 1580653 - RNA, 19 nt, Artificial Sequence
  Description of Artificial Sequence: Synthetic oligonucleotide
caguucacaagggcugagg

SEQ ID NO: 1580654 - RNA, 19 nt, Artificial Sequence
  Description of Artificial Sequence: Synthetic oligonucleotide
gugaccccuacauggacuc

SEQ ID NO: 1580655 - RNA, 19 nt, Artificial Sequence
  Description of Artificial Sequence: Synthetic oligonucleotide
uccaaggggcagccugucc

SEQ ID NO: 1580656 - RNA, 19 nt, Artificial Sequence
  Description of Artificial Sequence: Synthetic oligonucleotide
aaaugcaauaagaguccuu

SEQ ID NO: 1580657 - RNA, 19 nt, Artificial Sequence
  Description of Artificial Sequence: Synthetic oligonucleotide
auauuccagaugggaaaug

SEQ ID NO: 1580658 - RNA, 19 nt, Artificial Sequence
  Description of Artificial Sequence: Synthetic oligonucleotide
gguaauaaucuucuugcau

SEQ ID NO: 1580659 - RNA, 19 nt, Artificial Sequence
  Description of Artificial Sequence: Synthetic oligonucleotide
aacauacuugagggugugu

SEQ ID NO: 1580660 - RNA, 19 nt, Artificial Sequence
  Description of Artificial Sequence: Synthetic oligonucleotide
cucucuccaccccaaugac

SEQ ID NO: 1580661 - RNA, 19 nt, Artificial Sequence
  Description of Artificial Sequence: Synthetic oligonucleotide
agcacgccccaucccagag

SEQ ID NO: 1580662 - RNA, 19 nt, Artificial Sequence
  Description of Artificial Sequence: Synthetic oligonucleotide
agagguacuccaaggggca

SEQ ID NO: 1580663 - RNA, 19 nt, Artificial Sequence
  Description of Artificial Sequence: Synthetic oligonucleotide
cugccaaucacccuggcau

SEQ ID NO: 1580664 - RNA, 19 nt, Artificial Sequence
  Description of Artificial Sequence: Synthetic oligonucleotide
cacauaggcagggaguaca

SEQ ID NO: 1580665 - RNA, 19 nt, Artificial Sequence
  Description of Artificial Sequence: Synthetic oligonucleotide
aaccgacagaguccaugau

SEQ ID NO: 1580666 - RNA, 19 nt, Artificial Sequence
  Description of Artificial Sequence: Synthetic oligonucleotide
ggcaugcucagcucucucc

SEQ ID NO: 1580667 - RNA, 19 nt, Artificial Sequence
  Description of Artificial Sequence: Synthetic oligonucleotide
caauaagaguccuugcuuu

SEQ ID NO: 1580668 - RNA, 19 nt, Artificial Sequence
  Description of Artificial Sequence: Synthetic oligonucleotide
ugcuggaguacuggggcac

SEQ ID NO: 1580669 - RNA, 19 nt, Artificial Sequence
  Description of Artificial Sequence: Synthetic oligonucleotide
ugccaaucacccuggcauc

SEQ ID NO: 1580670 - RNA, 19 nt, Artificial Sequence
  Description of Artificial Sequence: Synthetic oligonucleotide
acuugaggguguguuauuu

SEQ ID NO: 1580671 - RNA, 19 nt, Artificial Sequence
  Description of Artificial Sequence: Synthetic oligonucleotide
ggagcuguaacggaccaca

SEQ ID NO: 1580672 - RNA, 19 nt, Artificial Sequence
  Description of Artificial Sequence: Synthetic oligonucleotide
ugcuggguugccagcugga

SEQ ID NO: 1580673 - RNA, 19 nt, Artificial Sequence
  Description of Artificial Sequence: Synthetic oligonucleotide
auuccagaugggaaauggu

SEQ ID NO: 1580674 - RNA, 19 nt, Artificial Sequence
  Description of Artificial Sequence: Synthetic oligonucleotide
cugggcgggccccacagac

SEQ ID NO: 1580675 - RNA, 19 nt, Artificial Sequence
  Description of Artificial Sequence: Synthetic oligonucleotide
gucccagcacgccccaucc

SEQ ID NO: 1580676 - RNA, 19 nt, Artificial Sequence
  Description of Artificial Sequence: Synthetic oligonucleotide
caugcucagcucucuccac

SEQ ID NO: 1580677 - RNA, 19 nt, Artificial Sequence
  Description of Artificial Sequence: Synthetic oligonucleotide
ccuuggagcuguaacggac

SEQ ID NO: 1580678 - RNA, 19 nt, Artificial Sequence
  Description of Artificial Sequence: Synthetic oligonucleotide
agggaguacaauguucaua

SEQ ID NO: 1580679 - RNA, 19 nt, Artificial Sequence
  Description of Artificial Sequence: Synthetic oligonucleotide
cauacuugaggguguguua

SEQ ID NO: 1580680 - RNA, 19 nt, Artificial Sequence
  Description of Artificial Sequence: Synthetic oligonucleotide
agcguuucucugugguccu

SEQ ID NO: 1580681 - RNA, 19 nt, Artificial Sequence
  Description of Artificial Sequence: Synthetic oligonucleotide
cacaaguuuccugaccaca

SEQ ID NO: 1580682 - RNA, 19 nt, Artificial Sequence
  Description of Artificial Sequence: Synthetic oligonucleotide
acacugccucaucaccuug

SEQ ID NO: 1580683 - RNA, 19 nt, Artificial Sequence
  Description of Artificial Sequence: Synthetic oligonucleotide
guacuggggcaccccaccc

SEQ ID NO: 1580684 - RNA, 19 nt, Artificial Sequence
  Description of Artificial Sequence: Synthetic oligonucleotide
cccaguugugcauaguuca

SEQ ID NO: 1580685 - RNA, 19 nt, Artificial Sequence
  Description of Artificial Sequence: Synthetic oligonucleotide
gagcucugaaguaacacau

SEQ ID NO: 1580686 - RNA, 19 nt, Artificial Sequence
  Description of Artificial Sequence: Synthetic oligonucleotide
augaaaugguguggagcug

SEQ ID NO: 1580687 - RNA, 19 nt, Artificial Sequence
  Description of Artificial Sequence: Synthetic oligonucleotide
caacaacaguuuuguuuuc

SEQ ID NO: 1580688 - RNA, 19 nt, Artificial Sequence
  Description of Artificial Sequence: Synthetic oligonucleotide
accccuacauggacucgcc

SEQ ID NO: 1580689 - RNA, 19 nt, Artificial Sequence
  Description of Artificial Sequence: Synthetic oligonucleotide
aaggggcagccuguccauc

SEQ ID NO: 1580690 - RNA, 19 nt, Artificial Sequence
  Description of Artificial Sequence: Synthetic oligonucleotide
gaccaaacgcagcccgcac

SEQ ID NO: 1580691 - RNA, 19 nt, Artificial Sequence
  Description of Artificial Sequence: Synthetic oligonucleotide
agcccgcacugucuucaac

SEQ ID NO: 1580692 - RNA, 19 nt, Artificial Sequence
  Description of Artificial Sequence: Synthetic oligonucleotide
caugauggcugcaggggaa

SEQ ID NO: 1580693 - RNA, 19 nt, Artificial Sequence
  Description of Artificial Sequence: Synthetic oligonucleotide
ucacgguccucuggaaaac

SEQ ID NO: 1580694 - RNA, 19 nt, Artificial Sequence
  Description of Artificial Sequence: Synthetic oligonucleotide
gagaccacacugccucauc

SEQ ID NO: 1580695 - RNA, 19 nt, Artificial Sequence
  Description of Artificial Sequence: Synthetic oligonucleotide
cccuacauggacucgccac

SEQ ID NO: 1580696 - RNA, 19 nt, Artificial Sequence
  Description of Artificial Sequence: Synthetic oligonucleotide
cacccauucucuacaagua

SEQ ID NO: 1580697 - RNA, 19 nt, Artificial Sequence
  Description of Artificial Sequence: Synthetic oligonucleotide
gagcuguaacggaccacag

SEQ ID NO: 1580698 - RNA, 19 nt, Artificial Sequence
  Description of Artificial Sequence: Synthetic oligonucleotide
guucacgguccucuggaaa

SEQ ID NO: 1580699 - RNA, 19 nt, Artificial Sequence
  Description of Artificial Sequence: Synthetic oligonucleotide
ugaccccuacauggacucg

SEQ ID NO: 1580700 - RNA, 19 nt, Artificial Sequence
  Description of Artificial Sequence: Synthetic oligonucleotide
agucugaaggagagaaaau

SEQ ID NO: 1580701 - RNA, 19 nt, Artificial Sequence
  Description of Artificial Sequence: Synthetic oligonucleotide
agaacuggacagagguacu

SEQ ID NO: 1580702 - RNA, 19 nt, Artificial Sequence
  Description of Artificial Sequence: Synthetic oligonucleotide
agacacggggugcuccagu

SEQ ID NO: 1580703 - RNA, 19 nt, Artificial Sequence
  Description of Artificial Sequence: Synthetic oligonucleotide
aguucacgguccucuggaa

SEQ ID NO: 1580704 - RNA, 19 nt, Artificial Sequence
  Description of Artificial Sequence: Synthetic oligonucleotide
cacugggcgggccccacag

SEQ ID NO: 1580705 - RNA, 19 nt, Artificial Sequence
  Description of Artificial Sequence: Synthetic oligonucleotide
gggacacccauucucuaca

SEQ ID NO: 1580706 - RNA, 19 nt, Artificial Sequence
  Description of Artificial Sequence: Synthetic oligonucleotide
uucuugcauuaguccacaa

SEQ ID NO: 1580707 - RNA, 19 nt, Artificial Sequence
  Description of Artificial Sequence: Synthetic oligonucleotide
aucccagagcucugaagua

SEQ ID NO: 1580708 - RNA, 19 nt, Artificial Sequence
  Description of Artificial Sequence: Synthetic oligonucleotide
cagagucgggccuggcaug

SEQ ID NO: 1580709 - RNA, 19 nt, Artificial Sequence
  Description of Artificial Sequence: Synthetic oligonucleotide
gguacuccaaggggcagcc

SEQ ID NO: 1580710 - RNA, 19 nt, Artificial Sequence
  Description of Artificial Sequence: Synthetic oligonucleotide
caaucacccuggcaucauc

SEQ ID NO: 1580711 - RNA, 19 nt, Artificial Sequence
  Description of Artificial Sequence: Synthetic oligonucleotide
gcgggacuugcuuucuucc

SEQ ID NO: 1580712 - RNA, 19 nt, Artificial Sequence
  Description of Artificial Sequence: Synthetic oligonucleotide
cacgguccucuggaaaacc

SEQ ID NO: 1580713 - RNA, 19 nt, Artificial Sequence
  Description of Artificial Sequence: Synthetic oligonucleotide
aagcugcuaaagguagaua

SEQ ID NO: 1580714 - RNA, 19 nt, Artificial Sequence
  Description of Artificial Sequence: Synthetic oligonucleotide
uacuugaggguguguuauu

SEQ ID NO: 1580715 - RNA, 19 nt, Artificial Sequence
  Description of Artificial Sequence: Synthetic oligonucleotide
gcuccagugggcagugucg

SEQ ID NO: 1580716 - RNA, 19 nt, Artificial Sequence
  Description of Artificial Sequence: Synthetic oligonucleotide
gcaggggaacagcacgucc

SEQ ID NO: 1580717 - RNA, 19 nt, Artificial Sequence
  Description of Artificial Sequence: Synthetic oligonucleotide
ugguccugcgggacuugcu

SEQ ID NO: 1580718 - RNA, 19 nt, Artificial Sequence
  Description of Artificial Sequence: Synthetic oligonucleotide
ccuggcguuagcacgugac

SEQ ID NO: 1580719 - RNA, 19 nt, Artificial Sequence
  Description of Artificial Sequence: Synthetic oligonucleotide
gcauuaguccacaaugaaa

SEQ ID NO: 1580720 - RNA, 19 nt, Artificial Sequence
  Description of Artificial Sequence: Synthetic oligonucleotide
gccacucagacacggggug

SEQ ID NO: 1580721 - RNA, 19 nt, Artificial Sequence
  Description of Artificial Sequence: Synthetic oligonucleotide
ucgggccuggcaugcucag

SEQ ID NO: 1580722 - RNA, 19 nt, Artificial Sequence
  Description of Artificial Sequence: Synthetic oligonucleotide
cuggcguuagcacgugaca

SEQ ID NO: 1580723 - RNA, 19 nt, Artificial Sequence
  Description of Artificial Sequence: Synthetic oligonucleotide
uccagugggcagugucgcu

SEQ ID NO: 1580724 - RNA, 19 nt, Artificial Sequence
  Description of Artificial Sequence: Synthetic oligonucleotide
uccuggcguuagcacguga

SEQ ID NO: 1580725 - RNA, 19 nt, Artificial Sequence
  Description of Artificial Sequence: Synthetic oligonucleotide
cucagagucgggccuggca

SEQ ID NO: 1580726 - RNA, 19 nt, Artificial Sequence
  Description of Artificial Sequence: Synthetic oligonucleotide
ccaguugugcauaguucac

SEQ ID NO: 1580727 - RNA, 19 nt, Artificial Sequence
  Description of Artificial Sequence: Synthetic oligonucleotide
ccuugggucagauucaggu

SEQ ID NO: 1580728 - RNA, 19 nt, Artificial Sequence
  Description of Artificial Sequence: Synthetic oligonucleotide
aaaaugcgggacacccauu

SEQ ID NO: 1580729 - RNA, 19 nt, Artificial Sequence
  Description of Artificial Sequence: Synthetic oligonucleotide
cuggaguacuggggcaccc

SEQ ID NO: 1580730 - RNA, 19 nt, Artificial Sequence
  Description of Artificial Sequence: Synthetic oligonucleotide
ugggcgggccccacagacu

SEQ ID NO: 1580731 - RNA, 19 nt, Artificial Sequence
  Description of Artificial Sequence: Synthetic oligonucleotide
uggagcuguaacggaccac

SEQ ID NO: 1580732 - RNA, 19 nt, Artificial Sequence
  Description of Artificial Sequence: Synthetic oligonucleotide
acggggugcuccagugggc

SEQ ID NO: 1580733 - RNA, 19 nt, Artificial Sequence
  Description of Artificial Sequence: Synthetic oligonucleotide
ggugcaauacucugguaau

SEQ ID NO: 1580734 - RNA, 19 nt, Artificial Sequence
  Description of Artificial Sequence: Synthetic oligonucleotide
gcguuagcacgugacacug

SEQ ID NO: 1580735 - RNA, 19 nt, Artificial Sequence
  Description of Artificial Sequence: Synthetic oligonucleotide
agcacgugacacugaccaa

SEQ ID NO: 1580736 - RNA, 19 nt, Artificial Sequence
  Description of Artificial Sequence: Synthetic oligonucleotide
ccacaguucaacaacaguu

SEQ ID NO: 1580737 - RNA, 19 nt, Artificial Sequence
  Description of Artificial Sequence: Synthetic oligonucleotide
acgguccucuggaaaacca

SEQ ID NO: 1580738 - RNA, 19 nt, Artificial Sequence
  Description of Artificial Sequence: Synthetic oligonucleotide
gcccgcacugucuucaaca

SEQ ID NO: 1580739 - RNA, 19 nt, Artificial Sequence
  Description of Artificial Sequence: Synthetic oligonucleotide
gcugcuaaagguagauaga

SEQ ID NO: 1580740 - RNA, 19 nt, Artificial Sequence
  Description of Artificial Sequence: Synthetic oligonucleotide
ugcaggggaacagcacguc

SEQ ID NO: 1580741 - RNA, 19 nt, Artificial Sequence
  Description of Artificial Sequence: Synthetic oligonucleotide
cuggacagagguacuccaa

SEQ ID NO: 1580742 - RNA, 19 nt, Artificial Sequence
  Description of Artificial Sequence: Synthetic oligonucleotide
ggguguguuauuucauugu

SEQ ID NO: 1580743 - RNA, 19 nt, Artificial Sequence
  Description of Artificial Sequence: Synthetic oligonucleotide
gcaauaagaguccuugcuu

SEQ ID NO: 1580744 - RNA, 19 nt, Artificial Sequence
  Description of Artificial Sequence: Synthetic oligonucleotide
acuccaaggggcagccugu

SEQ ID NO: 1580745 - RNA, 19 nt, Artificial Sequence
  Description of Artificial Sequence: Synthetic oligonucleotide
caccccaaugacggugacc

SEQ ID NO: 1580746 - RNA, 19 nt, Artificial Sequence
  Description of Artificial Sequence: Synthetic oligonucleotide
uggccggugugugcaagac

SEQ ID NO: 1580747 - RNA, 19 nt, Artificial Sequence
  Description of Artificial Sequence: Synthetic oligonucleotide
uuccugagagcuggccggu

SEQ ID NO: 1580748 - RNA, 19 nt, Artificial Sequence
  Description of Artificial Sequence: Synthetic oligonucleotide
agagaccacacugccucau

SEQ ID NO: 1580749 - RNA, 19 nt, Artificial Sequence
  Description of Artificial Sequence: Synthetic oligonucleotide
ggaguacuggggcacccca

SEQ ID NO: 1580750 - RNA, 19 nt, Artificial Sequence
  Description of Artificial Sequence: Synthetic oligonucleotide
caaguuuccugaccacaua

SEQ ID NO: 1580751 - RNA, 19 nt, Artificial Sequence
  Description of Artificial Sequence: Synthetic oligonucleotide
cucugugguccugcgggac

SEQ ID NO: 1580752 - RNA, 19 nt, Artificial Sequence
  Description of Artificial Sequence: Synthetic oligonucleotide
caaugacggugaccccuac

SEQ ID NO: 1580753 - RNA, 19 nt, Artificial Sequence
  Description of Artificial Sequence: Synthetic oligonucleotide
cagguggaaugugaugaga

SEQ ID NO: 1580754 - RNA, 19 nt, Artificial Sequence
  Description of Artificial Sequence: Synthetic oligonucleotide
uugccagcuggagcagaga

SEQ ID NO: 1580755 - RNA, 19 nt, Artificial Sequence
  Description of Artificial Sequence: Synthetic oligonucleotide
ugugguccugcgggacuug

SEQ ID NO: 1580756 - RNA, 19 nt, Artificial Sequence
  Description of Artificial Sequence: Synthetic oligonucleotide
acggugaccccuacaugga

SEQ ID NO: 1580757 - RNA, 19 nt, Artificial Sequence
  Description of Artificial Sequence: Synthetic oligonucleotide
gcacaaguuuccugaccac

SEQ ID NO: 1580758 - RNA, 19 nt, Artificial Sequence
  Description of Artificial Sequence: Synthetic oligonucleotide
ccaaggggcagccugucca

SEQ ID NO: 1580759 - RNA, 19 nt, Artificial Sequence
  Description of Artificial Sequence: Synthetic oligonucleotide
cacgccccaucccagagcu

SEQ ID NO: 1580760 - RNA, 19 nt, Artificial Sequence
  Description of Artificial Sequence: Synthetic oligonucleotide
gcccgaggagcccagccug

SEQ ID NO: 1580761 - RNA, 19 nt, Artificial Sequence
  Description of Artificial Sequence: Synthetic oligonucleotide
gcugccaaucacccuggca

SEQ ID NO: 1580762 - RNA, 19 nt, Artificial Sequence
  Description of Artificial Sequence: Synthetic oligonucleotide
cauucucuacaaguaucua

SEQ ID NO: 1580763 - RNA, 19 nt, Artificial Sequence
  Description of Artificial Sequence: Synthetic oligonucleotide
ucgcugcgcaccaggccau

SEQ ID NO: 1580764 - RNA, 19 nt, Artificial Sequence
  Description of Artificial Sequence: Synthetic oligonucleotide
gugcaauacucugguaaua

SEQ ID NO: 1580765 - RNA, 19 nt, Artificial Sequence
  Description of Artificial Sequence: Synthetic oligonucleotide
aucuauggccacaguucaa

SEQ ID NO: 1580766 - RNA, 19 nt, Artificial Sequence
  Description of Artificial Sequence: Synthetic oligonucleotide
cagagaccacacugccuca

SEQ ID NO: 1580767 - RNA, 19 nt, Artificial Sequence
  Description of Artificial Sequence: Synthetic oligonucleotide
caucugcauucugaaaaua

SEQ ID NO: 1580768 - RNA, 19 nt, Artificial Sequence
  Description of Artificial Sequence: Synthetic oligonucleotide
ggcguuagcacgugacacu

SEQ ID NO: 1580769 - RNA, 19 nt, Artificial Sequence
  Description of Artificial Sequence: Synthetic oligonucleotide
gugcauaguucacgguccu

SEQ ID NO: 1580770 - RNA, 19 nt, Artificial Sequence
  Description of Artificial Sequence: Synthetic oligonucleotide
cuccagagauauacacugu

SEQ ID NO: 1580771 - RNA, 19 nt, Artificial Sequence
  Description of Artificial Sequence: Synthetic oligonucleotide
ccagugggcagugucgcug

SEQ ID NO: 1580772 - RNA, 19 nt, Artificial Sequence
  Description of Artificial Sequence: Synthetic oligonucleotide
cuggccggugugugcaaga

SEQ ID NO: 1580773 - RNA, 19 nt, Artificial Sequence
  Description of Artificial Sequence: Synthetic oligonucleotide
ccaugauggcugcagggga

SEQ ID NO: 1580774 - RNA, 19 nt, Artificial Sequence
  Description of Artificial Sequence: Synthetic oligonucleotide
ugaggccaagggucaucuu

SEQ ID NO: 1580775 - RNA, 19 nt, Artificial Sequence
  Description of Artificial Sequence: Synthetic oligonucleotide
cacaagggcugaggccaag

SEQ ID NO: 1580776 - RNA, 19 nt, Artificial Sequence
  Description of Artificial Sequence: Synthetic oligonucleotide
ccuuugccacucagacacg

SEQ ID NO: 1580777 - RNA, 19 nt, Artificial Sequence
  Description of Artificial Sequence: Synthetic oligonucleotide
ugcuaggaguuggguuuaa

SEQ ID NO: 1580778 - RNA, 19 nt, Artificial Sequence
  Description of Artificial Sequence: Synthetic oligonucleotide
gcaauacucugguaauaau

SEQ ID NO: 1580779 - RNA, 19 nt, Artificial Sequence
  Description of Artificial Sequence: Synthetic oligonucleotide
gucgggccuggcaugcuca

SEQ ID NO: 1580780 - RNA, 19 nt, Artificial Sequence
  Description of Artificial Sequence: Synthetic oligonucleotide
gcccaguugugcauaguuc

SEQ ID NO: 1580781 - RNA, 19 nt, Artificial Sequence
  Description of Artificial Sequence: Synthetic oligonucleotide
gggcugccaaucacccugg

SEQ ID NO: 1580782 - RNA, 19 nt, Artificial Sequence
  Description of Artificial Sequence: Synthetic oligonucleotide
cgggacacccauucucuac

SEQ ID NO: 1580783 - RNA, 19 nt, Artificial Sequence
  Description of Artificial Sequence: Synthetic oligonucleotide
gccaaucacccuggcauca

SEQ ID NO: 1580784 - RNA, 19 nt, Artificial Sequence
  Description of Artificial Sequence: Synthetic oligonucleotide
gcacgucccagcacgcccc

SEQ ID NO: 1580785 - RNA, 19 nt, Artificial Sequence
  Description of Artificial Sequence: Synthetic oligonucleotide
ggaguacaauguucauaua

SEQ ID NO: 1580786 - RNA, 19 nt, Artificial Sequence
  Description of Artificial Sequence: Synthetic oligonucleotide
cuccaaggggcagccuguc

SEQ ID NO: 1580787 - RNA, 19 nt, Artificial Sequence
  Description of Artificial Sequence: Synthetic oligonucleotide
gcacgccccaucccagagc

SEQ ID NO: 1580788 - RNA, 19 nt, Artificial Sequence
  Description of Artificial Sequence: Synthetic oligonucleotide
ccacagacugcuggaguac

SEQ ID NO: 1580789 - RNA, 19 nt, Artificial Sequence
  Description of Artificial Sequence: Synthetic oligonucleotide
ccacucagacacggggugc

SEQ ID NO: 1580790 - RNA, 19 nt, Artificial Sequence
  Description of Artificial Sequence: Synthetic oligonucleotide
gcugcgcaccaggccaugg

SEQ ID NO: 1580791 - RNA, 19 nt, Artificial Sequence
  Description of Artificial Sequence: Synthetic oligonucleotide
cuggggcaccccaccccac

SEQ ID NO: 1580792 - RNA, 19 nt, Artificial Sequence
  Description of Artificial Sequence: Synthetic oligonucleotide
ggugaccccuacauggacu

SEQ ID NO: 1580793 - RNA, 19 nt, Artificial Sequence
  Description of Artificial Sequence: Synthetic oligonucleotide
gcagcccgcacugucuuca

SEQ ID NO: 1580794 - RNA, 19 nt, Artificial Sequence
  Description of Artificial Sequence: Synthetic oligonucleotide
cccagcacgccccauccca

SEQ ID NO: 1580795 - RNA, 19 nt, Artificial Sequence
  Description of Artificial Sequence: Synthetic oligonucleotide
ccuacauggacucgccacu

SEQ ID NO: 1580796 - RNA, 19 nt, Artificial Sequence
  Description of Artificial Sequence: Synthetic oligonucleotide
gcagaguguugagaggugu

SEQ ID NO: 1580797 - RNA, 19 nt, Artificial Sequence
  Description of Artificial Sequence: Synthetic oligonucleotide
gcaagacagagaccacacu

SEQ ID NO: 1580798 - RNA, 19 nt, Artificial Sequence
  Description of Artificial Sequence: Synthetic oligonucleotide
cagcacgccccaucccaga

SEQ ID NO: 1580799 - RNA, 19 nt, Artificial Sequence
  Description of Artificial Sequence: Synthetic oligonucleotide
ggcugcaggggaacagcac

SEQ ID NO: 1580800 - RNA, 19 nt, Artificial Sequence
  Description of Artificial Sequence: Synthetic oligonucleotide
gggacuugcuuucuuccuu

SEQ ID NO: 1580801 - RNA, 19 nt, Artificial Sequence
  Description of Artificial Sequence: Synthetic oligonucleotide
caccuugaggaagggugaa

SEQ ID NO: 1580802 - RNA, 19 nt, Artificial Sequence
  Description of Artificial Sequence: Synthetic oligonucleotide
cacucagacacggggugcu

SEQ ID NO: 1580803 - RNA, 19 nt, Artificial Sequence
  Description of Artificial Sequence: Synthetic oligonucleotide
agcuggccggugugugcaa

SEQ ID NO: 1580804 - RNA, 19 nt, Artificial Sequence
  Description of Artificial Sequence: Synthetic oligonucleotide
ggucagauucagguggaau

SEQ ID NO: 1580805 - RNA, 19 nt, Artificial Sequence
  Description of Artificial Sequence: Synthetic oligonucleotide
gugcuaggaguuggguuua

SEQ ID NO: 1580806 - RNA, 19 nt, Artificial Sequence
  Description of Artificial Sequence: Synthetic oligonucleotide
ggcugccaaucacccuggc

SEQ ID NO: 1580807 - RNA, 19 nt, Artificial Sequence
  Description of Artificial Sequence: Synthetic oligonucleotide
caaggggcagccuguccau

SEQ ID NO: 1580808 - RNA, 19 nt, Artificial Sequence
  Description of Artificial Sequence: Synthetic oligonucleotide
ccacauaggcagggaguac

SEQ ID NO: 1580809 - RNA, 19 nt, Artificial Sequence
  Description of Artificial Sequence: Synthetic oligonucleotide
ccaaugacggugaccccua

SEQ ID NO: 1580810 - RNA, 19 nt, Artificial Sequence
  Description of Artificial Sequence: Synthetic oligonucleotide
cagugucgcugcgcaccag

SEQ ID NO: 1580811 - RNA, 19 nt, Artificial Sequence
  Description of Artificial Sequence: Synthetic oligonucleotide
gcuaggaguuggguuuaaa

SEQ ID NO: 1580812 - RNA, 19 nt, Artificial Sequence
  Description of Artificial Sequence: Synthetic oligonucleotide
cacgucccagcacgcccca

SEQ ID NO: 1580813 - RNA, 19 nt, Artificial Sequence
  Description of Artificial Sequence: Synthetic oligonucleotide
ccccaaugacggugacccc

SEQ ID NO: 1580814 - RNA, 19 nt, Artificial Sequence
  Description of Artificial Sequence: Synthetic oligonucleotide
cauaggcagggaguacaau

SEQ ID NO: 1580815 - RNA, 19 nt, Artificial Sequence
  Description of Artificial Sequence: Synthetic oligonucleotide
cggugaccccuacauggac

SEQ ID NO: 1580816 - RNA, 19 nt, Artificial Sequence
  Description of Artificial Sequence: Synthetic oligonucleotide
cccaccccacagcagcuca

SEQ ID NO: 1580817 - RNA, 19 nt, Artificial Sequence
  Description of Artificial Sequence: Synthetic oligonucleotide
acgccccaucccagagcuc

SEQ ID NO: 1580818 - RNA, 19 nt, Artificial Sequence
  Description of Artificial Sequence: Synthetic oligonucleotide
cagcagcucacugcugccu

SEQ ID NO: 1580819 - RNA, 19 nt, Artificial Sequence
  Description of Artificial Sequence: Synthetic oligonucleotide
cauugccuugggucagauu

SEQ ID NO: 1580820 - RNA, 19 nt, Artificial Sequence
  Description of Artificial Sequence: Synthetic oligonucleotide
gagcccaguugugcauagu

SEQ ID NO: 1580821 - RNA, 19 nt, Artificial Sequence
  Description of Artificial Sequence: Synthetic oligonucleotide
ccugagagcuggccggugu

SEQ ID NO: 1580822 - RNA, 19 nt, Artificial Sequence
  Description of Artificial Sequence: Synthetic oligonucleotide
cguuagcacgugacacuga

SEQ ID NO: 1580823 - RNA, 19 nt, Artificial Sequence
  Description of Artificial Sequence: Synthetic oligonucleotide
ccaccccaaugacggugac

SEQ ID NO: 1580824 - RNA, 19 nt, Artificial Sequence
  Description of Artificial Sequence: Synthetic oligonucleotide
ccggugugugcaagacaga

SEQ ID NO: 1580825 - RNA, 19 nt, Artificial Sequence
  Description of Artificial Sequence: Synthetic oligonucleotide
ccccuacauggacucgcca

SEQ ID NO: 1580826 - RNA, 19 nt, Artificial Sequence
  Description of Artificial Sequence: Synthetic oligonucleotide
ggcgggccccacagacugc

SEQ ID NO: 1580827 - RNA, 19 nt, Artificial Sequence
  Description of Artificial Sequence: Synthetic oligonucleotide
gagucgggccuggcaugcu

SEQ ID NO: 1580828 - RNA, 19 nt, Artificial Sequence
  Description of Artificial Sequence: Synthetic oligonucleotide
guacuccaaggggcagccu

SEQ ID NO: 1580829 - RNA, 19 nt, Artificial Sequence
  Description of Artificial Sequence: Synthetic oligonucleotide
gacaaccgacagaguccau

SEQ ID NO: 1580830 - RNA, 19 nt, Artificial Sequence
  Description of Artificial Sequence: Synthetic oligonucleotide
acgucccagcacgccccau

SEQ ID NO: 1580831 - RNA, 19 nt, Artificial Sequence
  Description of Artificial Sequence: Synthetic oligonucleotide
ccccacagacugcuggagu

SEQ ID NO: 1580832 - RNA, 19 nt, Artificial Sequence
  Description of Artificial Sequence: Synthetic oligonucleotide
cagcacugggcgggcccca

SEQ ID NO: 1580833 - RNA, 19 nt, Artificial Sequence
  Description of Artificial Sequence: Synthetic oligonucleotide
cgggacuugcuuucuuccu

SEQ ID NO: 1580834 - RNA, 19 nt, Artificial Sequence
  Description of Artificial Sequence: Synthetic oligonucleotide
cugcgggacuugcuuucuu

SEQ ID NO: 1580835 - RNA, 19 nt, Artificial Sequence
  Description of Artificial Sequence: Synthetic oligonucleotide
cccgggagcccuggcuuuc

SEQ ID NO: 1580836 - RNA, 19 nt, Artificial Sequence
  Description of Artificial Sequence: Synthetic oligonucleotide
ccccaccccacagcagcuc

SEQ ID NO: 1580837 - RNA, 19 nt, Artificial Sequence
  Description of Artificial Sequence: Synthetic oligonucleotide
ccgcacugucuucaacagu

SEQ ID NO: 1580838 - RNA, 19 nt, Artificial Sequence
  Description of Artificial Sequence: Synthetic oligonucleotide
ccccaggcagcagaguguu

SEQ ID NO: 1580839 - RNA, 19 nt, Artificial Sequence
  Description of Artificial Sequence: Synthetic oligonucleotide
cgcugcgcaccaggccaug

SEQ ID NO: 1580840 - RNA, 19 nt, Artificial Sequence
  Description of Artificial Sequence: Synthetic oligonucleotide
ccuuggcggcuucuuccuu

SEQ ID NO: 1580841 - RNA, 19 nt, Artificial Sequence
  Description of Artificial Sequence: Synthetic oligonucleotide
aauacuuaaaguuagccag

SEQ ID NO: 1580842 - RNA, 19 nt, Artificial Sequence
  Description of Artificial Sequence: Synthetic oligonucleotide
auuacauauuaauucagcc

SEQ ID NO: 1580843 - RNA, 19 nt, Artificial Sequence
  Description of Artificial Sequence: Synthetic oligonucleotide
uccuacacaaaucagaucc

SEQ ID NO: 1580844 - RNA, 19 nt, Artificial Sequence
  Description of Artificial Sequence: Synthetic oligonucleotide
cauaaagacagcuaaacgc

SEQ ID NO: 1580845 - RNA, 19 nt, Artificial Sequence
  Description of Artificial Sequence: Synthetic oligonucleotide
uuuuaauacuuaaaguuag

SEQ ID NO: 1580846 - RNA, 19 nt, Artificial Sequence
  Description of Artificial Sequence: Synthetic oligonucleotide
ucugaaguacuuaagaccc

SEQ ID NO: 1580847 - RNA, 19 nt, Artificial Sequence
  Description of Artificial Sequence: Synthetic oligonucleotide
uaagaaaugguauugggug

SEQ ID NO: 1580848 - RNA, 19 nt, Artificial Sequence
  Description of Artificial Sequence: Synthetic oligonucleotide
acuaaggcacaacaaaucc

SEQ ID NO: 1580849 - RNA, 19 nt, Artificial Sequence
  Description of Artificial Sequence: Synthetic oligonucleotide
aaugaugcucacugaagcc

SEQ ID NO: 1580850 - RNA, 19 nt, Artificial Sequence
  Description of Artificial Sequence: Synthetic oligonucleotide
aaguauguagaggauagcc

SEQ ID NO: 1580851 - RNA, 19 nt, Artificial Sequence
  Description of Artificial Sequence: Synthetic oligonucleotide
ucugacauuagguaaaggc

SEQ ID NO: 1580852 - RNA, 19 nt, Artificial Sequence
  Description of Artificial Sequence: Synthetic oligonucleotide
uacuguuuuggcuacaggg

SEQ ID NO: 1580853 - RNA, 19 nt, Artificial Sequence
  Description of Artificial Sequence: Synthetic oligonucleotide
uaaggcuuuaguuacaaug

SEQ ID NO: 1580854 - RNA, 19 nt, Artificial Sequence
  Description of Artificial Sequence: Synthetic oligonucleotide
aacaaauagagauuauccu

SEQ ID NO: 1580855 - RNA, 19 nt, Artificial Sequence
  Description of Artificial Sequence: Synthetic oligonucleotide
auuauuaaugcuuuguuaa

SEQ ID NO: 1580856 - RNA, 19 nt, Artificial Sequence
  Description of Artificial Sequence: Synthetic oligonucleotide
aaugguauugggugggagg

SEQ ID NO: 1580857 - RNA, 19 nt, Artificial Sequence
  Description of Artificial Sequence: Synthetic oligonucleotide
uacauauuaauucagccau

SEQ ID NO: 1580858 - RNA, 19 nt, Artificial Sequence
  Description of Artificial Sequence: Synthetic oligonucleotide
uuaaagaucagguaggauu

SEQ ID NO: 1580859 - RNA, 19 nt, Artificial Sequence
  Description of Artificial Sequence: Synthetic oligonucleotide
aagaaaugguauugggugg

SEQ ID NO: 1580860 - RNA, 19 nt, Artificial Sequence
  Description of Artificial Sequence: Synthetic oligonucleotide
aaaucagauccauccagac

SEQ ID NO: 1580861 - RNA, 19 nt, Artificial Sequence
  Description of Artificial Sequence: Synthetic oligonucleotide
uuaaaguuagccagaguag

SEQ ID NO: 1580862 - RNA, 19 nt, Artificial Sequence
  Description of Artificial Sequence: Synthetic oligonucleotide
agacacaacaaauagagau

SEQ ID NO: 1580863 - RNA, 19 nt, Artificial Sequence
  Description of Artificial Sequence: Synthetic oligonucleotide
auucauauauucuucccuc

SEQ ID NO: 1580864 - RNA, 19 nt, Artificial Sequence
  Description of Artificial Sequence: Synthetic oligonucleotide
cauaugaagcaaacgaggg

SEQ ID NO: 1580865 - RNA, 19 nt, Artificial Sequence
  Description of Artificial Sequence: Synthetic oligonucleotide
uuugcagucuacuagggga

SEQ ID NO: 1580866 - RNA, 19 nt, Artificial Sequence
  Description of Artificial Sequence: Synthetic oligonucleotide
auagagauuauccuuagaa

SEQ ID NO: 1580867 - RNA, 19 nt, Artificial Sequence
  Description of Artificial Sequence: Synthetic oligonucleotide
uaaggcacaacaaauccug

SEQ ID NO: 1580868 - RNA, 19 nt, Artificial Sequence
  Description of Artificial Sequence: Synthetic oligonucleotide
uuaauacuuaaaguuagcc

SEQ ID NO: 1580869 - RNA, 19 nt, Artificial Sequence
  Description of Artificial Sequence: Synthetic oligonucleotide
uucucuacuccuuaggacc

SEQ ID NO: 1580870 - RNA, 19 nt, Artificial Sequence
  Description of Artificial Sequence: Synthetic oligonucleotide
aagacagcuaaacgcuugc

SEQ ID NO: 1580871 - RNA, 19 nt, Artificial Sequence
  Description of Artificial Sequence: Synthetic oligonucleotide
aacauauacuguuuuggcu

SEQ ID NO: 1580872 - RNA, 19 nt, Artificial Sequence
  Description of Artificial Sequence: Synthetic oligonucleotide
acauaaagacagcuaaacg

SEQ ID NO: 1580873 - RNA, 19 nt, Artificial Sequence
  Description of Artificial Sequence: Synthetic oligonucleotide
uaaaguuagccagaguagg

SEQ ID NO: 1580874 - RNA, 19 nt, Artificial Sequence
  Description of Artificial Sequence: Synthetic oligonucleotide
uuacuauuauuccugcuug

SEQ ID NO: 1580875 - RNA, 19 nt, Artificial Sequence
  Description of Artificial Sequence: Synthetic oligonucleotide
agaacuacuaaagaaaccu

SEQ ID NO: 1580876 - RNA, 19 nt, Artificial Sequence
  Description of Artificial Sequence: Synthetic oligonucleotide
ugacauuagguaaaggcac

SEQ ID NO: 1580877 - RNA, 19 nt, Artificial Sequence
  Description of Artificial Sequence: Synthetic oligonucleotide
gaaugaugcucacugaagc

SEQ ID NO: 1580878 - RNA, 19 nt, Artificial Sequence
  Description of Artificial Sequence: Synthetic oligonucleotide
aaauagagauuauccuuag

SEQ ID NO: 1580879 - RNA, 19 nt, Artificial Sequence
  Description of Artificial Sequence: Synthetic oligonucleotide
uuuaaugugaaaagugcau

SEQ ID NO: 1580880 - RNA, 19 nt, Artificial Sequence
  Description of Artificial Sequence: Synthetic oligonucleotide
cucugaaguacuuaagacc

SEQ ID NO: 1580881 - RNA, 19 nt, Artificial Sequence
  Description of Artificial Sequence: Synthetic oligonucleotide
uuuaauacuuaaaguuagc

SEQ ID NO: 1580882 - RNA, 19 nt, Artificial Sequence
  Description of Artificial Sequence: Synthetic oligonucleotide
aauuuaucuacagggaacu

SEQ ID NO: 1580883 - RNA, 19 nt, Artificial Sequence
  Description of Artificial Sequence: Synthetic oligonucleotide
gaucagguaggauuagagg

SEQ ID NO: 1580884 - RNA, 19 nt, Artificial Sequence
  Description of Artificial Sequence: Synthetic oligonucleotide
gaguuugcagucuacuagg

SEQ ID NO: 1580885 - RNA, 19 nt, Artificial Sequence
  Description of Artificial Sequence: Synthetic oligonucleotide
uacaacaacacaccaaguc

SEQ ID NO: 1580886 - RNA, 19 nt, Artificial Sequence
  Description of Artificial Sequence: Synthetic oligonucleotide
uuagaauuauuaaugcuuu

SEQ ID NO: 1580887 - RNA, 19 nt, Artificial Sequence
  Description of Artificial Sequence: Synthetic oligonucleotide
agagauuauccuuagaauu

SEQ ID NO: 1580888 - RNA, 19 nt, Artificial Sequence
  Description of Artificial Sequence: Synthetic oligonucleotide
uuaccuauucauauauucu

SEQ ID NO: 1580889 - RNA, 19 nt, Artificial Sequence
  Description of Artificial Sequence: Synthetic oligonucleotide
cuuaaaguuagccagagua

SEQ ID NO: 1580890 - RNA, 19 nt, Artificial Sequence
  Description of Artificial Sequence: Synthetic oligonucleotide
aacccucacaguuuacaac

SEQ ID NO: 1580891 - RNA, 19 nt, Artificial Sequence
  Description of Artificial Sequence: Synthetic oligonucleotide
auaugaagcaaacgagggg

SEQ ID NO: 1580892 - RNA, 19 nt, Artificial Sequence
  Description of Artificial Sequence: Synthetic oligonucleotide
uuuaucuacagggaacucc

SEQ ID NO: 1580893 - RNA, 19 nt, Artificial Sequence
  Description of Artificial Sequence: Synthetic oligonucleotide
auuaaugcuuuguuaaaga

SEQ ID NO: 1580894 - RNA, 19 nt, Artificial Sequence
  Description of Artificial Sequence: Synthetic oligonucleotide
acaacaaauagagauuauc

SEQ ID NO: 1580895 - RNA, 19 nt, Artificial Sequence
  Description of Artificial Sequence: Synthetic oligonucleotide
acagcuaaacgcuugcaag

SEQ ID NO: 1580896 - RNA, 19 nt, Artificial Sequence
  Description of Artificial Sequence: Synthetic oligonucleotide
accugacuaguucuaaggc

SEQ ID NO: 1580897 - RNA, 19 nt, Artificial Sequence
  Description of Artificial Sequence: Synthetic oligonucleotide
gauagccguauuuuaauac

SEQ ID NO: 1580898 - RNA, 19 nt, Artificial Sequence
  Description of Artificial Sequence: Synthetic oligonucleotide
guuacaaugcaguugauua

SEQ ID NO: 1580899 - RNA, 19 nt, Artificial Sequence
  Description of Artificial Sequence: Synthetic oligonucleotide
auagucugcagguaaggag

SEQ ID NO: 1580900 - RNA, 19 nt, Artificial Sequence
  Description of Artificial Sequence: Synthetic oligonucleotide
aguucuaaggcuuuaguua

SEQ ID NO: 1580901 - RNA, 19 nt, Artificial Sequence
  Description of Artificial Sequence: Synthetic oligonucleotide
auuacuauuauuccugcuu

SEQ ID NO: 1580902 - RNA, 19 nt, Artificial Sequence
  Description of Artificial Sequence: Synthetic oligonucleotide
uagucugcagguaaggaga

SEQ ID NO: 1580903 - RNA, 19 nt, Artificial Sequence
  Description of Artificial Sequence: Synthetic oligonucleotide
uacauacuggggauagugg

SEQ ID NO: 1580904 - RNA, 19 nt, Artificial Sequence
  Description of Artificial Sequence: Synthetic oligonucleotide
acaaauagagauuauccuu

SEQ ID NO: 1580905 - RNA, 19 nt, Artificial Sequence
  Description of Artificial Sequence: Synthetic oligonucleotide
acauaugaagcaaacgagg

SEQ ID NO: 1580906 - RNA, 19 nt, Artificial Sequence
  Description of Artificial Sequence: Synthetic oligonucleotide
aguuugugcagacacuaag

SEQ ID NO: 1580907 - RNA, 19 nt, Artificial Sequence
  Description of Artificial Sequence: Synthetic oligonucleotide
ucucugaaguacuuaagac

SEQ ID NO: 1580908 - RNA, 19 nt, Artificial Sequence
  Description of Artificial Sequence: Synthetic oligonucleotide
ugcaagucugacauuaggu

SEQ ID NO: 1580909 - RNA, 19 nt, Artificial Sequence
  Description of Artificial Sequence: Synthetic oligonucleotide
uaaaaccacuguuaucugc

SEQ ID NO: 1580910 - RNA, 19 nt, Artificial Sequence
  Description of Artificial Sequence: Synthetic oligonucleotide
aaaguuagccagaguaggg

SEQ ID NO: 1580911 - RNA, 19 nt, Artificial Sequence
  Description of Artificial Sequence: Synthetic oligonucleotide
uugcaagucugacauuagg

SEQ ID NO: 1580912 - RNA, 19 nt, Artificial Sequence
  Description of Artificial Sequence: Synthetic oligonucleotide
uccuuaggacccuaaagcc

SEQ ID NO: 1580913 - RNA, 19 nt, Artificial Sequence
  Description of Artificial Sequence: Synthetic oligonucleotide
cuaacauaaagacagcuaa

SEQ ID NO: 1580914 - RNA, 19 nt, Artificial Sequence
  Description of Artificial Sequence: Synthetic oligonucleotide
ggaucaguaauuuaucuac

SEQ ID NO: 1580915 - RNA, 19 nt, Artificial Sequence
  Description of Artificial Sequence: Synthetic oligonucleotide
cuuaggacccuaaagccac

SEQ ID NO: 1580916 - RNA, 19 nt, Artificial Sequence
  Description of Artificial Sequence: Synthetic oligonucleotide
uuacauacuggggauagug

SEQ ID NO: 1580917 - RNA, 19 nt, Artificial Sequence
  Description of Artificial Sequence: Synthetic oligonucleotide
caguuuacaacaacacacc

SEQ ID NO: 1580918 - RNA, 19 nt, Artificial Sequence
  Description of Artificial Sequence: Synthetic oligonucleotide
agaauuauuaaugcuuugu

SEQ ID NO: 1580919 - RNA, 19 nt, Artificial Sequence
  Description of Artificial Sequence: Synthetic oligonucleotide
guucuaaggcuuuaguuac

SEQ ID NO: 1580920 - RNA, 19 nt, Artificial Sequence
  Description of Artificial Sequence: Synthetic oligonucleotide
aguauguagaggauagccg

SEQ ID NO: 1580921 - RNA, 19 nt, Artificial Sequence
  Description of Artificial Sequence: Synthetic oligonucleotide
uuaaugcuuuguuaaagau

SEQ ID NO: 1580922 - RNA, 19 nt, Artificial Sequence
  Description of Artificial Sequence: Synthetic oligonucleotide
cauaaaaccacuguuaucu

SEQ ID NO: 1580923 - RNA, 19 nt, Artificial Sequence
  Description of Artificial Sequence: Synthetic oligonucleotide
agccauuacauacugggga

SEQ ID NO: 1580924 - RNA, 19 nt, Artificial Sequence
  Description of Artificial Sequence: Synthetic oligonucleotide
aguuagccagaguaggguc

SEQ ID NO: 1580925 - RNA, 19 nt, Artificial Sequence
  Description of Artificial Sequence: Synthetic oligonucleotide
auagccguauuuuaauacu

SEQ ID NO: 1580926 - RNA, 19 nt, Artificial Sequence
  Description of Artificial Sequence: Synthetic oligonucleotide
ucagguaggauuagagggu

SEQ ID NO: 1580927 - RNA, 19 nt, Artificial Sequence
  Description of Artificial Sequence: Synthetic oligonucleotide
ugcucucucucucugaagu

SEQ ID NO: 1580928 - RNA, 19 nt, Artificial Sequence
  Description of Artificial Sequence: Synthetic oligonucleotide
ggaacauauacuguuuugg

SEQ ID NO: 1580929 - RNA, 19 nt, Artificial Sequence
  Description of Artificial Sequence: Synthetic oligonucleotide
ugcacauaugaagcaaacg

SEQ ID NO: 1580930 - RNA, 19 nt, Artificial Sequence
  Description of Artificial Sequence: Synthetic oligonucleotide
aauagagauuauccuuaga

SEQ ID NO: 1580931 - RNA, 19 nt, Artificial Sequence
  Description of Artificial Sequence: Synthetic oligonucleotide
ugcagguaaggagagaaug

SEQ ID NO: 1580932 - RNA, 19 nt, Artificial Sequence
  Description of Artificial Sequence: Synthetic oligonucleotide
aggaaccuagucuggggcc

SEQ ID NO: 1580933 - RNA, 19 nt, Artificial Sequence
  Description of Artificial Sequence: Synthetic oligonucleotide
acuccuuaggacccuaaag

SEQ ID NO: 1580934 - RNA, 19 nt, Artificial Sequence
  Description of Artificial Sequence: Synthetic oligonucleotide
auucccauccuuucuccac

SEQ ID NO: 1580935 - RNA, 19 nt, Artificial Sequence
  Description of Artificial Sequence: Synthetic oligonucleotide
gacuaggaaguauguagag

SEQ ID NO: 1580936 - RNA, 19 nt, Artificial Sequence
  Description of Artificial Sequence: Synthetic oligonucleotide
uuagaggguaagaaauggu

SEQ ID NO: 1580937 - RNA, 19 nt, Artificial Sequence
  Description of Artificial Sequence: Synthetic oligonucleotide
ucuacagggaacuccuaca

SEQ ID NO: 1580938 - RNA, 19 nt, Artificial Sequence
  Description of Artificial Sequence: Synthetic oligonucleotide
acuaggaaguauguagagg

SEQ ID NO: 1580939 - RNA, 19 nt, Artificial Sequence
  Description of Artificial Sequence: Synthetic oligonucleotide
uccuucucuacuccuuagg

SEQ ID NO: 1580940 - RNA, 19 nt, Artificial Sequence
  Description of Artificial Sequence: Synthetic oligonucleotide
aacuccuacacaaaucaga

SEQ ID NO: 1580941 - RNA, 19 nt, Artificial Sequence
  Description of Artificial Sequence: Synthetic oligonucleotide
ugggaucacagacuguuga

SEQ ID NO: 1580942 - RNA, 19 nt, Artificial Sequence
  Description of Artificial Sequence: Synthetic oligonucleotide
gacacuaaggcacaacaaa

SEQ ID NO: 1580943 - RNA, 19 nt, Artificial Sequence
  Description of Artificial Sequence: Synthetic oligonucleotide
uuacaaugcaguugauuac

SEQ ID NO: 1580944 - RNA, 19 nt, Artificial Sequence
  Description of Artificial Sequence: Synthetic oligonucleotide
uacuaggggaagauccuag

SEQ ID NO: 1580945 - RNA, 19 nt, Artificial Sequence
  Description of Artificial Sequence: Synthetic oligonucleotide
gucuacuaggggaagaucc

SEQ ID NO: 1580946 - RNA, 19 nt, Artificial Sequence
  Description of Artificial Sequence: Synthetic oligonucleotide
caccugacuaguucuaagg

SEQ ID NO: 1580947 - RNA, 19 nt, Artificial Sequence
  Description of Artificial Sequence: Synthetic oligonucleotide
cuaaacgcuugcaagucug

SEQ ID NO: 1580948 - RNA, 19 nt, Artificial Sequence
  Description of Artificial Sequence: Synthetic oligonucleotide
uagaauuauuaaugcuuug

SEQ ID NO: 1580949 - RNA, 19 nt, Artificial Sequence
  Description of Artificial Sequence: Synthetic oligonucleotide
ucucuacuccuuaggaccc

SEQ ID NO: 1580950 - RNA, 19 nt, Artificial Sequence
  Description of Artificial Sequence: Synthetic oligonucleotide
ucuacuaggggaagauccu

SEQ ID NO: 1580951 - RNA, 19 nt, Artificial Sequence
  Description of Artificial Sequence: Synthetic oligonucleotide
gauccuaggcuuaacagga

SEQ ID NO: 1580952 - RNA, 19 nt, Artificial Sequence
  Description of Artificial Sequence: Synthetic oligonucleotide
aaacgagggguccacccug

SEQ ID NO: 1580953 - RNA, 19 nt, Artificial Sequence
  Description of Artificial Sequence: Synthetic oligonucleotide
aguaauuuaucuacaggga

SEQ ID NO: 1580954 - RNA, 19 nt, Artificial Sequence
  Description of Artificial Sequence: Synthetic oligonucleotide
cuuagaauuauuaaugcuu

SEQ ID NO: 1580955 - RNA, 19 nt, Artificial Sequence
  Description of Artificial Sequence: Synthetic oligonucleotide
aaacgcuugcaagucugac

SEQ ID NO: 1580956 - RNA, 19 nt, Artificial Sequence
  Description of Artificial Sequence: Synthetic oligonucleotide
aggagcaccugacuaguuc

SEQ ID NO: 1580957 - RNA, 19 nt, Artificial Sequence
  Description of Artificial Sequence: Synthetic oligonucleotide
caagcugagagcagucugc

SEQ ID NO: 1580958 - RNA, 19 nt, Artificial Sequence
  Description of Artificial Sequence: Synthetic oligonucleotide
acuauuauuccugcuugag

SEQ ID NO: 1580959 - RNA, 19 nt, Artificial Sequence
  Description of Artificial Sequence: Synthetic oligonucleotide
gcacauaugaagcaaacga

SEQ ID NO: 1580960 - RNA, 19 nt, Artificial Sequence
  Description of Artificial Sequence: Synthetic oligonucleotide
ugagugcacauaugaagca

SEQ ID NO: 1580961 - RNA, 19 nt, Artificial Sequence
  Description of Artificial Sequence: Synthetic oligonucleotide
acaaauccuggguuuggag

SEQ ID NO: 1580962 - RNA, 19 nt, Artificial Sequence
  Description of Artificial Sequence: Synthetic oligonucleotide
cacaccaagucccuggcag

SEQ ID NO: 1580963 - RNA, 19 nt, Artificial Sequence
  Description of Artificial Sequence: Synthetic oligonucleotide
ggaaguauguagaggauag

SEQ ID NO: 1580964 - RNA, 19 nt, Artificial Sequence
  Description of Artificial Sequence: Synthetic oligonucleotide
cauuacauacuggggauag

SEQ ID NO: 1580965 - RNA, 19 nt, Artificial Sequence
  Description of Artificial Sequence: Synthetic oligonucleotide
aguuccagugggcaccagg

SEQ ID NO: 1580966 - RNA, 19 nt, Artificial Sequence
  Description of Artificial Sequence: Synthetic oligonucleotide
aggauuagaggguaagaaa

SEQ ID NO: 1580967 - RNA, 19 nt, Artificial Sequence
  Description of Artificial Sequence: Synthetic oligonucleotide
guuugcagucuacuagggg

SEQ ID NO: 1580968 - RNA, 19 nt, Artificial Sequence
  Description of Artificial Sequence: Synthetic oligonucleotide
uuucuccacccuauuaccu

SEQ ID NO: 1580969 - RNA, 19 nt, Artificial Sequence
  Description of Artificial Sequence: Synthetic oligonucleotide
ggaacuccuacacaaauca

SEQ ID NO: 1580970 - RNA, 19 nt, Artificial Sequence
  Description of Artificial Sequence: Synthetic oligonucleotide
uuaaugugaaaagugcauu

SEQ ID NO: 1580971 - RNA, 19 nt, Artificial Sequence
  Description of Artificial Sequence: Synthetic oligonucleotide
ugggcauaaaaccacuguu

SEQ ID NO: 1580972 - RNA, 19 nt, Artificial Sequence
  Description of Artificial Sequence: Synthetic oligonucleotide
aacuacuaaagaaaccuuu

SEQ ID NO: 1580973 - RNA, 19 nt, Artificial Sequence
  Description of Artificial Sequence: Synthetic oligonucleotide
uaguucuaaggcuuuaguu

SEQ ID NO: 1580974 - RNA, 19 nt, Artificial Sequence
  Description of Artificial Sequence: Synthetic oligonucleotide
uacugcuaggcguuugcag

SEQ ID NO: 1580975 - RNA, 19 nt, Artificial Sequence
  Description of Artificial Sequence: Synthetic oligonucleotide
gagaacuacuaaagaaacc

SEQ ID NO: 1580976 - RNA, 19 nt, Artificial Sequence
  Description of Artificial Sequence: Synthetic oligonucleotide
gagaaugaugcucacugaa

SEQ ID NO: 1580977 - RNA, 19 nt, Artificial Sequence
  Description of Artificial Sequence: Synthetic oligonucleotide
uguuuuacugguuccugau

SEQ ID NO: 1580978 - RNA, 19 nt, Artificial Sequence
  Description of Artificial Sequence: Synthetic oligonucleotide
cuucucuacuccuuaggac

SEQ ID NO: 1580979 - RNA, 19 nt, Artificial Sequence
  Description of Artificial Sequence: Synthetic oligonucleotide
acgcuugcaagucugacau

SEQ ID NO: 1580980 - RNA, 19 nt, Artificial Sequence
  Description of Artificial Sequence: Synthetic oligonucleotide
aaaugguauugggugggag

SEQ ID NO: 1580981 - RNA, 19 nt, Artificial Sequence
  Description of Artificial Sequence: Synthetic oligonucleotide
uccccuaaggugcugugca

SEQ ID NO: 1580982 - RNA, 19 nt, Artificial Sequence
  Description of Artificial Sequence: Synthetic oligonucleotide
ucuacccgcuucuagcucu

SEQ ID NO: 1580983 - RNA, 19 nt, Artificial Sequence
  Description of Artificial Sequence: Synthetic oligonucleotide
agaucagguaggauuagag

SEQ ID NO: 1580984 - RNA, 19 nt, Artificial Sequence
  Description of Artificial Sequence: Synthetic oligonucleotide
cacuaaggcacaacaaauc

SEQ ID NO: 1580985 - RNA, 19 nt, Artificial Sequence
  Description of Artificial Sequence: Synthetic oligonucleotide
cuagggucaguuccagugg

SEQ ID NO: 1580986 - RNA, 19 nt, Artificial Sequence
  Description of Artificial Sequence: Synthetic oligonucleotide
uuugcaguggaauggcuuu

SEQ ID NO: 1580987 - RNA, 19 nt, Artificial Sequence
  Description of Artificial Sequence: Synthetic oligonucleotide
uccuaggcuuaacaggaga

SEQ ID NO: 1580988 - RNA, 19 nt, Artificial Sequence
  Description of Artificial Sequence: Synthetic oligonucleotide
agugcauuuauuacuauua

SEQ ID NO: 1580989 - RNA, 19 nt, Artificial Sequence
  Description of Artificial Sequence: Synthetic oligonucleotide
cuuaacaggagaacuacua

SEQ ID NO: 1580990 - RNA, 19 nt, Artificial Sequence
  Description of Artificial Sequence: Synthetic oligonucleotide
uucccauccuuucuccacc

SEQ ID NO: 1580991 - RNA, 19 nt, Artificial Sequence
  Description of Artificial Sequence: Synthetic oligonucleotide
uucacugagugcacauaug

SEQ ID NO: 1580992 - RNA, 19 nt, Artificial Sequence
  Description of Artificial Sequence: Synthetic oligonucleotide
gcauguccagacuugaugc

SEQ ID NO: 1580993 - RNA, 19 nt, Artificial Sequence
  Description of Artificial Sequence: Synthetic oligonucleotide
ccuauucauauauucuucc

SEQ ID NO: 1580994 - RNA, 19 nt, Artificial Sequence
  Description of Artificial Sequence: Synthetic oligonucleotide
aaagaucagguaggauuag

SEQ ID NO: 1580995 - RNA, 19 nt, Artificial Sequence
  Description of Artificial Sequence: Synthetic oligonucleotide
ucaguuugugcagacacua

SEQ ID NO: 1580996 - RNA, 19 nt, Artificial Sequence
  Description of Artificial Sequence: Synthetic oligonucleotide
gagauuauccuuagaauua

SEQ ID NO: 1580997 - RNA, 19 nt, Artificial Sequence
  Description of Artificial Sequence: Synthetic oligonucleotide
agcuaaacgcuugcaaguc

SEQ ID NO: 1580998 - RNA, 19 nt, Artificial Sequence
  Description of Artificial Sequence: Synthetic oligonucleotide
cuacagggaacuccuacac

SEQ ID NO: 1580999 - RNA, 19 nt, Artificial Sequence
  Description of Artificial Sequence: Synthetic oligonucleotide
uuaucugcucucucucucu

SEQ ID NO: 1581000 - RNA, 19 nt, Artificial Sequence
  Description of Artificial Sequence: Synthetic oligonucleotide
caggagaacuacuaaagaa

SEQ ID NO: 1581001 - RNA, 19 nt, Artificial Sequence
  Description of Artificial Sequence: Synthetic oligonucleotide
ucugcucucucucucugaa

SEQ ID NO: 1581002 - RNA, 19 nt, Artificial Sequence
  Description of Artificial Sequence: Synthetic oligonucleotide
gcuagggucaguuccagug

SEQ ID NO: 1581003 - RNA, 19 nt, Artificial Sequence
  Description of Artificial Sequence: Synthetic oligonucleotide
guauguagaggauagccgu

SEQ ID NO: 1581004 - RNA, 19 nt, Artificial Sequence
  Description of Artificial Sequence: Synthetic oligonucleotide
acuaguucuaaggcuuuag

SEQ ID NO: 1581005 - RNA, 19 nt, Artificial Sequence
  Description of Artificial Sequence: Synthetic oligonucleotide
cucucugaaguacuuaaga

SEQ ID NO: 1581006 - RNA, 19 nt, Artificial Sequence
  Description of Artificial Sequence: Synthetic oligonucleotide
aguaggcuagggucaguuc

SEQ ID NO: 1581007 - RNA, 19 nt, Artificial Sequence
  Description of Artificial Sequence: Synthetic oligonucleotide
uguccagacuugaugccac

SEQ ID NO: 1581008 - RNA, 19 nt, Artificial Sequence
  Description of Artificial Sequence: Synthetic oligonucleotide
caggaaccuagucuggggc

SEQ ID NO: 1581009 - RNA, 19 nt, Artificial Sequence
  Description of Artificial Sequence: Synthetic oligonucleotide
cagggcaagccauaccacc

SEQ ID NO: 1581010 - RNA, 19 nt, Artificial Sequence
  Description of Artificial Sequence: Synthetic oligonucleotide
uaaacgcuugcaagucuga

SEQ ID NO: 1581011 - RNA, 19 nt, Artificial Sequence
  Description of Artificial Sequence: Synthetic oligonucleotide
aggauagccguauuuuaau

SEQ ID NO: 1581012 - RNA, 19 nt, Artificial Sequence
  Description of Artificial Sequence: Synthetic oligonucleotide
uaucugcucucucucucug

SEQ ID NO: 1581013 - RNA, 19 nt, Artificial Sequence
  Description of Artificial Sequence: Synthetic oligonucleotide
caaaucagauccauccaga

SEQ ID NO: 1581014 - RNA, 19 nt, Artificial Sequence
  Description of Artificial Sequence: Synthetic oligonucleotide
aacaaauccuggguuugga

SEQ ID NO: 1581015 - RNA, 19 nt, Artificial Sequence
  Description of Artificial Sequence: Synthetic oligonucleotide
aagcaaacgagggguccac

SEQ ID NO: 1581016 - RNA, 19 nt, Artificial Sequence
  Description of Artificial Sequence: Synthetic oligonucleotide
ccuaaagccaccuggauga

SEQ ID NO: 1581017 - RNA, 19 nt, Artificial Sequence
  Description of Artificial Sequence: Synthetic oligonucleotide
uaggcuagggucaguucca

SEQ ID NO: 1581018 - RNA, 19 nt, Artificial Sequence
  Description of Artificial Sequence: Synthetic oligonucleotide
acuguuuuggcuacaggga

SEQ ID NO: 1581019 - RNA, 19 nt, Artificial Sequence
  Description of Artificial Sequence: Synthetic oligonucleotide
uugcagucuacuaggggaa

SEQ ID NO: 1581020 - RNA, 19 nt, Artificial Sequence
  Description of Artificial Sequence: Synthetic oligonucleotide
acugguuccugaugggacu

SEQ ID NO: 1581021 - RNA, 19 nt, Artificial Sequence
  Description of Artificial Sequence: Synthetic oligonucleotide
uauguagaggauagccgua

SEQ ID NO: 1581022 - RNA, 19 nt, Artificial Sequence
  Description of Artificial Sequence: Synthetic oligonucleotide
ggagaacuacuaaagaaac

SEQ ID NO: 1581023 - RNA, 19 nt, Artificial Sequence
  Description of Artificial Sequence: Synthetic oligonucleotide
ugcaguggaauggcuuugg

SEQ ID NO: 1581024 - RNA, 19 nt, Artificial Sequence
  Description of Artificial Sequence: Synthetic oligonucleotide
cuugcaagucugacauuag

SEQ ID NO: 1581025 - RNA, 19 nt, Artificial Sequence
  Description of Artificial Sequence: Synthetic oligonucleotide
ugggaggagcaccugacua

SEQ ID NO: 1581026 - RNA, 19 nt, Artificial Sequence
  Description of Artificial Sequence: Synthetic oligonucleotide
auauucuucccuccccuaa

SEQ ID NO: 1581027 - RNA, 19 nt, Artificial Sequence
  Description of Artificial Sequence: Synthetic oligonucleotide
gaucaguaauuuaucuaca

SEQ ID NO: 1581028 - RNA, 19 nt, Artificial Sequence
  Description of Artificial Sequence: Synthetic oligonucleotide
uuacugguuccugauggga

SEQ ID NO: 1581029 - RNA, 19 nt, Artificial Sequence
  Description of Artificial Sequence: Synthetic oligonucleotide
augguauugggugggagga

SEQ ID NO: 1581030 - RNA, 19 nt, Artificial Sequence
  Description of Artificial Sequence: Synthetic oligonucleotide
uugggaucacagacuguug

SEQ ID NO: 1581031 - RNA, 19 nt, Artificial Sequence
  Description of Artificial Sequence: Synthetic oligonucleotide
gaaguauguagaggauagc

SEQ ID NO: 1581032 - RNA, 19 nt, Artificial Sequence
  Description of Artificial Sequence: Synthetic oligonucleotide
gauccugugugacuaggaa

SEQ ID NO: 1581033 - RNA, 19 nt, Artificial Sequence
  Description of Artificial Sequence: Synthetic oligonucleotide
acuccuacacaaaucagau

SEQ ID NO: 1581034 - RNA, 19 nt, Artificial Sequence
  Description of Artificial Sequence: Synthetic oligonucleotide
gaacuccuacacaaaucag

SEQ ID NO: 1581035 - RNA, 19 nt, Artificial Sequence
  Description of Artificial Sequence: Synthetic oligonucleotide
acuacuaaagaaaccuuua

SEQ ID NO: 1581036 - RNA, 19 nt, Artificial Sequence
  Description of Artificial Sequence: Synthetic oligonucleotide
gauggcgccuuucaugaaa

SEQ ID NO: 1581037 - RNA, 19 nt, Artificial Sequence
  Description of Artificial Sequence: Synthetic oligonucleotide
aggcguuugcaguggaaug

SEQ ID NO: 1581038 - RNA, 19 nt, Artificial Sequence
  Description of Artificial Sequence: Synthetic oligonucleotide
augggacugaggauagaac

SEQ ID NO: 1581039 - RNA, 19 nt, Artificial Sequence
  Description of Artificial Sequence: Synthetic oligonucleotide
uggguaaagucuguguuuu

SEQ ID NO: 1581040 - RNA, 19 nt, Artificial Sequence
  Description of Artificial Sequence: Synthetic oligonucleotide
uccacccuauuaccuauuc

SEQ ID NO: 1581041 - RNA, 19 nt, Artificial Sequence
  Description of Artificial Sequence: Synthetic oligonucleotide
acacuaaggcacaacaaau

SEQ ID NO: 1581042 - RNA, 19 nt, Artificial Sequence
  Description of Artificial Sequence: Synthetic oligonucleotide
cuaggcuuaacaggagaac

SEQ ID NO: 1581043 - RNA, 19 nt, Artificial Sequence
  Description of Artificial Sequence: Synthetic oligonucleotide
cuauuaccuauucauauau

SEQ ID NO: 1581044 - RNA, 19 nt, Artificial Sequence
  Description of Artificial Sequence: Synthetic oligonucleotide
gaggugggcauaaaaccac

SEQ ID NO: 1581045 - RNA, 19 nt, Artificial Sequence
  Description of Artificial Sequence: Synthetic oligonucleotide
ccaucuuuacugcuaggcg

SEQ ID NO: 1581046 - RNA, 19 nt, Artificial Sequence
  Description of Artificial Sequence: Synthetic oligonucleotide
ugcagacaggaaccuaguc

SEQ ID NO: 1581047 - RNA, 19 nt, Artificial Sequence
  Description of Artificial Sequence: Synthetic oligonucleotide
gguaggauuagaggguaag

SEQ ID NO: 1581048 - RNA, 19 nt, Artificial Sequence
  Description of Artificial Sequence: Synthetic oligonucleotide
ggcguuugcaguggaaugg

SEQ ID NO: 1581049 - RNA, 19 nt, Artificial Sequence
  Description of Artificial Sequence: Synthetic oligonucleotide
caucuuuacugcuaggcgu

SEQ ID NO: 1581050 - RNA, 19 nt, Artificial Sequence
  Description of Artificial Sequence: Synthetic oligonucleotide
uacuccuuaggacccuaaa

SEQ ID NO: 1581051 - RNA, 19 nt, Artificial Sequence
  Description of Artificial Sequence: Synthetic oligonucleotide
cucucucucucugaaguac

SEQ ID NO: 1581052 - RNA, 19 nt, Artificial Sequence
  Description of Artificial Sequence: Synthetic oligonucleotide
agucuacuaggggaagauc

SEQ ID NO: 1581053 - RNA, 19 nt, Artificial Sequence
  Description of Artificial Sequence: Synthetic oligonucleotide
uuaggacccuaaagccacc

SEQ ID NO: 1581054 - RNA, 19 nt, Artificial Sequence
  Description of Artificial Sequence: Synthetic oligonucleotide
ucaccaacccucacaguuu

SEQ ID NO: 1581055 - RNA, 19 nt, Artificial Sequence
  Description of Artificial Sequence: Synthetic oligonucleotide
ucuccacccuauuaccuau

SEQ ID NO: 1581056 - RNA, 19 nt, Artificial Sequence
  Description of Artificial Sequence: Synthetic oligonucleotide
agguaaaggcacgugggcu

SEQ ID NO: 1581057 - RNA, 19 nt, Artificial Sequence
  Description of Artificial Sequence: Synthetic oligonucleotide
ucucgccccaggaacugug

SEQ ID NO: 1581058 - RNA, 19 nt, Artificial Sequence
  Description of Artificial Sequence: Synthetic oligonucleotide
cauauuaauucagccauua

SEQ ID NO: 1581059 - RNA, 19 nt, Artificial Sequence
  Description of Artificial Sequence: Synthetic oligonucleotide
uaggcguuugcaguggaau

SEQ ID NO: 1581060 - RNA, 19 nt, Artificial Sequence
  Description of Artificial Sequence: Synthetic oligonucleotide
caguugauuacauauuaau

SEQ ID NO: 1581061 - RNA, 19 nt, Artificial Sequence
  Description of Artificial Sequence: Synthetic oligonucleotide
cccaauccaauucacugag

SEQ ID NO: 1581062 - RNA, 19 nt, Artificial Sequence
  Description of Artificial Sequence: Synthetic oligonucleotide
cauuagguaaaggcacgug

SEQ ID NO: 1581063 - RNA, 19 nt, Artificial Sequence
  Description of Artificial Sequence: Synthetic oligonucleotide
gcgccuuucaugaaauggg

SEQ ID NO: 1581064 - RNA, 19 nt, Artificial Sequence
  Description of Artificial Sequence: Synthetic oligonucleotide
aggaaguauguagaggaua

SEQ ID NO: 1581065 - RNA, 19 nt, Artificial Sequence
  Description of Artificial Sequence: Synthetic oligonucleotide
gaagcaaacgaggggucca

SEQ ID NO: 1581066 - RNA, 19 nt, Artificial Sequence
  Description of Artificial Sequence: Synthetic oligonucleotide
cacugaagcccugacucag

SEQ ID NO: 1581067 - RNA, 19 nt, Artificial Sequence
  Description of Artificial Sequence: Synthetic oligonucleotide
agcaaacgagggguccacc

SEQ ID NO: 1581068 - RNA, 19 nt, Artificial Sequence
  Description of Artificial Sequence: Synthetic oligonucleotide
ugacuaguucuaaggcuuu

SEQ ID NO: 1581069 - RNA, 19 nt, Artificial Sequence
  Description of Artificial Sequence: Synthetic oligonucleotide
cacccuauuaccuauucau

SEQ ID NO: 1581070 - RNA, 19 nt, Artificial Sequence
  Description of Artificial Sequence: Synthetic oligonucleotide
uguagaggauagccguauu

SEQ ID NO: 1581071 - RNA, 19 nt, Artificial Sequence
  Description of Artificial Sequence: Synthetic oligonucleotide
uuacugcuaggcguuugca

SEQ ID NO: 1581072 - RNA, 19 nt, Artificial Sequence
  Description of Artificial Sequence: Synthetic oligonucleotide
guuagccagaguaggguca

SEQ ID NO: 1581073 - RNA, 19 nt, Artificial Sequence
  Description of Artificial Sequence: Synthetic oligonucleotide
gguauugggugggaggagc

SEQ ID NO: 1581074 - RNA, 19 nt, Artificial Sequence
  Description of Artificial Sequence: Synthetic oligonucleotide
agugcacauaugaagcaaa

SEQ ID NO: 1581075 - RNA, 19 nt, Artificial Sequence
  Description of Artificial Sequence: Synthetic oligonucleotide
guaggauuagaggguaaga

SEQ ID NO: 1581076 - RNA, 19 nt, Artificial Sequence
  Description of Artificial Sequence: Synthetic oligonucleotide
caacagggcaagccauacc

SEQ ID NO: 1581077 - RNA, 19 nt, Artificial Sequence
  Description of Artificial Sequence: Synthetic oligonucleotide
caccaagucccuggcaggg

SEQ ID NO: 1581078 - RNA, 19 nt, Artificial Sequence
  Description of Artificial Sequence: Synthetic oligonucleotide
acagggcaagccauaccac

SEQ ID NO: 1581079 - RNA, 19 nt, Artificial Sequence
  Description of Artificial Sequence: Synthetic oligonucleotide
gagguaacgggagguggug

SEQ ID NO: 1581080 - RNA, 19 nt, Artificial Sequence
  Description of Artificial Sequence: Synthetic oligonucleotide
cuccuacacaaaucagauc

SEQ ID NO: 1581081 - RNA, 19 nt, Artificial Sequence
  Description of Artificial Sequence: Synthetic oligonucleotide
gcaagucugacauuaggua

SEQ ID NO: 1581082 - RNA, 19 nt, Artificial Sequence
  Description of Artificial Sequence: Synthetic oligonucleotide
cugacuaguucuaaggcuu

SEQ ID NO: 1581083 - RNA, 19 nt, Artificial Sequence
  Description of Artificial Sequence: Synthetic oligonucleotide
ugugcauagucugcaggua

SEQ ID NO: 1581084 - RNA, 19 nt, Artificial Sequence
  Description of Artificial Sequence: Synthetic oligonucleotide
ccuaaggugcugugcaagc

SEQ ID NO: 1581085 - RNA, 19 nt, Artificial Sequence
  Description of Artificial Sequence: Synthetic oligonucleotide
ggcuuaacaggagaacuac

SEQ ID NO: 1581086 - RNA, 19 nt, Artificial Sequence
  Description of Artificial Sequence: Synthetic oligonucleotide
cauuggcuacaaccacugc

SEQ ID NO: 1581087 - RNA, 19 nt, Artificial Sequence
  Description of Artificial Sequence: Synthetic oligonucleotide
ggauuagaggguaagaaau

SEQ ID NO: 1581088 - RNA, 19 nt, Artificial Sequence
  Description of Artificial Sequence: Synthetic oligonucleotide
gucugacauuagguaaagg

SEQ ID NO: 1581089 - RNA, 19 nt, Artificial Sequence
  Description of Artificial Sequence: Synthetic oligonucleotide
agggucaguuccagugggc

SEQ ID NO: 1581090 - RNA, 19 nt, Artificial Sequence
  Description of Artificial Sequence: Synthetic oligonucleotide
gacacaacaaauagagauu

SEQ ID NO: 1581091 - RNA, 19 nt, Artificial Sequence
  Description of Artificial Sequence: Synthetic oligonucleotide
aggacccuaaagccaccug

SEQ ID NO: 1581092 - RNA, 19 nt, Artificial Sequence
  Description of Artificial Sequence: Synthetic oligonucleotide
gugcacauaugaagcaaac

SEQ ID NO: 1581093 - RNA, 19 nt, Artificial Sequence
  Description of Artificial Sequence: Synthetic oligonucleotide
cauagucugcagguaagga

SEQ ID NO: 1581094 - RNA, 19 nt, Artificial Sequence
  Description of Artificial Sequence: Synthetic oligonucleotide
gcauaaaaccacuguuauc

SEQ ID NO: 1581095 - RNA, 19 nt, Artificial Sequence
  Description of Artificial Sequence: Synthetic oligonucleotide
aucugcucucucucucuga

SEQ ID NO: 1581096 - RNA, 19 nt, Artificial Sequence
  Description of Artificial Sequence: Synthetic oligonucleotide
caacccucacaguuuacaa

SEQ ID NO: 1581097 - RNA, 19 nt, Artificial Sequence
  Description of Artificial Sequence: Synthetic oligonucleotide
gaaaugguauuggguggga

SEQ ID NO: 1581098 - RNA, 19 nt, Artificial Sequence
  Description of Artificial Sequence: Synthetic oligonucleotide
cugugcauagucugcaggu

SEQ ID NO: 1581099 - RNA, 19 nt, Artificial Sequence
  Description of Artificial Sequence: Synthetic oligonucleotide
gugggcauaaaaccacugu

SEQ ID NO: 1581100 - RNA, 19 nt, Artificial Sequence
  Description of Artificial Sequence: Synthetic oligonucleotide
ggcauaaaaccacuguuau

SEQ ID NO: 1581101 - RNA, 19 nt, Artificial Sequence
  Description of Artificial Sequence: Synthetic oligonucleotide
cuuuaguuacaaugcaguu

SEQ ID NO: 1581102 - RNA, 19 nt, Artificial Sequence
  Description of Artificial Sequence: Synthetic oligonucleotide
ggcuacaaccacugcuuug

SEQ ID NO: 1581103 - RNA, 19 nt, Artificial Sequence
  Description of Artificial Sequence: Synthetic oligonucleotide
ggcacaacaaauccugggu

SEQ ID NO: 1581104 - RNA, 19 nt, Artificial Sequence
  Description of Artificial Sequence: Synthetic oligonucleotide
acgugggcugcugccacac

SEQ ID NO: 1581105 - RNA, 19 nt, Artificial Sequence
  Description of Artificial Sequence: Synthetic oligonucleotide
cuaguucuaaggcuuuagu

SEQ ID NO: 1581106 - RNA, 19 nt, Artificial Sequence
  Description of Artificial Sequence: Synthetic oligonucleotide
aaccuagucuggggccauc

SEQ ID NO: 1581107 - RNA, 19 nt, Artificial Sequence
  Description of Artificial Sequence: Synthetic oligonucleotide
cugcucucucucucugaag

SEQ ID NO: 1581108 - RNA, 19 nt, Artificial Sequence
  Description of Artificial Sequence: Synthetic oligonucleotide
gccguauuuuaauacuuaa

SEQ ID NO: 1581109 - RNA, 19 nt, Artificial Sequence
  Description of Artificial Sequence: Synthetic oligonucleotide
guugaguuugcagucuacu

SEQ ID NO: 1581110 - RNA, 19 nt, Artificial Sequence
  Description of Artificial Sequence: Synthetic oligonucleotide
cagcuaaacgcuugcaagu

SEQ ID NO: 1581111 - RNA, 19 nt, Artificial Sequence
  Description of Artificial Sequence: Synthetic oligonucleotide
gugcauuuauuacuauuau

SEQ ID NO: 1581112 - RNA, 19 nt, Artificial Sequence
  Description of Artificial Sequence: Synthetic oligonucleotide
gccagcugaaugauggcgc

SEQ ID NO: 1581113 - RNA, 19 nt, Artificial Sequence
  Description of Artificial Sequence: Synthetic oligonucleotide
ccuaacauaaagacagcua

SEQ ID NO: 1581114 - RNA, 19 nt, Artificial Sequence
  Description of Artificial Sequence: Synthetic oligonucleotide
cacuguuaucugcucucuc

SEQ ID NO: 1581115 - RNA, 19 nt, Artificial Sequence
  Description of Artificial Sequence: Synthetic oligonucleotide
ggaggcucaacagggcaag

SEQ ID NO: 1581116 - RNA, 19 nt, Artificial Sequence
  Description of Artificial Sequence: Synthetic oligonucleotide
guagaggauagccguauuu

SEQ ID NO: 1581117 - RNA, 19 nt, Artificial Sequence
  Description of Artificial Sequence: Synthetic oligonucleotide
gccuuucaugaaaugggag

SEQ ID NO: 1581118 - RNA, 19 nt, Artificial Sequence
  Description of Artificial Sequence: Synthetic oligonucleotide
ccuuaggacccuaaagcca

SEQ ID NO: 1581119 - RNA, 19 nt, Artificial Sequence
  Description of Artificial Sequence: Synthetic oligonucleotide
agacagcuaaacgcuugca

SEQ ID NO: 1581120 - RNA, 19 nt, Artificial Sequence
  Description of Artificial Sequence: Synthetic oligonucleotide
acauauuaauucagccauu

SEQ ID NO: 1581121 - RNA, 19 nt, Artificial Sequence
  Description of Artificial Sequence: Synthetic oligonucleotide
gcuugcaagucugacauua

SEQ ID NO: 1581122 - RNA, 19 nt, Artificial Sequence
  Description of Artificial Sequence: Synthetic oligonucleotide
ggauagccguauuuuaaua

SEQ ID NO: 1581123 - RNA, 19 nt, Artificial Sequence
  Description of Artificial Sequence: Synthetic oligonucleotide
agccguauuuuaauacuua

SEQ ID NO: 1581124 - RNA, 19 nt, Artificial Sequence
  Description of Artificial Sequence: Synthetic oligonucleotide
augcaguugauuacauauu

SEQ ID NO: 1581125 - RNA, 19 nt, Artificial Sequence
  Description of Artificial Sequence: Synthetic oligonucleotide
cuacagggauccuguguga

SEQ ID NO: 1581126 - RNA, 19 nt, Artificial Sequence
  Description of Artificial Sequence: Synthetic oligonucleotide
ggucaguuccagugggcac

SEQ ID NO: 1581127 - RNA, 19 nt, Artificial Sequence
  Description of Artificial Sequence: Synthetic oligonucleotide
guauugggugggaggagca

SEQ ID NO: 1581128 - RNA, 19 nt, Artificial Sequence
  Description of Artificial Sequence: Synthetic oligonucleotide
ucuacuccuuaggacccua

SEQ ID NO: 1581129 - RNA, 19 nt, Artificial Sequence
  Description of Artificial Sequence: Synthetic oligonucleotide
cuguuuuggcuacagggau

SEQ ID NO: 1581130 - RNA, 19 nt, Artificial Sequence
  Description of Artificial Sequence: Synthetic oligonucleotide
cucuacccgcuucuagcuc

SEQ ID NO: 1581131 - RNA, 19 nt, Artificial Sequence
  Description of Artificial Sequence: Synthetic oligonucleotide
auccuaggcuuaacaggag

SEQ ID NO: 1581132 - RNA, 19 nt, Artificial Sequence
  Description of Artificial Sequence: Synthetic oligonucleotide
agguaacgggagguggugu

SEQ ID NO: 1581133 - RNA, 19 nt, Artificial Sequence
  Description of Artificial Sequence: Synthetic oligonucleotide
gaacuacuaaagaaaccuu

SEQ ID NO: 1581134 - RNA, 19 nt, Artificial Sequence
  Description of Artificial Sequence: Synthetic oligonucleotide
acccuauuaccuauucaua

SEQ ID NO: 1581135 - RNA, 19 nt, Artificial Sequence
  Description of Artificial Sequence: Synthetic oligonucleotide
ccuuagaauuauuaaugcu

SEQ ID NO: 1581136 - RNA, 19 nt, Artificial Sequence
  Description of Artificial Sequence: Synthetic oligonucleotide
aggugggcauaaaaccacu

SEQ ID NO: 1581137 - RNA, 19 nt, Artificial Sequence
  Description of Artificial Sequence: Synthetic oligonucleotide
ccuauuaccuauucauaua

SEQ ID NO: 1581138 - RNA, 19 nt, Artificial Sequence
  Description of Artificial Sequence: Synthetic oligonucleotide
gggaacuccuacacaaauc

SEQ ID NO: 1581139 - RNA, 19 nt, Artificial Sequence
  Description of Artificial Sequence: Synthetic oligonucleotide
accuagucuggggccaucu

SEQ ID NO: 1581140 - RNA, 19 nt, Artificial Sequence
  Description of Artificial Sequence: Synthetic oligonucleotide
agcaccugacuaguucuaa

SEQ ID NO: 1581141 - RNA, 19 nt, Artificial Sequence
  Description of Artificial Sequence: Synthetic oligonucleotide
cccugacucaguuugugca

SEQ ID NO: 1581142 - RNA, 19 nt, Artificial Sequence
  Description of Artificial Sequence: Synthetic oligonucleotide
gggcauaaaaccacuguua

SEQ ID NO: 1581143 - RNA, 19 nt, Artificial Sequence
  Description of Artificial Sequence: Synthetic oligonucleotide
ccguauuuuaauacuuaaa

SEQ ID NO: 1581144 - RNA, 19 nt, Artificial Sequence
  Description of Artificial Sequence: Synthetic oligonucleotide
cucaguuugugcagacacu

SEQ ID NO: 1581145 - RNA, 19 nt, Artificial Sequence
  Description of Artificial Sequence: Synthetic oligonucleotide
ugauggcgccuuucaugaa

SEQ ID NO: 1581146 - RNA, 19 nt, Artificial Sequence
  Description of Artificial Sequence: Synthetic oligonucleotide
auggcgccuuucaugaaau

SEQ ID NO: 1581147 - RNA, 19 nt, Artificial Sequence
  Description of Artificial Sequence: Synthetic oligonucleotide
aggcuagggucaguuccag

SEQ ID NO: 1581148 - RNA, 19 nt, Artificial Sequence
  Description of Artificial Sequence: Synthetic oligonucleotide
cauccuuucuccacccuau

SEQ ID NO: 1581149 - RNA, 19 nt, Artificial Sequence
  Description of Artificial Sequence: Synthetic oligonucleotide
ucuuuacugcuaggcguuu

SEQ ID NO: 1581150 - RNA, 19 nt, Artificial Sequence
  Description of Artificial Sequence: Synthetic oligonucleotide
ccuaggcuuaacaggagaa

SEQ ID NO: 1581151 - RNA, 19 nt, Artificial Sequence
  Description of Artificial Sequence: Synthetic oligonucleotide
acugaagcccugacucagu

SEQ ID NO: 1581152 - RNA, 19 nt, Artificial Sequence
  Description of Artificial Sequence: Synthetic oligonucleotide
cauacuggggauagugguu

SEQ ID NO: 1581153 - RNA, 19 nt, Artificial Sequence
  Description of Artificial Sequence: Synthetic oligonucleotide
gacuaguucuaaggcuuua

SEQ ID NO: 1581154 - RNA, 19 nt, Artificial Sequence
  Description of Artificial Sequence: Synthetic oligonucleotide
ccuacacaaaucagaucca

SEQ ID NO: 1581155 - RNA, 19 nt, Artificial Sequence
  Description of Artificial Sequence: Synthetic oligonucleotide
ggaaccuagucuggggcca

SEQ ID NO: 1581156 - RNA, 19 nt, Artificial Sequence
  Description of Artificial Sequence: Synthetic oligonucleotide
cuaggcguuugcaguggaa

SEQ ID NO: 1581157 - RNA, 19 nt, Artificial Sequence
  Description of Artificial Sequence: Synthetic oligonucleotide
cagggaacuccuacacaaa

SEQ ID NO: 1581158 - RNA, 19 nt, Artificial Sequence
  Description of Artificial Sequence: Synthetic oligonucleotide
caaacgagggguccacccu

SEQ ID NO: 1581159 - RNA, 19 nt, Artificial Sequence
  Description of Artificial Sequence: Synthetic oligonucleotide
ccugacuaguucuaaggcu

SEQ ID NO: 1581160 - RNA, 19 nt, Artificial Sequence
  Description of Artificial Sequence: Synthetic oligonucleotide
gcaagugggaggagguaac

SEQ ID NO: 1581161 - RNA, 19 nt, Artificial Sequence
  Description of Artificial Sequence: Synthetic oligonucleotide
ccccaauccaauucacuga

SEQ ID NO: 1581162 - RNA, 19 nt, Artificial Sequence
  Description of Artificial Sequence: Synthetic oligonucleotide
cccuauuaccuauucauau

SEQ ID NO: 1581163 - RNA, 19 nt, Artificial Sequence
  Description of Artificial Sequence: Synthetic oligonucleotide
cagguaaggagagaaugau

SEQ ID NO: 1581164 - RNA, 19 nt, Artificial Sequence
  Description of Artificial Sequence: Synthetic oligonucleotide
cccuaaggugcugugcaag

SEQ ID NO: 1581165 - RNA, 19 nt, Artificial Sequence
  Description of Artificial Sequence: Synthetic oligonucleotide
gggucaguuccagugggca

SEQ ID NO: 1581166 - RNA, 19 nt, Artificial Sequence
  Description of Artificial Sequence: Synthetic oligonucleotide
cagguaggauuagagggua

SEQ ID NO: 1581167 - RNA, 19 nt, Artificial Sequence
  Description of Artificial Sequence: Synthetic oligonucleotide
cuguguuuuacugguuccu

SEQ ID NO: 1581168 - RNA, 19 nt, Artificial Sequence
  Description of Artificial Sequence: Synthetic oligonucleotide
gggugaggugggcauaaaa

SEQ ID NO: 1581169 - RNA, 19 nt, Artificial Sequence
  Description of Artificial Sequence: Synthetic oligonucleotide
cuacuaggggaagauccua

SEQ ID NO: 1581170 - RNA, 19 nt, Artificial Sequence
  Description of Artificial Sequence: Synthetic oligonucleotide
ggaagauccuaggcuuaac

SEQ ID NO: 1581171 - RNA, 19 nt, Artificial Sequence
  Description of Artificial Sequence: Synthetic oligonucleotide
ggugcugugcaagcugaga

SEQ ID NO: 1581172 - RNA, 19 nt, Artificial Sequence
  Description of Artificial Sequence: Synthetic oligonucleotide
ggauccugugugacuagga

SEQ ID NO: 1581173 - RNA, 19 nt, Artificial Sequence
  Description of Artificial Sequence: Synthetic oligonucleotide
cacccugccuucagcaaua

SEQ ID NO: 1581174 - RNA, 19 nt, Artificial Sequence
  Description of Artificial Sequence: Synthetic oligonucleotide
gugugacuaggaaguaugu

SEQ ID NO: 1581175 - RNA, 19 nt, Artificial Sequence
  Description of Artificial Sequence: Synthetic oligonucleotide
ccaacccucacaguuuaca

SEQ ID NO: 1581176 - RNA, 19 nt, Artificial Sequence
  Description of Artificial Sequence: Synthetic oligonucleotide
uacccgcuucuagcucucc

SEQ ID NO: 1581177 - RNA, 19 nt, Artificial Sequence
  Description of Artificial Sequence: Synthetic oligonucleotide
agguaggauuagaggguaa

SEQ ID NO: 1581178 - RNA, 19 nt, Artificial Sequence
  Description of Artificial Sequence: Synthetic oligonucleotide
gccugcauguccagacuug

SEQ ID NO: 1581179 - RNA, 19 nt, Artificial Sequence
  Description of Artificial Sequence: Synthetic oligonucleotide
cuaaggcuuuaguuacaau

SEQ ID NO: 1581180 - RNA, 19 nt, Artificial Sequence
  Description of Artificial Sequence: Synthetic oligonucleotide
gccauaccaccucucccuc

SEQ ID NO: 1581181 - RNA, 19 nt, Artificial Sequence
  Description of Artificial Sequence: Synthetic oligonucleotide
ggcaagccauaccaccucu

SEQ ID NO: 1581182 - RNA, 19 nt, Artificial Sequence
  Description of Artificial Sequence: Synthetic oligonucleotide
gggaagauccuaggcuuaa

SEQ ID NO: 1581183 - RNA, 19 nt, Artificial Sequence
  Description of Artificial Sequence: Synthetic oligonucleotide
gcuaggcguuugcagugga

SEQ ID NO: 1581184 - RNA, 19 nt, Artificial Sequence
  Description of Artificial Sequence: Synthetic oligonucleotide
cagucuacuaggggaagau

SEQ ID NO: 1581185 - RNA, 19 nt, Artificial Sequence
  Description of Artificial Sequence: Synthetic oligonucleotide
ccacccuauuaccuauuca

SEQ ID NO: 1581186 - RNA, 19 nt, Artificial Sequence
  Description of Artificial Sequence: Synthetic oligonucleotide
gcuuaacaggagaacuacu

SEQ ID NO: 1581187 - RNA, 19 nt, Artificial Sequence
  Description of Artificial Sequence: Synthetic oligonucleotide
cugugugacuaggaaguau

SEQ ID NO: 1581188 - RNA, 19 nt, Artificial Sequence
  Description of Artificial Sequence: Synthetic oligonucleotide
cugaagcccugacucaguu

SEQ ID NO: 1581189 - RNA, 19 nt, Artificial Sequence
  Description of Artificial Sequence: Synthetic oligonucleotide
gcucucucucucugaagua

SEQ ID NO: 1581190 - RNA, 19 nt, Artificial Sequence
  Description of Artificial Sequence: Synthetic oligonucleotide
cuugucugggaagguggcu

SEQ ID NO: 1581191 - RNA, 19 nt, Artificial Sequence
  Description of Artificial Sequence: Synthetic oligonucleotide
ggguaaagucuguguuuua

SEQ ID NO: 1581192 - RNA, 19 nt, Artificial Sequence
  Description of Artificial Sequence: Synthetic oligonucleotide
cccuaacauaaagacagcu

SEQ ID NO: 1581193 - RNA, 19 nt, Artificial Sequence
  Description of Artificial Sequence: Synthetic oligonucleotide
ccucuacccgcuucuagcu

SEQ ID NO: 1581194 - RNA, 19 nt, Artificial Sequence
  Description of Artificial Sequence: Synthetic oligonucleotide
gaaccuagucuggggccau

SEQ ID NO: 1581195 - RNA, 19 nt, Artificial Sequence
  Description of Artificial Sequence: Synthetic oligonucleotide
ggggaagauccuaggcuua

SEQ ID NO: 1581196 - RNA, 19 nt, Artificial Sequence
  Description of Artificial Sequence: Synthetic oligonucleotide
ccucucgccccaggaacug

SEQ ID NO: 1581197 - RNA, 19 nt, Artificial Sequence
  Description of Artificial Sequence: Synthetic oligonucleotide
ccauuacauacuggggaua

SEQ ID NO: 1581198 - RNA, 19 nt, Artificial Sequence
  Description of Artificial Sequence: Synthetic oligonucleotide
cucuacuccuuaggacccu

SEQ ID NO: 1581199 - RNA, 19 nt, Artificial Sequence
  Description of Artificial Sequence: Synthetic oligonucleotide
ggcuagggucaguuccagu

SEQ ID NO: 1581200 - RNA, 19 nt, Artificial Sequence
  Description of Artificial Sequence: Synthetic oligonucleotide
cuccacccuauuaccuauu

SEQ ID NO: 1581201 - RNA, 19 nt, Artificial Sequence
  Description of Artificial Sequence: Synthetic oligonucleotide
ccgcuucuagcucuccugu

SEQ ID NO: 1581202 - RNA, 19 nt, Artificial Sequence
  Description of Artificial Sequence: Synthetic oligonucleotide
ccccuaaggugcugugcaa

SEQ ID NO: 1581203 - RNA, 19 nt, Artificial Sequence
  Description of Artificial Sequence: Synthetic oligonucleotide
ccacccugccuucagcaau

SEQ ID NO: 1581204 - RNA, 19 nt, Artificial Sequence
  Description of Artificial Sequence: Synthetic oligonucleotide
gggcaagugggaggaggua

SEQ ID NO: 1581205 - RNA, 19 nt, Artificial Sequence
  Description of Artificial Sequence: Synthetic oligonucleotide
ggagguccucuacccgcuu

SEQ ID NO: 1581206 - RNA, 19 nt, Artificial Sequence
  Description of Artificial Sequence: Synthetic oligonucleotide
gcaguaggcuagggucagu

SEQ ID NO: 1581207 - RNA, 19 nt, Artificial Sequence
  Description of Artificial Sequence: Synthetic oligonucleotide
aauacgguugaucaucucc

SEQ ID NO: 1581208 - RNA, 19 nt, Artificial Sequence
  Description of Artificial Sequence: Synthetic oligonucleotide
aguuauaauucucaucagc

SEQ ID NO: 1581209 - RNA, 19 nt, Artificial Sequence
  Description of Artificial Sequence: Synthetic oligonucleotide
aaauugcugggacaggacc

SEQ ID NO: 1581210 - RNA, 19 nt, Artificial Sequence
  Description of Artificial Sequence: Synthetic oligonucleotide
aagguucuaaguuuggaag

SEQ ID NO: 1581211 - RNA, 19 nt, Artificial Sequence
  Description of Artificial Sequence: Synthetic oligonucleotide
auaacauguggcauuaucc

SEQ ID NO: 1581212 - RNA, 19 nt, Artificial Sequence
  Description of Artificial Sequence: Synthetic oligonucleotide
uauccaacgguuaugguga

SEQ ID NO: 1581213 - RNA, 19 nt, Artificial Sequence
  Description of Artificial Sequence: Synthetic oligonucleotide
uucucaauacgguugauca

SEQ ID NO: 1581214 - RNA, 19 nt, Artificial Sequence
  Description of Artificial Sequence: Synthetic oligonucleotide
uuauccaacgguuauggug

SEQ ID NO: 1581215 - RNA, 19 nt, Artificial Sequence
  Description of Artificial Sequence: Synthetic oligonucleotide
aagugaagaucucauggag

SEQ ID NO: 1581216 - RNA, 19 nt, Artificial Sequence
  Description of Artificial Sequence: Synthetic oligonucleotide
aaugaucagcugccaaccc

SEQ ID NO: 1581217 - RNA, 19 nt, Artificial Sequence
  Description of Artificial Sequence: Synthetic oligonucleotide
aaagugaagaucucaugga

SEQ ID NO: 1581218 - RNA, 19 nt, Artificial Sequence
  Description of Artificial Sequence: Synthetic oligonucleotide
agugccaauaacauguggc

SEQ ID NO: 1581219 - RNA, 19 nt, Artificial Sequence
  Description of Artificial Sequence: Synthetic oligonucleotide
auggcuuuuagcugugccc

SEQ ID NO: 1581220 - RNA, 19 nt, Artificial Sequence
  Description of Artificial Sequence: Synthetic oligonucleotide
cauaguuugccgaauugcc

SEQ ID NO: 1581221 - RNA, 19 nt, Artificial Sequence
  Description of Artificial Sequence: Synthetic oligonucleotide
agaacccgaccauaggacc

SEQ ID NO: 1581222 - RNA, 19 nt, Artificial Sequence
  Description of Artificial Sequence: Synthetic oligonucleotide
aacacuucacucugcccac

SEQ ID NO: 1581223 - RNA, 19 nt, Artificial Sequence
  Description of Artificial Sequence: Synthetic oligonucleotide
agacauugcaaacucucuc

SEQ ID NO: 1581224 - RNA, 19 nt, Artificial Sequence
  Description of Artificial Sequence: Synthetic oligonucleotide
ucagacaccauuccggcgu

SEQ ID NO: 1581225 - RNA, 19 nt, Artificial Sequence
  Description of Artificial Sequence: Synthetic oligonucleotide
uguugacugaguuauaauu

SEQ ID NO: 1581226 - RNA, 19 nt, Artificial Sequence
  Description of Artificial Sequence: Synthetic oligonucleotide
aaguucuacagguuggaau

SEQ ID NO: 1581227 - RNA, 19 nt, Artificial Sequence
  Description of Artificial Sequence: Synthetic oligonucleotide
aaacaagacauugcaaacu

SEQ ID NO: 1581228 - RNA, 19 nt, Artificial Sequence
  Description of Artificial Sequence: Synthetic oligonucleotide
ugaaugaucagcugccaac

SEQ ID NO: 1581229 - RNA, 19 nt, Artificial Sequence
  Description of Artificial Sequence: Synthetic oligonucleotide
acgaacacuucacucugcc

SEQ ID NO: 1581230 - RNA, 19 nt, Artificial Sequence
  Description of Artificial Sequence: Synthetic oligonucleotide
aguuuggccauaguuugcc

SEQ ID NO: 1581231 - RNA, 19 nt, Artificial Sequence
  Description of Artificial Sequence: Synthetic oligonucleotide
uguuugaucuccucgcgca

SEQ ID NO: 1581232 - RNA, 19 nt, Artificial Sequence
  Description of Artificial Sequence: Synthetic oligonucleotide
uucaguauguuggacacga

SEQ ID NO: 1581233 - RNA, 19 nt, Artificial Sequence
  Description of Artificial Sequence: Synthetic oligonucleotide
auacgguugaucaucuccc

SEQ ID NO: 1581234 - RNA, 19 nt, Artificial Sequence
  Description of Artificial Sequence: Synthetic oligonucleotide
caaacaagacauugcaaac

SEQ ID NO: 1581235 - RNA, 19 nt, Artificial Sequence
  Description of Artificial Sequence: Synthetic oligonucleotide
uaguuugccgaauugccug

SEQ ID NO: 1581236 - RNA, 19 nt, Artificial Sequence
  Description of Artificial Sequence: Synthetic oligonucleotide
caagacauugcaaacucuc

SEQ ID NO: 1581237 - RNA, 19 nt, Artificial Sequence
  Description of Artificial Sequence: Synthetic oligonucleotide
aguauguuggacacgaaca

SEQ ID NO: 1581238 - RNA, 19 nt, Artificial Sequence
  Description of Artificial Sequence: Synthetic oligonucleotide
uccuucaguauguuggaca

SEQ ID NO: 1581239 - RNA, 19 nt, Artificial Sequence
  Description of Artificial Sequence: Synthetic oligonucleotide
agcucgacaaauugcuggg

SEQ ID NO: 1581240 - RNA, 19 nt, Artificial Sequence
  Description of Artificial Sequence: Synthetic oligonucleotide
uucuaaguuuggaaguccu

SEQ ID NO: 1581241 - RNA, 19 nt, Artificial Sequence
  Description of Artificial Sequence: Synthetic oligonucleotide
gaacucgucaucugggcug

SEQ ID NO: 1581242 - RNA, 19 nt, Artificial Sequence
  Description of Artificial Sequence: Synthetic oligonucleotide
cagaagagccauaugcccc

SEQ ID NO: 1581243 - RNA, 19 nt, Artificial Sequence
  Description of Artificial Sequence: Synthetic oligonucleotide
uccgacugcauugaguugc

SEQ ID NO: 1581244 - RNA, 19 nt, Artificial Sequence
  Description of Artificial Sequence: Synthetic oligonucleotide
ucuccuaggcauuguggcg

SEQ ID NO: 1581245 - RNA, 19 nt, Artificial Sequence
  Description of Artificial Sequence: Synthetic oligonucleotide
ucuaaguuuggaaguccug

SEQ ID NO: 1581246 - RNA, 19 nt, Artificial Sequence
  Description of Artificial Sequence: Synthetic oligonucleotide
ugauagaaacacagauggc

SEQ ID NO: 1581247 - RNA, 19 nt, Artificial Sequence
  Description of Artificial Sequence: Synthetic oligonucleotide
ucucucgguauuccgacug

SEQ ID NO: 1581248 - RNA, 19 nt, Artificial Sequence
  Description of Artificial Sequence: Synthetic oligonucleotide
ucuucucucgguauuccga

SEQ ID NO: 1581249 - RNA, 19 nt, Artificial Sequence
  Description of Artificial Sequence: Synthetic oligonucleotide
guuauggugaugccaauga

SEQ ID NO: 1581250 - RNA, 19 nt, Artificial Sequence
  Description of Artificial Sequence: Synthetic oligonucleotide
aacauguggcauuauccaa

SEQ ID NO: 1581251 - RNA, 19 nt, Artificial Sequence
  Description of Artificial Sequence: Synthetic oligonucleotide
cauugaguugcacuuguug

SEQ ID NO: 1581252 - RNA, 19 nt, Artificial Sequence
  Description of Artificial Sequence: Synthetic oligonucleotide
ugagggcggguucagcugg

SEQ ID NO: 1581253 - RNA, 19 nt, Artificial Sequence
  Description of Artificial Sequence: Synthetic oligonucleotide
ucaauacgguugaucaucu

SEQ ID NO: 1581254 - RNA, 19 nt, Artificial Sequence
  Description of Artificial Sequence: Synthetic oligonucleotide
uggaguucacggaugcugc

SEQ ID NO: 1581255 - RNA, 19 nt, Artificial Sequence
  Description of Artificial Sequence: Synthetic oligonucleotide
acugcauugaguugcacuu

SEQ ID NO: 1581256 - RNA, 19 nt, Artificial Sequence
  Description of Artificial Sequence: Synthetic oligonucleotide
cuugacaugcucuugccca

SEQ ID NO: 1581257 - RNA, 19 nt, Artificial Sequence
  Description of Artificial Sequence: Synthetic oligonucleotide
ucuugacaugcucuugccc

SEQ ID NO: 1581258 - RNA, 19 nt, Artificial Sequence
  Description of Artificial Sequence: Synthetic oligonucleotide
aacucgucaucugggcugc

SEQ ID NO: 1581259 - RNA, 19 nt, Artificial Sequence
  Description of Artificial Sequence: Synthetic oligonucleotide
ugacgugucaccugugugu

SEQ ID NO: 1581260 - RNA, 19 nt, Artificial Sequence
  Description of Artificial Sequence: Synthetic oligonucleotide
uuuggccauaguuugccga

SEQ ID NO: 1581261 - RNA, 19 nt, Artificial Sequence
  Description of Artificial Sequence: Synthetic oligonucleotide
ucucauggaguucacggau

SEQ ID NO: 1581262 - RNA, 19 nt, Artificial Sequence
  Description of Artificial Sequence: Synthetic oligonucleotide
agguucuaaguuuggaagu

SEQ ID NO: 1581263 - RNA, 19 nt, Artificial Sequence
  Description of Artificial Sequence: Synthetic oligonucleotide
uguguugacugaguuauaa

SEQ ID NO: 1581264 - RNA, 19 nt, Artificial Sequence
  Description of Artificial Sequence: Synthetic oligonucleotide
ugcacaagggccaguguga

SEQ ID NO: 1581265 - RNA, 19 nt, Artificial Sequence
  Description of Artificial Sequence: Synthetic oligonucleotide
uuuuagcugugcccggacc

SEQ ID NO: 1581266 - RNA, 19 nt, Artificial Sequence
  Description of Artificial Sequence: Synthetic oligonucleotide
aggcucuauggcuuuuagc

SEQ ID NO: 1581267 - RNA, 19 nt, Artificial Sequence
  Description of Artificial Sequence: Synthetic oligonucleotide
aguuugccgaauugccugg

SEQ ID NO: 1581268 - RNA, 19 nt, Artificial Sequence
  Description of Artificial Sequence: Synthetic oligonucleotide
ugccgaauugccuggaccu

SEQ ID NO: 1581269 - RNA, 19 nt, Artificial Sequence
  Description of Artificial Sequence: Synthetic oligonucleotide
cucaauacgguugaucauc

SEQ ID NO: 1581270 - RNA, 19 nt, Artificial Sequence
  Description of Artificial Sequence: Synthetic oligonucleotide
aacgguuauggugaugcca

SEQ ID NO: 1581271 - RNA, 19 nt, Artificial Sequence
  Description of Artificial Sequence: Synthetic oligonucleotide
ucgacaaauugcugggaca

SEQ ID NO: 1581272 - RNA, 19 nt, Artificial Sequence
  Description of Artificial Sequence: Synthetic oligonucleotide
aacccgaccauaggacccc

SEQ ID NO: 1581273 - RNA, 19 nt, Artificial Sequence
  Description of Artificial Sequence: Synthetic oligonucleotide
acugaguuauaauucucau

SEQ ID NO: 1581274 - RNA, 19 nt, Artificial Sequence
  Description of Artificial Sequence: Synthetic oligonucleotide
acggaugcugcgcucuagc

SEQ ID NO: 1581275 - RNA, 19 nt, Artificial Sequence
  Description of Artificial Sequence: Synthetic oligonucleotide
ugccaaccccagaagagcc

SEQ ID NO: 1581276 - RNA, 19 nt, Artificial Sequence
  Description of Artificial Sequence: Synthetic oligonucleotide
caguauguuggacacgaac

SEQ ID NO: 1581277 - RNA, 19 nt, Artificial Sequence
  Description of Artificial Sequence: Synthetic oligonucleotide
acacgaacacuucacucug

SEQ ID NO: 1581278 - RNA, 19 nt, Artificial Sequence
  Description of Artificial Sequence: Synthetic oligonucleotide
uugaguugcacuuguugau

SEQ ID NO: 1581279 - RNA, 19 nt, Artificial Sequence
  Description of Artificial Sequence: Synthetic oligonucleotide
agaagagccauaugccccu

SEQ ID NO: 1581280 - RNA, 19 nt, Artificial Sequence
  Description of Artificial Sequence: Synthetic oligonucleotide
aguagcuagaaaagugaag

SEQ ID NO: 1581281 - RNA, 19 nt, Artificial Sequence
  Description of Artificial Sequence: Synthetic oligonucleotide
ugucccagacaaacaagac

SEQ ID NO: 1581282 - RNA, 19 nt, Artificial Sequence
  Description of Artificial Sequence: Synthetic oligonucleotide
aagacauugcaaacucucu

SEQ ID NO: 1581283 - RNA, 19 nt, Artificial Sequence
  Description of Artificial Sequence: Synthetic oligonucleotide
ucaagguucuaaguuugga

SEQ ID NO: 1581284 - RNA, 19 nt, Artificial Sequence
  Description of Artificial Sequence: Synthetic oligonucleotide
gguccugucgcgcauggcg

SEQ ID NO: 1581285 - RNA, 19 nt, Artificial Sequence
  Description of Artificial Sequence: Synthetic oligonucleotide
agccauaugccccucugca

SEQ ID NO: 1581286 - RNA, 19 nt, Artificial Sequence
  Description of Artificial Sequence: Synthetic oligonucleotide
ugcacgagcucucucucac

SEQ ID NO: 1581287 - RNA, 19 nt, Artificial Sequence
  Description of Artificial Sequence: Synthetic oligonucleotide
cucaagguucuaaguuugg

SEQ ID NO: 1581288 - RNA, 19 nt, Artificial Sequence
  Description of Artificial Sequence: Synthetic oligonucleotide
ugggugcaccaccagcgcg

SEQ ID NO: 1581289 - RNA, 19 nt, Artificial Sequence
  Description of Artificial Sequence: Synthetic oligonucleotide
ugagcucgacaaauugcug

SEQ ID NO: 1581290 - RNA, 19 nt, Artificial Sequence
  Description of Artificial Sequence: Synthetic oligonucleotide
aucagacaccauuccggcg

SEQ ID NO: 1581291 - RNA, 19 nt, Artificial Sequence
  Description of Artificial Sequence: Synthetic oligonucleotide
agggccucaagguucuaag

SEQ ID NO: 1581292 - RNA, 19 nt, Artificial Sequence
  Description of Artificial Sequence: Synthetic oligonucleotide
agaacucgucaucugggcu

SEQ ID NO: 1581293 - RNA, 19 nt, Artificial Sequence
  Description of Artificial Sequence: Synthetic oligonucleotide
ucuucgucguccgagcugu

SEQ ID NO: 1581294 - RNA, 19 nt, Artificial Sequence
  Description of Artificial Sequence: Synthetic oligonucleotide
ucuauggcuuuuagcugug

SEQ ID NO: 1581295 - RNA, 19 nt, Artificial Sequence
  Description of Artificial Sequence: Synthetic oligonucleotide
accauuccggcguugguga

SEQ ID NO: 1581296 - RNA, 19 nt, Artificial Sequence
  Description of Artificial Sequence: Synthetic oligonucleotide
ggcucuauggcuuuuagcu

SEQ ID NO: 1581297 - RNA, 19 nt, Artificial Sequence
  Description of Artificial Sequence: Synthetic oligonucleotide
gugccaauaacauguggca

SEQ ID NO: 1581298 - RNA, 19 nt, Artificial Sequence
  Description of Artificial Sequence: Synthetic oligonucleotide
gacaccauuccggcguugg

SEQ ID NO: 1581299 - RNA, 19 nt, Artificial Sequence
  Description of Artificial Sequence: Synthetic oligonucleotide
aguucacggaugcugcgcu

SEQ ID NO: 1581300 - RNA, 19 nt, Artificial Sequence
  Description of Artificial Sequence: Synthetic oligonucleotide
ucgucguccgagcuguugu

SEQ ID NO: 1581301 - RNA, 19 nt, Artificial Sequence
  Description of Artificial Sequence: Synthetic oligonucleotide
ugcccugccuccacaaaug

SEQ ID NO: 1581302 - RNA, 19 nt, Artificial Sequence
  Description of Artificial Sequence: Synthetic oligonucleotide
ccaugaaugaucagcugcc

SEQ ID NO: 1581303 - RNA, 19 nt, Artificial Sequence
  Description of Artificial Sequence: Synthetic oligonucleotide
ccacgcuccacauagucgg

SEQ ID NO: 1581304 - RNA, 19 nt, Artificial Sequence
  Description of Artificial Sequence: Synthetic oligonucleotide
gcuagaaaagugaagaucu

SEQ ID NO: 1581305 - RNA, 19 nt, Artificial Sequence
  Description of Artificial Sequence: Synthetic oligonucleotide
ccaacgguuauggugaugc

SEQ ID NO: 1581306 - RNA, 19 nt, Artificial Sequence
  Description of Artificial Sequence: Synthetic oligonucleotide
cuguuugaucuccucgcgc

SEQ ID NO: 1581307 - RNA, 19 nt, Artificial Sequence
  Description of Artificial Sequence: Synthetic oligonucleotide
agagccauaugccccucug

SEQ ID NO: 1581308 - RNA, 19 nt, Artificial Sequence
  Description of Artificial Sequence: Synthetic oligonucleotide
caugcucuugcccacgcuc

SEQ ID NO: 1581309 - RNA, 19 nt, Artificial Sequence
  Description of Artificial Sequence: Synthetic oligonucleotide
guucuaaguuuggaagucc

SEQ ID NO: 1581310 - RNA, 19 nt, Artificial Sequence
  Description of Artificial Sequence: Synthetic oligonucleotide
gacaaauugcugggacagg

SEQ ID NO: 1581311 - RNA, 19 nt, Artificial Sequence
  Description of Artificial Sequence: Synthetic oligonucleotide
gaacccgaccauaggaccc

SEQ ID NO: 1581312 - RNA, 19 nt, Artificial Sequence
  Description of Artificial Sequence: Synthetic oligonucleotide
ugugcccggaccucucucc

SEQ ID NO: 1581313 - RNA, 19 nt, Artificial Sequence
  Description of Artificial Sequence: Synthetic oligonucleotide
ucgguauuccgacugcauu

SEQ ID NO: 1581314 - RNA, 19 nt, Artificial Sequence
  Description of Artificial Sequence: Synthetic oligonucleotide
ggcggguucagcuggaggc

SEQ ID NO: 1581315 - RNA, 19 nt, Artificial Sequence
  Description of Artificial Sequence: Synthetic oligonucleotide
guuggacacgaacacuuca

SEQ ID NO: 1581316 - RNA, 19 nt, Artificial Sequence
  Description of Artificial Sequence: Synthetic oligonucleotide
uugacaugcucuugcccac

SEQ ID NO: 1581317 - RNA, 19 nt, Artificial Sequence
  Description of Artificial Sequence: Synthetic oligonucleotide
auaguuugccgaauugccu

SEQ ID NO: 1581318 - RNA, 19 nt, Artificial Sequence
  Description of Artificial Sequence: Synthetic oligonucleotide
auuauccaacgguuauggu

SEQ ID NO: 1581319 - RNA, 19 nt, Artificial Sequence
  Description of Artificial Sequence: Synthetic oligonucleotide
agaucucauggaguucacg

SEQ ID NO: 1581320 - RNA, 19 nt, Artificial Sequence
  Description of Artificial Sequence: Synthetic oligonucleotide
cacauagucggcugagcuc

SEQ ID NO: 1581321 - RNA, 19 nt, Artificial Sequence
  Description of Artificial Sequence: Synthetic oligonucleotide
uuugccgaauugccuggac

SEQ ID NO: 1581322 - RNA, 19 nt, Artificial Sequence
  Description of Artificial Sequence: Synthetic oligonucleotide
uuccucacccugcgaaccc

SEQ ID NO: 1581323 - RNA, 19 nt, Artificial Sequence
  Description of Artificial Sequence: Synthetic oligonucleotide
aucuucgucguccgagcug

SEQ ID NO: 1581324 - RNA, 19 nt, Artificial Sequence
  Description of Artificial Sequence: Synthetic oligonucleotide
caacucccggacuuuacuc

SEQ ID NO: 1581325 - RNA, 19 nt, Artificial Sequence
  Description of Artificial Sequence: Synthetic oligonucleotide
gagccauaugccccucugc

SEQ ID NO: 1581326 - RNA, 19 nt, Artificial Sequence
  Description of Artificial Sequence: Synthetic oligonucleotide
agcucaggauguucuucuc

SEQ ID NO: 1581327 - RNA, 19 nt, Artificial Sequence
  Description of Artificial Sequence: Synthetic oligonucleotide
uggcauuauccaacgguua

SEQ ID NO: 1581328 - RNA, 19 nt, Artificial Sequence
  Description of Artificial Sequence: Synthetic oligonucleotide
auguggcauuauccaacgg

SEQ ID NO: 1581329 - RNA, 19 nt, Artificial Sequence
  Description of Artificial Sequence: Synthetic oligonucleotide
ucauggguccugucgcgca

SEQ ID NO: 1581330 - RNA, 19 nt, Artificial Sequence
  Description of Artificial Sequence: Synthetic oligonucleotide
acagugauagaaacacaga

SEQ ID NO: 1581331 - RNA, 19 nt, Artificial Sequence
  Description of Artificial Sequence: Synthetic oligonucleotide
cuuccucacccugcgaacc

SEQ ID NO: 1581332 - RNA, 19 nt, Artificial Sequence
  Description of Artificial Sequence: Synthetic oligonucleotide
acgugucaccugugugucc

SEQ ID NO: 1581333 - RNA, 19 nt, Artificial Sequence
  Description of Artificial Sequence: Synthetic oligonucleotide
agccugacgugucaccugu

SEQ ID NO: 1581334 - RNA, 19 nt, Artificial Sequence
  Description of Artificial Sequence: Synthetic oligonucleotide
ugccaauaacauguggcau

SEQ ID NO: 1581335 - RNA, 19 nt, Artificial Sequence
  Description of Artificial Sequence: Synthetic oligonucleotide
acgguuauggugaugccaa

SEQ ID NO: 1581336 - RNA, 19 nt, Artificial Sequence
  Description of Artificial Sequence: Synthetic oligonucleotide
cacucugcccacugucuag

SEQ ID NO: 1581337 - RNA, 19 nt, Artificial Sequence
  Description of Artificial Sequence: Synthetic oligonucleotide
cuaucuugacaugcucuug

SEQ ID NO: 1581338 - RNA, 19 nt, Artificial Sequence
  Description of Artificial Sequence: Synthetic oligonucleotide
ccauaguuugccgaauugc

SEQ ID NO: 1581339 - RNA, 19 nt, Artificial Sequence
  Description of Artificial Sequence: Synthetic oligonucleotide
gcuggaucucacugugucg

SEQ ID NO: 1581340 - RNA, 19 nt, Artificial Sequence
  Description of Artificial Sequence: Synthetic oligonucleotide
cacgaacacuucacucugc

SEQ ID NO: 1581341 - RNA, 19 nt, Artificial Sequence
  Description of Artificial Sequence: Synthetic oligonucleotide
caccaugcacagucgccgg

SEQ ID NO: 1581342 - RNA, 19 nt, Artificial Sequence
  Description of Artificial Sequence: Synthetic oligonucleotide
ucucgguauuccgacugca

SEQ ID NO: 1581343 - RNA, 19 nt, Artificial Sequence
  Description of Artificial Sequence: Synthetic oligonucleotide
auucagagccugacguguc

SEQ ID NO: 1581344 - RNA, 19 nt, Artificial Sequence
  Description of Artificial Sequence: Synthetic oligonucleotide
auuguggcgugaaggggag

SEQ ID NO: 1581345 - RNA, 19 nt, Artificial Sequence
  Description of Artificial Sequence: Synthetic oligonucleotide
cucucgguauuccgacugc

SEQ ID NO: 1581346 - RNA, 19 nt, Artificial Sequence
  Description of Artificial Sequence: Synthetic oligonucleotide
uucucucgguauuccgacu

SEQ ID NO: 1581347 - RNA, 19 nt, Artificial Sequence
  Description of Artificial Sequence: Synthetic oligonucleotide
uggaucucacugugucgug

SEQ ID NO: 1581348 - RNA, 19 nt, Artificial Sequence
  Description of Artificial Sequence: Synthetic oligonucleotide
ccgaaugcgcuccacauuc

SEQ ID NO: 1581349 - RNA, 19 nt, Artificial Sequence
  Description of Artificial Sequence: Synthetic oligonucleotide
caacgguuauggugaugcc

SEQ ID NO: 1581350 - RNA, 19 nt, Artificial Sequence
  Description of Artificial Sequence: Synthetic oligonucleotide
gguucuaaguuuggaaguc

SEQ ID NO: 1581351 - RNA, 19 nt, Artificial Sequence
  Description of Artificial Sequence: Synthetic oligonucleotide
cagagccugacgugucacc

SEQ ID NO: 1581352 - RNA, 19 nt, Artificial Sequence
  Description of Artificial Sequence: Synthetic oligonucleotide
acgagcucucucucacuug

SEQ ID NO: 1581353 - RNA, 19 nt, Artificial Sequence
  Description of Artificial Sequence: Synthetic oligonucleotide
gggagaacccgaccauagg

SEQ ID NO: 1581354 - RNA, 19 nt, Artificial Sequence
  Description of Artificial Sequence: Synthetic oligonucleotide
ccaugugucccagacaaac

SEQ ID NO: 1581355 - RNA, 19 nt, Artificial Sequence
  Description of Artificial Sequence: Synthetic oligonucleotide
caccauuccggcguuggug

SEQ ID NO: 1581356 - RNA, 19 nt, Artificial Sequence
  Description of Artificial Sequence: Synthetic oligonucleotide
ugugucgugcugagaucuc

SEQ ID NO: 1581357 - RNA, 19 nt, Artificial Sequence
  Description of Artificial Sequence: Synthetic oligonucleotide
gugagggcggguucagcug

SEQ ID NO: 1581358 - RNA, 19 nt, Artificial Sequence
  Description of Artificial Sequence: Synthetic oligonucleotide
gggucucugguucucccag

SEQ ID NO: 1581359 - RNA, 19 nt, Artificial Sequence
  Description of Artificial Sequence: Synthetic oligonucleotide
cugggugcaccaccagcgc

SEQ ID NO: 1581360 - RNA, 19 nt, Artificial Sequence
  Description of Artificial Sequence: Synthetic oligonucleotide
uccggcguuggugaucuuc

SEQ ID NO: 1581361 - RNA, 19 nt, Artificial Sequence
  Description of Artificial Sequence: Synthetic oligonucleotide
cagaauggugaccugcugu

SEQ ID NO: 1581362 - RNA, 19 nt, Artificial Sequence
  Description of Artificial Sequence: Synthetic oligonucleotide
gcgcauggcggcccgagcg

SEQ ID NO: 1581363 - RNA, 19 nt, Artificial Sequence
  Description of Artificial Sequence: Synthetic oligonucleotide
gcauuguggcgugaagggg

SEQ ID NO: 1581364 - RNA, 19 nt, Artificial Sequence
  Description of Artificial Sequence: Synthetic oligonucleotide
cucauggguccugucgcgc

SEQ ID NO: 1581365 - RNA, 19 nt, Artificial Sequence
  Description of Artificial Sequence: Synthetic oligonucleotide
ggucccgccccuuucacca

SEQ ID NO: 1581366 - RNA, 19 nt, Artificial Sequence
  Description of Artificial Sequence: Synthetic oligonucleotide
caauacgguugaucaucuc

SEQ ID NO: 1581367 - RNA, 19 nt, Artificial Sequence
  Description of Artificial Sequence: Synthetic oligonucleotide
agggcuaucuugacaugcu

SEQ ID NO: 1581368 - RNA, 19 nt, Artificial Sequence
  Description of Artificial Sequence: Synthetic oligonucleotide
cucgggaaggggcguggcc

SEQ ID NO: 1581369 - RNA, 19 nt, Artificial Sequence
  Description of Artificial Sequence: Synthetic oligonucleotide
gaucagcugccaaccccag

SEQ ID NO: 1581370 - RNA, 19 nt, Artificial Sequence
  Description of Artificial Sequence: Synthetic oligonucleotide
gcucauggguccugucgcg

SEQ ID NO: 1581371 - RNA, 19 nt, Artificial Sequence
  Description of Artificial Sequence: Synthetic oligonucleotide
acaugcucuugcccacgcu

SEQ ID NO: 1581372 - RNA, 19 nt, Artificial Sequence
  Description of Artificial Sequence: Synthetic oligonucleotide
cgacaaauugcugggacag

SEQ ID NO: 1581373 - RNA, 19 nt, Artificial Sequence
  Description of Artificial Sequence: Synthetic oligonucleotide
ggggagaacccgaccauag

SEQ ID NO: 1581374 - RNA, 19 nt, Artificial Sequence
  Description of Artificial Sequence: Synthetic oligonucleotide
uccucacccugcgaacccc

SEQ ID NO: 1581375 - RNA, 19 nt, Artificial Sequence
  Description of Artificial Sequence: Synthetic oligonucleotide
gucguccgagcuguugucc

SEQ ID NO: 1581376 - RNA, 19 nt, Artificial Sequence
  Description of Artificial Sequence: Synthetic oligonucleotide
uuguguugacugaguuaua

SEQ ID NO: 1581377 - RNA, 19 nt, Artificial Sequence
  Description of Artificial Sequence: Synthetic oligonucleotide
ggaucucacugugucgugc

SEQ ID NO: 1581378 - RNA, 19 nt, Artificial Sequence
  Description of Artificial Sequence: Synthetic oligonucleotide
cuauggcuuuuagcugugc

SEQ ID NO: 1581379 - RNA, 19 nt, Artificial Sequence
  Description of Artificial Sequence: Synthetic oligonucleotide
caugaaugaucagcugcca

SEQ ID NO: 1581380 - RNA, 19 nt, Artificial Sequence
  Description of Artificial Sequence: Synthetic oligonucleotide
gguauuccgacugcauuga

SEQ ID NO: 1581381 - RNA, 19 nt, Artificial Sequence
  Description of Artificial Sequence: Synthetic oligonucleotide
acaccauuccggcguuggu

SEQ ID NO: 1581382 - RNA, 19 nt, Artificial Sequence
  Description of Artificial Sequence: Synthetic oligonucleotide
uccaacgguuauggugaug

SEQ ID NO: 1581383 - RNA, 19 nt, Artificial Sequence
  Description of Artificial Sequence: Synthetic oligonucleotide
cuacagguuggaauucccu

SEQ ID NO: 1581384 - RNA, 19 nt, Artificial Sequence
  Description of Artificial Sequence: Synthetic oligonucleotide
cuggaucucacugugucgu

SEQ ID NO: 1581385 - RNA, 19 nt, Artificial Sequence
  Description of Artificial Sequence: Synthetic oligonucleotide
gauggcaaucaugacuuuu

SEQ ID NO: 1581386 - RNA, 19 nt, Artificial Sequence
  Description of Artificial Sequence: Synthetic oligonucleotide
ugcccggaccucucucccc

SEQ ID NO: 1581387 - RNA, 19 nt, Artificial Sequence
  Description of Artificial Sequence: Synthetic oligonucleotide
uuguggcgugaaggggagg

SEQ ID NO: 1581388 - RNA, 19 nt, Artificial Sequence
  Description of Artificial Sequence: Synthetic oligonucleotide
ggcauuauccaacgguuau

SEQ ID NO: 1581389 - RNA, 19 nt, Artificial Sequence
  Description of Artificial Sequence: Synthetic oligonucleotide
ucgccggggagaacccgac

SEQ ID NO: 1581390 - RNA, 19 nt, Artificial Sequence
  Description of Artificial Sequence: Synthetic oligonucleotide
gugcccggaccucucuccc

SEQ ID NO: 1581391 - RNA, 19 nt, Artificial Sequence
  Description of Artificial Sequence: Synthetic oligonucleotide
cagucgccggggagaaccc

SEQ ID NO: 1581392 - RNA, 19 nt, Artificial Sequence
  Description of Artificial Sequence: Synthetic oligonucleotide
cauggcggcccgagcgccc

SEQ ID NO: 1581393 - RNA, 19 nt, Artificial Sequence
  Description of Artificial Sequence: Synthetic oligonucleotide
auaugccccucugcacaag

SEQ ID NO: 1581394 - RNA, 19 nt, Artificial Sequence
  Description of Artificial Sequence: Synthetic oligonucleotide
cugugucgugcugagaucu

SEQ ID NO: 1581395 - RNA, 19 nt, Artificial Sequence
  Description of Artificial Sequence: Synthetic oligonucleotide
gccggggagaacccgacca

SEQ ID NO: 1581396 - RNA, 19 nt, Artificial Sequence
  Description of Artificial Sequence: Synthetic oligonucleotide
guguugacugaguuauaau

SEQ ID NO: 1581397 - RNA, 19 nt, Artificial Sequence
  Description of Artificial Sequence: Synthetic oligonucleotide
guccuucaguauguuggac

SEQ ID NO: 1581398 - RNA, 19 nt, Artificial Sequence
  Description of Artificial Sequence: Synthetic oligonucleotide
gugucgugcugagaucuca

SEQ ID NO: 1581399 - RNA, 19 nt, Artificial Sequence
  Description of Artificial Sequence: Synthetic oligonucleotide
ggcgguaccugggugcacc

SEQ ID NO: 1581400 - RNA, 19 nt, Artificial Sequence
  Description of Artificial Sequence: Synthetic oligonucleotide
gggcggguucagcuggagg

SEQ ID NO: 1581401 - RNA, 19 nt, Artificial Sequence
  Description of Artificial Sequence: Synthetic oligonucleotide
ucgcgcauggcggcccgag

SEQ ID NO: 1581402 - RNA, 19 nt, Artificial Sequence
  Description of Artificial Sequence: Synthetic oligonucleotide
gaaugcgcuccacauucuu

SEQ ID NO: 1581403 - RNA, 19 nt, Artificial Sequence
  Description of Artificial Sequence: Synthetic oligonucleotide
gccaauaacauguggcauu

SEQ ID NO: 1581404 - RNA, 19 nt, Artificial Sequence
  Description of Artificial Sequence: Synthetic oligonucleotide
auccaacgguuauggugau

SEQ ID NO: 1581405 - RNA, 19 nt, Artificial Sequence
  Description of Artificial Sequence: Synthetic oligonucleotide
gggcuaucuugacaugcuc

SEQ ID NO: 1581406 - RNA, 19 nt, Artificial Sequence
  Description of Artificial Sequence: Synthetic oligonucleotide
ccagugccaauaacaugug

SEQ ID NO: 1581407 - RNA, 19 nt, Artificial Sequence
  Description of Artificial Sequence: Synthetic oligonucleotide
uggccauaguuugccgaau

SEQ ID NO: 1581408 - RNA, 19 nt, Artificial Sequence
  Description of Artificial Sequence: Synthetic oligonucleotide
ugcccacgcuccacauagu

SEQ ID NO: 1581409 - RNA, 19 nt, Artificial Sequence
  Description of Artificial Sequence: Synthetic oligonucleotide
gccccucugcacaagggcc

SEQ ID NO: 1581410 - RNA, 19 nt, Artificial Sequence
  Description of Artificial Sequence: Synthetic oligonucleotide
cugcacgagcucucucuca

SEQ ID NO: 1581411 - RNA, 19 nt, Artificial Sequence
  Description of Artificial Sequence: Synthetic oligonucleotide
cuccuaggcauuguggcgu

SEQ ID NO: 1581412 - RNA, 19 nt, Artificial Sequence
  Description of Artificial Sequence: Synthetic oligonucleotide
gaagagccauaugccccuc

SEQ ID NO: 1581413 - RNA, 19 nt, Artificial Sequence
  Description of Artificial Sequence: Synthetic oligonucleotide
cugugcccggaccucucuc

SEQ ID NO: 1581414 - RNA, 19 nt, Artificial Sequence
  Description of Artificial Sequence: Synthetic oligonucleotide
auggguccugucgcgcaug

SEQ ID NO: 1581415 - RNA, 19 nt, Artificial Sequence
  Description of Artificial Sequence: Synthetic oligonucleotide
aggaccccgugcuggguuu

SEQ ID NO: 1581416 - RNA, 19 nt, Artificial Sequence
  Description of Artificial Sequence: Synthetic oligonucleotide
guuugccgaauugccugga

SEQ ID NO: 1581417 - RNA, 19 nt, Artificial Sequence
  Description of Artificial Sequence: Synthetic oligonucleotide
ugccuccgaaugcgcucca

SEQ ID NO: 1581418 - RNA, 19 nt, Artificial Sequence
  Description of Artificial Sequence: Synthetic oligonucleotide
ggcgugaaggggaggacuc

SEQ ID NO: 1581419 - RNA, 19 nt, Artificial Sequence
  Description of Artificial Sequence: Synthetic oligonucleotide
ccgggcgguaccugggugc

SEQ ID NO: 1581420 - RNA, 19 nt, Artificial Sequence
  Description of Artificial Sequence: Synthetic oligonucleotide
ggccucaagguucuaaguu

SEQ ID NO: 1581421 - RNA, 19 nt, Artificial Sequence
  Description of Artificial Sequence: Synthetic oligonucleotide
gguucucccagugccaaua

SEQ ID NO: 1581422 - RNA, 19 nt, Artificial Sequence
  Description of Artificial Sequence: Synthetic oligonucleotide
ugcugcgcucuagcugcug

SEQ ID NO: 1581423 - RNA, 19 nt, Artificial Sequence
  Description of Artificial Sequence: Synthetic oligonucleotide
agacaccauuccggcguug

SEQ ID NO: 1581424 - RNA, 19 nt, Artificial Sequence
  Description of Artificial Sequence: Synthetic oligonucleotide
cucgguauuccgacugcau

SEQ ID NO: 1581425 - RNA, 19 nt, Artificial Sequence
  Description of Artificial Sequence: Synthetic oligonucleotide
ccugcacgagcucucucuc

SEQ ID NO: 1581426 - RNA, 19 nt, Artificial Sequence
  Description of Artificial Sequence: Synthetic oligonucleotide
gucgccggggagaacccga

SEQ ID NO: 1581427 - RNA, 19 nt, Artificial Sequence
  Description of Artificial Sequence: Synthetic oligonucleotide
gcggguucagcuggaggcc

SEQ ID NO: 1581428 - RNA, 19 nt, Artificial Sequence
  Description of Artificial Sequence: Synthetic oligonucleotide
caucuucgucguccgagcu

SEQ ID NO: 1581429 - RNA, 19 nt, Artificial Sequence
  Description of Artificial Sequence: Synthetic oligonucleotide
gggugcaccaccagcgcga

SEQ ID NO: 1581430 - RNA, 19 nt, Artificial Sequence
  Description of Artificial Sequence: Synthetic oligonucleotide
ggacuuuacucuccaguuu

SEQ ID NO: 1581431 - RNA, 19 nt, Artificial Sequence
  Description of Artificial Sequence: Synthetic oligonucleotide
cacgagcucucucucacuu

SEQ ID NO: 1581432 - RNA, 19 nt, Artificial Sequence
  Description of Artificial Sequence: Synthetic oligonucleotide
gaauggugaccugcuguuu

SEQ ID NO: 1581433 - RNA, 19 nt, Artificial Sequence
  Description of Artificial Sequence: Synthetic oligonucleotide
cgacucgagccucaucuuc

SEQ ID NO: 1581434 - RNA, 19 nt, Artificial Sequence
  Description of Artificial Sequence: Synthetic oligonucleotide
cccgccccuuucaccaugc

SEQ ID NO: 1581435 - RNA, 19 nt, Artificial Sequence
  Description of Artificial Sequence: Synthetic oligonucleotide
ccggacuuuacucuccagu

SEQ ID NO: 1581436 - RNA, 19 nt, Artificial Sequence
  Description of Artificial Sequence: Synthetic oligonucleotide
gcgugaaggggaggacucc

SEQ ID NO: 1581437 - RNA, 19 nt, Artificial Sequence
  Description of Artificial Sequence: Synthetic oligonucleotide
cgcgacucgagccucaucu

SEQ ID NO: 1581438 - RNA, 19 nt, Artificial Sequence
  Description of Artificial Sequence: Synthetic oligonucleotide
ccuccgaaugcgcuccaca

SEQ ID NO: 1581439 - RNA, 19 nt, Artificial Sequence
  Description of Artificial Sequence: Synthetic oligonucleotide
gcccggaccucucucccca

SEQ ID NO: 1581440 - RNA, 19 nt, Artificial Sequence
  Description of Artificial Sequence: Synthetic oligonucleotide
gggccucaagguucuaagu

SEQ ID NO: 1581441 - RNA, 19 nt, Artificial Sequence
  Description of Artificial Sequence: Synthetic oligonucleotide
gaaggggcguggccagaau

SEQ ID NO: 1581442 - RNA, 19 nt, Artificial Sequence
  Description of Artificial Sequence: Synthetic oligonucleotide
gcucgacaaauugcuggga

SEQ ID NO: 1581443 - RNA, 19 nt, Artificial Sequence
  Description of Artificial Sequence: Synthetic oligonucleotide
gagggcggguucagcugga

SEQ ID NO: 1581444 - RNA, 19 nt, Artificial Sequence
  Description of Artificial Sequence: Synthetic oligonucleotide
ccgagcgcccggucccugg

SEQ ID NO: 1581445 - RNA, 19 nt, Artificial Sequence
  Description of Artificial Sequence: Synthetic oligonucleotide
agcgcgacucgagccucau

SEQ ID NO: 1581446 - RNA, 19 nt, Artificial Sequence
  Description of Artificial Sequence: Synthetic oligonucleotide
cauggguccugucgcgcau

SEQ ID NO: 1581447 - RNA, 19 nt, Artificial Sequence
  Description of Artificial Sequence: Synthetic oligonucleotide
cagcgcgacucgagccuca

SEQ ID NO: 1581448 - RNA, 19 nt, Artificial Sequence
  Description of Artificial Sequence: Synthetic oligonucleotide
ggaggacuccaugaaugau

SEQ ID NO: 1581449 - RNA, 19 nt, Artificial Sequence
  Description of Artificial Sequence: Synthetic oligonucleotide
gugaaggggaggacuccau

SEQ ID NO: 1581450 - RNA, 19 nt, Artificial Sequence
  Description of Artificial Sequence: Synthetic oligonucleotide
cacagucgccggggagaac

SEQ ID NO: 1581451 - RNA, 19 nt, Artificial Sequence
  Description of Artificial Sequence: Synthetic oligonucleotide
cgucguccgagcuguuguc

SEQ ID NO: 1581452 - RNA, 19 nt, Artificial Sequence
  Description of Artificial Sequence: Synthetic oligonucleotide
gcacagucgccggggagaa

SEQ ID NO: 1581453 - RNA, 19 nt, Artificial Sequence
  Description of Artificial Sequence: Synthetic oligonucleotide
ccagcgcgacucgagccuc

SEQ ID NO: 1581454 - RNA, 19 nt, Artificial Sequence
  Description of Artificial Sequence: Synthetic oligonucleotide
gcacgagcucucucucacu

SEQ ID NO: 1581455 - RNA, 19 nt, Artificial Sequence
  Description of Artificial Sequence: Synthetic oligonucleotide
cgugucaccuguguguccu

SEQ ID NO: 1581456 - RNA, 19 nt, Artificial Sequence
  Description of Artificial Sequence: Synthetic oligonucleotide
gccugacgugucaccugug

SEQ ID NO: 1581457 - RNA, 19 nt, Artificial Sequence
  Description of Artificial Sequence: Synthetic oligonucleotide
ccgagggccucaagguucu

SEQ ID NO: 1581458 - RNA, 19 nt, Artificial Sequence
  Description of Artificial Sequence: Synthetic oligonucleotide
cgcgcauggcggcccgagc

SEQ ID NO: 1581459 - RNA, 19 nt, Artificial Sequence
  Description of Artificial Sequence: Synthetic oligonucleotide
cgccggggagaacccgacc

SEQ ID NO: 1581460 - RNA, 19 nt, Artificial Sequence
  Description of Artificial Sequence: Synthetic oligonucleotide
gcgcgacucgagccucauc

SEQ ID NO: 1581461 - RNA, 19 nt, Artificial Sequence
  Description of Artificial Sequence: Synthetic oligonucleotide
gucgcgcauggcggcccga

SEQ ID NO: 1581462 - RNA, 19 nt, Artificial Sequence
  Description of Artificial Sequence: Synthetic oligonucleotide
gcauugaguugcacuuguu

SEQ ID NO: 1581463 - RNA, 19 nt, Artificial Sequence
  Description of Artificial Sequence: Synthetic oligonucleotide
gcgcccggucccuggaccu

SEQ ID NO: 1581464 - RNA, 19 nt, Artificial Sequence
  Description of Artificial Sequence: Synthetic oligonucleotide
cggaugcugcgcucuagcu

SEQ ID NO: 1581465 - RNA, 19 nt, Artificial Sequence
  Description of Artificial Sequence: Synthetic oligonucleotide
ccuaggcauuguggcguga

SEQ ID NO: 1581466 - RNA, 19 nt, Artificial Sequence
  Description of Artificial Sequence: Synthetic oligonucleotide
cugaggcucuauggcuuuu

SEQ ID NO: 1581467 - RNA, 19 nt, Artificial Sequence
  Description of Artificial Sequence: Synthetic oligonucleotide
cgguaccugggugcaccac

SEQ ID NO: 1581468 - RNA, 19 nt, Artificial Sequence
  Description of Artificial Sequence: Synthetic oligonucleotide
cuucgucguccgagcuguu

SEQ ID NO: 1581469 - RNA, 19 nt, Artificial Sequence
  Description of Artificial Sequence: Synthetic oligonucleotide
ccggggagaacccgaccau

SEQ ID NO: 1581470 - RNA, 19 nt, Artificial Sequence
  Description of Artificial Sequence: Synthetic oligonucleotide
cggggagaacccgaccaua

SEQ ID NO: 1581471 - RNA, 19 nt, Artificial Sequence
  Description of Artificial Sequence: Synthetic oligonucleotide
ccauuccggcguuggugau

SEQ ID NO: 1581472 - RNA, 19 nt, Artificial Sequence
  Description of Artificial Sequence: Synthetic oligonucleotide
ccgccccuuucaccaugca

SEQ ID NO: 1581473 - RNA, 19 nt, Artificial Sequence
  Description of Artificial Sequence: Synthetic oligonucleotide
ccccgagggccucaagguu

SEQ ID NO: 1581474 - RNA, 19 nt, Artificial Sequence
  Description of Artificial Sequence: Synthetic oligonucleotide
cccuuucaccaugcacagu

SEQ ID NO: 1581475 - RNA, 19 nt, Artificial Sequence
  Description of Artificial Sequence: Synthetic oligonucleotide
gcccagccgggcgguaccu

SEQ ID NO: 1581476 - RNA, 19 nt, Artificial Sequence
  Description of Artificial Sequence: Synthetic oligonucleotide
gcccgagcgcccggucccu

SEQ ID NO: 1581477 - RNA, 19 nt, Artificial Sequence
  Description of Artificial Sequence: Synthetic oligonucleotide
aaauuuugccccuugcagc

SEQ ID NO: 1581478 - RNA, 19 nt, Artificial Sequence
  Description of Artificial Sequence: Synthetic oligonucleotide
agaacguugaccuuugacc

SEQ ID NO: 1581479 - RNA, 19 nt, Artificial Sequence
  Description of Artificial Sequence: Synthetic oligonucleotide
aaucauuuaggauuaauaa

SEQ ID NO: 1581480 - RNA, 19 nt, Artificial Sequence
  Description of Artificial Sequence: Synthetic oligonucleotide
acccauacuguuuugaggc

SEQ ID NO: 1581481 - RNA, 19 nt, Artificial Sequence
  Description of Artificial Sequence: Synthetic oligonucleotide
uaaaaguguagaaauagac

SEQ ID NO: 1581482 - RNA, 19 nt, Artificial Sequence
  Description of Artificial Sequence: Synthetic oligonucleotide
ucguauacaaggaacauga

SEQ ID NO: 1581483 - RNA, 19 nt, Artificial Sequence
  Description of Artificial Sequence: Synthetic oligonucleotide
ucauuuaggauuaauaauu

SEQ ID NO: 1581484 - RNA, 19 nt, Artificial Sequence
  Description of Artificial Sequence: Synthetic oligonucleotide
aucucgaauaaucuggugg

SEQ ID NO: 1581485 - RNA, 19 nt, Artificial Sequence
  Description of Artificial Sequence: Synthetic oligonucleotide
cuaagaauugacuguaccg

SEQ ID NO: 1581486 - RNA, 19 nt, Artificial Sequence
  Description of Artificial Sequence: Synthetic oligonucleotide
cuuucguaggacaacaccg

SEQ ID NO: 1581487 - RNA, 19 nt, Artificial Sequence
  Description of Artificial Sequence: Synthetic oligonucleotide
ucaauaaugccuuuguagu

SEQ ID NO: 1581488 - RNA, 19 nt, Artificial Sequence
  Description of Artificial Sequence: Synthetic oligonucleotide
auuccaaagcgcuugacuc

SEQ ID NO: 1581489 - RNA, 19 nt, Artificial Sequence
  Description of Artificial Sequence: Synthetic oligonucleotide
aguuaguugguauaauguc

SEQ ID NO: 1581490 - RNA, 19 nt, Artificial Sequence
  Description of Artificial Sequence: Synthetic oligonucleotide
auaacuggaaaccacccuc

SEQ ID NO: 1581491 - RNA, 19 nt, Artificial Sequence
  Description of Artificial Sequence: Synthetic oligonucleotide
uggaaugcaucaauaaugc

SEQ ID NO: 1581492 - RNA, 19 nt, Artificial Sequence
  Description of Artificial Sequence: Synthetic oligonucleotide
guauacaaggaacaugagg

SEQ ID NO: 1581493 - RNA, 19 nt, Artificial Sequence
  Description of Artificial Sequence: Synthetic oligonucleotide
aaauaacuggaaaccaccc

SEQ ID NO: 1581494 - RNA, 19 nt, Artificial Sequence
  Description of Artificial Sequence: Synthetic oligonucleotide
ucuaguuggagcuugcaug

SEQ ID NO: 1581495 - RNA, 19 nt, Artificial Sequence
  Description of Artificial Sequence: Synthetic oligonucleotide
acaaaauuggaacagcaga

SEQ ID NO: 1581496 - RNA, 19 nt, Artificial Sequence
  Description of Artificial Sequence: Synthetic oligonucleotide
uguuuugaggcuauuaaaa

SEQ ID NO: 1581497 - RNA, 19 nt, Artificial Sequence
  Description of Artificial Sequence: Synthetic oligonucleotide
aagaauugacuguaccguc

SEQ ID NO: 1581498 - RNA, 19 nt, Artificial Sequence
  Description of Artificial Sequence: Synthetic oligonucleotide
aaaccuaagaauugacugu

SEQ ID NO: 1581499 - RNA, 19 nt, Artificial Sequence
  Description of Artificial Sequence: Synthetic oligonucleotide
aaaacuacgucaaacauua

SEQ ID NO: 1581500 - RNA, 19 nt, Artificial Sequence
  Description of Artificial Sequence: Synthetic oligonucleotide
cuggguuuagucuaugacg

SEQ ID NO: 1581501 - RNA, 19 nt, Artificial Sequence
  Description of Artificial Sequence: Synthetic oligonucleotide
gaacguugaccuuugaccc

SEQ ID NO: 1581502 - RNA, 19 nt, Artificial Sequence
  Description of Artificial Sequence: Synthetic oligonucleotide
gacuguaccgucugcaugg

SEQ ID NO: 1581503 - RNA, 19 nt, Artificial Sequence
  Description of Artificial Sequence: Synthetic oligonucleotide
ucuagcaguauccaaggga

SEQ ID NO: 1581504 - RNA, 19 nt, Artificial Sequence
  Description of Artificial Sequence: Synthetic oligonucleotide
uguagagucccauuauucc

SEQ ID NO: 1581505 - RNA, 19 nt, Artificial Sequence
  Description of Artificial Sequence: Synthetic oligonucleotide
cauuccgaaauuuugcccc

SEQ ID NO: 1581506 - RNA, 19 nt, Artificial Sequence
  Description of Artificial Sequence: Synthetic oligonucleotide
cuauacucccuauuuagcc

SEQ ID NO: 1581507 - RNA, 19 nt, Artificial Sequence
  Description of Artificial Sequence: Synthetic oligonucleotide
agucguuagcaacacauuc

SEQ ID NO: 1581508 - RNA, 19 nt, Artificial Sequence
  Description of Artificial Sequence: Synthetic oligonucleotide
uaguuaguugguauaaugu

SEQ ID NO: 1581509 - RNA, 19 nt, Artificial Sequence
  Description of Artificial Sequence: Synthetic oligonucleotide
gaaauaacuggaaaccacc

SEQ ID NO: 1581510 - RNA, 19 nt, Artificial Sequence
  Description of Artificial Sequence: Synthetic oligonucleotide
ccuauuuagccuuugaugc

SEQ ID NO: 1581511 - RNA, 19 nt, Artificial Sequence
  Description of Artificial Sequence: Synthetic oligonucleotide
acuuaacucauguuaagca

SEQ ID NO: 1581512 - RNA, 19 nt, Artificial Sequence
  Description of Artificial Sequence: Synthetic oligonucleotide
uagucuaugacguccaaac

SEQ ID NO: 1581513 - RNA, 19 nt, Artificial Sequence
  Description of Artificial Sequence: Synthetic oligonucleotide
uuggcuauugcaccaauga

SEQ ID NO: 1581514 - RNA, 19 nt, Artificial Sequence
  Description of Artificial Sequence: Synthetic oligonucleotide
aacuacgucaaacauuaau

SEQ ID NO: 1581515 - RNA, 19 nt, Artificial Sequence
  Description of Artificial Sequence: Synthetic oligonucleotide
aauugacuguaccgucugc

SEQ ID NO: 1581516 - RNA, 19 nt, Artificial Sequence
  Description of Artificial Sequence: Synthetic oligonucleotide
uuuaagccuucguagaaca

SEQ ID NO: 1581517 - RNA, 19 nt, Artificial Sequence
  Description of Artificial Sequence: Synthetic oligonucleotide
uucauuccgaaauuuugcc

SEQ ID NO: 1581518 - RNA, 19 nt, Artificial Sequence
  Description of Artificial Sequence: Synthetic oligonucleotide
cuucguagaacaugaauug

SEQ ID NO: 1581519 - RNA, 19 nt, Artificial Sequence
  Description of Artificial Sequence: Synthetic oligonucleotide
auauuauuuucagcuauac

SEQ ID NO: 1581520 - RNA, 19 nt, Artificial Sequence
  Description of Artificial Sequence: Synthetic oligonucleotide
uaacuggaaaccacccucg

SEQ ID NO: 1581521 - RNA, 19 nt, Artificial Sequence
  Description of Artificial Sequence: Synthetic oligonucleotide
ugaagucgaagucuagcag

SEQ ID NO: 1581522 - RNA, 19 nt, Artificial Sequence
  Description of Artificial Sequence: Synthetic oligonucleotide
uucucguauacaaggaaca

SEQ ID NO: 1581523 - RNA, 19 nt, Artificial Sequence
  Description of Artificial Sequence: Synthetic oligonucleotide
aagucuagcaguauccaag

SEQ ID NO: 1581524 - RNA, 19 nt, Artificial Sequence
  Description of Artificial Sequence: Synthetic oligonucleotide
uaagaauugacuguaccgu

SEQ ID NO: 1581525 - RNA, 19 nt, Artificial Sequence
  Description of Artificial Sequence: Synthetic oligonucleotide
aaucgcuuuggcuauugca

SEQ ID NO: 1581526 - RNA, 19 nt, Artificial Sequence
  Description of Artificial Sequence: Synthetic oligonucleotide
acuacgucaaacauuaaug

SEQ ID NO: 1581527 - RNA, 19 nt, Artificial Sequence
  Description of Artificial Sequence: Synthetic oligonucleotide
ucucgaauaaucuggugga

SEQ ID NO: 1581528 - RNA, 19 nt, Artificial Sequence
  Description of Artificial Sequence: Synthetic oligonucleotide
uccugcaacaaauccaacc

SEQ ID NO: 1581529 - RNA, 19 nt, Artificial Sequence
  Description of Artificial Sequence: Synthetic oligonucleotide
ucauccgcuucuuuaaaag

SEQ ID NO: 1581530 - RNA, 19 nt, Artificial Sequence
  Description of Artificial Sequence: Synthetic oligonucleotide
acaugaauuggauggcagg

SEQ ID NO: 1581531 - RNA, 19 nt, Artificial Sequence
  Description of Artificial Sequence: Synthetic oligonucleotide
ucguagaacaugaauugga

SEQ ID NO: 1581532 - RNA, 19 nt, Artificial Sequence
  Description of Artificial Sequence: Synthetic oligonucleotide
guauaaugucuucauuccg

SEQ ID NO: 1581533 - RNA, 19 nt, Artificial Sequence
  Description of Artificial Sequence: Synthetic oligonucleotide
ucaucauauuauuuucagc

SEQ ID NO: 1581534 - RNA, 19 nt, Artificial Sequence
  Description of Artificial Sequence: Synthetic oligonucleotide
agucuaugacguccaaacc

SEQ ID NO: 1581535 - RNA, 19 nt, Artificial Sequence
  Description of Artificial Sequence: Synthetic oligonucleotide
ucaguuucucguauacaag

SEQ ID NO: 1581536 - RNA, 19 nt, Artificial Sequence
  Description of Artificial Sequence: Synthetic oligonucleotide
ucugguguuuaccacccag

SEQ ID NO: 1581537 - RNA, 19 nt, Artificial Sequence
  Description of Artificial Sequence: Synthetic oligonucleotide
ucgguauggugccaggagg

SEQ ID NO: 1581538 - RNA, 19 nt, Artificial Sequence
  Description of Artificial Sequence: Synthetic oligonucleotide
guggaaugcaucaauaaug

SEQ ID NO: 1581539 - RNA, 19 nt, Artificial Sequence
  Description of Artificial Sequence: Synthetic oligonucleotide
aacacauucaccacuccug

SEQ ID NO: 1581540 - RNA, 19 nt, Artificial Sequence
  Description of Artificial Sequence: Synthetic oligonucleotide
aggauuaauaauuuucauu

SEQ ID NO: 1581541 - RNA, 19 nt, Artificial Sequence
  Description of Artificial Sequence: Synthetic oligonucleotide
cuugcaugaauggacauac

SEQ ID NO: 1581542 - RNA, 19 nt, Artificial Sequence
  Description of Artificial Sequence: Synthetic oligonucleotide
aucgcuuuggcuauugcac

SEQ ID NO: 1581543 - RNA, 19 nt, Artificial Sequence
  Description of Artificial Sequence: Synthetic oligonucleotide
aagggaaagaacacgguca

SEQ ID NO: 1581544 - RNA, 19 nt, Artificial Sequence
  Description of Artificial Sequence: Synthetic oligonucleotide
aaugcaucaauaaugccuu

SEQ ID NO: 1581545 - RNA, 19 nt, Artificial Sequence
  Description of Artificial Sequence: Synthetic oligonucleotide
uuaguugguauaaugucuu

SEQ ID NO: 1581546 - RNA, 19 nt, Artificial Sequence
  Description of Artificial Sequence: Synthetic oligonucleotide
gacccauacuguuuugagg

SEQ ID NO: 1581547 - RNA, 19 nt, Artificial Sequence
  Description of Artificial Sequence: Synthetic oligonucleotide
uaguuuucgacuuucuuuu

SEQ ID NO: 1581548 - RNA, 19 nt, Artificial Sequence
  Description of Artificial Sequence: Synthetic oligonucleotide
aagagucagacagacauaa

SEQ ID NO: 1581549 - RNA, 19 nt, Artificial Sequence
  Description of Artificial Sequence: Synthetic oligonucleotide
uauacucccuauuuagccu

SEQ ID NO: 1581550 - RNA, 19 nt, Artificial Sequence
  Description of Artificial Sequence: Synthetic oligonucleotide
aauaaugccuuuguaguua

SEQ ID NO: 1581551 - RNA, 19 nt, Artificial Sequence
  Description of Artificial Sequence: Synthetic oligonucleotide
ucauuccgaaauuuugccc

SEQ ID NO: 1581552 - RNA, 19 nt, Artificial Sequence
  Description of Artificial Sequence: Synthetic oligonucleotide
auuuauugaggcuugucua

SEQ ID NO: 1581553 - RNA, 19 nt, Artificial Sequence
  Description of Artificial Sequence: Synthetic oligonucleotide
uucguagaacaugaauugg

SEQ ID NO: 1581554 - RNA, 19 nt, Artificial Sequence
  Description of Artificial Sequence: Synthetic oligonucleotide
uaacucauguuaagcagga

SEQ ID NO: 1581555 - RNA, 19 nt, Artificial Sequence
  Description of Artificial Sequence: Synthetic oligonucleotide
uuacggugaagguagcagc

SEQ ID NO: 1581556 - RNA, 19 nt, Artificial Sequence
  Description of Artificial Sequence: Synthetic oligonucleotide
gacaaaauuggaacagcag

SEQ ID NO: 1581557 - RNA, 19 nt, Artificial Sequence
  Description of Artificial Sequence: Synthetic oligonucleotide
uuguagagucccauuauuc

SEQ ID NO: 1581558 - RNA, 19 nt, Artificial Sequence
  Description of Artificial Sequence: Synthetic oligonucleotide
ggauaggugacuguggugg

SEQ ID NO: 1581559 - RNA, 19 nt, Artificial Sequence
  Description of Artificial Sequence: Synthetic oligonucleotide
ucuaugacguccaaaccua

SEQ ID NO: 1581560 - RNA, 19 nt, Artificial Sequence
  Description of Artificial Sequence: Synthetic oligonucleotide
gaugccuugucucucugug

SEQ ID NO: 1581561 - RNA, 19 nt, Artificial Sequence
  Description of Artificial Sequence: Synthetic oligonucleotide
uuucguaggacaacaccga

SEQ ID NO: 1581562 - RNA, 19 nt, Artificial Sequence
  Description of Artificial Sequence: Synthetic oligonucleotide
uuuuccuguagaagaacgu

SEQ ID NO: 1581563 - RNA, 19 nt, Artificial Sequence
  Description of Artificial Sequence: Synthetic oligonucleotide
uguaccgucugcaugggau

SEQ ID NO: 1581564 - RNA, 19 nt, Artificial Sequence
  Description of Artificial Sequence: Synthetic oligonucleotide
ucccauuauuccaaagcgc

SEQ ID NO: 1581565 - RNA, 19 nt, Artificial Sequence
  Description of Artificial Sequence: Synthetic oligonucleotide
cuauuuagccuuugaugcc

SEQ ID NO: 1581566 - RNA, 19 nt, Artificial Sequence
  Description of Artificial Sequence: Synthetic oligonucleotide
agacauaaagucaagccca

SEQ ID NO: 1581567 - RNA, 19 nt, Artificial Sequence
  Description of Artificial Sequence: Synthetic oligonucleotide
uaugacguccaaaccuaag

SEQ ID NO: 1581568 - RNA, 19 nt, Artificial Sequence
  Description of Artificial Sequence: Synthetic oligonucleotide
gaauaaucugguggaaugc

SEQ ID NO: 1581569 - RNA, 19 nt, Artificial Sequence
  Description of Artificial Sequence: Synthetic oligonucleotide
auuacggugaagguagcag

SEQ ID NO: 1581570 - RNA, 19 nt, Artificial Sequence
  Description of Artificial Sequence: Synthetic oligonucleotide
agaccaacagcaaggaggg

SEQ ID NO: 1581571 - RNA, 19 nt, Artificial Sequence
  Description of Artificial Sequence: Synthetic oligonucleotide
caacaccgaagccauagcg

SEQ ID NO: 1581572 - RNA, 19 nt, Artificial Sequence
  Description of Artificial Sequence: Synthetic oligonucleotide
guagaacaugaauuggaug

SEQ ID NO: 1581573 - RNA, 19 nt, Artificial Sequence
  Description of Artificial Sequence: Synthetic oligonucleotide
aacauuccgaagacucccc

SEQ ID NO: 1581574 - RNA, 19 nt, Artificial Sequence
  Description of Artificial Sequence: Synthetic oligonucleotide
augacguccaaaccuaaga

SEQ ID NO: 1581575 - RNA, 19 nt, Artificial Sequence
  Description of Artificial Sequence: Synthetic oligonucleotide
uccgcuucuuuaaaagcug

SEQ ID NO: 1581576 - RNA, 19 nt, Artificial Sequence
  Description of Artificial Sequence: Synthetic oligonucleotide
uuuggcuauugcaccaaug

SEQ ID NO: 1581577 - RNA, 19 nt, Artificial Sequence
  Description of Artificial Sequence: Synthetic oligonucleotide
cuguagaagaacguugacc

SEQ ID NO: 1581578 - RNA, 19 nt, Artificial Sequence
  Description of Artificial Sequence: Synthetic oligonucleotide
uuuucagcuauacucccua

SEQ ID NO: 1581579 - RNA, 19 nt, Artificial Sequence
  Description of Artificial Sequence: Synthetic oligonucleotide
aauuggauggcaggguuga

SEQ ID NO: 1581580 - RNA, 19 nt, Artificial Sequence
  Description of Artificial Sequence: Synthetic oligonucleotide
cauuauuccaaagcgcuug

SEQ ID NO: 1581581 - RNA, 19 nt, Artificial Sequence
  Description of Artificial Sequence: Synthetic oligonucleotide
gaacauuccgaagacuccc

SEQ ID NO: 1581582 - RNA, 19 nt, Artificial Sequence
  Description of Artificial Sequence: Synthetic oligonucleotide
aaugccuuuguaguuaguu

SEQ ID NO: 1581583 - RNA, 19 nt, Artificial Sequence
  Description of Artificial Sequence: Synthetic oligonucleotide
uaagccuucguagaacaug

SEQ ID NO: 1581584 - RNA, 19 nt, Artificial Sequence
  Description of Artificial Sequence: Synthetic oligonucleotide
ugacccauacuguuuugag

SEQ ID NO: 1581585 - RNA, 19 nt, Artificial Sequence
  Description of Artificial Sequence: Synthetic oligonucleotide
ugacguccaaaccuaagaa

SEQ ID NO: 1581586 - RNA, 19 nt, Artificial Sequence
  Description of Artificial Sequence: Synthetic oligonucleotide
ucguaggacaacaccgaag

SEQ ID NO: 1581587 - RNA, 19 nt, Artificial Sequence
  Description of Artificial Sequence: Synthetic oligonucleotide
uaaucugguggaaugcauc

SEQ ID NO: 1581588 - RNA, 19 nt, Artificial Sequence
  Description of Artificial Sequence: Synthetic oligonucleotide
gaauugacuguaccgucug

SEQ ID NO: 1581589 - RNA, 19 nt, Artificial Sequence
  Description of Artificial Sequence: Synthetic oligonucleotide
ucaucucgaauaaucuggu

SEQ ID NO: 1581590 - RNA, 19 nt, Artificial Sequence
  Description of Artificial Sequence: Synthetic oligonucleotide
aggcccauuacggugaagg

SEQ ID NO: 1581591 - RNA, 19 nt, Artificial Sequence
  Description of Artificial Sequence: Synthetic oligonucleotide
gauggcaggguugaagacc

SEQ ID NO: 1581592 - RNA, 19 nt, Artificial Sequence
  Description of Artificial Sequence: Synthetic oligonucleotide
cuacgucaaacauuaauga

SEQ ID NO: 1581593 - RNA, 19 nt, Artificial Sequence
  Description of Artificial Sequence: Synthetic oligonucleotide
agcaguauccaagggaaag

SEQ ID NO: 1581594 - RNA, 19 nt, Artificial Sequence
  Description of Artificial Sequence: Synthetic oligonucleotide
uccaaaccuaagaauugac

SEQ ID NO: 1581595 - RNA, 19 nt, Artificial Sequence
  Description of Artificial Sequence: Synthetic oligonucleotide
aagguagagaacauuccga

SEQ ID NO: 1581596 - RNA, 19 nt, Artificial Sequence
  Description of Artificial Sequence: Synthetic oligonucleotide
uagacaaaauuggaacagc

SEQ ID NO: 1581597 - RNA, 19 nt, Artificial Sequence
  Description of Artificial Sequence: Synthetic oligonucleotide
ugggauaggugacuguggu

SEQ ID NO: 1581598 - RNA, 19 nt, Artificial Sequence
  Description of Artificial Sequence: Synthetic oligonucleotide
gacagacauaaagucaagc

SEQ ID NO: 1581599 - RNA, 19 nt, Artificial Sequence
  Description of Artificial Sequence: Synthetic oligonucleotide
uugaggcuauuaaaagugu

SEQ ID NO: 1581600 - RNA, 19 nt, Artificial Sequence
  Description of Artificial Sequence: Synthetic oligonucleotide
cuagcaguauccaagggaa

SEQ ID NO: 1581601 - RNA, 19 nt, Artificial Sequence
  Description of Artificial Sequence: Synthetic oligonucleotide
cauccgcuucuuuaaaagc

SEQ ID NO: 1581602 - RNA, 19 nt, Artificial Sequence
  Description of Artificial Sequence: Synthetic oligonucleotide
uuuuaagccuucguagaac

SEQ ID NO: 1581603 - RNA, 19 nt, Artificial Sequence
  Description of Artificial Sequence: Synthetic oligonucleotide
uaggauuaauaauuuucau

SEQ ID NO: 1581604 - RNA, 19 nt, Artificial Sequence
  Description of Artificial Sequence: Synthetic oligonucleotide
ccaagauuccuucaucucg

SEQ ID NO: 1581605 - RNA, 19 nt, Artificial Sequence
  Description of Artificial Sequence: Synthetic oligonucleotide
cagucaucauauuauuuuc

SEQ ID NO: 1581606 - RNA, 19 nt, Artificial Sequence
  Description of Artificial Sequence: Synthetic oligonucleotide
ucugguggaaugcaucaau

SEQ ID NO: 1581607 - RNA, 19 nt, Artificial Sequence
  Description of Artificial Sequence: Synthetic oligonucleotide
cacuuaacucauguuaagc

SEQ ID NO: 1581608 - RNA, 19 nt, Artificial Sequence
  Description of Artificial Sequence: Synthetic oligonucleotide
uacggugaagguagcagcu

SEQ ID NO: 1581609 - RNA, 19 nt, Artificial Sequence
  Description of Artificial Sequence: Synthetic oligonucleotide
agucugguguuuaccaccc

SEQ ID NO: 1581610 - RNA, 19 nt, Artificial Sequence
  Description of Artificial Sequence: Synthetic oligonucleotide
cccauuacggugaagguag

SEQ ID NO: 1581611 - RNA, 19 nt, Artificial Sequence
  Description of Artificial Sequence: Synthetic oligonucleotide
cagacaaugacagaaaugu

SEQ ID NO: 1581612 - RNA, 19 nt, Artificial Sequence
  Description of Artificial Sequence: Synthetic oligonucleotide
ggcuucaaggccuuuguag

SEQ ID NO: 1581613 - RNA, 19 nt, Artificial Sequence
  Description of Artificial Sequence: Synthetic oligonucleotide
ugaggcuauuaaaagugua

SEQ ID NO: 1581614 - RNA, 19 nt, Artificial Sequence
  Description of Artificial Sequence: Synthetic oligonucleotide
agguagagaacauuccgaa

SEQ ID NO: 1581615 - RNA, 19 nt, Artificial Sequence
  Description of Artificial Sequence: Synthetic oligonucleotide
acgucaaacauuaaugaau

SEQ ID NO: 1581616 - RNA, 19 nt, Artificial Sequence
  Description of Artificial Sequence: Synthetic oligonucleotide
aucauauuauuuucagcua

SEQ ID NO: 1581617 - RNA, 19 nt, Artificial Sequence
  Description of Artificial Sequence: Synthetic oligonucleotide
auuauuccaaagcgcuuga

SEQ ID NO: 1581618 - RNA, 19 nt, Artificial Sequence
  Description of Artificial Sequence: Synthetic oligonucleotide
ugguggaaugcaucaauaa

SEQ ID NO: 1581619 - RNA, 19 nt, Artificial Sequence
  Description of Artificial Sequence: Synthetic oligonucleotide
ucccuauuuagccuuugau

SEQ ID NO: 1581620 - RNA, 19 nt, Artificial Sequence
  Description of Artificial Sequence: Synthetic oligonucleotide
ugugugcugacaauuuauu

SEQ ID NO: 1581621 - RNA, 19 nt, Artificial Sequence
  Description of Artificial Sequence: Synthetic oligonucleotide
cucacuuaacucauguuaa

SEQ ID NO: 1581622 - RNA, 19 nt, Artificial Sequence
  Description of Artificial Sequence: Synthetic oligonucleotide
ucgcuuuggcuauugcacc

SEQ ID NO: 1581623 - RNA, 19 nt, Artificial Sequence
  Description of Artificial Sequence: Synthetic oligonucleotide
gguuuagucuaugacgucc

SEQ ID NO: 1581624 - RNA, 19 nt, Artificial Sequence
  Description of Artificial Sequence: Synthetic oligonucleotide
caugggauaggugacugug

SEQ ID NO: 1581625 - RNA, 19 nt, Artificial Sequence
  Description of Artificial Sequence: Synthetic oligonucleotide
acuucccacggcuccggcc

SEQ ID NO: 1581626 - RNA, 19 nt, Artificial Sequence
  Description of Artificial Sequence: Synthetic oligonucleotide
aaugaauaaucaacauuua

SEQ ID NO: 1581627 - RNA, 19 nt, Artificial Sequence
  Description of Artificial Sequence: Synthetic oligonucleotide
agacaaaauuggaacagca

SEQ ID NO: 1581628 - RNA, 19 nt, Artificial Sequence
  Description of Artificial Sequence: Synthetic oligonucleotide
uccgaaauuuugccccuug

SEQ ID NO: 1581629 - RNA, 19 nt, Artificial Sequence
  Description of Artificial Sequence: Synthetic oligonucleotide
uuccgaagacuccccagug

SEQ ID NO: 1581630 - RNA, 19 nt, Artificial Sequence
  Description of Artificial Sequence: Synthetic oligonucleotide
aggcuauuaaaaguguaga

SEQ ID NO: 1581631 - RNA, 19 nt, Artificial Sequence
  Description of Artificial Sequence: Synthetic oligonucleotide
ggcuauugcaccaaugaug

SEQ ID NO: 1581632 - RNA, 19 nt, Artificial Sequence
  Description of Artificial Sequence: Synthetic oligonucleotide
uucauccgcuucuuuaaaa

SEQ ID NO: 1581633 - RNA, 19 nt, Artificial Sequence
  Description of Artificial Sequence: Synthetic oligonucleotide
auugacuguaccgucugca

SEQ ID NO: 1581634 - RNA, 19 nt, Artificial Sequence
  Description of Artificial Sequence: Synthetic oligonucleotide
gcuauugcaccaaugauga

SEQ ID NO: 1581635 - RNA, 19 nt, Artificial Sequence
  Description of Artificial Sequence: Synthetic oligonucleotide
uucuggguuuagucuauga

SEQ ID NO: 1581636 - RNA, 19 nt, Artificial Sequence
  Description of Artificial Sequence: Synthetic oligonucleotide
cugucaguuucucguauac

SEQ ID NO: 1581637 - RNA, 19 nt, Artificial Sequence
  Description of Artificial Sequence: Synthetic oligonucleotide
cucguauacaaggaacaug

SEQ ID NO: 1581638 - RNA, 19 nt, Artificial Sequence
  Description of Artificial Sequence: Synthetic oligonucleotide
cguaggacaacaccgaagc

SEQ ID NO: 1581639 - RNA, 19 nt, Artificial Sequence
  Description of Artificial Sequence: Synthetic oligonucleotide
auagcgccacacuuuccuc

SEQ ID NO: 1581640 - RNA, 19 nt, Artificial Sequence
  Description of Artificial Sequence: Synthetic oligonucleotide
ucaucaaccugaagucgaa

SEQ ID NO: 1581641 - RNA, 19 nt, Artificial Sequence
  Description of Artificial Sequence: Synthetic oligonucleotide
ccuaagaauugacuguacc

SEQ ID NO: 1581642 - RNA, 19 nt, Artificial Sequence
  Description of Artificial Sequence: Synthetic oligonucleotide
uuauugaggcuugucuagu

SEQ ID NO: 1581643 - RNA, 19 nt, Artificial Sequence
  Description of Artificial Sequence: Synthetic oligonucleotide
gaauuggauggcaggguug

SEQ ID NO: 1581644 - RNA, 19 nt, Artificial Sequence
  Description of Artificial Sequence: Synthetic oligonucleotide
guuuuaagccuucguagaa

SEQ ID NO: 1581645 - RNA, 19 nt, Artificial Sequence
  Description of Artificial Sequence: Synthetic oligonucleotide
uggcuauugcaccaaugau

SEQ ID NO: 1581646 - RNA, 19 nt, Artificial Sequence
  Description of Artificial Sequence: Synthetic oligonucleotide
uucguaggacaacaccgaa

SEQ ID NO: 1581647 - RNA, 19 nt, Artificial Sequence
  Description of Artificial Sequence: Synthetic oligonucleotide
gucgaagucuagcaguauc

SEQ ID NO: 1581648 - RNA, 19 nt, Artificial Sequence
  Description of Artificial Sequence: Synthetic oligonucleotide
uuugacccauacuguuuug

SEQ ID NO: 1581649 - RNA, 19 nt, Artificial Sequence
  Description of Artificial Sequence: Synthetic oligonucleotide
cucgguauggugccaggag

SEQ ID NO: 1581650 - RNA, 19 nt, Artificial Sequence
  Description of Artificial Sequence: Synthetic oligonucleotide
aauccaaccaccagaucuu

SEQ ID NO: 1581651 - RNA, 19 nt, Artificial Sequence
  Description of Artificial Sequence: Synthetic oligonucleotide
ccguuuuaagccuucguag

SEQ ID NO: 1581652 - RNA, 19 nt, Artificial Sequence
  Description of Artificial Sequence: Synthetic oligonucleotide
gguagcagcugucaguuuc

SEQ ID NO: 1581653 - RNA, 19 nt, Artificial Sequence
  Description of Artificial Sequence: Synthetic oligonucleotide
ucgaauaaucugguggaau

SEQ ID NO: 1581654 - RNA, 19 nt, Artificial Sequence
  Description of Artificial Sequence: Synthetic oligonucleotide
agaauugacuguaccgucu

SEQ ID NO: 1581655 - RNA, 19 nt, Artificial Sequence
  Description of Artificial Sequence: Synthetic oligonucleotide
accgaagccauagcgccac

SEQ ID NO: 1581656 - RNA, 19 nt, Artificial Sequence
  Description of Artificial Sequence: Synthetic oligonucleotide
uucagcuauacucccuauu

SEQ ID NO: 1581657 - RNA, 19 nt, Artificial Sequence
  Description of Artificial Sequence: Synthetic oligonucleotide
uugacccauacuguuuuga

SEQ ID NO: 1581658 - RNA, 19 nt, Artificial Sequence
  Description of Artificial Sequence: Synthetic oligonucleotide
aacagcucacuuaacucau

SEQ ID NO: 1581659 - RNA, 19 nt, Artificial Sequence
  Description of Artificial Sequence: Synthetic oligonucleotide
uuuugccccuugcagcuuc

SEQ ID NO: 1581660 - RNA, 19 nt, Artificial Sequence
  Description of Artificial Sequence: Synthetic oligonucleotide
ugacucgcuggugaagaag

SEQ ID NO: 1581661 - RNA, 19 nt, Artificial Sequence
  Description of Artificial Sequence: Synthetic oligonucleotide
cacuccugcaacaaaucca

SEQ ID NO: 1581662 - RNA, 19 nt, Artificial Sequence
  Description of Artificial Sequence: Synthetic oligonucleotide
auacucccuauuuagccuu

SEQ ID NO: 1581663 - RNA, 19 nt, Artificial Sequence
  Description of Artificial Sequence: Synthetic oligonucleotide
gcuuucguaggacaacacc

SEQ ID NO: 1581664 - RNA, 19 nt, Artificial Sequence
  Description of Artificial Sequence: Synthetic oligonucleotide
uuuagucuaugacguccaa

SEQ ID NO: 1581665 - RNA, 19 nt, Artificial Sequence
  Description of Artificial Sequence: Synthetic oligonucleotide
cacggcuccggccacggcg

SEQ ID NO: 1581666 - RNA, 19 nt, Artificial Sequence
  Description of Artificial Sequence: Synthetic oligonucleotide
guuucucguauacaaggaa

SEQ ID NO: 1581667 - RNA, 19 nt, Artificial Sequence
  Description of Artificial Sequence: Synthetic oligonucleotide
uugucuaguuggagcuugc

SEQ ID NO: 1581668 - RNA, 19 nt, Artificial Sequence
  Description of Artificial Sequence: Synthetic oligonucleotide
agcgccacacuuuccucuc

SEQ ID NO: 1581669 - RNA, 19 nt, Artificial Sequence
  Description of Artificial Sequence: Synthetic oligonucleotide
acguccaaaccuaagaauu

SEQ ID NO: 1581670 - RNA, 19 nt, Artificial Sequence
  Description of Artificial Sequence: Synthetic oligonucleotide
ugcaugcguaguuuucgac

SEQ ID NO: 1581671 - RNA, 19 nt, Artificial Sequence
  Description of Artificial Sequence: Synthetic oligonucleotide
aguuggagcuugcaugaau

SEQ ID NO: 1581672 - RNA, 19 nt, Artificial Sequence
  Description of Artificial Sequence: Synthetic oligonucleotide
aacucauguuaagcaggag

SEQ ID NO: 1581673 - RNA, 19 nt, Artificial Sequence
  Description of Artificial Sequence: Synthetic oligonucleotide
aguuucucguauacaagga

SEQ ID NO: 1581674 - RNA, 19 nt, Artificial Sequence
  Description of Artificial Sequence: Synthetic oligonucleotide
uguaguuaguugguauaau

SEQ ID NO: 1581675 - RNA, 19 nt, Artificial Sequence
  Description of Artificial Sequence: Synthetic oligonucleotide
cuggaaaccacccucggua

SEQ ID NO: 1581676 - RNA, 19 nt, Artificial Sequence
  Description of Artificial Sequence: Synthetic oligonucleotide
ugacugugguggcaaucgc

SEQ ID NO: 1581677 - RNA, 19 nt, Artificial Sequence
  Description of Artificial Sequence: Synthetic oligonucleotide
uuaagccuucguagaacau

SEQ ID NO: 1581678 - RNA, 19 nt, Artificial Sequence
  Description of Artificial Sequence: Synthetic oligonucleotide
cauacaacaccagggcuuc

SEQ ID NO: 1581679 - RNA, 19 nt, Artificial Sequence
  Description of Artificial Sequence: Synthetic oligonucleotide
ugucaguuucucguauaca

SEQ ID NO: 1581680 - RNA, 19 nt, Artificial Sequence
  Description of Artificial Sequence: Synthetic oligonucleotide
cauucaccacuccugcaac

SEQ ID NO: 1581681 - RNA, 19 nt, Artificial Sequence
  Description of Artificial Sequence: Synthetic oligonucleotide
ggagcuugcaugaauggac

SEQ ID NO: 1581682 - RNA, 19 nt, Artificial Sequence
  Description of Artificial Sequence: Synthetic oligonucleotide
ucucguauacaaggaacau

SEQ ID NO: 1581683 - RNA, 19 nt, Artificial Sequence
  Description of Artificial Sequence: Synthetic oligonucleotide
uccugugggaggaccucag

SEQ ID NO: 1581684 - RNA, 19 nt, Artificial Sequence
  Description of Artificial Sequence: Synthetic oligonucleotide
gcucacuuaacucauguua

SEQ ID NO: 1581685 - RNA, 19 nt, Artificial Sequence
  Description of Artificial Sequence: Synthetic oligonucleotide
uauugaggcuugucuaguu

SEQ ID NO: 1581686 - RNA, 19 nt, Artificial Sequence
  Description of Artificial Sequence: Synthetic oligonucleotide
uagcgccacacuuuccucu

SEQ ID NO: 1581687 - RNA, 19 nt, Artificial Sequence
  Description of Artificial Sequence: Synthetic oligonucleotide
gaaaacuacgucaaacauu

SEQ ID NO: 1581688 - RNA, 19 nt, Artificial Sequence
  Description of Artificial Sequence: Synthetic oligonucleotide
ugccguuuuaagccuucgu

SEQ ID NO: 1581689 - RNA, 19 nt, Artificial Sequence
  Description of Artificial Sequence: Synthetic oligonucleotide
uggaaaccacccucgguau

SEQ ID NO: 1581690 - RNA, 19 nt, Artificial Sequence
  Description of Artificial Sequence: Synthetic oligonucleotide
augggauaggugacugugg

SEQ ID NO: 1581691 - RNA, 19 nt, Artificial Sequence
  Description of Artificial Sequence: Synthetic oligonucleotide
ggaaaggugccauuccaca

SEQ ID NO: 1581692 - RNA, 19 nt, Artificial Sequence
  Description of Artificial Sequence: Synthetic oligonucleotide
agaagaacguugaccuuug

SEQ ID NO: 1581693 - RNA, 19 nt, Artificial Sequence
  Description of Artificial Sequence: Synthetic oligonucleotide
ggcuauuaaaaguguagaa

SEQ ID NO: 1581694 - RNA, 19 nt, Artificial Sequence
  Description of Artificial Sequence: Synthetic oligonucleotide
uaccgucugcaugggauag

SEQ ID NO: 1581695 - RNA, 19 nt, Artificial Sequence
  Description of Artificial Sequence: Synthetic oligonucleotide
acauuccgaagacucccca

SEQ ID NO: 1581696 - RNA, 19 nt, Artificial Sequence
  Description of Artificial Sequence: Synthetic oligonucleotide
agaguggagucguuagcaa

SEQ ID NO: 1581697 - RNA, 19 nt, Artificial Sequence
  Description of Artificial Sequence: Synthetic oligonucleotide
ugcguaguuuucgacuuuc

SEQ ID NO: 1581698 - RNA, 19 nt, Artificial Sequence
  Description of Artificial Sequence: Synthetic oligonucleotide
uugcaugaauggacauaca

SEQ ID NO: 1581699 - RNA, 19 nt, Artificial Sequence
  Description of Artificial Sequence: Synthetic oligonucleotide
ccagacaaugacagaaaug

SEQ ID NO: 1581700 - RNA, 19 nt, Artificial Sequence
  Description of Artificial Sequence: Synthetic oligonucleotide
agucaagcccacagcacag

SEQ ID NO: 1581701 - RNA, 19 nt, Artificial Sequence
  Description of Artificial Sequence: Synthetic oligonucleotide
gaaaagagucagacagaca

SEQ ID NO: 1581702 - RNA, 19 nt, Artificial Sequence
  Description of Artificial Sequence: Synthetic oligonucleotide
ugaugccuugucucucugu

SEQ ID NO: 1581703 - RNA, 19 nt, Artificial Sequence
  Description of Artificial Sequence: Synthetic oligonucleotide
agacuugaaauaacuggaa

SEQ ID NO: 1581704 - RNA, 19 nt, Artificial Sequence
  Description of Artificial Sequence: Synthetic oligonucleotide
aaccugaagucgaagucua

SEQ ID NO: 1581705 - RNA, 19 nt, Artificial Sequence
  Description of Artificial Sequence: Synthetic oligonucleotide
aggacaacaccgaagccau

SEQ ID NO: 1581706 - RNA, 19 nt, Artificial Sequence
  Description of Artificial Sequence: Synthetic oligonucleotide
uuucagcuauacucccuau

SEQ ID NO: 1581707 - RNA, 19 nt, Artificial Sequence
  Description of Artificial Sequence: Synthetic oligonucleotide
gacguccaaaccuaagaau

SEQ ID NO: 1581708 - RNA, 19 nt, Artificial Sequence
  Description of Artificial Sequence: Synthetic oligonucleotide
uggagucguuagcaacaca

SEQ ID NO: 1581709 - RNA, 19 nt, Artificial Sequence
  Description of Artificial Sequence: Synthetic oligonucleotide
ugucuaguuggagcuugca

SEQ ID NO: 1581710 - RNA, 19 nt, Artificial Sequence
  Description of Artificial Sequence: Synthetic oligonucleotide
acaauuuauugaggcuugu

SEQ ID NO: 1581711 - RNA, 19 nt, Artificial Sequence
  Description of Artificial Sequence: Synthetic oligonucleotide
caaucgcuuuggcuauugc

SEQ ID NO: 1581712 - RNA, 19 nt, Artificial Sequence
  Description of Artificial Sequence: Synthetic oligonucleotide
uagcaguauccaagggaaa

SEQ ID NO: 1581713 - RNA, 19 nt, Artificial Sequence
  Description of Artificial Sequence: Synthetic oligonucleotide
cugacaauuuauugaggcu

SEQ ID NO: 1581714 - RNA, 19 nt, Artificial Sequence
  Description of Artificial Sequence: Synthetic oligonucleotide
uaaugccuuuguaguuagu

SEQ ID NO: 1581715 - RNA, 19 nt, Artificial Sequence
  Description of Artificial Sequence: Synthetic oligonucleotide
gaagagagcuucauccgcu

SEQ ID NO: 1581716 - RNA, 19 nt, Artificial Sequence
  Description of Artificial Sequence: Synthetic oligonucleotide
caucaaccugaagucgaag

SEQ ID NO: 1581717 - RNA, 19 nt, Artificial Sequence
  Description of Artificial Sequence: Synthetic oligonucleotide
uuugccccuugcagcuuca

SEQ ID NO: 1581718 - RNA, 19 nt, Artificial Sequence
  Description of Artificial Sequence: Synthetic oligonucleotide
agcuugcaugaauggacau

SEQ ID NO: 1581719 - RNA, 19 nt, Artificial Sequence
  Description of Artificial Sequence: Synthetic oligonucleotide
agcucacuuaacucauguu

SEQ ID NO: 1581720 - RNA, 19 nt, Artificial Sequence
  Description of Artificial Sequence: Synthetic oligonucleotide
caucaauaaugccuuugua

SEQ ID NO: 1581721 - RNA, 19 nt, Artificial Sequence
  Description of Artificial Sequence: Synthetic oligonucleotide
acauaaagucaagcccaca

SEQ ID NO: 1581722 - RNA, 19 nt, Artificial Sequence
  Description of Artificial Sequence: Synthetic oligonucleotide
gguggaaugcaucaauaau

SEQ ID NO: 1581723 - RNA, 19 nt, Artificial Sequence
  Description of Artificial Sequence: Synthetic oligonucleotide
gggaggaccucagugcuug

SEQ ID NO: 1581724 - RNA, 19 nt, Artificial Sequence
  Description of Artificial Sequence: Synthetic oligonucleotide
cccauuauuccaaagcgcu

SEQ ID NO: 1581725 - RNA, 19 nt, Artificial Sequence
  Description of Artificial Sequence: Synthetic oligonucleotide
caugcguaguuuucgacuu

SEQ ID NO: 1581726 - RNA, 19 nt, Artificial Sequence
  Description of Artificial Sequence: Synthetic oligonucleotide
ggcuugucuaguuggagcu

SEQ ID NO: 1581727 - RNA, 19 nt, Artificial Sequence
  Description of Artificial Sequence: Synthetic oligonucleotide
accgucugcaugggauagg

SEQ ID NO: 1581728 - RNA, 19 nt, Artificial Sequence
  Description of Artificial Sequence: Synthetic oligonucleotide
ccgaaauuuugccccuugc

SEQ ID NO: 1581729 - RNA, 19 nt, Artificial Sequence
  Description of Artificial Sequence: Synthetic oligonucleotide
ggaaaccacccucgguaug

SEQ ID NO: 1581730 - RNA, 19 nt, Artificial Sequence
  Description of Artificial Sequence: Synthetic oligonucleotide
ccuucguagaacaugaauu

SEQ ID NO: 1581731 - RNA, 19 nt, Artificial Sequence
  Description of Artificial Sequence: Synthetic oligonucleotide
ggagucguuagcaacacau

SEQ ID NO: 1581732 - RNA, 19 nt, Artificial Sequence
  Description of Artificial Sequence: Synthetic oligonucleotide
caauaaugccuuuguaguu

SEQ ID NO: 1581733 - RNA, 19 nt, Artificial Sequence
  Description of Artificial Sequence: Synthetic oligonucleotide
ggccacggcguguaccagg

SEQ ID NO: 1581734 - RNA, 19 nt, Artificial Sequence
  Description of Artificial Sequence: Synthetic oligonucleotide
cuaugacguccaaaccuaa

SEQ ID NO: 1581735 - RNA, 19 nt, Artificial Sequence
  Description of Artificial Sequence: Synthetic oligonucleotide
cugccguuuuaagccuucg

SEQ ID NO: 1581736 - RNA, 19 nt, Artificial Sequence
  Description of Artificial Sequence: Synthetic oligonucleotide
uaccaggcuuucguaggac

SEQ ID NO: 1581737 - RNA, 19 nt, Artificial Sequence
  Description of Artificial Sequence: Synthetic oligonucleotide
cugcaugcguaguuuucga

SEQ ID NO: 1581738 - RNA, 19 nt, Artificial Sequence
  Description of Artificial Sequence: Synthetic oligonucleotide
cauacuguuuugaggcuau

SEQ ID NO: 1581739 - RNA, 19 nt, Artificial Sequence
  Description of Artificial Sequence: Synthetic oligonucleotide
cguuuuaagccuucguaga

SEQ ID NO: 1581740 - RNA, 19 nt, Artificial Sequence
  Description of Artificial Sequence: Synthetic oligonucleotide
cauuacggugaagguagca

SEQ ID NO: 1581741 - RNA, 19 nt, Artificial Sequence
  Description of Artificial Sequence: Synthetic oligonucleotide
gcaugcguaguuuucgacu

SEQ ID NO: 1581742 - RNA, 19 nt, Artificial Sequence
  Description of Artificial Sequence: Synthetic oligonucleotide
cucccuauuuagccuuuga

SEQ ID NO: 1581743 - RNA, 19 nt, Artificial Sequence
  Description of Artificial Sequence: Synthetic oligonucleotide
gggaaaggugccauuccac

SEQ ID NO: 1581744 - RNA, 19 nt, Artificial Sequence
  Description of Artificial Sequence: Synthetic oligonucleotide
acccucgguauggugccag

SEQ ID NO: 1581745 - RNA, 19 nt, Artificial Sequence
  Description of Artificial Sequence: Synthetic oligonucleotide
ccuguagaagaacguugac

SEQ ID NO: 1581746 - RNA, 19 nt, Artificial Sequence
  Description of Artificial Sequence: Synthetic oligonucleotide
acucccuauuuagccuuug

SEQ ID NO: 1581747 - RNA, 19 nt, Artificial Sequence
  Description of Artificial Sequence: Synthetic oligonucleotide
cguauacaaggaacaugag

SEQ ID NO: 1581748 - RNA, 19 nt, Artificial Sequence
  Description of Artificial Sequence: Synthetic oligonucleotide
ccaaaccuaagaauugacu

SEQ ID NO: 1581749 - RNA, 19 nt, Artificial Sequence
  Description of Artificial Sequence: Synthetic oligonucleotide
aaacuacgucaaacauuaa

SEQ ID NO: 1581750 - RNA, 19 nt, Artificial Sequence
  Description of Artificial Sequence: Synthetic oligonucleotide
ccacccucgguauggugcc

SEQ ID NO: 1581751 - RNA, 19 nt, Artificial Sequence
  Description of Artificial Sequence: Synthetic oligonucleotide
augcguaguuuucgacuuu

SEQ ID NO: 1581752 - RNA, 19 nt, Artificial Sequence
  Description of Artificial Sequence: Synthetic oligonucleotide
agccauagcgccacacuuu

SEQ ID NO: 1581753 - RNA, 19 nt, Artificial Sequence
  Description of Artificial Sequence: Synthetic oligonucleotide
agucgaagucuagcaguau

SEQ ID NO: 1581754 - RNA, 19 nt, Artificial Sequence
  Description of Artificial Sequence: Synthetic oligonucleotide
ggguuuagucuaugacguc

SEQ ID NO: 1581755 - RNA, 19 nt, Artificial Sequence
  Description of Artificial Sequence: Synthetic oligonucleotide
aggaggccuucuuccuuaa

SEQ ID NO: 1581756 - RNA, 19 nt, Artificial Sequence
  Description of Artificial Sequence: Synthetic oligonucleotide
uugccccuugcagcuucag

SEQ ID NO: 1581757 - RNA, 19 nt, Artificial Sequence
  Description of Artificial Sequence: Synthetic oligonucleotide
cuauugcaccaaugaugaa

SEQ ID NO: 1581758 - RNA, 19 nt, Artificial Sequence
  Description of Artificial Sequence: Synthetic oligonucleotide
guagcagcugucaguuucu

SEQ ID NO: 1581759 - RNA, 19 nt, Artificial Sequence
  Description of Artificial Sequence: Synthetic oligonucleotide
gcgcuugacucgcugguga

SEQ ID NO: 1581760 - RNA, 19 nt, Artificial Sequence
  Description of Artificial Sequence: Synthetic oligonucleotide
uuccgaaauuuugccccuu

SEQ ID NO: 1581761 - RNA, 19 nt, Artificial Sequence
  Description of Artificial Sequence: Synthetic oligonucleotide
ggugacugugguggcaauc

SEQ ID NO: 1581762 - RNA, 19 nt, Artificial Sequence
  Description of Artificial Sequence: Synthetic oligonucleotide
ccauuacggugaagguagc

SEQ ID NO: 1581763 - RNA, 19 nt, Artificial Sequence
  Description of Artificial Sequence: Synthetic oligonucleotide
ggcguguaccaggcuuucg

SEQ ID NO: 1581764 - RNA, 19 nt, Artificial Sequence
  Description of Artificial Sequence: Synthetic oligonucleotide
auuggauggcaggguugaa

SEQ ID NO: 1581765 - RNA, 19 nt, Artificial Sequence
  Description of Artificial Sequence: Synthetic oligonucleotide
gcguguaccaggcuuucgu

SEQ ID NO: 1581766 - RNA, 19 nt, Artificial Sequence
  Description of Artificial Sequence: Synthetic oligonucleotide
gagucguuagcaacacauu

SEQ ID NO: 1581767 - RNA, 19 nt, Artificial Sequence
  Description of Artificial Sequence: Synthetic oligonucleotide
acggcguguaccaggcuuu

SEQ ID NO: 1581768 - RNA, 19 nt, Artificial Sequence
  Description of Artificial Sequence: Synthetic oligonucleotide
ggcuuucguaggacaacac

SEQ ID NO: 1581769 - RNA, 19 nt, Artificial Sequence
  Description of Artificial Sequence: Synthetic oligonucleotide
gcuugcaugaauggacaua

SEQ ID NO: 1581770 - RNA, 19 nt, Artificial Sequence
  Description of Artificial Sequence: Synthetic oligonucleotide
auacuguuuugaggcuauu

SEQ ID NO: 1581771 - RNA, 19 nt, Artificial Sequence
  Description of Artificial Sequence: Synthetic oligonucleotide
auuuugccccuugcagcuu

SEQ ID NO: 1581772 - RNA, 19 nt, Artificial Sequence
  Description of Artificial Sequence: Synthetic oligonucleotide
cuguaccgucugcauggga

SEQ ID NO: 1581773 - RNA, 19 nt, Artificial Sequence
  Description of Artificial Sequence: Synthetic oligonucleotide
cacggcguguaccaggcuu

SEQ ID NO: 1581774 - RNA, 19 nt, Artificial Sequence
  Description of Artificial Sequence: Synthetic oligonucleotide
ugugcucuucaggcccauu

SEQ ID NO: 1581775 - RNA, 19 nt, Artificial Sequence
  Description of Artificial Sequence: Synthetic oligonucleotide
cccucgguauggugccagg

SEQ ID NO: 1581776 - RNA, 19 nt, Artificial Sequence
  Description of Artificial Sequence: Synthetic oligonucleotide
gaccaacagcaaggaggga

SEQ ID NO: 1581777 - RNA, 19 nt, Artificial Sequence
  Description of Artificial Sequence: Synthetic oligonucleotide
gucaagcccacagcacagu

SEQ ID NO: 1581778 - RNA, 19 nt, Artificial Sequence
  Description of Artificial Sequence: Synthetic oligonucleotide
ggcccauuacggugaaggu

SEQ ID NO: 1581779 - RNA, 19 nt, Artificial Sequence
  Description of Artificial Sequence: Synthetic oligonucleotide
gcugccguuuuaagccuuc

SEQ ID NO: 1581780 - RNA, 19 nt, Artificial Sequence
  Description of Artificial Sequence: Synthetic oligonucleotide
caggcccauuacggugaag

SEQ ID NO: 1581781 - RNA, 19 nt, Artificial Sequence
  Description of Artificial Sequence: Synthetic oligonucleotide
gcaugggauaggugacugu

SEQ ID NO: 1581782 - RNA, 19 nt, Artificial Sequence
  Description of Artificial Sequence: Synthetic oligonucleotide
gccauuccacagagccaag

SEQ ID NO: 1581783 - RNA, 19 nt, Artificial Sequence
  Description of Artificial Sequence: Synthetic oligonucleotide
gccuuuguagagucccauu

SEQ ID NO: 1581784 - RNA, 19 nt, Artificial Sequence
  Description of Artificial Sequence: Synthetic oligonucleotide
gcacugcaugcguaguuuu

SEQ ID NO: 1581785 - RNA, 19 nt, Artificial Sequence
  Description of Artificial Sequence: Synthetic oligonucleotide
cuccggccacggcguguac

SEQ ID NO: 1581786 - RNA, 19 nt, Artificial Sequence
  Description of Artificial Sequence: Synthetic oligonucleotide
ccucgguauggugccagga

SEQ ID NO: 1581787 - RNA, 19 nt, Artificial Sequence
  Description of Artificial Sequence: Synthetic oligonucleotide
gcguaguuuucgacuuucu

SEQ ID NO: 1581788 - RNA, 19 nt, Artificial Sequence
  Description of Artificial Sequence: Synthetic oligonucleotide
ccgucugcaugggauaggu

SEQ ID NO: 1581789 - RNA, 19 nt, Artificial Sequence
  Description of Artificial Sequence: Synthetic oligonucleotide
cacccucgguauggugcca

SEQ ID NO: 1581790 - RNA, 19 nt, Artificial Sequence
  Description of Artificial Sequence: Synthetic oligonucleotide
ccugugggaggaccucagu

SEQ ID NO: 1581791 - RNA, 19 nt, Artificial Sequence
  Description of Artificial Sequence: Synthetic oligonucleotide
cacccagaguggagucguu

SEQ ID NO: 1581792 - RNA, 19 nt, Artificial Sequence
  Description of Artificial Sequence: Synthetic oligonucleotide
ccgaagccauagcgccaca

SEQ ID NO: 1581793 - RNA, 19 nt, Artificial Sequence
  Description of Artificial Sequence: Synthetic oligonucleotide
cggcguguaccaggcuuuc

SEQ ID NO: 1581794 - RNA, 19 nt, Artificial Sequence
  Description of Artificial Sequence: Synthetic oligonucleotide
ccacggcguguaccaggcu

SEQ ID NO: 1581795 - RNA, 19 nt, Artificial Sequence
  Description of Artificial Sequence: Synthetic oligonucleotide
aaaagaagcacuaacauuc

SEQ ID NO: 1581796 - RNA, 19 nt, Artificial Sequence
  Description of Artificial Sequence: Synthetic oligonucleotide
aaaauauuagaugccaucc

SEQ ID NO: 1581797 - RNA, 19 nt, Artificial Sequence
  Description of Artificial Sequence: Synthetic oligonucleotide
aaaguagcaccacuuagcc

SEQ ID NO: 1581798 - RNA, 19 nt, Artificial Sequence
  Description of Artificial Sequence: Synthetic oligonucleotide
agcacuaacauucaacacc

SEQ ID NO: 1581799 - RNA, 19 nt, Artificial Sequence
  Description of Artificial Sequence: Synthetic oligonucleotide
uuaaugaggacauuucugg

SEQ ID NO: 1581800 - RNA, 19 nt, Artificial Sequence
  Description of Artificial Sequence: Synthetic oligonucleotide
ucugauuacagguagagca

SEQ ID NO: 1581801 - RNA, 19 nt, Artificial Sequence
  Description of Artificial Sequence: Synthetic oligonucleotide
aaagauaccacuuccuuug

SEQ ID NO: 1581802 - RNA, 19 nt, Artificial Sequence
  Description of Artificial Sequence: Synthetic oligonucleotide
ucuuccaauggcaacaagg

SEQ ID NO: 1581803 - RNA, 19 nt, Artificial Sequence
  Description of Artificial Sequence: Synthetic oligonucleotide
aaaaguagcaccacuuagc

SEQ ID NO: 1581804 - RNA, 19 nt, Artificial Sequence
  Description of Artificial Sequence: Synthetic oligonucleotide
aguuaaagacauuaguguc

SEQ ID NO: 1581805 - RNA, 19 nt, Artificial Sequence
  Description of Artificial Sequence: Synthetic oligonucleotide
aagacauuagugucugggc

SEQ ID NO: 1581806 - RNA, 19 nt, Artificial Sequence
  Description of Artificial Sequence: Synthetic oligonucleotide
uauaaguuaaagacauuag

SEQ ID NO: 1581807 - RNA, 19 nt, Artificial Sequence
  Description of Artificial Sequence: Synthetic oligonucleotide
aaagacauuagugucuggg

SEQ ID NO: 1581808 - RNA, 19 nt, Artificial Sequence
  Description of Artificial Sequence: Synthetic oligonucleotide
uccaauggcaacaaggccc

SEQ ID NO: 1581809 - RNA, 19 nt, Artificial Sequence
  Description of Artificial Sequence: Synthetic oligonucleotide
ucaugacuaaaccacaacc

SEQ ID NO: 1581810 - RNA, 19 nt, Artificial Sequence
  Description of Artificial Sequence: Synthetic oligonucleotide
uuucaauuguuacagaauc

SEQ ID NO: 1581811 - RNA, 19 nt, Artificial Sequence
  Description of Artificial Sequence: Synthetic oligonucleotide
gauacagggcaccugaagg

SEQ ID NO: 1581812 - RNA, 19 nt, Artificial Sequence
  Description of Artificial Sequence: Synthetic oligonucleotide
uauuaggcuugcuugaagg

SEQ ID NO: 1581813 - RNA, 19 nt, Artificial Sequence
  Description of Artificial Sequence: Synthetic oligonucleotide
uguaguacauguuucuuag

SEQ ID NO: 1581814 - RNA, 19 nt, Artificial Sequence
  Description of Artificial Sequence: Synthetic oligonucleotide
uguguuauuuccuuauaag

SEQ ID NO: 1581815 - RNA, 19 nt, Artificial Sequence
  Description of Artificial Sequence: Synthetic oligonucleotide
acuuguuuggguuaaaaga

SEQ ID NO: 1581816 - RNA, 19 nt, Artificial Sequence
  Description of Artificial Sequence: Synthetic oligonucleotide
uuaaaagaagcacuaacau

SEQ ID NO: 1581817 - RNA, 19 nt, Artificial Sequence
  Description of Artificial Sequence: Synthetic oligonucleotide
auaaagcaaacauuuauga

SEQ ID NO: 1581818 - RNA, 19 nt, Artificial Sequence
  Description of Artificial Sequence: Synthetic oligonucleotide
aaggaauaccuucuucugg

SEQ ID NO: 1581819 - RNA, 19 nt, Artificial Sequence
  Description of Artificial Sequence: Synthetic oligonucleotide
uuagaauucacaaaucauu

SEQ ID NO: 1581820 - RNA, 19 nt, Artificial Sequence
  Description of Artificial Sequence: Synthetic oligonucleotide
ugcuaugaagcucuguagg

SEQ ID NO: 1581821 - RNA, 19 nt, Artificial Sequence
  Description of Artificial Sequence: Synthetic oligonucleotide
ucuaggucaauauaagugu

SEQ ID NO: 1581822 - RNA, 19 nt, Artificial Sequence
  Description of Artificial Sequence: Synthetic oligonucleotide
aauuuaaugaggacauuuc

SEQ ID NO: 1581823 - RNA, 19 nt, Artificial Sequence
  Description of Artificial Sequence: Synthetic oligonucleotide
uguaggaagcagaauuugg

SEQ ID NO: 1581824 - RNA, 19 nt, Artificial Sequence
  Description of Artificial Sequence: Synthetic oligonucleotide
auaaguuaaagacauuagu

SEQ ID NO: 1581825 - RNA, 19 nt, Artificial Sequence
  Description of Artificial Sequence: Synthetic oligonucleotide
ugcgcagugaucaagucag

SEQ ID NO: 1581826 - RNA, 19 nt, Artificial Sequence
  Description of Artificial Sequence: Synthetic oligonucleotide
accacuuagcccuuuacac

SEQ ID NO: 1581827 - RNA, 19 nt, Artificial Sequence
  Description of Artificial Sequence: Synthetic oligonucleotide
uacuuaagaaagcaguuac

SEQ ID NO: 1581828 - RNA, 19 nt, Artificial Sequence
  Description of Artificial Sequence: Synthetic oligonucleotide
auuuaugacauuuucuuaa

SEQ ID NO: 1581829 - RNA, 19 nt, Artificial Sequence
  Description of Artificial Sequence: Synthetic oligonucleotide
uguuauuuccuuauaaguu

SEQ ID NO: 1581830 - RNA, 19 nt, Artificial Sequence
  Description of Artificial Sequence: Synthetic oligonucleotide
acauucaacacccuaucuc

SEQ ID NO: 1581831 - RNA, 19 nt, Artificial Sequence
  Description of Artificial Sequence: Synthetic oligonucleotide
aacacccuaucucugagug

SEQ ID NO: 1581832 - RNA, 19 nt, Artificial Sequence
  Description of Artificial Sequence: Synthetic oligonucleotide
aagcaguuacaacagaggu

SEQ ID NO: 1581833 - RNA, 19 nt, Artificial Sequence
  Description of Artificial Sequence: Synthetic oligonucleotide
uaguacauguuucuuagcu

SEQ ID NO: 1581834 - RNA, 19 nt, Artificial Sequence
  Description of Artificial Sequence: Synthetic oligonucleotide
cuuagcuucaggauacagg

SEQ ID NO: 1581835 - RNA, 19 nt, Artificial Sequence
  Description of Artificial Sequence: Synthetic oligonucleotide
gaagcacuaacauucaaca

SEQ ID NO: 1581836 - RNA, 19 nt, Artificial Sequence
  Description of Artificial Sequence: Synthetic oligonucleotide
aaauauuagaugccauccu

SEQ ID NO: 1581837 - RNA, 19 nt, Artificial Sequence
  Description of Artificial Sequence: Synthetic oligonucleotide
agcagaauuuggcaggugg

SEQ ID NO: 1581838 - RNA, 19 nt, Artificial Sequence
  Description of Artificial Sequence: Synthetic oligonucleotide
uccuuauaaguuaaagaca

SEQ ID NO: 1581839 - RNA, 19 nt, Artificial Sequence
  Description of Artificial Sequence: Synthetic oligonucleotide
aauauuagaugccauccua

SEQ ID NO: 1581840 - RNA, 19 nt, Artificial Sequence
  Description of Artificial Sequence: Synthetic oligonucleotide
aaagcaguuacaacagagg

SEQ ID NO: 1581841 - RNA, 19 nt, Artificial Sequence
  Description of Artificial Sequence: Synthetic oligonucleotide
uauaagugugacuucaaaa

SEQ ID NO: 1581842 - RNA, 19 nt, Artificial Sequence
  Description of Artificial Sequence: Synthetic oligonucleotide
aagcacuaacauucaacac

SEQ ID NO: 1581843 - RNA, 19 nt, Artificial Sequence
  Description of Artificial Sequence: Synthetic oligonucleotide
uuggguuaaaagaagcacu

SEQ ID NO: 1581844 - RNA, 19 nt, Artificial Sequence
  Description of Artificial Sequence: Synthetic oligonucleotide
acaacagagguuuauuucu

SEQ ID NO: 1581845 - RNA, 19 nt, Artificial Sequence
  Description of Artificial Sequence: Synthetic oligonucleotide
aaaacucuuugguugacaa

SEQ ID NO: 1581846 - RNA, 19 nt, Artificial Sequence
  Description of Artificial Sequence: Synthetic oligonucleotide
acauuuaugacauuuucuu

SEQ ID NO: 1581847 - RNA, 19 nt, Artificial Sequence
  Description of Artificial Sequence: Synthetic oligonucleotide
augacaaacccucucccac

SEQ ID NO: 1581848 - RNA, 19 nt, Artificial Sequence
  Description of Artificial Sequence: Synthetic oligonucleotide
aaugacauccucaugacua

SEQ ID NO: 1581849 - RNA, 19 nt, Artificial Sequence
  Description of Artificial Sequence: Synthetic oligonucleotide
cagugaucaagucagauuc

SEQ ID NO: 1581850 - RNA, 19 nt, Artificial Sequence
  Description of Artificial Sequence: Synthetic oligonucleotide
cucuguaggcacuagaaac

SEQ ID NO: 1581851 - RNA, 19 nt, Artificial Sequence
  Description of Artificial Sequence: Synthetic oligonucleotide
ucaauuguuacagaaucac

SEQ ID NO: 1581852 - RNA, 19 nt, Artificial Sequence
  Description of Artificial Sequence: Synthetic oligonucleotide
uugguugacaaagccaugg

SEQ ID NO: 1581853 - RNA, 19 nt, Artificial Sequence
  Description of Artificial Sequence: Synthetic oligonucleotide
uagaauucacaaaucauuu

SEQ ID NO: 1581854 - RNA, 19 nt, Artificial Sequence
  Description of Artificial Sequence: Synthetic oligonucleotide
aacaucuaggucaauauaa

SEQ ID NO: 1581855 - RNA, 19 nt, Artificial Sequence
  Description of Artificial Sequence: Synthetic oligonucleotide
aagaaagcaguuacaacag

SEQ ID NO: 1581856 - RNA, 19 nt, Artificial Sequence
  Description of Artificial Sequence: Synthetic oligonucleotide
uucaauuguuacagaauca

SEQ ID NO: 1581857 - RNA, 19 nt, Artificial Sequence
  Description of Artificial Sequence: Synthetic oligonucleotide
aagauaccacuuccuuugc

SEQ ID NO: 1581858 - RNA, 19 nt, Artificial Sequence
  Description of Artificial Sequence: Synthetic oligonucleotide
ucuaucauuguguuauuuc

SEQ ID NO: 1581859 - RNA, 19 nt, Artificial Sequence
  Description of Artificial Sequence: Synthetic oligonucleotide
uuaaagacauuagugucug

SEQ ID NO: 1581860 - RNA, 19 nt, Artificial Sequence
  Description of Artificial Sequence: Synthetic oligonucleotide
ugagcagccaaccccauac

SEQ ID NO: 1581861 - RNA, 19 nt, Artificial Sequence
  Description of Artificial Sequence: Synthetic oligonucleotide
cacuagaaacaaaaguagc

SEQ ID NO: 1581862 - RNA, 19 nt, Artificial Sequence
  Description of Artificial Sequence: Synthetic oligonucleotide
uuucaaaugacauccucau

SEQ ID NO: 1581863 - RNA, 19 nt, Artificial Sequence
  Description of Artificial Sequence: Synthetic oligonucleotide
gaggauuuguccucuuggg

SEQ ID NO: 1581864 - RNA, 19 nt, Artificial Sequence
  Description of Artificial Sequence: Synthetic oligonucleotide
auacagggcaccugaaggg

SEQ ID NO: 1581865 - RNA, 19 nt, Artificial Sequence
  Description of Artificial Sequence: Synthetic oligonucleotide
guuaaaagaagcacuaaca

SEQ ID NO: 1581866 - RNA, 19 nt, Artificial Sequence
  Description of Artificial Sequence: Synthetic oligonucleotide
ucuacuuaagaaagcaguu

SEQ ID NO: 1581867 - RNA, 19 nt, Artificial Sequence
  Description of Artificial Sequence: Synthetic oligonucleotide
gaaggaauaccuucuucug

SEQ ID NO: 1581868 - RNA, 19 nt, Artificial Sequence
  Description of Artificial Sequence: Synthetic oligonucleotide
ugagugucuggucugauua

SEQ ID NO: 1581869 - RNA, 19 nt, Artificial Sequence
  Description of Artificial Sequence: Synthetic oligonucleotide
caaaaguagcaccacuuag

SEQ ID NO: 1581870 - RNA, 19 nt, Artificial Sequence
  Description of Artificial Sequence: Synthetic oligonucleotide
aaaaggucgcuuuccaaaa

SEQ ID NO: 1581871 - RNA, 19 nt, Artificial Sequence
  Description of Artificial Sequence: Synthetic oligonucleotide
ucaaugaaccagguguagg

SEQ ID NO: 1581872 - RNA, 19 nt, Artificial Sequence
  Description of Artificial Sequence: Synthetic oligonucleotide
aacauucaacacccuaucu

SEQ ID NO: 1581873 - RNA, 19 nt, Artificial Sequence
  Description of Artificial Sequence: Synthetic oligonucleotide
cuuguuuggguuaaaagaa

SEQ ID NO: 1581874 - RNA, 19 nt, Artificial Sequence
  Description of Artificial Sequence: Synthetic oligonucleotide
cacuuagcccuuuacacag

SEQ ID NO: 1581875 - RNA, 19 nt, Artificial Sequence
  Description of Artificial Sequence: Synthetic oligonucleotide
uacaacagagguuuauuuc

SEQ ID NO: 1581876 - RNA, 19 nt, Artificial Sequence
  Description of Artificial Sequence: Synthetic oligonucleotide
aaaucauuuucuacuuaag

SEQ ID NO: 1581877 - RNA, 19 nt, Artificial Sequence
  Description of Artificial Sequence: Synthetic oligonucleotide
guacauguuucuuagcuuc

SEQ ID NO: 1581878 - RNA, 19 nt, Artificial Sequence
  Description of Artificial Sequence: Synthetic oligonucleotide
uaugaagcucuguaggcac

SEQ ID NO: 1581879 - RNA, 19 nt, Artificial Sequence
  Description of Artificial Sequence: Synthetic oligonucleotide
agucagauuccuucuugac

SEQ ID NO: 1581880 - RNA, 19 nt, Artificial Sequence
  Description of Artificial Sequence: Synthetic oligonucleotide
auacgcaugacaaacccuc

SEQ ID NO: 1581881 - RNA, 19 nt, Artificial Sequence
  Description of Artificial Sequence: Synthetic oligonucleotide
aggaauaccuucuucugga

SEQ ID NO: 1581882 - RNA, 19 nt, Artificial Sequence
  Description of Artificial Sequence: Synthetic oligonucleotide
aggucaauauaagugugac

SEQ ID NO: 1581883 - RNA, 19 nt, Artificial Sequence
  Description of Artificial Sequence: Synthetic oligonucleotide
aggcacuagaaacaaaagu

SEQ ID NO: 1581884 - RNA, 19 nt, Artificial Sequence
  Description of Artificial Sequence: Synthetic oligonucleotide
ucugggcuaaauaaagcaa

SEQ ID NO: 1581885 - RNA, 19 nt, Artificial Sequence
  Description of Artificial Sequence: Synthetic oligonucleotide
uuuaugacauuuucuuaaa

SEQ ID NO: 1581886 - RNA, 19 nt, Artificial Sequence
  Description of Artificial Sequence: Synthetic oligonucleotide
agcagccaaccccauacgc

SEQ ID NO: 1581887 - RNA, 19 nt, Artificial Sequence
  Description of Artificial Sequence: Synthetic oligonucleotide
ugauuacagguagagcagg

SEQ ID NO: 1581888 - RNA, 19 nt, Artificial Sequence
  Description of Artificial Sequence: Synthetic oligonucleotide
agauaccacuuccuuugcc

SEQ ID NO: 1581889 - RNA, 19 nt, Artificial Sequence
  Description of Artificial Sequence: Synthetic oligonucleotide
uagugucugggcuaaauaa

SEQ ID NO: 1581890 - RNA, 19 nt, Artificial Sequence
  Description of Artificial Sequence: Synthetic oligonucleotide
agacauuagugucugggcu

SEQ ID NO: 1581891 - RNA, 19 nt, Artificial Sequence
  Description of Artificial Sequence: Synthetic oligonucleotide
ugucuggucugauuacagg

SEQ ID NO: 1581892 - RNA, 19 nt, Artificial Sequence
  Description of Artificial Sequence: Synthetic oligonucleotide
uaggcacuagaaacaaaag

SEQ ID NO: 1581893 - RNA, 19 nt, Artificial Sequence
  Description of Artificial Sequence: Synthetic oligonucleotide
ucaaagauaccacuuccuu

SEQ ID NO: 1581894 - RNA, 19 nt, Artificial Sequence
  Description of Artificial Sequence: Synthetic oligonucleotide
ugucugggcuaaauaaagc

SEQ ID NO: 1581895 - RNA, 19 nt, Artificial Sequence
  Description of Artificial Sequence: Synthetic oligonucleotide
uaaugaggacauuucuggc

SEQ ID NO: 1581896 - RNA, 19 nt, Artificial Sequence
  Description of Artificial Sequence: Synthetic oligonucleotide
agguguaggaagcagaauu

SEQ ID NO: 1581897 - RNA, 19 nt, Artificial Sequence
  Description of Artificial Sequence: Synthetic oligonucleotide
gguuaaaagaagcacuaac

SEQ ID NO: 1581898 - RNA, 19 nt, Artificial Sequence
  Description of Artificial Sequence: Synthetic oligonucleotide
cugauuacagguagagcag

SEQ ID NO: 1581899 - RNA, 19 nt, Artificial Sequence
  Description of Artificial Sequence: Synthetic oligonucleotide
uggguuaaaagaagcacua

SEQ ID NO: 1581900 - RNA, 19 nt, Artificial Sequence
  Description of Artificial Sequence: Synthetic oligonucleotide
uaacauucaacacccuauc

SEQ ID NO: 1581901 - RNA, 19 nt, Artificial Sequence
  Description of Artificial Sequence: Synthetic oligonucleotide
auuucuggcaucugcuaug

SEQ ID NO: 1581902 - RNA, 19 nt, Artificial Sequence
  Description of Artificial Sequence: Synthetic oligonucleotide
ugcuugaaggaauaccuuc

SEQ ID NO: 1581903 - RNA, 19 nt, Artificial Sequence
  Description of Artificial Sequence: Synthetic oligonucleotide
acauguaguacauguuucu

SEQ ID NO: 1581904 - RNA, 19 nt, Artificial Sequence
  Description of Artificial Sequence: Synthetic oligonucleotide
cuaggucaauauaagugug

SEQ ID NO: 1581905 - RNA, 19 nt, Artificial Sequence
  Description of Artificial Sequence: Synthetic oligonucleotide
ugggcuaaauaaagcaaac

SEQ ID NO: 1581906 - RNA, 19 nt, Artificial Sequence
  Description of Artificial Sequence: Synthetic oligonucleotide
uuauuucuaucauuguguu

SEQ ID NO: 1581907 - RNA, 19 nt, Artificial Sequence
  Description of Artificial Sequence: Synthetic oligonucleotide
uguuucuuagcuucaggau

SEQ ID NO: 1581908 - RNA, 19 nt, Artificial Sequence
  Description of Artificial Sequence: Synthetic oligonucleotide
cuugauucuccuccugggg

SEQ ID NO: 1581909 - RNA, 19 nt, Artificial Sequence
  Description of Artificial Sequence: Synthetic oligonucleotide
aucucugagugucuggucu

SEQ ID NO: 1581910 - RNA, 19 nt, Artificial Sequence
  Description of Artificial Sequence: Synthetic oligonucleotide
accacaacccauuucaauu

SEQ ID NO: 1581911 - RNA, 19 nt, Artificial Sequence
  Description of Artificial Sequence: Synthetic oligonucleotide
guaggaagcagaauuuggc

SEQ ID NO: 1581912 - RNA, 19 nt, Artificial Sequence
  Description of Artificial Sequence: Synthetic oligonucleotide
uucaaaugacauccucaug

SEQ ID NO: 1581913 - RNA, 19 nt, Artificial Sequence
  Description of Artificial Sequence: Synthetic oligonucleotide
ugacuaaaccacaacccau

SEQ ID NO: 1581914 - RNA, 19 nt, Artificial Sequence
  Description of Artificial Sequence: Synthetic oligonucleotide
acacauguaguacauguuu

SEQ ID NO: 1581915 - RNA, 19 nt, Artificial Sequence
  Description of Artificial Sequence: Synthetic oligonucleotide
auaccacuuccuuugccuc

SEQ ID NO: 1581916 - RNA, 19 nt, Artificial Sequence
  Description of Artificial Sequence: Synthetic oligonucleotide
cagagguuuauuucuauca

SEQ ID NO: 1581917 - RNA, 19 nt, Artificial Sequence
  Description of Artificial Sequence: Synthetic oligonucleotide
aacaaaaguagcaccacuu

SEQ ID NO: 1581918 - RNA, 19 nt, Artificial Sequence
  Description of Artificial Sequence: Synthetic oligonucleotide
uccuauuaggcuugcuuga

SEQ ID NO: 1581919 - RNA, 19 nt, Artificial Sequence
  Description of Artificial Sequence: Synthetic oligonucleotide
ggaggauuuguccucuugg

SEQ ID NO: 1581920 - RNA, 19 nt, Artificial Sequence
  Description of Artificial Sequence: Synthetic oligonucleotide
ugcaggcacuuaaacaucu

SEQ ID NO: 1581921 - RNA, 19 nt, Artificial Sequence
  Description of Artificial Sequence: Synthetic oligonucleotide
auggucagaccccucaaug

SEQ ID NO: 1581922 - RNA, 19 nt, Artificial Sequence
  Description of Artificial Sequence: Synthetic oligonucleotide
cacauguaguacauguuuc

SEQ ID NO: 1581923 - RNA, 19 nt, Artificial Sequence
  Description of Artificial Sequence: Synthetic oligonucleotide
ucaauauaagugugacuuc

SEQ ID NO: 1581924 - RNA, 19 nt, Artificial Sequence
  Description of Artificial Sequence: Synthetic oligonucleotide
gucaauauaagugugacuu

SEQ ID NO: 1581925 - RNA, 19 nt, Artificial Sequence
  Description of Artificial Sequence: Synthetic oligonucleotide
acccauuucaauuguuaca

SEQ ID NO: 1581926 - RNA, 19 nt, Artificial Sequence
  Description of Artificial Sequence: Synthetic oligonucleotide
acuaacauucaacacccua

SEQ ID NO: 1581927 - RNA, 19 nt, Artificial Sequence
  Description of Artificial Sequence: Synthetic oligonucleotide
aaccacaacccauuucaau

SEQ ID NO: 1581928 - RNA, 19 nt, Artificial Sequence
  Description of Artificial Sequence: Synthetic oligonucleotide
aacagagguuuauuucuau

SEQ ID NO: 1581929 - RNA, 19 nt, Artificial Sequence
  Description of Artificial Sequence: Synthetic oligonucleotide
auauaagugugacuucaaa

SEQ ID NO: 1581930 - RNA, 19 nt, Artificial Sequence
  Description of Artificial Sequence: Synthetic oligonucleotide
uuagugucugggcuaaaua

SEQ ID NO: 1581931 - RNA, 19 nt, Artificial Sequence
  Description of Artificial Sequence: Synthetic oligonucleotide
auuaggcuugcuugaagga

SEQ ID NO: 1581932 - RNA, 19 nt, Artificial Sequence
  Description of Artificial Sequence: Synthetic oligonucleotide
cuggucugauuacagguag

SEQ ID NO: 1581933 - RNA, 19 nt, Artificial Sequence
  Description of Artificial Sequence: Synthetic oligonucleotide
guuucuuagcuucaggaua

SEQ ID NO: 1581934 - RNA, 19 nt, Artificial Sequence
  Description of Artificial Sequence: Synthetic oligonucleotide
agugaucaagucagauucc

SEQ ID NO: 1581935 - RNA, 19 nt, Artificial Sequence
  Description of Artificial Sequence: Synthetic oligonucleotide
uacauguuucuuagcuuca

SEQ ID NO: 1581936 - RNA, 19 nt, Artificial Sequence
  Description of Artificial Sequence: Synthetic oligonucleotide
ugacaaacccucucccacc

SEQ ID NO: 1581937 - RNA, 19 nt, Artificial Sequence
  Description of Artificial Sequence: Synthetic oligonucleotide
cuugcuugaaggaauaccu

SEQ ID NO: 1581938 - RNA, 19 nt, Artificial Sequence
  Description of Artificial Sequence: Synthetic oligonucleotide
uccucaugacuaaaccaca

SEQ ID NO: 1581939 - RNA, 19 nt, Artificial Sequence
  Description of Artificial Sequence: Synthetic oligonucleotide
ggcaacaaggcccaugagc

SEQ ID NO: 1581940 - RNA, 19 nt, Artificial Sequence
  Description of Artificial Sequence: Synthetic oligonucleotide
gaugccauccuauuaggcu

SEQ ID NO: 1581941 - RNA, 19 nt, Artificial Sequence
  Description of Artificial Sequence: Synthetic oligonucleotide
uuacagaaucacacacaug

SEQ ID NO: 1581942 - RNA, 19 nt, Artificial Sequence
  Description of Artificial Sequence: Synthetic oligonucleotide
caaacccucucccaccccg

SEQ ID NO: 1581943 - RNA, 19 nt, Artificial Sequence
  Description of Artificial Sequence: Synthetic oligonucleotide
uacagggcaccugaagggg

SEQ ID NO: 1581944 - RNA, 19 nt, Artificial Sequence
  Description of Artificial Sequence: Synthetic oligonucleotide
acaucuaggucaauauaag

SEQ ID NO: 1581945 - RNA, 19 nt, Artificial Sequence
  Description of Artificial Sequence: Synthetic oligonucleotide
uuugguugacaaagccaug

SEQ ID NO: 1581946 - RNA, 19 nt, Artificial Sequence
  Description of Artificial Sequence: Synthetic oligonucleotide
aaggucgcuuuccaaaauu

SEQ ID NO: 1581947 - RNA, 19 nt, Artificial Sequence
  Description of Artificial Sequence: Synthetic oligonucleotide
uggucagaccccucaauga

SEQ ID NO: 1581948 - RNA, 19 nt, Artificial Sequence
  Description of Artificial Sequence: Synthetic oligonucleotide
uacccaggccagcaagugg

SEQ ID NO: 1581949 - RNA, 19 nt, Artificial Sequence
  Description of Artificial Sequence: Synthetic oligonucleotide
aaccccauacgcaugacaa

SEQ ID NO: 1581950 - RNA, 19 nt, Artificial Sequence
  Description of Artificial Sequence: Synthetic oligonucleotide
agaauucacaaaucauuuu

SEQ ID NO: 1581951 - RNA, 19 nt, Artificial Sequence
  Description of Artificial Sequence: Synthetic oligonucleotide
caggcacuuaaacaucuag

SEQ ID NO: 1581952 - RNA, 19 nt, Artificial Sequence
  Description of Artificial Sequence: Synthetic oligonucleotide
uaggcuugcuugaaggaau

SEQ ID NO: 1581953 - RNA, 19 nt, Artificial Sequence
  Description of Artificial Sequence: Synthetic oligonucleotide
guguuauuuccuuauaagu

SEQ ID NO: 1581954 - RNA, 19 nt, Artificial Sequence
  Description of Artificial Sequence: Synthetic oligonucleotide
caaugaaccagguguagga

SEQ ID NO: 1581955 - RNA, 19 nt, Artificial Sequence
  Description of Artificial Sequence: Synthetic oligonucleotide
acaaaaguagcaccacuua

SEQ ID NO: 1581956 - RNA, 19 nt, Artificial Sequence
  Description of Artificial Sequence: Synthetic oligonucleotide
auucacaaaucauuuucua

SEQ ID NO: 1581957 - RNA, 19 nt, Artificial Sequence
  Description of Artificial Sequence: Synthetic oligonucleotide
caauauaagugugacuuca

SEQ ID NO: 1581958 - RNA, 19 nt, Artificial Sequence
  Description of Artificial Sequence: Synthetic oligonucleotide
ucuggucugauuacaggua

SEQ ID NO: 1581959 - RNA, 19 nt, Artificial Sequence
  Description of Artificial Sequence: Synthetic oligonucleotide
uaaagacauuagugucugg

SEQ ID NO: 1581960 - RNA, 19 nt, Artificial Sequence
  Description of Artificial Sequence: Synthetic oligonucleotide
gugggcuaaccucagggcc

SEQ ID NO: 1581961 - RNA, 19 nt, Artificial Sequence
  Description of Artificial Sequence: Synthetic oligonucleotide
aaagaagcacuaacauuca

SEQ ID NO: 1581962 - RNA, 19 nt, Artificial Sequence
  Description of Artificial Sequence: Synthetic oligonucleotide
guaggcacuagaaacaaaa

SEQ ID NO: 1581963 - RNA, 19 nt, Artificial Sequence
  Description of Artificial Sequence: Synthetic oligonucleotide
aaacucuuugguugacaaa

SEQ ID NO: 1581964 - RNA, 19 nt, Artificial Sequence
  Description of Artificial Sequence: Synthetic oligonucleotide
aguacauguuucuuagcuu

SEQ ID NO: 1581965 - RNA, 19 nt, Artificial Sequence
  Description of Artificial Sequence: Synthetic oligonucleotide
auguaguacauguuucuua

SEQ ID NO: 1581966 - RNA, 19 nt, Artificial Sequence
  Description of Artificial Sequence: Synthetic oligonucleotide
ucuuagcuucaggauacag

SEQ ID NO: 1581967 - RNA, 19 nt, Artificial Sequence
  Description of Artificial Sequence: Synthetic oligonucleotide
aggauuuguccucuugggu

SEQ ID NO: 1581968 - RNA, 19 nt, Artificial Sequence
  Description of Artificial Sequence: Synthetic oligonucleotide
aaaggucgcuuuccaaaau

SEQ ID NO: 1581969 - RNA, 19 nt, Artificial Sequence
  Description of Artificial Sequence: Synthetic oligonucleotide
ugggcuaaccucagggccu

SEQ ID NO: 1581970 - RNA, 19 nt, Artificial Sequence
  Description of Artificial Sequence: Synthetic oligonucleotide
cuauuaggcuugcuugaag

SEQ ID NO: 1581971 - RNA, 19 nt, Artificial Sequence
  Description of Artificial Sequence: Synthetic oligonucleotide
auuucaauuguuacagaau

SEQ ID NO: 1581972 - RNA, 19 nt, Artificial Sequence
  Description of Artificial Sequence: Synthetic oligonucleotide
aauauaagugugacuucaa

SEQ ID NO: 1581973 - RNA, 19 nt, Artificial Sequence
  Description of Artificial Sequence: Synthetic oligonucleotide
gcuaugaagcucuguaggc

SEQ ID NO: 1581974 - RNA, 19 nt, Artificial Sequence
  Description of Artificial Sequence: Synthetic oligonucleotide
cauccucaugacuaaacca

SEQ ID NO: 1581975 - RNA, 19 nt, Artificial Sequence
  Description of Artificial Sequence: Synthetic oligonucleotide
cuuugguugacaaagccau

SEQ ID NO: 1581976 - RNA, 19 nt, Artificial Sequence
  Description of Artificial Sequence: Synthetic oligonucleotide
acgcaugacaaacccucuc

SEQ ID NO: 1581977 - RNA, 19 nt, Artificial Sequence
  Description of Artificial Sequence: Synthetic oligonucleotide
gcacuaacauucaacaccc

SEQ ID NO: 1581978 - RNA, 19 nt, Artificial Sequence
  Description of Artificial Sequence: Synthetic oligonucleotide
ggcacuagaaacaaaagua

SEQ ID NO: 1581979 - RNA, 19 nt, Artificial Sequence
  Description of Artificial Sequence: Synthetic oligonucleotide
aacccucucccaccccgac

SEQ ID NO: 1581980 - RNA, 19 nt, Artificial Sequence
  Description of Artificial Sequence: Synthetic oligonucleotide
uucauggcucuggagccgg

SEQ ID NO: 1581981 - RNA, 19 nt, Artificial Sequence
  Description of Artificial Sequence: Synthetic oligonucleotide
gacauuagugucugggcua

SEQ ID NO: 1581982 - RNA, 19 nt, Artificial Sequence
  Description of Artificial Sequence: Synthetic oligonucleotide
acaauccaauuuagaauuc

SEQ ID NO: 1581983 - RNA, 19 nt, Artificial Sequence
  Description of Artificial Sequence: Synthetic oligonucleotide
cugggcuaaauaaagcaaa

SEQ ID NO: 1581984 - RNA, 19 nt, Artificial Sequence
  Description of Artificial Sequence: Synthetic oligonucleotide
agcuacccaggccagcaag

SEQ ID NO: 1581985 - RNA, 19 nt, Artificial Sequence
  Description of Artificial Sequence: Synthetic oligonucleotide
gacauccucaugacuaaac

SEQ ID NO: 1581986 - RNA, 19 nt, Artificial Sequence
  Description of Artificial Sequence: Synthetic oligonucleotide
uuagguucuucaguugguc

SEQ ID NO: 1581987 - RNA, 19 nt, Artificial Sequence
  Description of Artificial Sequence: Synthetic oligonucleotide
uuagcccuuuacacagaug

SEQ ID NO: 1581988 - RNA, 19 nt, Artificial Sequence
  Description of Artificial Sequence: Synthetic oligonucleotide
cuaacauucaacacccuau

SEQ ID NO: 1581989 - RNA, 19 nt, Artificial Sequence
  Description of Artificial Sequence: Synthetic oligonucleotide
uuucuggcaucugcuauga

SEQ ID NO: 1581990 - RNA, 19 nt, Artificial Sequence
  Description of Artificial Sequence: Synthetic oligonucleotide
ggcuaaauaaagcaaacau

SEQ ID NO: 1581991 - RNA, 19 nt, Artificial Sequence
  Description of Artificial Sequence: Synthetic oligonucleotide
gcuugauucuccuccuggg

SEQ ID NO: 1581992 - RNA, 19 nt, Artificial Sequence
  Description of Artificial Sequence: Synthetic oligonucleotide
guaguacauguuucuuagc

SEQ ID NO: 1581993 - RNA, 19 nt, Artificial Sequence
  Description of Artificial Sequence: Synthetic oligonucleotide
acaaacccucucccacccc

SEQ ID NO: 1581994 - RNA, 19 nt, Artificial Sequence
  Description of Artificial Sequence: Synthetic oligonucleotide
cacccuaucucugaguguc

SEQ ID NO: 1581995 - RNA, 19 nt, Artificial Sequence
  Description of Artificial Sequence: Synthetic oligonucleotide
auauuagaugccauccuau

SEQ ID NO: 1581996 - RNA, 19 nt, Artificial Sequence
  Description of Artificial Sequence: Synthetic oligonucleotide
aaaaugcucugaauuucaa

SEQ ID NO: 1581997 - RNA, 19 nt, Artificial Sequence
  Description of Artificial Sequence: Synthetic oligonucleotide
cuaaccucagggccugcgc

SEQ ID NO: 1581998 - RNA, 19 nt, Artificial Sequence
  Description of Artificial Sequence: Synthetic oligonucleotide
gcaacaaggcccaugagca

SEQ ID NO: 1581999 - RNA, 19 nt, Artificial Sequence
  Description of Artificial Sequence: Synthetic oligonucleotide
uacgcaugacaaacccucu

SEQ ID NO: 1582000 - RNA, 19 nt, Artificial Sequence
  Description of Artificial Sequence: Synthetic oligonucleotide
acuaaaccacaacccauuu

SEQ ID NO: 1582001 - RNA, 19 nt, Artificial Sequence
  Description of Artificial Sequence: Synthetic oligonucleotide
ucccaccccgacuuguuug

SEQ ID NO: 1582002 - RNA, 19 nt, Artificial Sequence
  Description of Artificial Sequence: Synthetic oligonucleotide
agaccccucaaugaaccag

SEQ ID NO: 1582003 - RNA, 19 nt, Artificial Sequence
  Description of Artificial Sequence: Synthetic oligonucleotide
gcuucauggcucuggagcc

SEQ ID NO: 1582004 - RNA, 19 nt, Artificial Sequence
  Description of Artificial Sequence: Synthetic oligonucleotide
guguaggaagcagaauuug

SEQ ID NO: 1582005 - RNA, 19 nt, Artificial Sequence
  Description of Artificial Sequence: Synthetic oligonucleotide
ggcacuuaaacaucuaggu

SEQ ID NO: 1582006 - RNA, 19 nt, Artificial Sequence
  Description of Artificial Sequence: Synthetic oligonucleotide
aguuacaacagagguuuau

SEQ ID NO: 1582007 - RNA, 19 nt, Artificial Sequence
  Description of Artificial Sequence: Synthetic oligonucleotide
agcccuuuacacagaugcc

SEQ ID NO: 1582008 - RNA, 19 nt, Artificial Sequence
  Description of Artificial Sequence: Synthetic oligonucleotide
ggauacagggcaccugaag

SEQ ID NO: 1582009 - RNA, 19 nt, Artificial Sequence
  Description of Artificial Sequence: Synthetic oligonucleotide
uugcuugaaggaauaccuu

SEQ ID NO: 1582010 - RNA, 19 nt, Artificial Sequence
  Description of Artificial Sequence: Synthetic oligonucleotide
caugacaaacccucuccca

SEQ ID NO: 1582011 - RNA, 19 nt, Artificial Sequence
  Description of Artificial Sequence: Synthetic oligonucleotide
cagcaaguggggcugcagc

SEQ ID NO: 1582012 - RNA, 19 nt, Artificial Sequence
  Description of Artificial Sequence: Synthetic oligonucleotide
ggauuuguccucuugggua

SEQ ID NO: 1582013 - RNA, 19 nt, Artificial Sequence
  Description of Artificial Sequence: Synthetic oligonucleotide
caggauacagggcaccuga

SEQ ID NO: 1582014 - RNA, 19 nt, Artificial Sequence
  Description of Artificial Sequence: Synthetic oligonucleotide
gagugucuggucugauuac

SEQ ID NO: 1582015 - RNA, 19 nt, Artificial Sequence
  Description of Artificial Sequence: Synthetic oligonucleotide
uucaggauacagggcaccu

SEQ ID NO: 1582016 - RNA, 19 nt, Artificial Sequence
  Description of Artificial Sequence: Synthetic oligonucleotide
aguuccucccagcuaccca

SEQ ID NO: 1582017 - RNA, 19 nt, Artificial Sequence
  Description of Artificial Sequence: Synthetic oligonucleotide
cucccagcuacccaggcca

SEQ ID NO: 1582018 - RNA, 19 nt, Artificial Sequence
  Description of Artificial Sequence: Synthetic oligonucleotide
agugucugggcuaaauaaa

SEQ ID NO: 1582019 - RNA, 19 nt, Artificial Sequence
  Description of Artificial Sequence: Synthetic oligonucleotide
cuaugaagcucuguaggca

SEQ ID NO: 1582020 - RNA, 19 nt, Artificial Sequence
  Description of Artificial Sequence: Synthetic oligonucleotide
gucgcuuuccaaaauuuaa

SEQ ID NO: 1582021 - RNA, 19 nt, Artificial Sequence
  Description of Artificial Sequence: Synthetic oligonucleotide
gguugacaaagccaugguc

SEQ ID NO: 1582022 - RNA, 19 nt, Artificial Sequence
  Description of Artificial Sequence: Synthetic oligonucleotide
ucaggauacagggcaccug

SEQ ID NO: 1582023 - RNA, 19 nt, Artificial Sequence
  Description of Artificial Sequence: Synthetic oligonucleotide
uccuggaggauuuguccuc

SEQ ID NO: 1582024 - RNA, 19 nt, Artificial Sequence
  Description of Artificial Sequence: Synthetic oligonucleotide
caauccaauuuagaauuca

SEQ ID NO: 1582025 - RNA, 19 nt, Artificial Sequence
  Description of Artificial Sequence: Synthetic oligonucleotide
aaacccucucugccacucu

SEQ ID NO: 1582026 - RNA, 19 nt, Artificial Sequence
  Description of Artificial Sequence: Synthetic oligonucleotide
cccaugagcagccaacccc

SEQ ID NO: 1582027 - RNA, 19 nt, Artificial Sequence
  Description of Artificial Sequence: Synthetic oligonucleotide
gcuugcuugaaggaauacc

SEQ ID NO: 1582028 - RNA, 19 nt, Artificial Sequence
  Description of Artificial Sequence: Synthetic oligonucleotide
gucugauuacagguagagc

SEQ ID NO: 1582029 - RNA, 19 nt, Artificial Sequence
  Description of Artificial Sequence: Synthetic oligonucleotide
ggaauaccuucuucuggag

SEQ ID NO: 1582030 - RNA, 19 nt, Artificial Sequence
  Description of Artificial Sequence: Synthetic oligonucleotide
gcacuuaaacaucuagguc

SEQ ID NO: 1582031 - RNA, 19 nt, Artificial Sequence
  Description of Artificial Sequence: Synthetic oligonucleotide
uccgcgcccuggaacaugu

SEQ ID NO: 1582032 - RNA, 19 nt, Artificial Sequence
  Description of Artificial Sequence: Synthetic oligonucleotide
gaaacccucucugccacuc

SEQ ID NO: 1582033 - RNA, 19 nt, Artificial Sequence
  Description of Artificial Sequence: Synthetic oligonucleotide
cucagugggcuaaccucag

SEQ ID NO: 1582034 - RNA, 19 nt, Artificial Sequence
  Description of Artificial Sequence: Synthetic oligonucleotide
cauuguguuauuuccuuau

SEQ ID NO: 1582035 - RNA, 19 nt, Artificial Sequence
  Description of Artificial Sequence: Synthetic oligonucleotide
auucaacacccuaucucug

SEQ ID NO: 1582036 - RNA, 19 nt, Artificial Sequence
  Description of Artificial Sequence: Synthetic oligonucleotide
gcccuuuacacagaugccc

SEQ ID NO: 1582037 - RNA, 19 nt, Artificial Sequence
  Description of Artificial Sequence: Synthetic oligonucleotide
caccacuuagcccuuuaca

SEQ ID NO: 1582038 - RNA, 19 nt, Artificial Sequence
  Description of Artificial Sequence: Synthetic oligonucleotide
uggcaacaaggcccaugag

SEQ ID NO: 1582039 - RNA, 19 nt, Artificial Sequence
  Description of Artificial Sequence: Synthetic oligonucleotide
agccggacccgccagccug

SEQ ID NO: 1582040 - RNA, 19 nt, Artificial Sequence
  Description of Artificial Sequence: Synthetic oligonucleotide
cuacuuaagaaagcaguua

SEQ ID NO: 1582041 - RNA, 19 nt, Artificial Sequence
  Description of Artificial Sequence: Synthetic oligonucleotide
caucuaggucaauauaagu

SEQ ID NO: 1582042 - RNA, 19 nt, Artificial Sequence
  Description of Artificial Sequence: Synthetic oligonucleotide
gaagcucuguaggcacuag

SEQ ID NO: 1582043 - RNA, 19 nt, Artificial Sequence
  Description of Artificial Sequence: Synthetic oligonucleotide
acauuagugucugggcuaa

SEQ ID NO: 1582044 - RNA, 19 nt, Artificial Sequence
  Description of Artificial Sequence: Synthetic oligonucleotide
cgcuuuccaaaauuuaaug

SEQ ID NO: 1582045 - RNA, 19 nt, Artificial Sequence
  Description of Artificial Sequence: Synthetic oligonucleotide
uuuccucagugggcuaacc

SEQ ID NO: 1582046 - RNA, 19 nt, Artificial Sequence
  Description of Artificial Sequence: Synthetic oligonucleotide
agcaguuacaacagagguu

SEQ ID NO: 1582047 - RNA, 19 nt, Artificial Sequence
  Description of Artificial Sequence: Synthetic oligonucleotide
accagguguaggaagcaga

SEQ ID NO: 1582048 - RNA, 19 nt, Artificial Sequence
  Description of Artificial Sequence: Synthetic oligonucleotide
ugaagcucuguaggcacua

SEQ ID NO: 1582049 - RNA, 19 nt, Artificial Sequence
  Description of Artificial Sequence: Synthetic oligonucleotide
acacccuaucucugagugu

SEQ ID NO: 1582050 - RNA, 19 nt, Artificial Sequence
  Description of Artificial Sequence: Synthetic oligonucleotide
cugcgcagugaucaaguca

SEQ ID NO: 1582051 - RNA, 19 nt, Artificial Sequence
  Description of Artificial Sequence: Synthetic oligonucleotide
accccgacuuguuuggguu

SEQ ID NO: 1582052 - RNA, 19 nt, Artificial Sequence
  Description of Artificial Sequence: Synthetic oligonucleotide
gucagaccccucaaugaac

SEQ ID NO: 1582053 - RNA, 19 nt, Artificial Sequence
  Description of Artificial Sequence: Synthetic oligonucleotide
caacagagguuuauuucua

SEQ ID NO: 1582054 - RNA, 19 nt, Artificial Sequence
  Description of Artificial Sequence: Synthetic oligonucleotide
ggucagaccccucaaugaa

SEQ ID NO: 1582055 - RNA, 19 nt, Artificial Sequence
  Description of Artificial Sequence: Synthetic oligonucleotide
agaaacccucucugccacu

SEQ ID NO: 1582056 - RNA, 19 nt, Artificial Sequence
  Description of Artificial Sequence: Synthetic oligonucleotide
cgcaugacaaacccucucc

SEQ ID NO: 1582057 - RNA, 19 nt, Artificial Sequence
  Description of Artificial Sequence: Synthetic oligonucleotide
ugacauccucaugacuaaa

SEQ ID NO: 1582058 - RNA, 19 nt, Artificial Sequence
  Description of Artificial Sequence: Synthetic oligonucleotide
cuacccaggccagcaagug

SEQ ID NO: 1582059 - RNA, 19 nt, Artificial Sequence
  Description of Artificial Sequence: Synthetic oligonucleotide
gaaccagguguaggaagca

SEQ ID NO: 1582060 - RNA, 19 nt, Artificial Sequence
  Description of Artificial Sequence: Synthetic oligonucleotide
gacuaaaccacaacccauu

SEQ ID NO: 1582061 - RNA, 19 nt, Artificial Sequence
  Description of Artificial Sequence: Synthetic oligonucleotide
uggagccggacccgccagc

SEQ ID NO: 1582062 - RNA, 19 nt, Artificial Sequence
  Description of Artificial Sequence: Synthetic oligonucleotide
cauacgcaugacaaacccu

SEQ ID NO: 1582063 - RNA, 19 nt, Artificial Sequence
  Description of Artificial Sequence: Synthetic oligonucleotide
accccauacgcaugacaaa

SEQ ID NO: 1582064 - RNA, 19 nt, Artificial Sequence
  Description of Artificial Sequence: Synthetic oligonucleotide
cauccuauuaggcuugcuu

SEQ ID NO: 1582065 - RNA, 19 nt, Artificial Sequence
  Description of Artificial Sequence: Synthetic oligonucleotide
ccccauacgcaugacaaac

SEQ ID NO: 1582066 - RNA, 19 nt, Artificial Sequence
  Description of Artificial Sequence: Synthetic oligonucleotide
ccugcaggcacuuaaacau

SEQ ID NO: 1582067 - RNA, 19 nt, Artificial Sequence
  Description of Artificial Sequence: Synthetic oligonucleotide
gugaucaagucagauuccu

SEQ ID NO: 1582068 - RNA, 19 nt, Artificial Sequence
  Description of Artificial Sequence: Synthetic oligonucleotide
gcgcccuggaacauguccg

SEQ ID NO: 1582069 - RNA, 19 nt, Artificial Sequence
  Description of Artificial Sequence: Synthetic oligonucleotide
caaccccauacgcaugaca

SEQ ID NO: 1582070 - RNA, 19 nt, Artificial Sequence
  Description of Artificial Sequence: Synthetic oligonucleotide
aaacccucucccaccccga

SEQ ID NO: 1582071 - RNA, 19 nt, Artificial Sequence
  Description of Artificial Sequence: Synthetic oligonucleotide
aggucgcuuuccaaaauuu

SEQ ID NO: 1582072 - RNA, 19 nt, Artificial Sequence
  Description of Artificial Sequence: Synthetic oligonucleotide
caguuccucccagcuaccc

SEQ ID NO: 1582073 - RNA, 19 nt, Artificial Sequence
  Description of Artificial Sequence: Synthetic oligonucleotide
cuaucucugagugucuggu

SEQ ID NO: 1582074 - RNA, 19 nt, Artificial Sequence
  Description of Artificial Sequence: Synthetic oligonucleotide
ccacuuagcccuuuacaca

SEQ ID NO: 1582075 - RNA, 19 nt, Artificial Sequence
  Description of Artificial Sequence: Synthetic oligonucleotide
cuccuggaggauuuguccu

SEQ ID NO: 1582076 - RNA, 19 nt, Artificial Sequence
  Description of Artificial Sequence: Synthetic oligonucleotide
gcuaaccucagggccugcg

SEQ ID NO: 1582077 - RNA, 19 nt, Artificial Sequence
  Description of Artificial Sequence: Synthetic oligonucleotide
ccaugagcagccaacccca

SEQ ID NO: 1582078 - RNA, 19 nt, Artificial Sequence
  Description of Artificial Sequence: Synthetic oligonucleotide
acccucucugccacucuuc

SEQ ID NO: 1582079 - RNA, 19 nt, Artificial Sequence
  Description of Artificial Sequence: Synthetic oligonucleotide
ucugagugucuggucugau

SEQ ID NO: 1582080 - RNA, 19 nt, Artificial Sequence
  Description of Artificial Sequence: Synthetic oligonucleotide
ucauggcucuggagccgga

SEQ ID NO: 1582081 - RNA, 19 nt, Artificial Sequence
  Description of Artificial Sequence: Synthetic oligonucleotide
augagcagccaaccccaua

SEQ ID NO: 1582082 - RNA, 19 nt, Artificial Sequence
  Description of Artificial Sequence: Synthetic oligonucleotide
agcaccacuuagcccuuua

SEQ ID NO: 1582083 - RNA, 19 nt, Artificial Sequence
  Description of Artificial Sequence: Synthetic oligonucleotide
cuggagccggacccgccag

SEQ ID NO: 1582084 - RNA, 19 nt, Artificial Sequence
  Description of Artificial Sequence: Synthetic oligonucleotide
ggucaauauaagugugacu

SEQ ID NO: 1582085 - RNA, 19 nt, Artificial Sequence
  Description of Artificial Sequence: Synthetic oligonucleotide
gccauggucagaccccuca

SEQ ID NO: 1582086 - RNA, 19 nt, Artificial Sequence
  Description of Artificial Sequence: Synthetic oligonucleotide
agcaaacauuuaugacauu

SEQ ID NO: 1582087 - RNA, 19 nt, Artificial Sequence
  Description of Artificial Sequence: Synthetic oligonucleotide
cuuagcccuuuacacagau

SEQ ID NO: 1582088 - RNA, 19 nt, Artificial Sequence
  Description of Artificial Sequence: Synthetic oligonucleotide
acaacccauuucaauuguu

SEQ ID NO: 1582089 - RNA, 19 nt, Artificial Sequence
  Description of Artificial Sequence: Synthetic oligonucleotide
gccaaccccauacgcauga

SEQ ID NO: 1582090 - RNA, 19 nt, Artificial Sequence
  Description of Artificial Sequence: Synthetic oligonucleotide
ggcaucugcuaugaagcuc

SEQ ID NO: 1582091 - RNA, 19 nt, Artificial Sequence
  Description of Artificial Sequence: Synthetic oligonucleotide
acccucucccaccccgacu

SEQ ID NO: 1582092 - RNA, 19 nt, Artificial Sequence
  Description of Artificial Sequence: Synthetic oligonucleotide
uggccguccgcgcccugga

SEQ ID NO: 1582093 - RNA, 19 nt, Artificial Sequence
  Description of Artificial Sequence: Synthetic oligonucleotide
cuugaaggaauaccuucuu

SEQ ID NO: 1582094 - RNA, 19 nt, Artificial Sequence
  Description of Artificial Sequence: Synthetic oligonucleotide
gcuugaaggaauaccuucu

SEQ ID NO: 1582095 - RNA, 19 nt, Artificial Sequence
  Description of Artificial Sequence: Synthetic oligonucleotide
acuuagcccuuuacacaga

SEQ ID NO: 1582096 - RNA, 19 nt, Artificial Sequence
  Description of Artificial Sequence: Synthetic oligonucleotide
cagccaaccccauacgcau

SEQ ID NO: 1582097 - RNA, 19 nt, Artificial Sequence
  Description of Artificial Sequence: Synthetic oligonucleotide
ggcccaugagcagccaacc

SEQ ID NO: 1582098 - RNA, 19 nt, Artificial Sequence
  Description of Artificial Sequence: Synthetic oligonucleotide
gcccaugagcagccaaccc

SEQ ID NO: 1582099 - RNA, 19 nt, Artificial Sequence
  Description of Artificial Sequence: Synthetic oligonucleotide
cacacauguaguacauguu

SEQ ID NO: 1582100 - RNA, 19 nt, Artificial Sequence
  Description of Artificial Sequence: Synthetic oligonucleotide
gcagugaucaagucagauu

SEQ ID NO: 1582101 - RNA, 19 nt, Artificial Sequence
  Description of Artificial Sequence: Synthetic oligonucleotide
ccucaugacuaaaccacaa

SEQ ID NO: 1582102 - RNA, 19 nt, Artificial Sequence
  Description of Artificial Sequence: Synthetic oligonucleotide
gggcuucauggcucuggag

SEQ ID NO: 1582103 - RNA, 19 nt, Artificial Sequence
  Description of Artificial Sequence: Synthetic oligonucleotide
ccucaaugaaccaggugua

SEQ ID NO: 1582104 - RNA, 19 nt, Artificial Sequence
  Description of Artificial Sequence: Synthetic oligonucleotide
cauguaguacauguuucuu

SEQ ID NO: 1582105 - RNA, 19 nt, Artificial Sequence
  Description of Artificial Sequence: Synthetic oligonucleotide
agccaaccccauacgcaug

SEQ ID NO: 1582106 - RNA, 19 nt, Artificial Sequence
  Description of Artificial Sequence: Synthetic oligonucleotide
cgcgcccuggaacaugucc

SEQ ID NO: 1582107 - RNA, 19 nt, Artificial Sequence
  Description of Artificial Sequence: Synthetic oligonucleotide
gguguaggaagcagaauuu

SEQ ID NO: 1582108 - RNA, 19 nt, Artificial Sequence
  Description of Artificial Sequence: Synthetic oligonucleotide
ggucgcuuuccaaaauuua

SEQ ID NO: 1582109 - RNA, 19 nt, Artificial Sequence
  Description of Artificial Sequence: Synthetic oligonucleotide
ggagccggacccgccagcc

SEQ ID NO: 1582110 - RNA, 19 nt, Artificial Sequence
  Description of Artificial Sequence: Synthetic oligonucleotide
aggcuugcuugaaggaaua

SEQ ID NO: 1582111 - RNA, 19 nt, Artificial Sequence
  Description of Artificial Sequence: Synthetic oligonucleotide
cagcuuuccucagugggcu

SEQ ID NO: 1582112 - RNA, 19 nt, Artificial Sequence
  Description of Artificial Sequence: Synthetic oligonucleotide
caacacccuaucucugagu

SEQ ID NO: 1582113 - RNA, 19 nt, Artificial Sequence
  Description of Artificial Sequence: Synthetic oligonucleotide
aggauacagggcaccugaa

SEQ ID NO: 1582114 - RNA, 19 nt, Artificial Sequence
  Description of Artificial Sequence: Synthetic oligonucleotide
cauggucagaccccucaau

SEQ ID NO: 1582115 - RNA, 19 nt, Artificial Sequence
  Description of Artificial Sequence: Synthetic oligonucleotide
ccaguuccucccagcuacc

SEQ ID NO: 1582116 - RNA, 19 nt, Artificial Sequence
  Description of Artificial Sequence: Synthetic oligonucleotide
ggcuugcuugaaggaauac

SEQ ID NO: 1582117 - RNA, 19 nt, Artificial Sequence
  Description of Artificial Sequence: Synthetic oligonucleotide
ggccugcgcagugaucaag

SEQ ID NO: 1582118 - RNA, 19 nt, Artificial Sequence
  Description of Artificial Sequence: Synthetic oligonucleotide
agccauggucagaccccuc

SEQ ID NO: 1582119 - RNA, 19 nt, Artificial Sequence
  Description of Artificial Sequence: Synthetic oligonucleotide
ggccccaguuccucccagc

SEQ ID NO: 1582120 - RNA, 19 nt, Artificial Sequence
  Description of Artificial Sequence: Synthetic oligonucleotide
acccuaucucugagugucu

SEQ ID NO: 1582121 - RNA, 19 nt, Artificial Sequence
  Description of Artificial Sequence: Synthetic oligonucleotide
gccguccgcgcccuggaac

SEQ ID NO: 1582122 - RNA, 19 nt, Artificial Sequence
  Description of Artificial Sequence: Synthetic oligonucleotide
gggcuaaccucagggccug

SEQ ID NO: 1582123 - RNA, 19 nt, Artificial Sequence
  Description of Artificial Sequence: Synthetic oligonucleotide
cugagugucuggucugauu

SEQ ID NO: 1582124 - RNA, 19 nt, Artificial Sequence
  Description of Artificial Sequence: Synthetic oligonucleotide
gcuuuccucagugggcuaa

SEQ ID NO: 1582125 - RNA, 19 nt, Artificial Sequence
  Description of Artificial Sequence: Synthetic oligonucleotide
caaguggggcugcagcuuu

SEQ ID NO: 1582126 - RNA, 19 nt, Artificial Sequence
  Description of Artificial Sequence: Synthetic oligonucleotide
guccgcgcccuggaacaug

SEQ ID NO: 1582127 - RNA, 19 nt, Artificial Sequence
  Description of Artificial Sequence: Synthetic oligonucleotide
cgcccuggaacauguccgc

SEQ ID NO: 1582128 - RNA, 19 nt, Artificial Sequence
  Description of Artificial Sequence: Synthetic oligonucleotide
ccuauuaggcuugcuugaa

SEQ ID NO: 1582129 - RNA, 19 nt, Artificial Sequence
  Description of Artificial Sequence: Synthetic oligonucleotide
ccagcuacccaggccagca

SEQ ID NO: 1582130 - RNA, 19 nt, Artificial Sequence
  Description of Artificial Sequence: Synthetic oligonucleotide
caccccgacuuguuugggu

SEQ ID NO: 1582131 - RNA, 19 nt, Artificial Sequence
  Description of Artificial Sequence: Synthetic oligonucleotide
ggggaagaagaaacccucu

SEQ ID NO: 1582132 - RNA, 19 nt, Artificial Sequence
  Description of Artificial Sequence: Synthetic oligonucleotide
gcccuggaacauguccgcc

SEQ ID NO: 1582133 - RNA, 19 nt, Artificial Sequence
  Description of Artificial Sequence: Synthetic oligonucleotide
ccguccgcgcccuggaaca

SEQ ID NO: 1582134 - RNA, 19 nt, Artificial Sequence
  Description of Artificial Sequence: Synthetic oligonucleotide
gccggacccgccagccugg

SEQ ID NO: 1582135 - RNA, 19 nt, Artificial Sequence
  Description of Artificial Sequence: Synthetic oligonucleotide
cagcuacccaggccagcaa

SEQ ID NO: 1582136 - RNA, 19 nt, Artificial Sequence
  Description of Artificial Sequence: Synthetic oligonucleotide
cauuagugucugggcuaaa

SEQ ID NO: 1582137 - RNA, 19 nt, Artificial Sequence
  Description of Artificial Sequence: Synthetic oligonucleotide
cuuaaacaucuaggucaau

SEQ ID NO: 1582138 - RNA, 19 nt, Artificial Sequence
  Description of Artificial Sequence: Synthetic oligonucleotide
gagccggacccgccagccu

SEQ ID NO: 1582139 - RNA, 19 nt, Artificial Sequence
  Description of Artificial Sequence: Synthetic oligonucleotide
ccaccccgacuuguuuggg

SEQ ID NO: 1582140 - RNA, 19 nt, Artificial Sequence
  Description of Artificial Sequence: Synthetic oligonucleotide
gccugcgcagugaucaagu

SEQ ID NO: 1582141 - RNA, 19 nt, Artificial Sequence
  Description of Artificial Sequence: Synthetic oligonucleotide
cagguguaggaagcagaau

SEQ ID NO: 1582142 - RNA, 19 nt, Artificial Sequence
  Description of Artificial Sequence: Synthetic oligonucleotide
ccaaccccauacgcaugac

SEQ ID NO: 1582143 - RNA, 19 nt, Artificial Sequence
  Description of Artificial Sequence: Synthetic oligonucleotide
gcaggcacuuaaacaucua

SEQ ID NO: 1582144 - RNA, 19 nt, Artificial Sequence
  Description of Artificial Sequence: Synthetic oligonucleotide
cccgacuuguuuggguuaa

SEQ ID NO: 1582145 - RNA, 19 nt, Artificial Sequence
  Description of Artificial Sequence: Synthetic oligonucleotide
ccucucccaccccgacuug

SEQ ID NO: 1582146 - RNA, 19 nt, Artificial Sequence
  Description of Artificial Sequence: Synthetic oligonucleotide
ggcuaaccucagggccugc

SEQ ID NO: 1582147 - RNA, 19 nt, Artificial Sequence
  Description of Artificial Sequence: Synthetic oligonucleotide
guagcaccacuuagcccuu

SEQ ID NO: 1582148 - RNA, 19 nt, Artificial Sequence
  Description of Artificial Sequence: Synthetic oligonucleotide
ccccgacuuguuuggguua

SEQ ID NO: 1582149 - RNA, 19 nt, Artificial Sequence
  Description of Artificial Sequence: Synthetic oligonucleotide
gccagcaaguggggcugca

SEQ ID NO: 1582150 - RNA, 19 nt, Artificial Sequence
  Description of Artificial Sequence: Synthetic oligonucleotide
gcgcagugaucaagucaga

SEQ ID NO: 1582151 - RNA, 19 nt, Artificial Sequence
  Description of Artificial Sequence: Synthetic oligonucleotide
ccccaguuccucccagcua

SEQ ID NO: 1582152 - RNA, 19 nt, Artificial Sequence
  Description of Artificial Sequence: Synthetic oligonucleotide
ggccguccgcgcccuggaa

SEQ ID NO: 1582153 - RNA, 19 nt, Artificial Sequence
  Description of Artificial Sequence: Synthetic oligonucleotide
ccggacccgccagccuggc

SEQ ID NO: 1582154 - RNA, 19 nt, Artificial Sequence
  Description of Artificial Sequence: Synthetic oligonucleotide
ccgcgcccuggaacauguc

SEQ ID NO: 1582155 - RNA, 19 nt, Artificial Sequence
  Description of Artificial Sequence: Synthetic oligonucleotide
ccgacuuguuuggguuaaa

SEQ ID NO: 1582156 - RNA, 19 nt, Artificial Sequence
  Description of Artificial Sequence: Synthetic oligonucleotide
ccauccuauuaggcuugcu

SEQ ID NO: 1582157 - RNA, 19 nt, Artificial Sequence
  Description of Artificial Sequence: Synthetic oligonucleotide
cguccgcgcccuggaacau

SEQ ID NO: 1582158 - RNA, 19 nt, Artificial Sequence
  Description of Artificial Sequence: Synthetic oligonucleotide
uuuucaaauauaaaacagg

SEQ ID NO: 1582159 - RNA, 19 nt, Artificial Sequence
  Description of Artificial Sequence: Synthetic oligonucleotide
ucugauaggccucaaagag

SEQ ID NO: 1582160 - RNA, 19 nt, Artificial Sequence
  Description of Artificial Sequence: Synthetic oligonucleotide
aagaagugccaacagaguc

SEQ ID NO: 1582161 - RNA, 19 nt, Artificial Sequence
  Description of Artificial Sequence: Synthetic oligonucleotide
aagcucuccguccagaaac

SEQ ID NO: 1582162 - RNA, 19 nt, Artificial Sequence
  Description of Artificial Sequence: Synthetic oligonucleotide
uguuuaucuaguuuggucu

SEQ ID NO: 1582163 - RNA, 19 nt, Artificial Sequence
  Description of Artificial Sequence: Synthetic oligonucleotide
aaaacucgcucucuauuac

SEQ ID NO: 1582164 - RNA, 19 nt, Artificial Sequence
  Description of Artificial Sequence: Synthetic oligonucleotide
uguuugacuguuuaucuag

SEQ ID NO: 1582165 - RNA, 19 nt, Artificial Sequence
  Description of Artificial Sequence: Synthetic oligonucleotide
cuauuacucaccauggacc

SEQ ID NO: 1582166 - RNA, 19 nt, Artificial Sequence
  Description of Artificial Sequence: Synthetic oligonucleotide
ugacuguuuaucuaguuug

SEQ ID NO: 1582167 - RNA, 19 nt, Artificial Sequence
  Description of Artificial Sequence: Synthetic oligonucleotide
ucucuauuacucaccaugg

SEQ ID NO: 1582168 - RNA, 19 nt, Artificial Sequence
  Description of Artificial Sequence: Synthetic oligonucleotide
aagcugaacagucugcguc

SEQ ID NO: 1582169 - RNA, 19 nt, Artificial Sequence
  Description of Artificial Sequence: Synthetic oligonucleotide
uuuguuaagcugaacaguc

SEQ ID NO: 1582170 - RNA, 19 nt, Artificial Sequence
  Description of Artificial Sequence: Synthetic oligonucleotide
agauccuggacuccaaagc

SEQ ID NO: 1582171 - RNA, 19 nt, Artificial Sequence
  Description of Artificial Sequence: Synthetic oligonucleotide
agcucuaaacaguaucugc

SEQ ID NO: 1582172 - RNA, 19 nt, Artificial Sequence
  Description of Artificial Sequence: Synthetic oligonucleotide
aaagccuccgucugcagag

SEQ ID NO: 1582173 - RNA, 19 nt, Artificial Sequence
  Description of Artificial Sequence: Synthetic oligonucleotide
uuuaccagcucuaaacagu

SEQ ID NO: 1582174 - RNA, 19 nt, Artificial Sequence
  Description of Artificial Sequence: Synthetic oligonucleotide
uuuuaccagcucuaaacag

SEQ ID NO: 1582175 - RNA, 19 nt, Artificial Sequence
  Description of Artificial Sequence: Synthetic oligonucleotide
aaagauucccugaaugguc

SEQ ID NO: 1582176 - RNA, 19 nt, Artificial Sequence
  Description of Artificial Sequence: Synthetic oligonucleotide
uuaagcugaacagucugcg

SEQ ID NO: 1582177 - RNA, 19 nt, Artificial Sequence
  Description of Artificial Sequence: Synthetic oligonucleotide
cucucuauuacucaccaug

SEQ ID NO: 1582178 - RNA, 19 nt, Artificial Sequence
  Description of Artificial Sequence: Synthetic oligonucleotide
aagguuuuccucugccagg

SEQ ID NO: 1582179 - RNA, 19 nt, Artificial Sequence
  Description of Artificial Sequence: Synthetic oligonucleotide
uccacuuucacacggcgca

SEQ ID NO: 1582180 - RNA, 19 nt, Artificial Sequence
  Description of Artificial Sequence: Synthetic oligonucleotide
accagcucuaaacaguauc

SEQ ID NO: 1582181 - RNA, 19 nt, Artificial Sequence
  Description of Artificial Sequence: Synthetic oligonucleotide
uccaaggaagcacuguuug

SEQ ID NO: 1582182 - RNA, 19 nt, Artificial Sequence
  Description of Artificial Sequence: Synthetic oligonucleotide
aaauuacaaguguaguaaa

SEQ ID NO: 1582183 - RNA, 19 nt, Artificial Sequence
  Description of Artificial Sequence: Synthetic oligonucleotide
uguaauccuggguauggag

SEQ ID NO: 1582184 - RNA, 19 nt, Artificial Sequence
  Description of Artificial Sequence: Synthetic oligonucleotide
uauuacucaccauggaccu

SEQ ID NO: 1582185 - RNA, 19 nt, Artificial Sequence
  Description of Artificial Sequence: Synthetic oligonucleotide
uuucacacggcgcaugugu

SEQ ID NO: 1582186 - RNA, 19 nt, Artificial Sequence
  Description of Artificial Sequence: Synthetic oligonucleotide
cacagaaaccgucaugagg

SEQ ID NO: 1582187 - RNA, 19 nt, Artificial Sequence
  Description of Artificial Sequence: Synthetic oligonucleotide
ugucccuucagcacuagcu

SEQ ID NO: 1582188 - RNA, 19 nt, Artificial Sequence
  Description of Artificial Sequence: Synthetic oligonucleotide
acaaaagguuuuccucugc

SEQ ID NO: 1582189 - RNA, 19 nt, Artificial Sequence
  Description of Artificial Sequence: Synthetic oligonucleotide
ucguggagcugcaucagcg

SEQ ID NO: 1582190 - RNA, 19 nt, Artificial Sequence
  Description of Artificial Sequence: Synthetic oligonucleotide
accgucaugaggcuugagg

SEQ ID NO: 1582191 - RNA, 19 nt, Artificial Sequence
  Description of Artificial Sequence: Synthetic oligonucleotide
ucaccauggaccuacaguu

SEQ ID NO: 1582192 - RNA, 19 nt, Artificial Sequence
  Description of Artificial Sequence: Synthetic oligonucleotide
acgaacagagcuuccuugg

SEQ ID NO: 1582193 - RNA, 19 nt, Artificial Sequence
  Description of Artificial Sequence: Synthetic oligonucleotide
ucugguagacaucaaugaa

SEQ ID NO: 1582194 - RNA, 19 nt, Artificial Sequence
  Description of Artificial Sequence: Synthetic oligonucleotide
ugcagagaauccuugcuga

SEQ ID NO: 1582195 - RNA, 19 nt, Artificial Sequence
  Description of Artificial Sequence: Synthetic oligonucleotide
caccaagugaagcuaaggc

SEQ ID NO: 1582196 - RNA, 19 nt, Artificial Sequence
  Description of Artificial Sequence: Synthetic oligonucleotide
acaguucuaaaaucagaug

SEQ ID NO: 1582197 - RNA, 19 nt, Artificial Sequence
  Description of Artificial Sequence: Synthetic oligonucleotide
cuggguauggagaagccug

SEQ ID NO: 1582198 - RNA, 19 nt, Artificial Sequence
  Description of Artificial Sequence: Synthetic oligonucleotide
uggaccuacaguucuaaaa

SEQ ID NO: 1582199 - RNA, 19 nt, Artificial Sequence
  Description of Artificial Sequence: Synthetic oligonucleotide
ugguacaaaagguuuuccu

SEQ ID NO: 1582200 - RNA, 19 nt, Artificial Sequence
  Description of Artificial Sequence: Synthetic oligonucleotide
gucuucuuuaucugauagg

SEQ ID NO: 1582201 - RNA, 19 nt, Artificial Sequence
  Description of Artificial Sequence: Synthetic oligonucleotide
uccuugguccacaaaacuc

SEQ ID NO: 1582202 - RNA, 19 nt, Artificial Sequence
  Description of Artificial Sequence: Synthetic oligonucleotide
cuguuuaucuaguuugguc

SEQ ID NO: 1582203 - RNA, 19 nt, Artificial Sequence
  Description of Artificial Sequence: Synthetic oligonucleotide
aaacucgcucucuauuacu

SEQ ID NO: 1582204 - RNA, 19 nt, Artificial Sequence
  Description of Artificial Sequence: Synthetic oligonucleotide
uugcuagccaaugucaucu

SEQ ID NO: 1582205 - RNA, 19 nt, Artificial Sequence
  Description of Artificial Sequence: Synthetic oligonucleotide
uggcuauguguccugcagg

SEQ ID NO: 1582206 - RNA, 19 nt, Artificial Sequence
  Description of Artificial Sequence: Synthetic oligonucleotide
ggaagaacagccuccguag

SEQ ID NO: 1582207 - RNA, 19 nt, Artificial Sequence
  Description of Artificial Sequence: Synthetic oligonucleotide
cucacuggaggaugaagcc

SEQ ID NO: 1582208 - RNA, 19 nt, Artificial Sequence
  Description of Artificial Sequence: Synthetic oligonucleotide
ugguccacaaaacucgcuc

SEQ ID NO: 1582209 - RNA, 19 nt, Artificial Sequence
  Description of Artificial Sequence: Synthetic oligonucleotide
gaaaccgucaugaggcuug

SEQ ID NO: 1582210 - RNA, 19 nt, Artificial Sequence
  Description of Artificial Sequence: Synthetic oligonucleotide
ugcaucagcgacagccccg

SEQ ID NO: 1582211 - RNA, 19 nt, Artificial Sequence
  Description of Artificial Sequence: Synthetic oligonucleotide
uuaccagcucuaaacagua

SEQ ID NO: 1582212 - RNA, 19 nt, Artificial Sequence
  Description of Artificial Sequence: Synthetic oligonucleotide
aagcuaaggcacagcaugg

SEQ ID NO: 1582213 - RNA, 19 nt, Artificial Sequence
  Description of Artificial Sequence: Synthetic oligonucleotide
uccagaaacuucucugcca

SEQ ID NO: 1582214 - RNA, 19 nt, Artificial Sequence
  Description of Artificial Sequence: Synthetic oligonucleotide
gguacaaaagguuuuccuc

SEQ ID NO: 1582215 - RNA, 19 nt, Artificial Sequence
  Description of Artificial Sequence: Synthetic oligonucleotide
uagaggaagcucuccgucc

SEQ ID NO: 1582216 - RNA, 19 nt, Artificial Sequence
  Description of Artificial Sequence: Synthetic oligonucleotide
agugucuugcaggaagaac

SEQ ID NO: 1582217 - RNA, 19 nt, Artificial Sequence
  Description of Artificial Sequence: Synthetic oligonucleotide
uuguuaagcugaacagucu

SEQ ID NO: 1582218 - RNA, 19 nt, Artificial Sequence
  Description of Artificial Sequence: Synthetic oligonucleotide
uuacucaccauggaccuac

SEQ ID NO: 1582219 - RNA, 19 nt, Artificial Sequence
  Description of Artificial Sequence: Synthetic oligonucleotide
gcucuaaacaguaucugcg

SEQ ID NO: 1582220 - RNA, 19 nt, Artificial Sequence
  Description of Artificial Sequence: Synthetic oligonucleotide
aguucuaaaaucagaugga

SEQ ID NO: 1582221 - RNA, 19 nt, Artificial Sequence
  Description of Artificial Sequence: Synthetic oligonucleotide
auaaaacaggaaaauuaca

SEQ ID NO: 1582222 - RNA, 19 nt, Artificial Sequence
  Description of Artificial Sequence: Synthetic oligonucleotide
aagauucccugaauggucu

SEQ ID NO: 1582223 - RNA, 19 nt, Artificial Sequence
  Description of Artificial Sequence: Synthetic oligonucleotide
caguuaauggcucgggcac

SEQ ID NO: 1582224 - RNA, 19 nt, Artificial Sequence
  Description of Artificial Sequence: Synthetic oligonucleotide
ugcgaccaugcacuacucg

SEQ ID NO: 1582225 - RNA, 19 nt, Artificial Sequence
  Description of Artificial Sequence: Synthetic oligonucleotide
accauggaccuacaguucu

SEQ ID NO: 1582226 - RNA, 19 nt, Artificial Sequence
  Description of Artificial Sequence: Synthetic oligonucleotide
ugugaggugaggguggccu

SEQ ID NO: 1582227 - RNA, 19 nt, Artificial Sequence
  Description of Artificial Sequence: Synthetic oligonucleotide
aauggcucgggcacccugg

SEQ ID NO: 1582228 - RNA, 19 nt, Artificial Sequence
  Description of Artificial Sequence: Synthetic oligonucleotide
aguuaauggcucgggcacc

SEQ ID NO: 1582229 - RNA, 19 nt, Artificial Sequence
  Description of Artificial Sequence: Synthetic oligonucleotide
agaaccuggaguuccuggu

SEQ ID NO: 1582230 - RNA, 19 nt, Artificial Sequence
  Description of Artificial Sequence: Synthetic oligonucleotide
agaacagccuccguagcuc

SEQ ID NO: 1582231 - RNA, 19 nt, Artificial Sequence
  Description of Artificial Sequence: Synthetic oligonucleotide
uggcacggcgggcagagag

SEQ ID NO: 1582232 - RNA, 19 nt, Artificial Sequence
  Description of Artificial Sequence: Synthetic oligonucleotide
ugccaacagagucuccaag

SEQ ID NO: 1582233 - RNA, 19 nt, Artificial Sequence
  Description of Artificial Sequence: Synthetic oligonucleotide
auggaugcgaccaugcacu

SEQ ID NO: 1582234 - RNA, 19 nt, Artificial Sequence
  Description of Artificial Sequence: Synthetic oligonucleotide
gugaagcuaaggcacagca

SEQ ID NO: 1582235 - RNA, 19 nt, Artificial Sequence
  Description of Artificial Sequence: Synthetic oligonucleotide
ugaauggucuugagagugu

SEQ ID NO: 1582236 - RNA, 19 nt, Artificial Sequence
  Description of Artificial Sequence: Synthetic oligonucleotide
accuacaguucuaaaauca

SEQ ID NO: 1582237 - RNA, 19 nt, Artificial Sequence
  Description of Artificial Sequence: Synthetic oligonucleotide
caccaugucgccgagcugc

SEQ ID NO: 1582238 - RNA, 19 nt, Artificial Sequence
  Description of Artificial Sequence: Synthetic oligonucleotide
uuaucugauaggccucaaa

SEQ ID NO: 1582239 - RNA, 19 nt, Artificial Sequence
  Description of Artificial Sequence: Synthetic oligonucleotide
agcgacagccccgcgaagc

SEQ ID NO: 1582240 - RNA, 19 nt, Artificial Sequence
  Description of Artificial Sequence: Synthetic oligonucleotide
cucugguagacaucaauga

SEQ ID NO: 1582241 - RNA, 19 nt, Artificial Sequence
  Description of Artificial Sequence: Synthetic oligonucleotide
gaugcgaccaugcacuacu

SEQ ID NO: 1582242 - RNA, 19 nt, Artificial Sequence
  Description of Artificial Sequence: Synthetic oligonucleotide
acaaaacucgcucucuauu

SEQ ID NO: 1582243 - RNA, 19 nt, Artificial Sequence
  Description of Artificial Sequence: Synthetic oligonucleotide
ucagacgagcuuuccgagc

SEQ ID NO: 1582244 - RNA, 19 nt, Artificial Sequence
  Description of Artificial Sequence: Synthetic oligonucleotide
ugauggaugcgaccaugca

SEQ ID NO: 1582245 - RNA, 19 nt, Artificial Sequence
  Description of Artificial Sequence: Synthetic oligonucleotide
ucacagaaaccgucaugag

SEQ ID NO: 1582246 - RNA, 19 nt, Artificial Sequence
  Description of Artificial Sequence: Synthetic oligonucleotide
guggcuauguguccugcag

SEQ ID NO: 1582247 - RNA, 19 nt, Artificial Sequence
  Description of Artificial Sequence: Synthetic oligonucleotide
cuacucgccugacaggaag

SEQ ID NO: 1582248 - RNA, 19 nt, Artificial Sequence
  Description of Artificial Sequence: Synthetic oligonucleotide
uuaucuaguuuggucuucu

SEQ ID NO: 1582249 - RNA, 19 nt, Artificial Sequence
  Description of Artificial Sequence: Synthetic oligonucleotide
cacgaacagagcuuccuug

SEQ ID NO: 1582250 - RNA, 19 nt, Artificial Sequence
  Description of Artificial Sequence: Synthetic oligonucleotide
cagauccuggacuccaaag

SEQ ID NO: 1582251 - RNA, 19 nt, Artificial Sequence
  Description of Artificial Sequence: Synthetic oligonucleotide
agaagugccaacagagucu

SEQ ID NO: 1582252 - RNA, 19 nt, Artificial Sequence
  Description of Artificial Sequence: Synthetic oligonucleotide
gaccuacaguucuaaaauc

SEQ ID NO: 1582253 - RNA, 19 nt, Artificial Sequence
  Description of Artificial Sequence: Synthetic oligonucleotide
ugcucugguagacaucaau

SEQ ID NO: 1582254 - RNA, 19 nt, Artificial Sequence
  Description of Artificial Sequence: Synthetic oligonucleotide
uuugacuguuuaucuaguu

SEQ ID NO: 1582255 - RNA, 19 nt, Artificial Sequence
  Description of Artificial Sequence: Synthetic oligonucleotide
uucacacggcgcaugugug

SEQ ID NO: 1582256 - RNA, 19 nt, Artificial Sequence
  Description of Artificial Sequence: Synthetic oligonucleotide
uaaacaguaucugcguuuu

SEQ ID NO: 1582257 - RNA, 19 nt, Artificial Sequence
  Description of Artificial Sequence: Synthetic oligonucleotide
cuugcucugguagacauca

SEQ ID NO: 1582258 - RNA, 19 nt, Artificial Sequence
  Description of Artificial Sequence: Synthetic oligonucleotide
cucgcucucuauuacucac

SEQ ID NO: 1582259 - RNA, 19 nt, Artificial Sequence
  Description of Artificial Sequence: Synthetic oligonucleotide
agcucguggagcugcauca

SEQ ID NO: 1582260 - RNA, 19 nt, Artificial Sequence
  Description of Artificial Sequence: Synthetic oligonucleotide
cuagaggaagcucuccguc

SEQ ID NO: 1582261 - RNA, 19 nt, Artificial Sequence
  Description of Artificial Sequence: Synthetic oligonucleotide
gucugcgucuccuccaugc

SEQ ID NO: 1582262 - RNA, 19 nt, Artificial Sequence
  Description of Artificial Sequence: Synthetic oligonucleotide
uuugggucagacgagcuuu

SEQ ID NO: 1582263 - RNA, 19 nt, Artificial Sequence
  Description of Artificial Sequence: Synthetic oligonucleotide
agcgcgacucgcucgcggc

SEQ ID NO: 1582264 - RNA, 19 nt, Artificial Sequence
  Description of Artificial Sequence: Synthetic oligonucleotide
ugaaggcaucuagaggaag

SEQ ID NO: 1582265 - RNA, 19 nt, Artificial Sequence
  Description of Artificial Sequence: Synthetic oligonucleotide
uaagcugaacagucugcgu

SEQ ID NO: 1582266 - RNA, 19 nt, Artificial Sequence
  Description of Artificial Sequence: Synthetic oligonucleotide
aagggagcccaguggccuc

SEQ ID NO: 1582267 - RNA, 19 nt, Artificial Sequence
  Description of Artificial Sequence: Synthetic oligonucleotide
ugcggagccagccguggag

SEQ ID NO: 1582268 - RNA, 19 nt, Artificial Sequence
  Description of Artificial Sequence: Synthetic oligonucleotide
aagcgcgacucgcucgcgg

SEQ ID NO: 1582269 - RNA, 19 nt, Artificial Sequence
  Description of Artificial Sequence: Synthetic oligonucleotide
uacucgccugacaggaagc

SEQ ID NO: 1582270 - RNA, 19 nt, Artificial Sequence
  Description of Artificial Sequence: Synthetic oligonucleotide
cugugcagagaauccuugc

SEQ ID NO: 1582271 - RNA, 19 nt, Artificial Sequence
  Description of Artificial Sequence: Synthetic oligonucleotide
uaauggcucgggcacccug

SEQ ID NO: 1582272 - RNA, 19 nt, Artificial Sequence
  Description of Artificial Sequence: Synthetic oligonucleotide
gguauggagaagccugucc

SEQ ID NO: 1582273 - RNA, 19 nt, Artificial Sequence
  Description of Artificial Sequence: Synthetic oligonucleotide
gucagacgagcuuuccgag

SEQ ID NO: 1582274 - RNA, 19 nt, Artificial Sequence
  Description of Artificial Sequence: Synthetic oligonucleotide
agcauggacacugauggau

SEQ ID NO: 1582275 - RNA, 19 nt, Artificial Sequence
  Description of Artificial Sequence: Synthetic oligonucleotide
gaagugccaacagagucuc

SEQ ID NO: 1582276 - RNA, 19 nt, Artificial Sequence
  Description of Artificial Sequence: Synthetic oligonucleotide
aguccuggcaccaagugaa

SEQ ID NO: 1582277 - RNA, 19 nt, Artificial Sequence
  Description of Artificial Sequence: Synthetic oligonucleotide
agauggacacacuggccca

SEQ ID NO: 1582278 - RNA, 19 nt, Artificial Sequence
  Description of Artificial Sequence: Synthetic oligonucleotide
acgagcuuuccgagcaucc

SEQ ID NO: 1582279 - RNA, 19 nt, Artificial Sequence
  Description of Artificial Sequence: Synthetic oligonucleotide
ucacacggcgcaugugugc

SEQ ID NO: 1582280 - RNA, 19 nt, Artificial Sequence
  Description of Artificial Sequence: Synthetic oligonucleotide
uuuaucuaguuuggucuuc

SEQ ID NO: 1582281 - RNA, 19 nt, Artificial Sequence
  Description of Artificial Sequence: Synthetic oligonucleotide
ggcacuguaauccugggua

SEQ ID NO: 1582282 - RNA, 19 nt, Artificial Sequence
  Description of Artificial Sequence: Synthetic oligonucleotide
aguuggggcugguacaaaa

SEQ ID NO: 1582283 - RNA, 19 nt, Artificial Sequence
  Description of Artificial Sequence: Synthetic oligonucleotide
guauggagaagccuguccu

SEQ ID NO: 1582284 - RNA, 19 nt, Artificial Sequence
  Description of Artificial Sequence: Synthetic oligonucleotide
caaaacucgcucucuauua

SEQ ID NO: 1582285 - RNA, 19 nt, Artificial Sequence
  Description of Artificial Sequence: Synthetic oligonucleotide
uccuggguauggagaagcc

SEQ ID NO: 1582286 - RNA, 19 nt, Artificial Sequence
  Description of Artificial Sequence: Synthetic oligonucleotide
ccaacugugcagagaaucc

SEQ ID NO: 1582287 - RNA, 19 nt, Artificial Sequence
  Description of Artificial Sequence: Synthetic oligonucleotide
cugauaggccucaaagaga

SEQ ID NO: 1582288 - RNA, 19 nt, Artificial Sequence
  Description of Artificial Sequence: Synthetic oligonucleotide
ucacuggaggaugaagccu

SEQ ID NO: 1582289 - RNA, 19 nt, Artificial Sequence
  Description of Artificial Sequence: Synthetic oligonucleotide
gucucugucccuucagcac

SEQ ID NO: 1582290 - RNA, 19 nt, Artificial Sequence
  Description of Artificial Sequence: Synthetic oligonucleotide
aggcacgacagaagggagc

SEQ ID NO: 1582291 - RNA, 19 nt, Artificial Sequence
  Description of Artificial Sequence: Synthetic oligonucleotide
agccaaugucaucucuuug

SEQ ID NO: 1582292 - RNA, 19 nt, Artificial Sequence
  Description of Artificial Sequence: Synthetic oligonucleotide
guuaauggcucgggcaccc

SEQ ID NO: 1582293 - RNA, 19 nt, Artificial Sequence
  Description of Artificial Sequence: Synthetic oligonucleotide
ugccauguucucagugucu

SEQ ID NO: 1582294 - RNA, 19 nt, Artificial Sequence
  Description of Artificial Sequence: Synthetic oligonucleotide
cuuuccgagcauccaguug

SEQ ID NO: 1582295 - RNA, 19 nt, Artificial Sequence
  Description of Artificial Sequence: Synthetic oligonucleotide
uugguccacaaaacucgcu

SEQ ID NO: 1582296 - RNA, 19 nt, Artificial Sequence
  Description of Artificial Sequence: Synthetic oligonucleotide
acugauggaugcgaccaug

SEQ ID NO: 1582297 - RNA, 19 nt, Artificial Sequence
  Description of Artificial Sequence: Synthetic oligonucleotide
guuggggcugguacaaaag

SEQ ID NO: 1582298 - RNA, 19 nt, Artificial Sequence
  Description of Artificial Sequence: Synthetic oligonucleotide
uggcaguuaauggcucggg

SEQ ID NO: 1582299 - RNA, 19 nt, Artificial Sequence
  Description of Artificial Sequence: Synthetic oligonucleotide
gcgaccaugcacuacucgc

SEQ ID NO: 1582300 - RNA, 19 nt, Artificial Sequence
  Description of Artificial Sequence: Synthetic oligonucleotide
cagagagugucuugcagga

SEQ ID NO: 1582301 - RNA, 19 nt, Artificial Sequence
  Description of Artificial Sequence: Synthetic oligonucleotide
cugguacaaaagguuuucc

SEQ ID NO: 1582302 - RNA, 19 nt, Artificial Sequence
  Description of Artificial Sequence: Synthetic oligonucleotide
gaugcgccgaggcacgaca

SEQ ID NO: 1582303 - RNA, 19 nt, Artificial Sequence
  Description of Artificial Sequence: Synthetic oligonucleotide
auggacacugauggaugcg

SEQ ID NO: 1582304 - RNA, 19 nt, Artificial Sequence
  Description of Artificial Sequence: Synthetic oligonucleotide
cucuccguccagaaacuuc

SEQ ID NO: 1582305 - RNA, 19 nt, Artificial Sequence
  Description of Artificial Sequence: Synthetic oligonucleotide
cagacgagcuuuccgagca

SEQ ID NO: 1582306 - RNA, 19 nt, Artificial Sequence
  Description of Artificial Sequence: Synthetic oligonucleotide
ggucagacgagcuuuccga

SEQ ID NO: 1582307 - RNA, 19 nt, Artificial Sequence
  Description of Artificial Sequence: Synthetic oligonucleotide
agggcacccaagccauugg

SEQ ID NO: 1582308 - RNA, 19 nt, Artificial Sequence
  Description of Artificial Sequence: Synthetic oligonucleotide
uucccugaauggucuugag

SEQ ID NO: 1582309 - RNA, 19 nt, Artificial Sequence
  Description of Artificial Sequence: Synthetic oligonucleotide
gcaguuaauggcucgggca

SEQ ID NO: 1582310 - RNA, 19 nt, Artificial Sequence
  Description of Artificial Sequence: Synthetic oligonucleotide
cccauggcagcugugaacg

SEQ ID NO: 1582311 - RNA, 19 nt, Artificial Sequence
  Description of Artificial Sequence: Synthetic oligonucleotide
caugugugccagcuuccgc

SEQ ID NO: 1582312 - RNA, 19 nt, Artificial Sequence
  Description of Artificial Sequence: Synthetic oligonucleotide
acggcgggcagagaguguc

SEQ ID NO: 1582313 - RNA, 19 nt, Artificial Sequence
  Description of Artificial Sequence: Synthetic oligonucleotide
gcucacuggaggaugaagc

SEQ ID NO: 1582314 - RNA, 19 nt, Artificial Sequence
  Description of Artificial Sequence: Synthetic oligonucleotide
cuugaggugugaggugagg

SEQ ID NO: 1582315 - RNA, 19 nt, Artificial Sequence
  Description of Artificial Sequence: Synthetic oligonucleotide
augccccgcaccaugucgc

SEQ ID NO: 1582316 - RNA, 19 nt, Artificial Sequence
  Description of Artificial Sequence: Synthetic oligonucleotide
uggcaccaagugaagcuaa

SEQ ID NO: 1582317 - RNA, 19 nt, Artificial Sequence
  Description of Artificial Sequence: Synthetic oligonucleotide
gaacagccuccguagcuca

SEQ ID NO: 1582318 - RNA, 19 nt, Artificial Sequence
  Description of Artificial Sequence: Synthetic oligonucleotide
guggagcugcaucagcgac

SEQ ID NO: 1582319 - RNA, 19 nt, Artificial Sequence
  Description of Artificial Sequence: Synthetic oligonucleotide
uccuggcaccaagugaagc

SEQ ID NO: 1582320 - RNA, 19 nt, Artificial Sequence
  Description of Artificial Sequence: Synthetic oligonucleotide
gggucagacgagcuuuccg

SEQ ID NO: 1582321 - RNA, 19 nt, Artificial Sequence
  Description of Artificial Sequence: Synthetic oligonucleotide
uggcccagauccuggacuc

SEQ ID NO: 1582322 - RNA, 19 nt, Artificial Sequence
  Description of Artificial Sequence: Synthetic oligonucleotide
cacacggcgcaugugugcc

SEQ ID NO: 1582323 - RNA, 19 nt, Artificial Sequence
  Description of Artificial Sequence: Synthetic oligonucleotide
gcuggcaguuaauggcucg

SEQ ID NO: 1582324 - RNA, 19 nt, Artificial Sequence
  Description of Artificial Sequence: Synthetic oligonucleotide
gaggcacgacagaagggag

SEQ ID NO: 1582325 - RNA, 19 nt, Artificial Sequence
  Description of Artificial Sequence: Synthetic oligonucleotide
aacagccuccguagcucac

SEQ ID NO: 1582326 - RNA, 19 nt, Artificial Sequence
  Description of Artificial Sequence: Synthetic oligonucleotide
cuuggcacggcgggcagag

SEQ ID NO: 1582327 - RNA, 19 nt, Artificial Sequence
  Description of Artificial Sequence: Synthetic oligonucleotide
aagagaaccuggaguuccu

SEQ ID NO: 1582328 - RNA, 19 nt, Artificial Sequence
  Description of Artificial Sequence: Synthetic oligonucleotide
cuuuguuaagcugaacagu

SEQ ID NO: 1582329 - RNA, 19 nt, Artificial Sequence
  Description of Artificial Sequence: Synthetic oligonucleotide
ggcacgacagaagggagcc

SEQ ID NO: 1582330 - RNA, 19 nt, Artificial Sequence
  Description of Artificial Sequence: Synthetic oligonucleotide
ggcaguuaauggcucgggc

SEQ ID NO: 1582331 - RNA, 19 nt, Artificial Sequence
  Description of Artificial Sequence: Synthetic oligonucleotide
uccgcuugcucugguagac

SEQ ID NO: 1582332 - RNA, 19 nt, Artificial Sequence
  Description of Artificial Sequence: Synthetic oligonucleotide
cagcucuaaacaguaucug

SEQ ID NO: 1582333 - RNA, 19 nt, Artificial Sequence
  Description of Artificial Sequence: Synthetic oligonucleotide
cuggcggguauggugacac

SEQ ID NO: 1582334 - RNA, 19 nt, Artificial Sequence
  Description of Artificial Sequence: Synthetic oligonucleotide
ggaccuacaguucuaaaau

SEQ ID NO: 1582335 - RNA, 19 nt, Artificial Sequence
  Description of Artificial Sequence: Synthetic oligonucleotide
agagcuuccuugguccaca

SEQ ID NO: 1582336 - RNA, 19 nt, Artificial Sequence
  Description of Artificial Sequence: Synthetic oligonucleotide
aagugccaacagagucucc

SEQ ID NO: 1582337 - RNA, 19 nt, Artificial Sequence
  Description of Artificial Sequence: Synthetic oligonucleotide
cacuacucgccugacagga

SEQ ID NO: 1582338 - RNA, 19 nt, Artificial Sequence
  Description of Artificial Sequence: Synthetic oligonucleotide
cuaaacaguaucugcguuu

SEQ ID NO: 1582339 - RNA, 19 nt, Artificial Sequence
  Description of Artificial Sequence: Synthetic oligonucleotide
cucaccauggaccuacagu

SEQ ID NO: 1582340 - RNA, 19 nt, Artificial Sequence
  Description of Artificial Sequence: Synthetic oligonucleotide
cugcgcgucguccuccagc

SEQ ID NO: 1582341 - RNA, 19 nt, Artificial Sequence
  Description of Artificial Sequence: Synthetic oligonucleotide
gaacagucugcgucuccuc

SEQ ID NO: 1582342 - RNA, 19 nt, Artificial Sequence
  Description of Artificial Sequence: Synthetic oligonucleotide
gcuaaggcacagcauggac

SEQ ID NO: 1582343 - RNA, 19 nt, Artificial Sequence
  Description of Artificial Sequence: Synthetic oligonucleotide
caggaagcggcacucaaua

SEQ ID NO: 1582344 - RNA, 19 nt, Artificial Sequence
  Description of Artificial Sequence: Synthetic oligonucleotide
gaagcucuccguccagaaa

SEQ ID NO: 1582345 - RNA, 19 nt, Artificial Sequence
  Description of Artificial Sequence: Synthetic oligonucleotide
caccauggaccuacaguuc

SEQ ID NO: 1582346 - RNA, 19 nt, Artificial Sequence
  Description of Artificial Sequence: Synthetic oligonucleotide
aggcuugaggugugaggug

SEQ ID NO: 1582347 - RNA, 19 nt, Artificial Sequence
  Description of Artificial Sequence: Synthetic oligonucleotide
uccgucugcagagcuuggc

SEQ ID NO: 1582348 - RNA, 19 nt, Artificial Sequence
  Description of Artificial Sequence: Synthetic oligonucleotide
gcuugugggagucucuguc

SEQ ID NO: 1582349 - RNA, 19 nt, Artificial Sequence
  Description of Artificial Sequence: Synthetic oligonucleotide
cuguuugacuguuuaucua

SEQ ID NO: 1582350 - RNA, 19 nt, Artificial Sequence
  Description of Artificial Sequence: Synthetic oligonucleotide
uuuaucugauaggccucaa

SEQ ID NO: 1582351 - RNA, 19 nt, Artificial Sequence
  Description of Artificial Sequence: Synthetic oligonucleotide
caaagccuccgucugcaga

SEQ ID NO: 1582352 - RNA, 19 nt, Artificial Sequence
  Description of Artificial Sequence: Synthetic oligonucleotide
aggaagcggcacucaauaa

SEQ ID NO: 1582353 - RNA, 19 nt, Artificial Sequence
  Description of Artificial Sequence: Synthetic oligonucleotide
cacgacagaagggagccca

SEQ ID NO: 1582354 - RNA, 19 nt, Artificial Sequence
  Description of Artificial Sequence: Synthetic oligonucleotide
aggcgucugaguccuggca

SEQ ID NO: 1582355 - RNA, 19 nt, Artificial Sequence
  Description of Artificial Sequence: Synthetic oligonucleotide
cggcacucaauaaaucugc

SEQ ID NO: 1582356 - RNA, 19 nt, Artificial Sequence
  Description of Artificial Sequence: Synthetic oligonucleotide
agccuccguagcucacugg

SEQ ID NO: 1582357 - RNA, 19 nt, Artificial Sequence
  Description of Artificial Sequence: Synthetic oligonucleotide
cacuguaauccuggguaug

SEQ ID NO: 1582358 - RNA, 19 nt, Artificial Sequence
  Description of Artificial Sequence: Synthetic oligonucleotide
aaaccgucaugaggcuuga

SEQ ID NO: 1582359 - RNA, 19 nt, Artificial Sequence
  Description of Artificial Sequence: Synthetic oligonucleotide
cuugcaggaagaacagccu

SEQ ID NO: 1582360 - RNA, 19 nt, Artificial Sequence
  Description of Artificial Sequence: Synthetic oligonucleotide
agcuaaggcacagcaugga

SEQ ID NO: 1582361 - RNA, 19 nt, Artificial Sequence
  Description of Artificial Sequence: Synthetic oligonucleotide
cucgccugacaggaagcgg

SEQ ID NO: 1582362 - RNA, 19 nt, Artificial Sequence
  Description of Artificial Sequence: Synthetic oligonucleotide
ggcgucugaguccuggcac

SEQ ID NO: 1582363 - RNA, 19 nt, Artificial Sequence
  Description of Artificial Sequence: Synthetic oligonucleotide
uaucuaguuuggucuucuu

SEQ ID NO: 1582364 - RNA, 19 nt, Artificial Sequence
  Description of Artificial Sequence: Synthetic oligonucleotide
guauggugacaccaacugu

SEQ ID NO: 1582365 - RNA, 19 nt, Artificial Sequence
  Description of Artificial Sequence: Synthetic oligonucleotide
ugcgccgaggcacgacaga

SEQ ID NO: 1582366 - RNA, 19 nt, Artificial Sequence
  Description of Artificial Sequence: Synthetic oligonucleotide
auccuggacuccaaagccu

SEQ ID NO: 1582367 - RNA, 19 nt, Artificial Sequence
  Description of Artificial Sequence: Synthetic oligonucleotide
caacagagucuccaaggaa

SEQ ID NO: 1582368 - RNA, 19 nt, Artificial Sequence
  Description of Artificial Sequence: Synthetic oligonucleotide
uggcacgaacagagcuucc

SEQ ID NO: 1582369 - RNA, 19 nt, Artificial Sequence
  Description of Artificial Sequence: Synthetic oligonucleotide
gacgagcuuuccgagcauc

SEQ ID NO: 1582370 - RNA, 19 nt, Artificial Sequence
  Description of Artificial Sequence: Synthetic oligonucleotide
ugaggguggccuggcacga

SEQ ID NO: 1582371 - RNA, 19 nt, Artificial Sequence
  Description of Artificial Sequence: Synthetic oligonucleotide
gcggcacucaauaaaucug

SEQ ID NO: 1582372 - RNA, 19 nt, Artificial Sequence
  Description of Artificial Sequence: Synthetic oligonucleotide
caaugucaucucuuuguua

SEQ ID NO: 1582373 - RNA, 19 nt, Artificial Sequence
  Description of Artificial Sequence: Synthetic oligonucleotide
auggaccuacaguucuaaa

SEQ ID NO: 1582374 - RNA, 19 nt, Artificial Sequence
  Description of Artificial Sequence: Synthetic oligonucleotide
augcacuacucgccugaca

SEQ ID NO: 1582375 - RNA, 19 nt, Artificial Sequence
  Description of Artificial Sequence: Synthetic oligonucleotide
gaccaugcacuacucgccu

SEQ ID NO: 1582376 - RNA, 19 nt, Artificial Sequence
  Description of Artificial Sequence: Synthetic oligonucleotide
uggugcggagccagccgug

SEQ ID NO: 1582377 - RNA, 19 nt, Artificial Sequence
  Description of Artificial Sequence: Synthetic oligonucleotide
uacucaccauggaccuaca

SEQ ID NO: 1582378 - RNA, 19 nt, Artificial Sequence
  Description of Artificial Sequence: Synthetic oligonucleotide
caggcgucugaguccuggc

SEQ ID NO: 1582379 - RNA, 19 nt, Artificial Sequence
  Description of Artificial Sequence: Synthetic oligonucleotide
gagcccauggcagcuguga

SEQ ID NO: 1582380 - RNA, 19 nt, Artificial Sequence
  Description of Artificial Sequence: Synthetic oligonucleotide
ccauuggcccagauccugg

SEQ ID NO: 1582381 - RNA, 19 nt, Artificial Sequence
  Description of Artificial Sequence: Synthetic oligonucleotide
gcacuacucgccugacagg

SEQ ID NO: 1582382 - RNA, 19 nt, Artificial Sequence
  Description of Artificial Sequence: Synthetic oligonucleotide
gcuggugcggagccagccg

SEQ ID NO: 1582383 - RNA, 19 nt, Artificial Sequence
  Description of Artificial Sequence: Synthetic oligonucleotide
cagggcacccaagccauug

SEQ ID NO: 1582384 - RNA, 19 nt, Artificial Sequence
  Description of Artificial Sequence: Synthetic oligonucleotide
gcgaagcgcgacucgcucg

SEQ ID NO: 1582385 - RNA, 19 nt, Artificial Sequence
  Description of Artificial Sequence: Synthetic oligonucleotide
gcugguacaaaagguuuuc

SEQ ID NO: 1582386 - RNA, 19 nt, Artificial Sequence
  Description of Artificial Sequence: Synthetic oligonucleotide
cacuuucacacggcgcaug

SEQ ID NO: 1582387 - RNA, 19 nt, Artificial Sequence
  Description of Artificial Sequence: Synthetic oligonucleotide
agaaaccgucaugaggcuu

SEQ ID NO: 1582388 - RNA, 19 nt, Artificial Sequence
  Description of Artificial Sequence: Synthetic oligonucleotide
gacucgcucgcggcgcccg

SEQ ID NO: 1582389 - RNA, 19 nt, Artificial Sequence
  Description of Artificial Sequence: Synthetic oligonucleotide
gaagccuggcuggugcgga

SEQ ID NO: 1582390 - RNA, 19 nt, Artificial Sequence
  Description of Artificial Sequence: Synthetic oligonucleotide
ggcaucuagaggaagcucu

SEQ ID NO: 1582391 - RNA, 19 nt, Artificial Sequence
  Description of Artificial Sequence: Synthetic oligonucleotide
gcgcaugugugccagcuuc

SEQ ID NO: 1582392 - RNA, 19 nt, Artificial Sequence
  Description of Artificial Sequence: Synthetic oligonucleotide
agccuccgucugcagagcu

SEQ ID NO: 1582393 - RNA, 19 nt, Artificial Sequence
  Description of Artificial Sequence: Synthetic oligonucleotide
cuuucacacggcgcaugug

SEQ ID NO: 1582394 - RNA, 19 nt, Artificial Sequence
  Description of Artificial Sequence: Synthetic oligonucleotide
gcgggcacuguaauccugg

SEQ ID NO: 1582395 - RNA, 19 nt, Artificial Sequence
  Description of Artificial Sequence: Synthetic oligonucleotide
augucgccgagcugcgcgu

SEQ ID NO: 1582396 - RNA, 19 nt, Artificial Sequence
  Description of Artificial Sequence: Synthetic oligonucleotide
acggcgcaugugugccagc

SEQ ID NO: 1582397 - RNA, 19 nt, Artificial Sequence
  Description of Artificial Sequence: Synthetic oligonucleotide
cuagccaaugucaucucuu

SEQ ID NO: 1582398 - RNA, 19 nt, Artificial Sequence
  Description of Artificial Sequence: Synthetic oligonucleotide
cuccgucugcagagcuugg

SEQ ID NO: 1582399 - RNA, 19 nt, Artificial Sequence
  Description of Artificial Sequence: Synthetic oligonucleotide
agauucccugaauggucuu

SEQ ID NO: 1582400 - RNA, 19 nt, Artificial Sequence
  Description of Artificial Sequence: Synthetic oligonucleotide
gccuccguagcucacugga

SEQ ID NO: 1582401 - RNA, 19 nt, Artificial Sequence
  Description of Artificial Sequence: Synthetic oligonucleotide
ggcuugaggugugagguga

SEQ ID NO: 1582402 - RNA, 19 nt, Artificial Sequence
  Description of Artificial Sequence: Synthetic oligonucleotide
aggaagcucuccguccaga

SEQ ID NO: 1582403 - RNA, 19 nt, Artificial Sequence
  Description of Artificial Sequence: Synthetic oligonucleotide
gcaugugugccagcuuccg

SEQ ID NO: 1582404 - RNA, 19 nt, Artificial Sequence
  Description of Artificial Sequence: Synthetic oligonucleotide
cacggcgcaugugugccag

SEQ ID NO: 1582405 - RNA, 19 nt, Artificial Sequence
  Description of Artificial Sequence: Synthetic oligonucleotide
uggcacacugcaggcgucu

SEQ ID NO: 1582406 - RNA, 19 nt, Artificial Sequence
  Description of Artificial Sequence: Synthetic oligonucleotide
acaggaagcggcacucaau

SEQ ID NO: 1582407 - RNA, 19 nt, Artificial Sequence
  Description of Artificial Sequence: Synthetic oligonucleotide
gcgucugaguccuggcacc

SEQ ID NO: 1582408 - RNA, 19 nt, Artificial Sequence
  Description of Artificial Sequence: Synthetic oligonucleotide
augaaggcaucuagaggaa

SEQ ID NO: 1582409 - RNA, 19 nt, Artificial Sequence
  Description of Artificial Sequence: Synthetic oligonucleotide
gaagcgcgacucgcucgcg

SEQ ID NO: 1582410 - RNA, 19 nt, Artificial Sequence
  Description of Artificial Sequence: Synthetic oligonucleotide
ugccccgcaccaugucgcc

SEQ ID NO: 1582411 - RNA, 19 nt, Artificial Sequence
  Description of Artificial Sequence: Synthetic oligonucleotide
uggaugcgaccaugcacua

SEQ ID NO: 1582412 - RNA, 19 nt, Artificial Sequence
  Description of Artificial Sequence: Synthetic oligonucleotide
cagccuccguagcucacug

SEQ ID NO: 1582413 - RNA, 19 nt, Artificial Sequence
  Description of Artificial Sequence: Synthetic oligonucleotide
gcaggcgucugaguccugg

SEQ ID NO: 1582414 - RNA, 19 nt, Artificial Sequence
  Description of Artificial Sequence: Synthetic oligonucleotide
gggcacccaagccauuggc

SEQ ID NO: 1582415 - RNA, 19 nt, Artificial Sequence
  Description of Artificial Sequence: Synthetic oligonucleotide
cuggaggaugaagccuggc

SEQ ID NO: 1582416 - RNA, 19 nt, Artificial Sequence
  Description of Artificial Sequence: Synthetic oligonucleotide
uuaauggcucgggcacccu

SEQ ID NO: 1582417 - RNA, 19 nt, Artificial Sequence
  Description of Artificial Sequence: Synthetic oligonucleotide
ccgguugcuagccaauguc

SEQ ID NO: 1582418 - RNA, 19 nt, Artificial Sequence
  Description of Artificial Sequence: Synthetic oligonucleotide
aaccgucaugaggcuugag

SEQ ID NO: 1582419 - RNA, 19 nt, Artificial Sequence
  Description of Artificial Sequence: Synthetic oligonucleotide
caugcacuacucgccugac

SEQ ID NO: 1582420 - RNA, 19 nt, Artificial Sequence
  Description of Artificial Sequence: Synthetic oligonucleotide
cauggaccuacaguucuaa

SEQ ID NO: 1582421 - RNA, 19 nt, Artificial Sequence
  Description of Artificial Sequence: Synthetic oligonucleotide
cuccgguugcuagccaaug

SEQ ID NO: 1582422 - RNA, 19 nt, Artificial Sequence
  Description of Artificial Sequence: Synthetic oligonucleotide
augcgaccaugcacuacuc

SEQ ID NO: 1582423 - RNA, 19 nt, Artificial Sequence
  Description of Artificial Sequence: Synthetic oligonucleotide
gagugucuugcaggaagaa

SEQ ID NO: 1582424 - RNA, 19 nt, Artificial Sequence
  Description of Artificial Sequence: Synthetic oligonucleotide
uugcucugguagacaucaa

SEQ ID NO: 1582425 - RNA, 19 nt, Artificial Sequence
  Description of Artificial Sequence: Synthetic oligonucleotide
agcucuccguccagaaacu

SEQ ID NO: 1582426 - RNA, 19 nt, Artificial Sequence
  Description of Artificial Sequence: Synthetic oligonucleotide
acgacagaagggagcccag

SEQ ID NO: 1582427 - RNA, 19 nt, Artificial Sequence
  Description of Artificial Sequence: Synthetic oligonucleotide
ggcagcugugaacggggug

SEQ ID NO: 1582428 - RNA, 19 nt, Artificial Sequence
  Description of Artificial Sequence: Synthetic oligonucleotide
gguccacaaaacucgcucu

SEQ ID NO: 1582429 - RNA, 19 nt, Artificial Sequence
  Description of Artificial Sequence: Synthetic oligonucleotide
uggcggguauggugacacc

SEQ ID NO: 1582430 - RNA, 19 nt, Artificial Sequence
  Description of Artificial Sequence: Synthetic oligonucleotide
cacaaaacucgcucucuau

SEQ ID NO: 1582431 - RNA, 19 nt, Artificial Sequence
  Description of Artificial Sequence: Synthetic oligonucleotide
ccagcucuaaacaguaucu

SEQ ID NO: 1582432 - RNA, 19 nt, Artificial Sequence
  Description of Artificial Sequence: Synthetic oligonucleotide
cagagcuuccuugguccac

SEQ ID NO: 1582433 - RNA, 19 nt, Artificial Sequence
  Description of Artificial Sequence: Synthetic oligonucleotide
agacgagcuuuccgagcau

SEQ ID NO: 1582434 - RNA, 19 nt, Artificial Sequence
  Description of Artificial Sequence: Synthetic oligonucleotide
ggaagcucuccguccagaa

SEQ ID NO: 1582435 - RNA, 19 nt, Artificial Sequence
  Description of Artificial Sequence: Synthetic oligonucleotide
ggugcggagccagccgugg

SEQ ID NO: 1582436 - RNA, 19 nt, Artificial Sequence
  Description of Artificial Sequence: Synthetic oligonucleotide
uuccucaaucuuggccccu

SEQ ID NO: 1582437 - RNA, 19 nt, Artificial Sequence
  Description of Artificial Sequence: Synthetic oligonucleotide
ggcggguauggugacacca

SEQ ID NO: 1582438 - RNA, 19 nt, Artificial Sequence
  Description of Artificial Sequence: Synthetic oligonucleotide
agagagugucuugcaggaa

SEQ ID NO: 1582439 - RNA, 19 nt, Artificial Sequence
  Description of Artificial Sequence: Synthetic oligonucleotide
ggacuccaaagccuccguc

SEQ ID NO: 1582440 - RNA, 19 nt, Artificial Sequence
  Description of Artificial Sequence: Synthetic oligonucleotide
gcaucagcgacagccccgc

SEQ ID NO: 1582441 - RNA, 19 nt, Artificial Sequence
  Description of Artificial Sequence: Synthetic oligonucleotide
agcuuccuugguccacaaa

SEQ ID NO: 1582442 - RNA, 19 nt, Artificial Sequence
  Description of Artificial Sequence: Synthetic oligonucleotide
gccauuggcccagauccug

SEQ ID NO: 1582443 - RNA, 19 nt, Artificial Sequence
  Description of Artificial Sequence: Synthetic oligonucleotide
ggcacucaauaaaucugca

SEQ ID NO: 1582444 - RNA, 19 nt, Artificial Sequence
  Description of Artificial Sequence: Synthetic oligonucleotide
acacggcgcaugugugcca

SEQ ID NO: 1582445 - RNA, 19 nt, Artificial Sequence
  Description of Artificial Sequence: Synthetic oligonucleotide
gguggcuauguguccugca

SEQ ID NO: 1582446 - RNA, 19 nt, Artificial Sequence
  Description of Artificial Sequence: Synthetic oligonucleotide
caacugugcagagaauccu

SEQ ID NO: 1582447 - RNA, 19 nt, Artificial Sequence
  Description of Artificial Sequence: Synthetic oligonucleotide
ccuccgucugcagagcuug

SEQ ID NO: 1582448 - RNA, 19 nt, Artificial Sequence
  Description of Artificial Sequence: Synthetic oligonucleotide
ggcuggcacacugcaggcg

SEQ ID NO: 1582449 - RNA, 19 nt, Artificial Sequence
  Description of Artificial Sequence: Synthetic oligonucleotide
ccaaggaagcacuguuuga

SEQ ID NO: 1582450 - RNA, 19 nt, Artificial Sequence
  Description of Artificial Sequence: Synthetic oligonucleotide
agcugcgcgucguccucca

SEQ ID NO: 1582451 - RNA, 19 nt, Artificial Sequence
  Description of Artificial Sequence: Synthetic oligonucleotide
ccuccguagcucacuggag

SEQ ID NO: 1582452 - RNA, 19 nt, Artificial Sequence
  Description of Artificial Sequence: Synthetic oligonucleotide
augcgccgaggcacgacag

SEQ ID NO: 1582453 - RNA, 19 nt, Artificial Sequence
  Description of Artificial Sequence: Synthetic oligonucleotide
ccgucaugaggcuugaggu

SEQ ID NO: 1582454 - RNA, 19 nt, Artificial Sequence
  Description of Artificial Sequence: Synthetic oligonucleotide
caucagcgacagccccgcg

SEQ ID NO: 1582455 - RNA, 19 nt, Artificial Sequence
  Description of Artificial Sequence: Synthetic oligonucleotide
cuuggccccuucugcuuga

SEQ ID NO: 1582456 - RNA, 19 nt, Artificial Sequence
  Description of Artificial Sequence: Synthetic oligonucleotide
ugccccggcuugugggagu

SEQ ID NO: 1582457 - RNA, 19 nt, Artificial Sequence
  Description of Artificial Sequence: Synthetic oligonucleotide
cagcauggacacugaugga

SEQ ID NO: 1582458 - RNA, 19 nt, Artificial Sequence
  Description of Artificial Sequence: Synthetic oligonucleotide
cagcuuccgcuugcucugg

SEQ ID NO: 1582459 - RNA, 19 nt, Artificial Sequence
  Description of Artificial Sequence: Synthetic oligonucleotide
gagcuuccuugguccacaa

SEQ ID NO: 1582460 - RNA, 19 nt, Artificial Sequence
  Description of Artificial Sequence: Synthetic oligonucleotide
cgaagcgcgacucgcucgc

SEQ ID NO: 1582461 - RNA, 19 nt, Artificial Sequence
  Description of Artificial Sequence: Synthetic oligonucleotide
ggucucuggggcagggcug

SEQ ID NO: 1582462 - RNA, 19 nt, Artificial Sequence
  Description of Artificial Sequence: Synthetic oligonucleotide
gcacucaauaaaucugcau

SEQ ID NO: 1582463 - RNA, 19 nt, Artificial Sequence
  Description of Artificial Sequence: Synthetic oligonucleotide
cucugucccuucagcacua

SEQ ID NO: 1582464 - RNA, 19 nt, Artificial Sequence
  Description of Artificial Sequence: Synthetic oligonucleotide
gccuggcacgaacagagcu

SEQ ID NO: 1582465 - RNA, 19 nt, Artificial Sequence
  Description of Artificial Sequence: Synthetic oligonucleotide
cugugaacgggguggcuau

SEQ ID NO: 1582466 - RNA, 19 nt, Artificial Sequence
  Description of Artificial Sequence: Synthetic oligonucleotide
ucgggcacccuggguggca

SEQ ID NO: 1582467 - RNA, 19 nt, Artificial Sequence
  Description of Artificial Sequence: Synthetic oligonucleotide
gcuagccaaugucaucucu

SEQ ID NO: 1582468 - RNA, 19 nt, Artificial Sequence
  Description of Artificial Sequence: Synthetic oligonucleotide
acuacucgccugacaggaa

SEQ ID NO: 1582469 - RNA, 19 nt, Artificial Sequence
  Description of Artificial Sequence: Synthetic oligonucleotide
cagaaaccgucaugaggcu

SEQ ID NO: 1582470 - RNA, 19 nt, Artificial Sequence
  Description of Artificial Sequence: Synthetic oligonucleotide
cgaggcacgacagaaggga

SEQ ID NO: 1582471 - RNA, 19 nt, Artificial Sequence
  Description of Artificial Sequence: Synthetic oligonucleotide
gugugaggugaggguggcc

SEQ ID NO: 1582472 - RNA, 19 nt, Artificial Sequence
  Description of Artificial Sequence: Synthetic oligonucleotide
gagaggggaggcccacccu

SEQ ID NO: 1582473 - RNA, 19 nt, Artificial Sequence
  Description of Artificial Sequence: Synthetic oligonucleotide
ugcaggcgucugaguccug

SEQ ID NO: 1582474 - RNA, 19 nt, Artificial Sequence
  Description of Artificial Sequence: Synthetic oligonucleotide
ggugccccggcuuguggga

SEQ ID NO: 1582475 - RNA, 19 nt, Artificial Sequence
  Description of Artificial Sequence: Synthetic oligonucleotide
gcugugaacgggguggcua

SEQ ID NO: 1582476 - RNA, 19 nt, Artificial Sequence
  Description of Artificial Sequence: Synthetic oligonucleotide
gugccccggcuugugggag

SEQ ID NO: 1582477 - RNA, 19 nt, Artificial Sequence
  Description of Artificial Sequence: Synthetic oligonucleotide
cgguugcuagccaauguca

SEQ ID NO: 1582478 - RNA, 19 nt, Artificial Sequence
  Description of Artificial Sequence: Synthetic oligonucleotide
gcgggcagagagugucuug

SEQ ID NO: 1582479 - RNA, 19 nt, Artificial Sequence
  Description of Artificial Sequence: Synthetic oligonucleotide
agcugugaacgggguggcu

SEQ ID NO: 1582480 - RNA, 19 nt, Artificial Sequence
  Description of Artificial Sequence: Synthetic oligonucleotide
ggaugcgaccaugcacuac

SEQ ID NO: 1582481 - RNA, 19 nt, Artificial Sequence
  Description of Artificial Sequence: Synthetic oligonucleotide
cuggugcggagccagccgu

SEQ ID NO: 1582482 - RNA, 19 nt, Artificial Sequence
  Description of Artificial Sequence: Synthetic oligonucleotide
aggcuccgguugcuagcca

SEQ ID NO: 1582483 - RNA, 19 nt, Artificial Sequence
  Description of Artificial Sequence: Synthetic oligonucleotide
ggcacccuggguggcacug

SEQ ID NO: 1582484 - RNA, 19 nt, Artificial Sequence
  Description of Artificial Sequence: Synthetic oligonucleotide
ccaaagccuccgucugcag

SEQ ID NO: 1582485 - RNA, 19 nt, Artificial Sequence
  Description of Artificial Sequence: Synthetic oligonucleotide
gguugcuagccaaugucau

SEQ ID NO: 1582486 - RNA, 19 nt, Artificial Sequence
  Description of Artificial Sequence: Synthetic oligonucleotide
cagcgacagccccgcgaag

SEQ ID NO: 1582487 - RNA, 19 nt, Artificial Sequence
  Description of Artificial Sequence: Synthetic oligonucleotide
gcuauguguccugcaggca

SEQ ID NO: 1582488 - RNA, 19 nt, Artificial Sequence
  Description of Artificial Sequence: Synthetic oligonucleotide
cucgggcacccuggguggc

SEQ ID NO: 1582489 - RNA, 19 nt, Artificial Sequence
  Description of Artificial Sequence: Synthetic oligonucleotide
ggguauggugacaccaacu

SEQ ID NO: 1582490 - RNA, 19 nt, Artificial Sequence
  Description of Artificial Sequence: Synthetic oligonucleotide
ggguggcuauguguccugc

SEQ ID NO: 1582491 - RNA, 19 nt, Artificial Sequence
  Description of Artificial Sequence: Synthetic oligonucleotide
cgcucucuauuacucacca

SEQ ID NO: 1582492 - RNA, 19 nt, Artificial Sequence
  Description of Artificial Sequence: Synthetic oligonucleotide
ccgucugcagagcuuggca

SEQ ID NO: 1582493 - RNA, 19 nt, Artificial Sequence
  Description of Artificial Sequence: Synthetic oligonucleotide
cccgcgaagcgcgacucgc

SEQ ID NO: 1582494 - RNA, 19 nt, Artificial Sequence
  Description of Artificial Sequence: Synthetic oligonucleotide
ggcacgaacagagcuuccu

SEQ ID NO: 1582495 - RNA, 19 nt, Artificial Sequence
  Description of Artificial Sequence: Synthetic oligonucleotide
cggguauggugacaccaac

SEQ ID NO: 1582496 - RNA, 19 nt, Artificial Sequence
  Description of Artificial Sequence: Synthetic oligonucleotide
gugcggagccagccgugga

SEQ ID NO: 1582497 - RNA, 19 nt, Artificial Sequence
  Description of Artificial Sequence: Synthetic oligonucleotide
gcacuguaauccuggguau

SEQ ID NO: 1582498 - RNA, 19 nt, Artificial Sequence
  Description of Artificial Sequence: Synthetic oligonucleotide
ggguauggagaagccuguc

SEQ ID NO: 1582499 - RNA, 19 nt, Artificial Sequence
  Description of Artificial Sequence: Synthetic oligonucleotide
gcugaacagucugcgucuc

SEQ ID NO: 1582500 - RNA, 19 nt, Artificial Sequence
  Description of Artificial Sequence: Synthetic oligonucleotide
ggcgggcacuguaauccug

SEQ ID NO: 1582501 - RNA, 19 nt, Artificial Sequence
  Description of Artificial Sequence: Synthetic oligonucleotide
uuggccccuucugcuugaa

SEQ ID NO: 1582502 - RNA, 19 nt, Artificial Sequence
  Description of Artificial Sequence: Synthetic oligonucleotide
cugcaggcgucugaguccu

SEQ ID NO: 1582503 - RNA, 19 nt, Artificial Sequence
  Description of Artificial Sequence: Synthetic oligonucleotide
gcaccaugucgccgagcug

SEQ ID NO: 1582504 - RNA, 19 nt, Artificial Sequence
  Description of Artificial Sequence: Synthetic oligonucleotide
ccacaaaacucgcucucua

SEQ ID NO: 1582505 - RNA, 19 nt, Artificial Sequence
  Description of Artificial Sequence: Synthetic oligonucleotide
gggcacuguaauccugggu

SEQ ID NO: 1582506 - RNA, 19 nt, Artificial Sequence
  Description of Artificial Sequence: Synthetic oligonucleotide
cguggagcugcaucagcga

SEQ ID NO: 1582507 - RNA, 19 nt, Artificial Sequence
  Description of Artificial Sequence: Synthetic oligonucleotide
gugggagucucugucccuu

SEQ ID NO: 1582508 - RNA, 19 nt, Artificial Sequence
  Description of Artificial Sequence: Synthetic oligonucleotide
gcggguauggugacaccaa

SEQ ID NO: 1582509 - RNA, 19 nt, Artificial Sequence
  Description of Artificial Sequence: Synthetic oligonucleotide
ccagauccuggacuccaaa

SEQ ID NO: 1582510 - RNA, 19 nt, Artificial Sequence
  Description of Artificial Sequence: Synthetic oligonucleotide
ggccuggcacgaacagagc

SEQ ID NO: 1582511 - RNA, 19 nt, Artificial Sequence
  Description of Artificial Sequence: Synthetic oligonucleotide
gcacgacagaagggagccc

SEQ ID NO: 1582512 - RNA, 19 nt, Artificial Sequence
  Description of Artificial Sequence: Synthetic oligonucleotide
ggaugcgccgaggcacgac

SEQ ID NO: 1582513 - RNA, 19 nt, Artificial Sequence
  Description of Artificial Sequence: Synthetic oligonucleotide
cacugauggaugcgaccau

SEQ ID NO: 1582514 - RNA, 19 nt, Artificial Sequence
  Description of Artificial Sequence: Synthetic oligonucleotide
gcgccgaggcacgacagaa

SEQ ID NO: 1582515 - RNA, 19 nt, Artificial Sequence
  Description of Artificial Sequence: Synthetic oligonucleotide
gcuuuccgagcauccaguu

SEQ ID NO: 1582516 - RNA, 19 nt, Artificial Sequence
  Description of Artificial Sequence: Synthetic oligonucleotide
gccccgcaccaugucgccg

SEQ ID NO: 1582517 - RNA, 19 nt, Artificial Sequence
  Description of Artificial Sequence: Synthetic oligonucleotide
gaggguggccuggcacgaa

SEQ ID NO: 1582518 - RNA, 19 nt, Artificial Sequence
  Description of Artificial Sequence: Synthetic oligonucleotide
ggcacuggugccccggcuu

SEQ ID NO: 1582519 - RNA, 19 nt, Artificial Sequence
  Description of Artificial Sequence: Synthetic oligonucleotide
cgcgaagcgcgacucgcuc

SEQ ID NO: 1582520 - RNA, 19 nt, Artificial Sequence
  Description of Artificial Sequence: Synthetic oligonucleotide
gcugcgcgucguccuccag

SEQ ID NO: 1582521 - RNA, 19 nt, Artificial Sequence
  Description of Artificial Sequence: Synthetic oligonucleotide
ccccgcgaagcgcgacucg

SEQ ID NO: 1582522 - RNA, 19 nt, Artificial Sequence
  Description of Artificial Sequence: Synthetic oligonucleotide
ccuggcacgaacagagcuu

SEQ ID NO: 1582523 - RNA, 19 nt, Artificial Sequence
  Description of Artificial Sequence: Synthetic oligonucleotide
caguuggggcugguacaaa

SEQ ID NO: 1582524 - RNA, 19 nt, Artificial Sequence
  Description of Artificial Sequence: Synthetic oligonucleotide
gcuggcggguauggugaca

SEQ ID NO: 1582525 - RNA, 19 nt, Artificial Sequence
  Description of Artificial Sequence: Synthetic oligonucleotide
gcgcgucguccuccagcag

SEQ ID NO: 1582526 - RNA, 19 nt, Artificial Sequence
  Description of Artificial Sequence: Synthetic oligonucleotide
cgagcuuuccgagcaucca

SEQ ID NO: 1582527 - RNA, 19 nt, Artificial Sequence
  Description of Artificial Sequence: Synthetic oligonucleotide
cgcgacucgcucgcggcgc

SEQ ID NO: 1582528 - RNA, 19 nt, Artificial Sequence
  Description of Artificial Sequence: Synthetic oligonucleotide
cgaacagagcuuccuuggu

SEQ ID NO: 1582529 - RNA, 19 nt, Artificial Sequence
  Description of Artificial Sequence: Synthetic oligonucleotide
cgacagccccgcgaagcgc

SEQ ID NO: 1582530 - RNA, 19 nt, Artificial Sequence
  Description of Artificial Sequence: Synthetic oligonucleotide
cacggcgggcagagagugu

SEQ ID NO: 1582531 - RNA, 19 nt, Artificial Sequence
  Description of Artificial Sequence: Synthetic oligonucleotide
gccccgcgaagcgcgacuc

SEQ ID NO: 1582532 - RNA, 19 nt, Artificial Sequence
  Description of Artificial Sequence: Synthetic oligonucleotide
gccccggcuugugggaguc

SEQ ID NO: 1582533 - RNA, 19 nt, Artificial Sequence
  Description of Artificial Sequence: Synthetic oligonucleotide
cgucugaguccuggcacca

SEQ ID NO: 1582534 - RNA, 19 nt, Artificial Sequence
  Description of Artificial Sequence: Synthetic oligonucleotide
cacuggugccccggcuugu

SEQ ID NO: 1582535 - RNA, 19 nt, Artificial Sequence
  Description of Artificial Sequence: Synthetic oligonucleotide
gcuccgguugcuagccaau

SEQ ID NO: 1582536 - RNA, 19 nt, Artificial Sequence
  Description of Artificial Sequence: Synthetic oligonucleotide
ccgcuugcucugguagaca

SEQ ID NO: 1582537 - RNA, 19 nt, Artificial Sequence
  Description of Artificial Sequence: Synthetic oligonucleotide
ggcgggcagagagugucuu

SEQ ID NO: 1582538 - RNA, 19 nt, Artificial Sequence
  Description of Artificial Sequence: Synthetic oligonucleotide
cgggcacccuggguggcac

SEQ ID NO: 1582539 - RNA, 19 nt, Artificial Sequence
  Description of Artificial Sequence: Synthetic oligonucleotide
gcucuccguccagaaacuu

SEQ ID NO: 1582540 - RNA, 19 nt, Artificial Sequence
  Description of Artificial Sequence: Synthetic oligonucleotide
ccgcgaagcgcgacucgcu

SEQ ID NO: 1582541 - RNA, 19 nt, Artificial Sequence
  Description of Artificial Sequence: Synthetic oligonucleotide
gggcacccuggguggcacu

SEQ ID NO: 1582542 - RNA, 19 nt, Artificial Sequence
  Description of Artificial Sequence: Synthetic oligonucleotide
ccguagcucacuggaggau

SEQ ID NO: 1582543 - RNA, 19 nt, Artificial Sequence
  Description of Artificial Sequence: Synthetic oligonucleotide
ccaagccauuggcccagau

SEQ ID NO: 1582544 - RNA, 19 nt, Artificial Sequence
  Description of Artificial Sequence: Synthetic oligonucleotide
gccuccgucugcagagcuu

SEQ ID NO: 1582545 - RNA, 19 nt, Artificial Sequence
  Description of Artificial Sequence: Synthetic oligonucleotide
cggcgggcagagagugucu

SEQ ID NO: 1582546 - RNA, 19 nt, Artificial Sequence
  Description of Artificial Sequence: Synthetic oligonucleotide
ccccggcuugugggagucu

SEQ ID NO: 1582547 - RNA, 19 nt, Artificial Sequence
  Description of Artificial Sequence: Synthetic oligonucleotide
aaacuuucaguccagaagc

SEQ ID NO: 1582548 - RNA, 19 nt, Artificial Sequence
  Description of Artificial Sequence: Synthetic oligonucleotide
uuaacuuaauaccugacag

SEQ ID NO: 1582549 - RNA, 19 nt, Artificial Sequence
  Description of Artificial Sequence: Synthetic oligonucleotide
aacccuuuggcuuaggcuc

SEQ ID NO: 1582550 - RNA, 19 nt, Artificial Sequence
  Description of Artificial Sequence: Synthetic oligonucleotide
uuuagauucuccaugcacc

SEQ ID NO: 1582551 - RNA, 19 nt, Artificial Sequence
  Description of Artificial Sequence: Synthetic oligonucleotide
gaucuuugcauauuuagcc

SEQ ID NO: 1582552 - RNA, 19 nt, Artificial Sequence
  Description of Artificial Sequence: Synthetic oligonucleotide
ucaacaauaaacaccgagc

SEQ ID NO: 1582553 - RNA, 19 nt, Artificial Sequence
  Description of Artificial Sequence: Synthetic oligonucleotide
aauuauuaacuuaauaccu

SEQ ID NO: 1582554 - RNA, 19 nt, Artificial Sequence
  Description of Artificial Sequence: Synthetic oligonucleotide
uucaacaauaaacaccgag

SEQ ID NO: 1582555 - RNA, 19 nt, Artificial Sequence
  Description of Artificial Sequence: Synthetic oligonucleotide
gauacucuacuuuugguag

SEQ ID NO: 1582556 - RNA, 19 nt, Artificial Sequence
  Description of Artificial Sequence: Synthetic oligonucleotide
acaaaguaugccuacauug

SEQ ID NO: 1582557 - RNA, 19 nt, Artificial Sequence
  Description of Artificial Sequence: Synthetic oligonucleotide
aauuugcuacuuuucagag

SEQ ID NO: 1582558 - RNA, 19 nt, Artificial Sequence
  Description of Artificial Sequence: Synthetic oligonucleotide
ucuguaauuguucaucaga

SEQ ID NO: 1582559 - RNA, 19 nt, Artificial Sequence
  Description of Artificial Sequence: Synthetic oligonucleotide
agcuguuucuaacaguggc

SEQ ID NO: 1582560 - RNA, 19 nt, Artificial Sequence
  Description of Artificial Sequence: Synthetic oligonucleotide
auugguacaaaguaugccu

SEQ ID NO: 1582561 - RNA, 19 nt, Artificial Sequence
  Description of Artificial Sequence: Synthetic oligonucleotide
auuaucuuguguuaaagau

SEQ ID NO: 1582562 - RNA, 19 nt, Artificial Sequence
  Description of Artificial Sequence: Synthetic oligonucleotide
uuaaagauuuugcacuggc

SEQ ID NO: 1582563 - RNA, 19 nt, Artificial Sequence
  Description of Artificial Sequence: Synthetic oligonucleotide
cuugcuaucugacuuuucg

SEQ ID NO: 1582564 - RNA, 19 nt, Artificial Sequence
  Description of Artificial Sequence: Synthetic oligonucleotide
uuauuaacuuaauaccuga

SEQ ID NO: 1582565 - RNA, 19 nt, Artificial Sequence
  Description of Artificial Sequence: Synthetic oligonucleotide
auuaacuuaauaccugaca

SEQ ID NO: 1582566 - RNA, 19 nt, Artificial Sequence
  Description of Artificial Sequence: Synthetic oligonucleotide
agaaacgaggauaaggaac

SEQ ID NO: 1582567 - RNA, 19 nt, Artificial Sequence
  Description of Artificial Sequence: Synthetic oligonucleotide
ugcaauaaacuuucagucc

SEQ ID NO: 1582568 - RNA, 19 nt, Artificial Sequence
  Description of Artificial Sequence: Synthetic oligonucleotide
uggaaugcaauaaacuuuc

SEQ ID NO: 1582569 - RNA, 19 nt, Artificial Sequence
  Description of Artificial Sequence: Synthetic oligonucleotide
uaaacaaugugcacagcug

SEQ ID NO: 1582570 - RNA, 19 nt, Artificial Sequence
  Description of Artificial Sequence: Synthetic oligonucleotide
acaauaaacaccgagcagu

SEQ ID NO: 1582571 - RNA, 19 nt, Artificial Sequence
  Description of Artificial Sequence: Synthetic oligonucleotide
ugaguugcugaacuaacug

SEQ ID NO: 1582572 - RNA, 19 nt, Artificial Sequence
  Description of Artificial Sequence: Synthetic oligonucleotide
ucuacuuuugguagcacgu

SEQ ID NO: 1582573 - RNA, 19 nt, Artificial Sequence
  Description of Artificial Sequence: Synthetic oligonucleotide
aauauuaauuugcuacuuu

SEQ ID NO: 1582574 - RNA, 19 nt, Artificial Sequence
  Description of Artificial Sequence: Synthetic oligonucleotide
aaaguaugccuacauugcu

SEQ ID NO: 1582575 - RNA, 19 nt, Artificial Sequence
  Description of Artificial Sequence: Synthetic oligonucleotide
uugguagcacguaaacugg

SEQ ID NO: 1582576 - RNA, 19 nt, Artificial Sequence
  Description of Artificial Sequence: Synthetic oligonucleotide
ugcauauuuagccaacaaa

SEQ ID NO: 1582577 - RNA, 19 nt, Artificial Sequence
  Description of Artificial Sequence: Synthetic oligonucleotide
aagauuuugcacuggcacu

SEQ ID NO: 1582578 - RNA, 19 nt, Artificial Sequence
  Description of Artificial Sequence: Synthetic oligonucleotide
gagauagggauuuauuuuc

SEQ ID NO: 1582579 - RNA, 19 nt, Artificial Sequence
  Description of Artificial Sequence: Synthetic oligonucleotide
uguaguaccaaaaguuguc

SEQ ID NO: 1582580 - RNA, 19 nt, Artificial Sequence
  Description of Artificial Sequence: Synthetic oligonucleotide
uagacuggaaauacaguca

SEQ ID NO: 1582581 - RNA, 19 nt, Artificial Sequence
  Description of Artificial Sequence: Synthetic oligonucleotide
ugcugagacauucaaauuu

SEQ ID NO: 1582582 - RNA, 19 nt, Artificial Sequence
  Description of Artificial Sequence: Synthetic oligonucleotide
uguaaaacacauguguggu

SEQ ID NO: 1582583 - RNA, 19 nt, Artificial Sequence
  Description of Artificial Sequence: Synthetic oligonucleotide
gaugaggaaggacacuaag

SEQ ID NO: 1582584 - RNA, 19 nt, Artificial Sequence
  Description of Artificial Sequence: Synthetic oligonucleotide
ugugagaaccgagagaaac

SEQ ID NO: 1582585 - RNA, 19 nt, Artificial Sequence
  Description of Artificial Sequence: Synthetic oligonucleotide
uuuggcuuaggcucauuag

SEQ ID NO: 1582586 - RNA, 19 nt, Artificial Sequence
  Description of Artificial Sequence: Synthetic oligonucleotide
uucuacagaacuugcugag

SEQ ID NO: 1582587 - RNA, 19 nt, Artificial Sequence
  Description of Artificial Sequence: Synthetic oligonucleotide
ucccugaucaucuuuauuu

SEQ ID NO: 1582588 - RNA, 19 nt, Artificial Sequence
  Description of Artificial Sequence: Synthetic oligonucleotide
aguaccaaaaguugucaca

SEQ ID NO: 1582589 - RNA, 19 nt, Artificial Sequence
  Description of Artificial Sequence: Synthetic oligonucleotide
uaaagauuuugcacuggca

SEQ ID NO: 1582590 - RNA, 19 nt, Artificial Sequence
  Description of Artificial Sequence: Synthetic oligonucleotide
gaguugcugaacuaacugc

SEQ ID NO: 1582591 - RNA, 19 nt, Artificial Sequence
  Description of Artificial Sequence: Synthetic oligonucleotide
uuaucuuguguuaaagauu

SEQ ID NO: 1582592 - RNA, 19 nt, Artificial Sequence
  Description of Artificial Sequence: Synthetic oligonucleotide
uuagauucuccaugcacca

SEQ ID NO: 1582593 - RNA, 19 nt, Artificial Sequence
  Description of Artificial Sequence: Synthetic oligonucleotide
aaacacaugugugguugcc

SEQ ID NO: 1582594 - RNA, 19 nt, Artificial Sequence
  Description of Artificial Sequence: Synthetic oligonucleotide
uuagagauuccaucagaug

SEQ ID NO: 1582595 - RNA, 19 nt, Artificial Sequence
  Description of Artificial Sequence: Synthetic oligonucleotide
ugauacucuacuuuuggua

SEQ ID NO: 1582596 - RNA, 19 nt, Artificial Sequence
  Description of Artificial Sequence: Synthetic oligonucleotide
uuagucagagcuucaacuc

SEQ ID NO: 1582597 - RNA, 19 nt, Artificial Sequence
  Description of Artificial Sequence: Synthetic oligonucleotide
aaaugggcuguaaacaaug

SEQ ID NO: 1582598 - RNA, 19 nt, Artificial Sequence
  Description of Artificial Sequence: Synthetic oligonucleotide
ucacaccacagaaugcuag

SEQ ID NO: 1582599 - RNA, 19 nt, Artificial Sequence
  Description of Artificial Sequence: Synthetic oligonucleotide
ugagcuuguaguaccaaaa

SEQ ID NO: 1582600 - RNA, 19 nt, Artificial Sequence
  Description of Artificial Sequence: Synthetic oligonucleotide
uugcuaucugacuuuucgg

SEQ ID NO: 1582601 - RNA, 19 nt, Artificial Sequence
  Description of Artificial Sequence: Synthetic oligonucleotide
acagccacguaaauggagc

SEQ ID NO: 1582602 - RNA, 19 nt, Artificial Sequence
  Description of Artificial Sequence: Synthetic oligonucleotide
agagauagggauuuauuuu

SEQ ID NO: 1582603 - RNA, 19 nt, Artificial Sequence
  Description of Artificial Sequence: Synthetic oligonucleotide
uaacuuaauaccugacagu

SEQ ID NO: 1582604 - RNA, 19 nt, Artificial Sequence
  Description of Artificial Sequence: Synthetic oligonucleotide
agagaaacgaggauaagga

SEQ ID NO: 1582605 - RNA, 19 nt, Artificial Sequence
  Description of Artificial Sequence: Synthetic oligonucleotide
uucaacggguuuucaaaag

SEQ ID NO: 1582606 - RNA, 19 nt, Artificial Sequence
  Description of Artificial Sequence: Synthetic oligonucleotide
cucuacuuuugguagcacg

SEQ ID NO: 1582607 - RNA, 19 nt, Artificial Sequence
  Description of Artificial Sequence: Synthetic oligonucleotide
cuuucaguccagaagcgac

SEQ ID NO: 1582608 - RNA, 19 nt, Artificial Sequence
  Description of Artificial Sequence: Synthetic oligonucleotide
agucaaauuauuaacuuaa

SEQ ID NO: 1582609 - RNA, 19 nt, Artificial Sequence
  Description of Artificial Sequence: Synthetic oligonucleotide
auaccugacaguuccuaag

SEQ ID NO: 1582610 - RNA, 19 nt, Artificial Sequence
  Description of Artificial Sequence: Synthetic oligonucleotide
uucuagaaucaucaguaau

SEQ ID NO: 1582611 - RNA, 19 nt, Artificial Sequence
  Description of Artificial Sequence: Synthetic oligonucleotide
auugucuacauucccuuga

SEQ ID NO: 1582612 - RNA, 19 nt, Artificial Sequence
  Description of Artificial Sequence: Synthetic oligonucleotide
aguaauguuugguguagcu

SEQ ID NO: 1582613 - RNA, 19 nt, Artificial Sequence
  Description of Artificial Sequence: Synthetic oligonucleotide
cuaaguucugcugucacug

SEQ ID NO: 1582614 - RNA, 19 nt, Artificial Sequence
  Description of Artificial Sequence: Synthetic oligonucleotide
cuuaucaccacaugauuca

SEQ ID NO: 1582615 - RNA, 19 nt, Artificial Sequence
  Description of Artificial Sequence: Synthetic oligonucleotide
acaccgagcaguuggaaug

SEQ ID NO: 1582616 - RNA, 19 nt, Artificial Sequence
  Description of Artificial Sequence: Synthetic oligonucleotide
acagagcucgcuuucuuag

SEQ ID NO: 1582617 - RNA, 19 nt, Artificial Sequence
  Description of Artificial Sequence: Synthetic oligonucleotide
aauaccugacaguuccuaa

SEQ ID NO: 1582618 - RNA, 19 nt, Artificial Sequence
  Description of Artificial Sequence: Synthetic oligonucleotide
ucauuagacuggaaauaca

SEQ ID NO: 1582619 - RNA, 19 nt, Artificial Sequence
  Description of Artificial Sequence: Synthetic oligonucleotide
agauagggauuuauuuucc

SEQ ID NO: 1582620 - RNA, 19 nt, Artificial Sequence
  Description of Artificial Sequence: Synthetic oligonucleotide
agagcucgcuuucuuaguc

SEQ ID NO: 1582621 - RNA, 19 nt, Artificial Sequence
  Description of Artificial Sequence: Synthetic oligonucleotide
aggaaggacacuaaguucu

SEQ ID NO: 1582622 - RNA, 19 nt, Artificial Sequence
  Description of Artificial Sequence: Synthetic oligonucleotide
auguuuaacccuuuggcuu

SEQ ID NO: 1582623 - RNA, 19 nt, Artificial Sequence
  Description of Artificial Sequence: Synthetic oligonucleotide
  modified_base (16)..(16): a, c, u, g, unknown or other
accacagaaugcuagnguu

SEQ ID NO: 1582624 - RNA, 19 nt, Artificial Sequence
  Description of Artificial Sequence: Synthetic oligonucleotide
uguuugguguagcuggaac

SEQ ID NO: 1582625 - RNA, 19 nt, Artificial Sequence
  Description of Artificial Sequence: Synthetic oligonucleotide
aggagaaucaucccaacuu

SEQ ID NO: 1582626 - RNA, 19 nt, Artificial Sequence
  Description of Artificial Sequence: Synthetic oligonucleotide
ggcauaagcuucuagaauc

SEQ ID NO: 1582627 - RNA, 19 nt, Artificial Sequence
  Description of Artificial Sequence: Synthetic oligonucleotide
aaauauuaauuugcuacuu

SEQ ID NO: 1582628 - RNA, 19 nt, Artificial Sequence
  Description of Artificial Sequence: Synthetic oligonucleotide
ugguagguuuccaaggcac

SEQ ID NO: 1582629 - RNA, 19 nt, Artificial Sequence
  Description of Artificial Sequence: Synthetic oligonucleotide
cuauuucugaugagguagc

SEQ ID NO: 1582630 - RNA, 19 nt, Artificial Sequence
  Description of Artificial Sequence: Synthetic oligonucleotide
ugucacaccacagaaugcu

SEQ ID NO: 1582631 - RNA, 19 nt, Artificial Sequence
  Description of Artificial Sequence: Synthetic oligonucleotide
uuuugagcuuguaguacca

SEQ ID NO: 1582632 - RNA, 19 nt, Artificial Sequence
  Description of Artificial Sequence: Synthetic oligonucleotide
uggcuuaggcucauuagac

SEQ ID NO: 1582633 - RNA, 19 nt, Artificial Sequence
  Description of Artificial Sequence: Synthetic oligonucleotide
acggguuuucaaaagcagc

SEQ ID NO: 1582634 - RNA, 19 nt, Artificial Sequence
  Description of Artificial Sequence: Synthetic oligonucleotide
cuucugguguccacaauag

SEQ ID NO: 1582635 - RNA, 19 nt, Artificial Sequence
  Description of Artificial Sequence: Synthetic oligonucleotide
uuucaacggguuuucaaaa

SEQ ID NO: 1582636 - RNA, 19 nt, Artificial Sequence
  Description of Artificial Sequence: Synthetic oligonucleotide
auuuugcacucuucaggac

SEQ ID NO: 1582637 - RNA, 19 nt, Artificial Sequence
  Description of Artificial Sequence: Synthetic oligonucleotide
ucuuagucagagcuucaac

SEQ ID NO: 1582638 - RNA, 19 nt, Artificial Sequence
  Description of Artificial Sequence: Synthetic oligonucleotide
guguuaaagauuuugcacu

SEQ ID NO: 1582639 - RNA, 19 nt, Artificial Sequence
  Description of Artificial Sequence: Synthetic oligonucleotide
uaacccuuuggcuuaggcu

SEQ ID NO: 1582640 - RNA, 19 nt, Artificial Sequence
  Description of Artificial Sequence: Synthetic oligonucleotide
accugugauuguuagaaaa

SEQ ID NO: 1582641 - RNA, 19 nt, Artificial Sequence
  Description of Artificial Sequence: Synthetic oligonucleotide
uaccugacaguuccuaaga

SEQ ID NO: 1582642 - RNA, 19 nt, Artificial Sequence
  Description of Artificial Sequence: Synthetic oligonucleotide
cauugguacaaaguaugcc

SEQ ID NO: 1582643 - RNA, 19 nt, Artificial Sequence
  Description of Artificial Sequence: Synthetic oligonucleotide
uagcacguaaacuggaaau

SEQ ID NO: 1582644 - RNA, 19 nt, Artificial Sequence
  Description of Artificial Sequence: Synthetic oligonucleotide
uguuuaacccuuuggcuua

SEQ ID NO: 1582645 - RNA, 19 nt, Artificial Sequence
  Description of Artificial Sequence: Synthetic oligonucleotide
aacaaccuugauacucuac

SEQ ID NO: 1582646 - RNA, 19 nt, Artificial Sequence
  Description of Artificial Sequence: Synthetic oligonucleotide
guaaacaaugugcacagcu

SEQ ID NO: 1582647 - RNA, 19 nt, Artificial Sequence
  Description of Artificial Sequence: Synthetic oligonucleotide
guaccaaaaguugucacac

SEQ ID NO: 1582648 - RNA, 19 nt, Artificial Sequence
  Description of Artificial Sequence: Synthetic oligonucleotide
caguuggaaugcaauaaac

SEQ ID NO: 1582649 - RNA, 19 nt, Artificial Sequence
  Description of Artificial Sequence: Synthetic oligonucleotide
uuugcacuggcacuucgaa

SEQ ID NO: 1582650 - RNA, 19 nt, Artificial Sequence
  Description of Artificial Sequence: Synthetic oligonucleotide
agacuggaaauacagucaa

SEQ ID NO: 1582651 - RNA, 19 nt, Artificial Sequence
  Description of Artificial Sequence: Synthetic oligonucleotide
uccuaccugugauuguuag

SEQ ID NO: 1582652 - RNA, 19 nt, Artificial Sequence
  Description of Artificial Sequence: Synthetic oligonucleotide
guuuuccuaccugugauug

SEQ ID NO: 1582653 - RNA, 19 nt, Artificial Sequence
  Description of Artificial Sequence: Synthetic oligonucleotide
cacuucgaaccuuaucacc

SEQ ID NO: 1582654 - RNA, 19 nt, Artificial Sequence
  Description of Artificial Sequence: Synthetic oligonucleotide
uuucuaacaguggcaaugu

SEQ ID NO: 1582655 - RNA, 19 nt, Artificial Sequence
  Description of Artificial Sequence: Synthetic oligonucleotide
aaccuuaucaccacaugau

SEQ ID NO: 1582656 - RNA, 19 nt, Artificial Sequence
  Description of Artificial Sequence: Synthetic oligonucleotide
uaaacaccgagcaguugga

SEQ ID NO: 1582657 - RNA, 19 nt, Artificial Sequence
  Description of Artificial Sequence: Synthetic oligonucleotide
gaggaaggacacuaaguuc

SEQ ID NO: 1582658 - RNA, 19 nt, Artificial Sequence
  Description of Artificial Sequence: Synthetic oligonucleotide
acaugugugguugccuagc

SEQ ID NO: 1582659 - RNA, 19 nt, Artificial Sequence
  Description of Artificial Sequence: Synthetic oligonucleotide
caauaaacuuucaguccag

SEQ ID NO: 1582660 - RNA, 19 nt, Artificial Sequence
  Description of Artificial Sequence: Synthetic oligonucleotide
gugagaaccgagagaaacg

SEQ ID NO: 1582661 - RNA, 19 nt, Artificial Sequence
  Description of Artificial Sequence: Synthetic oligonucleotide
aguaugccuacauugcuuu

SEQ ID NO: 1582662 - RNA, 19 nt, Artificial Sequence
  Description of Artificial Sequence: Synthetic oligonucleotide
acuucgaaccuuaucacca

SEQ ID NO: 1582663 - RNA, 19 nt, Artificial Sequence
  Description of Artificial Sequence: Synthetic oligonucleotide
ucucucugugagaaccgag

SEQ ID NO: 1582664 - RNA, 19 nt, Artificial Sequence
  Description of Artificial Sequence: Synthetic oligonucleotide
gaaacgaggauaaggaacu

SEQ ID NO: 1582665 - RNA, 19 nt, Artificial Sequence
  Description of Artificial Sequence: Synthetic oligonucleotide
acguaaacuggaaauuguc

SEQ ID NO: 1582666 - RNA, 19 nt, Artificial Sequence
  Description of Artificial Sequence: Synthetic oligonucleotide
gcuuaggcucauuagacug

SEQ ID NO: 1582667 - RNA, 19 nt, Artificial Sequence
  Description of Artificial Sequence: Synthetic oligonucleotide
acguaaauggagcauuuua

SEQ ID NO: 1582668 - RNA, 19 nt, Artificial Sequence
  Description of Artificial Sequence: Synthetic oligonucleotide
aacgaggauaaggaacucu

SEQ ID NO: 1582669 - RNA, 19 nt, Artificial Sequence
  Description of Artificial Sequence: Synthetic oligonucleotide
aacuggaaauugucuucug

SEQ ID NO: 1582670 - RNA, 19 nt, Artificial Sequence
  Description of Artificial Sequence: Synthetic oligonucleotide
auuugcuacuuuucagaga

SEQ ID NO: 1582671 - RNA, 19 nt, Artificial Sequence
  Description of Artificial Sequence: Synthetic oligonucleotide
uugucucuauccucuggag

SEQ ID NO: 1582672 - RNA, 19 nt, Artificial Sequence
  Description of Artificial Sequence: Synthetic oligonucleotide
aauaaacaccgagcaguug

SEQ ID NO: 1582673 - RNA, 19 nt, Artificial Sequence
  Description of Artificial Sequence: Synthetic oligonucleotide
agaacuccaggagagcaag

SEQ ID NO: 1582674 - RNA, 19 nt, Artificial Sequence
  Description of Artificial Sequence: Synthetic oligonucleotide
auaagcucucugcucucuc

SEQ ID NO: 1582675 - RNA, 19 nt, Artificial Sequence
  Description of Artificial Sequence: Synthetic oligonucleotide
cuuagucagagcuucaacu

SEQ ID NO: 1582676 - RNA, 19 nt, Artificial Sequence
  Description of Artificial Sequence: Synthetic oligonucleotide
uccaaggcacuuuguaaga

SEQ ID NO: 1582677 - RNA, 19 nt, Artificial Sequence
  Description of Artificial Sequence: Synthetic oligonucleotide
uggagcguggucuugucuc

SEQ ID NO: 1582678 - RNA, 19 nt, Artificial Sequence
  Description of Artificial Sequence: Synthetic oligonucleotide
uugagcuuguaguaccaaa

SEQ ID NO: 1582679 - RNA, 19 nt, Artificial Sequence
  Description of Artificial Sequence: Synthetic oligonucleotide
cuaucugacuuuucgggca

SEQ ID NO: 1582680 - RNA, 19 nt, Artificial Sequence
  Description of Artificial Sequence: Synthetic oligonucleotide
cguaaauggagcauuuuag

SEQ ID NO: 1582681 - RNA, 19 nt, Artificial Sequence
  Description of Artificial Sequence: Synthetic oligonucleotide
uggaaccucaggaguagcu

SEQ ID NO: 1582682 - RNA, 19 nt, Artificial Sequence
  Description of Artificial Sequence: Synthetic oligonucleotide
uuaauaccugacaguuccu

SEQ ID NO: 1582683 - RNA, 19 nt, Artificial Sequence
  Description of Artificial Sequence: Synthetic oligonucleotide
ucgaaccuuaucaccacau

SEQ ID NO: 1582684 - RNA, 19 nt, Artificial Sequence
  Description of Artificial Sequence: Synthetic oligonucleotide
ggaaauugucuucugaucu

SEQ ID NO: 1582685 - RNA, 19 nt, Artificial Sequence
  Description of Artificial Sequence: Synthetic oligonucleotide
ugcaagugguuuuccuacc

SEQ ID NO: 1582686 - RNA, 19 nt, Artificial Sequence
  Description of Artificial Sequence: Synthetic oligonucleotide
cuuuagagauuccaucaga

SEQ ID NO: 1582687 - RNA, 19 nt, Artificial Sequence
  Description of Artificial Sequence: Synthetic oligonucleotide
aaacgaggauaaggaacuc

SEQ ID NO: 1582688 - RNA, 19 nt, Artificial Sequence
  Description of Artificial Sequence: Synthetic oligonucleotide
uaccaaaaguugucacacc

SEQ ID NO: 1582689 - RNA, 19 nt, Artificial Sequence
  Description of Artificial Sequence: Synthetic oligonucleotide
cuaccugugauuguuagaa

SEQ ID NO: 1582690 - RNA, 19 nt, Artificial Sequence
  Description of Artificial Sequence: Synthetic oligonucleotide
ugccaaggggaucuuugca

SEQ ID NO: 1582691 - RNA, 19 nt, Artificial Sequence
  Description of Artificial Sequence: Synthetic oligonucleotide
acauaagcucucugcucuc

SEQ ID NO: 1582692 - RNA, 19 nt, Artificial Sequence
  Description of Artificial Sequence: Synthetic oligonucleotide
caugcaccagagaugagga

SEQ ID NO: 1582693 - RNA, 19 nt, Artificial Sequence
  Description of Artificial Sequence: Synthetic oligonucleotide
aacaguaguggugcuaaua

SEQ ID NO: 1582694 - RNA, 19 nt, Artificial Sequence
  Description of Artificial Sequence: Synthetic oligonucleotide
ggaucuuugcauauuuagc

SEQ ID NO: 1582695 - RNA, 19 nt, Artificial Sequence
  Description of Artificial Sequence: Synthetic oligonucleotide
uuaggcucauuagacugga

SEQ ID NO: 1582696 - RNA, 19 nt, Artificial Sequence
  Description of Artificial Sequence: Synthetic oligonucleotide
uaguggugcuaauacugac

SEQ ID NO: 1582697 - RNA, 19 nt, Artificial Sequence
  Description of Artificial Sequence: Synthetic oligonucleotide
aaugggcuguaaacaaugu

SEQ ID NO: 1582698 - RNA, 19 nt, Artificial Sequence
  Description of Artificial Sequence: Synthetic oligonucleotide
caguggcaauguuuaaccc

SEQ ID NO: 1582699 - RNA, 19 nt, Artificial Sequence
  Description of Artificial Sequence: Synthetic oligonucleotide
gacaguuccuaagauugca

SEQ ID NO: 1582700 - RNA, 19 nt, Artificial Sequence
  Description of Artificial Sequence: Synthetic oligonucleotide
agcuguuuuguuggcauug

SEQ ID NO: 1582701 - RNA, 19 nt, Artificial Sequence
  Description of Artificial Sequence: Synthetic oligonucleotide
uuuuccuaccugugauugu

SEQ ID NO: 1582702 - RNA, 19 nt, Artificial Sequence
  Description of Artificial Sequence: Synthetic oligonucleotide
gcuaucugacuuuucgggc

SEQ ID NO: 1582703 - RNA, 19 nt, Artificial Sequence
  Description of Artificial Sequence: Synthetic oligonucleotide
uuuccuaccugugauuguu

SEQ ID NO: 1582704 - RNA, 19 nt, Artificial Sequence
  Description of Artificial Sequence: Synthetic oligonucleotide
uucagagauagggauuuau

SEQ ID NO: 1582705 - RNA, 19 nt, Artificial Sequence
  Description of Artificial Sequence: Synthetic oligonucleotide
uuuuggagcguggucuugu

SEQ ID NO: 1582706 - RNA, 19 nt, Artificial Sequence
  Description of Artificial Sequence: Synthetic oligonucleotide
guagcuggugccaagggga

SEQ ID NO: 1582707 - RNA, 19 nt, Artificial Sequence
  Description of Artificial Sequence: Synthetic oligonucleotide
uuucgggcacauuuccccu

SEQ ID NO: 1582708 - RNA, 19 nt, Artificial Sequence
  Description of Artificial Sequence: Synthetic oligonucleotide
ucucuauccucuggagucc

SEQ ID NO: 1582709 - RNA, 19 nt, Artificial Sequence
  Description of Artificial Sequence: Synthetic oligonucleotide
aaguaugccuacauugcuu

SEQ ID NO: 1582710 - RNA, 19 nt, Artificial Sequence
  Description of Artificial Sequence: Synthetic oligonucleotide
aguggugcuaauacugaca

SEQ ID NO: 1582711 - RNA, 19 nt, Artificial Sequence
  Description of Artificial Sequence: Synthetic oligonucleotide
caagugguuuuccuaccug

SEQ ID NO: 1582712 - RNA, 19 nt, Artificial Sequence
  Description of Artificial Sequence: Synthetic oligonucleotide
accuuaucaccacaugauu

SEQ ID NO: 1582713 - RNA, 19 nt, Artificial Sequence
  Description of Artificial Sequence: Synthetic oligonucleotide
uaauaccugacaguuccua

SEQ ID NO: 1582714 - RNA, 19 nt, Artificial Sequence
  Description of Artificial Sequence: Synthetic oligonucleotide
ucaccacaugauucaaguc

SEQ ID NO: 1582715 - RNA, 19 nt, Artificial Sequence
  Description of Artificial Sequence: Synthetic oligonucleotide
accgagagaaacgaggaua

SEQ ID NO: 1582716 - RNA, 19 nt, Artificial Sequence
  Description of Artificial Sequence: Synthetic oligonucleotide
gaugagguagcuguuuugu

SEQ ID NO: 1582717 - RNA, 19 nt, Artificial Sequence
  Description of Artificial Sequence: Synthetic oligonucleotide
uggagcauuuuagauucuc

SEQ ID NO: 1582718 - RNA, 19 nt, Artificial Sequence
  Description of Artificial Sequence: Synthetic oligonucleotide
cuuugcuugaguugcugaa

SEQ ID NO: 1582719 - RNA, 19 nt, Artificial Sequence
  Description of Artificial Sequence: Synthetic oligonucleotide
uguuucuaacaguggcaau

SEQ ID NO: 1582720 - RNA, 19 nt, Artificial Sequence
  Description of Artificial Sequence: Synthetic oligonucleotide
aggggaucuuugcauauuu

SEQ ID NO: 1582721 - RNA, 19 nt, Artificial Sequence
  Description of Artificial Sequence: Synthetic oligonucleotide
guagcacguaaacuggaaa

SEQ ID NO: 1582722 - RNA, 19 nt, Artificial Sequence
  Description of Artificial Sequence: Synthetic oligonucleotide
uuggagcguggucuugucu

SEQ ID NO: 1582723 - RNA, 19 nt, Artificial Sequence
  Description of Artificial Sequence: Synthetic oligonucleotide
caucaguaauguuuggugu

SEQ ID NO: 1582724 - RNA, 19 nt, Artificial Sequence
  Description of Artificial Sequence: Synthetic oligonucleotide
gagaaccgagagaaacgag

SEQ ID NO: 1582725 - RNA, 19 nt, Artificial Sequence
  Description of Artificial Sequence: Synthetic oligonucleotide
cuagaaucaucaguaaugu

SEQ ID NO: 1582726 - RNA, 19 nt, Artificial Sequence
  Description of Artificial Sequence: Synthetic oligonucleotide
uuaucaccacaugauucaa

SEQ ID NO: 1582727 - RNA, 19 nt, Artificial Sequence
  Description of Artificial Sequence: Synthetic oligonucleotide
gauugcaagugguuuuccu

SEQ ID NO: 1582728 - RNA, 19 nt, Artificial Sequence
  Description of Artificial Sequence: Synthetic oligonucleotide
agucagagcuucaacucca

SEQ ID NO: 1582729 - RNA, 19 nt, Artificial Sequence
  Description of Artificial Sequence: Synthetic oligonucleotide
gcauauuuagccaacaaau

SEQ ID NO: 1582730 - RNA, 19 nt, Artificial Sequence
  Description of Artificial Sequence: Synthetic oligonucleotide
cagagaauagcugcuucuc

SEQ ID NO: 1582731 - RNA, 19 nt, Artificial Sequence
  Description of Artificial Sequence: Synthetic oligonucleotide
ggagcauuuuagauucucc

SEQ ID NO: 1582732 - RNA, 19 nt, Artificial Sequence
  Description of Artificial Sequence: Synthetic oligonucleotide
cacaugauucaagucccug

SEQ ID NO: 1582733 - RNA, 19 nt, Artificial Sequence
  Description of Artificial Sequence: Synthetic oligonucleotide
agcacguaaacuggaaauu

SEQ ID NO: 1582734 - RNA, 19 nt, Artificial Sequence
  Description of Artificial Sequence: Synthetic oligonucleotide
uccuucuguaauuguucau

SEQ ID NO: 1582735 - RNA, 19 nt, Artificial Sequence
  Description of Artificial Sequence: Synthetic oligonucleotide
gagcucgcuuucuuaguca

SEQ ID NO: 1582736 - RNA, 19 nt, Artificial Sequence
  Description of Artificial Sequence: Synthetic oligonucleotide
ucuugcuaucugacuuuuc

SEQ ID NO: 1582737 - RNA, 19 nt, Artificial Sequence
  Description of Artificial Sequence: Synthetic oligonucleotide
ucgcuuucuuagucagagc

SEQ ID NO: 1582738 - RNA, 19 nt, Artificial Sequence
  Description of Artificial Sequence: Synthetic oligonucleotide
uaacaaccuugauacucua

SEQ ID NO: 1582739 - RNA, 19 nt, Artificial Sequence
  Description of Artificial Sequence: Synthetic oligonucleotide
cuucuagaaucaucaguaa

SEQ ID NO: 1582740 - RNA, 19 nt, Artificial Sequence
  Description of Artificial Sequence: Synthetic oligonucleotide
aguucacagccacguaaau

SEQ ID NO: 1582741 - RNA, 19 nt, Artificial Sequence
  Description of Artificial Sequence: Synthetic oligonucleotide
ucccgaaguugguagguuu

SEQ ID NO: 1582742 - RNA, 19 nt, Artificial Sequence
  Description of Artificial Sequence: Synthetic oligonucleotide
  modified_base (19)..(19): a, c, u, g, unknown or other
cacaccacagaaugcuagn

SEQ ID NO: 1582743 - RNA, 19 nt, Artificial Sequence
  Description of Artificial Sequence: Synthetic oligonucleotide
accugacaguuccuaagau

SEQ ID NO: 1582744 - RNA, 19 nt, Artificial Sequence
  Description of Artificial Sequence: Synthetic oligonucleotide
caucauugguacaaaguau

SEQ ID NO: 1582745 - RNA, 19 nt, Artificial Sequence
  Description of Artificial Sequence: Synthetic oligonucleotide
acgaggauaaggaacucuu

SEQ ID NO: 1582746 - RNA, 19 nt, Artificial Sequence
  Description of Artificial Sequence: Synthetic oligonucleotide
acucuacuuuugguagcac

SEQ ID NO: 1582747 - RNA, 19 nt, Artificial Sequence
  Description of Artificial Sequence: Synthetic oligonucleotide
cuguuucuaacaguggcaa

SEQ ID NO: 1582748 - RNA, 19 nt, Artificial Sequence
  Description of Artificial Sequence: Synthetic oligonucleotide
gaaucuggcauaagcuucu

SEQ ID NO: 1582749 - RNA, 19 nt, Artificial Sequence
  Description of Artificial Sequence: Synthetic oligonucleotide
uaccugugauuguuagaaa

SEQ ID NO: 1582750 - RNA, 19 nt, Artificial Sequence
  Description of Artificial Sequence: Synthetic oligonucleotide
uugaacacuugggcuuuca

SEQ ID NO: 1582751 - RNA, 19 nt, Artificial Sequence
  Description of Artificial Sequence: Synthetic oligonucleotide
ucgggcacauuuccccuaa

SEQ ID NO: 1582752 - RNA, 19 nt, Artificial Sequence
  Description of Artificial Sequence: Synthetic oligonucleotide
uucuaacaguggcaauguu

SEQ ID NO: 1582753 - RNA, 19 nt, Artificial Sequence
  Description of Artificial Sequence: Synthetic oligonucleotide
augagguagcuguuuuguu

SEQ ID NO: 1582754 - RNA, 19 nt, Artificial Sequence
  Description of Artificial Sequence: Synthetic oligonucleotide
ggaaccucaggaguagcug

SEQ ID NO: 1582755 - RNA, 19 nt, Artificial Sequence
  Description of Artificial Sequence: Synthetic oligonucleotide
ggugccaaggggaucuuug

SEQ ID NO: 1582756 - RNA, 19 nt, Artificial Sequence
  Description of Artificial Sequence: Synthetic oligonucleotide
caccgagcaguuggaaugc

SEQ ID NO: 1582757 - RNA, 19 nt, Artificial Sequence
  Description of Artificial Sequence: Synthetic oligonucleotide
uuccuaccugugauuguua

SEQ ID NO: 1582758 - RNA, 19 nt, Artificial Sequence
  Description of Artificial Sequence: Synthetic oligonucleotide
cguggucuugucucuaucc

SEQ ID NO: 1582759 - RNA, 19 nt, Artificial Sequence
  Description of Artificial Sequence: Synthetic oligonucleotide
ggcuguaaacaaugugcac

SEQ ID NO: 1582760 - RNA, 19 nt, Artificial Sequence
  Description of Artificial Sequence: Synthetic oligonucleotide
aaggggaucuuugcauauu

SEQ ID NO: 1582761 - RNA, 19 nt, Artificial Sequence
  Description of Artificial Sequence: Synthetic oligonucleotide
uggugcuaauacugacaaa

SEQ ID NO: 1582762 - RNA, 19 nt, Artificial Sequence
  Description of Artificial Sequence: Synthetic oligonucleotide
gcaguuggaaugcaauaaa

SEQ ID NO: 1582763 - RNA, 19 nt, Artificial Sequence
  Description of Artificial Sequence: Synthetic oligonucleotide
gcuuguaguaccaaaaguu

SEQ ID NO: 1582764 - RNA, 19 nt, Artificial Sequence
  Description of Artificial Sequence: Synthetic oligonucleotide
acaguuccuaagauugcaa

SEQ ID NO: 1582765 - RNA, 19 nt, Artificial Sequence
  Description of Artificial Sequence: Synthetic oligonucleotide
ugcacucuucaggaccacu

SEQ ID NO: 1582766 - RNA, 19 nt, Artificial Sequence
  Description of Artificial Sequence: Synthetic oligonucleotide
gguacaaaguaugccuaca

SEQ ID NO: 1582767 - RNA, 19 nt, Artificial Sequence
  Description of Artificial Sequence: Synthetic oligonucleotide
cuaagauugcaagugguuu

SEQ ID NO: 1582768 - RNA, 19 nt, Artificial Sequence
  Description of Artificial Sequence: Synthetic oligonucleotide
guaugccuacauugcuuuc

SEQ ID NO: 1582769 - RNA, 19 nt, Artificial Sequence
  Description of Artificial Sequence: Synthetic oligonucleotide
ggcucauuagacuggaaau

SEQ ID NO: 1582770 - RNA, 19 nt, Artificial Sequence
  Description of Artificial Sequence: Synthetic oligonucleotide
uguuggcauugucuacauu

SEQ ID NO: 1582771 - RNA, 19 nt, Artificial Sequence
  Description of Artificial Sequence: Synthetic oligonucleotide
cuauccucuggaguccuca

SEQ ID NO: 1582772 - RNA, 19 nt, Artificial Sequence
  Description of Artificial Sequence: Synthetic oligonucleotide
cccuucccgaaguugguag

SEQ ID NO: 1582773 - RNA, 19 nt, Artificial Sequence
  Description of Artificial Sequence: Synthetic oligonucleotide
uucgggcacauuuccccua

SEQ ID NO: 1582774 - RNA, 19 nt, Artificial Sequence
  Description of Artificial Sequence: Synthetic oligonucleotide
ccuucccgaaguugguagg

SEQ ID NO: 1582775 - RNA, 19 nt, Artificial Sequence
  Description of Artificial Sequence: Synthetic oligonucleotide
agcguggucuugucucuau

SEQ ID NO: 1582776 - RNA, 19 nt, Artificial Sequence
  Description of Artificial Sequence: Synthetic oligonucleotide
cggguuuucaaaagcagca

SEQ ID NO: 1582777 - RNA, 19 nt, Artificial Sequence
  Description of Artificial Sequence: Synthetic oligonucleotide
  modified_base (14)..(14): a, c, u, g, unknown or other
cacagaaugcuagnguuuu

SEQ ID NO: 1582778 - RNA, 19 nt, Artificial Sequence
  Description of Artificial Sequence: Synthetic oligonucleotide
guaaaacacaugugugguu

SEQ ID NO: 1582779 - RNA, 19 nt, Artificial Sequence
  Description of Artificial Sequence: Synthetic oligonucleotide
gcaacaguaguggugcuaa

SEQ ID NO: 1582780 - RNA, 19 nt, Artificial Sequence
  Description of Artificial Sequence: Synthetic oligonucleotide
caucagaaucuggcauaag

SEQ ID NO: 1582781 - RNA, 19 nt, Artificial Sequence
  Description of Artificial Sequence: Synthetic oligonucleotide
agaugaggaaggacacuaa

SEQ ID NO: 1582782 - RNA, 19 nt, Artificial Sequence
  Description of Artificial Sequence: Synthetic oligonucleotide
uggcaauguuuaacccuuu

SEQ ID NO: 1582783 - RNA, 19 nt, Artificial Sequence
  Description of Artificial Sequence: Synthetic oligonucleotide
agcaacaguaguggugcua

SEQ ID NO: 1582784 - RNA, 19 nt, Artificial Sequence
  Description of Artificial Sequence: Synthetic oligonucleotide
uuucagagauagggauuua

SEQ ID NO: 1582785 - RNA, 19 nt, Artificial Sequence
  Description of Artificial Sequence: Synthetic oligonucleotide
ccgagagaaacgaggauaa

SEQ ID NO: 1582786 - RNA, 19 nt, Artificial Sequence
  Description of Artificial Sequence: Synthetic oligonucleotide
gcucauuagacuggaaaua

SEQ ID NO: 1582787 - RNA, 19 nt, Artificial Sequence
  Description of Artificial Sequence: Synthetic oligonucleotide
agccacguaaauggagcau

SEQ ID NO: 1582788 - RNA, 19 nt, Artificial Sequence
  Description of Artificial Sequence: Synthetic oligonucleotide
gcccuuucucaguuuucag

SEQ ID NO: 1582789 - RNA, 19 nt, Artificial Sequence
  Description of Artificial Sequence: Synthetic oligonucleotide
  modified_base (17)..(17): a, c, u, g, unknown or other
caccacagaaugcuagngu

SEQ ID NO: 1582790 - RNA, 19 nt, Artificial Sequence
  Description of Artificial Sequence: Synthetic oligonucleotide
cccgaaguugguagguuuc

SEQ ID NO: 1582791 - RNA, 19 nt, Artificial Sequence
  Description of Artificial Sequence: Synthetic oligonucleotide
gagaaucaucccaacuuuu

SEQ ID NO: 1582792 - RNA, 19 nt, Artificial Sequence
  Description of Artificial Sequence: Synthetic oligonucleotide
uucccgaaguugguagguu

SEQ ID NO: 1582793 - RNA, 19 nt, Artificial Sequence
  Description of Artificial Sequence: Synthetic oligonucleotide
acccuuuggcuuaggcuca

SEQ ID NO: 1582794 - RNA, 19 nt, Artificial Sequence
  Description of Artificial Sequence: Synthetic oligonucleotide
gagauuccaucagauguuu

SEQ ID NO: 1582795 - RNA, 19 nt, Artificial Sequence
  Description of Artificial Sequence: Synthetic oligonucleotide
cgaggauaaggaacucuug

SEQ ID NO: 1582796 - RNA, 19 nt, Artificial Sequence
  Description of Artificial Sequence: Synthetic oligonucleotide
cuacuuuugguagcacgua

SEQ ID NO: 1582797 - RNA, 19 nt, Artificial Sequence
  Description of Artificial Sequence: Synthetic oligonucleotide
ggcauugucuacauucccu

SEQ ID NO: 1582798 - RNA, 19 nt, Artificial Sequence
  Description of Artificial Sequence: Synthetic oligonucleotide
ccgaaguugguagguuucc

SEQ ID NO: 1582799 - RNA, 19 nt, Artificial Sequence
  Description of Artificial Sequence: Synthetic oligonucleotide
ggcuuaggcucauuagacu

SEQ ID NO: 1582800 - RNA, 19 nt, Artificial Sequence
  Description of Artificial Sequence: Synthetic oligonucleotide
gcaagugguuuuccuaccu

SEQ ID NO: 1582801 - RNA, 19 nt, Artificial Sequence
  Description of Artificial Sequence: Synthetic oligonucleotide
ggaaugcaauaaacuuuca

SEQ ID NO: 1582802 - RNA, 19 nt, Artificial Sequence
  Description of Artificial Sequence: Synthetic oligonucleotide
gcauugucuacauucccuu

SEQ ID NO: 1582803 - RNA, 19 nt, Artificial Sequence
  Description of Artificial Sequence: Synthetic oligonucleotide
gccaaggggaucuuugcau

SEQ ID NO: 1582804 - RNA, 19 nt, Artificial Sequence
  Description of Artificial Sequence: Synthetic oligonucleotide
accgagcaguuggaaugca

SEQ ID NO: 1582805 - RNA, 19 nt, Artificial Sequence
  Description of Artificial Sequence: Synthetic oligonucleotide
cugugagaaccgagagaaa

SEQ ID NO: 1582806 - RNA, 19 nt, Artificial Sequence
  Description of Artificial Sequence: Synthetic oligonucleotide
ccaaggggaucuuugcaua

SEQ ID NO: 1582807 - RNA, 19 nt, Artificial Sequence
  Description of Artificial Sequence: Synthetic oligonucleotide
cagagcucgcuuucuuagu

SEQ ID NO: 1582808 - RNA, 19 nt, Artificial Sequence
  Description of Artificial Sequence: Synthetic oligonucleotide
uggugccaaggggaucuuu

SEQ ID NO: 1582809 - RNA, 19 nt, Artificial Sequence
  Description of Artificial Sequence: Synthetic oligonucleotide
ccuaagauugcaagugguu

SEQ ID NO: 1582810 - RNA, 19 nt, Artificial Sequence
  Description of Artificial Sequence: Synthetic oligonucleotide
gcguggucuugucucuauc

SEQ ID NO: 1582811 - RNA, 19 nt, Artificial Sequence
  Description of Artificial Sequence: Synthetic oligonucleotide
gggauuuauuuuccuuguu

SEQ ID NO: 1582812 - RNA, 19 nt, Artificial Sequence
  Description of Artificial Sequence: Synthetic oligonucleotide
gccacguaaauggagcauu

SEQ ID NO: 1582813 - RNA, 19 nt, Artificial Sequence
  Description of Artificial Sequence: Synthetic oligonucleotide
cucuauccucuggaguccu

SEQ ID NO: 1582814 - RNA, 19 nt, Artificial Sequence
  Description of Artificial Sequence: Synthetic oligonucleotide
cccugaucaucuuuauuuu

SEQ ID NO: 1582815 - RNA, 19 nt, Artificial Sequence
  Description of Artificial Sequence: Synthetic oligonucleotide
  modified_base (15)..(15): a, c, u, g, unknown or other
ccacagaaugcuagnguuu

SEQ ID NO: 1582816 - RNA, 19 nt, Artificial Sequence
  Description of Artificial Sequence: Synthetic oligonucleotide
ccacguaaauggagcauuu

SEQ ID NO: 1582817 - RNA, 19 nt, Artificial Sequence
  Description of Artificial Sequence: Synthetic oligonucleotide
ccacaugauucaagucccu

SEQ ID NO: 1582818 - RNA, 19 nt, Artificial Sequence
  Description of Artificial Sequence: Synthetic oligonucleotide
cugacuuuucgggcacauu

SEQ ID NO: 1582819 - RNA, 19 nt, Artificial Sequence
  Description of Artificial Sequence: Synthetic oligonucleotide
gcgacagagcucgcuuucu

SEQ ID NO: 1582820 - RNA, 19 nt, Artificial Sequence
  Description of Artificial Sequence: Synthetic oligonucleotide
gcccuucccgaaguuggua

SEQ ID NO: 1582821 - RNA, 19 nt, Artificial Sequence
  Description of Artificial Sequence: Synthetic oligonucleotide
ccuugaacacuugggcuuu

SEQ ID NO: 1582822 - RNA, 19 nt, Artificial Sequence
  Description of Artificial Sequence: Synthetic oligonucleotide
cacuggcacuucgaaccuu

SEQ ID NO: 1582823 - RNA, 19 nt, Artificial Sequence
  Description of Artificial Sequence: Synthetic oligonucleotide
aauguaaagaccaacauuc

SEQ ID NO: 1582824 - RNA, 19 nt, Artificial Sequence
  Description of Artificial Sequence: Synthetic oligonucleotide
agaaacuucacuuuuggcc

SEQ ID NO: 1582825 - RNA, 19 nt, Artificial Sequence
  Description of Artificial Sequence: Synthetic oligonucleotide
auaaauauaugccaucugc

SEQ ID NO: 1582826 - RNA, 19 nt, Artificial Sequence
  Description of Artificial Sequence: Synthetic oligonucleotide
aagauaagaacccaggcca

SEQ ID NO: 1582827 - RNA, 19 nt, Artificial Sequence
  Description of Artificial Sequence: Synthetic oligonucleotide
uauaaaucaaagcugacau

SEQ ID NO: 1582828 - RNA, 19 nt, Artificial Sequence
  Description of Artificial Sequence: Synthetic oligonucleotide
uauuccaaaacucagcgac

SEQ ID NO: 1582829 - RNA, 19 nt, Artificial Sequence
  Description of Artificial Sequence: Synthetic oligonucleotide
cuuauagucagccaucugg

SEQ ID NO: 1582830 - RNA, 19 nt, Artificial Sequence
  Description of Artificial Sequence: Synthetic oligonucleotide
auagaacuaggguaaaagc

SEQ ID NO: 1582831 - RNA, 19 nt, Artificial Sequence
  Description of Artificial Sequence: Synthetic oligonucleotide
aauuaagaaagguauaauu

SEQ ID NO: 1582832 - RNA, 19 nt, Artificial Sequence
  Description of Artificial Sequence: Synthetic oligonucleotide
ucgaggacaaauaagauaa

SEQ ID NO: 1582833 - RNA, 19 nt, Artificial Sequence
  Description of Artificial Sequence: Synthetic oligonucleotide
aauauaaauagaacgaagu

SEQ ID NO: 1582834 - RNA, 19 nt, Artificial Sequence
  Description of Artificial Sequence: Synthetic oligonucleotide
gaauaugcaagucuuuggg

SEQ ID NO: 1582835 - RNA, 19 nt, Artificial Sequence
  Description of Artificial Sequence: Synthetic oligonucleotide
aauagaacgaaguacuaau

SEQ ID NO: 1582836 - RNA, 19 nt, Artificial Sequence
  Description of Artificial Sequence: Synthetic oligonucleotide
aauaugcaagucuuugggg

SEQ ID NO: 1582837 - RNA, 19 nt, Artificial Sequence
  Description of Artificial Sequence: Synthetic oligonucleotide
uauuaaugucccaugaaug

SEQ ID NO: 1582838 - RNA, 19 nt, Artificial Sequence
  Description of Artificial Sequence: Synthetic oligonucleotide
auaaccuaguccucuaagc

SEQ ID NO: 1582839 - RNA, 19 nt, Artificial Sequence
  Description of Artificial Sequence: Synthetic oligonucleotide
aaauauuaaugucccauga

SEQ ID NO: 1582840 - RNA, 19 nt, Artificial Sequence
  Description of Artificial Sequence: Synthetic oligonucleotide
uagucaaggauguauaacc

SEQ ID NO: 1582841 - RNA, 19 nt, Artificial Sequence
  Description of Artificial Sequence: Synthetic oligonucleotide
guuacuauuaaacugaaua

SEQ ID NO: 1582842 - RNA, 19 nt, Artificial Sequence
  Description of Artificial Sequence: Synthetic oligonucleotide
uuaagaaagguauaauuaa

SEQ ID NO: 1582843 - RNA, 19 nt, Artificial Sequence
  Description of Artificial Sequence: Synthetic oligonucleotide
gaagauaagaacccaggcc

SEQ ID NO: 1582844 - RNA, 19 nt, Artificial Sequence
  Description of Artificial Sequence: Synthetic oligonucleotide
aaauaugccaccaugcaug

SEQ ID NO: 1582845 - RNA, 19 nt, Artificial Sequence
  Description of Artificial Sequence: Synthetic oligonucleotide
ugcuaaauaagcagcaaug

SEQ ID NO: 1582846 - RNA, 19 nt, Artificial Sequence
  Description of Artificial Sequence: Synthetic oligonucleotide
aguacuaauguaaagacca

SEQ ID NO: 1582847 - RNA, 19 nt, Artificial Sequence
  Description of Artificial Sequence: Synthetic oligonucleotide
aaagaccaacauuccauac

SEQ ID NO: 1582848 - RNA, 19 nt, Artificial Sequence
  Description of Artificial Sequence: Synthetic oligonucleotide
augcaguacacaaauaugc

SEQ ID NO: 1582849 - RNA, 19 nt, Artificial Sequence
  Description of Artificial Sequence: Synthetic oligonucleotide
uuaucuacauuccacaaua

SEQ ID NO: 1582850 - RNA, 19 nt, Artificial Sequence
  Description of Artificial Sequence: Synthetic oligonucleotide
cuguaagcaucuuaggucg

SEQ ID NO: 1582851 - RNA, 19 nt, Artificial Sequence
  Description of Artificial Sequence: Synthetic oligonucleotide
ugaauaugcaagucuuugg

SEQ ID NO: 1582852 - RNA, 19 nt, Artificial Sequence
  Description of Artificial Sequence: Synthetic oligonucleotide
aaguacuaauguaaagacc

SEQ ID NO: 1582853 - RNA, 19 nt, Artificial Sequence
  Description of Artificial Sequence: Synthetic oligonucleotide
aacugaauagaacuagggu

SEQ ID NO: 1582854 - RNA, 19 nt, Artificial Sequence
  Description of Artificial Sequence: Synthetic oligonucleotide
ugagugcuaaauaagcagc

SEQ ID NO: 1582855 - RNA, 19 nt, Artificial Sequence
  Description of Artificial Sequence: Synthetic oligonucleotide
uuuuagguaaaucaugguu

SEQ ID NO: 1582856 - RNA, 19 nt, Artificial Sequence
  Description of Artificial Sequence: Synthetic oligonucleotide
uaaaauaugccaccaugca

SEQ ID NO: 1582857 - RNA, 19 nt, Artificial Sequence
  Description of Artificial Sequence: Synthetic oligonucleotide
uaaauauaugccaucugcu

SEQ ID NO: 1582858 - RNA, 19 nt, Artificial Sequence
  Description of Artificial Sequence: Synthetic oligonucleotide
auuaaugucccaugaauga

SEQ ID NO: 1582859 - RNA, 19 nt, Artificial Sequence
  Description of Artificial Sequence: Synthetic oligonucleotide
ugaagauaagaacccaggc

SEQ ID NO: 1582860 - RNA, 19 nt, Artificial Sequence
  Description of Artificial Sequence: Synthetic oligonucleotide
augacaacuacuuaguaaa

SEQ ID NO: 1582861 - RNA, 19 nt, Artificial Sequence
  Description of Artificial Sequence: Synthetic oligonucleotide
uguugcaacaccuaggaua

SEQ ID NO: 1582862 - RNA, 19 nt, Artificial Sequence
  Description of Artificial Sequence: Synthetic oligonucleotide
uaagaaagguauaauuaac

SEQ ID NO: 1582863 - RNA, 19 nt, Artificial Sequence
  Description of Artificial Sequence: Synthetic oligonucleotide
aauauagguucuuuuacuu

SEQ ID NO: 1582864 - RNA, 19 nt, Artificial Sequence
  Description of Artificial Sequence: Synthetic oligonucleotide
acugaauagaacuagggua

SEQ ID NO: 1582865 - RNA, 19 nt, Artificial Sequence
  Description of Artificial Sequence: Synthetic oligonucleotide
aaacugaauagaacuaggg

SEQ ID NO: 1582866 - RNA, 19 nt, Artificial Sequence
  Description of Artificial Sequence: Synthetic oligonucleotide
uguguugcaacaccuagga

SEQ ID NO: 1582867 - RNA, 19 nt, Artificial Sequence
  Description of Artificial Sequence: Synthetic oligonucleotide
cagugaaucacaaaagaug

SEQ ID NO: 1582868 - RNA, 19 nt, Artificial Sequence
  Description of Artificial Sequence: Synthetic oligonucleotide
acuuuuagguaaaucaugg

SEQ ID NO: 1582869 - RNA, 19 nt, Artificial Sequence
  Description of Artificial Sequence: Synthetic oligonucleotide
uaaccuaguccucuaagcc

SEQ ID NO: 1582870 - RNA, 19 nt, Artificial Sequence
  Description of Artificial Sequence: Synthetic oligonucleotide
aauauuaaugucccaugaa

SEQ ID NO: 1582871 - RNA, 19 nt, Artificial Sequence
  Description of Artificial Sequence: Synthetic oligonucleotide
accaacauuccauacauga

SEQ ID NO: 1582872 - RNA, 19 nt, Artificial Sequence
  Description of Artificial Sequence: Synthetic oligonucleotide
uucucuauguggcugauuc

SEQ ID NO: 1582873 - RNA, 19 nt, Artificial Sequence
  Description of Artificial Sequence: Synthetic oligonucleotide
uuuuacuagucuuaaugac

SEQ ID NO: 1582874 - RNA, 19 nt, Artificial Sequence
  Description of Artificial Sequence: Synthetic oligonucleotide
aaaauaugccaccaugcau

SEQ ID NO: 1582875 - RNA, 19 nt, Artificial Sequence
  Description of Artificial Sequence: Synthetic oligonucleotide
uauaaccuaguccucuaag

SEQ ID NO: 1582876 - RNA, 19 nt, Artificial Sequence
  Description of Artificial Sequence: Synthetic oligonucleotide
ucaucucuugugaugggcg

SEQ ID NO: 1582877 - RNA, 19 nt, Artificial Sequence
  Description of Artificial Sequence: Synthetic oligonucleotide
auaaucagguuacucacug

SEQ ID NO: 1582878 - RNA, 19 nt, Artificial Sequence
  Description of Artificial Sequence: Synthetic oligonucleotide
cuugaaacauucaaacaug

SEQ ID NO: 1582879 - RNA, 19 nt, Artificial Sequence
  Description of Artificial Sequence: Synthetic oligonucleotide
aauauaaaucaaagcugac

SEQ ID NO: 1582880 - RNA, 19 nt, Artificial Sequence
  Description of Artificial Sequence: Synthetic oligonucleotide
aagaaagguauaauuaaca

SEQ ID NO: 1582881 - RNA, 19 nt, Artificial Sequence
  Description of Artificial Sequence: Synthetic oligonucleotide
uccagucuaucucuaaugc

SEQ ID NO: 1582882 - RNA, 19 nt, Artificial Sequence
  Description of Artificial Sequence: Synthetic oligonucleotide
gaugugaagauaagaaccc

SEQ ID NO: 1582883 - RNA, 19 nt, Artificial Sequence
  Description of Artificial Sequence: Synthetic oligonucleotide
uacuauuaaacugaauaga

SEQ ID NO: 1582884 - RNA, 19 nt, Artificial Sequence
  Description of Artificial Sequence: Synthetic oligonucleotide
uuauagucagccaucugga

SEQ ID NO: 1582885 - RNA, 19 nt, Artificial Sequence
  Description of Artificial Sequence: Synthetic oligonucleotide
ucucuaaugcucugaauug

SEQ ID NO: 1582886 - RNA, 19 nt, Artificial Sequence
  Description of Artificial Sequence: Synthetic oligonucleotide
aguuuauugagcucuuugu

SEQ ID NO: 1582887 - RNA, 19 nt, Artificial Sequence
  Description of Artificial Sequence: Synthetic oligonucleotide
ucaugguuacuauuaaacu

SEQ ID NO: 1582888 - RNA, 19 nt, Artificial Sequence
  Description of Artificial Sequence: Synthetic oligonucleotide
uuucggaaguuccucagug

SEQ ID NO: 1582889 - RNA, 19 nt, Artificial Sequence
  Description of Artificial Sequence: Synthetic oligonucleotide
gugagugcuaaauaagcag

SEQ ID NO: 1582890 - RNA, 19 nt, Artificial Sequence
  Description of Artificial Sequence: Synthetic oligonucleotide
agcugacauugcuaaaugc

SEQ ID NO: 1582891 - RNA, 19 nt, Artificial Sequence
  Description of Artificial Sequence: Synthetic oligonucleotide
uuagguaaaucaugguuac

SEQ ID NO: 1582892 - RNA, 19 nt, Artificial Sequence
  Description of Artificial Sequence: Synthetic oligonucleotide
aaucagguuacucacugua

SEQ ID NO: 1582893 - RNA, 19 nt, Artificial Sequence
  Description of Artificial Sequence: Synthetic oligonucleotide
aaaagcagaugguaguuua

SEQ ID NO: 1582894 - RNA, 19 nt, Artificial Sequence
  Description of Artificial Sequence: Synthetic oligonucleotide
uuacuagucuuaaugacuu

SEQ ID NO: 1582895 - RNA, 19 nt, Artificial Sequence
  Description of Artificial Sequence: Synthetic oligonucleotide
ugaaucacaaaagauguua

SEQ ID NO: 1582896 - RNA, 19 nt, Artificial Sequence
  Description of Artificial Sequence: Synthetic oligonucleotide
ucagcgacgaacuggguca

SEQ ID NO: 1582897 - RNA, 19 nt, Artificial Sequence
  Description of Artificial Sequence: Synthetic oligonucleotide
gguauaauuaacaugacaa

SEQ ID NO: 1582898 - RNA, 19 nt, Artificial Sequence
  Description of Artificial Sequence: Synthetic oligonucleotide
cagaugguaguuuauugag

SEQ ID NO: 1582899 - RNA, 19 nt, Artificial Sequence
  Description of Artificial Sequence: Synthetic oligonucleotide
acgaucauaaucagguuac

SEQ ID NO: 1582900 - RNA, 19 nt, Artificial Sequence
  Description of Artificial Sequence: Synthetic oligonucleotide
ugcaguacacaaauaugca

SEQ ID NO: 1582901 - RNA, 19 nt, Artificial Sequence
  Description of Artificial Sequence: Synthetic oligonucleotide
aaccuaguccucuaagcca

SEQ ID NO: 1582902 - RNA, 19 nt, Artificial Sequence
  Description of Artificial Sequence: Synthetic oligonucleotide
guugcaacaccuaggauag

SEQ ID NO: 1582903 - RNA, 19 nt, Artificial Sequence
  Description of Artificial Sequence: Synthetic oligonucleotide
uacgaucauaaucagguua

SEQ ID NO: 1582904 - RNA, 19 nt, Artificial Sequence
  Description of Artificial Sequence: Synthetic oligonucleotide
ugucuuugaauaugcaagu

SEQ ID NO: 1582905 - RNA, 19 nt, Artificial Sequence
  Description of Artificial Sequence: Synthetic oligonucleotide
cuaagccauggauaaaccc

SEQ ID NO: 1582906 - RNA, 19 nt, Artificial Sequence
  Description of Artificial Sequence: Synthetic oligonucleotide
ugguagaauaauucaucag

SEQ ID NO: 1582907 - RNA, 19 nt, Artificial Sequence
  Description of Artificial Sequence: Synthetic oligonucleotide
ugucccaugaaugaccagc

SEQ ID NO: 1582908 - RNA, 19 nt, Artificial Sequence
  Description of Artificial Sequence: Synthetic oligonucleotide
agguuacucacuguauucc

SEQ ID NO: 1582909 - RNA, 19 nt, Artificial Sequence
  Description of Artificial Sequence: Synthetic oligonucleotide
gaaacuucacuuuuggccu

SEQ ID NO: 1582910 - RNA, 19 nt, Artificial Sequence
  Description of Artificial Sequence: Synthetic oligonucleotide
caucuugccagaacuacag

SEQ ID NO: 1582911 - RNA, 19 nt, Artificial Sequence
  Description of Artificial Sequence: Synthetic oligonucleotide
gaugguaguuuauugagcu

SEQ ID NO: 1582912 - RNA, 19 nt, Artificial Sequence
  Description of Artificial Sequence: Synthetic oligonucleotide
aacuguuaaccuguuaaga

SEQ ID NO: 1582913 - RNA, 19 nt, Artificial Sequence
  Description of Artificial Sequence: Synthetic oligonucleotide
aaauagaacgaaguacuaa

SEQ ID NO: 1582914 - RNA, 19 nt, Artificial Sequence
  Description of Artificial Sequence: Synthetic oligonucleotide
ugguaguuuauugagcucu

SEQ ID NO: 1582915 - RNA, 19 nt, Artificial Sequence
  Description of Artificial Sequence: Synthetic oligonucleotide
agguauaauuaacaugaca

SEQ ID NO: 1582916 - RNA, 19 nt, Artificial Sequence
  Description of Artificial Sequence: Synthetic oligonucleotide
uuaggucgaggacaaauaa

SEQ ID NO: 1582917 - RNA, 19 nt, Artificial Sequence
  Description of Artificial Sequence: Synthetic oligonucleotide
aagcugacauugcuaaaug

SEQ ID NO: 1582918 - RNA, 19 nt, Artificial Sequence
  Description of Artificial Sequence: Synthetic oligonucleotide
uucacuuuuggccuguauu

SEQ ID NO: 1582919 - RNA, 19 nt, Artificial Sequence
  Description of Artificial Sequence: Synthetic oligonucleotide
agcaucuuaggucgaggac

SEQ ID NO: 1582920 - RNA, 19 nt, Artificial Sequence
  Description of Artificial Sequence: Synthetic oligonucleotide
agaugguaguuuauugagc

SEQ ID NO: 1582921 - RNA, 19 nt, Artificial Sequence
  Description of Artificial Sequence: Synthetic oligonucleotide
uucagguaaaguguucuug

SEQ ID NO: 1582922 - RNA, 19 nt, Artificial Sequence
  Description of Artificial Sequence: Synthetic oligonucleotide
acaauauaaauagaacgaa

SEQ ID NO: 1582923 - RNA, 19 nt, Artificial Sequence
  Description of Artificial Sequence: Synthetic oligonucleotide
acgaaguacuaauguaaag

SEQ ID NO: 1582924 - RNA, 19 nt, Artificial Sequence
  Description of Artificial Sequence: Synthetic oligonucleotide
aaaaggaugugaagauaag

SEQ ID NO: 1582925 - RNA, 19 nt, Artificial Sequence
  Description of Artificial Sequence: Synthetic oligonucleotide
agcucuuugucuugaaaca

SEQ ID NO: 1582926 - RNA, 19 nt, Artificial Sequence
  Description of Artificial Sequence: Synthetic oligonucleotide
cauucaggcugauucauuc

SEQ ID NO: 1582927 - RNA, 19 nt, Artificial Sequence
  Description of Artificial Sequence: Synthetic oligonucleotide
uaggguaaaagcagauggu

SEQ ID NO: 1582928 - RNA, 19 nt, Artificial Sequence
  Description of Artificial Sequence: Synthetic oligonucleotide
ggacauggcauuuuacuag

SEQ ID NO: 1582929 - RNA, 19 nt, Artificial Sequence
  Description of Artificial Sequence: Synthetic oligonucleotide
ggaauauagguucuuuuac

SEQ ID NO: 1582930 - RNA, 19 nt, Artificial Sequence
  Description of Artificial Sequence: Synthetic oligonucleotide
uggauaaacccaugugaca

SEQ ID NO: 1582931 - RNA, 19 nt, Artificial Sequence
  Description of Artificial Sequence: Synthetic oligonucleotide
gaauauagguucuuuuacu

SEQ ID NO: 1582932 - RNA, 19 nt, Artificial Sequence
  Description of Artificial Sequence: Synthetic oligonucleotide
ucggaaguuccucagugaa

SEQ ID NO: 1582933 - RNA, 19 nt, Artificial Sequence
  Description of Artificial Sequence: Synthetic oligonucleotide
gaacgaaguacuaauguaa

SEQ ID NO: 1582934 - RNA, 19 nt, Artificial Sequence
  Description of Artificial Sequence: Synthetic oligonucleotide
cucuaagccauggauaaac

SEQ ID NO: 1582935 - RNA, 19 nt, Artificial Sequence
  Description of Artificial Sequence: Synthetic oligonucleotide
gguagaauaauucaucagu

SEQ ID NO: 1582936 - RNA, 19 nt, Artificial Sequence
  Description of Artificial Sequence: Synthetic oligonucleotide
aaacuucacuuuuggccug

SEQ ID NO: 1582937 - RNA, 19 nt, Artificial Sequence
  Description of Artificial Sequence: Synthetic oligonucleotide
gcuaaaugcuggcuuauag

SEQ ID NO: 1582938 - RNA, 19 nt, Artificial Sequence
  Description of Artificial Sequence: Synthetic oligonucleotide
acauucaaacaugcaguac

SEQ ID NO: 1582939 - RNA, 19 nt, Artificial Sequence
  Description of Artificial Sequence: Synthetic oligonucleotide
uacuaauguaaagaccaac

SEQ ID NO: 1582940 - RNA, 19 nt, Artificial Sequence
  Description of Artificial Sequence: Synthetic oligonucleotide
uaagcaucuuaggucgagg

SEQ ID NO: 1582941 - RNA, 19 nt, Artificial Sequence
  Description of Artificial Sequence: Synthetic oligonucleotide
acaggaaccugguuaagaa

SEQ ID NO: 1582942 - RNA, 19 nt, Artificial Sequence
  Description of Artificial Sequence: Synthetic oligonucleotide
ucuaucucuaaugcucuga

SEQ ID NO: 1582943 - RNA, 19 nt, Artificial Sequence
  Description of Artificial Sequence: Synthetic oligonucleotide
ucccauuccuaccaccgug

SEQ ID NO: 1582944 - RNA, 19 nt, Artificial Sequence
  Description of Artificial Sequence: Synthetic oligonucleotide
auugcuaaaugcuggcuua

SEQ ID NO: 1582945 - RNA, 19 nt, Artificial Sequence
  Description of Artificial Sequence: Synthetic oligonucleotide
cucagugaaucacaaaaga

SEQ ID NO: 1582946 - RNA, 19 nt, Artificial Sequence
  Description of Artificial Sequence: Synthetic oligonucleotide
gauagucaaggauguauaa

SEQ ID NO: 1582947 - RNA, 19 nt, Artificial Sequence
  Description of Artificial Sequence: Synthetic oligonucleotide
uuacucacuguauuccaaa

SEQ ID NO: 1582948 - RNA, 19 nt, Artificial Sequence
  Description of Artificial Sequence: Synthetic oligonucleotide
ucuuaggucgaggacaaau

SEQ ID NO: 1582949 - RNA, 19 nt, Artificial Sequence
  Description of Artificial Sequence: Synthetic oligonucleotide
agguaaaguguucuuguau

SEQ ID NO: 1582950 - RNA, 19 nt, Artificial Sequence
  Description of Artificial Sequence: Synthetic oligonucleotide
aacgaaguacuaauguaaa

SEQ ID NO: 1582951 - RNA, 19 nt, Artificial Sequence
  Description of Artificial Sequence: Synthetic oligonucleotide
aaacuguguugcaacaccu

SEQ ID NO: 1582952 - RNA, 19 nt, Artificial Sequence
  Description of Artificial Sequence: Synthetic oligonucleotide
caccaguccaauguggagg

SEQ ID NO: 1582953 - RNA, 19 nt, Artificial Sequence
  Description of Artificial Sequence: Synthetic oligonucleotide
gcaguacacaaauaugcag

SEQ ID NO: 1582954 - RNA, 19 nt, Artificial Sequence
  Description of Artificial Sequence: Synthetic oligonucleotide
cuaaugcucugaauugcac

SEQ ID NO: 1582955 - RNA, 19 nt, Artificial Sequence
  Description of Artificial Sequence: Synthetic oligonucleotide
agguaaaucaugguuacua

SEQ ID NO: 1582956 - RNA, 19 nt, Artificial Sequence
  Description of Artificial Sequence: Synthetic oligonucleotide
cacuguauuccaaaacuca

SEQ ID NO: 1582957 - RNA, 19 nt, Artificial Sequence
  Description of Artificial Sequence: Synthetic oligonucleotide
cucuaaugcucugaauugc

SEQ ID NO: 1582958 - RNA, 19 nt, Artificial Sequence
  Description of Artificial Sequence: Synthetic oligonucleotide
augaaacuguguugcaaca

SEQ ID NO: 1582959 - RNA, 19 nt, Artificial Sequence
  Description of Artificial Sequence: Synthetic oligonucleotide
gaucauaaucagguuacuc

SEQ ID NO: 1582960 - RNA, 19 nt, Artificial Sequence
  Description of Artificial Sequence: Synthetic oligonucleotide
uaguucuccucacaccagu

SEQ ID NO: 1582961 - RNA, 19 nt, Artificial Sequence
  Description of Artificial Sequence: Synthetic oligonucleotide
gacgaacugggucagcgca

SEQ ID NO: 1582962 - RNA, 19 nt, Artificial Sequence
  Description of Artificial Sequence: Synthetic oligonucleotide
cagaacuacaguaagugcu

SEQ ID NO: 1582963 - RNA, 19 nt, Artificial Sequence
  Description of Artificial Sequence: Synthetic oligonucleotide
uauagucagccaucuggac

SEQ ID NO: 1582964 - RNA, 19 nt, Artificial Sequence
  Description of Artificial Sequence: Synthetic oligonucleotide
auagaacgaaguacuaaug

SEQ ID NO: 1582965 - RNA, 19 nt, Artificial Sequence
  Description of Artificial Sequence: Synthetic oligonucleotide
ucuggacauggcauuuuac

SEQ ID NO: 1582966 - RNA, 19 nt, Artificial Sequence
  Description of Artificial Sequence: Synthetic oligonucleotide
auaaacugaaaaggaugug

SEQ ID NO: 1582967 - RNA, 19 nt, Artificial Sequence
  Description of Artificial Sequence: Synthetic oligonucleotide
uguauaaccuaguccucua

SEQ ID NO: 1582968 - RNA, 19 nt, Artificial Sequence
  Description of Artificial Sequence: Synthetic oligonucleotide
cuugccagaacuacaguaa

SEQ ID NO: 1582969 - RNA, 19 nt, Artificial Sequence
  Description of Artificial Sequence: Synthetic oligonucleotide
acccaggccaguuaaaaua

SEQ ID NO: 1582970 - RNA, 19 nt, Artificial Sequence
  Description of Artificial Sequence: Synthetic oligonucleotide
aaugaccagcacaaacugu

SEQ ID NO: 1582971 - RNA, 19 nt, Artificial Sequence
  Description of Artificial Sequence: Synthetic oligonucleotide
cagguuacucacuguauuc

SEQ ID NO: 1582972 - RNA, 19 nt, Artificial Sequence
  Description of Artificial Sequence: Synthetic oligonucleotide
cuaaauaagcagcaaugua

SEQ ID NO: 1582973 - RNA, 19 nt, Artificial Sequence
  Description of Artificial Sequence: Synthetic oligonucleotide
ugacuuuguucaauauuua

SEQ ID NO: 1582974 - RNA, 19 nt, Artificial Sequence
  Description of Artificial Sequence: Synthetic oligonucleotide
auguauaaccuaguccucu

SEQ ID NO: 1582975 - RNA, 19 nt, Artificial Sequence
  Description of Artificial Sequence: Synthetic oligonucleotide
acuaggguaaaagcagaug

SEQ ID NO: 1582976 - RNA, 19 nt, Artificial Sequence
  Description of Artificial Sequence: Synthetic oligonucleotide
ugacaacuacuuaguaaaa

SEQ ID NO: 1582977 - RNA, 19 nt, Artificial Sequence
  Description of Artificial Sequence: Synthetic oligonucleotide
cuguuaaccuguuaagaaa

SEQ ID NO: 1582978 - RNA, 19 nt, Artificial Sequence
  Description of Artificial Sequence: Synthetic oligonucleotide
auuggagguacgaucauaa

SEQ ID NO: 1582979 - RNA, 19 nt, Artificial Sequence
  Description of Artificial Sequence: Synthetic oligonucleotide
agauaaagccagaagcuaa

SEQ ID NO: 1582980 - RNA, 19 nt, Artificial Sequence
  Description of Artificial Sequence: Synthetic oligonucleotide
uaaacccaugugacaauau

SEQ ID NO: 1582981 - RNA, 19 nt, Artificial Sequence
  Description of Artificial Sequence: Synthetic oligonucleotide
ugcuggcuuauagucagcc

SEQ ID NO: 1582982 - RNA, 19 nt, Artificial Sequence
  Description of Artificial Sequence: Synthetic oligonucleotide
auucaggcugauucauuca

SEQ ID NO: 1582983 - RNA, 19 nt, Artificial Sequence
  Description of Artificial Sequence: Synthetic oligonucleotide
uagucuuaaugacuuuguu

SEQ ID NO: 1582984 - RNA, 19 nt, Artificial Sequence
  Description of Artificial Sequence: Synthetic oligonucleotide
cagcuguaaaucaugggga

SEQ ID NO: 1582985 - RNA, 19 nt, Artificial Sequence
  Description of Artificial Sequence: Synthetic oligonucleotide
gguaaaguguucuuguaua

SEQ ID NO: 1582986 - RNA, 19 nt, Artificial Sequence
  Description of Artificial Sequence: Synthetic oligonucleotide
uguaagcaucuuaggucga

SEQ ID NO: 1582987 - RNA, 19 nt, Artificial Sequence
  Description of Artificial Sequence: Synthetic oligonucleotide
gucgaggacaaauaagaua

SEQ ID NO: 1582988 - RNA, 19 nt, Artificial Sequence
  Description of Artificial Sequence: Synthetic oligonucleotide
cucagcgacgaacuggguc

SEQ ID NO: 1582989 - RNA, 19 nt, Artificial Sequence
  Description of Artificial Sequence: Synthetic oligonucleotide
uuccucggagguucaaaca

SEQ ID NO: 1582990 - RNA, 19 nt, Artificial Sequence
  Description of Artificial Sequence: Synthetic oligonucleotide
ucucuauguggcugauuca

SEQ ID NO: 1582991 - RNA, 19 nt, Artificial Sequence
  Description of Artificial Sequence: Synthetic oligonucleotide
cuucgcgguccacagcugg

SEQ ID NO: 1582992 - RNA, 19 nt, Artificial Sequence
  Description of Artificial Sequence: Synthetic oligonucleotide
gagugcuaaauaagcagca

SEQ ID NO: 1582993 - RNA, 19 nt, Artificial Sequence
  Description of Artificial Sequence: Synthetic oligonucleotide
ucagagucauguggaaaca

SEQ ID NO: 1582994 - RNA, 19 nt, Artificial Sequence
  Description of Artificial Sequence: Synthetic oligonucleotide
cauuccauacaugaccuga

SEQ ID NO: 1582995 - RNA, 19 nt, Artificial Sequence
  Description of Artificial Sequence: Synthetic oligonucleotide
gaauaauucaucaguguuu

SEQ ID NO: 1582996 - RNA, 19 nt, Artificial Sequence
  Description of Artificial Sequence: Synthetic oligonucleotide
augccaccaugcaugaaac

SEQ ID NO: 1582997 - RNA, 19 nt, Artificial Sequence
  Description of Artificial Sequence: Synthetic oligonucleotide
accgugagugcuaaauaag

SEQ ID NO: 1582998 - RNA, 19 nt, Artificial Sequence
  Description of Artificial Sequence: Synthetic oligonucleotide
uucauucaggcugauucau

SEQ ID NO: 1582999 - RNA, 19 nt, Artificial Sequence
  Description of Artificial Sequence: Synthetic oligonucleotide
agguacgaucauaaucagg

SEQ ID NO: 1583000 - RNA, 19 nt, Artificial Sequence
  Description of Artificial Sequence: Synthetic oligonucleotide
guaagcaucuuaggucgag

SEQ ID NO: 1583001 - RNA, 19 nt, Artificial Sequence
  Description of Artificial Sequence: Synthetic oligonucleotide
uagccuucgcgguccacag

SEQ ID NO: 1583002 - RNA, 19 nt, Artificial Sequence
  Description of Artificial Sequence: Synthetic oligonucleotide
agucuaucucuaaugcucu

SEQ ID NO: 1583003 - RNA, 19 nt, Artificial Sequence
  Description of Artificial Sequence: Synthetic oligonucleotide
uaguccucuaagccaugga

SEQ ID NO: 1583004 - RNA, 19 nt, Artificial Sequence
  Description of Artificial Sequence: Synthetic oligonucleotide
ccgugagugcuaaauaagc

SEQ ID NO: 1583005 - RNA, 19 nt, Artificial Sequence
  Description of Artificial Sequence: Synthetic oligonucleotide
gacauggcauuuuacuagu

SEQ ID NO: 1583006 - RNA, 19 nt, Artificial Sequence
  Description of Artificial Sequence: Synthetic oligonucleotide
guauuccaaaacucagcga

SEQ ID NO: 1583007 - RNA, 19 nt, Artificial Sequence
  Description of Artificial Sequence: Synthetic oligonucleotide
cuuaggucgaggacaaaua

SEQ ID NO: 1583008 - RNA, 19 nt, Artificial Sequence
  Description of Artificial Sequence: Synthetic oligonucleotide
agauagucaaggauguaua

SEQ ID NO: 1583009 - RNA, 19 nt, Artificial Sequence
  Description of Artificial Sequence: Synthetic oligonucleotide
ugaauagaacuaggguaaa

SEQ ID NO: 1583010 - RNA, 19 nt, Artificial Sequence
  Description of Artificial Sequence: Synthetic oligonucleotide
acaugacaacuacuuagua

SEQ ID NO: 1583011 - RNA, 19 nt, Artificial Sequence
  Description of Artificial Sequence: Synthetic oligonucleotide
acauuccauacaugaccug

SEQ ID NO: 1583012 - RNA, 19 nt, Artificial Sequence
  Description of Artificial Sequence: Synthetic oligonucleotide
auaaacccaugugacaaua

SEQ ID NO: 1583013 - RNA, 19 nt, Artificial Sequence
  Description of Artificial Sequence: Synthetic oligonucleotide
gccaccaugcaugaaacug

SEQ ID NO: 1583014 - RNA, 19 nt, Artificial Sequence
  Description of Artificial Sequence: Synthetic oligonucleotide
ccagaacuacaguaagugc

SEQ ID NO: 1583015 - RNA, 19 nt, Artificial Sequence
  Description of Artificial Sequence: Synthetic oligonucleotide
agaacuacaguaagugcuu

SEQ ID NO: 1583016 - RNA, 19 nt, Artificial Sequence
  Description of Artificial Sequence: Synthetic oligonucleotide
cuaucucuaaugcucugaa

SEQ ID NO: 1583017 - RNA, 19 nt, Artificial Sequence
  Description of Artificial Sequence: Synthetic oligonucleotide
guuaucuacauuccacaau

SEQ ID NO: 1583018 - RNA, 19 nt, Artificial Sequence
  Description of Artificial Sequence: Synthetic oligonucleotide
cauacaugaccugauggaa

SEQ ID NO: 1583019 - RNA, 19 nt, Artificial Sequence
  Description of Artificial Sequence: Synthetic oligonucleotide
caccgugagugcuaaauaa

SEQ ID NO: 1583020 - RNA, 19 nt, Artificial Sequence
  Description of Artificial Sequence: Synthetic oligonucleotide
aaagauagucaaggaugua

SEQ ID NO: 1583021 - RNA, 19 nt, Artificial Sequence
  Description of Artificial Sequence: Synthetic oligonucleotide
gccccaguagccuucgcgg

SEQ ID NO: 1583022 - RNA, 19 nt, Artificial Sequence
  Description of Artificial Sequence: Synthetic oligonucleotide
gucaaggauguauaaccua

SEQ ID NO: 1583023 - RNA, 19 nt, Artificial Sequence
  Description of Artificial Sequence: Synthetic oligonucleotide
gaauagaacuaggguaaaa

SEQ ID NO: 1583024 - RNA, 19 nt, Artificial Sequence
  Description of Artificial Sequence: Synthetic oligonucleotide
gagcccaucgcgccgccgc

SEQ ID NO: 1583025 - RNA, 19 nt, Artificial Sequence
  Description of Artificial Sequence: Synthetic oligonucleotide
gcaucuuaggucgaggaca

SEQ ID NO: 1583026 - RNA, 19 nt, Artificial Sequence
  Description of Artificial Sequence: Synthetic oligonucleotide
cacagcuggagcccaucgc

SEQ ID NO: 1583027 - RNA, 19 nt, Artificial Sequence
  Description of Artificial Sequence: Synthetic oligonucleotide
cuugugaugggcguggugu

SEQ ID NO: 1583028 - RNA, 19 nt, Artificial Sequence
  Description of Artificial Sequence: Synthetic oligonucleotide
acaaacuguuaaccuguua

SEQ ID NO: 1583029 - RNA, 19 nt, Artificial Sequence
  Description of Artificial Sequence: Synthetic oligonucleotide
ucguggggccccaguagcc

SEQ ID NO: 1583030 - RNA, 19 nt, Artificial Sequence
  Description of Artificial Sequence: Synthetic oligonucleotide
accaccgugagugcuaaau

SEQ ID NO: 1583031 - RNA, 19 nt, Artificial Sequence
  Description of Artificial Sequence: Synthetic oligonucleotide
gguuacucacuguauucca

SEQ ID NO: 1583032 - RNA, 19 nt, Artificial Sequence
  Description of Artificial Sequence: Synthetic oligonucleotide
uggccacaucccaaagaga

SEQ ID NO: 1583033 - RNA, 19 nt, Artificial Sequence
  Description of Artificial Sequence: Synthetic oligonucleotide
auaagaacccaggccaguu

SEQ ID NO: 1583034 - RNA, 19 nt, Artificial Sequence
  Description of Artificial Sequence: Synthetic oligonucleotide
agccaacagaccaauugcu

SEQ ID NO: 1583035 - RNA, 19 nt, Artificial Sequence
  Description of Artificial Sequence: Synthetic oligonucleotide
cagagucauguggaaacac

SEQ ID NO: 1583036 - RNA, 19 nt, Artificial Sequence
  Description of Artificial Sequence: Synthetic oligonucleotide
ccauggauaaacccaugug

SEQ ID NO: 1583037 - RNA, 19 nt, Artificial Sequence
  Description of Artificial Sequence: Synthetic oligonucleotide
guaaaucaugguuacuauu

SEQ ID NO: 1583038 - RNA, 19 nt, Artificial Sequence
  Description of Artificial Sequence: Synthetic oligonucleotide
agccuucgcgguccacagc

SEQ ID NO: 1583039 - RNA, 19 nt, Artificial Sequence
  Description of Artificial Sequence: Synthetic oligonucleotide
uuggagguacgaucauaau

SEQ ID NO: 1583040 - RNA, 19 nt, Artificial Sequence
  Description of Artificial Sequence: Synthetic oligonucleotide
ccaacagaccaauugcuca

SEQ ID NO: 1583041 - RNA, 19 nt, Artificial Sequence
  Description of Artificial Sequence: Synthetic oligonucleotide
accuaguccucuaagccau

SEQ ID NO: 1583042 - RNA, 19 nt, Artificial Sequence
  Description of Artificial Sequence: Synthetic oligonucleotide
guauaaccuaguccucuaa

SEQ ID NO: 1583043 - RNA, 19 nt, Artificial Sequence
  Description of Artificial Sequence: Synthetic oligonucleotide
gcaacaccuaggauagggg

SEQ ID NO: 1583044 - RNA, 19 nt, Artificial Sequence
  Description of Artificial Sequence: Synthetic oligonucleotide
ggcguggugucuuugaaua

SEQ ID NO: 1583045 - RNA, 19 nt, Artificial Sequence
  Description of Artificial Sequence: Synthetic oligonucleotide
cuuuuagguaaaucauggu

SEQ ID NO: 1583046 - RNA, 19 nt, Artificial Sequence
  Description of Artificial Sequence: Synthetic oligonucleotide
ggccccaguagccuucgcg

SEQ ID NO: 1583047 - RNA, 19 nt, Artificial Sequence
  Description of Artificial Sequence: Synthetic oligonucleotide
cgaaguacuaauguaaaga

SEQ ID NO: 1583048 - RNA, 19 nt, Artificial Sequence
  Description of Artificial Sequence: Synthetic oligonucleotide
ugggcguggugucuuugaa

SEQ ID NO: 1583049 - RNA, 19 nt, Artificial Sequence
  Description of Artificial Sequence: Synthetic oligonucleotide
augggcguggugucuuuga

SEQ ID NO: 1583050 - RNA, 19 nt, Artificial Sequence
  Description of Artificial Sequence: Synthetic oligonucleotide
gauaaacccaugugacaau

SEQ ID NO: 1583051 - RNA, 19 nt, Artificial Sequence
  Description of Artificial Sequence: Synthetic oligonucleotide
ccauacaugaccugaugga

SEQ ID NO: 1583052 - RNA, 19 nt, Artificial Sequence
  Description of Artificial Sequence: Synthetic oligonucleotide
uauaugccaucugcuuuuc

SEQ ID NO: 1583053 - RNA, 19 nt, Artificial Sequence
  Description of Artificial Sequence: Synthetic oligonucleotide
auuccauacaugaccugau

SEQ ID NO: 1583054 - RNA, 19 nt, Artificial Sequence
  Description of Artificial Sequence: Synthetic oligonucleotide
gaccaauugcucauucucu

SEQ ID NO: 1583055 - RNA, 19 nt, Artificial Sequence
  Description of Artificial Sequence: Synthetic oligonucleotide
uggaaacaccaggauccca

SEQ ID NO: 1583056 - RNA, 19 nt, Artificial Sequence
  Description of Artificial Sequence: Synthetic oligonucleotide
ggaucccauuccuaccacc

SEQ ID NO: 1583057 - RNA, 19 nt, Artificial Sequence
  Description of Artificial Sequence: Synthetic oligonucleotide
ugccaccaugcaugaaacu

SEQ ID NO: 1583058 - RNA, 19 nt, Artificial Sequence
  Description of Artificial Sequence: Synthetic oligonucleotide
guuacucacuguauuccaa

SEQ ID NO: 1583059 - RNA, 19 nt, Artificial Sequence
  Description of Artificial Sequence: Synthetic oligonucleotide
gcgacgaacugggucagcg

SEQ ID NO: 1583060 - RNA, 19 nt, Artificial Sequence
  Description of Artificial Sequence: Synthetic oligonucleotide
augugacaauauaaauaga

SEQ ID NO: 1583061 - RNA, 19 nt, Artificial Sequence
  Description of Artificial Sequence: Synthetic oligonucleotide
uacuagucuuaaugacuuu

SEQ ID NO: 1583062 - RNA, 19 nt, Artificial Sequence
  Description of Artificial Sequence: Synthetic oligonucleotide
uccuaccaccgugagugcu

SEQ ID NO: 1583063 - RNA, 19 nt, Artificial Sequence
  Description of Artificial Sequence: Synthetic oligonucleotide
uugcuaaaugcuggcuuau

SEQ ID NO: 1583064 - RNA, 19 nt, Artificial Sequence
  Description of Artificial Sequence: Synthetic oligonucleotide
ucgcgguccacagcuggag

SEQ ID NO: 1583065 - RNA, 19 nt, Artificial Sequence
  Description of Artificial Sequence: Synthetic oligonucleotide
ucggagguucaaacaugau

SEQ ID NO: 1583066 - RNA, 19 nt, Artificial Sequence
  Description of Artificial Sequence: Synthetic oligonucleotide
gauggaauauagguucuuu

SEQ ID NO: 1583067 - RNA, 19 nt, Artificial Sequence
  Description of Artificial Sequence: Synthetic oligonucleotide
gcugacauugcuaaaugcu

SEQ ID NO: 1583068 - RNA, 19 nt, Artificial Sequence
  Description of Artificial Sequence: Synthetic oligonucleotide
uuccuaccaccgugagugc

SEQ ID NO: 1583069 - RNA, 19 nt, Artificial Sequence
  Description of Artificial Sequence: Synthetic oligonucleotide
gccuguauuucagguaaag

SEQ ID NO: 1583070 - RNA, 19 nt, Artificial Sequence
  Description of Artificial Sequence: Synthetic oligonucleotide
gguaaaucaugguuacuau

SEQ ID NO: 1583071 - RNA, 19 nt, Artificial Sequence
  Description of Artificial Sequence: Synthetic oligonucleotide
ggucguggggccccaguag

SEQ ID NO: 1583072 - RNA, 19 nt, Artificial Sequence
  Description of Artificial Sequence: Synthetic oligonucleotide
cauugcuaaaugcuggcuu

SEQ ID NO: 1583073 - RNA, 19 nt, Artificial Sequence
  Description of Artificial Sequence: Synthetic oligonucleotide
ugcuaaaugcuggcuuaua

SEQ ID NO: 1583074 - RNA, 19 nt, Artificial Sequence
  Description of Artificial Sequence: Synthetic oligonucleotide
gcgguccacagcuggagcc

SEQ ID NO: 1583075 - RNA, 19 nt, Artificial Sequence
  Description of Artificial Sequence: Synthetic oligonucleotide
gggugcucucuuucggaag

SEQ ID NO: 1583076 - RNA, 19 nt, Artificial Sequence
  Description of Artificial Sequence: Synthetic oligonucleotide
cugauggaauauagguucu

SEQ ID NO: 1583077 - RNA, 19 nt, Artificial Sequence
  Description of Artificial Sequence: Synthetic oligonucleotide
gcuuauagucagccaucug

SEQ ID NO: 1583078 - RNA, 19 nt, Artificial Sequence
  Description of Artificial Sequence: Synthetic oligonucleotide
cagguaaaguguucuugua

SEQ ID NO: 1583079 - RNA, 19 nt, Artificial Sequence
  Description of Artificial Sequence: Synthetic oligonucleotide
gcugauucauucaggcuga

SEQ ID NO: 1583080 - RNA, 19 nt, Artificial Sequence
  Description of Artificial Sequence: Synthetic oligonucleotide
ccauuccagaauauaaaua

SEQ ID NO: 1583081 - RNA, 19 nt, Artificial Sequence
  Description of Artificial Sequence: Synthetic oligonucleotide
agcgacgaacugggucagc

SEQ ID NO: 1583082 - RNA, 19 nt, Artificial Sequence
  Description of Artificial Sequence: Synthetic oligonucleotide
cgugagugcuaaauaagca

SEQ ID NO: 1583083 - RNA, 19 nt, Artificial Sequence
  Description of Artificial Sequence: Synthetic oligonucleotide
cucuauguggcugauucau

SEQ ID NO: 1583084 - RNA, 19 nt, Artificial Sequence
  Description of Artificial Sequence: Synthetic oligonucleotide
caugaucacuggccacauc

SEQ ID NO: 1583085 - RNA, 19 nt, Artificial Sequence
  Description of Artificial Sequence: Synthetic oligonucleotide
aguagccuucgcgguccac

SEQ ID NO: 1583086 - RNA, 19 nt, Artificial Sequence
  Description of Artificial Sequence: Synthetic oligonucleotide
ggucagcgcauaguucucc

SEQ ID NO: 1583087 - RNA, 19 nt, Artificial Sequence
  Description of Artificial Sequence: Synthetic oligonucleotide
ggugcucucuuucggaagu

SEQ ID NO: 1583088 - RNA, 19 nt, Artificial Sequence
  Description of Artificial Sequence: Synthetic oligonucleotide
gaccaucuugccagaacua

SEQ ID NO: 1583089 - RNA, 19 nt, Artificial Sequence
  Description of Artificial Sequence: Synthetic oligonucleotide
uggggacuucuugaccauc

SEQ ID NO: 1583090 - RNA, 19 nt, Artificial Sequence
  Description of Artificial Sequence: Synthetic oligonucleotide
cagaccaauugcucauucu

SEQ ID NO: 1583091 - RNA, 19 nt, Artificial Sequence
  Description of Artificial Sequence: Synthetic oligonucleotide
gccauggauaaacccaugu

SEQ ID NO: 1583092 - RNA, 19 nt, Artificial Sequence
  Description of Artificial Sequence: Synthetic oligonucleotide
accaugcaugaaacugugu

SEQ ID NO: 1583093 - RNA, 19 nt, Artificial Sequence
  Description of Artificial Sequence: Synthetic oligonucleotide
cacucugcccggccggcuc

SEQ ID NO: 1583094 - RNA, 19 nt, Artificial Sequence
  Description of Artificial Sequence: Synthetic oligonucleotide
ugaugggcguggugucuuu

SEQ ID NO: 1583095 - RNA, 19 nt, Artificial Sequence
  Description of Artificial Sequence: Synthetic oligonucleotide
ccaggccaguuaaaauaug

SEQ ID NO: 1583096 - RNA, 19 nt, Artificial Sequence
  Description of Artificial Sequence: Synthetic oligonucleotide
ccauuccuaccaccgugag

SEQ ID NO: 1583097 - RNA, 19 nt, Artificial Sequence
  Description of Artificial Sequence: Synthetic oligonucleotide
agaacccaggccaguuaaa

SEQ ID NO: 1583098 - RNA, 19 nt, Artificial Sequence
  Description of Artificial Sequence: Synthetic oligonucleotide
gccuucgcgguccacagcu

SEQ ID NO: 1583099 - RNA, 19 nt, Artificial Sequence
  Description of Artificial Sequence: Synthetic oligonucleotide
guacgaucauaaucagguu

SEQ ID NO: 1583100 - RNA, 19 nt, Artificial Sequence
  Description of Artificial Sequence: Synthetic oligonucleotide
cagcgacgaacugggucag

SEQ ID NO: 1583101 - RNA, 19 nt, Artificial Sequence
  Description of Artificial Sequence: Synthetic oligonucleotide
cauuccuaccaccgugagu

SEQ ID NO: 1583102 - RNA, 19 nt, Artificial Sequence
  Description of Artificial Sequence: Synthetic oligonucleotide
cccauuccuaccaccguga

SEQ ID NO: 1583103 - RNA, 19 nt, Artificial Sequence
  Description of Artificial Sequence: Synthetic oligonucleotide
ggggugcucucuuucggaa

SEQ ID NO: 1583104 - RNA, 19 nt, Artificial Sequence
  Description of Artificial Sequence: Synthetic oligonucleotide
ccaccaugcaugaaacugu

SEQ ID NO: 1583105 - RNA, 19 nt, Artificial Sequence
  Description of Artificial Sequence: Synthetic oligonucleotide
gugaaucacaaaagauguu

SEQ ID NO: 1583106 - RNA, 19 nt, Artificial Sequence
  Description of Artificial Sequence: Synthetic oligonucleotide
cgacgaacugggucagcgc

SEQ ID NO: 1583107 - RNA, 19 nt, Artificial Sequence
  Description of Artificial Sequence: Synthetic oligonucleotide
gaggucguggggccccagu

SEQ ID NO: 1583108 - RNA, 19 nt, Artificial Sequence
  Description of Artificial Sequence: Synthetic oligonucleotide
ccuaguccucuaagccaug

SEQ ID NO: 1583109 - RNA, 19 nt, Artificial Sequence
  Description of Artificial Sequence: Synthetic oligonucleotide
ggucgaggacaaauaagau

SEQ ID NO: 1583110 - RNA, 19 nt, Artificial Sequence
  Description of Artificial Sequence: Synthetic oligonucleotide
cccaggccaguuaaaauau

SEQ ID NO: 1583111 - RNA, 19 nt, Artificial Sequence
  Description of Artificial Sequence: Synthetic oligonucleotide
aucuuaggucgaggacaaa

SEQ ID NO: 1583112 - RNA, 19 nt, Artificial Sequence
  Description of Artificial Sequence: Synthetic oligonucleotide
ccaauugcucauucucuau

SEQ ID NO: 1583113 - RNA, 19 nt, Artificial Sequence
  Description of Artificial Sequence: Synthetic oligonucleotide
ccaccgugagugcuaaaua

SEQ ID NO: 1583114 - RNA, 19 nt, Artificial Sequence
  Description of Artificial Sequence: Synthetic oligonucleotide
cgcgguccacagcuggagc

SEQ ID NO: 1583115 - RNA, 19 nt, Artificial Sequence
  Description of Artificial Sequence: Synthetic oligonucleotide
gggcguggugucuuugaau

SEQ ID NO: 1583116 - RNA, 19 nt, Artificial Sequence
  Description of Artificial Sequence: Synthetic oligonucleotide
gugaugggcguggugucuu

SEQ ID NO: 1583117 - RNA, 19 nt, Artificial Sequence
  Description of Artificial Sequence: Synthetic oligonucleotide
caguagccuucgcggucca

SEQ ID NO: 1583118 - RNA, 19 nt, Artificial Sequence
  Description of Artificial Sequence: Synthetic oligonucleotide
cuccucacaccaguccaau

SEQ ID NO: 1583119 - RNA, 19 nt, Artificial Sequence
  Description of Artificial Sequence: Synthetic oligonucleotide
ggaggucguggggccccag

SEQ ID NO: 1583120 - RNA, 19 nt, Artificial Sequence
  Description of Artificial Sequence: Synthetic oligonucleotide
cugauucauucaggcugau

SEQ ID NO: 1583121 - RNA, 19 nt, Artificial Sequence
  Description of Artificial Sequence: Synthetic oligonucleotide
ccccaguagccuucgcggu

SEQ ID NO: 1583122 - RNA, 19 nt, Artificial Sequence
  Description of Artificial Sequence: Synthetic oligonucleotide
cgaucauaaucagguuacu

SEQ ID NO: 1583123 - RNA, 19 nt, Artificial Sequence
  Description of Artificial Sequence: Synthetic oligonucleotide
aguaaaaccaccugcggcc

SEQ ID NO: 1583124 - RNA, 19 nt, Artificial Sequence
  Description of Artificial Sequence: Synthetic oligonucleotide
acaaucgucucaaagaugc

SEQ ID NO: 1583125 - RNA, 19 nt, Artificial Sequence
  Description of Artificial Sequence: Synthetic oligonucleotide
agggaaagugccuucagcc

SEQ ID NO: 1583126 - RNA, 19 nt, Artificial Sequence
  Description of Artificial Sequence: Synthetic oligonucleotide
ugaucuuaugcaaaacuag

SEQ ID NO: 1583127 - RNA, 19 nt, Artificial Sequence
  Description of Artificial Sequence: Synthetic oligonucleotide
guuuucacgaccuucagug

SEQ ID NO: 1583128 - RNA, 19 nt, Artificial Sequence
  Description of Artificial Sequence: Synthetic oligonucleotide
aaaacuagggaguccuuag

SEQ ID NO: 1583129 - RNA, 19 nt, Artificial Sequence
  Description of Artificial Sequence: Synthetic oligonucleotide
cuuaugcaaaacuagggag

SEQ ID NO: 1583130 - RNA, 19 nt, Artificial Sequence
  Description of Artificial Sequence: Synthetic oligonucleotide
uuguccugcauccacaugc

SEQ ID NO: 1583131 - RNA, 19 nt, Artificial Sequence
  Description of Artificial Sequence: Synthetic oligonucleotide
uauagaacuuguccaggcg

SEQ ID NO: 1583132 - RNA, 19 nt, Artificial Sequence
  Description of Artificial Sequence: Synthetic oligonucleotide
acuagggaguccuuagugc

SEQ ID NO: 1583133 - RNA, 19 nt, Artificial Sequence
  Description of Artificial Sequence: Synthetic oligonucleotide
gaucuuaugcaaaacuagg

SEQ ID NO: 1583134 - RNA, 19 nt, Artificial Sequence
  Description of Artificial Sequence: Synthetic oligonucleotide
ucucagucggcaauggccg

SEQ ID NO: 1583135 - RNA, 19 nt, Artificial Sequence
  Description of Artificial Sequence: Synthetic oligonucleotide
agcuugaacagucuguuag

SEQ ID NO: 1583136 - RNA, 19 nt, Artificial Sequence
  Description of Artificial Sequence: Synthetic oligonucleotide
uuaugcaaaacuagggagu

SEQ ID NO: 1583137 - RNA, 19 nt, Artificial Sequence
  Description of Artificial Sequence: Synthetic oligonucleotide
uggugugucuugcagaucc

SEQ ID NO: 1583138 - RNA, 19 nt, Artificial Sequence
  Description of Artificial Sequence: Synthetic oligonucleotide
ucauagucgaacuggagga

SEQ ID NO: 1583139 - RNA, 19 nt, Artificial Sequence
  Description of Artificial Sequence: Synthetic oligonucleotide
uggucugccagaaugcccg

SEQ ID NO: 1583140 - RNA, 19 nt, Artificial Sequence
  Description of Artificial Sequence: Synthetic oligonucleotide
augaugagaaccccgggac

SEQ ID NO: 1583141 - RNA, 19 nt, Artificial Sequence
  Description of Artificial Sequence: Synthetic oligonucleotide
ugaacagucuguuagccac

SEQ ID NO: 1583142 - RNA, 19 nt, Artificial Sequence
  Description of Artificial Sequence: Synthetic oligonucleotide
agggacaucaucaucaggg

SEQ ID NO: 1583143 - RNA, 19 nt, Artificial Sequence
  Description of Artificial Sequence: Synthetic oligonucleotide
uggaucacuuuguagaggc

SEQ ID NO: 1583144 - RNA, 19 nt, Artificial Sequence
  Description of Artificial Sequence: Synthetic oligonucleotide
uucucagucggcaauggcc

SEQ ID NO: 1583145 - RNA, 19 nt, Artificial Sequence
  Description of Artificial Sequence: Synthetic oligonucleotide
agugaucuuaugcaaaacu

SEQ ID NO: 1583146 - RNA, 19 nt, Artificial Sequence
  Description of Artificial Sequence: Synthetic oligonucleotide
aacuagggaguccuuagug

SEQ ID NO: 1583147 - RNA, 19 nt, Artificial Sequence
  Description of Artificial Sequence: Synthetic oligonucleotide
ucugaggacuucaucacca

SEQ ID NO: 1583148 - RNA, 19 nt, Artificial Sequence
  Description of Artificial Sequence: Synthetic oligonucleotide
cuagggaguccuuagugcg

SEQ ID NO: 1583149 - RNA, 19 nt, Artificial Sequence
  Description of Artificial Sequence: Synthetic oligonucleotide
uccucuuuaucccugggcu

SEQ ID NO: 1583150 - RNA, 19 nt, Artificial Sequence
  Description of Artificial Sequence: Synthetic oligonucleotide
cucuaggaagaucucaagg

SEQ ID NO: 1583151 - RNA, 19 nt, Artificial Sequence
  Description of Artificial Sequence: Synthetic oligonucleotide
uccuagaucuuccugcugu

SEQ ID NO: 1583152 - RNA, 19 nt, Artificial Sequence
  Description of Artificial Sequence: Synthetic oligonucleotide
aauggccguuuccucuucc

SEQ ID NO: 1583153 - RNA, 19 nt, Artificial Sequence
  Description of Artificial Sequence: Synthetic oligonucleotide
acuuuguagaggcgcuucc

SEQ ID NO: 1583154 - RNA, 19 nt, Artificial Sequence
  Description of Artificial Sequence: Synthetic oligonucleotide
uauucuguggcugcaaugu

SEQ ID NO: 1583155 - RNA, 19 nt, Artificial Sequence
  Description of Artificial Sequence: Synthetic oligonucleotide
aucuuaugcaaaacuaggg

SEQ ID NO: 1583156 - RNA, 19 nt, Artificial Sequence
  Description of Artificial Sequence: Synthetic oligonucleotide
ugugucuugcagauccugc

SEQ ID NO: 1583157 - RNA, 19 nt, Artificial Sequence
  Description of Artificial Sequence: Synthetic oligonucleotide
uauucuggucugcugugag

SEQ ID NO: 1583158 - RNA, 19 nt, Artificial Sequence
  Description of Artificial Sequence: Synthetic oligonucleotide
caucaucagggaaagugcc

SEQ ID NO: 1583159 - RNA, 19 nt, Artificial Sequence
  Description of Artificial Sequence: Synthetic oligonucleotide
ucgaugaacugcauauucu

SEQ ID NO: 1583160 - RNA, 19 nt, Artificial Sequence
  Description of Artificial Sequence: Synthetic oligonucleotide
agucggucgaugcccaccc

SEQ ID NO: 1583161 - RNA, 19 nt, Artificial Sequence
  Description of Artificial Sequence: Synthetic oligonucleotide
ugcguccuggccaugaugu

SEQ ID NO: 1583162 - RNA, 19 nt, Artificial Sequence
  Description of Artificial Sequence: Synthetic oligonucleotide
agucugaaaagcauggaug

SEQ ID NO: 1583163 - RNA, 19 nt, Artificial Sequence
  Description of Artificial Sequence: Synthetic oligonucleotide
ugcaaaacuagggaguccu

SEQ ID NO: 1583164 - RNA, 19 nt, Artificial Sequence
  Description of Artificial Sequence: Synthetic oligonucleotide
caugauguacuuccgcagc

SEQ ID NO: 1583165 - RNA, 19 nt, Artificial Sequence
  Description of Artificial Sequence: Synthetic oligonucleotide
ucgggguucaguaucucug

SEQ ID NO: 1583166 - RNA, 19 nt, Artificial Sequence
  Description of Artificial Sequence: Synthetic oligonucleotide
gucugaaaagcauggauga

SEQ ID NO: 1583167 - RNA, 19 nt, Artificial Sequence
  Description of Artificial Sequence: Synthetic oligonucleotide
ugcuaucuggcagaagggg

SEQ ID NO: 1583168 - RNA, 19 nt, Artificial Sequence
  Description of Artificial Sequence: Synthetic oligonucleotide
cagucuguuagccaccgcc

SEQ ID NO: 1583169 - RNA, 19 nt, Artificial Sequence
  Description of Artificial Sequence: Synthetic oligonucleotide
uuauucuguggcugcaaug

SEQ ID NO: 1583170 - RNA, 19 nt, Artificial Sequence
  Description of Artificial Sequence: Synthetic oligonucleotide
agugcgggcugcuaucugg

SEQ ID NO: 1583171 - RNA, 19 nt, Artificial Sequence
  Description of Artificial Sequence: Synthetic oligonucleotide
ucaaggaaguggcucuuca

SEQ ID NO: 1583172 - RNA, 19 nt, Artificial Sequence
  Description of Artificial Sequence: Synthetic oligonucleotide
ugcucuagcaccaggcuuc

SEQ ID NO: 1583173 - RNA, 19 nt, Artificial Sequence
  Description of Artificial Sequence: Synthetic oligonucleotide
ucgggucugcacuugaggc

SEQ ID NO: 1583174 - RNA, 19 nt, Artificial Sequence
  Description of Artificial Sequence: Synthetic oligonucleotide
ucuagcaccaggcuuccuc

SEQ ID NO: 1583175 - RNA, 19 nt, Artificial Sequence
  Description of Artificial Sequence: Synthetic oligonucleotide
aacagucuguuagccaccg

SEQ ID NO: 1583176 - RNA, 19 nt, Artificial Sequence
  Description of Artificial Sequence: Synthetic oligonucleotide
uagucgaacuggaggacag

SEQ ID NO: 1583177 - RNA, 19 nt, Artificial Sequence
  Description of Artificial Sequence: Synthetic oligonucleotide
ucuacuggcuagcuugaac

SEQ ID NO: 1583178 - RNA, 19 nt, Artificial Sequence
  Description of Artificial Sequence: Synthetic oligonucleotide
aaacuagggaguccuuagu

SEQ ID NO: 1583179 - RNA, 19 nt, Artificial Sequence
  Description of Artificial Sequence: Synthetic oligonucleotide
aaccucaugagcauauaga

SEQ ID NO: 1583180 - RNA, 19 nt, Artificial Sequence
  Description of Artificial Sequence: Synthetic oligonucleotide
cuugaacagucuguuagcc

SEQ ID NO: 1583181 - RNA, 19 nt, Artificial Sequence
  Description of Artificial Sequence: Synthetic oligonucleotide
acgaccuucagugacucuc

SEQ ID NO: 1583182 - RNA, 19 nt, Artificial Sequence
  Description of Artificial Sequence: Synthetic oligonucleotide
uuccuguucucagaagggg

SEQ ID NO: 1583183 - RNA, 19 nt, Artificial Sequence
  Description of Artificial Sequence: Synthetic oligonucleotide
ugaugagaaccccgggacc

SEQ ID NO: 1583184 - RNA, 19 nt, Artificial Sequence
  Description of Artificial Sequence: Synthetic oligonucleotide
cucuuuaucccugggcucg

SEQ ID NO: 1583185 - RNA, 19 nt, Artificial Sequence
  Description of Artificial Sequence: Synthetic oligonucleotide
aucucaaggaaguggcucu

SEQ ID NO: 1583186 - RNA, 19 nt, Artificial Sequence
  Description of Artificial Sequence: Synthetic oligonucleotide
ucauccggaguaaaaccac

SEQ ID NO: 1583187 - RNA, 19 nt, Artificial Sequence
  Description of Artificial Sequence: Synthetic oligonucleotide
cuggcuagcuugaacaguc

SEQ ID NO: 1583188 - RNA, 19 nt, Artificial Sequence
  Description of Artificial Sequence: Synthetic oligonucleotide
agcaccaaccucaugagca

SEQ ID NO: 1583189 - RNA, 19 nt, Artificial Sequence
  Description of Artificial Sequence: Synthetic oligonucleotide
uucaauggccaagggagcc

SEQ ID NO: 1583190 - RNA, 19 nt, Artificial Sequence
  Description of Artificial Sequence: Synthetic oligonucleotide
ucuguuagccaccgccuca

SEQ ID NO: 1583191 - RNA, 19 nt, Artificial Sequence
  Description of Artificial Sequence: Synthetic oligonucleotide
cuagcaccaggcuuccucc

SEQ ID NO: 1583192 - RNA, 19 nt, Artificial Sequence
  Description of Artificial Sequence: Synthetic oligonucleotide
uccggaguaaaaccaccug

SEQ ID NO: 1583193 - RNA, 19 nt, Artificial Sequence
  Description of Artificial Sequence: Synthetic oligonucleotide
cuaucuggcagaagggguc

SEQ ID NO: 1583194 - RNA, 19 nt, Artificial Sequence
  Description of Artificial Sequence: Synthetic oligonucleotide
ggaaagugccuucagccag

SEQ ID NO: 1583195 - RNA, 19 nt, Artificial Sequence
  Description of Artificial Sequence: Synthetic oligonucleotide
uccuguucucagaaggggu

SEQ ID NO: 1583196 - RNA, 19 nt, Artificial Sequence
  Description of Artificial Sequence: Synthetic oligonucleotide
caaccucaugagcauauag

SEQ ID NO: 1583197 - RNA, 19 nt, Artificial Sequence
  Description of Artificial Sequence: Synthetic oligonucleotide
ugcauauucuggucugcug

SEQ ID NO: 1583198 - RNA, 19 nt, Artificial Sequence
  Description of Artificial Sequence: Synthetic oligonucleotide
uacuggcuagcuugaacag

SEQ ID NO: 1583199 - RNA, 19 nt, Artificial Sequence
  Description of Artificial Sequence: Synthetic oligonucleotide
auggccguuuccucuuccc

SEQ ID NO: 1583200 - RNA, 19 nt, Artificial Sequence
  Description of Artificial Sequence: Synthetic oligonucleotide
uaucuggcagaaggggucg

SEQ ID NO: 1583201 - RNA, 19 nt, Artificial Sequence
  Description of Artificial Sequence: Synthetic oligonucleotide
caccucacuucucagucgg

SEQ ID NO: 1583202 - RNA, 19 nt, Artificial Sequence
  Description of Artificial Sequence: Synthetic oligonucleotide
uaaaaccaccugcggcccg

SEQ ID NO: 1583203 - RNA, 19 nt, Artificial Sequence
  Description of Artificial Sequence: Synthetic oligonucleotide
cacaucugcuccuugucug

SEQ ID NO: 1583204 - RNA, 19 nt, Artificial Sequence
  Description of Artificial Sequence: Synthetic oligonucleotide
cauauucuggucugcugug

SEQ ID NO: 1583205 - RNA, 19 nt, Artificial Sequence
  Description of Artificial Sequence: Synthetic oligonucleotide
ucgaacuggaggacagggc

SEQ ID NO: 1583206 - RNA, 19 nt, Artificial Sequence
  Description of Artificial Sequence: Synthetic oligonucleotide
cuuguccaggcgcagucgg

SEQ ID NO: 1583207 - RNA, 19 nt, Artificial Sequence
  Description of Artificial Sequence: Synthetic oligonucleotide
uccgcuucccaagaggccc

SEQ ID NO: 1583208 - RNA, 19 nt, Artificial Sequence
  Description of Artificial Sequence: Synthetic oligonucleotide
cauccggaguaaaaccacc

SEQ ID NO: 1583209 - RNA, 19 nt, Artificial Sequence
  Description of Artificial Sequence: Synthetic oligonucleotide
gaucucaaggaaguggcuc

SEQ ID NO: 1583210 - RNA, 19 nt, Artificial Sequence
  Description of Artificial Sequence: Synthetic oligonucleotide
uccgagugaucuuaugcaa

SEQ ID NO: 1583211 - RNA, 19 nt, Artificial Sequence
  Description of Artificial Sequence: Synthetic oligonucleotide
ccuuccuagaucuuccugc

SEQ ID NO: 1583212 - RNA, 19 nt, Artificial Sequence
  Description of Artificial Sequence: Synthetic oligonucleotide
cucauccggaguaaaacca

SEQ ID NO: 1583213 - RNA, 19 nt, Artificial Sequence
  Description of Artificial Sequence: Synthetic oligonucleotide
uacuuccgcagcuugcgca

SEQ ID NO: 1583214 - RNA, 19 nt, Artificial Sequence
  Description of Artificial Sequence: Synthetic oligonucleotide
uaucccugggcucgggucu

SEQ ID NO: 1583215 - RNA, 19 nt, Artificial Sequence
  Description of Artificial Sequence: Synthetic oligonucleotide
uuuucacgaccuucaguga

SEQ ID NO: 1583216 - RNA, 19 nt, Artificial Sequence
  Description of Artificial Sequence: Synthetic oligonucleotide
cugcuaucuggcagaaggg

SEQ ID NO: 1583217 - RNA, 19 nt, Artificial Sequence
  Description of Artificial Sequence: Synthetic oligonucleotide
uccuuccuagaucuuccug

SEQ ID NO: 1583218 - RNA, 19 nt, Artificial Sequence
  Description of Artificial Sequence: Synthetic oligonucleotide
gaugcccacccacucucgg

SEQ ID NO: 1583219 - RNA, 19 nt, Artificial Sequence
  Description of Artificial Sequence: Synthetic oligonucleotide
ggguucaguaucucugugg

SEQ ID NO: 1583220 - RNA, 19 nt, Artificial Sequence
  Description of Artificial Sequence: Synthetic oligonucleotide
ugggccaugcaccucacuu

SEQ ID NO: 1583221 - RNA, 19 nt, Artificial Sequence
  Description of Artificial Sequence: Synthetic oligonucleotide
aguccuuagugcgggcugc

SEQ ID NO: 1583222 - RNA, 19 nt, Artificial Sequence
  Description of Artificial Sequence: Synthetic oligonucleotide
uccguggguuuucacgacc

SEQ ID NO: 1583223 - RNA, 19 nt, Artificial Sequence
  Description of Artificial Sequence: Synthetic oligonucleotide
cucuguagucugaaaagca

SEQ ID NO: 1583224 - RNA, 19 nt, Artificial Sequence
  Description of Artificial Sequence: Synthetic oligonucleotide
gaggcuucugucucgcuuc

SEQ ID NO: 1583225 - RNA, 19 nt, Artificial Sequence
  Description of Artificial Sequence: Synthetic oligonucleotide
ugucuacuggcuagcuuga

SEQ ID NO: 1583226 - RNA, 19 nt, Artificial Sequence
  Description of Artificial Sequence: Synthetic oligonucleotide
ucggcaauggccguuuccu

SEQ ID NO: 1583227 - RNA, 19 nt, Artificial Sequence
  Description of Artificial Sequence: Synthetic oligonucleotide
caugaugagaaccccggga

SEQ ID NO: 1583228 - RNA, 19 nt, Artificial Sequence
  Description of Artificial Sequence: Synthetic oligonucleotide
caaucugucuuucuuccca

SEQ ID NO: 1583229 - RNA, 19 nt, Artificial Sequence
  Description of Artificial Sequence: Synthetic oligonucleotide
augcaaaacuagggagucc

SEQ ID NO: 1583230 - RNA, 19 nt, Artificial Sequence
  Description of Artificial Sequence: Synthetic oligonucleotide
aggcgcagucggucgaugc

SEQ ID NO: 1583231 - RNA, 19 nt, Artificial Sequence
  Description of Artificial Sequence: Synthetic oligonucleotide
gaaugcccgauggaacagg

SEQ ID NO: 1583232 - RNA, 19 nt, Artificial Sequence
  Description of Artificial Sequence: Synthetic oligonucleotide
cucgggucugcacuugagg

SEQ ID NO: 1583233 - RNA, 19 nt, Artificial Sequence
  Description of Artificial Sequence: Synthetic oligonucleotide
cuaggaagaucucaaggaa

SEQ ID NO: 1583234 - RNA, 19 nt, Artificial Sequence
  Description of Artificial Sequence: Synthetic oligonucleotide
aagggagccugcuccacaa

SEQ ID NO: 1583235 - RNA, 19 nt, Artificial Sequence
  Description of Artificial Sequence: Synthetic oligonucleotide
ucgaugcccacccacucuc

SEQ ID NO: 1583236 - RNA, 19 nt, Artificial Sequence
  Description of Artificial Sequence: Synthetic oligonucleotide
cacaaucgucucaaagaug

SEQ ID NO: 1583237 - RNA, 19 nt, Artificial Sequence
  Description of Artificial Sequence: Synthetic oligonucleotide
ugaggcuucugucucgcuu

SEQ ID NO: 1583238 - RNA, 19 nt, Artificial Sequence
  Description of Artificial Sequence: Synthetic oligonucleotide
ucacuucucagucggcaau

SEQ ID NO: 1583239 - RNA, 19 nt, Artificial Sequence
  Description of Artificial Sequence: Synthetic oligonucleotide
cauccguggguuuucacga

SEQ ID NO: 1583240 - RNA, 19 nt, Artificial Sequence
  Description of Artificial Sequence: Synthetic oligonucleotide
ugacugucgggguucagua

SEQ ID NO: 1583241 - RNA, 19 nt, Artificial Sequence
  Description of Artificial Sequence: Synthetic oligonucleotide
gacucucgcagcaccaacc

SEQ ID NO: 1583242 - RNA, 19 nt, Artificial Sequence
  Description of Artificial Sequence: Synthetic oligonucleotide
cuccgagugaucuuaugca

SEQ ID NO: 1583243 - RNA, 19 nt, Artificial Sequence
  Description of Artificial Sequence: Synthetic oligonucleotide
uuaucccugggcucggguc

SEQ ID NO: 1583244 - RNA, 19 nt, Artificial Sequence
  Description of Artificial Sequence: Synthetic oligonucleotide
cuuagugcgggcugcuauc

SEQ ID NO: 1583245 - RNA, 19 nt, Artificial Sequence
  Description of Artificial Sequence: Synthetic oligonucleotide
caucaucccacaucugcuc

SEQ ID NO: 1583246 - RNA, 19 nt, Artificial Sequence
  Description of Artificial Sequence: Synthetic oligonucleotide
caaggaaguggcucuucac

SEQ ID NO: 1583247 - RNA, 19 nt, Artificial Sequence
  Description of Artificial Sequence: Synthetic oligonucleotide
gaaguggcucuucacccca

SEQ ID NO: 1583248 - RNA, 19 nt, Artificial Sequence
  Description of Artificial Sequence: Synthetic oligonucleotide
caccccaggagccaugaug

SEQ ID NO: 1583249 - RNA, 19 nt, Artificial Sequence
  Description of Artificial Sequence: Synthetic oligonucleotide
acucucgcagcaccaaccu

SEQ ID NO: 1583250 - RNA, 19 nt, Artificial Sequence
  Description of Artificial Sequence: Synthetic oligonucleotide
gaaaugguccuuccuagau

SEQ ID NO: 1583251 - RNA, 19 nt, Artificial Sequence
  Description of Artificial Sequence: Synthetic oligonucleotide
agggaguccuuagugcggg

SEQ ID NO: 1583252 - RNA, 19 nt, Artificial Sequence
  Description of Artificial Sequence: Synthetic oligonucleotide
auagucgaacuggaggaca

SEQ ID NO: 1583253 - RNA, 19 nt, Artificial Sequence
  Description of Artificial Sequence: Synthetic oligonucleotide
acagucuguuagccaccgc

SEQ ID NO: 1583254 - RNA, 19 nt, Artificial Sequence
  Description of Artificial Sequence: Synthetic oligonucleotide
acuucucagucggcaaugg

SEQ ID NO: 1583255 - RNA, 19 nt, Artificial Sequence
  Description of Artificial Sequence: Synthetic oligonucleotide
ccauccguggguuuucacg

SEQ ID NO: 1583256 - RNA, 19 nt, Artificial Sequence
  Description of Artificial Sequence: Synthetic oligonucleotide
gugaucuuaugcaaaacua

SEQ ID NO: 1583257 - RNA, 19 nt, Artificial Sequence
  Description of Artificial Sequence: Synthetic oligonucleotide
cauggucugccagaaugcc

SEQ ID NO: 1583258 - RNA, 19 nt, Artificial Sequence
  Description of Artificial Sequence: Synthetic oligonucleotide
ucggucgaugcccacccac

SEQ ID NO: 1583259 - RNA, 19 nt, Artificial Sequence
  Description of Artificial Sequence: Synthetic oligonucleotide
accgccucauagucgaacu

SEQ ID NO: 1583260 - RNA, 19 nt, Artificial Sequence
  Description of Artificial Sequence: Synthetic oligonucleotide
aaugcccgauggaacaggu

SEQ ID NO: 1583261 - RNA, 19 nt, Artificial Sequence
  Description of Artificial Sequence: Synthetic oligonucleotide
uagaggcgcuuccuguucu

SEQ ID NO: 1583262 - RNA, 19 nt, Artificial Sequence
  Description of Artificial Sequence: Synthetic oligonucleotide
uuccuagaucuuccugcug

SEQ ID NO: 1583263 - RNA, 19 nt, Artificial Sequence
  Description of Artificial Sequence: Synthetic oligonucleotide
cggaguaaaaccaccugcg

SEQ ID NO: 1583264 - RNA, 19 nt, Artificial Sequence
  Description of Artificial Sequence: Synthetic oligonucleotide
caucugacgcugcuucccc

SEQ ID NO: 1583265 - RNA, 19 nt, Artificial Sequence
  Description of Artificial Sequence: Synthetic oligonucleotide
ucuuuaucccugggcucgg

SEQ ID NO: 1583266 - RNA, 19 nt, Artificial Sequence
  Description of Artificial Sequence: Synthetic oligonucleotide
ucugucuacuggcuagcuu

SEQ ID NO: 1583267 - RNA, 19 nt, Artificial Sequence
  Description of Artificial Sequence: Synthetic oligonucleotide
gcuugaacagucuguuagc

SEQ ID NO: 1583268 - RNA, 19 nt, Artificial Sequence
  Description of Artificial Sequence: Synthetic oligonucleotide
ccggaguaaaaccaccugc

SEQ ID NO: 1583269 - RNA, 19 nt, Artificial Sequence
  Description of Artificial Sequence: Synthetic oligonucleotide
cagugacucucgcagcacc

SEQ ID NO: 1583270 - RNA, 19 nt, Artificial Sequence
  Description of Artificial Sequence: Synthetic oligonucleotide
agaaggggugcucugucua

SEQ ID NO: 1583271 - RNA, 19 nt, Artificial Sequence
  Description of Artificial Sequence: Synthetic oligonucleotide
guaaaaccaccugcggccc

SEQ ID NO: 1583272 - RNA, 19 nt, Artificial Sequence
  Description of Artificial Sequence: Synthetic oligonucleotide
agaaugcccgauggaacag

SEQ ID NO: 1583273 - RNA, 19 nt, Artificial Sequence
  Description of Artificial Sequence: Synthetic oligonucleotide
ugagaaccccgggaccacg

SEQ ID NO: 1583274 - RNA, 19 nt, Artificial Sequence
  Description of Artificial Sequence: Synthetic oligonucleotide
cuagaucuuccugcuguag

SEQ ID NO: 1583275 - RNA, 19 nt, Artificial Sequence
  Description of Artificial Sequence: Synthetic oligonucleotide
uuagugcgggcugcuaucu

SEQ ID NO: 1583276 - RNA, 19 nt, Artificial Sequence
  Description of Artificial Sequence: Synthetic oligonucleotide
gaugcuccgagugaucuua

SEQ ID NO: 1583277 - RNA, 19 nt, Artificial Sequence
  Description of Artificial Sequence: Synthetic oligonucleotide
cccuuucuuauucuguggc

SEQ ID NO: 1583278 - RNA, 19 nt, Artificial Sequence
  Description of Artificial Sequence: Synthetic oligonucleotide
gagugaucuuaugcaaaac

SEQ ID NO: 1583279 - RNA, 19 nt, Artificial Sequence
  Description of Artificial Sequence: Synthetic oligonucleotide
ucauugcccgccaggcgcu

SEQ ID NO: 1583280 - RNA, 19 nt, Artificial Sequence
  Description of Artificial Sequence: Synthetic oligonucleotide
cccuaugggagccugcagg

SEQ ID NO: 1583281 - RNA, 19 nt, Artificial Sequence
  Description of Artificial Sequence: Synthetic oligonucleotide
acuuguccaggcgcagucg

SEQ ID NO: 1583282 - RNA, 19 nt, Artificial Sequence
  Description of Artificial Sequence: Synthetic oligonucleotide
ugccagaaugcccgaugga

SEQ ID NO: 1583283 - RNA, 19 nt, Artificial Sequence
  Description of Artificial Sequence: Synthetic oligonucleotide
augcaccucacuucucagu

SEQ ID NO: 1583284 - RNA, 19 nt, Artificial Sequence
  Description of Artificial Sequence: Synthetic oligonucleotide
gcccacuuuggucagcucc

SEQ ID NO: 1583285 - RNA, 19 nt, Artificial Sequence
  Description of Artificial Sequence: Synthetic oligonucleotide
ucaauggccaagggagccu

SEQ ID NO: 1583286 - RNA, 19 nt, Artificial Sequence
  Description of Artificial Sequence: Synthetic oligonucleotide
ucuuauucuguggcugcaa

SEQ ID NO: 1583287 - RNA, 19 nt, Artificial Sequence
  Description of Artificial Sequence: Synthetic oligonucleotide
uggccguuuccucuucccu

SEQ ID NO: 1583288 - RNA, 19 nt, Artificial Sequence
  Description of Artificial Sequence: Synthetic oligonucleotide
ugcccacccacucucggau

SEQ ID NO: 1583289 - RNA, 19 nt, Artificial Sequence
  Description of Artificial Sequence: Synthetic oligonucleotide
ggaaguggcucuucacccc

SEQ ID NO: 1583290 - RNA, 19 nt, Artificial Sequence
  Description of Artificial Sequence: Synthetic oligonucleotide
uucagccaggucccgcaac

SEQ ID NO: 1583291 - RNA, 19 nt, Artificial Sequence
  Description of Artificial Sequence: Synthetic oligonucleotide
agaggcgcuuccuguucuc

SEQ ID NO: 1583292 - RNA, 19 nt, Artificial Sequence
  Description of Artificial Sequence: Synthetic oligonucleotide
cugcucauugcccgccagg

SEQ ID NO: 1583293 - RNA, 19 nt, Artificial Sequence
  Description of Artificial Sequence: Synthetic oligonucleotide
cugcucauccucugaggac

SEQ ID NO: 1583294 - RNA, 19 nt, Artificial Sequence
  Description of Artificial Sequence: Synthetic oligonucleotide
uuccuccgcuucccaagag

SEQ ID NO: 1583295 - RNA, 19 nt, Artificial Sequence
  Description of Artificial Sequence: Synthetic oligonucleotide
auauucuggucugcuguga

SEQ ID NO: 1583296 - RNA, 19 nt, Artificial Sequence
  Description of Artificial Sequence: Synthetic oligonucleotide
acuggcuagcuugaacagu

SEQ ID NO: 1583297 - RNA, 19 nt, Artificial Sequence
  Description of Artificial Sequence: Synthetic oligonucleotide
uugcgcaccgcgcgguccc

SEQ ID NO: 1583298 - RNA, 19 nt, Artificial Sequence
  Description of Artificial Sequence: Synthetic oligonucleotide
ccucaugagcauauagaac

SEQ ID NO: 1583299 - RNA, 19 nt, Artificial Sequence
  Description of Artificial Sequence: Synthetic oligonucleotide
acucucggaucauggucug

SEQ ID NO: 1583300 - RNA, 19 nt, Artificial Sequence
  Description of Artificial Sequence: Synthetic oligonucleotide
ugcuccgagugaucuuaug

SEQ ID NO: 1583301 - RNA, 19 nt, Artificial Sequence
  Description of Artificial Sequence: Synthetic oligonucleotide
acccacucucggaucaugg

SEQ ID NO: 1583302 - RNA, 19 nt, Artificial Sequence
  Description of Artificial Sequence: Synthetic oligonucleotide
agucuguuagccaccgccu

SEQ ID NO: 1583303 - RNA, 19 nt, Artificial Sequence
  Description of Artificial Sequence: Synthetic oligonucleotide
gucggcaauggccguuucc

SEQ ID NO: 1583304 - RNA, 19 nt, Artificial Sequence
  Description of Artificial Sequence: Synthetic oligonucleotide
cuccgcuucccaagaggcc

SEQ ID NO: 1583305 - RNA, 19 nt, Artificial Sequence
  Description of Artificial Sequence: Synthetic oligonucleotide
augagaaccccgggaccac

SEQ ID NO: 1583306 - RNA, 19 nt, Artificial Sequence
  Description of Artificial Sequence: Synthetic oligonucleotide
gaaccccgggaccacgcac

SEQ ID NO: 1583307 - RNA, 19 nt, Artificial Sequence
  Description of Artificial Sequence: Synthetic oligonucleotide
uucccaagaggcccucuuu

SEQ ID NO: 1583308 - RNA, 19 nt, Artificial Sequence
  Description of Artificial Sequence: Synthetic oligonucleotide
ccuccgcuucccaagaggc

SEQ ID NO: 1583309 - RNA, 19 nt, Artificial Sequence
  Description of Artificial Sequence: Synthetic oligonucleotide
ggcuagcuugaacagucug

SEQ ID NO: 1583310 - RNA, 19 nt, Artificial Sequence
  Description of Artificial Sequence: Synthetic oligonucleotide
ucagcccuaugggagccug

SEQ ID NO: 1583311 - RNA, 19 nt, Artificial Sequence
  Description of Artificial Sequence: Synthetic oligonucleotide
cauaucuucagcagcucau

SEQ ID NO: 1583312 - RNA, 19 nt, Artificial Sequence
  Description of Artificial Sequence: Synthetic oligonucleotide
uccaggcgcagucggucga

SEQ ID NO: 1583313 - RNA, 19 nt, Artificial Sequence
  Description of Artificial Sequence: Synthetic oligonucleotide
auccggaguaaaaccaccu

SEQ ID NO: 1583314 - RNA, 19 nt, Artificial Sequence
  Description of Artificial Sequence: Synthetic oligonucleotide
aaccccgggaccacgcacu

SEQ ID NO: 1583315 - RNA, 19 nt, Artificial Sequence
  Description of Artificial Sequence: Synthetic oligonucleotide
ggugcugugucucuguagu

SEQ ID NO: 1583316 - RNA, 19 nt, Artificial Sequence
  Description of Artificial Sequence: Synthetic oligonucleotide
gggaaagugccuucagcca

SEQ ID NO: 1583317 - RNA, 19 nt, Artificial Sequence
  Description of Artificial Sequence: Synthetic oligonucleotide
guggguuuucacgaccuuc

SEQ ID NO: 1583318 - RNA, 19 nt, Artificial Sequence
  Description of Artificial Sequence: Synthetic oligonucleotide
gguccuuccuagaucuucc

SEQ ID NO: 1583319 - RNA, 19 nt, Artificial Sequence
  Description of Artificial Sequence: Synthetic oligonucleotide
uuguccaggcgcagucggu

SEQ ID NO: 1583320 - RNA, 19 nt, Artificial Sequence
  Description of Artificial Sequence: Synthetic oligonucleotide
cuuguccugcauccacaug

SEQ ID NO: 1583321 - RNA, 19 nt, Artificial Sequence
  Description of Artificial Sequence: Synthetic oligonucleotide
guagucugaaaagcaugga

SEQ ID NO: 1583322 - RNA, 19 nt, Artificial Sequence
  Description of Artificial Sequence: Synthetic oligonucleotide
ucacucugugaguccaguu

SEQ ID NO: 1583323 - RNA, 19 nt, Artificial Sequence
  Description of Artificial Sequence: Synthetic oligonucleotide
uagugcgggcugcuaucug

SEQ ID NO: 1583324 - RNA, 19 nt, Artificial Sequence
  Description of Artificial Sequence: Synthetic oligonucleotide
gacagggccaguguuuucu

SEQ ID NO: 1583325 - RNA, 19 nt, Artificial Sequence
  Description of Artificial Sequence: Synthetic oligonucleotide
gagaaccccgggaccacgc

SEQ ID NO: 1583326 - RNA, 19 nt, Artificial Sequence
  Description of Artificial Sequence: Synthetic oligonucleotide
ggccguuuccucuucccug

SEQ ID NO: 1583327 - RNA, 19 nt, Artificial Sequence
  Description of Artificial Sequence: Synthetic oligonucleotide
gccguuuccucuucccugc

SEQ ID NO: 1583328 - RNA, 19 nt, Artificial Sequence
  Description of Artificial Sequence: Synthetic oligonucleotide
caaaacuagggaguccuua

SEQ ID NO: 1583329 - RNA, 19 nt, Artificial Sequence
  Description of Artificial Sequence: Synthetic oligonucleotide
accaaccucaugagcauau

SEQ ID NO: 1583330 - RNA, 19 nt, Artificial Sequence
  Description of Artificial Sequence: Synthetic oligonucleotide
ccucugaggacuucaucac

SEQ ID NO: 1583331 - RNA, 19 nt, Artificial Sequence
  Description of Artificial Sequence: Synthetic oligonucleotide
cccucuuugaccagccuuc

SEQ ID NO: 1583332 - RNA, 19 nt, Artificial Sequence
  Description of Artificial Sequence: Synthetic oligonucleotide
ggggugcucugucuacugg

SEQ ID NO: 1583333 - RNA, 19 nt, Artificial Sequence
  Description of Artificial Sequence: Synthetic oligonucleotide
aagcauggaugagcuggga

SEQ ID NO: 1583334 - RNA, 19 nt, Artificial Sequence
  Description of Artificial Sequence: Synthetic oligonucleotide
cucacuucucagucggcaa

SEQ ID NO: 1583335 - RNA, 19 nt, Artificial Sequence
  Description of Artificial Sequence: Synthetic oligonucleotide
augcccacccacucucgga

SEQ ID NO: 1583336 - RNA, 19 nt, Artificial Sequence
  Description of Artificial Sequence: Synthetic oligonucleotide
cuuccuagaucuuccugcu

SEQ ID NO: 1583337 - RNA, 19 nt, Artificial Sequence
  Description of Artificial Sequence: Synthetic oligonucleotide
gggucgaugaacugcauau

SEQ ID NO: 1583338 - RNA, 19 nt, Artificial Sequence
  Description of Artificial Sequence: Synthetic oligonucleotide
agucggcaauggccguuuc

SEQ ID NO: 1583339 - RNA, 19 nt, Artificial Sequence
  Description of Artificial Sequence: Synthetic oligonucleotide
agaaccccgggaccacgca

SEQ ID NO: 1583340 - RNA, 19 nt, Artificial Sequence
  Description of Artificial Sequence: Synthetic oligonucleotide
ccccuuucuuauucugugg

SEQ ID NO: 1583341 - RNA, 19 nt, Artificial Sequence
  Description of Artificial Sequence: Synthetic oligonucleotide
ggguuuucacgaccuucag

SEQ ID NO: 1583342 - RNA, 19 nt, Artificial Sequence
  Description of Artificial Sequence: Synthetic oligonucleotide
ucccgcgucaccugcucau

SEQ ID NO: 1583343 - RNA, 19 nt, Artificial Sequence
  Description of Artificial Sequence: Synthetic oligonucleotide
gcucuucaccccauugggg

SEQ ID NO: 1583344 - RNA, 19 nt, Artificial Sequence
  Description of Artificial Sequence: Synthetic oligonucleotide
ggaucacuuuguagaggcg

SEQ ID NO: 1583345 - RNA, 19 nt, Artificial Sequence
  Description of Artificial Sequence: Synthetic oligonucleotide
cagucggucgaugcccacc

SEQ ID NO: 1583346 - RNA, 19 nt, Artificial Sequence
  Description of Artificial Sequence: Synthetic oligonucleotide
gcagaaggggucgaugaac

SEQ ID NO: 1583347 - RNA, 19 nt, Artificial Sequence
  Description of Artificial Sequence: Synthetic oligonucleotide
accucacuucucagucggc

SEQ ID NO: 1583348 - RNA, 19 nt, Artificial Sequence
  Description of Artificial Sequence: Synthetic oligonucleotide
ugcgggcugcuaucuggca

SEQ ID NO: 1583349 - RNA, 19 nt, Artificial Sequence
  Description of Artificial Sequence: Synthetic oligonucleotide
cugcguccuggccaugaug

SEQ ID NO: 1583350 - RNA, 19 nt, Artificial Sequence
  Description of Artificial Sequence: Synthetic oligonucleotide
cucuuugaccagccuucuc

SEQ ID NO: 1583351 - RNA, 19 nt, Artificial Sequence
  Description of Artificial Sequence: Synthetic oligonucleotide
ccugcauccacaugcagua

SEQ ID NO: 1583352 - RNA, 19 nt, Artificial Sequence
  Description of Artificial Sequence: Synthetic oligonucleotide
gcgggcugcuaucuggcag

SEQ ID NO: 1583353 - RNA, 19 nt, Artificial Sequence
  Description of Artificial Sequence: Synthetic oligonucleotide
gggagccugcuccacaauc

SEQ ID NO: 1583354 - RNA, 19 nt, Artificial Sequence
  Description of Artificial Sequence: Synthetic oligonucleotide
gggguucaguaucucugug

SEQ ID NO: 1583355 - RNA, 19 nt, Artificial Sequence
  Description of Artificial Sequence: Synthetic oligonucleotide
agccaccgccucauagucg

SEQ ID NO: 1583356 - RNA, 19 nt, Artificial Sequence
  Description of Artificial Sequence: Synthetic oligonucleotide
cuuauucuguggcugcaau

SEQ ID NO: 1583357 - RNA, 19 nt, Artificial Sequence
  Description of Artificial Sequence: Synthetic oligonucleotide
cuuccuccgcuucccaaga

SEQ ID NO: 1583358 - RNA, 19 nt, Artificial Sequence
  Description of Artificial Sequence: Synthetic oligonucleotide
gcaguaaaacagcccuuuc

SEQ ID NO: 1583359 - RNA, 19 nt, Artificial Sequence
  Description of Artificial Sequence: Synthetic oligonucleotide
cucaaggaaguggcucuuc

SEQ ID NO: 1583360 - RNA, 19 nt, Artificial Sequence
  Description of Artificial Sequence: Synthetic oligonucleotide
gcgucaccugcucauugcc

SEQ ID NO: 1583361 - RNA, 19 nt, Artificial Sequence
  Description of Artificial Sequence: Synthetic oligonucleotide
ugggcucgggucugcacuu

SEQ ID NO: 1583362 - RNA, 19 nt, Artificial Sequence
  Description of Artificial Sequence: Synthetic oligonucleotide
cucucgcagcaccaaccuc

SEQ ID NO: 1583363 - RNA, 19 nt, Artificial Sequence
  Description of Artificial Sequence: Synthetic oligonucleotide
cgaccuucagugacucucg

SEQ ID NO: 1583364 - RNA, 19 nt, Artificial Sequence
  Description of Artificial Sequence: Synthetic oligonucleotide
caccgccucauagucgaac

SEQ ID NO: 1583365 - RNA, 19 nt, Artificial Sequence
  Description of Artificial Sequence: Synthetic oligonucleotide
ucuucccauccguggguuu

SEQ ID NO: 1583366 - RNA, 19 nt, Artificial Sequence
  Description of Artificial Sequence: Synthetic oligonucleotide
cucggaucauggucugcca

SEQ ID NO: 1583367 - RNA, 19 nt, Artificial Sequence
  Description of Artificial Sequence: Synthetic oligonucleotide
ucagucggcaauggccguu

SEQ ID NO: 1583368 - RNA, 19 nt, Artificial Sequence
  Description of Artificial Sequence: Synthetic oligonucleotide
ggguggugugucuugcaga

SEQ ID NO: 1583369 - RNA, 19 nt, Artificial Sequence
  Description of Artificial Sequence: Synthetic oligonucleotide
gggccaugcaccucacuuc

SEQ ID NO: 1583370 - RNA, 19 nt, Artificial Sequence
  Description of Artificial Sequence: Synthetic oligonucleotide
aguggcucuucaccccauu

SEQ ID NO: 1583371 - RNA, 19 nt, Artificial Sequence
  Description of Artificial Sequence: Synthetic oligonucleotide
gcugcaaugugggcaaaca

SEQ ID NO: 1583372 - RNA, 19 nt, Artificial Sequence
  Description of Artificial Sequence: Synthetic oligonucleotide
cuagcuugaacagucuguu

SEQ ID NO: 1583373 - RNA, 19 nt, Artificial Sequence
  Description of Artificial Sequence: Synthetic oligonucleotide
cugcacuugaggcuucugu

SEQ ID NO: 1583374 - RNA, 19 nt, Artificial Sequence
  Description of Artificial Sequence: Synthetic oligonucleotide
gccagaaugcccgauggaa

SEQ ID NO: 1583375 - RNA, 19 nt, Artificial Sequence
  Description of Artificial Sequence: Synthetic oligonucleotide
uguuagccaccgccucaua

SEQ ID NO: 1583376 - RNA, 19 nt, Artificial Sequence
  Description of Artificial Sequence: Synthetic oligonucleotide
gagcggcaccccaggagcc

SEQ ID NO: 1583377 - RNA, 19 nt, Artificial Sequence
  Description of Artificial Sequence: Synthetic oligonucleotide
gugcgggcugcuaucuggc

SEQ ID NO: 1583378 - RNA, 19 nt, Artificial Sequence
  Description of Artificial Sequence: Synthetic oligonucleotide
ccaucugacgcugcuuccc

SEQ ID NO: 1583379 - RNA, 19 nt, Artificial Sequence
  Description of Artificial Sequence: Synthetic oligonucleotide
ccauaucuucagcagcuca

SEQ ID NO: 1583380 - RNA, 19 nt, Artificial Sequence
  Description of Artificial Sequence: Synthetic oligonucleotide
cagcccuaugggagccugc

SEQ ID NO: 1583381 - RNA, 19 nt, Artificial Sequence
  Description of Artificial Sequence: Synthetic oligonucleotide
gaucuccggcgggagcggc

SEQ ID NO: 1583382 - RNA, 19 nt, Artificial Sequence
  Description of Artificial Sequence: Synthetic oligonucleotide
ucgcagcaccaaccucaug

SEQ ID NO: 1583383 - RNA, 19 nt, Artificial Sequence
  Description of Artificial Sequence: Synthetic oligonucleotide
cucucggaucauggucugc

SEQ ID NO: 1583384 - RNA, 19 nt, Artificial Sequence
  Description of Artificial Sequence: Synthetic oligonucleotide
ggucgaugcccacccacuc

SEQ ID NO: 1583385 - RNA, 19 nt, Artificial Sequence
  Description of Artificial Sequence: Synthetic oligonucleotide
ugccuucagccaggucccg

SEQ ID NO: 1583386 - RNA, 19 nt, Artificial Sequence
  Description of Artificial Sequence: Synthetic oligonucleotide
cagcucauccggaguaaaa

SEQ ID NO: 1583387 - RNA, 19 nt, Artificial Sequence
  Description of Artificial Sequence: Synthetic oligonucleotide
uucccauccguggguuuuc

SEQ ID NO: 1583388 - RNA, 19 nt, Artificial Sequence
  Description of Artificial Sequence: Synthetic oligonucleotide
ucccauccguggguuuuca

SEQ ID NO: 1583389 - RNA, 19 nt, Artificial Sequence
  Description of Artificial Sequence: Synthetic oligonucleotide
gcacuugaggcuucugucu

SEQ ID NO: 1583390 - RNA, 19 nt, Artificial Sequence
  Description of Artificial Sequence: Synthetic oligonucleotide
agcagcucauccggaguaa

SEQ ID NO: 1583391 - RNA, 19 nt, Artificial Sequence
  Description of Artificial Sequence: Synthetic oligonucleotide
gucgaugcccacccacucu

SEQ ID NO: 1583392 - RNA, 19 nt, Artificial Sequence
  Description of Artificial Sequence: Synthetic oligonucleotide
gcuagcuugaacagucugu

SEQ ID NO: 1583393 - RNA, 19 nt, Artificial Sequence
  Description of Artificial Sequence: Synthetic oligonucleotide
ugucgggguucaguaucuc

SEQ ID NO: 1583394 - RNA, 19 nt, Artificial Sequence
  Description of Artificial Sequence: Synthetic oligonucleotide
ggucagcccuaugggagcc

SEQ ID NO: 1583395 - RNA, 19 nt, Artificial Sequence
  Description of Artificial Sequence: Synthetic oligonucleotide
gaacuuguccaggcgcagu

SEQ ID NO: 1583396 - RNA, 19 nt, Artificial Sequence
  Description of Artificial Sequence: Synthetic oligonucleotide
ggccaugcaccucacuucu

SEQ ID NO: 1583397 - RNA, 19 nt, Artificial Sequence
  Description of Artificial Sequence: Synthetic oligonucleotide
cugggcucgggucugcacu

SEQ ID NO: 1583398 - RNA, 19 nt, Artificial Sequence
  Description of Artificial Sequence: Synthetic oligonucleotide
cugcaaugugggcaaacau

SEQ ID NO: 1583399 - RNA, 19 nt, Artificial Sequence
  Description of Artificial Sequence: Synthetic oligonucleotide
cgagugaucuuaugcaaaa

SEQ ID NO: 1583400 - RNA, 19 nt, Artificial Sequence
  Description of Artificial Sequence: Synthetic oligonucleotide
gacugucgggguucaguau

SEQ ID NO: 1583401 - RNA, 19 nt, Artificial Sequence
  Description of Artificial Sequence: Synthetic oligonucleotide
aaguggcucuucaccccau

SEQ ID NO: 1583402 - RNA, 19 nt, Artificial Sequence
  Description of Artificial Sequence: Synthetic oligonucleotide
cacccacucucggaucaug

SEQ ID NO: 1583403 - RNA, 19 nt, Artificial Sequence
  Description of Artificial Sequence: Synthetic oligonucleotide
ccacaaucgucucaaagau

SEQ ID NO: 1583404 - RNA, 19 nt, Artificial Sequence
  Description of Artificial Sequence: Synthetic oligonucleotide
gcgcagucggucgaugccc

SEQ ID NO: 1583405 - RNA, 19 nt, Artificial Sequence
  Description of Artificial Sequence: Synthetic oligonucleotide
cugucgggguucaguaucu

SEQ ID NO: 1583406 - RNA, 19 nt, Artificial Sequence
  Description of Artificial Sequence: Synthetic oligonucleotide
gcgggagcggcaccccagg

SEQ ID NO: 1583407 - RNA, 19 nt, Artificial Sequence
  Description of Artificial Sequence: Synthetic oligonucleotide
ccaccugcggcccgcugcg

SEQ ID NO: 1583408 - RNA, 19 nt, Artificial Sequence
  Description of Artificial Sequence: Synthetic oligonucleotide
ccgagugaucuuaugcaaa

SEQ ID NO: 1583409 - RNA, 19 nt, Artificial Sequence
  Description of Artificial Sequence: Synthetic oligonucleotide
uccuuagugcgggcugcua

SEQ ID NO: 1583410 - RNA, 19 nt, Artificial Sequence
  Description of Artificial Sequence: Synthetic oligonucleotide
gaucauggucugccagaau

SEQ ID NO: 1583411 - RNA, 19 nt, Artificial Sequence
  Description of Artificial Sequence: Synthetic oligonucleotide
cgcgucaccugcucauugc

SEQ ID NO: 1583412 - RNA, 19 nt, Artificial Sequence
  Description of Artificial Sequence: Synthetic oligonucleotide
ugggagccugcaggcaguc

SEQ ID NO: 1583413 - RNA, 19 nt, Artificial Sequence
  Description of Artificial Sequence: Synthetic oligonucleotide
ugcgcaccgcgcggucccg

SEQ ID NO: 1583414 - RNA, 19 nt, Artificial Sequence
  Description of Artificial Sequence: Synthetic oligonucleotide
ggucccgcaacuucuggau

SEQ ID NO: 1583415 - RNA, 19 nt, Artificial Sequence
  Description of Artificial Sequence: Synthetic oligonucleotide
ggaucuccggcgggagcgg

SEQ ID NO: 1583416 - RNA, 19 nt, Artificial Sequence
  Description of Artificial Sequence: Synthetic oligonucleotide
cugcauauucuggucugcu

SEQ ID NO: 1583417 - RNA, 19 nt, Artificial Sequence
  Description of Artificial Sequence: Synthetic oligonucleotide
caccgcgcggucccgcguc

SEQ ID NO: 1583418 - RNA, 19 nt, Artificial Sequence
  Description of Artificial Sequence: Synthetic oligonucleotide
gucccgcgucaccugcuca

SEQ ID NO: 1583419 - RNA, 19 nt, Artificial Sequence
  Description of Artificial Sequence: Synthetic oligonucleotide
ccucacuucucagucggca

SEQ ID NO: 1583420 - RNA, 19 nt, Artificial Sequence
  Description of Artificial Sequence: Synthetic oligonucleotide
cguccuggccaugauguac

SEQ ID NO: 1583421 - RNA, 19 nt, Artificial Sequence
  Description of Artificial Sequence: Synthetic oligonucleotide
gcucuagcaccaggcuucc

SEQ ID NO: 1583422 - RNA, 19 nt, Artificial Sequence
  Description of Artificial Sequence: Synthetic oligonucleotide
ccccuuugcucuagcacca

SEQ ID NO: 1583423 - RNA, 19 nt, Artificial Sequence
  Description of Artificial Sequence: Synthetic oligonucleotide
ccgccucauagucgaacug

SEQ ID NO: 1583424 - RNA, 19 nt, Artificial Sequence
  Description of Artificial Sequence: Synthetic oligonucleotide
cccacccacucucggauca

SEQ ID NO: 1583425 - RNA, 19 nt, Artificial Sequence
  Description of Artificial Sequence: Synthetic oligonucleotide
ggcgggagcggcaccccag

SEQ ID NO: 1583426 - RNA, 19 nt, Artificial Sequence
  Description of Artificial Sequence: Synthetic oligonucleotide
ggucccgcgucaccugcuc

SEQ ID NO: 1583427 - RNA, 19 nt, Artificial Sequence
  Description of Artificial Sequence: Synthetic oligonucleotide
gucggucgaugcccaccca

SEQ ID NO: 1583428 - RNA, 19 nt, Artificial Sequence
  Description of Artificial Sequence: Synthetic oligonucleotide
cgaugcccacccacucucg

SEQ ID NO: 1583429 - RNA, 19 nt, Artificial Sequence
  Description of Artificial Sequence: Synthetic oligonucleotide
ggcucgggucugcacuuga

SEQ ID NO: 1583430 - RNA, 19 nt, Artificial Sequence
  Description of Artificial Sequence: Synthetic oligonucleotide
caggcgcagucggucgaug

SEQ ID NO: 1583431 - RNA, 19 nt, Artificial Sequence
  Description of Artificial Sequence: Synthetic oligonucleotide
ggacagggccaguguuuuc

SEQ ID NO: 1583432 - RNA, 19 nt, Artificial Sequence
  Description of Artificial Sequence: Synthetic oligonucleotide
ggaguccuuagugcgggcu

SEQ ID NO: 1583433 - RNA, 19 nt, Artificial Sequence
  Description of Artificial Sequence: Synthetic oligonucleotide
cauugcccgccaggcgcug

SEQ ID NO: 1583434 - RNA, 19 nt, Artificial Sequence
  Description of Artificial Sequence: Synthetic oligonucleotide
ggccugacugucgggguuc

SEQ ID NO: 1583435 - RNA, 19 nt, Artificial Sequence
  Description of Artificial Sequence: Synthetic oligonucleotide
augcuccgagugaucuuau

SEQ ID NO: 1583436 - RNA, 19 nt, Artificial Sequence
  Description of Artificial Sequence: Synthetic oligonucleotide
ccgcgucaccugcucauug

SEQ ID NO: 1583437 - RNA, 19 nt, Artificial Sequence
  Description of Artificial Sequence: Synthetic oligonucleotide
cucagucggcaauggccgu

SEQ ID NO: 1583438 - RNA, 19 nt, Artificial Sequence
  Description of Artificial Sequence: Synthetic oligonucleotide
guaggggcuuguccugcau

SEQ ID NO: 1583439 - RNA, 19 nt, Artificial Sequence
  Description of Artificial Sequence: Synthetic oligonucleotide
ggucugccagaaugcccga

SEQ ID NO: 1583440 - RNA, 19 nt, Artificial Sequence
  Description of Artificial Sequence: Synthetic oligonucleotide
cuucccauccguggguuuu

SEQ ID NO: 1583441 - RNA, 19 nt, Artificial Sequence
  Description of Artificial Sequence: Synthetic oligonucleotide
cuccggcgggagcggcacc

SEQ ID NO: 1583442 - RNA, 19 nt, Artificial Sequence
  Description of Artificial Sequence: Synthetic oligonucleotide
ccguuuccucuucccugcc

SEQ ID NO: 1583443 - RNA, 19 nt, Artificial Sequence
  Description of Artificial Sequence: Synthetic oligonucleotide
cccauccguggguuuucac

SEQ ID NO: 1583444 - RNA, 19 nt, Artificial Sequence
  Description of Artificial Sequence: Synthetic oligonucleotide
uggcugcaaugugggcaaa

SEQ ID NO: 1583445 - RNA, 19 nt, Artificial Sequence
  Description of Artificial Sequence: Synthetic oligonucleotide
cugcauccacaugcaguaa

SEQ ID NO: 1583446 - RNA, 19 nt, Artificial Sequence
  Description of Artificial Sequence: Synthetic oligonucleotide
gcccucuuugaccagccuu

SEQ ID NO: 1583447 - RNA, 19 nt, Artificial Sequence
  Description of Artificial Sequence: Synthetic oligonucleotide
gcagucggucgaugcccac

SEQ ID NO: 1583448 - RNA, 19 nt, Artificial Sequence
  Description of Artificial Sequence: Synthetic oligonucleotide
gcagcucauccggaguaaa

SEQ ID NO: 1583449 - RNA, 19 nt, Artificial Sequence
  Description of Artificial Sequence: Synthetic oligonucleotide
ccuuagugcgggcugcuau

SEQ ID NO: 1583450 - RNA, 19 nt, Artificial Sequence
  Description of Artificial Sequence: Synthetic oligonucleotide
cccuuugcucuagcaccag

SEQ ID NO: 1583451 - RNA, 19 nt, Artificial Sequence
  Description of Artificial Sequence: Synthetic oligonucleotide
ggucgaugaacugcauauu

SEQ ID NO: 1583452 - RNA, 19 nt, Artificial Sequence
  Description of Artificial Sequence: Synthetic oligonucleotide
gcccacccacucucggauc

SEQ ID NO: 1583453 - RNA, 19 nt, Artificial Sequence
  Description of Artificial Sequence: Synthetic oligonucleotide
cacgaccuucagugacucu

SEQ ID NO: 1583454 - RNA, 19 nt, Artificial Sequence
  Description of Artificial Sequence: Synthetic oligonucleotide
cgcaacuucuggaucacuu

SEQ ID NO: 1583455 - RNA, 19 nt, Artificial Sequence
  Description of Artificial Sequence: Synthetic oligonucleotide
gcggcccgcugcguccugg

SEQ ID NO: 1583456 - RNA, 19 nt, Artificial Sequence
  Description of Artificial Sequence: Synthetic oligonucleotide
gggcucgggucugcacuug

SEQ ID NO: 1583457 - RNA, 19 nt, Artificial Sequence
  Description of Artificial Sequence: Synthetic oligonucleotide
cguuuccucuucccugcca

SEQ ID NO: 1583458 - RNA, 19 nt, Artificial Sequence
  Description of Artificial Sequence: Synthetic oligonucleotide
gucugccagaaugcccgau

SEQ ID NO: 1583459 - RNA, 19 nt, Artificial Sequence
  Description of Artificial Sequence: Synthetic oligonucleotide
gccaugcaccucacuucuc

SEQ ID NO: 1583460 - RNA, 19 nt, Artificial Sequence
  Description of Artificial Sequence: Synthetic oligonucleotide
cugcagcgcccacuuuggu

SEQ ID NO: 1583461 - RNA, 19 nt, Artificial Sequence
  Description of Artificial Sequence: Synthetic oligonucleotide
cgcagucggucgaugccca

SEQ ID NO: 1583462 - RNA, 19 nt, Artificial Sequence
  Description of Artificial Sequence: Synthetic oligonucleotide
ccugacugucgggguucag

SEQ ID NO: 1583463 - RNA, 19 nt, Artificial Sequence
  Description of Artificial Sequence: Synthetic oligonucleotide
gucagcccuaugggagccu

SEQ ID NO: 1583464 - RNA, 19 nt, Artificial Sequence
  Description of Artificial Sequence: Synthetic oligonucleotide
cugggccaugcaccucacu

SEQ ID NO: 1583465 - RNA, 19 nt, Artificial Sequence
  Description of Artificial Sequence: Synthetic oligonucleotide
ccccgggaccacgcacucg

SEQ ID NO: 1583466 - RNA, 19 nt, Artificial Sequence
  Description of Artificial Sequence: Synthetic oligonucleotide
gcguccuggccaugaugua

SEQ ID NO: 1583467 - RNA, 19 nt, Artificial Sequence
  Description of Artificial Sequence: Synthetic oligonucleotide
cagucggcaauggccguuu

SEQ ID NO: 1583468 - RNA, 19 nt, Artificial Sequence
  Description of Artificial Sequence: Synthetic oligonucleotide
gccugacugucgggguuca

SEQ ID NO: 1583469 - RNA, 19 nt, Artificial Sequence
  Description of Artificial Sequence: Synthetic oligonucleotide
cccgccaggcgcugcgcca

SEQ ID NO: 1583470 - RNA, 19 nt, Artificial Sequence
  Description of Artificial Sequence: Synthetic oligonucleotide
gcgcugcgccagcuggauc

SEQ ID NO: 1583471 - RNA, 19 nt, Artificial Sequence
  Description of Artificial Sequence: Synthetic oligonucleotide
ccaaccucaugagcauaua

SEQ ID NO: 1583472 - RNA, 19 nt, Artificial Sequence
  Description of Artificial Sequence: Synthetic oligonucleotide
gcgcccacuuuggucagcu

SEQ ID NO: 1583473 - RNA, 19 nt, Artificial Sequence
  Description of Artificial Sequence: Synthetic oligonucleotide
gggccugacugucgggguu

SEQ ID NO: 1583474 - RNA, 19 nt, Artificial Sequence
  Description of Artificial Sequence: Synthetic oligonucleotide
ggcccucuuugaccagccu

SEQ ID NO: 1583475 - RNA, 19 nt, Artificial Sequence
  Description of Artificial Sequence: Synthetic oligonucleotide
gcugcguccuggccaugau

SEQ ID NO: 1583476 - RNA, 19 nt, Artificial Sequence
  Description of Artificial Sequence: Synthetic oligonucleotide
cgcggucccgcgucaccug

SEQ ID NO: 1583477 - RNA, 19 nt, Artificial Sequence
  Description of Artificial Sequence: Synthetic oligonucleotide
ccgauggaacaggugcugu

SEQ ID NO: 1583478 - RNA, 19 nt, Artificial Sequence
  Description of Artificial Sequence: Synthetic oligonucleotide
gcgcggucccgcgucaccu

SEQ ID NO: 1583479 - RNA, 19 nt, Artificial Sequence
  Description of Artificial Sequence: Synthetic oligonucleotide
ccggcgggagcggcacccc

SEQ ID NO: 1583480 - RNA, 19 nt, Artificial Sequence
  Description of Artificial Sequence: Synthetic oligonucleotide
cccgcugcguccuggccau

SEQ ID NO: 1583481 - RNA, 19 nt, Artificial Sequence
  Description of Artificial Sequence: Synthetic oligonucleotide
ggcgcugcgccagcuggau

SEQ ID NO: 1583482 - RNA, 19 nt, Artificial Sequence
  Description of Artificial Sequence: Synthetic oligonucleotide
ccgcuucccaagaggcccu

SEQ ID NO: 1583483 - RNA, 19 nt, Artificial Sequence
  Description of Artificial Sequence: Synthetic oligonucleotide
cugcggcccgcugcguccu

SEQ ID NO: 1583484 - RNA, 19 nt, Artificial Sequence
  Description of Artificial Sequence: Synthetic oligonucleotide
gcaccgcgcggucccgcgu

SEQ ID NO: 1583485 - RNA, 19 nt, Artificial Sequence
  Description of Artificial Sequence: Synthetic oligonucleotide
ccaccgccucauagucgaa

SEQ ID NO: 1583486 - RNA, 19 nt, Artificial Sequence
  Description of Artificial Sequence: Synthetic oligonucleotide
cgggagcggcaccccagga

SEQ ID NO: 1583487 - RNA, 19 nt, Artificial Sequence
  Description of Artificial Sequence: Synthetic oligonucleotide
gcggcaccccaggagccau

SEQ ID NO: 1583488 - RNA, 19 nt, Artificial Sequence
  Description of Artificial Sequence: Synthetic oligonucleotide
cguggguuuucacgaccuu

SEQ ID NO: 1583489 - RNA, 19 nt, Artificial Sequence
  Description of Artificial Sequence: Synthetic oligonucleotide
ccgcaacuucuggaucacu

SEQ ID NO: 1583490 - RNA, 19 nt, Artificial Sequence
  Description of Artificial Sequence: Synthetic oligonucleotide
caccugcggcccgcugcgu

SEQ ID NO: 1583491 - RNA, 19 nt, Artificial Sequence
  Description of Artificial Sequence: Synthetic oligonucleotide
ccacccacucucggaucau

SEQ ID NO: 1583492 - RNA, 19 nt, Artificial Sequence
  Description of Artificial Sequence: Synthetic oligonucleotide
ccgcugcguccuggccaug

SEQ ID NO: 1583493 - RNA, 19 nt, Artificial Sequence
  Description of Artificial Sequence: Synthetic oligonucleotide
cccgcgucaccugcucauu

SEQ ID NO: 1583494 - RNA, 19 nt, Artificial Sequence
  Description of Artificial Sequence: Synthetic oligonucleotide
aaugaauaaacauauaagu

SEQ ID NO: 1583495 - RNA, 19 nt, Artificial Sequence
  Description of Artificial Sequence: Synthetic oligonucleotide
aauuagaagauacauauga

SEQ ID NO: 1583496 - RNA, 19 nt, Artificial Sequence
  Description of Artificial Sequence: Synthetic oligonucleotide
ugaauaaacauauaagucc

SEQ ID NO: 1583497 - RNA, 19 nt, Artificial Sequence
  Description of Artificial Sequence: Synthetic oligonucleotide
uagaagauacauaugaacg

SEQ ID NO: 1583498 - RNA, 19 nt, Artificial Sequence
  Description of Artificial Sequence: Synthetic oligonucleotide
aaaauuguuucccugcugg

SEQ ID NO: 1583499 - RNA, 19 nt, Artificial Sequence
  Description of Artificial Sequence: Synthetic oligonucleotide
agaagauacauaugaacgc

SEQ ID NO: 1583500 - RNA, 19 nt, Artificial Sequence
  Description of Artificial Sequence: Synthetic oligonucleotide
aauuuugauuccuugagga

SEQ ID NO: 1583501 - RNA, 19 nt, Artificial Sequence
  Description of Artificial Sequence: Synthetic oligonucleotide
cuucacaugaucuugacug

SEQ ID NO: 1583502 - RNA, 19 nt, Artificial Sequence
  Description of Artificial Sequence: Synthetic oligonucleotide
uuaaacaaauaaaggcugg

SEQ ID NO: 1583503 - RNA, 19 nt, Artificial Sequence
  Description of Artificial Sequence: Synthetic oligonucleotide
ugauguaaaggucauaagu

SEQ ID NO: 1583504 - RNA, 19 nt, Artificial Sequence
  Description of Artificial Sequence: Synthetic oligonucleotide
ucauaagugauguaaaggu

SEQ ID NO: 1583505 - RNA, 19 nt, Artificial Sequence
  Description of Artificial Sequence: Synthetic oligonucleotide
aguguaaucuccuuaacug

SEQ ID NO: 1583506 - RNA, 19 nt, Artificial Sequence
  Description of Artificial Sequence: Synthetic oligonucleotide
auacauaugaacgccaagc

SEQ ID NO: 1583507 - RNA, 19 nt, Artificial Sequence
  Description of Artificial Sequence: Synthetic oligonucleotide
aauuaguauacacucuaug

SEQ ID NO: 1583508 - RNA, 19 nt, Artificial Sequence
  Description of Artificial Sequence: Synthetic oligonucleotide
aaauuauacuuauugguaa

SEQ ID NO: 1583509 - RNA, 19 nt, Artificial Sequence
  Description of Artificial Sequence: Synthetic oligonucleotide
uauguaucuacccaucccc

SEQ ID NO: 1583510 - RNA, 19 nt, Artificial Sequence
  Description of Artificial Sequence: Synthetic oligonucleotide
uaaauauggucaaugguca

SEQ ID NO: 1583511 - RNA, 19 nt, Artificial Sequence
  Description of Artificial Sequence: Synthetic oligonucleotide
auuaguauacacucuaugu

SEQ ID NO: 1583512 - RNA, 19 nt, Artificial Sequence
  Description of Artificial Sequence: Synthetic oligonucleotide
uguaauaccuguguugugg

SEQ ID NO: 1583513 - RNA, 19 nt, Artificial Sequence
  Description of Artificial Sequence: Synthetic oligonucleotide
uuagaagauacauaugaac

SEQ ID NO: 1583514 - RNA, 19 nt, Artificial Sequence
  Description of Artificial Sequence: Synthetic oligonucleotide
aguuuuauacuguccuugc

SEQ ID NO: 1583515 - RNA, 19 nt, Artificial Sequence
  Description of Artificial Sequence: Synthetic oligonucleotide
auauaagucccuuuauuag

SEQ ID NO: 1583516 - RNA, 19 nt, Artificial Sequence
  Description of Artificial Sequence: Synthetic oligonucleotide
aaucagaagcaguaauuag

SEQ ID NO: 1583517 - RNA, 19 nt, Artificial Sequence
  Description of Artificial Sequence: Synthetic oligonucleotide
ucaauggucacaucuaugu

SEQ ID NO: 1583518 - RNA, 19 nt, Artificial Sequence
  Description of Artificial Sequence: Synthetic oligonucleotide
uuaguauacacucuauguc

SEQ ID NO: 1583519 - RNA, 19 nt, Artificial Sequence
  Description of Artificial Sequence: Synthetic oligonucleotide
augaauaaacauauaaguc

SEQ ID NO: 1583520 - RNA, 19 nt, Artificial Sequence
  Description of Artificial Sequence: Synthetic oligonucleotide
aauaaaggcugguagugga

SEQ ID NO: 1583521 - RNA, 19 nt, Artificial Sequence
  Description of Artificial Sequence: Synthetic oligonucleotide
ucucguuugcaaaauaaca

SEQ ID NO: 1583522 - RNA, 19 nt, Artificial Sequence
  Description of Artificial Sequence: Synthetic oligonucleotide
uggaaugacagcuuguaca

SEQ ID NO: 1583523 - RNA, 19 nt, Artificial Sequence
  Description of Artificial Sequence: Synthetic oligonucleotide
uauuguuggaaugacagcu

SEQ ID NO: 1583524 - RNA, 19 nt, Artificial Sequence
  Description of Artificial Sequence: Synthetic oligonucleotide
uuugucauaagugauguaa

SEQ ID NO: 1583525 - RNA, 19 nt, Artificial Sequence
  Description of Artificial Sequence: Synthetic oligonucleotide
uauaagucccuuuauuaga

SEQ ID NO: 1583526 - RNA, 19 nt, Artificial Sequence
  Description of Artificial Sequence: Synthetic oligonucleotide
aaacauauaagucccuuua

SEQ ID NO: 1583527 - RNA, 19 nt, Artificial Sequence
  Description of Artificial Sequence: Synthetic oligonucleotide
uggaguuuuauacuguccu

SEQ ID NO: 1583528 - RNA, 19 nt, Artificial Sequence
  Description of Artificial Sequence: Synthetic oligonucleotide
guaaauauggucaaugguc

SEQ ID NO: 1583529 - RNA, 19 nt, Artificial Sequence
  Description of Artificial Sequence: Synthetic oligonucleotide
aauuauacuuauugguaaa

SEQ ID NO: 1583530 - RNA, 19 nt, Artificial Sequence
  Description of Artificial Sequence: Synthetic oligonucleotide
uuuccaacaauccacucuc

SEQ ID NO: 1583531 - RNA, 19 nt, Artificial Sequence
  Description of Artificial Sequence: Synthetic oligonucleotide
auuaaacaaauaaaggcug

SEQ ID NO: 1583532 - RNA, 19 nt, Artificial Sequence
  Description of Artificial Sequence: Synthetic oligonucleotide
ugugguauguaucuaccca

SEQ ID NO: 1583533 - RNA, 19 nt, Artificial Sequence
  Description of Artificial Sequence: Synthetic oligonucleotide
uguaaucuccuuaacugcu

SEQ ID NO: 1583534 - RNA, 19 nt, Artificial Sequence
  Description of Artificial Sequence: Synthetic oligonucleotide
uguguugugguauguaucu

SEQ ID NO: 1583535 - RNA, 19 nt, Artificial Sequence
  Description of Artificial Sequence: Synthetic oligonucleotide
gaagauacauaugaacgcc

SEQ ID NO: 1583536 - RNA, 19 nt, Artificial Sequence
  Description of Artificial Sequence: Synthetic oligonucleotide
ugauuuucaauggucacug

SEQ ID NO: 1583537 - RNA, 19 nt, Artificial Sequence
  Description of Artificial Sequence: Synthetic oligonucleotide
ucauacaugugcucaacug

SEQ ID NO: 1583538 - RNA, 19 nt, Artificial Sequence
  Description of Artificial Sequence: Synthetic oligonucleotide
aacuguuaaaggcugccgu

SEQ ID NO: 1583539 - RNA, 19 nt, Artificial Sequence
  Description of Artificial Sequence: Synthetic oligonucleotide
ugcauggaugaacugaaca

SEQ ID NO: 1583540 - RNA, 19 nt, Artificial Sequence
  Description of Artificial Sequence: Synthetic oligonucleotide
uagcccauugccaugucgg

SEQ ID NO: 1583541 - RNA, 19 nt, Artificial Sequence
  Description of Artificial Sequence: Synthetic oligonucleotide
uucaauucuuccccuguag

SEQ ID NO: 1583542 - RNA, 19 nt, Artificial Sequence
  Description of Artificial Sequence: Synthetic oligonucleotide
acauaugaacgccaagcuc

SEQ ID NO: 1583543 - RNA, 19 nt, Artificial Sequence
  Description of Artificial Sequence: Synthetic oligonucleotide
uguagucauauucuauugu

SEQ ID NO: 1583544 - RNA, 19 nt, Artificial Sequence
  Description of Artificial Sequence: Synthetic oligonucleotide
gucauaagugauguaaagg

SEQ ID NO: 1583545 - RNA, 19 nt, Artificial Sequence
  Description of Artificial Sequence: Synthetic oligonucleotide
cuaagugaucuccagcugc

SEQ ID NO: 1583546 - RNA, 19 nt, Artificial Sequence
  Description of Artificial Sequence: Synthetic oligonucleotide
ugcucaacuguuaaaggcu

SEQ ID NO: 1583547 - RNA, 19 nt, Artificial Sequence
  Description of Artificial Sequence: Synthetic oligonucleotide
uuuucaauggucacuguuu

SEQ ID NO: 1583548 - RNA, 19 nt, Artificial Sequence
  Description of Artificial Sequence: Synthetic oligonucleotide
uacaccguuuguagcaugg

SEQ ID NO: 1583549 - RNA, 19 nt, Artificial Sequence
  Description of Artificial Sequence: Synthetic oligonucleotide
uaacuuuacaagcuuccac

SEQ ID NO: 1583550 - RNA, 19 nt, Artificial Sequence
  Description of Artificial Sequence: Synthetic oligonucleotide
caaacaaccauagccgugg

SEQ ID NO: 1583551 - RNA, 19 nt, Artificial Sequence
  Description of Artificial Sequence: Synthetic oligonucleotide
auagccaaacaaccauagc

SEQ ID NO: 1583552 - RNA, 19 nt, Artificial Sequence
  Description of Artificial Sequence: Synthetic oligonucleotide
uucuggaguaaguacaccu

SEQ ID NO: 1583553 - RNA, 19 nt, Artificial Sequence
  Description of Artificial Sequence: Synthetic oligonucleotide
uucacuacauugugaagug

SEQ ID NO: 1583554 - RNA, 19 nt, Artificial Sequence
  Description of Artificial Sequence: Synthetic oligonucleotide
caucacuucagcaugccug

SEQ ID NO: 1583555 - RNA, 19 nt, Artificial Sequence
  Description of Artificial Sequence: Synthetic oligonucleotide
auaagugauguaaagguca

SEQ ID NO: 1583556 - RNA, 19 nt, Artificial Sequence
  Description of Artificial Sequence: Synthetic oligonucleotide
augaucuugacugaugucu

SEQ ID NO: 1583557 - RNA, 19 nt, Artificial Sequence
  Description of Artificial Sequence: Synthetic oligonucleotide
uaaaggcugccguugcucg

SEQ ID NO: 1583558 - RNA, 19 nt, Artificial Sequence
  Description of Artificial Sequence: Synthetic oligonucleotide
uuuacaagcuuccacuauu

SEQ ID NO: 1583559 - RNA, 19 nt, Artificial Sequence
  Description of Artificial Sequence: Synthetic oligonucleotide
uacucggccacuuccagag

SEQ ID NO: 1583560 - RNA, 19 nt, Artificial Sequence
  Description of Artificial Sequence: Synthetic oligonucleotide
uaaaggucauaaguucucg

SEQ ID NO: 1583561 - RNA, 19 nt, Artificial Sequence
  Description of Artificial Sequence: Synthetic oligonucleotide
auauucuauuguuggaaug

SEQ ID NO: 1583562 - RNA, 19 nt, Artificial Sequence
  Description of Artificial Sequence: Synthetic oligonucleotide
aacauauaagucccuuuau

SEQ ID NO: 1583563 - RNA, 19 nt, Artificial Sequence
  Description of Artificial Sequence: Synthetic oligonucleotide
uguugugguauguaucuac

SEQ ID NO: 1583564 - RNA, 19 nt, Artificial Sequence
  Description of Artificial Sequence: Synthetic oligonucleotide
cucgucauagccaaacaac

SEQ ID NO: 1583565 - RNA, 19 nt, Artificial Sequence
  Description of Artificial Sequence: Synthetic oligonucleotide
uuuguagcauggaacauuu

SEQ ID NO: 1583566 - RNA, 19 nt, Artificial Sequence
  Description of Artificial Sequence: Synthetic oligonucleotide
gaaauuauacuuauuggua

SEQ ID NO: 1583567 - RNA, 19 nt, Artificial Sequence
  Description of Artificial Sequence: Synthetic oligonucleotide
uuuauacuguccuugcuuu

SEQ ID NO: 1583568 - RNA, 19 nt, Artificial Sequence
  Description of Artificial Sequence: Synthetic oligonucleotide
gauacauaugaacgccaag

SEQ ID NO: 1583569 - RNA, 19 nt, Artificial Sequence
  Description of Artificial Sequence: Synthetic oligonucleotide
cuguuuacaccguuuguag

SEQ ID NO: 1583570 - RNA, 19 nt, Artificial Sequence
  Description of Artificial Sequence: Synthetic oligonucleotide
ucguuugcaaaauaacauc

SEQ ID NO: 1583571 - RNA, 19 nt, Artificial Sequence
  Description of Artificial Sequence: Synthetic oligonucleotide
aaaggucauaaguucucgu

SEQ ID NO: 1583572 - RNA, 19 nt, Artificial Sequence
  Description of Artificial Sequence: Synthetic oligonucleotide
aauaccuguguugugguau

SEQ ID NO: 1583573 - RNA, 19 nt, Artificial Sequence
  Description of Artificial Sequence: Synthetic oligonucleotide
cauaagugauguaaagguc

SEQ ID NO: 1583574 - RNA, 19 nt, Artificial Sequence
  Description of Artificial Sequence: Synthetic oligonucleotide
aguaaguccuguaauaccu

SEQ ID NO: 1583575 - RNA, 19 nt, Artificial Sequence
  Description of Artificial Sequence: Synthetic oligonucleotide
uguuuacaccguuuguagc

SEQ ID NO: 1583576 - RNA, 19 nt, Artificial Sequence
  Description of Artificial Sequence: Synthetic oligonucleotide
ugcauccuggggcugagag

SEQ ID NO: 1583577 - RNA, 19 nt, Artificial Sequence
  Description of Artificial Sequence: Synthetic oligonucleotide
ugaauacuccaucuguuua

SEQ ID NO: 1583578 - RNA, 19 nt, Artificial Sequence
  Description of Artificial Sequence: Synthetic oligonucleotide
uagauaugccuucacuuuc

SEQ ID NO: 1583579 - RNA, 19 nt, Artificial Sequence
  Description of Artificial Sequence: Synthetic oligonucleotide
uugucauaagugauguaaa

SEQ ID NO: 1583580 - RNA, 19 nt, Artificial Sequence
  Description of Artificial Sequence: Synthetic oligonucleotide
auugccaugucggacagug

SEQ ID NO: 1583581 - RNA, 19 nt, Artificial Sequence
  Description of Artificial Sequence: Synthetic oligonucleotide
uucaguaaguccuguaaua

SEQ ID NO: 1583582 - RNA, 19 nt, Artificial Sequence
  Description of Artificial Sequence: Synthetic oligonucleotide
guauguaucuacccauccc

SEQ ID NO: 1583583 - RNA, 19 nt, Artificial Sequence
  Description of Artificial Sequence: Synthetic oligonucleotide
cauauaagucccuuuauua

SEQ ID NO: 1583584 - RNA, 19 nt, Artificial Sequence
  Description of Artificial Sequence: Synthetic oligonucleotide
gucuuguguagucauauuc

SEQ ID NO: 1583585 - RNA, 19 nt, Artificial Sequence
  Description of Artificial Sequence: Synthetic oligonucleotide
auauuugucauaagugaug

SEQ ID NO: 1583586 - RNA, 19 nt, Artificial Sequence
  Description of Artificial Sequence: Synthetic oligonucleotide
cuauuguuggaaugacagc

SEQ ID NO: 1583587 - RNA, 19 nt, Artificial Sequence
  Description of Artificial Sequence: Synthetic oligonucleotide
ucuauguccucuucacuac

SEQ ID NO: 1583588 - RNA, 19 nt, Artificial Sequence
  Description of Artificial Sequence: Synthetic oligonucleotide
uggacuaagugaucuccag

SEQ ID NO: 1583589 - RNA, 19 nt, Artificial Sequence
  Description of Artificial Sequence: Synthetic oligonucleotide
ugguagauaugccuucacu

SEQ ID NO: 1583590 - RNA, 19 nt, Artificial Sequence
  Description of Artificial Sequence: Synthetic oligonucleotide
aauacuccaucuguuuaca

SEQ ID NO: 1583591 - RNA, 19 nt, Artificial Sequence
  Description of Artificial Sequence: Synthetic oligonucleotide
gacuaagugaucuccagcu

SEQ ID NO: 1583592 - RNA, 19 nt, Artificial Sequence
  Description of Artificial Sequence: Synthetic oligonucleotide
uuucaauggucacuguuuu

SEQ ID NO: 1583593 - RNA, 19 nt, Artificial Sequence
  Description of Artificial Sequence: Synthetic oligonucleotide
cuuggaguuuuauacuguc

SEQ ID NO: 1583594 - RNA, 19 nt, Artificial Sequence
  Description of Artificial Sequence: Synthetic oligonucleotide
uggugucugguaauauuug

SEQ ID NO: 1583595 - RNA, 19 nt, Artificial Sequence
  Description of Artificial Sequence: Synthetic oligonucleotide
caucuguuuacaccguuug

SEQ ID NO: 1583596 - RNA, 19 nt, Artificial Sequence
  Description of Artificial Sequence: Synthetic oligonucleotide
ucuucacuacauugugaag

SEQ ID NO: 1583597 - RNA, 19 nt, Artificial Sequence
  Description of Artificial Sequence: Synthetic oligonucleotide
aauaaacauauaagucccu

SEQ ID NO: 1583598 - RNA, 19 nt, Artificial Sequence
  Description of Artificial Sequence: Synthetic oligonucleotide
ucacaucuauguauuaauu

SEQ ID NO: 1583599 - RNA, 19 nt, Artificial Sequence
  Description of Artificial Sequence: Synthetic oligonucleotide
uccuuaacugcuucaguaa

SEQ ID NO: 1583600 - RNA, 19 nt, Artificial Sequence
  Description of Artificial Sequence: Synthetic oligonucleotide
ugcaacugucucaauaauu

SEQ ID NO: 1583601 - RNA, 19 nt, Artificial Sequence
  Description of Artificial Sequence: Synthetic oligonucleotide
aaguacaccugucuccuua

SEQ ID NO: 1583602 - RNA, 19 nt, Artificial Sequence
  Description of Artificial Sequence: Synthetic oligonucleotide
uuggaaugacagcuuguac

SEQ ID NO: 1583603 - RNA, 19 nt, Artificial Sequence
  Description of Artificial Sequence: Synthetic oligonucleotide
aguaauuaguauacacucu

SEQ ID NO: 1583604 - RNA, 19 nt, Artificial Sequence
  Description of Artificial Sequence: Synthetic oligonucleotide
auacuccaucuguuuacac

SEQ ID NO: 1583605 - RNA, 19 nt, Artificial Sequence
  Description of Artificial Sequence: Synthetic oligonucleotide
caccguguugaucacauuc

SEQ ID NO: 1583606 - RNA, 19 nt, Artificial Sequence
  Description of Artificial Sequence: Synthetic oligonucleotide
acuaagugaucuccagcug

SEQ ID NO: 1583607 - RNA, 19 nt, Artificial Sequence
  Description of Artificial Sequence: Synthetic oligonucleotide
auuccuugaggaccggugu

SEQ ID NO: 1583608 - RNA, 19 nt, Artificial Sequence
  Description of Artificial Sequence: Synthetic oligonucleotide
ggucauaaguucucguuug

SEQ ID NO: 1583609 - RNA, 19 nt, Artificial Sequence
  Description of Artificial Sequence: Synthetic oligonucleotide
uacaccugucuccuuaaau

SEQ ID NO: 1583610 - RNA, 19 nt, Artificial Sequence
  Description of Artificial Sequence: Synthetic oligonucleotide
guagcccauugccaugucg

SEQ ID NO: 1583611 - RNA, 19 nt, Artificial Sequence
  Description of Artificial Sequence: Synthetic oligonucleotide
auuagaagauacauaugaa

SEQ ID NO: 1583612 - RNA, 19 nt, Artificial Sequence
  Description of Artificial Sequence: Synthetic oligonucleotide
caucugaauacuccaucug

SEQ ID NO: 1583613 - RNA, 19 nt, Artificial Sequence
  Description of Artificial Sequence: Synthetic oligonucleotide
ucuugugucuaggguagcc

SEQ ID NO: 1583614 - RNA, 19 nt, Artificial Sequence
  Description of Artificial Sequence: Synthetic oligonucleotide
ugaucuugacugaugucuu

SEQ ID NO: 1583615 - RNA, 19 nt, Artificial Sequence
  Description of Artificial Sequence: Synthetic oligonucleotide
ugguauguaucuacccauc

SEQ ID NO: 1583616 - RNA, 19 nt, Artificial Sequence
  Description of Artificial Sequence: Synthetic oligonucleotide
aguauacacucuauguccu

SEQ ID NO: 1583617 - RNA, 19 nt, Artificial Sequence
  Description of Artificial Sequence: Synthetic oligonucleotide
aggucauaaguucucguuu

SEQ ID NO: 1583618 - RNA, 19 nt, Artificial Sequence
  Description of Artificial Sequence: Synthetic oligonucleotide
cucggccacuuccagagcc

SEQ ID NO: 1583619 - RNA, 19 nt, Artificial Sequence
  Description of Artificial Sequence: Synthetic oligonucleotide
ugguaauauuugucauaag

SEQ ID NO: 1583620 - RNA, 19 nt, Artificial Sequence
  Description of Artificial Sequence: Synthetic oligonucleotide
caucacacggggcugagca

SEQ ID NO: 1583621 - RNA, 19 nt, Artificial Sequence
  Description of Artificial Sequence: Synthetic oligonucleotide
cacaugaucuugacugaug

SEQ ID NO: 1583622 - RNA, 19 nt, Artificial Sequence
  Description of Artificial Sequence: Synthetic oligonucleotide
auaccuguguugugguaug

SEQ ID NO: 1583623 - RNA, 19 nt, Artificial Sequence
  Description of Artificial Sequence: Synthetic oligonucleotide
auauggucaauggucacau

SEQ ID NO: 1583624 - RNA, 19 nt, Artificial Sequence
  Description of Artificial Sequence: Synthetic oligonucleotide
aacaauccacucucuucau

SEQ ID NO: 1583625 - RNA, 19 nt, Artificial Sequence
  Description of Artificial Sequence: Synthetic oligonucleotide
uaagucccuuuauuagaga

SEQ ID NO: 1583626 - RNA, 19 nt, Artificial Sequence
  Description of Artificial Sequence: Synthetic oligonucleotide
caucgagccccgcaggcgg

SEQ ID NO: 1583627 - RNA, 19 nt, Artificial Sequence
  Description of Artificial Sequence: Synthetic oligonucleotide
cacauucugcauccugggg

SEQ ID NO: 1583628 - RNA, 19 nt, Artificial Sequence
  Description of Artificial Sequence: Synthetic oligonucleotide
cauggaugaacugaacaca

SEQ ID NO: 1583629 - RNA, 19 nt, Artificial Sequence
  Description of Artificial Sequence: Synthetic oligonucleotide
guuuccaacaauccacucu

SEQ ID NO: 1583630 - RNA, 19 nt, Artificial Sequence
  Description of Artificial Sequence: Synthetic oligonucleotide
aucuguuuacaccguuugu

SEQ ID NO: 1583631 - RNA, 19 nt, Artificial Sequence
  Description of Artificial Sequence: Synthetic oligonucleotide
acuguuaaaggcugccguu

SEQ ID NO: 1583632 - RNA, 19 nt, Artificial Sequence
  Description of Artificial Sequence: Synthetic oligonucleotide
caacuguuaaaggcugccg

SEQ ID NO: 1583633 - RNA, 19 nt, Artificial Sequence
  Description of Artificial Sequence: Synthetic oligonucleotide
uggccgacuggcaucgagc

SEQ ID NO: 1583634 - RNA, 19 nt, Artificial Sequence
  Description of Artificial Sequence: Synthetic oligonucleotide
cuucacuacauugugaagu

SEQ ID NO: 1583635 - RNA, 19 nt, Artificial Sequence
  Description of Artificial Sequence: Synthetic oligonucleotide
ugcucgucauagccaaaca

SEQ ID NO: 1583636 - RNA, 19 nt, Artificial Sequence
  Description of Artificial Sequence: Synthetic oligonucleotide
cucguuugcaaaauaacau

SEQ ID NO: 1583637 - RNA, 19 nt, Artificial Sequence
  Description of Artificial Sequence: Synthetic oligonucleotide
gaucuugacugaugucuuc

SEQ ID NO: 1583638 - RNA, 19 nt, Artificial Sequence
  Description of Artificial Sequence: Synthetic oligonucleotide
aaaggcugccguugcucgu

SEQ ID NO: 1583639 - RNA, 19 nt, Artificial Sequence
  Description of Artificial Sequence: Synthetic oligonucleotide
uugcucgucauagccaaac

SEQ ID NO: 1583640 - RNA, 19 nt, Artificial Sequence
  Description of Artificial Sequence: Synthetic oligonucleotide
auaugaacgccaagcucuc

SEQ ID NO: 1583641 - RNA, 19 nt, Artificial Sequence
  Description of Artificial Sequence: Synthetic oligonucleotide
uguuuccaacaauccacuc

SEQ ID NO: 1583642 - RNA, 19 nt, Artificial Sequence
  Description of Artificial Sequence: Synthetic oligonucleotide
uuccccuguagcccauugc

SEQ ID NO: 1583643 - RNA, 19 nt, Artificial Sequence
  Description of Artificial Sequence: Synthetic oligonucleotide
cuccuuaacugcuucagua

SEQ ID NO: 1583644 - RNA, 19 nt, Artificial Sequence
  Description of Artificial Sequence: Synthetic oligonucleotide
uuacaccguuuguagcaug

SEQ ID NO: 1583645 - RNA, 19 nt, Artificial Sequence
  Description of Artificial Sequence: Synthetic oligonucleotide
ugucggacagugguggacu

SEQ ID NO: 1583646 - RNA, 19 nt, Artificial Sequence
  Description of Artificial Sequence: Synthetic oligonucleotide
ggacuaagugaucuccagc

SEQ ID NO: 1583647 - RNA, 19 nt, Artificial Sequence
  Description of Artificial Sequence: Synthetic oligonucleotide
uggcaucgagccccgcagg

SEQ ID NO: 1583648 - RNA, 19 nt, Artificial Sequence
  Description of Artificial Sequence: Synthetic oligonucleotide
uuuacaccguuuguagcau

SEQ ID NO: 1583649 - RNA, 19 nt, Artificial Sequence
  Description of Artificial Sequence: Synthetic oligonucleotide
uucagcaugccugcaugga

SEQ ID NO: 1583650 - RNA, 19 nt, Artificial Sequence
  Description of Artificial Sequence: Synthetic oligonucleotide
gguaaauauggucaauggu

SEQ ID NO: 1583651 - RNA, 19 nt, Artificial Sequence
  Description of Artificial Sequence: Synthetic oligonucleotide
aaguucucguuugcaaaau

SEQ ID NO: 1583652 - RNA, 19 nt, Artificial Sequence
  Description of Artificial Sequence: Synthetic oligonucleotide
gaggaccggugucagguac

SEQ ID NO: 1583653 - RNA, 19 nt, Artificial Sequence
  Description of Artificial Sequence: Synthetic oligonucleotide
augucggacagugguggac

SEQ ID NO: 1583654 - RNA, 19 nt, Artificial Sequence
  Description of Artificial Sequence: Synthetic oligonucleotide
uagccguggugucugguaa

SEQ ID NO: 1583655 - RNA, 19 nt, Artificial Sequence
  Description of Artificial Sequence: Synthetic oligonucleotide
agcugucuuucaucccggg

SEQ ID NO: 1583656 - RNA, 19 nt, Artificial Sequence
  Description of Artificial Sequence: Synthetic oligonucleotide
guaaguccuguaauaccug

SEQ ID NO: 1583657 - RNA, 19 nt, Artificial Sequence
  Description of Artificial Sequence: Synthetic oligonucleotide
acuggcaucgagccccgca

SEQ ID NO: 1583658 - RNA, 19 nt, Artificial Sequence
  Description of Artificial Sequence: Synthetic oligonucleotide
cugccguugcucgucauag

SEQ ID NO: 1583659 - RNA, 19 nt, Artificial Sequence
  Description of Artificial Sequence: Synthetic oligonucleotide
aguacaccugucuccuuaa

SEQ ID NO: 1583660 - RNA, 19 nt, Artificial Sequence
  Description of Artificial Sequence: Synthetic oligonucleotide
guagauaugccuucacuuu

SEQ ID NO: 1583661 - RNA, 19 nt, Artificial Sequence
  Description of Artificial Sequence: Synthetic oligonucleotide
aguucucguuugcaaaaua

SEQ ID NO: 1583662 - RNA, 19 nt, Artificial Sequence
  Description of Artificial Sequence: Synthetic oligonucleotide
uccaucuguuuacaccguu

SEQ ID NO: 1583663 - RNA, 19 nt, Artificial Sequence
  Description of Artificial Sequence: Synthetic oligonucleotide
gccguugcucgucauagcc

SEQ ID NO: 1583664 - RNA, 19 nt, Artificial Sequence
  Description of Artificial Sequence: Synthetic oligonucleotide
auacaugugcucaacuguu

SEQ ID NO: 1583665 - RNA, 19 nt, Artificial Sequence
  Description of Artificial Sequence: Synthetic oligonucleotide
acugaacacauaggaggug

SEQ ID NO: 1583666 - RNA, 19 nt, Artificial Sequence
  Description of Artificial Sequence: Synthetic oligonucleotide
gucuaggguagccucaucu

SEQ ID NO: 1583667 - RNA, 19 nt, Artificial Sequence
  Description of Artificial Sequence: Synthetic oligonucleotide
caauccacucucuucauau

SEQ ID NO: 1583668 - RNA, 19 nt, Artificial Sequence
  Description of Artificial Sequence: Synthetic oligonucleotide
guauacacucuauguccuc

SEQ ID NO: 1583669 - RNA, 19 nt, Artificial Sequence
  Description of Artificial Sequence: Synthetic oligonucleotide
auugguaaauauggucaau

SEQ ID NO: 1583670 - RNA, 19 nt, Artificial Sequence
  Description of Artificial Sequence: Synthetic oligonucleotide
aaacugccccggacguggc

SEQ ID NO: 1583671 - RNA, 19 nt, Artificial Sequence
  Description of Artificial Sequence: Synthetic oligonucleotide
cagcgauggggcagggagg

SEQ ID NO: 1583672 - RNA, 19 nt, Artificial Sequence
  Description of Artificial Sequence: Synthetic oligonucleotide
gguagauaugccuucacuu

SEQ ID NO: 1583673 - RNA, 19 nt, Artificial Sequence
  Description of Artificial Sequence: Synthetic oligonucleotide
uaugaacgccaagcucucc

SEQ ID NO: 1583674 - RNA, 19 nt, Artificial Sequence
  Description of Artificial Sequence: Synthetic oligonucleotide
acaauccacucucuucaua

SEQ ID NO: 1583675 - RNA, 19 nt, Artificial Sequence
  Description of Artificial Sequence: Synthetic oligonucleotide
auagccguggugucuggua

SEQ ID NO: 1583676 - RNA, 19 nt, Artificial Sequence
  Description of Artificial Sequence: Synthetic oligonucleotide
gcuucaguaaguccuguaa

SEQ ID NO: 1583677 - RNA, 19 nt, Artificial Sequence
  Description of Artificial Sequence: Synthetic oligonucleotide
agggacagucgcgauccgg

SEQ ID NO: 1583678 - RNA, 19 nt, Artificial Sequence
  Description of Artificial Sequence: Synthetic oligonucleotide
guaauaccuguguuguggu

SEQ ID NO: 1583679 - RNA, 19 nt, Artificial Sequence
  Description of Artificial Sequence: Synthetic oligonucleotide
agugguggacuaagugauc

SEQ ID NO: 1583680 - RNA, 19 nt, Artificial Sequence
  Description of Artificial Sequence: Synthetic oligonucleotide
gacguggccgacuggcauc

SEQ ID NO: 1583681 - RNA, 19 nt, Artificial Sequence
  Description of Artificial Sequence: Synthetic oligonucleotide
auuugucauaagugaugua

SEQ ID NO: 1583682 - RNA, 19 nt, Artificial Sequence
  Description of Artificial Sequence: Synthetic oligonucleotide
acguggccgacuggcaucg

SEQ ID NO: 1583683 - RNA, 19 nt, Artificial Sequence
  Description of Artificial Sequence: Synthetic oligonucleotide
gguacucggccacuuccag

SEQ ID NO: 1583684 - RNA, 19 nt, Artificial Sequence
  Description of Artificial Sequence: Synthetic oligonucleotide
gugguauguaucuacccau

SEQ ID NO: 1583685 - RNA, 19 nt, Artificial Sequence
  Description of Artificial Sequence: Synthetic oligonucleotide
gcaguaauuaguauacacu

SEQ ID NO: 1583686 - RNA, 19 nt, Artificial Sequence
  Description of Artificial Sequence: Synthetic oligonucleotide
ccaugucggacaguggugg

SEQ ID NO: 1583687 - RNA, 19 nt, Artificial Sequence
  Description of Artificial Sequence: Synthetic oligonucleotide
agucccuuuauuagagaaa

SEQ ID NO: 1583688 - RNA, 19 nt, Artificial Sequence
  Description of Artificial Sequence: Synthetic oligonucleotide
ugauuccuugaggaccggu

SEQ ID NO: 1583689 - RNA, 19 nt, Artificial Sequence
  Description of Artificial Sequence: Synthetic oligonucleotide
cugcauggaugaacugaac

SEQ ID NO: 1583690 - RNA, 19 nt, Artificial Sequence
  Description of Artificial Sequence: Synthetic oligonucleotide
ccguuuguagcauggaaca

SEQ ID NO: 1583691 - RNA, 19 nt, Artificial Sequence
  Description of Artificial Sequence: Synthetic oligonucleotide
ccaaacaaccauagccgug

SEQ ID NO: 1583692 - RNA, 19 nt, Artificial Sequence
  Description of Artificial Sequence: Synthetic oligonucleotide
caugugcucaacuguuaaa

SEQ ID NO: 1583693 - RNA, 19 nt, Artificial Sequence
  Description of Artificial Sequence: Synthetic oligonucleotide
gcucaacuguuaaaggcug

SEQ ID NO: 1583694 - RNA, 19 nt, Artificial Sequence
  Description of Artificial Sequence: Synthetic oligonucleotide
ccgacuggcaucgagcccc

SEQ ID NO: 1583695 - RNA, 19 nt, Artificial Sequence
  Description of Artificial Sequence: Synthetic oligonucleotide
auaaaggcugguaguggaa

SEQ ID NO: 1583696 - RNA, 19 nt, Artificial Sequence
  Description of Artificial Sequence: Synthetic oligonucleotide
uugauuccuugaggaccgg

SEQ ID NO: 1583697 - RNA, 19 nt, Artificial Sequence
  Description of Artificial Sequence: Synthetic oligonucleotide
ggccgacuggcaucgagcc

SEQ ID NO: 1583698 - RNA, 19 nt, Artificial Sequence
  Description of Artificial Sequence: Synthetic oligonucleotide
cuuccccuguagcccauug

SEQ ID NO: 1583699 - RNA, 19 nt, Artificial Sequence
  Description of Artificial Sequence: Synthetic oligonucleotide
ucgcgauccgggccgggga

SEQ ID NO: 1583700 - RNA, 19 nt, Artificial Sequence
  Description of Artificial Sequence: Synthetic oligonucleotide
uucuugugucuaggguagc

SEQ ID NO: 1583701 - RNA, 19 nt, Artificial Sequence
  Description of Artificial Sequence: Synthetic oligonucleotide
cuaggguagccucaucugu

SEQ ID NO: 1583702 - RNA, 19 nt, Artificial Sequence
  Description of Artificial Sequence: Synthetic oligonucleotide
gucugguaauauuugucau

SEQ ID NO: 1583703 - RNA, 19 nt, Artificial Sequence
  Description of Artificial Sequence: Synthetic oligonucleotide
guggacuaagugaucucca

SEQ ID NO: 1583704 - RNA, 19 nt, Artificial Sequence
  Description of Artificial Sequence: Synthetic oligonucleotide
guacucggccacuuccaga

SEQ ID NO: 1583705 - RNA, 19 nt, Artificial Sequence
  Description of Artificial Sequence: Synthetic oligonucleotide
cuggaggcgggugcgcgcg

SEQ ID NO: 1583706 - RNA, 19 nt, Artificial Sequence
  Description of Artificial Sequence: Synthetic oligonucleotide
ucaucacacggggcugagc

SEQ ID NO: 1583707 - RNA, 19 nt, Artificial Sequence
  Description of Artificial Sequence: Synthetic oligonucleotide
guuuguagcauggaacauu

SEQ ID NO: 1583708 - RNA, 19 nt, Artificial Sequence
  Description of Artificial Sequence: Synthetic oligonucleotide
ggugucugguaauauuugu

SEQ ID NO: 1583709 - RNA, 19 nt, Artificial Sequence
  Description of Artificial Sequence: Synthetic oligonucleotide
gugguggacuaagugaucu

SEQ ID NO: 1583710 - RNA, 19 nt, Artificial Sequence
  Description of Artificial Sequence: Synthetic oligonucleotide
ggucacaucuauguauuaa

SEQ ID NO: 1583711 - RNA, 19 nt, Artificial Sequence
  Description of Artificial Sequence: Synthetic oligonucleotide
uucccuucaccguguugau

SEQ ID NO: 1583712 - RNA, 19 nt, Artificial Sequence
  Description of Artificial Sequence: Synthetic oligonucleotide
uuguagcauggaacauuuu

SEQ ID NO: 1583713 - RNA, 19 nt, Artificial Sequence
  Description of Artificial Sequence: Synthetic oligonucleotide
ggcaucgagccccgcaggc

SEQ ID NO: 1583714 - RNA, 19 nt, Artificial Sequence
  Description of Artificial Sequence: Synthetic oligonucleotide
caccguuuguagcauggaa

SEQ ID NO: 1583715 - RNA, 19 nt, Artificial Sequence
  Description of Artificial Sequence: Synthetic oligonucleotide
gaccggugucagguacucg

SEQ ID NO: 1583716 - RNA, 19 nt, Artificial Sequence
  Description of Artificial Sequence: Synthetic oligonucleotide
cuuuacaagcuuccacuau

SEQ ID NO: 1583717 - RNA, 19 nt, Artificial Sequence
  Description of Artificial Sequence: Synthetic oligonucleotide
agcauccacuuuaacuuua

SEQ ID NO: 1583718 - RNA, 19 nt, Artificial Sequence
  Description of Artificial Sequence: Synthetic oligonucleotide
gucgcgauccgggccgggg

SEQ ID NO: 1583719 - RNA, 19 nt, Artificial Sequence
  Description of Artificial Sequence: Synthetic oligonucleotide
cacacggggcugagcaauc

SEQ ID NO: 1583720 - RNA, 19 nt, Artificial Sequence
  Description of Artificial Sequence: Synthetic oligonucleotide
aucgagccccgcaggcggc

SEQ ID NO: 1583721 - RNA, 19 nt, Artificial Sequence
  Description of Artificial Sequence: Synthetic oligonucleotide
ggacagucgcgauccgggc

SEQ ID NO: 1583722 - RNA, 19 nt, Artificial Sequence
  Description of Artificial Sequence: Synthetic oligonucleotide
acaccguuuguagcaugga

SEQ ID NO: 1583723 - RNA, 19 nt, Artificial Sequence
  Description of Artificial Sequence: Synthetic oligonucleotide
gaggggcggcggcacgcgg

SEQ ID NO: 1583724 - RNA, 19 nt, Artificial Sequence
  Description of Artificial Sequence: Synthetic oligonucleotide
caugucggacaguggugga

SEQ ID NO: 1583725 - RNA, 19 nt, Artificial Sequence
  Description of Artificial Sequence: Synthetic oligonucleotide
agccguggugucugguaau

SEQ ID NO: 1583726 - RNA, 19 nt, Artificial Sequence
  Description of Artificial Sequence: Synthetic oligonucleotide
agugucuuguguagucaua

SEQ ID NO: 1583727 - RNA, 19 nt, Artificial Sequence
  Description of Artificial Sequence: Synthetic oligonucleotide
caccugucuccuuaaauuu

SEQ ID NO: 1583728 - RNA, 19 nt, Artificial Sequence
  Description of Artificial Sequence: Synthetic oligonucleotide
ucggacagugguggacuaa

SEQ ID NO: 1583729 - RNA, 19 nt, Artificial Sequence
  Description of Artificial Sequence: Synthetic oligonucleotide
gcugucuuucaucccggga

SEQ ID NO: 1583730 - RNA, 19 nt, Artificial Sequence
  Description of Artificial Sequence: Synthetic oligonucleotide
cuugugucuaggguagccu

SEQ ID NO: 1583731 - RNA, 19 nt, Artificial Sequence
  Description of Artificial Sequence: Synthetic oligonucleotide
aggcgggugcgcgcgcagc

SEQ ID NO: 1583732 - RNA, 19 nt, Artificial Sequence
  Description of Artificial Sequence: Synthetic oligonucleotide
gcaucgagccccgcaggcg

SEQ ID NO: 1583733 - RNA, 19 nt, Artificial Sequence
  Description of Artificial Sequence: Synthetic oligonucleotide
cagggagggacagucgcga

SEQ ID NO: 1583734 - RNA, 19 nt, Artificial Sequence
  Description of Artificial Sequence: Synthetic oligonucleotide
ccuguagcccauugccaug

SEQ ID NO: 1583735 - RNA, 19 nt, Artificial Sequence
  Description of Artificial Sequence: Synthetic oligonucleotide
cuggccggccccgaagcug

SEQ ID NO: 1583736 - RNA, 19 nt, Artificial Sequence
  Description of Artificial Sequence: Synthetic oligonucleotide
gcauccacuuuaacuuuac

SEQ ID NO: 1583737 - RNA, 19 nt, Artificial Sequence
  Description of Artificial Sequence: Synthetic oligonucleotide
agggagggacagucgcgau

SEQ ID NO: 1583738 - RNA, 19 nt, Artificial Sequence
  Description of Artificial Sequence: Synthetic oligonucleotide
gccaaacaaccauagccgu

SEQ ID NO: 1583739 - RNA, 19 nt, Artificial Sequence
  Description of Artificial Sequence: Synthetic oligonucleotide
acacggggcugagcaaucu

SEQ ID NO: 1583740 - RNA, 19 nt, Artificial Sequence
  Description of Artificial Sequence: Synthetic oligonucleotide
ggaguuuuauacuguccuu

SEQ ID NO: 1583741 - RNA, 19 nt, Artificial Sequence
  Description of Artificial Sequence: Synthetic oligonucleotide
cuacauugugaagugucuu

SEQ ID NO: 1583742 - RNA, 19 nt, Artificial Sequence
  Description of Artificial Sequence: Synthetic oligonucleotide
ucgagccccgcaggcggca

SEQ ID NO: 1583743 - RNA, 19 nt, Artificial Sequence
  Description of Artificial Sequence: Synthetic oligonucleotide
cguugcucgucauagccaa

SEQ ID NO: 1583744 - RNA, 19 nt, Artificial Sequence
  Description of Artificial Sequence: Synthetic oligonucleotide
cugcaacugucucaauaau

SEQ ID NO: 1583745 - RNA, 19 nt, Artificial Sequence
  Description of Artificial Sequence: Synthetic oligonucleotide
gucggacagugguggacua

SEQ ID NO: 1583746 - RNA, 19 nt, Artificial Sequence
  Description of Artificial Sequence: Synthetic oligonucleotide
gccgacuggcaucgagccc

SEQ ID NO: 1583747 - RNA, 19 nt, Artificial Sequence
  Description of Artificial Sequence: Synthetic oligonucleotide
gcccauugccaugucggac

SEQ ID NO: 1583748 - RNA, 19 nt, Artificial Sequence
  Description of Artificial Sequence: Synthetic oligonucleotide
ccuucaccguguugaucac

SEQ ID NO: 1583749 - RNA, 19 nt, Artificial Sequence
  Description of Artificial Sequence: Synthetic oligonucleotide
ccauagccguggugucugg

SEQ ID NO: 1583750 - RNA, 19 nt, Artificial Sequence
  Description of Artificial Sequence: Synthetic oligonucleotide
agucgcgauccgggccggg

SEQ ID NO: 1583751 - RNA, 19 nt, Artificial Sequence
  Description of Artificial Sequence: Synthetic oligonucleotide
ccguugcucgucauagcca

SEQ ID NO: 1583752 - RNA, 19 nt, Artificial Sequence
  Description of Artificial Sequence: Synthetic oligonucleotide
cuccaucuguuuacaccgu

SEQ ID NO: 1583753 - RNA, 19 nt, Artificial Sequence
  Description of Artificial Sequence: Synthetic oligonucleotide
ggaggggcggcggcacgcg

SEQ ID NO: 1583754 - RNA, 19 nt, Artificial Sequence
  Description of Artificial Sequence: Synthetic oligonucleotide
ggaccggugucagguacuc

SEQ ID NO: 1583755 - RNA, 19 nt, Artificial Sequence
  Description of Artificial Sequence: Synthetic oligonucleotide
cagucgcgauccgggccgg

SEQ ID NO: 1583756 - RNA, 19 nt, Artificial Sequence
  Description of Artificial Sequence: Synthetic oligonucleotide
guugcucgucauagccaaa

SEQ ID NO: 1583757 - RNA, 19 nt, Artificial Sequence
  Description of Artificial Sequence: Synthetic oligonucleotide
accuggccgcgacggcaga

SEQ ID NO: 1583758 - RNA, 19 nt, Artificial Sequence
  Description of Artificial Sequence: Synthetic oligonucleotide
auccgggccggggacucaa

SEQ ID NO: 1583759 - RNA, 19 nt, Artificial Sequence
  Description of Artificial Sequence: Synthetic oligonucleotide
gcugccguugcucgucaua

SEQ ID NO: 1583760 - RNA, 19 nt, Artificial Sequence
  Description of Artificial Sequence: Synthetic oligonucleotide
gugucuaggguagccucau

SEQ ID NO: 1583761 - RNA, 19 nt, Artificial Sequence
  Description of Artificial Sequence: Synthetic oligonucleotide
agcugucaccuggccgcga

SEQ ID NO: 1583762 - RNA, 19 nt, Artificial Sequence
  Description of Artificial Sequence: Synthetic oligonucleotide
cugccccggacguggccga

SEQ ID NO: 1583763 - RNA, 19 nt, Artificial Sequence
  Description of Artificial Sequence: Synthetic oligonucleotide
gcagcgcccuggccggccc

SEQ ID NO: 1583764 - RNA, 19 nt, Artificial Sequence
  Description of Artificial Sequence: Synthetic oligonucleotide
cauagccguggugucuggu

SEQ ID NO: 1583765 - RNA, 19 nt, Artificial Sequence
  Description of Artificial Sequence: Synthetic oligonucleotide
ccaucuguuuacaccguuu

SEQ ID NO: 1583766 - RNA, 19 nt, Artificial Sequence
  Description of Artificial Sequence: Synthetic oligonucleotide
cgacuggcaucgagccccg

SEQ ID NO: 1583767 - RNA, 19 nt, Artificial Sequence
  Description of Artificial Sequence: Synthetic oligonucleotide
ccgcaggcggcacccgcag

SEQ ID NO: 1583768 - RNA, 19 nt, Artificial Sequence
  Description of Artificial Sequence: Synthetic oligonucleotide
ccucaucacacggggcuga

SEQ ID NO: 1583769 - RNA, 19 nt, Artificial Sequence
  Description of Artificial Sequence: Synthetic oligonucleotide
gccgagcuggaggcgggug

SEQ ID NO: 1583770 - RNA, 19 nt, Artificial Sequence
  Description of Artificial Sequence: Synthetic oligonucleotide
ggcggccgggcccagcugu

SEQ ID NO: 1583771 - RNA, 19 nt, Artificial Sequence
  Description of Artificial Sequence: Synthetic oligonucleotide
gccguggugucugguaaua

SEQ ID NO: 1583772 - RNA, 19 nt, Artificial Sequence
  Description of Artificial Sequence: Synthetic oligonucleotide
cgcgauccgggccggggac

SEQ ID NO: 1583773 - RNA, 19 nt, Artificial Sequence
  Description of Artificial Sequence: Synthetic oligonucleotide
cccggacguggccgacugg

SEQ ID NO: 1583774 - RNA, 19 nt, Artificial Sequence
  Description of Artificial Sequence: Synthetic oligonucleotide
cacggggcugagcaaucuu

SEQ ID NO: 1583775 - RNA, 19 nt, Artificial Sequence
  Description of Artificial Sequence: Synthetic oligonucleotide
cccgcaggcggcacccgca

SEQ ID NO: 1583776 - RNA, 19 nt, Artificial Sequence
  Description of Artificial Sequence: Synthetic oligonucleotide
gcggcacgcggcggccggg

SEQ ID NO: 1583777 - RNA, 19 nt, Artificial Sequence
  Description of Artificial Sequence: Synthetic oligonucleotide
ccgggccggggacucaaaa

SEQ ID NO: 1583778 - RNA, 19 nt, Artificial Sequence
  Description of Artificial Sequence: Synthetic oligonucleotide
cgauccgggccggggacuc

SEQ ID NO: 1583779 - RNA, 19 nt, Artificial Sequence
  Description of Artificial Sequence: Synthetic oligonucleotide
ggugcgcgcgcagcgcccu

SEQ ID NO: 1583780 - RNA, 19 nt, Artificial Sequence
  Description of Artificial Sequence: Synthetic oligonucleotide
cguuuguagcauggaacau

SEQ ID NO: 1583781 - RNA, 19 nt, Artificial Sequence
  Description of Artificial Sequence: Synthetic oligonucleotide
gcggccgggcccagcuguc

SEQ ID NO: 1583782 - RNA, 19 nt, Artificial Sequence
  Description of Artificial Sequence: Synthetic oligonucleotide
gcgauccgggccggggacu

SEQ ID NO: 1583783 - RNA, 19 nt, Artificial Sequence
  Description of Artificial Sequence: Synthetic oligonucleotide
cgagccccgcaggcggcac

SEQ ID NO: 1583784 - RNA, 19 nt, Artificial Sequence
  Description of Artificial Sequence: Synthetic oligonucleotide
cggccgggcccagcuguca

SEQ ID NO: 1583785 - RNA, 19 nt, Artificial Sequence
  Description of Artificial Sequence: Synthetic oligonucleotide
cggccccgaagcugucuuu

SEQ ID NO: 1583786 - RNA, 19 nt, Artificial Sequence
  Description of Artificial Sequence: Synthetic oligonucleotide
aacggcaucagccagcacg

SEQ ID NO: 1583787 - RNA, 19 nt, Artificial Sequence
  Description of Artificial Sequence: Synthetic oligonucleotide
acaacagggaaguuggugc

SEQ ID NO: 1583788 - RNA, 19 nt, Artificial Sequence
  Description of Artificial Sequence: Synthetic oligonucleotide
cugucaaagauguaaaggg

SEQ ID NO: 1583789 - RNA, 19 nt, Artificial Sequence
  Description of Artificial Sequence: Synthetic oligonucleotide
uguaccacuuccuugacag

SEQ ID NO: 1583790 - RNA, 19 nt, Artificial Sequence
  Description of Artificial Sequence: Synthetic oligonucleotide
agagggucaauaugaaucc

SEQ ID NO: 1583791 - RNA, 19 nt, Artificial Sequence
  Description of Artificial Sequence: Synthetic oligonucleotide
cauuaaaccagguaauggc

SEQ ID NO: 1583792 - RNA, 19 nt, Artificial Sequence
  Description of Artificial Sequence: Synthetic oligonucleotide
ucucgggucaccuugauga

SEQ ID NO: 1583793 - RNA, 19 nt, Artificial Sequence
  Description of Artificial Sequence: Synthetic oligonucleotide
ugcuucaagacccuguacc

SEQ ID NO: 1583794 - RNA, 19 nt, Artificial Sequence
  Description of Artificial Sequence: Synthetic oligonucleotide
aagaaacgcgcccucugcc

SEQ ID NO: 1583795 - RNA, 19 nt, Artificial Sequence
  Description of Artificial Sequence: Synthetic oligonucleotide
uguccguggauaaauaaca

SEQ ID NO: 1583796 - RNA, 19 nt, Artificial Sequence
  Description of Artificial Sequence: Synthetic oligonucleotide
ucaauaugaaucccgguuc

SEQ ID NO: 1583797 - RNA, 19 nt, Artificial Sequence
  Description of Artificial Sequence: Synthetic oligonucleotide
aucacaaaccaccuguaag

SEQ ID NO: 1583798 - RNA, 19 nt, Artificial Sequence
  Description of Artificial Sequence: Synthetic oligonucleotide
gggguuugaacucaggugg

SEQ ID NO: 1583799 - RNA, 19 nt, Artificial Sequence
  Description of Artificial Sequence: Synthetic oligonucleotide
acauuaaaccagguaaugg

SEQ ID NO: 1583800 - RNA, 19 nt, Artificial Sequence
  Description of Artificial Sequence: Synthetic oligonucleotide
gaaucccgguuccagaacg

SEQ ID NO: 1583801 - RNA, 19 nt, Artificial Sequence
  Description of Artificial Sequence: Synthetic oligonucleotide
uguagggccuuucguaccg

SEQ ID NO: 1583802 - RNA, 19 nt, Artificial Sequence
  Description of Artificial Sequence: Synthetic oligonucleotide
agaagcgaugccuguagac

SEQ ID NO: 1583803 - RNA, 19 nt, Artificial Sequence
  Description of Artificial Sequence: Synthetic oligonucleotide
ucucguaguaguugugccg

SEQ ID NO: 1583804 - RNA, 19 nt, Artificial Sequence
  Description of Artificial Sequence: Synthetic oligonucleotide
ucccagagggucaauauga

SEQ ID NO: 1583805 - RNA, 19 nt, Artificial Sequence
  Description of Artificial Sequence: Synthetic oligonucleotide
uccgguauuuccuuuugag

SEQ ID NO: 1583806 - RNA, 19 nt, Artificial Sequence
  Description of Artificial Sequence: Synthetic oligonucleotide
gaacuaaggcauuccaggc

SEQ ID NO: 1583807 - RNA, 19 nt, Artificial Sequence
  Description of Artificial Sequence: Synthetic oligonucleotide
uuugcucacgcagucaucc

SEQ ID NO: 1583808 - RNA, 19 nt, Artificial Sequence
  Description of Artificial Sequence: Synthetic oligonucleotide
aacgcccuucgcuccaucc

SEQ ID NO: 1583809 - RNA, 19 nt, Artificial Sequence
  Description of Artificial Sequence: Synthetic oligonucleotide
auguacucgauguaguacu

SEQ ID NO: 1583810 - RNA, 19 nt, Artificial Sequence
  Description of Artificial Sequence: Synthetic oligonucleotide
uuucguaccgcucuacaaa

SEQ ID NO: 1583811 - RNA, 19 nt, Artificial Sequence
  Description of Artificial Sequence: Synthetic oligonucleotide
gaguccuugagcucgggcc

SEQ ID NO: 1583812 - RNA, 19 nt, Artificial Sequence
  Description of Artificial Sequence: Synthetic oligonucleotide
aacgcuuguggcccugaac

SEQ ID NO: 1583813 - RNA, 19 nt, Artificial Sequence
  Description of Artificial Sequence: Synthetic oligonucleotide
uacucgauguaguacuuca

SEQ ID NO: 1583814 - RNA, 19 nt, Artificial Sequence
  Description of Artificial Sequence: Synthetic oligonucleotide
agguaguguccccauuucc

SEQ ID NO: 1583815 - RNA, 19 nt, Artificial Sequence
  Description of Artificial Sequence: Synthetic oligonucleotide
cacgcagucauccugugag

SEQ ID NO: 1583816 - RNA, 19 nt, Artificial Sequence
  Description of Artificial Sequence: Synthetic oligonucleotide
auccucaccgcacuugaac

SEQ ID NO: 1583817 - RNA, 19 nt, Artificial Sequence
  Description of Artificial Sequence: Synthetic oligonucleotide
aguguccccauuucccacc

SEQ ID NO: 1583818 - RNA, 19 nt, Artificial Sequence
  Description of Artificial Sequence: Synthetic oligonucleotide
cauccugugagguaguguc

SEQ ID NO: 1583819 - RNA, 19 nt, Artificial Sequence
  Description of Artificial Sequence: Synthetic oligonucleotide
gaggucaacggcaucagcc

SEQ ID NO: 1583820 - RNA, 19 nt, Artificial Sequence
  Description of Artificial Sequence: Synthetic oligonucleotide
caauaugaaucccgguucc

SEQ ID NO: 1583821 - RNA, 19 nt, Artificial Sequence
  Description of Artificial Sequence: Synthetic oligonucleotide
ucgagcgaguccuugagcu

SEQ ID NO: 1583822 - RNA, 19 nt, Artificial Sequence
  Description of Artificial Sequence: Synthetic oligonucleotide
acaaaccaccuguaagggg

SEQ ID NO: 1583823 - RNA, 19 nt, Artificial Sequence
  Description of Artificial Sequence: Synthetic oligonucleotide
uuauccucaccgcacuuga

SEQ ID NO: 1583824 - RNA, 19 nt, Artificial Sequence
  Description of Artificial Sequence: Synthetic oligonucleotide
acgcuuguggcccugaacu

SEQ ID NO: 1583825 - RNA, 19 nt, Artificial Sequence
  Description of Artificial Sequence: Synthetic oligonucleotide
agggguuugaacucaggug

SEQ ID NO: 1583826 - RNA, 19 nt, Artificial Sequence
  Description of Artificial Sequence: Synthetic oligonucleotide
cuggaaaaggucauccgug

SEQ ID NO: 1583827 - RNA, 19 nt, Artificial Sequence
  Description of Artificial Sequence: Synthetic oligonucleotide
aguugugccggguccaguc

SEQ ID NO: 1583828 - RNA, 19 nt, Artificial Sequence
  Description of Artificial Sequence: Synthetic oligonucleotide
aaacgcgcccucugccucc

SEQ ID NO: 1583829 - RNA, 19 nt, Artificial Sequence
  Description of Artificial Sequence: Synthetic oligonucleotide
uuaaaccagguaauggcuu

SEQ ID NO: 1583830 - RNA, 19 nt, Artificial Sequence
  Description of Artificial Sequence: Synthetic oligonucleotide
uucugguuccgguauuucc

SEQ ID NO: 1583831 - RNA, 19 nt, Artificial Sequence
  Description of Artificial Sequence: Synthetic oligonucleotide
agacaccaacgcuuguggc

SEQ ID NO: 1583832 - RNA, 19 nt, Artificial Sequence
  Description of Artificial Sequence: Synthetic oligonucleotide
gcugucaaagauguaaagg

SEQ ID NO: 1583833 - RNA, 19 nt, Artificial Sequence
  Description of Artificial Sequence: Synthetic oligonucleotide
auuaaaccagguaauggcu

SEQ ID NO: 1583834 - RNA, 19 nt, Artificial Sequence
  Description of Artificial Sequence: Synthetic oligonucleotide
ugccgucaccuucagaccc

SEQ ID NO: 1583835 - RNA, 19 nt, Artificial Sequence
  Description of Artificial Sequence: Synthetic oligonucleotide
cacguuauccggcacggcc

SEQ ID NO: 1583836 - RNA, 19 nt, Artificial Sequence
  Description of Artificial Sequence: Synthetic oligonucleotide
guucaucccgagcaggucc

SEQ ID NO: 1583837 - RNA, 19 nt, Artificial Sequence
  Description of Artificial Sequence: Synthetic oligonucleotide
cucguaguaguugugccgg

SEQ ID NO: 1583838 - RNA, 19 nt, Artificial Sequence
  Description of Artificial Sequence: Synthetic oligonucleotide
uguagacucuuggagguca

SEQ ID NO: 1583839 - RNA, 19 nt, Artificial Sequence
  Description of Artificial Sequence: Synthetic oligonucleotide
gaaccacgggcuuguaggg

SEQ ID NO: 1583840 - RNA, 19 nt, Artificial Sequence
  Description of Artificial Sequence: Synthetic oligonucleotide
acgaccucgacgccgcucg

SEQ ID NO: 1583841 - RNA, 19 nt, Artificial Sequence
  Description of Artificial Sequence: Synthetic oligonucleotide
acgggugcucuccauguac

SEQ ID NO: 1583842 - RNA, 19 nt, Artificial Sequence
  Description of Artificial Sequence: Synthetic oligonucleotide
ugagguaguguccccauuu

SEQ ID NO: 1583843 - RNA, 19 nt, Artificial Sequence
  Description of Artificial Sequence: Synthetic oligonucleotide
agggucaauaugaaucccg

SEQ ID NO: 1583844 - RNA, 19 nt, Artificial Sequence
  Description of Artificial Sequence: Synthetic oligonucleotide
ucucggggagugcuugugg

SEQ ID NO: 1583845 - RNA, 19 nt, Artificial Sequence
  Description of Artificial Sequence: Synthetic oligonucleotide
cucucguaguaguugugcc

SEQ ID NO: 1583846 - RNA, 19 nt, Artificial Sequence
  Description of Artificial Sequence: Synthetic oligonucleotide
guagcugcugucaaagaug

SEQ ID NO: 1583847 - RNA, 19 nt, Artificial Sequence
  Description of Artificial Sequence: Synthetic oligonucleotide
agcgucagcccucuccacg

SEQ ID NO: 1583848 - RNA, 19 nt, Artificial Sequence
  Description of Artificial Sequence: Synthetic oligonucleotide
uccucaccgcacuugaacu

SEQ ID NO: 1583849 - RNA, 19 nt, Artificial Sequence
  Description of Artificial Sequence: Synthetic oligonucleotide
cacaaaccaccuguaaggg

SEQ ID NO: 1583850 - RNA, 19 nt, Artificial Sequence
  Description of Artificial Sequence: Synthetic oligonucleotide
aaauaacauuaaaccaggu

SEQ ID NO: 1583851 - RNA, 19 nt, Artificial Sequence
  Description of Artificial Sequence: Synthetic oligonucleotide
ugcucacgcagucauccug

SEQ ID NO: 1583852 - RNA, 19 nt, Artificial Sequence
  Description of Artificial Sequence: Synthetic oligonucleotide
gccgucguuauccucaccg

SEQ ID NO: 1583853 - RNA, 19 nt, Artificial Sequence
  Description of Artificial Sequence: Synthetic oligonucleotide
aauaugaaucccgguucca

SEQ ID NO: 1583854 - RNA, 19 nt, Artificial Sequence
  Description of Artificial Sequence: Synthetic oligonucleotide
uucaucccgagcagguccc

SEQ ID NO: 1583855 - RNA, 19 nt, Artificial Sequence
  Description of Artificial Sequence: Synthetic oligonucleotide
uucguaccgcucuacaaau

SEQ ID NO: 1583856 - RNA, 19 nt, Artificial Sequence
  Description of Artificial Sequence: Synthetic oligonucleotide
cauguacucgauguaguac

SEQ ID NO: 1583857 - RNA, 19 nt, Artificial Sequence
  Description of Artificial Sequence: Synthetic oligonucleotide
ggcacucguucccagaggg

SEQ ID NO: 1583858 - RNA, 19 nt, Artificial Sequence
  Description of Artificial Sequence: Synthetic oligonucleotide
caccgacagcuguagagcg

SEQ ID NO: 1583859 - RNA, 19 nt, Artificial Sequence
  Description of Artificial Sequence: Synthetic oligonucleotide
agagcgucagcccucucca

SEQ ID NO: 1583860 - RNA, 19 nt, Artificial Sequence
  Description of Artificial Sequence: Synthetic oligonucleotide
ugcgagcacauccuugcac

SEQ ID NO: 1583861 - RNA, 19 nt, Artificial Sequence
  Description of Artificial Sequence: Synthetic oligonucleotide
uuccuuuugaggcgcucca

SEQ ID NO: 1583862 - RNA, 19 nt, Artificial Sequence
  Description of Artificial Sequence: Synthetic oligonucleotide
acgcccuucgcuccauccc

SEQ ID NO: 1583863 - RNA, 19 nt, Artificial Sequence
  Description of Artificial Sequence: Synthetic oligonucleotide
uuguagggccuuucguacc

SEQ ID NO: 1583864 - RNA, 19 nt, Artificial Sequence
  Description of Artificial Sequence: Synthetic oligonucleotide
accgucuugugccacacaa

SEQ ID NO: 1583865 - RNA, 19 nt, Artificial Sequence
  Description of Artificial Sequence: Synthetic oligonucleotide
ucguuauccucaccgcacu

SEQ ID NO: 1583866 - RNA, 19 nt, Artificial Sequence
  Description of Artificial Sequence: Synthetic oligonucleotide
guauuuccuuuugaggcgc

SEQ ID NO: 1583867 - RNA, 19 nt, Artificial Sequence
  Description of Artificial Sequence: Synthetic oligonucleotide
uccuuuugggguguucgcc

SEQ ID NO: 1583868 - RNA, 19 nt, Artificial Sequence
  Description of Artificial Sequence: Synthetic oligonucleotide
uccguggauaaauaacauu

SEQ ID NO: 1583869 - RNA, 19 nt, Artificial Sequence
  Description of Artificial Sequence: Synthetic oligonucleotide
ggaccagcccucuugugcg

SEQ ID NO: 1583870 - RNA, 19 nt, Artificial Sequence
  Description of Artificial Sequence: Synthetic oligonucleotide
acagacaccaacgcuugug

SEQ ID NO: 1583871 - RNA, 19 nt, Artificial Sequence
  Description of Artificial Sequence: Synthetic oligonucleotide
agaaacgcgcccucugccu

SEQ ID NO: 1583872 - RNA, 19 nt, Artificial Sequence
  Description of Artificial Sequence: Synthetic oligonucleotide
uuauccggcacggccgccg

SEQ ID NO: 1583873 - RNA, 19 nt, Artificial Sequence
  Description of Artificial Sequence: Synthetic oligonucleotide
uccccauuucccaccgugc

SEQ ID NO: 1583874 - RNA, 19 nt, Artificial Sequence
  Description of Artificial Sequence: Synthetic oligonucleotide
ugaaucccgguuccagaac

SEQ ID NO: 1583875 - RNA, 19 nt, Artificial Sequence
  Description of Artificial Sequence: Synthetic oligonucleotide
uccugcgcggaccagcccu

SEQ ID NO: 1583876 - RNA, 19 nt, Artificial Sequence
  Description of Artificial Sequence: Synthetic oligonucleotide
uggcacaaagacagucucu

SEQ ID NO: 1583877 - RNA, 19 nt, Artificial Sequence
  Description of Artificial Sequence: Synthetic oligonucleotide
gguaguguccccauuuccc

SEQ ID NO: 1583878 - RNA, 19 nt, Artificial Sequence
  Description of Artificial Sequence: Synthetic oligonucleotide
gucaauaugaaucccgguu

SEQ ID NO: 1583879 - RNA, 19 nt, Artificial Sequence
  Description of Artificial Sequence: Synthetic oligonucleotide
ucacgggugcucuccaugu

SEQ ID NO: 1583880 - RNA, 19 nt, Artificial Sequence
  Description of Artificial Sequence: Synthetic oligonucleotide
accagguaauggcuucauc

SEQ ID NO: 1583881 - RNA, 19 nt, Artificial Sequence
  Description of Artificial Sequence: Synthetic oligonucleotide
aggagcugcguucuuugcu

SEQ ID NO: 1583882 - RNA, 19 nt, Artificial Sequence
  Description of Artificial Sequence: Synthetic oligonucleotide
aucacgggugcucuccaug

SEQ ID NO: 1583883 - RNA, 19 nt, Artificial Sequence
  Description of Artificial Sequence: Synthetic oligonucleotide
ucaacggcaucagccagca

SEQ ID NO: 1583884 - RNA, 19 nt, Artificial Sequence
  Description of Artificial Sequence: Synthetic oligonucleotide
gguuccagaacgugguggc

SEQ ID NO: 1583885 - RNA, 19 nt, Artificial Sequence
  Description of Artificial Sequence: Synthetic oligonucleotide
uuccgguauuuccuuuuga

SEQ ID NO: 1583886 - RNA, 19 nt, Artificial Sequence
  Description of Artificial Sequence: Synthetic oligonucleotide
acggccgccgggcucagcg

SEQ ID NO: 1583887 - RNA, 19 nt, Artificial Sequence
  Description of Artificial Sequence: Synthetic oligonucleotide
uucucgggucaccuugaug

SEQ ID NO: 1583888 - RNA, 19 nt, Artificial Sequence
  Description of Artificial Sequence: Synthetic oligonucleotide
acguuauccggcacggccg

SEQ ID NO: 1583889 - RNA, 19 nt, Artificial Sequence
  Description of Artificial Sequence: Synthetic oligonucleotide
guuauccucaccgcacuug

SEQ ID NO: 1583890 - RNA, 19 nt, Artificial Sequence
  Description of Artificial Sequence: Synthetic oligonucleotide
guagccgucguuauccuca

SEQ ID NO: 1583891 - RNA, 19 nt, Artificial Sequence
  Description of Artificial Sequence: Synthetic oligonucleotide
ucguaguaguugugccggg

SEQ ID NO: 1583892 - RNA, 19 nt, Artificial Sequence
  Description of Artificial Sequence: Synthetic oligonucleotide
ccgguauuuccuuuugagg

SEQ ID NO: 1583893 - RNA, 19 nt, Artificial Sequence
  Description of Artificial Sequence: Synthetic oligonucleotide
gggucaauaugaaucccgg

SEQ ID NO: 1583894 - RNA, 19 nt, Artificial Sequence
  Description of Artificial Sequence: Synthetic oligonucleotide
acggcaucagccagcacgg

SEQ ID NO: 1583895 - RNA, 19 nt, Artificial Sequence
  Description of Artificial Sequence: Synthetic oligonucleotide
gugcuuguggggaacagac

SEQ ID NO: 1583896 - RNA, 19 nt, Artificial Sequence
  Description of Artificial Sequence: Synthetic oligonucleotide
caggcacucguucccagag

SEQ ID NO: 1583897 - RNA, 19 nt, Artificial Sequence
  Description of Artificial Sequence: Synthetic oligonucleotide
ugucaagauugagaacaac

SEQ ID NO: 1583898 - RNA, 19 nt, Artificial Sequence
  Description of Artificial Sequence: Synthetic oligonucleotide
uucgccguagcugcuguca

SEQ ID NO: 1583899 - RNA, 19 nt, Artificial Sequence
  Description of Artificial Sequence: Synthetic oligonucleotide
accucgacgccgcucgcuc

SEQ ID NO: 1583900 - RNA, 19 nt, Artificial Sequence
  Description of Artificial Sequence: Synthetic oligonucleotide
uugugccggguccagucga

SEQ ID NO: 1583901 - RNA, 19 nt, Artificial Sequence
  Description of Artificial Sequence: Synthetic oligonucleotide
acgcagucauccugugagg

SEQ ID NO: 1583902 - RNA, 19 nt, Artificial Sequence
  Description of Artificial Sequence: Synthetic oligonucleotide
ugugccggguccagucgag

SEQ ID NO: 1583903 - RNA, 19 nt, Artificial Sequence
  Description of Artificial Sequence: Synthetic oligonucleotide
cauuucuccugcgcggacc

SEQ ID NO: 1583904 - RNA, 19 nt, Artificial Sequence
  Description of Artificial Sequence: Synthetic oligonucleotide
uccccugcguacuggaaaa

SEQ ID NO: 1583905 - RNA, 19 nt, Artificial Sequence
  Description of Artificial Sequence: Synthetic oligonucleotide
uauuuccuuuugaggcgcu

SEQ ID NO: 1583906 - RNA, 19 nt, Artificial Sequence
  Description of Artificial Sequence: Synthetic oligonucleotide
ucacgcagucauccuguga

SEQ ID NO: 1583907 - RNA, 19 nt, Artificial Sequence
  Description of Artificial Sequence: Synthetic oligonucleotide
agcugcguucuuugcucac

SEQ ID NO: 1583908 - RNA, 19 nt, Artificial Sequence
  Description of Artificial Sequence: Synthetic oligonucleotide
ccguggauaaauaacauua

SEQ ID NO: 1583909 - RNA, 19 nt, Artificial Sequence
  Description of Artificial Sequence: Synthetic oligonucleotide
uccauuucuccugcgcgga

SEQ ID NO: 1583910 - RNA, 19 nt, Artificial Sequence
  Description of Artificial Sequence: Synthetic oligonucleotide
ggguguucgccguagcugc

SEQ ID NO: 1583911 - RNA, 19 nt, Artificial Sequence
  Description of Artificial Sequence: Synthetic oligonucleotide
aaacgcccuucgcuccauc

SEQ ID NO: 1583912 - RNA, 19 nt, Artificial Sequence
  Description of Artificial Sequence: Synthetic oligonucleotide
uccugcggugugcugugcc

SEQ ID NO: 1583913 - RNA, 19 nt, Artificial Sequence
  Description of Artificial Sequence: Synthetic oligonucleotide
gaaacgcgcccucugccuc

SEQ ID NO: 1583914 - RNA, 19 nt, Artificial Sequence
  Description of Artificial Sequence: Synthetic oligonucleotide
auuuccuuuugaggcgcuc

SEQ ID NO: 1583915 - RNA, 19 nt, Artificial Sequence
  Description of Artificial Sequence: Synthetic oligonucleotide
uauccggcacggccgccgg

SEQ ID NO: 1583916 - RNA, 19 nt, Artificial Sequence
  Description of Artificial Sequence: Synthetic oligonucleotide
cuucaagacccuguaccac

SEQ ID NO: 1583917 - RNA, 19 nt, Artificial Sequence
  Description of Artificial Sequence: Synthetic oligonucleotide
ccggccaccaagaaacgcg

SEQ ID NO: 1583918 - RNA, 19 nt, Artificial Sequence
  Description of Artificial Sequence: Synthetic oligonucleotide
gucguuauccucaccgcac

SEQ ID NO: 1583919 - RNA, 19 nt, Artificial Sequence
  Description of Artificial Sequence: Synthetic oligonucleotide
gaagcgaugccuguagacu

SEQ ID NO: 1583920 - RNA, 19 nt, Artificial Sequence
  Description of Artificial Sequence: Synthetic oligonucleotide
cuuucguaccgcucuacaa

SEQ ID NO: 1583921 - RNA, 19 nt, Artificial Sequence
  Description of Artificial Sequence: Synthetic oligonucleotide
aguucucggggagugcuug

SEQ ID NO: 1583922 - RNA, 19 nt, Artificial Sequence
  Description of Artificial Sequence: Synthetic oligonucleotide
aggcacucguucccagagg

SEQ ID NO: 1583923 - RNA, 19 nt, Artificial Sequence
  Description of Artificial Sequence: Synthetic oligonucleotide
cacucguucccagaggguc

SEQ ID NO: 1583924 - RNA, 19 nt, Artificial Sequence
  Description of Artificial Sequence: Synthetic oligonucleotide
cagcgggaagcucucguag

SEQ ID NO: 1583925 - RNA, 19 nt, Artificial Sequence
  Description of Artificial Sequence: Synthetic oligonucleotide
agaacgugguggccccauc

SEQ ID NO: 1583926 - RNA, 19 nt, Artificial Sequence
  Description of Artificial Sequence: Synthetic oligonucleotide
uguagagcgucagcccucu

SEQ ID NO: 1583927 - RNA, 19 nt, Artificial Sequence
  Description of Artificial Sequence: Synthetic oligonucleotide
agcgggaagcucucguagu

SEQ ID NO: 1583928 - RNA, 19 nt, Artificial Sequence
  Description of Artificial Sequence: Synthetic oligonucleotide
ucaccgcacuugaacuucu

SEQ ID NO: 1583929 - RNA, 19 nt, Artificial Sequence
  Description of Artificial Sequence: Synthetic oligonucleotide
ugaggcgcuccagagucca

SEQ ID NO: 1583930 - RNA, 19 nt, Artificial Sequence
  Description of Artificial Sequence: Synthetic oligonucleotide
guguccccauuucccaccg

SEQ ID NO: 1583931 - RNA, 19 nt, Artificial Sequence
  Description of Artificial Sequence: Synthetic oligonucleotide
ccgcucuacaaauucuucc

SEQ ID NO: 1583932 - RNA, 19 nt, Artificial Sequence
  Description of Artificial Sequence: Synthetic oligonucleotide
uugagcucgggccgcgcac

SEQ ID NO: 1583933 - RNA, 19 nt, Artificial Sequence
  Description of Artificial Sequence: Synthetic oligonucleotide
gucuugugccacacaacag

SEQ ID NO: 1583934 - RNA, 19 nt, Artificial Sequence
  Description of Artificial Sequence: Synthetic oligonucleotide
uugaggcgcuccagagucc

SEQ ID NO: 1583935 - RNA, 19 nt, Artificial Sequence
  Description of Artificial Sequence: Synthetic oligonucleotide
caucuucaccgaguagccg

SEQ ID NO: 1583936 - RNA, 19 nt, Artificial Sequence
  Description of Artificial Sequence: Synthetic oligonucleotide
gcuucaagacccuguacca

SEQ ID NO: 1583937 - RNA, 19 nt, Artificial Sequence
  Description of Artificial Sequence: Synthetic oligonucleotide
ggagcugcguucuuugcuc

SEQ ID NO: 1583938 - RNA, 19 nt, Artificial Sequence
  Description of Artificial Sequence: Synthetic oligonucleotide
ggggcugucaucacgggug

SEQ ID NO: 1583939 - RNA, 19 nt, Artificial Sequence
  Description of Artificial Sequence: Synthetic oligonucleotide
gcccucuccacguuauccg

SEQ ID NO: 1583940 - RNA, 19 nt, Artificial Sequence
  Description of Artificial Sequence: Synthetic oligonucleotide
aacgcgcccucugccuccc

SEQ ID NO: 1583941 - RNA, 19 nt, Artificial Sequence
  Description of Artificial Sequence: Synthetic oligonucleotide
gcguugagcagaaccacgg

SEQ ID NO: 1583942 - RNA, 19 nt, Artificial Sequence
  Description of Artificial Sequence: Synthetic oligonucleotide
cucgggucaccuugaugag

SEQ ID NO: 1583943 - RNA, 19 nt, Artificial Sequence
  Description of Artificial Sequence: Synthetic oligonucleotide
ugcguucuuugcucacgca

SEQ ID NO: 1583944 - RNA, 19 nt, Artificial Sequence
  Description of Artificial Sequence: Synthetic oligonucleotide
ucccucuuaccgucuugug

SEQ ID NO: 1583945 - RNA, 19 nt, Artificial Sequence
  Description of Artificial Sequence: Synthetic oligonucleotide
cccucuuaccgucuugugc

SEQ ID NO: 1583946 - RNA, 19 nt, Artificial Sequence
  Description of Artificial Sequence: Synthetic oligonucleotide
uauccucaccgcacuugaa

SEQ ID NO: 1583947 - RNA, 19 nt, Artificial Sequence
  Description of Artificial Sequence: Synthetic oligonucleotide
uucucggggagugcuugug

SEQ ID NO: 1583948 - RNA, 19 nt, Artificial Sequence
  Description of Artificial Sequence: Synthetic oligonucleotide
gugccgucaccuucagacc

SEQ ID NO: 1583949 - RNA, 19 nt, Artificial Sequence
  Description of Artificial Sequence: Synthetic oligonucleotide
ccuccuuuugggguguucg

SEQ ID NO: 1583950 - RNA, 19 nt, Artificial Sequence
  Description of Artificial Sequence: Synthetic oligonucleotide
cucgacgccgcucgcuccc

SEQ ID NO: 1583951 - RNA, 19 nt, Artificial Sequence
  Description of Artificial Sequence: Synthetic oligonucleotide
guaccacuuccuugacagc

SEQ ID NO: 1583952 - RNA, 19 nt, Artificial Sequence
  Description of Artificial Sequence: Synthetic oligonucleotide
aaccagguaauggcuucau

SEQ ID NO: 1583953 - RNA, 19 nt, Artificial Sequence
  Description of Artificial Sequence: Synthetic oligonucleotide
ccagguaauggcuucaucu

SEQ ID NO: 1583954 - RNA, 19 nt, Artificial Sequence
  Description of Artificial Sequence: Synthetic oligonucleotide
uagggccuuucguaccgcu

SEQ ID NO: 1583955 - RNA, 19 nt, Artificial Sequence
  Description of Artificial Sequence: Synthetic oligonucleotide
agccgucguuauccucacc

SEQ ID NO: 1583956 - RNA, 19 nt, Artificial Sequence
  Description of Artificial Sequence: Synthetic oligonucleotide
ucuuaccgucuugugccac

SEQ ID NO: 1583957 - RNA, 19 nt, Artificial Sequence
  Description of Artificial Sequence: Synthetic oligonucleotide
gccguagcugcugucaaag

SEQ ID NO: 1583958 - RNA, 19 nt, Artificial Sequence
  Description of Artificial Sequence: Synthetic oligonucleotide
uugcucacgcagucauccu

SEQ ID NO: 1583959 - RNA, 19 nt, Artificial Sequence
  Description of Artificial Sequence: Synthetic oligonucleotide
gggcuuguagggccuuucg

SEQ ID NO: 1583960 - RNA, 19 nt, Artificial Sequence
  Description of Artificial Sequence: Synthetic oligonucleotide
gcucucguaguaguugugc

SEQ ID NO: 1583961 - RNA, 19 nt, Artificial Sequence
  Description of Artificial Sequence: Synthetic oligonucleotide
gguggccccaucacaaacc

SEQ ID NO: 1583962 - RNA, 19 nt, Artificial Sequence
  Description of Artificial Sequence: Synthetic oligonucleotide
accaagaaacgcgcccucu

SEQ ID NO: 1583963 - RNA, 19 nt, Artificial Sequence
  Description of Artificial Sequence: Synthetic oligonucleotide
guaguugugccggguccag

SEQ ID NO: 1583964 - RNA, 19 nt, Artificial Sequence
  Description of Artificial Sequence: Synthetic oligonucleotide
uccgcuuggccucgcggau

SEQ ID NO: 1583965 - RNA, 19 nt, Artificial Sequence
  Description of Artificial Sequence: Synthetic oligonucleotide
ucgccguagcugcugucaa

SEQ ID NO: 1583966 - RNA, 19 nt, Artificial Sequence
  Description of Artificial Sequence: Synthetic oligonucleotide
ucguaccgcucuacaaauu

SEQ ID NO: 1583967 - RNA, 19 nt, Artificial Sequence
  Description of Artificial Sequence: Synthetic oligonucleotide
uagccgucguuauccucac

SEQ ID NO: 1583968 - RNA, 19 nt, Artificial Sequence
  Description of Artificial Sequence: Synthetic oligonucleotide
cucacgcagucauccugug

SEQ ID NO: 1583969 - RNA, 19 nt, Artificial Sequence
  Description of Artificial Sequence: Synthetic oligonucleotide
cguaccgcucuacaaauuc

SEQ ID NO: 1583970 - RNA, 19 nt, Artificial Sequence
  Description of Artificial Sequence: Synthetic oligonucleotide
cacagcgggucaccuggag

SEQ ID NO: 1583971 - RNA, 19 nt, Artificial Sequence
  Description of Artificial Sequence: Synthetic oligonucleotide
ggaacagacaccaacgcuu

SEQ ID NO: 1583972 - RNA, 19 nt, Artificial Sequence
  Description of Artificial Sequence: Synthetic oligonucleotide
uccggcacggccgccgggc

SEQ ID NO: 1583973 - RNA, 19 nt, Artificial Sequence
  Description of Artificial Sequence: Synthetic oligonucleotide
cccgaaacgcccuucgcuc

SEQ ID NO: 1583974 - RNA, 19 nt, Artificial Sequence
  Description of Artificial Sequence: Synthetic oligonucleotide
cuugcacagacagcugcca

SEQ ID NO: 1583975 - RNA, 19 nt, Artificial Sequence
  Description of Artificial Sequence: Synthetic oligonucleotide
gggguguucgccguagcug

SEQ ID NO: 1583976 - RNA, 19 nt, Artificial Sequence
  Description of Artificial Sequence: Synthetic oligonucleotide
cuucugguuccgguauuuc

SEQ ID NO: 1583977 - RNA, 19 nt, Artificial Sequence
  Description of Artificial Sequence: Synthetic oligonucleotide
ggaaaaggucauccgugaa

SEQ ID NO: 1583978 - RNA, 19 nt, Artificial Sequence
  Description of Artificial Sequence: Synthetic oligonucleotide
ccaagaaacgcgcccucug

SEQ ID NO: 1583979 - RNA, 19 nt, Artificial Sequence
  Description of Artificial Sequence: Synthetic oligonucleotide
uggccccaucacaaaccac

SEQ ID NO: 1583980 - RNA, 19 nt, Artificial Sequence
  Description of Artificial Sequence: Synthetic oligonucleotide
ggccccgaaacgcccuucg

SEQ ID NO: 1583981 - RNA, 19 nt, Artificial Sequence
  Description of Artificial Sequence: Synthetic oligonucleotide
gacgccgcucgcucccggc

SEQ ID NO: 1583982 - RNA, 19 nt, Artificial Sequence
  Description of Artificial Sequence: Synthetic oligonucleotide
caccaagaaacgcgcccuc

SEQ ID NO: 1583983 - RNA, 19 nt, Artificial Sequence
  Description of Artificial Sequence: Synthetic oligonucleotide
caucccgagcagguccccg

SEQ ID NO: 1583984 - RNA, 19 nt, Artificial Sequence
  Description of Artificial Sequence: Synthetic oligonucleotide
gcacggccagaucagggug

SEQ ID NO: 1583985 - RNA, 19 nt, Artificial Sequence
  Description of Artificial Sequence: Synthetic oligonucleotide
cgucuugugccacacaaca

SEQ ID NO: 1583986 - RNA, 19 nt, Artificial Sequence
  Description of Artificial Sequence: Synthetic oligonucleotide
ugcggugugcugugccguc

SEQ ID NO: 1583987 - RNA, 19 nt, Artificial Sequence
  Description of Artificial Sequence: Synthetic oligonucleotide
cagucgagcgaguccuuga

SEQ ID NO: 1583988 - RNA, 19 nt, Artificial Sequence
  Description of Artificial Sequence: Synthetic oligonucleotide
acucgauguaguacuucau

SEQ ID NO: 1583989 - RNA, 19 nt, Artificial Sequence
  Description of Artificial Sequence: Synthetic oligonucleotide
agcccucuugugcguugag

SEQ ID NO: 1583990 - RNA, 19 nt, Artificial Sequence
  Description of Artificial Sequence: Synthetic oligonucleotide
cucuuaccgucuugugcca

SEQ ID NO: 1583991 - RNA, 19 nt, Artificial Sequence
  Description of Artificial Sequence: Synthetic oligonucleotide
agcgaguccuugagcucgg

SEQ ID NO: 1583992 - RNA, 19 nt, Artificial Sequence
  Description of Artificial Sequence: Synthetic oligonucleotide
ccgaaacgcccuucgcucc

SEQ ID NO: 1583993 - RNA, 19 nt, Artificial Sequence
  Description of Artificial Sequence: Synthetic oligonucleotide
cccugcguacuggaaaagg

SEQ ID NO: 1583994 - RNA, 19 nt, Artificial Sequence
  Description of Artificial Sequence: Synthetic oligonucleotide
ccucuccacguuauccggc

SEQ ID NO: 1583995 - RNA, 19 nt, Artificial Sequence
  Description of Artificial Sequence: Synthetic oligonucleotide
ggcgaugguggugucaaga

SEQ ID NO: 1583996 - RNA, 19 nt, Artificial Sequence
  Description of Artificial Sequence: Synthetic oligonucleotide
cgcucuacaaauucuucca

SEQ ID NO: 1583997 - RNA, 19 nt, Artificial Sequence
  Description of Artificial Sequence: Synthetic oligonucleotide
cccaucacaaaccaccugu

SEQ ID NO: 1583998 - RNA, 19 nt, Artificial Sequence
  Description of Artificial Sequence: Synthetic oligonucleotide
caccgcacuugaacuucug

SEQ ID NO: 1583999 - RNA, 19 nt, Artificial Sequence
  Description of Artificial Sequence: Synthetic oligonucleotide
cuguagacucuuggagguc

SEQ ID NO: 1584000 - RNA, 19 nt, Artificial Sequence
  Description of Artificial Sequence: Synthetic oligonucleotide
uguccccauuucccaccgu

SEQ ID NO: 1584001 - RNA, 19 nt, Artificial Sequence
  Description of Artificial Sequence: Synthetic oligonucleotide
ccgucguuauccucaccgc

SEQ ID NO: 1584002 - RNA, 19 nt, Artificial Sequence
  Description of Artificial Sequence: Synthetic oligonucleotide
uaguugugccggguccagu

SEQ ID NO: 1584003 - RNA, 19 nt, Artificial Sequence
  Description of Artificial Sequence: Synthetic oligonucleotide
agcgggucaccuggaggag

SEQ ID NO: 1584004 - RNA, 19 nt, Artificial Sequence
  Description of Artificial Sequence: Synthetic oligonucleotide
agcucucguaguaguugug

SEQ ID NO: 1584005 - RNA, 19 nt, Artificial Sequence
  Description of Artificial Sequence: Synthetic oligonucleotide
ucaucccgagcaggucccc

SEQ ID NO: 1584006 - RNA, 19 nt, Artificial Sequence
  Description of Artificial Sequence: Synthetic oligonucleotide
ugggcaccuuguagucuuc

SEQ ID NO: 1584007 - RNA, 19 nt, Artificial Sequence
  Description of Artificial Sequence: Synthetic oligonucleotide
gagcgucagcccucuccac

SEQ ID NO: 1584008 - RNA, 19 nt, Artificial Sequence
  Description of Artificial Sequence: Synthetic oligonucleotide
cuggcugcgagcacauccu

SEQ ID NO: 1584009 - RNA, 19 nt, Artificial Sequence
  Description of Artificial Sequence: Synthetic oligonucleotide
gcggaugcgcuucuugcuc

SEQ ID NO: 1584010 - RNA, 19 nt, Artificial Sequence
  Description of Artificial Sequence: Synthetic oligonucleotide
gcugucaucacgggugcuc

SEQ ID NO: 1584011 - RNA, 19 nt, Artificial Sequence
  Description of Artificial Sequence: Synthetic oligonucleotide
auccuugcacagacagcug

SEQ ID NO: 1584012 - RNA, 19 nt, Artificial Sequence
  Description of Artificial Sequence: Synthetic oligonucleotide
ccuguagacucuuggaggu

SEQ ID NO: 1584013 - RNA, 19 nt, Artificial Sequence
  Description of Artificial Sequence: Synthetic oligonucleotide
ccgagcagguccccguccg

SEQ ID NO: 1584014 - RNA, 19 nt, Artificial Sequence
  Description of Artificial Sequence: Synthetic oligonucleotide
uggcugcgagcacauccuu

SEQ ID NO: 1584015 - RNA, 19 nt, Artificial Sequence
  Description of Artificial Sequence: Synthetic oligonucleotide
ggucaauaugaaucccggu

SEQ ID NO: 1584016 - RNA, 19 nt, Artificial Sequence
  Description of Artificial Sequence: Synthetic oligonucleotide
accgacagcuguagagcgu

SEQ ID NO: 1584017 - RNA, 19 nt, Artificial Sequence
  Description of Artificial Sequence: Synthetic oligonucleotide
guaccgcucuacaaauucu

SEQ ID NO: 1584018 - RNA, 19 nt, Artificial Sequence
  Description of Artificial Sequence: Synthetic oligonucleotide
ccuuuugaggcgcuccaga

SEQ ID NO: 1584019 - RNA, 19 nt, Artificial Sequence
  Description of Artificial Sequence: Synthetic oligonucleotide
cuggagcugucagaagcga

SEQ ID NO: 1584020 - RNA, 19 nt, Artificial Sequence
  Description of Artificial Sequence: Synthetic oligonucleotide
agucauccugugagguagu

SEQ ID NO: 1584021 - RNA, 19 nt, Artificial Sequence
  Description of Artificial Sequence: Synthetic oligonucleotide
cccugaacuaaggcauucc

SEQ ID NO: 1584022 - RNA, 19 nt, Artificial Sequence
  Description of Artificial Sequence: Synthetic oligonucleotide
acggccagaucagggugcu

SEQ ID NO: 1584023 - RNA, 19 nt, Artificial Sequence
  Description of Artificial Sequence: Synthetic oligonucleotide
ccgugcugcacguccuccg

SEQ ID NO: 1584024 - RNA, 19 nt, Artificial Sequence
  Description of Artificial Sequence: Synthetic oligonucleotide
cgguuccagaacguggugg

SEQ ID NO: 1584025 - RNA, 19 nt, Artificial Sequence
  Description of Artificial Sequence: Synthetic oligonucleotide
cugugucagaggagcugga

SEQ ID NO: 1584026 - RNA, 19 nt, Artificial Sequence
  Description of Artificial Sequence: Synthetic oligonucleotide
gccggcgcggccccgaaac

SEQ ID NO: 1584027 - RNA, 19 nt, Artificial Sequence
  Description of Artificial Sequence: Synthetic oligonucleotide
guuauccggcacggccgcc

SEQ ID NO: 1584028 - RNA, 19 nt, Artificial Sequence
  Description of Artificial Sequence: Synthetic oligonucleotide
agcuguguccguggauaaa

SEQ ID NO: 1584029 - RNA, 19 nt, Artificial Sequence
  Description of Artificial Sequence: Synthetic oligonucleotide
gggccuuucguaccgcucu

SEQ ID NO: 1584030 - RNA, 19 nt, Artificial Sequence
  Description of Artificial Sequence: Synthetic oligonucleotide
gcgcggaccagcccucuug

SEQ ID NO: 1584031 - RNA, 19 nt, Artificial Sequence
  Description of Artificial Sequence: Synthetic oligonucleotide
gcuuguggcccugaacuaa

SEQ ID NO: 1584032 - RNA, 19 nt, Artificial Sequence
  Description of Artificial Sequence: Synthetic oligonucleotide
cauuucccaccgugcugca

SEQ ID NO: 1584033 - RNA, 19 nt, Artificial Sequence
  Description of Artificial Sequence: Synthetic oligonucleotide
guucgccguagcugcuguc

SEQ ID NO: 1584034 - RNA, 19 nt, Artificial Sequence
  Description of Artificial Sequence: Synthetic oligonucleotide
cguuauccggcacggccgc

SEQ ID NO: 1584035 - RNA, 19 nt, Artificial Sequence
  Description of Artificial Sequence: Synthetic oligonucleotide
ccuuucguaccgcucuaca

SEQ ID NO: 1584036 - RNA, 19 nt, Artificial Sequence
  Description of Artificial Sequence: Synthetic oligonucleotide
caccgugcugcacguccuc

SEQ ID NO: 1584037 - RNA, 19 nt, Artificial Sequence
  Description of Artificial Sequence: Synthetic oligonucleotide
ccuggcacaaagacagucu

SEQ ID NO: 1584038 - RNA, 19 nt, Artificial Sequence
  Description of Artificial Sequence: Synthetic oligonucleotide
gcccucuugugcguugagc

SEQ ID NO: 1584039 - RNA, 19 nt, Artificial Sequence
  Description of Artificial Sequence: Synthetic oligonucleotide
aggcgcuccagaguccauu

SEQ ID NO: 1584040 - RNA, 19 nt, Artificial Sequence
  Description of Artificial Sequence: Synthetic oligonucleotide
cuugugcguugagcagaac

SEQ ID NO: 1584041 - RNA, 19 nt, Artificial Sequence
  Description of Artificial Sequence: Synthetic oligonucleotide
cacgaccucgacgccgcuc

SEQ ID NO: 1584042 - RNA, 19 nt, Artificial Sequence
  Description of Artificial Sequence: Synthetic oligonucleotide
gccgggcucagcgggaagc

SEQ ID NO: 1584043 - RNA, 19 nt, Artificial Sequence
  Description of Artificial Sequence: Synthetic oligonucleotide
gggcaccuuguagucuucc

SEQ ID NO: 1584044 - RNA, 19 nt, Artificial Sequence
  Description of Artificial Sequence: Synthetic oligonucleotide
gcuguguccguggauaaau

SEQ ID NO: 1584045 - RNA, 19 nt, Artificial Sequence
  Description of Artificial Sequence: Synthetic oligonucleotide
ccagcacggccagaucagg

SEQ ID NO: 1584046 - RNA, 19 nt, Artificial Sequence
  Description of Artificial Sequence: Synthetic oligonucleotide
ggagugcuuguggggaaca

SEQ ID NO: 1584047 - RNA, 19 nt, Artificial Sequence
  Description of Artificial Sequence: Synthetic oligonucleotide
ugcgcggaccagcccucuu

SEQ ID NO: 1584048 - RNA, 19 nt, Artificial Sequence
  Description of Artificial Sequence: Synthetic oligonucleotide
gggccgcgcacuccgcuug

SEQ ID NO: 1584049 - RNA, 19 nt, Artificial Sequence
  Description of Artificial Sequence: Synthetic oligonucleotide
ccgcacuugaacuucuggu

SEQ ID NO: 1584050 - RNA, 19 nt, Artificial Sequence
  Description of Artificial Sequence: Synthetic oligonucleotide
guucucggggagugcuugu

SEQ ID NO: 1584051 - RNA, 19 nt, Artificial Sequence
  Description of Artificial Sequence: Synthetic oligonucleotide
cucguucccagagggucaa

SEQ ID NO: 1584052 - RNA, 19 nt, Artificial Sequence
  Description of Artificial Sequence: Synthetic oligonucleotide
gcgcacuccgcuuggccuc

SEQ ID NO: 1584053 - RNA, 19 nt, Artificial Sequence
  Description of Artificial Sequence: Synthetic oligonucleotide
gcgaugguggugucaagau

SEQ ID NO: 1584054 - RNA, 19 nt, Artificial Sequence
  Description of Artificial Sequence: Synthetic oligonucleotide
cgucguuauccucaccgca

SEQ ID NO: 1584055 - RNA, 19 nt, Artificial Sequence
  Description of Artificial Sequence: Synthetic oligonucleotide
ccauuucuccugcgcggac

SEQ ID NO: 1584056 - RNA, 19 nt, Artificial Sequence
  Description of Artificial Sequence: Synthetic oligonucleotide
ccgaguagccgucguuauc

SEQ ID NO: 1584057 - RNA, 19 nt, Artificial Sequence
  Description of Artificial Sequence: Synthetic oligonucleotide
cagcccucuccacguuauc

SEQ ID NO: 1584058 - RNA, 19 nt, Artificial Sequence
  Description of Artificial Sequence: Synthetic oligonucleotide
ccagucgagcgaguccuug

SEQ ID NO: 1584059 - RNA, 19 nt, Artificial Sequence
  Description of Artificial Sequence: Synthetic oligonucleotide
ccucgacgccgcucgcucc

SEQ ID NO: 1584060 - RNA, 19 nt, Artificial Sequence
  Description of Artificial Sequence: Synthetic oligonucleotide
gccccgaaacgcccuucgc

SEQ ID NO: 1584061 - RNA, 19 nt, Artificial Sequence
  Description of Artificial Sequence: Synthetic oligonucleotide
caacgcuuguggcccugaa

SEQ ID NO: 1584062 - RNA, 19 nt, Artificial Sequence
  Description of Artificial Sequence: Synthetic oligonucleotide
cccggccaccaagaaacgc

SEQ ID NO: 1584063 - RNA, 19 nt, Artificial Sequence
  Description of Artificial Sequence: Synthetic oligonucleotide
caacggcaucagccagcac

SEQ ID NO: 1584064 - RNA, 19 nt, Artificial Sequence
  Description of Artificial Sequence: Synthetic oligonucleotide
gcucacgcagucauccugu

SEQ ID NO: 1584065 - RNA, 19 nt, Artificial Sequence
  Description of Artificial Sequence: Synthetic oligonucleotide
ggcacggccgccgggcuca

SEQ ID NO: 1584066 - RNA, 19 nt, Artificial Sequence
  Description of Artificial Sequence: Synthetic oligonucleotide
ccucccucuuaccgucuug

SEQ ID NO: 1584067 - RNA, 19 nt, Artificial Sequence
  Description of Artificial Sequence: Synthetic oligonucleotide
cguagcugcugucaaagau

SEQ ID NO: 1584068 - RNA, 19 nt, Artificial Sequence
  Description of Artificial Sequence: Synthetic oligonucleotide
cugugccgucaccuucaga

SEQ ID NO: 1584069 - RNA, 19 nt, Artificial Sequence
  Description of Artificial Sequence: Synthetic oligonucleotide
gccuuucguaccgcucuac

SEQ ID NO: 1584070 - RNA, 19 nt, Artificial Sequence
  Description of Artificial Sequence: Synthetic oligonucleotide
gcggaccagcccucuugug

SEQ ID NO: 1584071 - RNA, 19 nt, Artificial Sequence
  Description of Artificial Sequence: Synthetic oligonucleotide
cucagguggccagguugga

SEQ ID NO: 1584072 - RNA, 19 nt, Artificial Sequence
  Description of Artificial Sequence: Synthetic oligonucleotide
gcgucagcccucuccacgu

SEQ ID NO: 1584073 - RNA, 19 nt, Artificial Sequence
  Description of Artificial Sequence: Synthetic oligonucleotide
ccgcgcacuccgcuuggcc

SEQ ID NO: 1584074 - RNA, 19 nt, Artificial Sequence
  Description of Artificial Sequence: Synthetic oligonucleotide
uggcuucaucuugcugguu

SEQ ID NO: 1584075 - RNA, 19 nt, Artificial Sequence
  Description of Artificial Sequence: Synthetic oligonucleotide
ccgguuccagaacguggug

SEQ ID NO: 1584076 - RNA, 19 nt, Artificial Sequence
  Description of Artificial Sequence: Synthetic oligonucleotide
gugagguaguguccccauu

SEQ ID NO: 1584077 - RNA, 19 nt, Artificial Sequence
  Description of Artificial Sequence: Synthetic oligonucleotide
gggcucagcgggaagcucu

SEQ ID NO: 1584078 - RNA, 19 nt, Artificial Sequence
  Description of Artificial Sequence: Synthetic oligonucleotide
cacgggugcucuccaugua

SEQ ID NO: 1584079 - RNA, 19 nt, Artificial Sequence
  Description of Artificial Sequence: Synthetic oligonucleotide
cagcccucuugugcguuga

SEQ ID NO: 1584080 - RNA, 19 nt, Artificial Sequence
  Description of Artificial Sequence: Synthetic oligonucleotide
gaccucgacgccgcucgcu

SEQ ID NO: 1584081 - RNA, 19 nt, Artificial Sequence
  Description of Artificial Sequence: Synthetic oligonucleotide
gaaacgcccuucgcuccau

SEQ ID NO: 1584082 - RNA, 19 nt, Artificial Sequence
  Description of Artificial Sequence: Synthetic oligonucleotide
gcgcuccagaguccauuuc

SEQ ID NO: 1584083 - RNA, 19 nt, Artificial Sequence
  Description of Artificial Sequence: Synthetic oligonucleotide
ccugcgcggaccagcccuc

SEQ ID NO: 1584084 - RNA, 19 nt, Artificial Sequence
  Description of Artificial Sequence: Synthetic oligonucleotide
cagggaaguuggugcugcu

SEQ ID NO: 1584085 - RNA, 19 nt, Artificial Sequence
  Description of Artificial Sequence: Synthetic oligonucleotide
caucacgggugcucuccau

SEQ ID NO: 1584086 - RNA, 19 nt, Artificial Sequence
  Description of Artificial Sequence: Synthetic oligonucleotide
cuucucgggucaccuugau

SEQ ID NO: 1584087 - RNA, 19 nt, Artificial Sequence
  Description of Artificial Sequence: Synthetic oligonucleotide
ggcgcuccagaguccauuu

SEQ ID NO: 1584088 - RNA, 19 nt, Artificial Sequence
  Description of Artificial Sequence: Synthetic oligonucleotide
gaguucucggggagugcuu

SEQ ID NO: 1584089 - RNA, 19 nt, Artificial Sequence
  Description of Artificial Sequence: Synthetic oligonucleotide
ggccuuucguaccgcucua

SEQ ID NO: 1584090 - RNA, 19 nt, Artificial Sequence
  Description of Artificial Sequence: Synthetic oligonucleotide
ccacguuauccggcacggc

SEQ ID NO: 1584091 - RNA, 19 nt, Artificial Sequence
  Description of Artificial Sequence: Synthetic oligonucleotide
cagggugcuccugcuucaa

SEQ ID NO: 1584092 - RNA, 19 nt, Artificial Sequence
  Description of Artificial Sequence: Synthetic oligonucleotide
cugcggugugcugugccgu

SEQ ID NO: 1584093 - RNA, 19 nt, Artificial Sequence
  Description of Artificial Sequence: Synthetic oligonucleotide
ccccugcguacuggaaaag

SEQ ID NO: 1584094 - RNA, 19 nt, Artificial Sequence
  Description of Artificial Sequence: Synthetic oligonucleotide
cgaaacgcccuucgcucca

SEQ ID NO: 1584095 - RNA, 19 nt, Artificial Sequence
  Description of Artificial Sequence: Synthetic oligonucleotide
gccgcucgcucccggccac

SEQ ID NO: 1584096 - RNA, 19 nt, Artificial Sequence
  Description of Artificial Sequence: Synthetic oligonucleotide
cggugugcugugccgucac

SEQ ID NO: 1584097 - RNA, 19 nt, Artificial Sequence
  Description of Artificial Sequence: Synthetic oligonucleotide
ccccguccgguuccgccac

SEQ ID NO: 1584098 - RNA, 19 nt, Artificial Sequence
  Description of Artificial Sequence: Synthetic oligonucleotide
cgguuccgccacgaccucg

SEQ ID NO: 1584099 - RNA, 19 nt, Artificial Sequence
  Description of Artificial Sequence: Synthetic oligonucleotide
gcggugugcugugccguca

SEQ ID NO: 1584100 - RNA, 19 nt, Artificial Sequence
  Description of Artificial Sequence: Synthetic oligonucleotide
cagaacgugguggccccau

SEQ ID NO: 1584101 - RNA, 19 nt, Artificial Sequence
  Description of Artificial Sequence: Synthetic oligonucleotide
caccaacgcuuguggcccu

SEQ ID NO: 1584102 - RNA, 19 nt, Artificial Sequence
  Description of Artificial Sequence: Synthetic oligonucleotide
ccucaccgcacuugaacuu

SEQ ID NO: 1584103 - RNA, 19 nt, Artificial Sequence
  Description of Artificial Sequence: Synthetic oligonucleotide
cugccacagcgggucaccu

SEQ ID NO: 1584104 - RNA, 19 nt, Artificial Sequence
  Description of Artificial Sequence: Synthetic oligonucleotide
gguguucgccguagcugcu

SEQ ID NO: 1584105 - RNA, 19 nt, Artificial Sequence
  Description of Artificial Sequence: Synthetic oligonucleotide
gguccccguccgguuccgc

SEQ ID NO: 1584106 - RNA, 19 nt, Artificial Sequence
  Description of Artificial Sequence: Synthetic oligonucleotide
cgcuuguggcccugaacua

SEQ ID NO: 1584107 - RNA, 19 nt, Artificial Sequence
  Description of Artificial Sequence: Synthetic oligonucleotide
cgcagucauccugugaggu

SEQ ID NO: 1584108 - RNA, 19 nt, Artificial Sequence
  Description of Artificial Sequence: Synthetic oligonucleotide
cgcgcacuccgcuuggccu

SEQ ID NO: 1584109 - RNA, 19 nt, Artificial Sequence
  Description of Artificial Sequence: Synthetic oligonucleotide
cacggccgccgggcucagc

SEQ ID NO: 1584110 - RNA, 19 nt, Artificial Sequence
  Description of Artificial Sequence: Synthetic oligonucleotide
gcacucguucccagagggu

SEQ ID NO: 1584111 - RNA, 19 nt, Artificial Sequence
  Description of Artificial Sequence: Synthetic oligonucleotide
ccaacgcuuguggcccuga

SEQ ID NO: 1584112 - RNA, 19 nt, Artificial Sequence
  Description of Artificial Sequence: Synthetic oligonucleotide
ccaccgugcugcacguccu

SEQ ID NO: 1584113 - RNA, 19 nt, Artificial Sequence
  Description of Artificial Sequence: Synthetic oligonucleotide
ccgguuccgccacgaccuc

SEQ ID NO: 1584114 - RNA, 19 nt, Artificial Sequence
  Description of Artificial Sequence: Synthetic oligonucleotide
cguaguaguugugccgggu

SEQ ID NO: 1584115 - RNA, 19 nt, Artificial Sequence
  Description of Artificial Sequence: Synthetic oligonucleotide
cgacgccgcucgcucccgg

SEQ ID NO: 1584116 - RNA, 19 nt, Artificial Sequence
  Description of Artificial Sequence: Synthetic oligonucleotide
gcucgcucccggccaccaa

SEQ ID NO: 1584117 - RNA, 19 nt, Artificial Sequence
  Description of Artificial Sequence: Synthetic oligonucleotide
cgaccucgacgccgcucgc

SEQ ID NO: 1584118 - RNA, 19 nt, Artificial Sequence
  Description of Artificial Sequence: Synthetic oligonucleotide
ccacgggcuuguagggccu

SEQ ID NO: 1584119 - RNA, 19 nt, Artificial Sequence
  Description of Artificial Sequence: Synthetic oligonucleotide
ccagaacgugguggcccca

SEQ ID NO: 1584120 - RNA, 19 nt, Artificial Sequence
  Description of Artificial Sequence: Synthetic oligonucleotide
ccguccgguuccgccacga

SEQ ID NO: 1584121 - RNA, 19 nt, Artificial Sequence
  Description of Artificial Sequence: Synthetic oligonucleotide
gcagaaccacgggcuugua

SEQ ID NO: 1584122 - RNA, 19 nt, Artificial Sequence
  Description of Artificial Sequence: Synthetic oligonucleotide
cgcggaccagcccucuugu

SEQ ID NO: 1584123 - RNA, 19 nt, Artificial Sequence
  Description of Artificial Sequence: Synthetic oligonucleotide
cugcgcggaccagcccucu

SEQ ID NO: 1584124 - RNA, 19 nt, Artificial Sequence
  Description of Artificial Sequence: Synthetic oligonucleotide
ccgcucgcucccggccacc

SEQ ID NO: 1584125 - RNA, 19 nt, Artificial Sequence
  Description of Artificial Sequence: Synthetic oligonucleotide
cguuauccucaccgcacuu

SEQ ID NO: 1584126 - RNA, 19 nt, Artificial Sequence
  Description of Artificial Sequence: Synthetic oligonucleotide
ggccggcgcggccccgaaa

SEQ ID NO: 1584127 - RNA, 19 nt, Artificial Sequence
  Description of Artificial Sequence: Synthetic oligonucleotide
cacgggcuuguagggccuu

SEQ ID NO: 1584128 - RNA, 19 nt, Artificial Sequence
  Description of Artificial Sequence: Synthetic oligonucleotide
gcacggccgccgggcucag

SEQ ID NO: 1584129 - RNA, 19 nt, Artificial Sequence
  Description of Artificial Sequence: Synthetic oligonucleotide
gcggccccgaaacgcccuu

SEQ ID NO: 1584130 - RNA, 19 nt, Artificial Sequence
  Description of Artificial Sequence: Synthetic oligonucleotide
cggccccgaaacgcccuuc

SEQ ID NO: 1584131 - RNA, 19 nt, Artificial Sequence
  Description of Artificial Sequence: Synthetic oligonucleotide
cgcucgcucccggccacca

SEQ ID NO: 1584132 - RNA, 19 nt, Artificial Sequence
  Description of Artificial Sequence: Synthetic oligonucleotide
ccggcacggccgccgggcu

SEQ ID NO: 1584133 - RNA, 19 nt, Artificial Sequence
  Description of Artificial Sequence: Synthetic oligonucleotide
ccggccggcgcggccccga

SEQ ID NO: 1584134 - RNA, 19 nt, Artificial Sequence
  Description of Artificial Sequence: Synthetic oligonucleotide
cgucagcccucuccacguu

SEQ ID NO: 1584135 - RNA, 19 nt, Artificial Sequence
  Description of Artificial Sequence: Synthetic oligonucleotide
agaacguuguccuugacgc

SEQ ID NO: 1584136 - RNA, 19 nt, Artificial Sequence
  Description of Artificial Sequence: Synthetic oligonucleotide
aaauaccagaccgugaugg

SEQ ID NO: 1584137 - RNA, 19 nt, Artificial Sequence
  Description of Artificial Sequence: Synthetic oligonucleotide
uccauaaagugccauagcc

SEQ ID NO: 1584138 - RNA, 19 nt, Artificial Sequence
  Description of Artificial Sequence: Synthetic oligonucleotide
aagaacguuguccuugacg

SEQ ID NO: 1584139 - RNA, 19 nt, Artificial Sequence
  Description of Artificial Sequence: Synthetic oligonucleotide
ugauacaggaaccuggaca

SEQ ID NO: 1584140 - RNA, 19 nt, Artificial Sequence
  Description of Artificial Sequence: Synthetic oligonucleotide
auacccaugcuccucaugg

SEQ ID NO: 1584141 - RNA, 19 nt, Artificial Sequence
  Description of Artificial Sequence: Synthetic oligonucleotide
ugauacuugucucuggcug

SEQ ID NO: 1584142 - RNA, 19 nt, Artificial Sequence
  Description of Artificial Sequence: Synthetic oligonucleotide
aggaccuccauacccaugc

SEQ ID NO: 1584143 - RNA, 19 nt, Artificial Sequence
  Description of Artificial Sequence: Synthetic oligonucleotide
gauuaccguguccacaugg

SEQ ID NO: 1584144 - RNA, 19 nt, Artificial Sequence
  Description of Artificial Sequence: Synthetic oligonucleotide
ugcuaauccacgcagcucu

SEQ ID NO: 1584145 - RNA, 19 nt, Artificial Sequence
  Description of Artificial Sequence: Synthetic oligonucleotide
ucaaagaguggcucgaugu

SEQ ID NO: 1584146 - RNA, 19 nt, Artificial Sequence
  Description of Artificial Sequence: Synthetic oligonucleotide
aauccacgcagcucugggc

SEQ ID NO: 1584147 - RNA, 19 nt, Artificial Sequence
  Description of Artificial Sequence: Synthetic oligonucleotide
acgcagauaccguaguacc

SEQ ID NO: 1584148 - RNA, 19 nt, Artificial Sequence
  Description of Artificial Sequence: Synthetic oligonucleotide
agcucaacaagcaauggac

SEQ ID NO: 1584149 - RNA, 19 nt, Artificial Sequence
  Description of Artificial Sequence: Synthetic oligonucleotide
uaacacgccaccauggccu

SEQ ID NO: 1584150 - RNA, 19 nt, Artificial Sequence
  Description of Artificial Sequence: Synthetic oligonucleotide
  modified_base (3)..(3): a, c, u, g, unknown or other
ugngguaaacuuuuauuuc

SEQ ID NO: 1584151 - RNA, 19 nt, Artificial Sequence
  Description of Artificial Sequence: Synthetic oligonucleotide
ucacuagcugcccaucgcg

SEQ ID NO: 1584152 - RNA, 19 nt, Artificial Sequence
  Description of Artificial Sequence: Synthetic oligonucleotide
accgugauggcguaccugg

SEQ ID NO: 1584153 - RNA, 19 nt, Artificial Sequence
  Description of Artificial Sequence: Synthetic oligonucleotide
uuauuucuuggcuggcagg

SEQ ID NO: 1584154 - RNA, 19 nt, Artificial Sequence
  Description of Artificial Sequence: Synthetic oligonucleotide
aaaaugagcaagcggucaa

SEQ ID NO: 1584155 - RNA, 19 nt, Artificial Sequence
  Description of Artificial Sequence: Synthetic oligonucleotide
auaccguaguaccgcaugc

SEQ ID NO: 1584156 - RNA, 19 nt, Artificial Sequence
  Description of Artificial Sequence: Synthetic oligonucleotide
uaauccacgcagcucuggg

SEQ ID NO: 1584157 - RNA, 19 nt, Artificial Sequence
  Description of Artificial Sequence: Synthetic oligonucleotide
uaaaggggcauccccacca

SEQ ID NO: 1584158 - RNA, 19 nt, Artificial Sequence
  Description of Artificial Sequence: Synthetic oligonucleotide
auauaguccagggccaggc

SEQ ID NO: 1584159 - RNA, 19 nt, Artificial Sequence
  Description of Artificial Sequence: Synthetic oligonucleotide
gauacuugucucuggcugc

SEQ ID NO: 1584160 - RNA, 19 nt, Artificial Sequence
  Description of Artificial Sequence: Synthetic oligonucleotide
gacguagcugcccagccgg

SEQ ID NO: 1584161 - RNA, 19 nt, Artificial Sequence
  Description of Artificial Sequence: Synthetic oligonucleotide
  modified_base (5)..(5): a, c, u, g, unknown or other
ucugngguaaacuuuuauu

SEQ ID NO: 1584162 - RNA, 19 nt, Artificial Sequence
  Description of Artificial Sequence: Synthetic oligonucleotide
uucuacccaggcaaucugg

SEQ ID NO: 1584163 - RNA, 19 nt, Artificial Sequence
  Description of Artificial Sequence: Synthetic oligonucleotide
auagccaaaggguugggga

SEQ ID NO: 1584164 - RNA, 19 nt, Artificial Sequence
  Description of Artificial Sequence: Synthetic oligonucleotide
aaaauaccagaccgugaug

SEQ ID NO: 1584165 - RNA, 19 nt, Artificial Sequence
  Description of Artificial Sequence: Synthetic oligonucleotide
uugucaacgugccucacgu

SEQ ID NO: 1584166 - RNA, 19 nt, Artificial Sequence
  Description of Artificial Sequence: Synthetic oligonucleotide
aaugcugcgcggugggauc

SEQ ID NO: 1584167 - RNA, 19 nt, Artificial Sequence
  Description of Artificial Sequence: Synthetic oligonucleotide
gauaccguaguaccgcaug

SEQ ID NO: 1584168 - RNA, 19 nt, Artificial Sequence
  Description of Artificial Sequence: Synthetic oligonucleotide
auugucaacgugccucacg

SEQ ID NO: 1584169 - RNA, 19 nt, Artificial Sequence
  Description of Artificial Sequence: Synthetic oligonucleotide
ugcaaggcacaauauaguc

SEQ ID NO: 1584170 - RNA, 19 nt, Artificial Sequence
  Description of Artificial Sequence: Synthetic oligonucleotide
aagaguggcucgauguugg

SEQ ID NO: 1584171 - RNA, 19 nt, Artificial Sequence
  Description of Artificial Sequence: Synthetic oligonucleotide
uaccguguccacaugggcc

SEQ ID NO: 1584172 - RNA, 19 nt, Artificial Sequence
  Description of Artificial Sequence: Synthetic oligonucleotide
aaagugccauagccaaagg

SEQ ID NO: 1584173 - RNA, 19 nt, Artificial Sequence
  Description of Artificial Sequence: Synthetic oligonucleotide
ucaacaagcaauggaccag

SEQ ID NO: 1584174 - RNA, 19 nt, Artificial Sequence
  Description of Artificial Sequence: Synthetic oligonucleotide
aaagaguggcucgauguug

SEQ ID NO: 1584175 - RNA, 19 nt, Artificial Sequence
  Description of Artificial Sequence: Synthetic oligonucleotide
augacguagcugcccagcc

SEQ ID NO: 1584176 - RNA, 19 nt, Artificial Sequence
  Description of Artificial Sequence: Synthetic oligonucleotide
uggguaaaggggcaucccc

SEQ ID NO: 1584177 - RNA, 19 nt, Artificial Sequence
  Description of Artificial Sequence: Synthetic oligonucleotide
ggcacaauauaguccaggg

SEQ ID NO: 1584178 - RNA, 19 nt, Artificial Sequence
  Description of Artificial Sequence: Synthetic oligonucleotide
  modified_base (2)..(2): a, c, u, g, unknown or other
gngguaaacuuuuauuucu

SEQ ID NO: 1584179 - RNA, 19 nt, Artificial Sequence
  Description of Artificial Sequence: Synthetic oligonucleotide
uccuuggcaucaaaauacc

SEQ ID NO: 1584180 - RNA, 19 nt, Artificial Sequence
  Description of Artificial Sequence: Synthetic oligonucleotide
ucaacgugccucacguacc

SEQ ID NO: 1584181 - RNA, 19 nt, Artificial Sequence
  Description of Artificial Sequence: Synthetic oligonucleotide
acaguggcggauuaccgug

SEQ ID NO: 1584182 - RNA, 19 nt, Artificial Sequence
  Description of Artificial Sequence: Synthetic oligonucleotide
acccaggcaaucugguccc

SEQ ID NO: 1584183 - RNA, 19 nt, Artificial Sequence
  Description of Artificial Sequence: Synthetic oligonucleotide
cagccuagcacuugccucg

SEQ ID NO: 1584184 - RNA, 19 nt, Artificial Sequence
  Description of Artificial Sequence: Synthetic oligonucleotide
uggggauugucaacgugcc

SEQ ID NO: 1584185 - RNA, 19 nt, Artificial Sequence
  Description of Artificial Sequence: Synthetic oligonucleotide
gucaacgugccucacguac

SEQ ID NO: 1584186 - RNA, 19 nt, Artificial Sequence
  Description of Artificial Sequence: Synthetic oligonucleotide
ugacguagcugcccagccg

SEQ ID NO: 1584187 - RNA, 19 nt, Artificial Sequence
  Description of Artificial Sequence: Synthetic oligonucleotide
gaugcuagcugauacuugu

SEQ ID NO: 1584188 - RNA, 19 nt, Artificial Sequence
  Description of Artificial Sequence: Synthetic oligonucleotide
uuaccguguccacaugggc

SEQ ID NO: 1584189 - RNA, 19 nt, Artificial Sequence
  Description of Artificial Sequence: Synthetic oligonucleotide
aagcccauugccuggguaa

SEQ ID NO: 1584190 - RNA, 19 nt, Artificial Sequence
  Description of Artificial Sequence: Synthetic oligonucleotide
agaaaaugagcaagcgguc

SEQ ID NO: 1584191 - RNA, 19 nt, Artificial Sequence
  Description of Artificial Sequence: Synthetic oligonucleotide
gagcugcuaauccacgcag

SEQ ID NO: 1584192 - RNA, 19 nt, Artificial Sequence
  Description of Artificial Sequence: Synthetic oligonucleotide
uccauacccaugcuccuca

SEQ ID NO: 1584193 - RNA, 19 nt, Artificial Sequence
  Description of Artificial Sequence: Synthetic oligonucleotide
ccguugaugacguagcugc

SEQ ID NO: 1584194 - RNA, 19 nt, Artificial Sequence
  Description of Artificial Sequence: Synthetic oligonucleotide
gaaaaugagcaagcgguca

SEQ ID NO: 1584195 - RNA, 19 nt, Artificial Sequence
  Description of Artificial Sequence: Synthetic oligonucleotide
cauggcaccuuacucugcc

SEQ ID NO: 1584196 - RNA, 19 nt, Artificial Sequence
  Description of Artificial Sequence: Synthetic oligonucleotide
cucaacaagcaauggacca

SEQ ID NO: 1584197 - RNA, 19 nt, Artificial Sequence
  Description of Artificial Sequence: Synthetic oligonucleotide
auaccagaccgugauggcg

SEQ ID NO: 1584198 - RNA, 19 nt, Artificial Sequence
  Description of Artificial Sequence: Synthetic oligonucleotide
ucuacccaggcaaucuggu

SEQ ID NO: 1584199 - RNA, 19 nt, Artificial Sequence
  Description of Artificial Sequence: Synthetic oligonucleotide
auuaccguguccacauggg

SEQ ID NO: 1584200 - RNA, 19 nt, Artificial Sequence
  Description of Artificial Sequence: Synthetic oligonucleotide
ucccgaugcuagcugauac

SEQ ID NO: 1584201 - RNA, 19 nt, Artificial Sequence
  Description of Artificial Sequence: Synthetic oligonucleotide
ucugucccgaugcuagcug

SEQ ID NO: 1584202 - RNA, 19 nt, Artificial Sequence
  Description of Artificial Sequence: Synthetic oligonucleotide
ucagccuagcacuugccuc

SEQ ID NO: 1584203 - RNA, 19 nt, Artificial Sequence
  Description of Artificial Sequence: Synthetic oligonucleotide
cucauguggguuccgucgg

SEQ ID NO: 1584204 - RNA, 19 nt, Artificial Sequence
  Description of Artificial Sequence: Synthetic oligonucleotide
caguacggaggcaagccag

SEQ ID NO: 1584205 - RNA, 19 nt, Artificial Sequence
  Description of Artificial Sequence: Synthetic oligonucleotide
uaguaccgcaugcaaggca

SEQ ID NO: 1584206 - RNA, 19 nt, Artificial Sequence
  Description of Artificial Sequence: Synthetic oligonucleotide
ugcgcggugggaucgcccg

SEQ ID NO: 1584207 - RNA, 19 nt, Artificial Sequence
  Description of Artificial Sequence: Synthetic oligonucleotide
acguacccaagcccauugc

SEQ ID NO: 1584208 - RNA, 19 nt, Artificial Sequence
  Description of Artificial Sequence: Synthetic oligonucleotide
cguaguaccgcaugcaagg

SEQ ID NO: 1584209 - RNA, 19 nt, Artificial Sequence
  Description of Artificial Sequence: Synthetic oligonucleotide
uccccacgaaugcugcgcg

SEQ ID NO: 1584210 - RNA, 19 nt, Artificial Sequence
  Description of Artificial Sequence: Synthetic oligonucleotide
ugcaccuugacgucccagu

SEQ ID NO: 1584211 - RNA, 19 nt, Artificial Sequence
  Description of Artificial Sequence: Synthetic oligonucleotide
acaagcaauggaccagaca

SEQ ID NO: 1584212 - RNA, 19 nt, Artificial Sequence
  Description of Artificial Sequence: Synthetic oligonucleotide
auguuggcuaccaccggcc

SEQ ID NO: 1584213 - RNA, 19 nt, Artificial Sequence
  Description of Artificial Sequence: Synthetic oligonucleotide
cucaaccccaaauccugcc

SEQ ID NO: 1584214 - RNA, 19 nt, Artificial Sequence
  Description of Artificial Sequence: Synthetic oligonucleotide
acccucagggaagaucugc

SEQ ID NO: 1584215 - RNA, 19 nt, Artificial Sequence
  Description of Artificial Sequence: Synthetic oligonucleotide
acgaaugcugcgcgguggg

SEQ ID NO: 1584216 - RNA, 19 nt, Artificial Sequence
  Description of Artificial Sequence: Synthetic oligonucleotide
aggcacaauauaguccagg

SEQ ID NO: 1584217 - RNA, 19 nt, Artificial Sequence
  Description of Artificial Sequence: Synthetic oligonucleotide
  modified_base (4)..(4): a, c, u, g, unknown or other
cugngguaaacuuuuauuu

SEQ ID NO: 1584218 - RNA, 19 nt, Artificial Sequence
  Description of Artificial Sequence: Synthetic oligonucleotide
gaugacguagcugcccagc

SEQ ID NO: 1584219 - RNA, 19 nt, Artificial Sequence
  Description of Artificial Sequence: Synthetic oligonucleotide
uugacgcagauaccguagu

SEQ ID NO: 1584220 - RNA, 19 nt, Artificial Sequence
  Description of Artificial Sequence: Synthetic oligonucleotide
agaguggcucgauguuggc

SEQ ID NO: 1584221 - RNA, 19 nt, Artificial Sequence
  Description of Artificial Sequence: Synthetic oligonucleotide
uguccuugacgcagauacc

SEQ ID NO: 1584222 - RNA, 19 nt, Artificial Sequence
  Description of Artificial Sequence: Synthetic oligonucleotide
ggugaugcagcgcccgucg

SEQ ID NO: 1584223 - RNA, 19 nt, Artificial Sequence
  Description of Artificial Sequence: Synthetic oligonucleotide
cucguggccuucuacccag

SEQ ID NO: 1584224 - RNA, 19 nt, Artificial Sequence
  Description of Artificial Sequence: Synthetic oligonucleotide
cucacuagcugcccaucgc

SEQ ID NO: 1584225 - RNA, 19 nt, Artificial Sequence
  Description of Artificial Sequence: Synthetic oligonucleotide
agcggucaaagaguggcuc

SEQ ID NO: 1584226 - RNA, 19 nt, Artificial Sequence
  Description of Artificial Sequence: Synthetic oligonucleotide
accucauguggguuccguc

SEQ ID NO: 1584227 - RNA, 19 nt, Artificial Sequence
  Description of Artificial Sequence: Synthetic oligonucleotide
gcugccaacgcugucacag

SEQ ID NO: 1584228 - RNA, 19 nt, Artificial Sequence
  Description of Artificial Sequence: Synthetic oligonucleotide
agccggcccgcacaguggc

SEQ ID NO: 1584229 - RNA, 19 nt, Artificial Sequence
  Description of Artificial Sequence: Synthetic oligonucleotide
aguggcggauuaccguguc

SEQ ID NO: 1584230 - RNA, 19 nt, Artificial Sequence
  Description of Artificial Sequence: Synthetic oligonucleotide
agcaagcggucaaagagug

SEQ ID NO: 1584231 - RNA, 19 nt, Artificial Sequence
  Description of Artificial Sequence: Synthetic oligonucleotide
acucaccucaaccccaaau

SEQ ID NO: 1584232 - RNA, 19 nt, Artificial Sequence
  Description of Artificial Sequence: Synthetic oligonucleotide
caaugcuccugcagccugg

SEQ ID NO: 1584233 - RNA, 19 nt, Artificial Sequence
  Description of Artificial Sequence: Synthetic oligonucleotide
ccucauguggguuccgucg

SEQ ID NO: 1584234 - RNA, 19 nt, Artificial Sequence
  Description of Artificial Sequence: Synthetic oligonucleotide
agcugcuaauccacgcagc

SEQ ID NO: 1584235 - RNA, 19 nt, Artificial Sequence
  Description of Artificial Sequence: Synthetic oligonucleotide
uagcugauacuugucucug

SEQ ID NO: 1584236 - RNA, 19 nt, Artificial Sequence
  Description of Artificial Sequence: Synthetic oligonucleotide
uccuugacgcagauaccgu

SEQ ID NO: 1584237 - RNA, 19 nt, Artificial Sequence
  Description of Artificial Sequence: Synthetic oligonucleotide
ggcgcuccggugcagaggg

SEQ ID NO: 1584238 - RNA, 19 nt, Artificial Sequence
  Description of Artificial Sequence: Synthetic oligonucleotide
cuucuacccaggcaaucug

SEQ ID NO: 1584239 - RNA, 19 nt, Artificial Sequence
  Description of Artificial Sequence: Synthetic oligonucleotide
agucgcuggcacuccuugg

SEQ ID NO: 1584240 - RNA, 19 nt, Artificial Sequence
  Description of Artificial Sequence: Synthetic oligonucleotide
acccaugcuccucauggca

SEQ ID NO: 1584241 - RNA, 19 nt, Artificial Sequence
  Description of Artificial Sequence: Synthetic oligonucleotide
cauucagguaauagaugca

SEQ ID NO: 1584242 - RNA, 19 nt, Artificial Sequence
  Description of Artificial Sequence: Synthetic oligonucleotide
guaauagaugcaggugaug

SEQ ID NO: 1584243 - RNA, 19 nt, Artificial Sequence
  Description of Artificial Sequence: Synthetic oligonucleotide
accucaaccccaaauccug

SEQ ID NO: 1584244 - RNA, 19 nt, Artificial Sequence
  Description of Artificial Sequence: Synthetic oligonucleotide
guaaaggggcauccccacc

SEQ ID NO: 1584245 - RNA, 19 nt, Artificial Sequence
  Description of Artificial Sequence: Synthetic oligonucleotide
ugaugacguagcugcccag

SEQ ID NO: 1584246 - RNA, 19 nt, Artificial Sequence
  Description of Artificial Sequence: Synthetic oligonucleotide
caaaggguuggggagucac

SEQ ID NO: 1584247 - RNA, 19 nt, Artificial Sequence
  Description of Artificial Sequence: Synthetic oligonucleotide
uggaccagacacacaccac

SEQ ID NO: 1584248 - RNA, 19 nt, Artificial Sequence
  Description of Artificial Sequence: Synthetic oligonucleotide
uacccaugcuccucauggc

SEQ ID NO: 1584249 - RNA, 19 nt, Artificial Sequence
  Description of Artificial Sequence: Synthetic oligonucleotide
ggcagcccaguccauaaag

SEQ ID NO: 1584250 - RNA, 19 nt, Artificial Sequence
  Description of Artificial Sequence: Synthetic oligonucleotide
cuaauccacgcagcucugg

SEQ ID NO: 1584251 - RNA, 19 nt, Artificial Sequence
  Description of Artificial Sequence: Synthetic oligonucleotide
gccgccaugcaccuugacg

SEQ ID NO: 1584252 - RNA, 19 nt, Artificial Sequence
  Description of Artificial Sequence: Synthetic oligonucleotide
ggggagucacuucacauuc

SEQ ID NO: 1584253 - RNA, 19 nt, Artificial Sequence
  Description of Artificial Sequence: Synthetic oligonucleotide
caccggccgacccucaggg

SEQ ID NO: 1584254 - RNA, 19 nt, Artificial Sequence
  Description of Artificial Sequence: Synthetic oligonucleotide
aaaggggcauccccaccau

SEQ ID NO: 1584255 - RNA, 19 nt, Artificial Sequence
  Description of Artificial Sequence: Synthetic oligonucleotide
gggauugucaacgugccuc

SEQ ID NO: 1584256 - RNA, 19 nt, Artificial Sequence
  Description of Artificial Sequence: Synthetic oligonucleotide
ugacucaccucaaccccaa

SEQ ID NO: 1584257 - RNA, 19 nt, Artificial Sequence
  Description of Artificial Sequence: Synthetic oligonucleotide
uugacgucccaguucucau

SEQ ID NO: 1584258 - RNA, 19 nt, Artificial Sequence
  Description of Artificial Sequence: Synthetic oligonucleotide
uuggcccacuuccguuugg

SEQ ID NO: 1584259 - RNA, 19 nt, Artificial Sequence
  Description of Artificial Sequence: Synthetic oligonucleotide
cacguacccaagcccauug

SEQ ID NO: 1584260 - RNA, 19 nt, Artificial Sequence
  Description of Artificial Sequence: Synthetic oligonucleotide
gguaguguuguugcuguug

SEQ ID NO: 1584261 - RNA, 19 nt, Artificial Sequence
  Description of Artificial Sequence: Synthetic oligonucleotide
cacgaaugcugcgcggugg

SEQ ID NO: 1584262 - RNA, 19 nt, Artificial Sequence
  Description of Artificial Sequence: Synthetic oligonucleotide
cuagcugauacuugucucu

SEQ ID NO: 1584263 - RNA, 19 nt, Artificial Sequence
  Description of Artificial Sequence: Synthetic oligonucleotide
ugacgcagauaccguagua

SEQ ID NO: 1584264 - RNA, 19 nt, Artificial Sequence
  Description of Artificial Sequence: Synthetic oligonucleotide
cagaccgugauggcguacc

SEQ ID NO: 1584265 - RNA, 19 nt, Artificial Sequence
  Description of Artificial Sequence: Synthetic oligonucleotide
caaccccaaauccugccuc

SEQ ID NO: 1584266 - RNA, 19 nt, Artificial Sequence
  Description of Artificial Sequence: Synthetic oligonucleotide
uaccguaguaccgcaugca

SEQ ID NO: 1584267 - RNA, 19 nt, Artificial Sequence
  Description of Artificial Sequence: Synthetic oligonucleotide
cagcucaacaagcaaugga

SEQ ID NO: 1584268 - RNA, 19 nt, Artificial Sequence
  Description of Artificial Sequence: Synthetic oligonucleotide
ucauguggguuccgucggu

SEQ ID NO: 1584269 - RNA, 19 nt, Artificial Sequence
  Description of Artificial Sequence: Synthetic oligonucleotide
gguaaaggggcauccccac

SEQ ID NO: 1584270 - RNA, 19 nt, Artificial Sequence
  Description of Artificial Sequence: Synthetic oligonucleotide
ugggccgccagucgcuggc

SEQ ID NO: 1584271 - RNA, 19 nt, Artificial Sequence
  Description of Artificial Sequence: Synthetic oligonucleotide
agcccauugccuggguaac

SEQ ID NO: 1584272 - RNA, 19 nt, Artificial Sequence
  Description of Artificial Sequence: Synthetic oligonucleotide
gcggucaaagaguggcucg

SEQ ID NO: 1584273 - RNA, 19 nt, Artificial Sequence
  Description of Artificial Sequence: Synthetic oligonucleotide
ggagucacuucacauucca

SEQ ID NO: 1584274 - RNA, 19 nt, Artificial Sequence
  Description of Artificial Sequence: Synthetic oligonucleotide
uucucuugccuggcccacg

SEQ ID NO: 1584275 - RNA, 19 nt, Artificial Sequence
  Description of Artificial Sequence: Synthetic oligonucleotide
  modified_base (8)..(8): a, c, u, g, unknown or other
agcucugngguaaacuuuu

SEQ ID NO: 1584276 - RNA, 19 nt, Artificial Sequence
  Description of Artificial Sequence: Synthetic oligonucleotide
gcuagcugauacuugucuc

SEQ ID NO: 1584277 - RNA, 19 nt, Artificial Sequence
  Description of Artificial Sequence: Synthetic oligonucleotide
cuugacgucccaguucuca

SEQ ID NO: 1584278 - RNA, 19 nt, Artificial Sequence
  Description of Artificial Sequence: Synthetic oligonucleotide
cacgccaccauggccuugg

SEQ ID NO: 1584279 - RNA, 19 nt, Artificial Sequence
  Description of Artificial Sequence: Synthetic oligonucleotide
ccauaaagugccauagcca

SEQ ID NO: 1584280 - RNA, 19 nt, Artificial Sequence
  Description of Artificial Sequence: Synthetic oligonucleotide
gaacguuguccuugacgca

SEQ ID NO: 1584281 - RNA, 19 nt, Artificial Sequence
  Description of Artificial Sequence: Synthetic oligonucleotide
guaguaccgcaugcaaggc

SEQ ID NO: 1584282 - RNA, 19 nt, Artificial Sequence
  Description of Artificial Sequence: Synthetic oligonucleotide
cauacccaugcuccucaug

SEQ ID NO: 1584283 - RNA, 19 nt, Artificial Sequence
  Description of Artificial Sequence: Synthetic oligonucleotide
gcucaacaagcaauggacc

SEQ ID NO: 1584284 - RNA, 19 nt, Artificial Sequence
  Description of Artificial Sequence: Synthetic oligonucleotide
cuacccaggcaaucugguc

SEQ ID NO: 1584285 - RNA, 19 nt, Artificial Sequence
  Description of Artificial Sequence: Synthetic oligonucleotide
ggugggaucgcccgcuggc

SEQ ID NO: 1584286 - RNA, 19 nt, Artificial Sequence
  Description of Artificial Sequence: Synthetic oligonucleotide
ccgcuugcuggguaaaggg

SEQ ID NO: 1584287 - RNA, 19 nt, Artificial Sequence
  Description of Artificial Sequence: Synthetic oligonucleotide
caacaagcaauggaccaga

SEQ ID NO: 1584288 - RNA, 19 nt, Artificial Sequence
  Description of Artificial Sequence: Synthetic oligonucleotide
cugccaacgcugucacagc

SEQ ID NO: 1584289 - RNA, 19 nt, Artificial Sequence
  Description of Artificial Sequence: Synthetic oligonucleotide
acgugccucacguacccaa

SEQ ID NO: 1584290 - RNA, 19 nt, Artificial Sequence
  Description of Artificial Sequence: Synthetic oligonucleotide
caccacccaguacggaggc

SEQ ID NO: 1584291 - RNA, 19 nt, Artificial Sequence
  Description of Artificial Sequence: Synthetic oligonucleotide
ggagcugcuaauccacgca

SEQ ID NO: 1584292 - RNA, 19 nt, Artificial Sequence
  Description of Artificial Sequence: Synthetic oligonucleotide
ugucccgaugcuagcugau

SEQ ID NO: 1584293 - RNA, 19 nt, Artificial Sequence
  Description of Artificial Sequence: Synthetic oligonucleotide
cagucgcuggcacuccuug

SEQ ID NO: 1584294 - RNA, 19 nt, Artificial Sequence
  Description of Artificial Sequence: Synthetic oligonucleotide
ucgcgcaggcgcccgcccg

SEQ ID NO: 1584295 - RNA, 19 nt, Artificial Sequence
  Description of Artificial Sequence: Synthetic oligonucleotide
cuuggcccacuuccguuug

SEQ ID NO: 1584296 - RNA, 19 nt, Artificial Sequence
  Description of Artificial Sequence: Synthetic oligonucleotide
guccccacgaaugcugcgc

SEQ ID NO: 1584297 - RNA, 19 nt, Artificial Sequence
  Description of Artificial Sequence: Synthetic oligonucleotide
ucguggccuucuacccagg

SEQ ID NO: 1584298 - RNA, 19 nt, Artificial Sequence
  Description of Artificial Sequence: Synthetic oligonucleotide
ugggaucgcccgcuggcuc

SEQ ID NO: 1584299 - RNA, 19 nt, Artificial Sequence
  Description of Artificial Sequence: Synthetic oligonucleotide
cugguaguguuguugcugu

SEQ ID NO: 1584300 - RNA, 19 nt, Artificial Sequence
  Description of Artificial Sequence: Synthetic oligonucleotide
caccuuacucugcccaauc

SEQ ID NO: 1584301 - RNA, 19 nt, Artificial Sequence
  Description of Artificial Sequence: Synthetic oligonucleotide
agccuagcacuugccucgc

SEQ ID NO: 1584302 - RNA, 19 nt, Artificial Sequence
  Description of Artificial Sequence: Synthetic oligonucleotide
cugcccaaucaguggcagc

SEQ ID NO: 1584303 - RNA, 19 nt, Artificial Sequence
  Description of Artificial Sequence: Synthetic oligonucleotide
cgcagauaccguaguaccg

SEQ ID NO: 1584304 - RNA, 19 nt, Artificial Sequence
  Description of Artificial Sequence: Synthetic oligonucleotide
cguaccugguggcauaggc

SEQ ID NO: 1584305 - RNA, 19 nt, Artificial Sequence
  Description of Artificial Sequence: Synthetic oligonucleotide
augcugcgcggugggaucg

SEQ ID NO: 1584306 - RNA, 19 nt, Artificial Sequence
  Description of Artificial Sequence: Synthetic oligonucleotide
ccguaguaccgcaugcaag

SEQ ID NO: 1584307 - RNA, 19 nt, Artificial Sequence
  Description of Artificial Sequence: Synthetic oligonucleotide
gcugugauacaggaaccug

SEQ ID NO: 1584308 - RNA, 19 nt, Artificial Sequence
  Description of Artificial Sequence: Synthetic oligonucleotide
gaccgugauggcguaccug

SEQ ID NO: 1584309 - RNA, 19 nt, Artificial Sequence
  Description of Artificial Sequence: Synthetic oligonucleotide
guggcggauuaccgugucc

SEQ ID NO: 1584310 - RNA, 19 nt, Artificial Sequence
  Description of Artificial Sequence: Synthetic oligonucleotide
agaccgugauggcguaccu

SEQ ID NO: 1584311 - RNA, 19 nt, Artificial Sequence
  Description of Artificial Sequence: Synthetic oligonucleotide
cccaagaacguuguccuug

SEQ ID NO: 1584312 - RNA, 19 nt, Artificial Sequence
  Description of Artificial Sequence: Synthetic oligonucleotide
cacccaguacggaggcaag

SEQ ID NO: 1584313 - RNA, 19 nt, Artificial Sequence
  Description of Artificial Sequence: Synthetic oligonucleotide
gguucucuugccuggccca

SEQ ID NO: 1584314 - RNA, 19 nt, Artificial Sequence
  Description of Artificial Sequence: Synthetic oligonucleotide
agcacgcggccacccagug

SEQ ID NO: 1584315 - RNA, 19 nt, Artificial Sequence
  Description of Artificial Sequence: Synthetic oligonucleotide
guggcagcccaguccauaa

SEQ ID NO: 1584316 - RNA, 19 nt, Artificial Sequence
  Description of Artificial Sequence: Synthetic oligonucleotide
cagccggcccgcacagugg

SEQ ID NO: 1584317 - RNA, 19 nt, Artificial Sequence
  Description of Artificial Sequence: Synthetic oligonucleotide
ugucaacgugccucacgua

SEQ ID NO: 1584318 - RNA, 19 nt, Artificial Sequence
  Description of Artificial Sequence: Synthetic oligonucleotide
ucaccucauguggguuccg

SEQ ID NO: 1584319 - RNA, 19 nt, Artificial Sequence
  Description of Artificial Sequence: Synthetic oligonucleotide
guggcucgauguuggcuac

SEQ ID NO: 1584320 - RNA, 19 nt, Artificial Sequence
  Description of Artificial Sequence: Synthetic oligonucleotide
ccucacguacccaagccca

SEQ ID NO: 1584321 - RNA, 19 nt, Artificial Sequence
  Description of Artificial Sequence: Synthetic oligonucleotide
cccaguacggaggcaagcc

SEQ ID NO: 1584322 - RNA, 19 nt, Artificial Sequence
  Description of Artificial Sequence: Synthetic oligonucleotide
gcggaccucugccagcaag

SEQ ID NO: 1584323 - RNA, 19 nt, Artificial Sequence
  Description of Artificial Sequence: Synthetic oligonucleotide
ccucaaccccaaauccugc

SEQ ID NO: 1584324 - RNA, 19 nt, Artificial Sequence
  Description of Artificial Sequence: Synthetic oligonucleotide
caccucaaccccaaauccu

SEQ ID NO: 1584325 - RNA, 19 nt, Artificial Sequence
  Description of Artificial Sequence: Synthetic oligonucleotide
gugaugcagcgcccgucgc

SEQ ID NO: 1584326 - RNA, 19 nt, Artificial Sequence
  Description of Artificial Sequence: Synthetic oligonucleotide
augcaccuugacgucccag

SEQ ID NO: 1584327 - RNA, 19 nt, Artificial Sequence
  Description of Artificial Sequence: Synthetic oligonucleotide
acgucccaguucucauuca

SEQ ID NO: 1584328 - RNA, 19 nt, Artificial Sequence
  Description of Artificial Sequence: Synthetic oligonucleotide
gcccacggccgcuugcugg

SEQ ID NO: 1584329 - RNA, 19 nt, Artificial Sequence
  Description of Artificial Sequence: Synthetic oligonucleotide
uggugcgcccguugaugac

SEQ ID NO: 1584330 - RNA, 19 nt, Artificial Sequence
  Description of Artificial Sequence: Synthetic oligonucleotide
gguccccacgaaugcugcg

SEQ ID NO: 1584331 - RNA, 19 nt, Artificial Sequence
  Description of Artificial Sequence: Synthetic oligonucleotide
guacccaagcccauugccu

SEQ ID NO: 1584332 - RNA, 19 nt, Artificial Sequence
  Description of Artificial Sequence: Synthetic oligonucleotide
guggcauaggcuggcuuca

SEQ ID NO: 1584333 - RNA, 19 nt, Artificial Sequence
  Description of Artificial Sequence: Synthetic oligonucleotide
cacaguggcggauuaccgu

SEQ ID NO: 1584334 - RNA, 19 nt, Artificial Sequence
  Description of Artificial Sequence: Synthetic oligonucleotide
cccgaaggcagggagcugc

SEQ ID NO: 1584335 - RNA, 19 nt, Artificial Sequence
  Description of Artificial Sequence: Synthetic oligonucleotide
gccacuagguggguguagc

SEQ ID NO: 1584336 - RNA, 19 nt, Artificial Sequence
  Description of Artificial Sequence: Synthetic oligonucleotide
ggguaaaggggcaucccca

SEQ ID NO: 1584337 - RNA, 19 nt, Artificial Sequence
  Description of Artificial Sequence: Synthetic oligonucleotide
  modified_base (6)..(6): a, c, u, g, unknown or other
cucugngguaaacuuuuau

SEQ ID NO: 1584338 - RNA, 19 nt, Artificial Sequence
  Description of Artificial Sequence: Synthetic oligonucleotide
cucugcccaaucaguggca

SEQ ID NO: 1584339 - RNA, 19 nt, Artificial Sequence
  Description of Artificial Sequence: Synthetic oligonucleotide
caggcgcuccggugcagag

SEQ ID NO: 1584340 - RNA, 19 nt, Artificial Sequence
  Description of Artificial Sequence: Synthetic oligonucleotide
auggcguaccugguggcau

SEQ ID NO: 1584341 - RNA, 19 nt, Artificial Sequence
  Description of Artificial Sequence: Synthetic oligonucleotide
ucccucagccuagcacuug

SEQ ID NO: 1584342 - RNA, 19 nt, Artificial Sequence
  Description of Artificial Sequence: Synthetic oligonucleotide
cugcgcggugggaucgccc

SEQ ID NO: 1584343 - RNA, 19 nt, Artificial Sequence
  Description of Artificial Sequence: Synthetic oligonucleotide
ccaaugcuccugcagccug

SEQ ID NO: 1584344 - RNA, 19 nt, Artificial Sequence
  Description of Artificial Sequence: Synthetic oligonucleotide
aggcgcuccggugcagagg

SEQ ID NO: 1584345 - RNA, 19 nt, Artificial Sequence
  Description of Artificial Sequence: Synthetic oligonucleotide
cccucagccuagcacuugc

SEQ ID NO: 1584346 - RNA, 19 nt, Artificial Sequence
  Description of Artificial Sequence: Synthetic oligonucleotide
gcugcuaauccacgcagcu

SEQ ID NO: 1584347 - RNA, 19 nt, Artificial Sequence
  Description of Artificial Sequence: Synthetic oligonucleotide
gaaugcugcgcggugggau

SEQ ID NO: 1584348 - RNA, 19 nt, Artificial Sequence
  Description of Artificial Sequence: Synthetic oligonucleotide
ggauuaccguguccacaug

SEQ ID NO: 1584349 - RNA, 19 nt, Artificial Sequence
  Description of Artificial Sequence: Synthetic oligonucleotide
ccgcuggcucacuagcugc

SEQ ID NO: 1584350 - RNA, 19 nt, Artificial Sequence
  Description of Artificial Sequence: Synthetic oligonucleotide
ugcuacugguaguguuguu

SEQ ID NO: 1584351 - RNA, 19 nt, Artificial Sequence
  Description of Artificial Sequence: Synthetic oligonucleotide
cucagccuagcacuugccu

SEQ ID NO: 1584352 - RNA, 19 nt, Artificial Sequence
  Description of Artificial Sequence: Synthetic oligonucleotide
agauaccguaguaccgcau

SEQ ID NO: 1584353 - RNA, 19 nt, Artificial Sequence
  Description of Artificial Sequence: Synthetic oligonucleotide
gcaagcggucaaagagugg

SEQ ID NO: 1584354 - RNA, 19 nt, Artificial Sequence
  Description of Artificial Sequence: Synthetic oligonucleotide
gguaauagaugcaggugau

SEQ ID NO: 1584355 - RNA, 19 nt, Artificial Sequence
  Description of Artificial Sequence: Synthetic oligonucleotide
uugccucgccacugcuacu

SEQ ID NO: 1584356 - RNA, 19 nt, Artificial Sequence
  Description of Artificial Sequence: Synthetic oligonucleotide
gcgcccguugaugacguag

SEQ ID NO: 1584357 - RNA, 19 nt, Artificial Sequence
  Description of Artificial Sequence: Synthetic oligonucleotide
guaccugguggcauaggcu

SEQ ID NO: 1584358 - RNA, 19 nt, Artificial Sequence
  Description of Artificial Sequence: Synthetic oligonucleotide
caacgcugucacagcccac

SEQ ID NO: 1584359 - RNA, 19 nt, Artificial Sequence
  Description of Artificial Sequence: Synthetic oligonucleotide
caaagaguggcucgauguu

SEQ ID NO: 1584360 - RNA, 19 nt, Artificial Sequence
  Description of Artificial Sequence: Synthetic oligonucleotide
gacccucagggaagaucug

SEQ ID NO: 1584361 - RNA, 19 nt, Artificial Sequence
  Description of Artificial Sequence: Synthetic oligonucleotide
uggcauaggcuggcuucac

SEQ ID NO: 1584362 - RNA, 19 nt, Artificial Sequence
  Description of Artificial Sequence: Synthetic oligonucleotide
ccgccaugcaccuugacgu

SEQ ID NO: 1584363 - RNA, 19 nt, Artificial Sequence
  Description of Artificial Sequence: Synthetic oligonucleotide
ccuagcacuugccucgcca

SEQ ID NO: 1584364 - RNA, 19 nt, Artificial Sequence
  Description of Artificial Sequence: Synthetic oligonucleotide
cgcacaguggcggauuacc

SEQ ID NO: 1584365 - RNA, 19 nt, Artificial Sequence
  Description of Artificial Sequence: Synthetic oligonucleotide
cacgcggccacccaguguu

SEQ ID NO: 1584366 - RNA, 19 nt, Artificial Sequence
  Description of Artificial Sequence: Synthetic oligonucleotide
ccagccggcccgcacagug

SEQ ID NO: 1584367 - RNA, 19 nt, Artificial Sequence
  Description of Artificial Sequence: Synthetic oligonucleotide
ucuuggcuggcaggaccuc

SEQ ID NO: 1584368 - RNA, 19 nt, Artificial Sequence
  Description of Artificial Sequence: Synthetic oligonucleotide
gcacuugccucgccacugc

SEQ ID NO: 1584369 - RNA, 19 nt, Artificial Sequence
  Description of Artificial Sequence: Synthetic oligonucleotide
ggcggauuaccguguccac

SEQ ID NO: 1584370 - RNA, 19 nt, Artificial Sequence
  Description of Artificial Sequence: Synthetic oligonucleotide
acguuguccuugacgcaga

SEQ ID NO: 1584371 - RNA, 19 nt, Artificial Sequence
  Description of Artificial Sequence: Synthetic oligonucleotide
accagaccgugauggcgua

SEQ ID NO: 1584372 - RNA, 19 nt, Artificial Sequence
  Description of Artificial Sequence: Synthetic oligonucleotide
cugcccgcuccuuggcauc

SEQ ID NO: 1584373 - RNA, 19 nt, Artificial Sequence
  Description of Artificial Sequence: Synthetic oligonucleotide
gccaacgcugucacagccc

SEQ ID NO: 1584374 - RNA, 19 nt, Artificial Sequence
  Description of Artificial Sequence: Synthetic oligonucleotide
cgaugcuagcugauacuug

SEQ ID NO: 1584375 - RNA, 19 nt, Artificial Sequence
  Description of Artificial Sequence: Synthetic oligonucleotide
ccucagccuagcacuugcc

SEQ ID NO: 1584376 - RNA, 19 nt, Artificial Sequence
  Description of Artificial Sequence: Synthetic oligonucleotide
ggccacccaguguucgccc

SEQ ID NO: 1584377 - RNA, 19 nt, Artificial Sequence
  Description of Artificial Sequence: Synthetic oligonucleotide
uaccaccggccgacccuca

SEQ ID NO: 1584378 - RNA, 19 nt, Artificial Sequence
  Description of Artificial Sequence: Synthetic oligonucleotide
gggaucgcccgcuggcuca

SEQ ID NO: 1584379 - RNA, 19 nt, Artificial Sequence
  Description of Artificial Sequence: Synthetic oligonucleotide
caagcccauugccugggua

SEQ ID NO: 1584380 - RNA, 19 nt, Artificial Sequence
  Description of Artificial Sequence: Synthetic oligonucleotide
aucgcccgcuggcucacua

SEQ ID NO: 1584381 - RNA, 19 nt, Artificial Sequence
  Description of Artificial Sequence: Synthetic oligonucleotide
ggcaccuuacucugcccaa

SEQ ID NO: 1584382 - RNA, 19 nt, Artificial Sequence
  Description of Artificial Sequence: Synthetic oligonucleotide
cccguugaugacguagcug

SEQ ID NO: 1584383 - RNA, 19 nt, Artificial Sequence
  Description of Artificial Sequence: Synthetic oligonucleotide
gacucaccucaaccccaaa

SEQ ID NO: 1584384 - RNA, 19 nt, Artificial Sequence
  Description of Artificial Sequence: Synthetic oligonucleotide
gcggauuaccguguccaca

SEQ ID NO: 1584385 - RNA, 19 nt, Artificial Sequence
  Description of Artificial Sequence: Synthetic oligonucleotide
ugcugcgcggugggaucgc

SEQ ID NO: 1584386 - RNA, 19 nt, Artificial Sequence
  Description of Artificial Sequence: Synthetic oligonucleotide
ccgcaugcaaggcacaaua

SEQ ID NO: 1584387 - RNA, 19 nt, Artificial Sequence
  Description of Artificial Sequence: Synthetic oligonucleotide
ccaguacggaggcaagcca

SEQ ID NO: 1584388 - RNA, 19 nt, Artificial Sequence
  Description of Artificial Sequence: Synthetic oligonucleotide
accggccgacccucaggga

SEQ ID NO: 1584389 - RNA, 19 nt, Artificial Sequence
  Description of Artificial Sequence: Synthetic oligonucleotide
cguggggauugucaacgug

SEQ ID NO: 1584390 - RNA, 19 nt, Artificial Sequence
  Description of Artificial Sequence: Synthetic oligonucleotide
ccuugacgcagauaccgua

SEQ ID NO: 1584391 - RNA, 19 nt, Artificial Sequence
  Description of Artificial Sequence: Synthetic oligonucleotide
ggccuuggugcgcccguug

SEQ ID NO: 1584392 - RNA, 19 nt, Artificial Sequence
  Description of Artificial Sequence: Synthetic oligonucleotide
cgacccucagggaagaucu

SEQ ID NO: 1584393 - RNA, 19 nt, Artificial Sequence
  Description of Artificial Sequence: Synthetic oligonucleotide
caugcaccuugacguccca

SEQ ID NO: 1584394 - RNA, 19 nt, Artificial Sequence
  Description of Artificial Sequence: Synthetic oligonucleotide
ccacgaaugcugcgcggug

SEQ ID NO: 1584395 - RNA, 19 nt, Artificial Sequence
  Description of Artificial Sequence: Synthetic oligonucleotide
ggccacuagguggguguag

SEQ ID NO: 1584396 - RNA, 19 nt, Artificial Sequence
  Description of Artificial Sequence: Synthetic oligonucleotide
augcagcgcccgucgccgu

SEQ ID NO: 1584397 - RNA, 19 nt, Artificial Sequence
  Description of Artificial Sequence: Synthetic oligonucleotide
ccggcccgcacaguggcgg

SEQ ID NO: 1584398 - RNA, 19 nt, Artificial Sequence
  Description of Artificial Sequence: Synthetic oligonucleotide
caguggcggauuaccgugu

SEQ ID NO: 1584399 - RNA, 19 nt, Artificial Sequence
  Description of Artificial Sequence: Synthetic oligonucleotide
cucacguacccaagcccau

SEQ ID NO: 1584400 - RNA, 19 nt, Artificial Sequence
  Description of Artificial Sequence: Synthetic oligonucleotide
ccgacccucagggaagauc

SEQ ID NO: 1584401 - RNA, 19 nt, Artificial Sequence
  Description of Artificial Sequence: Synthetic oligonucleotide
gucccgaugcuagcugaua

SEQ ID NO: 1584402 - RNA, 19 nt, Artificial Sequence
  Description of Artificial Sequence: Synthetic oligonucleotide
gccuucuacccaggcaauc

SEQ ID NO: 1584403 - RNA, 19 nt, Artificial Sequence
  Description of Artificial Sequence: Synthetic oligonucleotide
acacgccaccauggccuug

SEQ ID NO: 1584404 - RNA, 19 nt, Artificial Sequence
  Description of Artificial Sequence: Synthetic oligonucleotide
gcagcccaguccauaaagu

SEQ ID NO: 1584405 - RNA, 19 nt, Artificial Sequence
  Description of Artificial Sequence: Synthetic oligonucleotide
ccgcugccaacgcugucac

SEQ ID NO: 1584406 - RNA, 19 nt, Artificial Sequence
  Description of Artificial Sequence: Synthetic oligonucleotide
ccuucuacccaggcaaucu

SEQ ID NO: 1584407 - RNA, 19 nt, Artificial Sequence
  Description of Artificial Sequence: Synthetic oligonucleotide
ggacaccuuucugucccga

SEQ ID NO: 1584408 - RNA, 19 nt, Artificial Sequence
  Description of Artificial Sequence: Synthetic oligonucleotide
gcguaccugguggcauagg

SEQ ID NO: 1584409 - RNA, 19 nt, Artificial Sequence
  Description of Artificial Sequence: Synthetic oligonucleotide
caugcuccucauggcaccu

SEQ ID NO: 1584410 - RNA, 19 nt, Artificial Sequence
  Description of Artificial Sequence: Synthetic oligonucleotide
cccgucgccguggggauug

SEQ ID NO: 1584411 - RNA, 19 nt, Artificial Sequence
  Description of Artificial Sequence: Synthetic oligonucleotide
cccgcggaccucugccagc

SEQ ID NO: 1584412 - RNA, 19 nt, Artificial Sequence
  Description of Artificial Sequence: Synthetic oligonucleotide
gcgcccgucgccgugggga

SEQ ID NO: 1584413 - RNA, 19 nt, Artificial Sequence
  Description of Artificial Sequence: Synthetic oligonucleotide
ccccgcggaccucugccag

SEQ ID NO: 1584414 - RNA, 19 nt, Artificial Sequence
  Description of Artificial Sequence: Synthetic oligonucleotide
cggccgacccucagggaag

SEQ ID NO: 1584415 - RNA, 19 nt, Artificial Sequence
  Description of Artificial Sequence: Synthetic oligonucleotide
caggcgcccgcccgcuuca

SEQ ID NO: 1584416 - RNA, 19 nt, Artificial Sequence
  Description of Artificial Sequence: Synthetic oligonucleotide
gccuagcacuugccucgcc

SEQ ID NO: 1584417 - RNA, 19 nt, Artificial Sequence
  Description of Artificial Sequence: Synthetic oligonucleotide
cggauuaccguguccacau

SEQ ID NO: 1584418 - RNA, 19 nt, Artificial Sequence
  Description of Artificial Sequence: Synthetic oligonucleotide
ggggauugucaacgugccu

SEQ ID NO: 1584419 - RNA, 19 nt, Artificial Sequence
  Description of Artificial Sequence: Synthetic oligonucleotide
  modified_base (7)..(7): a, c, u, g, unknown or other
gcucugngguaaacuuuua

SEQ ID NO: 1584420 - RNA, 19 nt, Artificial Sequence
  Description of Artificial Sequence: Synthetic oligonucleotide
ccaugagggcaccaaugcu

SEQ ID NO: 1584421 - RNA, 19 nt, Artificial Sequence
  Description of Artificial Sequence: Synthetic oligonucleotide
ccgccagucgcuggcacuc

SEQ ID NO: 1584422 - RNA, 19 nt, Artificial Sequence
  Description of Artificial Sequence: Synthetic oligonucleotide
cgcuccggugcagagggug

SEQ ID NO: 1584423 - RNA, 19 nt, Artificial Sequence
  Description of Artificial Sequence: Synthetic oligonucleotide
cccgaugcuagcugauacu

SEQ ID NO: 1584424 - RNA, 19 nt, Artificial Sequence
  Description of Artificial Sequence: Synthetic oligonucleotide
cacuugccucgccacugcu

SEQ ID NO: 1584425 - RNA, 19 nt, Artificial Sequence
  Description of Artificial Sequence: Synthetic oligonucleotide
ggcccacggccgcuugcug

SEQ ID NO: 1584426 - RNA, 19 nt, Artificial Sequence
  Description of Artificial Sequence: Synthetic oligonucleotide
caccucauguggguuccgu

SEQ ID NO: 1584427 - RNA, 19 nt, Artificial Sequence
  Description of Artificial Sequence: Synthetic oligonucleotide
gugcgcccguugaugacgu

SEQ ID NO: 1584428 - RNA, 19 nt, Artificial Sequence
  Description of Artificial Sequence: Synthetic oligonucleotide
cgccaugcaccuugacguc

SEQ ID NO: 1584429 - RNA, 19 nt, Artificial Sequence
  Description of Artificial Sequence: Synthetic oligonucleotide
gcugcgcggugggaucgcc

SEQ ID NO: 1584430 - RNA, 19 nt, Artificial Sequence
  Description of Artificial Sequence: Synthetic oligonucleotide
cgcggccacccaguguucg

SEQ ID NO: 1584431 - RNA, 19 nt, Artificial Sequence
  Description of Artificial Sequence: Synthetic oligonucleotide
gcggugggaucgcccgcug

SEQ ID NO: 1584432 - RNA, 19 nt, Artificial Sequence
  Description of Artificial Sequence: Synthetic oligonucleotide
cacggccgcuugcugggua

SEQ ID NO: 1584433 - RNA, 19 nt, Artificial Sequence
  Description of Artificial Sequence: Synthetic oligonucleotide
gcgcggugggaucgcccgc

SEQ ID NO: 1584434 - RNA, 19 nt, Artificial Sequence
  Description of Artificial Sequence: Synthetic oligonucleotide
cgccguggggauugucaac

SEQ ID NO: 1584435 - RNA, 19 nt, Artificial Sequence
  Description of Artificial Sequence: Synthetic oligonucleotide
ccagaccgugauggcguac

SEQ ID NO: 1584436 - RNA, 19 nt, Artificial Sequence
  Description of Artificial Sequence: Synthetic oligonucleotide
gggcacccugggccgccag

SEQ ID NO: 1584437 - RNA, 19 nt, Artificial Sequence
  Description of Artificial Sequence: Synthetic oligonucleotide
ccgaugcuagcugauacuu

SEQ ID NO: 1584438 - RNA, 19 nt, Artificial Sequence
  Description of Artificial Sequence: Synthetic oligonucleotide
aggcgcccgcccgcuucag

SEQ ID NO: 1584439 - RNA, 19 nt, Artificial Sequence
  Description of Artificial Sequence: Synthetic oligonucleotide
gccggcccgcacaguggcg

SEQ ID NO: 1584440 - RNA, 19 nt, Artificial Sequence
  Description of Artificial Sequence: Synthetic oligonucleotide
ccuuggcccacuuccguuu

SEQ ID NO: 1584441 - RNA, 19 nt, Artificial Sequence
  Description of Artificial Sequence: Synthetic oligonucleotide
ccgcacaguggcggauuac

SEQ ID NO: 1584442 - RNA, 19 nt, Artificial Sequence
  Description of Artificial Sequence: Synthetic oligonucleotide
gccgccagucgcuggcacu

SEQ ID NO: 1584443 - RNA, 19 nt, Artificial Sequence
  Description of Artificial Sequence: Synthetic oligonucleotide
cccacgaaugcugcgcggu

SEQ ID NO: 1584444 - RNA, 19 nt, Artificial Sequence
  Description of Artificial Sequence: Synthetic oligonucleotide
gcaccuuacucugcccaau

SEQ ID NO: 1584445 - RNA, 19 nt, Artificial Sequence
  Description of Artificial Sequence: Synthetic oligonucleotide
ccgcggaccucugccagca

SEQ ID NO: 1584446 - RNA, 19 nt, Artificial Sequence
  Description of Artificial Sequence: Synthetic oligonucleotide
cgcaugcaaggcacaauau

SEQ ID NO: 1584447 - RNA, 19 nt, Artificial Sequence
  Description of Artificial Sequence: Synthetic oligonucleotide
ccucgccacugcuacuggu

SEQ ID NO: 1584448 - RNA, 19 nt, Artificial Sequence
  Description of Artificial Sequence: Synthetic oligonucleotide
gcacgcggccacccagugu

SEQ ID NO: 1584449 - RNA, 19 nt, Artificial Sequence
  Description of Artificial Sequence: Synthetic oligonucleotide
ccgggcacccugggccgcc

SEQ ID NO: 1584450 - RNA, 19 nt, Artificial Sequence
  Description of Artificial Sequence: Synthetic oligonucleotide
cgaaugcugcgcgguggga

SEQ ID NO: 1584451 - RNA, 19 nt, Artificial Sequence
  Description of Artificial Sequence: Synthetic oligonucleotide
ccccaagaacguuguccuu

SEQ ID NO: 1584452 - RNA, 19 nt, Artificial Sequence
  Description of Artificial Sequence: Synthetic oligonucleotide
cgucgccguggggauuguc

SEQ ID NO: 1584453 - RNA, 19 nt, Artificial Sequence
  Description of Artificial Sequence: Synthetic oligonucleotide
cggcccgcacaguggcgga

SEQ ID NO: 1584454 - RNA, 19 nt, Artificial Sequence
  Description of Artificial Sequence: Synthetic oligonucleotide
ggcccgcacaguggcggau

SEQ ID NO: 1584455 - RNA, 19 nt, Artificial Sequence
  Description of Artificial Sequence: Synthetic oligonucleotide
cgcggugggaucgcccgcu

SEQ ID NO: 1584456 - RNA, 19 nt, Artificial Sequence
  Description of Artificial Sequence: Synthetic oligonucleotide
cggccgcuugcuggguaaa

SEQ ID NO: 1584457 - RNA, 19 nt, Artificial Sequence
  Description of Artificial Sequence: Synthetic oligonucleotide
cgcccgucgccguggggau

SEQ ID NO: 1584458 - RNA, 19 nt, Artificial Sequence
  Description of Artificial Sequence: Synthetic oligonucleotide
cgcggaccucugccagcaa

SEQ ID NO: 1584459 - RNA, 19 nt, Artificial Sequence
  Description of Artificial Sequence: Synthetic oligonucleotide
gcgcuccggugcagagggu

SEQ ID NO: 1584460 - RNA, 19 nt, Artificial Sequence
  Description of Artificial Sequence: Synthetic oligonucleotide
gcccgucgccguggggauu

SEQ ID NO: 1584461 - RNA, 19 nt, Artificial Sequence
  Description of Artificial Sequence: Synthetic oligonucleotide
ccgucgccguggggauugu

SEQ ID NO: 1584462 - RNA, 19 nt, Artificial Sequence
  Description of Artificial Sequence: Synthetic oligonucleotide
uucaguacggauaugcacg

SEQ ID NO: 1584463 - RNA, 19 nt, Artificial Sequence
  Description of Artificial Sequence: Synthetic oligonucleotide
cauaauacccucuugacac

SEQ ID NO: 1584464 - RNA, 19 nt, Artificial Sequence
  Description of Artificial Sequence: Synthetic oligonucleotide
aaaaugacuguccaggcga

SEQ ID NO: 1584465 - RNA, 19 nt, Artificial Sequence
  Description of Artificial Sequence: Synthetic oligonucleotide
ucucgaacugcguagaagg

SEQ ID NO: 1584466 - RNA, 19 nt, Artificial Sequence
  Description of Artificial Sequence: Synthetic oligonucleotide
agacagagaacccacgccc

SEQ ID NO: 1584467 - RNA, 19 nt, Artificial Sequence
  Description of Artificial Sequence: Synthetic oligonucleotide
ucucucaaugcucugacca

SEQ ID NO: 1584468 - RNA, 19 nt, Artificial Sequence
  Description of Artificial Sequence: Synthetic oligonucleotide
guugaugggacauaauacc

SEQ ID NO: 1584469 - RNA, 19 nt, Artificial Sequence
  Description of Artificial Sequence: Synthetic oligonucleotide
aauucugcaggguggaugu

SEQ ID NO: 1584470 - RNA, 19 nt, Artificial Sequence
  Description of Artificial Sequence: Synthetic oligonucleotide
ucuggaaccugacugaggu

SEQ ID NO: 1584471 - RNA, 19 nt, Artificial Sequence
  Description of Artificial Sequence: Synthetic oligonucleotide
uugaugggacauaauaccc

SEQ ID NO: 1584472 - RNA, 19 nt, Artificial Sequence
  Description of Artificial Sequence: Synthetic oligonucleotide
ugaggaaauagucccucgg

SEQ ID NO: 1584473 - RNA, 19 nt, Artificial Sequence
  Description of Artificial Sequence: Synthetic oligonucleotide
aacaguaggcgaaaaggcg

SEQ ID NO: 1584474 - RNA, 19 nt, Artificial Sequence
  Description of Artificial Sequence: Synthetic oligonucleotide
aguugaugggacauaauac

SEQ ID NO: 1584475 - RNA, 19 nt, Artificial Sequence
  Description of Artificial Sequence: Synthetic oligonucleotide
aacuuguccgcugugucac

SEQ ID NO: 1584476 - RNA, 19 nt, Artificial Sequence
  Description of Artificial Sequence: Synthetic oligonucleotide
uaguugaugggacauaaua

SEQ ID NO: 1584477 - RNA, 19 nt, Artificial Sequence
  Description of Artificial Sequence: Synthetic oligonucleotide
aaugcucugaccacuuggg

SEQ ID NO: 1584478 - RNA, 19 nt, Artificial Sequence
  Description of Artificial Sequence: Synthetic oligonucleotide
caacaguaggcgaaaaggc

SEQ ID NO: 1584479 - RNA, 19 nt, Artificial Sequence
  Description of Artificial Sequence: Synthetic oligonucleotide
auaauacccucuugacacc

SEQ ID NO: 1584480 - RNA, 19 nt, Artificial Sequence
  Description of Artificial Sequence: Synthetic oligonucleotide
aagcccucggccaugacac

SEQ ID NO: 1584481 - RNA, 19 nt, Artificial Sequence
  Description of Artificial Sequence: Synthetic oligonucleotide
ucagcuuuccgucucgaac

SEQ ID NO: 1584482 - RNA, 19 nt, Artificial Sequence
  Description of Artificial Sequence: Synthetic oligonucleotide
aaagcugacugagucagcu

SEQ ID NO: 1584483 - RNA, 19 nt, Artificial Sequence
  Description of Artificial Sequence: Synthetic oligonucleotide
cuuuccgucucgaacugcg

SEQ ID NO: 1584484 - RNA, 19 nt, Artificial Sequence
  Description of Artificial Sequence: Synthetic oligonucleotide
aggaaauacgggccaggcc

SEQ ID NO: 1584485 - RNA, 19 nt, Artificial Sequence
  Description of Artificial Sequence: Synthetic oligonucleotide
ugcacgauuucuugagcgg

SEQ ID NO: 1584486 - RNA, 19 nt, Artificial Sequence
  Description of Artificial Sequence: Synthetic oligonucleotide
ugaugggacauaauacccu

SEQ ID NO: 1584487 - RNA, 19 nt, Artificial Sequence
  Description of Artificial Sequence: Synthetic oligonucleotide
agcguccuaacaaaguggc

SEQ ID NO: 1584488 - RNA, 19 nt, Artificial Sequence
  Description of Artificial Sequence: Synthetic oligonucleotide
cuucaguacggauaugcac

SEQ ID NO: 1584489 - RNA, 19 nt, Artificial Sequence
  Description of Artificial Sequence: Synthetic oligonucleotide
uuccucuugucuacgcagg

SEQ ID NO: 1584490 - RNA, 19 nt, Artificial Sequence
  Description of Artificial Sequence: Synthetic oligonucleotide
uugaggaaauagucccucg

SEQ ID NO: 1584491 - RNA, 19 nt, Artificial Sequence
  Description of Artificial Sequence: Synthetic oligonucleotide
ggaaauacgggccaggcca

SEQ ID NO: 1584492 - RNA, 19 nt, Artificial Sequence
  Description of Artificial Sequence: Synthetic oligonucleotide
acuugggaggacuugguga

SEQ ID NO: 1584493 - RNA, 19 nt, Artificial Sequence
  Description of Artificial Sequence: Synthetic oligonucleotide
cucuugacaccuuugguuc

SEQ ID NO: 1584494 - RNA, 19 nt, Artificial Sequence
  Description of Artificial Sequence: Synthetic oligonucleotide
cucuucaguacggauaugc

SEQ ID NO: 1584495 - RNA, 19 nt, Artificial Sequence
  Description of Artificial Sequence: Synthetic oligonucleotide
ucuacgcucuccaggaaga

SEQ ID NO: 1584496 - RNA, 19 nt, Artificial Sequence
  Description of Artificial Sequence: Synthetic oligonucleotide
ucuucaguacggauaugca

SEQ ID NO: 1584497 - RNA, 19 nt, Artificial Sequence
  Description of Artificial Sequence: Synthetic oligonucleotide
caugcggucuuccacugcg

SEQ ID NO: 1584498 - RNA, 19 nt, Artificial Sequence
  Description of Artificial Sequence: Synthetic oligonucleotide
acgcaggucacccugggag

SEQ ID NO: 1584499 - RNA, 19 nt, Artificial Sequence
  Description of Artificial Sequence: Synthetic oligonucleotide
gaugggacauaauacccuc

SEQ ID NO: 1584500 - RNA, 19 nt, Artificial Sequence
  Description of Artificial Sequence: Synthetic oligonucleotide
ucacagugugugaaccggg

SEQ ID NO: 1584501 - RNA, 19 nt, Artificial Sequence
  Description of Artificial Sequence: Synthetic oligonucleotide
uaggcgaaaaggcgugggg

SEQ ID NO: 1584502 - RNA, 19 nt, Artificial Sequence
  Description of Artificial Sequence: Synthetic oligonucleotide
gaaauagucccucggagcu

SEQ ID NO: 1584503 - RNA, 19 nt, Artificial Sequence
  Description of Artificial Sequence: Synthetic oligonucleotide
gaagguuggugcugucugg

SEQ ID NO: 1584504 - RNA, 19 nt, Artificial Sequence
  Description of Artificial Sequence: Synthetic oligonucleotide
ucggcgaacaucuggcuca

SEQ ID NO: 1584505 - RNA, 19 nt, Artificial Sequence
  Description of Artificial Sequence: Synthetic oligonucleotide
ugagccgagcuucugcagc

SEQ ID NO: 1584506 - RNA, 19 nt, Artificial Sequence
  Description of Artificial Sequence: Synthetic oligonucleotide
ucuacgcaggucacccugg

SEQ ID NO: 1584507 - RNA, 19 nt, Artificial Sequence
  Description of Artificial Sequence: Synthetic oligonucleotide
cucucucccaggaaauacg

SEQ ID NO: 1584508 - RNA, 19 nt, Artificial Sequence
  Description of Artificial Sequence: Synthetic oligonucleotide
uccgucucgaacugcguag

SEQ ID NO: 1584509 - RNA, 19 nt, Artificial Sequence
  Description of Artificial Sequence: Synthetic oligonucleotide
ugugguugaagaguccuga

SEQ ID NO: 1584510 - RNA, 19 nt, Artificial Sequence
  Description of Artificial Sequence: Synthetic oligonucleotide
augagggccacaguacggc

SEQ ID NO: 1584511 - RNA, 19 nt, Artificial Sequence
  Description of Artificial Sequence: Synthetic oligonucleotide
cucgucacugcccagcccc

SEQ ID NO: 1584512 - RNA, 19 nt, Artificial Sequence
  Description of Artificial Sequence: Synthetic oligonucleotide
aaaugacuguccaggcgac

SEQ ID NO: 1584513 - RNA, 19 nt, Artificial Sequence
  Description of Artificial Sequence: Synthetic oligonucleotide
ucgaugaaccccagcaccu

SEQ ID NO: 1584514 - RNA, 19 nt, Artificial Sequence
  Description of Artificial Sequence: Synthetic oligonucleotide
uugucuacgcaggucaccc

SEQ ID NO: 1584515 - RNA, 19 nt, Artificial Sequence
  Description of Artificial Sequence: Synthetic oligonucleotide
uucugagccgagcuucugc

SEQ ID NO: 1584516 - RNA, 19 nt, Artificial Sequence
  Description of Artificial Sequence: Synthetic oligonucleotide
ucaguacggauaugcacga

SEQ ID NO: 1584517 - RNA, 19 nt, Artificial Sequence
  Description of Artificial Sequence: Synthetic oligonucleotide
gagguugugacgcgcccgg

SEQ ID NO: 1584518 - RNA, 19 nt, Artificial Sequence
  Description of Artificial Sequence: Synthetic oligonucleotide
acgagugcgcguuccggcc

SEQ ID NO: 1584519 - RNA, 19 nt, Artificial Sequence
  Description of Artificial Sequence: Synthetic oligonucleotide
ucgaacugcguagaaggcc

SEQ ID NO: 1584520 - RNA, 19 nt, Artificial Sequence
  Description of Artificial Sequence: Synthetic oligonucleotide
aguacggcgggacugcgca

SEQ ID NO: 1584521 - RNA, 19 nt, Artificial Sequence
  Description of Artificial Sequence: Synthetic oligonucleotide
acugcguagaaggccaggg

SEQ ID NO: 1584522 - RNA, 19 nt, Artificial Sequence
  Description of Artificial Sequence: Synthetic oligonucleotide
ucuugcggcgagaagcccu

SEQ ID NO: 1584523 - RNA, 19 nt, Artificial Sequence
  Description of Artificial Sequence: Synthetic oligonucleotide
ugcggcguggccuggaggc

SEQ ID NO: 1584524 - RNA, 19 nt, Artificial Sequence
  Description of Artificial Sequence: Synthetic oligonucleotide
ugggagcguccuaacaaag

SEQ ID NO: 1584525 - RNA, 19 nt, Artificial Sequence
  Description of Artificial Sequence: Synthetic oligonucleotide
guaguaggugccccggucc

SEQ ID NO: 1584526 - RNA, 19 nt, Artificial Sequence
  Description of Artificial Sequence: Synthetic oligonucleotide
cucacagugugugaaccgg

SEQ ID NO: 1584527 - RNA, 19 nt, Artificial Sequence
  Description of Artificial Sequence: Synthetic oligonucleotide
gaugagggccacaguacgg

SEQ ID NO: 1584528 - RNA, 19 nt, Artificial Sequence
  Description of Artificial Sequence: Synthetic oligonucleotide
acggauaugcacgauuucu

SEQ ID NO: 1584529 - RNA, 19 nt, Artificial Sequence
  Description of Artificial Sequence: Synthetic oligonucleotide
aguacggauaugcacgauu

SEQ ID NO: 1584530 - RNA, 19 nt, Artificial Sequence
  Description of Artificial Sequence: Synthetic oligonucleotide
cagacagagaacccacgcc

SEQ ID NO: 1584531 - RNA, 19 nt, Artificial Sequence
  Description of Artificial Sequence: Synthetic oligonucleotide
ugcaagaacuuguccgcug

SEQ ID NO: 1584532 - RNA, 19 nt, Artificial Sequence
  Description of Artificial Sequence: Synthetic oligonucleotide
cuuugagccuccgaagaag

SEQ ID NO: 1584533 - RNA, 19 nt, Artificial Sequence
  Description of Artificial Sequence: Synthetic oligonucleotide
accacuugggaggacuugg

SEQ ID NO: 1584534 - RNA, 19 nt, Artificial Sequence
  Description of Artificial Sequence: Synthetic oligonucleotide
acgauuucuugagcggccc

SEQ ID NO: 1584535 - RNA, 19 nt, Artificial Sequence
  Description of Artificial Sequence: Synthetic oligonucleotide
aaccgggugggugacuccg

SEQ ID NO: 1584536 - RNA, 19 nt, Artificial Sequence
  Description of Artificial Sequence: Synthetic oligonucleotide
gguaguggggccuccagcc

SEQ ID NO: 1584537 - RNA, 19 nt, Artificial Sequence
  Description of Artificial Sequence: Synthetic oligonucleotide
auacgggccaggccacugc

SEQ ID NO: 1584538 - RNA, 19 nt, Artificial Sequence
  Description of Artificial Sequence: Synthetic oligonucleotide
ggagcguccuaacaaagug

SEQ ID NO: 1584539 - RNA, 19 nt, Artificial Sequence
  Description of Artificial Sequence: Synthetic oligonucleotide
agaacccacgcccauucca

SEQ ID NO: 1584540 - RNA, 19 nt, Artificial Sequence
  Description of Artificial Sequence: Synthetic oligonucleotide
ugagccuccgaagaaggcu

SEQ ID NO: 1584541 - RNA, 19 nt, Artificial Sequence
  Description of Artificial Sequence: Synthetic oligonucleotide
cucuugucuacgcagguca

SEQ ID NO: 1584542 - RNA, 19 nt, Artificial Sequence
  Description of Artificial Sequence: Synthetic oligonucleotide
ugagguugugacgcgcccg

SEQ ID NO: 1584543 - RNA, 19 nt, Artificial Sequence
  Description of Artificial Sequence: Synthetic oligonucleotide
cuugagcggcccaaucugc

SEQ ID NO: 1584544 - RNA, 19 nt, Artificial Sequence
  Description of Artificial Sequence: Synthetic oligonucleotide
cacgauuucuugagcggcc

SEQ ID NO: 1584545 - RNA, 19 nt, Artificial Sequence
  Description of Artificial Sequence: Synthetic oligonucleotide
ggauaugcacgauuucuug

SEQ ID NO: 1584546 - RNA, 19 nt, Artificial Sequence
  Description of Artificial Sequence: Synthetic oligonucleotide
gcguacuccaggcagaccc

SEQ ID NO: 1584547 - RNA, 19 nt, Artificial Sequence
  Description of Artificial Sequence: Synthetic oligonucleotide
acugcgcaaugcuggcacc

SEQ ID NO: 1584548 - RNA, 19 nt, Artificial Sequence
  Description of Artificial Sequence: Synthetic oligonucleotide
ugggacauaauacccucuu

SEQ ID NO: 1584549 - RNA, 19 nt, Artificial Sequence
  Description of Artificial Sequence: Synthetic oligonucleotide
ugcucacagugugugaacc

SEQ ID NO: 1584550 - RNA, 19 nt, Artificial Sequence
  Description of Artificial Sequence: Synthetic oligonucleotide
acaguaggcgaaaaggcgu

SEQ ID NO: 1584551 - RNA, 19 nt, Artificial Sequence
  Description of Artificial Sequence: Synthetic oligonucleotide
aaaaggcgugggguagugg

SEQ ID NO: 1584552 - RNA, 19 nt, Artificial Sequence
  Description of Artificial Sequence: Synthetic oligonucleotide
cucgaacugcguagaaggc

SEQ ID NO: 1584553 - RNA, 19 nt, Artificial Sequence
  Description of Artificial Sequence: Synthetic oligonucleotide
uugagcggcccaaucugca

SEQ ID NO: 1584554 - RNA, 19 nt, Artificial Sequence
  Description of Artificial Sequence: Synthetic oligonucleotide
aggcuuugagccuccgaag

SEQ ID NO: 1584555 - RNA, 19 nt, Artificial Sequence
  Description of Artificial Sequence: Synthetic oligonucleotide
uugagccuccgaagaaggc

SEQ ID NO: 1584556 - RNA, 19 nt, Artificial Sequence
  Description of Artificial Sequence: Synthetic oligonucleotide
ugagcggcccaaucugcag

SEQ ID NO: 1584557 - RNA, 19 nt, Artificial Sequence
  Description of Artificial Sequence: Synthetic oligonucleotide
uccggguaguugaugggac

SEQ ID NO: 1584558 - RNA, 19 nt, Artificial Sequence
  Description of Artificial Sequence: Synthetic oligonucleotide
aacugcguagaaggccagg

SEQ ID NO: 1584559 - RNA, 19 nt, Artificial Sequence
  Description of Artificial Sequence: Synthetic oligonucleotide
ugacugagguugugacgcg

SEQ ID NO: 1584560 - RNA, 19 nt, Artificial Sequence
  Description of Artificial Sequence: Synthetic oligonucleotide
gcagcugcgcucuugauga

SEQ ID NO: 1584561 - RNA, 19 nt, Artificial Sequence
  Description of Artificial Sequence: Synthetic oligonucleotide
gguggauguggccucggcg

SEQ ID NO: 1584562 - RNA, 19 nt, Artificial Sequence
  Description of Artificial Sequence: Synthetic oligonucleotide
ucuugucuacgcaggucac

SEQ ID NO: 1584563 - RNA, 19 nt, Artificial Sequence
  Description of Artificial Sequence: Synthetic oligonucleotide
acuccggguaguugauggg

SEQ ID NO: 1584564 - RNA, 19 nt, Artificial Sequence
  Description of Artificial Sequence: Synthetic oligonucleotide
acgauguaggcaaacuuga

SEQ ID NO: 1584565 - RNA, 19 nt, Artificial Sequence
  Description of Artificial Sequence: Synthetic oligonucleotide
uccacugcgcucaggacuu

SEQ ID NO: 1584566 - RNA, 19 nt, Artificial Sequence
  Description of Artificial Sequence: Synthetic oligonucleotide
aauacgggccaggccacug

SEQ ID NO: 1584567 - RNA, 19 nt, Artificial Sequence
  Description of Artificial Sequence: Synthetic oligonucleotide
gucuacgcaggucacccug

SEQ ID NO: 1584568 - RNA, 19 nt, Artificial Sequence
  Description of Artificial Sequence: Synthetic oligonucleotide
gaugaaccccagcaccuca

SEQ ID NO: 1584569 - RNA, 19 nt, Artificial Sequence
  Description of Artificial Sequence: Synthetic oligonucleotide
uccccuagcaccugcucac

SEQ ID NO: 1584570 - RNA, 19 nt, Artificial Sequence
  Description of Artificial Sequence: Synthetic oligonucleotide
cauccaugcggucuuccac

SEQ ID NO: 1584571 - RNA, 19 nt, Artificial Sequence
  Description of Artificial Sequence: Synthetic oligonucleotide
cuugggaggacuuggugaa

SEQ ID NO: 1584572 - RNA, 19 nt, Artificial Sequence
  Description of Artificial Sequence: Synthetic oligonucleotide
caguaggcgaaaaggcgug

SEQ ID NO: 1584573 - RNA, 19 nt, Artificial Sequence
  Description of Artificial Sequence: Synthetic oligonucleotide
ggcucuugcggcgagaagc

SEQ ID NO: 1584574 - RNA, 19 nt, Artificial Sequence
  Description of Artificial Sequence: Synthetic oligonucleotide
ugaucuccaccucccagua

SEQ ID NO: 1584575 - RNA, 19 nt, Artificial Sequence
  Description of Artificial Sequence: Synthetic oligonucleotide
uacggauaugcacgauuuc

SEQ ID NO: 1584576 - RNA, 19 nt, Artificial Sequence
  Description of Artificial Sequence: Synthetic oligonucleotide
ugcgcguuccggcccagcc

SEQ ID NO: 1584577 - RNA, 19 nt, Artificial Sequence
  Description of Artificial Sequence: Synthetic oligonucleotide
uccucuugucuacgcaggu

SEQ ID NO: 1584578 - RNA, 19 nt, Artificial Sequence
  Description of Artificial Sequence: Synthetic oligonucleotide
aaccugacugagguuguga

SEQ ID NO: 1584579 - RNA, 19 nt, Artificial Sequence
  Description of Artificial Sequence: Synthetic oligonucleotide
cacgagugcgcguuccggc

SEQ ID NO: 1584580 - RNA, 19 nt, Artificial Sequence
  Description of Artificial Sequence: Synthetic oligonucleotide
uccagaagguuggugcugu

SEQ ID NO: 1584581 - RNA, 19 nt, Artificial Sequence
  Description of Artificial Sequence: Synthetic oligonucleotide
cagccguagugccaggagc

SEQ ID NO: 1584582 - RNA, 19 nt, Artificial Sequence
  Description of Artificial Sequence: Synthetic oligonucleotide
ugcggucuuccacugcgcu

SEQ ID NO: 1584583 - RNA, 19 nt, Artificial Sequence
  Description of Artificial Sequence: Synthetic oligonucleotide
caggaaauacgggccaggc

SEQ ID NO: 1584584 - RNA, 19 nt, Artificial Sequence
  Description of Artificial Sequence: Synthetic oligonucleotide
ugacgcgcccggcucaggc

SEQ ID NO: 1584585 - RNA, 19 nt, Artificial Sequence
  Description of Artificial Sequence: Synthetic oligonucleotide
uuccgucucgaacugcgua

SEQ ID NO: 1584586 - RNA, 19 nt, Artificial Sequence
  Description of Artificial Sequence: Synthetic oligonucleotide
aguaggcgaaaaggcgugg

SEQ ID NO: 1584587 - RNA, 19 nt, Artificial Sequence
  Description of Artificial Sequence: Synthetic oligonucleotide
gucucgaacugcguagaag

SEQ ID NO: 1584588 - RNA, 19 nt, Artificial Sequence
  Description of Artificial Sequence: Synthetic oligonucleotide
cuugucuacgcaggucacc

SEQ ID NO: 1584589 - RNA, 19 nt, Artificial Sequence
  Description of Artificial Sequence: Synthetic oligonucleotide
gacccauccuucaaugauc

SEQ ID NO: 1584590 - RNA, 19 nt, Artificial Sequence
  Description of Artificial Sequence: Synthetic oligonucleotide
agcuuuccgucucgaacug

SEQ ID NO: 1584591 - RNA, 19 nt, Artificial Sequence
  Description of Artificial Sequence: Synthetic oligonucleotide
gaacccacgcccauuccac

SEQ ID NO: 1584592 - RNA, 19 nt, Artificial Sequence
  Description of Artificial Sequence: Synthetic oligonucleotide
cagaaagcugacugaguca

SEQ ID NO: 1584593 - RNA, 19 nt, Artificial Sequence
  Description of Artificial Sequence: Synthetic oligonucleotide
ggcauggucagcguacucc

SEQ ID NO: 1584594 - RNA, 19 nt, Artificial Sequence
  Description of Artificial Sequence: Synthetic oligonucleotide
ugaaccgggugggugacuc

SEQ ID NO: 1584595 - RNA, 19 nt, Artificial Sequence
  Description of Artificial Sequence: Synthetic oligonucleotide
cccaaucugcagaugggcg

SEQ ID NO: 1584596 - RNA, 19 nt, Artificial Sequence
  Description of Artificial Sequence: Synthetic oligonucleotide
cugcgcucaggacuuuggg

SEQ ID NO: 1584597 - RNA, 19 nt, Artificial Sequence
  Description of Artificial Sequence: Synthetic oligonucleotide
agucccucggagcuucacu

SEQ ID NO: 1584598 - RNA, 19 nt, Artificial Sequence
  Description of Artificial Sequence: Synthetic oligonucleotide
cugugguugaagaguccug

SEQ ID NO: 1584599 - RNA, 19 nt, Artificial Sequence
  Description of Artificial Sequence: Synthetic oligonucleotide
cugcguagaaggccagggc

SEQ ID NO: 1584600 - RNA, 19 nt, Artificial Sequence
  Description of Artificial Sequence: Synthetic oligonucleotide
gaaauacgggccaggccac

SEQ ID NO: 1584601 - RNA, 19 nt, Artificial Sequence
  Description of Artificial Sequence: Synthetic oligonucleotide
uuuccgucucgaacugcgu

SEQ ID NO: 1584602 - RNA, 19 nt, Artificial Sequence
  Description of Artificial Sequence: Synthetic oligonucleotide
gcucacagugugugaaccg

SEQ ID NO: 1584603 - RNA, 19 nt, Artificial Sequence
  Description of Artificial Sequence: Synthetic oligonucleotide
guugugacgcgcccggcuc

SEQ ID NO: 1584604 - RNA, 19 nt, Artificial Sequence
  Description of Artificial Sequence: Synthetic oligonucleotide
gugugaaccggguggguga

SEQ ID NO: 1584605 - RNA, 19 nt, Artificial Sequence
  Description of Artificial Sequence: Synthetic oligonucleotide
cugagguugugacgcgccc

SEQ ID NO: 1584606 - RNA, 19 nt, Artificial Sequence
  Description of Artificial Sequence: Synthetic oligonucleotide
acugcgcucaggacuuugg

SEQ ID NO: 1584607 - RNA, 19 nt, Artificial Sequence
  Description of Artificial Sequence: Synthetic oligonucleotide
aggcgaaaaggcguggggu

SEQ ID NO: 1584608 - RNA, 19 nt, Artificial Sequence
  Description of Artificial Sequence: Synthetic oligonucleotide
agaccccaacaguaggcga

SEQ ID NO: 1584609 - RNA, 19 nt, Artificial Sequence
  Description of Artificial Sequence: Synthetic oligonucleotide
uugugacgcgcccggcuca

SEQ ID NO: 1584610 - RNA, 19 nt, Artificial Sequence
  Description of Artificial Sequence: Synthetic oligonucleotide
cucggcgaacaucuggcuc

SEQ ID NO: 1584611 - RNA, 19 nt, Artificial Sequence
  Description of Artificial Sequence: Synthetic oligonucleotide
gacugagguugugacgcgc

SEQ ID NO: 1584612 - RNA, 19 nt, Artificial Sequence
  Description of Artificial Sequence: Synthetic oligonucleotide
acccacgcccauuccacug

SEQ ID NO: 1584613 - RNA, 19 nt, Artificial Sequence
  Description of Artificial Sequence: Synthetic oligonucleotide
caggcagaccccaacagua

SEQ ID NO: 1584614 - RNA, 19 nt, Artificial Sequence
  Description of Artificial Sequence: Synthetic oligonucleotide
gauuucuugagcggcccaa

SEQ ID NO: 1584615 - RNA, 19 nt, Artificial Sequence
  Description of Artificial Sequence: Synthetic oligonucleotide
gagaacccacgcccauucc

SEQ ID NO: 1584616 - RNA, 19 nt, Artificial Sequence
  Description of Artificial Sequence: Synthetic oligonucleotide
cuugcggcgagaagcccuc

SEQ ID NO: 1584617 - RNA, 19 nt, Artificial Sequence
  Description of Artificial Sequence: Synthetic oligonucleotide
cauggucagcguacuccag

SEQ ID NO: 1584618 - RNA, 19 nt, Artificial Sequence
  Description of Artificial Sequence: Synthetic oligonucleotide
caaucugcagaugggcguc

SEQ ID NO: 1584619 - RNA, 19 nt, Artificial Sequence
  Description of Artificial Sequence: Synthetic oligonucleotide
gagccuccgaagaaggcuc

SEQ ID NO: 1584620 - RNA, 19 nt, Artificial Sequence
  Description of Artificial Sequence: Synthetic oligonucleotide
ccaggaugucucucaaugc

SEQ ID NO: 1584621 - RNA, 19 nt, Artificial Sequence
  Description of Artificial Sequence: Synthetic oligonucleotide
uacgcaggucacccuggga

SEQ ID NO: 1584622 - RNA, 19 nt, Artificial Sequence
  Description of Artificial Sequence: Synthetic oligonucleotide
guaguggggccuccagccc

SEQ ID NO: 1584623 - RNA, 19 nt, Artificial Sequence
  Description of Artificial Sequence: Synthetic oligonucleotide
cacaguacggcgggacugc

SEQ ID NO: 1584624 - RNA, 19 nt, Artificial Sequence
  Description of Artificial Sequence: Synthetic oligonucleotide
gaaagcugacugagucagc

SEQ ID NO: 1584625 - RNA, 19 nt, Artificial Sequence
  Description of Artificial Sequence: Synthetic oligonucleotide
cagcuuuccgucucgaacu

SEQ ID NO: 1584626 - RNA, 19 nt, Artificial Sequence
  Description of Artificial Sequence: Synthetic oligonucleotide
uguggcagcugcgcucuug

SEQ ID NO: 1584627 - RNA, 19 nt, Artificial Sequence
  Description of Artificial Sequence: Synthetic oligonucleotide
cugcucacagugugugaac

SEQ ID NO: 1584628 - RNA, 19 nt, Artificial Sequence
  Description of Artificial Sequence: Synthetic oligonucleotide
agccguagugccaggagcu

SEQ ID NO: 1584629 - RNA, 19 nt, Artificial Sequence
  Description of Artificial Sequence: Synthetic oligonucleotide
agaccaggaugucucucaa

SEQ ID NO: 1584630 - RNA, 19 nt, Artificial Sequence
  Description of Artificial Sequence: Synthetic oligonucleotide
aaauacgggccaggccacu

SEQ ID NO: 1584631 - RNA, 19 nt, Artificial Sequence
  Description of Artificial Sequence: Synthetic oligonucleotide
ucccucggagcuucacucu

SEQ ID NO: 1584632 - RNA, 19 nt, Artificial Sequence
  Description of Artificial Sequence: Synthetic oligonucleotide
ugaccacuugggaggacuu

SEQ ID NO: 1584633 - RNA, 19 nt, Artificial Sequence
  Description of Artificial Sequence: Synthetic oligonucleotide
gagcggcccaaucugcaga

SEQ ID NO: 1584634 - RNA, 19 nt, Artificial Sequence
  Description of Artificial Sequence: Synthetic oligonucleotide
ugucuacgcaggucacccu

SEQ ID NO: 1584635 - RNA, 19 nt, Artificial Sequence
  Description of Artificial Sequence: Synthetic oligonucleotide
ucggagcuucacucuccag

SEQ ID NO: 1584636 - RNA, 19 nt, Artificial Sequence
  Description of Artificial Sequence: Synthetic oligonucleotide
agcguacuccaggcagacc

SEQ ID NO: 1584637 - RNA, 19 nt, Artificial Sequence
  Description of Artificial Sequence: Synthetic oligonucleotide
agcccucggccaugacacc

SEQ ID NO: 1584638 - RNA, 19 nt, Artificial Sequence
  Description of Artificial Sequence: Synthetic oligonucleotide
uguggccucggcgaacauc

SEQ ID NO: 1584639 - RNA, 19 nt, Artificial Sequence
  Description of Artificial Sequence: Synthetic oligonucleotide
ggugggugacuccggguag

SEQ ID NO: 1584640 - RNA, 19 nt, Artificial Sequence
  Description of Artificial Sequence: Synthetic oligonucleotide
cugcgcaaugcuggcaccc

SEQ ID NO: 1584641 - RNA, 19 nt, Artificial Sequence
  Description of Artificial Sequence: Synthetic oligonucleotide
caaugcuggcacccaguuc

SEQ ID NO: 1584642 - RNA, 19 nt, Artificial Sequence
  Description of Artificial Sequence: Synthetic oligonucleotide
gaccccaacaguaggcgaa

SEQ ID NO: 1584643 - RNA, 19 nt, Artificial Sequence
  Description of Artificial Sequence: Synthetic oligonucleotide
agcggcccaaucugcagau

SEQ ID NO: 1584644 - RNA, 19 nt, Artificial Sequence
  Description of Artificial Sequence: Synthetic oligonucleotide
agaugggcgucuacgcucu

SEQ ID NO: 1584645 - RNA, 19 nt, Artificial Sequence
  Description of Artificial Sequence: Synthetic oligonucleotide
uugggaggacuuggugaag

SEQ ID NO: 1584646 - RNA, 19 nt, Artificial Sequence
  Description of Artificial Sequence: Synthetic oligonucleotide
gaaccgggugggugacucc

SEQ ID NO: 1584647 - RNA, 19 nt, Artificial Sequence
  Description of Artificial Sequence: Synthetic oligonucleotide
aggcagaccccaacaguag

SEQ ID NO: 1584648 - RNA, 19 nt, Artificial Sequence
  Description of Artificial Sequence: Synthetic oligonucleotide
gcacgauuucuugagcggc

SEQ ID NO: 1584649 - RNA, 19 nt, Artificial Sequence
  Description of Artificial Sequence: Synthetic oligonucleotide
gaaccugacugagguugug

SEQ ID NO: 1584650 - RNA, 19 nt, Artificial Sequence
  Description of Artificial Sequence: Synthetic oligonucleotide
gaacugcguagaaggccag

SEQ ID NO: 1584651 - RNA, 19 nt, Artificial Sequence
  Description of Artificial Sequence: Synthetic oligonucleotide
cugggagcguccuaacaaa

SEQ ID NO: 1584652 - RNA, 19 nt, Artificial Sequence
  Description of Artificial Sequence: Synthetic oligonucleotide
ggcgcccuccccuagcacc

SEQ ID NO: 1584653 - RNA, 19 nt, Artificial Sequence
  Description of Artificial Sequence: Synthetic oligonucleotide
ugugacgcgcccggcucag

SEQ ID NO: 1584654 - RNA, 19 nt, Artificial Sequence
  Description of Artificial Sequence: Synthetic oligonucleotide
cuccgaagaaggcucagcu

SEQ ID NO: 1584655 - RNA, 19 nt, Artificial Sequence
  Description of Artificial Sequence: Synthetic oligonucleotide
cugacugagucagcuucug

SEQ ID NO: 1584656 - RNA, 19 nt, Artificial Sequence
  Description of Artificial Sequence: Synthetic oligonucleotide
augcggucuuccacugcgc

SEQ ID NO: 1584657 - RNA, 19 nt, Artificial Sequence
  Description of Artificial Sequence: Synthetic oligonucleotide
acaguacggcgggacugcg

SEQ ID NO: 1584658 - RNA, 19 nt, Artificial Sequence
  Description of Artificial Sequence: Synthetic oligonucleotide
cucggccaugacacccacg

SEQ ID NO: 1584659 - RNA, 19 nt, Artificial Sequence
  Description of Artificial Sequence: Synthetic oligonucleotide
uggagcgcacgcuccugcu

SEQ ID NO: 1584660 - RNA, 19 nt, Artificial Sequence
  Description of Artificial Sequence: Synthetic oligonucleotide
ccaaguccacgauguaggc

SEQ ID NO: 1584661 - RNA, 19 nt, Artificial Sequence
  Description of Artificial Sequence: Synthetic oligonucleotide
caguacggcgggacugcgc

SEQ ID NO: 1584662 - RNA, 19 nt, Artificial Sequence
  Description of Artificial Sequence: Synthetic oligonucleotide
gcauggucagcguacucca

SEQ ID NO: 1584663 - RNA, 19 nt, Artificial Sequence
  Description of Artificial Sequence: Synthetic oligonucleotide
gcgucuacgcucuccagga

SEQ ID NO: 1584664 - RNA, 19 nt, Artificial Sequence
  Description of Artificial Sequence: Synthetic oligonucleotide
augggacauaauacccucu

SEQ ID NO: 1584665 - RNA, 19 nt, Artificial Sequence
  Description of Artificial Sequence: Synthetic oligonucleotide
gugguugaagaguccugaa

SEQ ID NO: 1584666 - RNA, 19 nt, Artificial Sequence
  Description of Artificial Sequence: Synthetic oligonucleotide
agguugugacgcgcccggc

SEQ ID NO: 1584667 - RNA, 19 nt, Artificial Sequence
  Description of Artificial Sequence: Synthetic oligonucleotide
uggugcucucucccaggaa

SEQ ID NO: 1584668 - RNA, 19 nt, Artificial Sequence
  Description of Artificial Sequence: Synthetic oligonucleotide
guagggcucuugcggcgag

SEQ ID NO: 1584669 - RNA, 19 nt, Artificial Sequence
  Description of Artificial Sequence: Synthetic oligonucleotide
cuacgcuguuccucuuguc

SEQ ID NO: 1584670 - RNA, 19 nt, Artificial Sequence
  Description of Artificial Sequence: Synthetic oligonucleotide
aggucacccugggagcguc

SEQ ID NO: 1584671 - RNA, 19 nt, Artificial Sequence
  Description of Artificial Sequence: Synthetic oligonucleotide
ggguaguggggccuccagc

SEQ ID NO: 1584672 - RNA, 19 nt, Artificial Sequence
  Description of Artificial Sequence: Synthetic oligonucleotide
gcgaaaaggcgugggguag

SEQ ID NO: 1584673 - RNA, 19 nt, Artificial Sequence
  Description of Artificial Sequence: Synthetic oligonucleotide
cggcccaaucugcagaugg

SEQ ID NO: 1584674 - RNA, 19 nt, Artificial Sequence
  Description of Artificial Sequence: Synthetic oligonucleotide
gggacugcgcaaugcuggc

SEQ ID NO: 1584675 - RNA, 19 nt, Artificial Sequence
  Description of Artificial Sequence: Synthetic oligonucleotide
acuuguccgcugugucacu

SEQ ID NO: 1584676 - RNA, 19 nt, Artificial Sequence
  Description of Artificial Sequence: Synthetic oligonucleotide
cgaacugcguagaaggcca

SEQ ID NO: 1584677 - RNA, 19 nt, Artificial Sequence
  Description of Artificial Sequence: Synthetic oligonucleotide
guacggauaugcacgauuu

SEQ ID NO: 1584678 - RNA, 19 nt, Artificial Sequence
  Description of Artificial Sequence: Synthetic oligonucleotide
cuccggguaguugauggga

SEQ ID NO: 1584679 - RNA, 19 nt, Artificial Sequence
  Description of Artificial Sequence: Synthetic oligonucleotide
cucggagcuucacucucca

SEQ ID NO: 1584680 - RNA, 19 nt, Artificial Sequence
  Description of Artificial Sequence: Synthetic oligonucleotide
ggcuacgcuguuccucuug

SEQ ID NO: 1584681 - RNA, 19 nt, Artificial Sequence
  Description of Artificial Sequence: Synthetic oligonucleotide
gcucuugcggcgagaagcc

SEQ ID NO: 1584682 - RNA, 19 nt, Artificial Sequence
  Description of Artificial Sequence: Synthetic oligonucleotide
agacagcacgagugcgcgu

SEQ ID NO: 1584683 - RNA, 19 nt, Artificial Sequence
  Description of Artificial Sequence: Synthetic oligonucleotide
cacgcccauuccacugcag

SEQ ID NO: 1584684 - RNA, 19 nt, Artificial Sequence
  Description of Artificial Sequence: Synthetic oligonucleotide
ccucgaugaaccccagcac

SEQ ID NO: 1584685 - RNA, 19 nt, Artificial Sequence
  Description of Artificial Sequence: Synthetic oligonucleotide
agggcauggucagcguacu

SEQ ID NO: 1584686 - RNA, 19 nt, Artificial Sequence
  Description of Artificial Sequence: Synthetic oligonucleotide
ggcgaaaaggcguggggua

SEQ ID NO: 1584687 - RNA, 19 nt, Artificial Sequence
  Description of Artificial Sequence: Synthetic oligonucleotide
cgauguaggcaaacuugag

SEQ ID NO: 1584688 - RNA, 19 nt, Artificial Sequence
  Description of Artificial Sequence: Synthetic oligonucleotide
cauccucgucacugcccag

SEQ ID NO: 1584689 - RNA, 19 nt, Artificial Sequence
  Description of Artificial Sequence: Synthetic oligonucleotide
gagugcgcguuccggccca

SEQ ID NO: 1584690 - RNA, 19 nt, Artificial Sequence
  Description of Artificial Sequence: Synthetic oligonucleotide
cucuugcggcgagaagccc

SEQ ID NO: 1584691 - RNA, 19 nt, Artificial Sequence
  Description of Artificial Sequence: Synthetic oligonucleotide
cuucugagccgagcuucug

SEQ ID NO: 1584692 - RNA, 19 nt, Artificial Sequence
  Description of Artificial Sequence: Synthetic oligonucleotide
ccugggagcguccuaacaa

SEQ ID NO: 1584693 - RNA, 19 nt, Artificial Sequence
  Description of Artificial Sequence: Synthetic oligonucleotide
acggcgggacugcgcaaug

SEQ ID NO: 1584694 - RNA, 19 nt, Artificial Sequence
  Description of Artificial Sequence: Synthetic oligonucleotide
gcaagaacuuguccgcugu

SEQ ID NO: 1584695 - RNA, 19 nt, Artificial Sequence
  Description of Artificial Sequence: Synthetic oligonucleotide
gacagcacgagugcgcguu

SEQ ID NO: 1584696 - RNA, 19 nt, Artificial Sequence
  Description of Artificial Sequence: Synthetic oligonucleotide
ugggguaguggggccucca

SEQ ID NO: 1584697 - RNA, 19 nt, Artificial Sequence
  Description of Artificial Sequence: Synthetic oligonucleotide
uugcggcgagaagcccucg

SEQ ID NO: 1584698 - RNA, 19 nt, Artificial Sequence
  Description of Artificial Sequence: Synthetic oligonucleotide
uagucccucggagcuucac

SEQ ID NO: 1584699 - RNA, 19 nt, Artificial Sequence
  Description of Artificial Sequence: Synthetic oligonucleotide
ucugaccacuugggaggac

SEQ ID NO: 1584700 - RNA, 19 nt, Artificial Sequence
  Description of Artificial Sequence: Synthetic oligonucleotide
gcacgagugcgcguuccgg

SEQ ID NO: 1584701 - RNA, 19 nt, Artificial Sequence
  Description of Artificial Sequence: Synthetic oligonucleotide
gggugggugacuccgggua

SEQ ID NO: 1584702 - RNA, 19 nt, Artificial Sequence
  Description of Artificial Sequence: Synthetic oligonucleotide
ccagccguagugccaggag

SEQ ID NO: 1584703 - RNA, 19 nt, Artificial Sequence
  Description of Artificial Sequence: Synthetic oligonucleotide
cagggcgcccuccccuagc

SEQ ID NO: 1584704 - RNA, 19 nt, Artificial Sequence
  Description of Artificial Sequence: Synthetic oligonucleotide
ggacuuggugaagcugagc

SEQ ID NO: 1584705 - RNA, 19 nt, Artificial Sequence
  Description of Artificial Sequence: Synthetic oligonucleotide
cacugcgcucaggacuuug

SEQ ID NO: 1584706 - RNA, 19 nt, Artificial Sequence
  Description of Artificial Sequence: Synthetic oligonucleotide
gccaugacacccacgcuga

SEQ ID NO: 1584707 - RNA, 19 nt, Artificial Sequence
  Description of Artificial Sequence: Synthetic oligonucleotide
gcgcaaugcuggcacccag

SEQ ID NO: 1584708 - RNA, 19 nt, Artificial Sequence
  Description of Artificial Sequence: Synthetic oligonucleotide
ggcuugagccugugguuga

SEQ ID NO: 1584709 - RNA, 19 nt, Artificial Sequence
  Description of Artificial Sequence: Synthetic oligonucleotide
cguacuccaggcagacccc

SEQ ID NO: 1584710 - RNA, 19 nt, Artificial Sequence
  Description of Artificial Sequence: Synthetic oligonucleotide
guagugccaggagcuccug

SEQ ID NO: 1584711 - RNA, 19 nt, Artificial Sequence
  Description of Artificial Sequence: Synthetic oligonucleotide
cagcugcgcucuugaugag

SEQ ID NO: 1584712 - RNA, 19 nt, Artificial Sequence
  Description of Artificial Sequence: Synthetic oligonucleotide
cucugaccacuugggagga

SEQ ID NO: 1584713 - RNA, 19 nt, Artificial Sequence
  Description of Artificial Sequence: Synthetic oligonucleotide
ugggugacuccggguaguu

SEQ ID NO: 1584714 - RNA, 19 nt, Artificial Sequence
  Description of Artificial Sequence: Synthetic oligonucleotide
ccucuugacaccuuugguu

SEQ ID NO: 1584715 - RNA, 19 nt, Artificial Sequence
  Description of Artificial Sequence: Synthetic oligonucleotide
ggaggcuuugagccuccga

SEQ ID NO: 1584716 - RNA, 19 nt, Artificial Sequence
  Description of Artificial Sequence: Synthetic oligonucleotide
ccuccgaagaaggcucagc

SEQ ID NO: 1584717 - RNA, 19 nt, Artificial Sequence
  Description of Artificial Sequence: Synthetic oligonucleotide
agggccagccguagugcca

SEQ ID NO: 1584718 - RNA, 19 nt, Artificial Sequence
  Description of Artificial Sequence: Synthetic oligonucleotide
ggccgcaccccuccuccag

SEQ ID NO: 1584719 - RNA, 19 nt, Artificial Sequence
  Description of Artificial Sequence: Synthetic oligonucleotide
ccacgcugacccauccuuc

SEQ ID NO: 1584720 - RNA, 19 nt, Artificial Sequence
  Description of Artificial Sequence: Synthetic oligonucleotide
gguugugacgcgcccggcu

SEQ ID NO: 1584721 - RNA, 19 nt, Artificial Sequence
  Description of Artificial Sequence: Synthetic oligonucleotide
gcuuuccgucucgaacugc

SEQ ID NO: 1584722 - RNA, 19 nt, Artificial Sequence
  Description of Artificial Sequence: Synthetic oligonucleotide
gcguccuaacaaaguggcc

SEQ ID NO: 1584723 - RNA, 19 nt, Artificial Sequence
  Description of Artificial Sequence: Synthetic oligonucleotide
gaugggcgucuacgcucuc

SEQ ID NO: 1584724 - RNA, 19 nt, Artificial Sequence
  Description of Artificial Sequence: Synthetic oligonucleotide
ggcggcuacgcuguuccuc

SEQ ID NO: 1584725 - RNA, 19 nt, Artificial Sequence
  Description of Artificial Sequence: Synthetic oligonucleotide
gcggucuuccacugcgcuc

SEQ ID NO: 1584726 - RNA, 19 nt, Artificial Sequence
  Description of Artificial Sequence: Synthetic oligonucleotide
ccauuccacugcagacagc

SEQ ID NO: 1584727 - RNA, 19 nt, Artificial Sequence
  Description of Artificial Sequence: Synthetic oligonucleotide
gcggcuacgcuguuccucu

SEQ ID NO: 1584728 - RNA, 19 nt, Artificial Sequence
  Description of Artificial Sequence: Synthetic oligonucleotide
gcgggacugcgcaaugcug

SEQ ID NO: 1584729 - RNA, 19 nt, Artificial Sequence
  Description of Artificial Sequence: Synthetic oligonucleotide
cccucggagcuucacucuc

SEQ ID NO: 1584730 - RNA, 19 nt, Artificial Sequence
  Description of Artificial Sequence: Synthetic oligonucleotide
gggcucuugcggcgagaag

SEQ ID NO: 1584731 - RNA, 19 nt, Artificial Sequence
  Description of Artificial Sequence: Synthetic oligonucleotide
aggcggcuacgcuguuccu

SEQ ID NO: 1584732 - RNA, 19 nt, Artificial Sequence
  Description of Artificial Sequence: Synthetic oligonucleotide
caggcuugagccugugguu

SEQ ID NO: 1584733 - RNA, 19 nt, Artificial Sequence
  Description of Artificial Sequence: Synthetic oligonucleotide
ggcgggacugcgcaaugcu

SEQ ID NO: 1584734 - RNA, 19 nt, Artificial Sequence
  Description of Artificial Sequence: Synthetic oligonucleotide
cuacgcucuccaggaagaa

SEQ ID NO: 1584735 - RNA, 19 nt, Artificial Sequence
  Description of Artificial Sequence: Synthetic oligonucleotide
ggauguggccucggcgaac

SEQ ID NO: 1584736 - RNA, 19 nt, Artificial Sequence
  Description of Artificial Sequence: Synthetic oligonucleotide
cugcaagaacuuguccgcu

SEQ ID NO: 1584737 - RNA, 19 nt, Artificial Sequence
  Description of Artificial Sequence: Synthetic oligonucleotide
gggugacuccggguaguug

SEQ ID NO: 1584738 - RNA, 19 nt, Artificial Sequence
  Description of Artificial Sequence: Synthetic oligonucleotide
gcgcucuugaugagggcca

SEQ ID NO: 1584739 - RNA, 19 nt, Artificial Sequence
  Description of Artificial Sequence: Synthetic oligonucleotide
auagucccucggagcuuca

SEQ ID NO: 1584740 - RNA, 19 nt, Artificial Sequence
  Description of Artificial Sequence: Synthetic oligonucleotide
ccggguaguugaugggaca

SEQ ID NO: 1584741 - RNA, 19 nt, Artificial Sequence
  Description of Artificial Sequence: Synthetic oligonucleotide
gggagcguccuaacaaagu

SEQ ID NO: 1584742 - RNA, 19 nt, Artificial Sequence
  Description of Artificial Sequence: Synthetic oligonucleotide
gcaaugcuggcacccaguu

SEQ ID NO: 1584743 - RNA, 19 nt, Artificial Sequence
  Description of Artificial Sequence: Synthetic oligonucleotide
ccucgucacugcccagccc

SEQ ID NO: 1584744 - RNA, 19 nt, Artificial Sequence
  Description of Artificial Sequence: Synthetic oligonucleotide
auguggccucggcgaacau

SEQ ID NO: 1584745 - RNA, 19 nt, Artificial Sequence
  Description of Artificial Sequence: Synthetic oligonucleotide
cgagugcgcguuccggccc

SEQ ID NO: 1584746 - RNA, 19 nt, Artificial Sequence
  Description of Artificial Sequence: Synthetic oligonucleotide
gugacgcgcccggcucagg

SEQ ID NO: 1584747 - RNA, 19 nt, Artificial Sequence
  Description of Artificial Sequence: Synthetic oligonucleotide
guacggcgggacugcgcaa

SEQ ID NO: 1584748 - RNA, 19 nt, Artificial Sequence
  Description of Artificial Sequence: Synthetic oligonucleotide
gccuccgaagaaggcucag

SEQ ID NO: 1584749 - RNA, 19 nt, Artificial Sequence
  Description of Artificial Sequence: Synthetic oligonucleotide
gggcauggucagcguacuc

SEQ ID NO: 1584750 - RNA, 19 nt, Artificial Sequence
  Description of Artificial Sequence: Synthetic oligonucleotide
ggaaccugacugagguugu

SEQ ID NO: 1584751 - RNA, 19 nt, Artificial Sequence
  Description of Artificial Sequence: Synthetic oligonucleotide
ggguaguugaugggacaua

SEQ ID NO: 1584752 - RNA, 19 nt, Artificial Sequence
  Description of Artificial Sequence: Synthetic oligonucleotide
gcucaggcggcuacgcugu

SEQ ID NO: 1584753 - RNA, 19 nt, Artificial Sequence
  Description of Artificial Sequence: Synthetic oligonucleotide
cccugggagcguccuaaca

SEQ ID NO: 1584754 - RNA, 19 nt, Artificial Sequence
  Description of Artificial Sequence: Synthetic oligonucleotide
cccucuugacaccuuuggu

SEQ ID NO: 1584755 - RNA, 19 nt, Artificial Sequence
  Description of Artificial Sequence: Synthetic oligonucleotide
gggcaccacugcggcgugg

SEQ ID NO: 1584756 - RNA, 19 nt, Artificial Sequence
  Description of Artificial Sequence: Synthetic oligonucleotide
ggcgaacaucuggcucacc

SEQ ID NO: 1584757 - RNA, 19 nt, Artificial Sequence
  Description of Artificial Sequence: Synthetic oligonucleotide
gugugugaaccgggugggu

SEQ ID NO: 1584758 - RNA, 19 nt, Artificial Sequence
  Description of Artificial Sequence: Synthetic oligonucleotide
ccagggcgcccuccccuag

SEQ ID NO: 1584759 - RNA, 19 nt, Artificial Sequence
  Description of Artificial Sequence: Synthetic oligonucleotide
cgauuucuugagcggccca

SEQ ID NO: 1584760 - RNA, 19 nt, Artificial Sequence
  Description of Artificial Sequence: Synthetic oligonucleotide
guccagggccgcaccccuc

SEQ ID NO: 1584761 - RNA, 19 nt, Artificial Sequence
  Description of Artificial Sequence: Synthetic oligonucleotide
ccgucucgaacugcguaga

SEQ ID NO: 1584762 - RNA, 19 nt, Artificial Sequence
  Description of Artificial Sequence: Synthetic oligonucleotide
cagagaacccacgcccauu

SEQ ID NO: 1584763 - RNA, 19 nt, Artificial Sequence
  Description of Artificial Sequence: Synthetic oligonucleotide
ccacgcccauuccacugca

SEQ ID NO: 1584764 - RNA, 19 nt, Artificial Sequence
  Description of Artificial Sequence: Synthetic oligonucleotide
ccacuugggaggacuuggu

SEQ ID NO: 1584765 - RNA, 19 nt, Artificial Sequence
  Description of Artificial Sequence: Synthetic oligonucleotide
cacugcggcguggccugga

SEQ ID NO: 1584766 - RNA, 19 nt, Artificial Sequence
  Description of Artificial Sequence: Synthetic oligonucleotide
cccacgcugacccauccuu

SEQ ID NO: 1584767 - RNA, 19 nt, Artificial Sequence
  Description of Artificial Sequence: Synthetic oligonucleotide
cgcaccccuccuccagggc

SEQ ID NO: 1584768 - RNA, 19 nt, Artificial Sequence
  Description of Artificial Sequence: Synthetic oligonucleotide
gugaaccgggugggugacu

SEQ ID NO: 1584769 - RNA, 19 nt, Artificial Sequence
  Description of Artificial Sequence: Synthetic oligonucleotide
caguacggauaugcacgau

SEQ ID NO: 1584770 - RNA, 19 nt, Artificial Sequence
  Description of Artificial Sequence: Synthetic oligonucleotide
ccucggcgaacaucuggcu

SEQ ID NO: 1584771 - RNA, 19 nt, Artificial Sequence
  Description of Artificial Sequence: Synthetic oligonucleotide
cguagggcucuugcggcga

SEQ ID NO: 1584772 - RNA, 19 nt, Artificial Sequence
  Description of Artificial Sequence: Synthetic oligonucleotide
cggcgaacaucuggcucac

SEQ ID NO: 1584773 - RNA, 19 nt, Artificial Sequence
  Description of Artificial Sequence: Synthetic oligonucleotide
ggccccggucguagggcuc

SEQ ID NO: 1584774 - RNA, 19 nt, Artificial Sequence
  Description of Artificial Sequence: Synthetic oligonucleotide
cccggucguagggcucuug

SEQ ID NO: 1584775 - RNA, 19 nt, Artificial Sequence
  Description of Artificial Sequence: Synthetic oligonucleotide
ccgagcuucugcagcucau

SEQ ID NO: 1584776 - RNA, 19 nt, Artificial Sequence
  Description of Artificial Sequence: Synthetic oligonucleotide
gccccggucguagggcucu

SEQ ID NO: 1584777 - RNA, 19 nt, Artificial Sequence
  Description of Artificial Sequence: Synthetic oligonucleotide
cggguaguugaugggacau

SEQ ID NO: 1584778 - RNA, 19 nt, Artificial Sequence
  Description of Artificial Sequence: Synthetic oligonucleotide
cgaaaaggcgugggguagu

SEQ ID NO: 1584779 - RNA, 19 nt, Artificial Sequence
  Description of Artificial Sequence: Synthetic oligonucleotide
gggccacaguacggcggga

SEQ ID NO: 1584780 - RNA, 19 nt, Artificial Sequence
  Description of Artificial Sequence: Synthetic oligonucleotide
cucaggcggcuacgcuguu

SEQ ID NO: 1584781 - RNA, 19 nt, Artificial Sequence
  Description of Artificial Sequence: Synthetic oligonucleotide
ggcguggccuggaggcuuu

SEQ ID NO: 1584782 - RNA, 19 nt, Artificial Sequence
  Description of Artificial Sequence: Synthetic oligonucleotide
gcggcguggccuggaggcu

SEQ ID NO: 1584783 - RNA, 19 nt, Artificial Sequence
  Description of Artificial Sequence: Synthetic oligonucleotide
cggccccggucguagggcu

SEQ ID NO: 1584784 - RNA, 19 nt, Artificial Sequence
  Description of Artificial Sequence: Synthetic oligonucleotide
cggcuacgcuguuccucuu

SEQ ID NO: 1584785 - RNA, 19 nt, Artificial Sequence
  Description of Artificial Sequence: Synthetic oligonucleotide
ccacugcgcucaggacuuu

SEQ ID NO: 1584786 - RNA, 19 nt, Artificial Sequence
  Description of Artificial Sequence: Synthetic oligonucleotide
aauacauugaagcuauagg

SEQ ID NO: 1584787 - RNA, 19 nt, Artificial Sequence
  Description of Artificial Sequence: Synthetic oligonucleotide
uguauaaucagccauuccu

SEQ ID NO: 1584788 - RNA, 19 nt, Artificial Sequence
  Description of Artificial Sequence: Synthetic oligonucleotide
uaugucaugaacaaacuca

SEQ ID NO: 1584789 - RNA, 19 nt, Artificial Sequence
  Description of Artificial Sequence: Synthetic oligonucleotide
uauugcaaagaauacauug

SEQ ID NO: 1584790 - RNA, 19 nt, Artificial Sequence
  Description of Artificial Sequence: Synthetic oligonucleotide
gaaugauggacucuguucg

SEQ ID NO: 1584791 - RNA, 19 nt, Artificial Sequence
  Description of Artificial Sequence: Synthetic oligonucleotide
uuuaccgggaccuugaaga

SEQ ID NO: 1584792 - RNA, 19 nt, Artificial Sequence
  Description of Artificial Sequence: Synthetic oligonucleotide
caagucguaguaaagagcc

SEQ ID NO: 1584793 - RNA, 19 nt, Artificial Sequence
  Description of Artificial Sequence: Synthetic oligonucleotide
uuugccuaugaagagaagg

SEQ ID NO: 1584794 - RNA, 19 nt, Artificial Sequence
  Description of Artificial Sequence: Synthetic oligonucleotide
acuugggugagcuugacag

SEQ ID NO: 1584795 - RNA, 19 nt, Artificial Sequence
  Description of Artificial Sequence: Synthetic oligonucleotide
cucucaaacacaauucugg

SEQ ID NO: 1584796 - RNA, 19 nt, Artificial Sequence
  Description of Artificial Sequence: Synthetic oligonucleotide
uugaguagaacaucaagug

SEQ ID NO: 1584797 - RNA, 19 nt, Artificial Sequence
  Description of Artificial Sequence: Synthetic oligonucleotide
aggaguuccuuguaggugc

SEQ ID NO: 1584798 - RNA, 19 nt, Artificial Sequence
  Description of Artificial Sequence: Synthetic oligonucleotide
aucuaugucaugaacaaac

SEQ ID NO: 1584799 - RNA, 19 nt, Artificial Sequence
  Description of Artificial Sequence: Synthetic oligonucleotide
ugaaguaagccacaccgag

SEQ ID NO: 1584800 - RNA, 19 nt, Artificial Sequence
  Description of Artificial Sequence: Synthetic oligonucleotide
uacauugaagcuauagggc

SEQ ID NO: 1584801 - RNA, 19 nt, Artificial Sequence
  Description of Artificial Sequence: Synthetic oligonucleotide
ucuaaugggaaggugaggc

SEQ ID NO: 1584802 - RNA, 19 nt, Artificial Sequence
  Description of Artificial Sequence: Synthetic oligonucleotide
aaguaagccacaccgagga

SEQ ID NO: 1584803 - RNA, 19 nt, Artificial Sequence
  Description of Artificial Sequence: Synthetic oligonucleotide
aauguauaaucagccauuc

SEQ ID NO: 1584804 - RNA, 19 nt, Artificial Sequence
  Description of Artificial Sequence: Synthetic oligonucleotide
uauagggcagccuuccugg

SEQ ID NO: 1584805 - RNA, 19 nt, Artificial Sequence
  Description of Artificial Sequence: Synthetic oligonucleotide
aggauucugggccuggucc

SEQ ID NO: 1584806 - RNA, 19 nt, Artificial Sequence
  Description of Artificial Sequence: Synthetic oligonucleotide
ugaguagaacaucaagugc

SEQ ID NO: 1584807 - RNA, 19 nt, Artificial Sequence
  Description of Artificial Sequence: Synthetic oligonucleotide
ucgaucuaugucaugaaca

SEQ ID NO: 1584808 - RNA, 19 nt, Artificial Sequence
  Description of Artificial Sequence: Synthetic oligonucleotide
ucgggugacucaaacaagg

SEQ ID NO: 1584809 - RNA, 19 nt, Artificial Sequence
  Description of Artificial Sequence: Synthetic oligonucleotide
cuggaauguauaaucagcc

SEQ ID NO: 1584810 - RNA, 19 nt, Artificial Sequence
  Description of Artificial Sequence: Synthetic oligonucleotide
uaaucagccauuccucuag

SEQ ID NO: 1584811 - RNA, 19 nt, Artificial Sequence
  Description of Artificial Sequence: Synthetic oligonucleotide
aagguaaaagcucuuuuau

SEQ ID NO: 1584812 - RNA, 19 nt, Artificial Sequence
  Description of Artificial Sequence: Synthetic oligonucleotide
ugauagucuaaugggaagg

SEQ ID NO: 1584813 - RNA, 19 nt, Artificial Sequence
  Description of Artificial Sequence: Synthetic oligonucleotide
aucaagucguaguaaagag

SEQ ID NO: 1584814 - RNA, 19 nt, Artificial Sequence
  Description of Artificial Sequence: Synthetic oligonucleotide
uagucuaaugggaagguga

SEQ ID NO: 1584815 - RNA, 19 nt, Artificial Sequence
  Description of Artificial Sequence: Synthetic oligonucleotide
aaagcuggaucuuacucga

SEQ ID NO: 1584816 - RNA, 19 nt, Artificial Sequence
  Description of Artificial Sequence: Synthetic oligonucleotide
aucaagugccccuaggguc

SEQ ID NO: 1584817 - RNA, 19 nt, Artificial Sequence
  Description of Artificial Sequence: Synthetic oligonucleotide
cagaguccaagccauaucg

SEQ ID NO: 1584818 - RNA, 19 nt, Artificial Sequence
  Description of Artificial Sequence: Synthetic oligonucleotide
ucuuucucgagucaaacuu

SEQ ID NO: 1584819 - RNA, 19 nt, Artificial Sequence
  Description of Artificial Sequence: Synthetic oligonucleotide
gaauacauugaagcuauag

SEQ ID NO: 1584820 - RNA, 19 nt, Artificial Sequence
  Description of Artificial Sequence: Synthetic oligonucleotide
caggauuuugccuaugaag

SEQ ID NO: 1584821 - RNA, 19 nt, Artificial Sequence
  Description of Artificial Sequence: Synthetic oligonucleotide
ucaagucguaguaaagagc

SEQ ID NO: 1584822 - RNA, 19 nt, Artificial Sequence
  Description of Artificial Sequence: Synthetic oligonucleotide
agaacguuggcaguugggc

SEQ ID NO: 1584823 - RNA, 19 nt, Artificial Sequence
  Description of Artificial Sequence: Synthetic oligonucleotide
uuuccuggaggucuauccg

SEQ ID NO: 1584824 - RNA, 19 nt, Artificial Sequence
  Description of Artificial Sequence: Synthetic oligonucleotide
uuguuaauuuccuggaggu

SEQ ID NO: 1584825 - RNA, 19 nt, Artificial Sequence
  Description of Artificial Sequence: Synthetic oligonucleotide
acauugaagcuauagggca

SEQ ID NO: 1584826 - RNA, 19 nt, Artificial Sequence
  Description of Artificial Sequence: Synthetic oligonucleotide
uguagaccgagcaaguuuc

SEQ ID NO: 1584827 - RNA, 19 nt, Artificial Sequence
  Description of Artificial Sequence: Synthetic oligonucleotide
acaucaagugccccuaggg

SEQ ID NO: 1584828 - RNA, 19 nt, Artificial Sequence
  Description of Artificial Sequence: Synthetic oligonucleotide
ugaaugauggacucuguuc

SEQ ID NO: 1584829 - RNA, 19 nt, Artificial Sequence
  Description of Artificial Sequence: Synthetic oligonucleotide
guaaaagcucuuuuauugc

SEQ ID NO: 1584830 - RNA, 19 nt, Artificial Sequence
  Description of Artificial Sequence: Synthetic oligonucleotide
aacguuggcaguugggcug

SEQ ID NO: 1584831 - RNA, 19 nt, Artificial Sequence
  Description of Artificial Sequence: Synthetic oligonucleotide
auugaguagaacaucaagu

SEQ ID NO: 1584832 - RNA, 19 nt, Artificial Sequence
  Description of Artificial Sequence: Synthetic oligonucleotide
uucucucaaacacaauucu

SEQ ID NO: 1584833 - RNA, 19 nt, Artificial Sequence
  Description of Artificial Sequence: Synthetic oligonucleotide
gagcacauugaguagaaca

SEQ ID NO: 1584834 - RNA, 19 nt, Artificial Sequence
  Description of Artificial Sequence: Synthetic oligonucleotide
ugaucaagucguaguaaag

SEQ ID NO: 1584835 - RNA, 19 nt, Artificial Sequence
  Description of Artificial Sequence: Synthetic oligonucleotide
cauugaguagaacaucaag

SEQ ID NO: 1584836 - RNA, 19 nt, Artificial Sequence
  Description of Artificial Sequence: Synthetic oligonucleotide
ucaagugccccuagggucc

SEQ ID NO: 1584837 - RNA, 19 nt, Artificial Sequence
  Description of Artificial Sequence: Synthetic oligonucleotide
agucguaguaaagagcccg

SEQ ID NO: 1584838 - RNA, 19 nt, Artificial Sequence
  Description of Artificial Sequence: Synthetic oligonucleotide
ucucucaaacacaauucug

SEQ ID NO: 1584839 - RNA, 19 nt, Artificial Sequence
  Description of Artificial Sequence: Synthetic oligonucleotide
ucuggguuaccgucaaggg

SEQ ID NO: 1584840 - RNA, 19 nt, Artificial Sequence
  Description of Artificial Sequence: Synthetic oligonucleotide
uuucucgagucaaacuuug

SEQ ID NO: 1584841 - RNA, 19 nt, Artificial Sequence
  Description of Artificial Sequence: Synthetic oligonucleotide
agaagugaggcucuccucu

SEQ ID NO: 1584842 - RNA, 19 nt, Artificial Sequence
  Description of Artificial Sequence: Synthetic oligonucleotide
ucagaagugaggcucuccu

SEQ ID NO: 1584843 - RNA, 19 nt, Artificial Sequence
  Description of Artificial Sequence: Synthetic oligonucleotide
caaacuuugucacccacug

SEQ ID NO: 1584844 - RNA, 19 nt, Artificial Sequence
  Description of Artificial Sequence: Synthetic oligonucleotide
ucgagucaaacuuugucac

SEQ ID NO: 1584845 - RNA, 19 nt, Artificial Sequence
  Description of Artificial Sequence: Synthetic oligonucleotide
ccucauuccacucaaaagc

SEQ ID NO: 1584846 - RNA, 19 nt, Artificial Sequence
  Description of Artificial Sequence: Synthetic oligonucleotide
aguagaacaucaagugccc

SEQ ID NO: 1584847 - RNA, 19 nt, Artificial Sequence
  Description of Artificial Sequence: Synthetic oligonucleotide
guaguaaagagcccgguga

SEQ ID NO: 1584848 - RNA, 19 nt, Artificial Sequence
  Description of Artificial Sequence: Synthetic oligonucleotide
uaacuuccccuucauagcu

SEQ ID NO: 1584849 - RNA, 19 nt, Artificial Sequence
  Description of Artificial Sequence: Synthetic oligonucleotide
aguuguuaauuuccuggag

SEQ ID NO: 1584850 - RNA, 19 nt, Artificial Sequence
  Description of Artificial Sequence: Synthetic oligonucleotide
caguuuuccugucaggggc

SEQ ID NO: 1584851 - RNA, 19 nt, Artificial Sequence
  Description of Artificial Sequence: Synthetic oligonucleotide
ucaaacuuugucacccacu

SEQ ID NO: 1584852 - RNA, 19 nt, Artificial Sequence
  Description of Artificial Sequence: Synthetic oligonucleotide
uuaaggugauagucuaaug

SEQ ID NO: 1584853 - RNA, 19 nt, Artificial Sequence
  Description of Artificial Sequence: Synthetic oligonucleotide
agcuugacagguuugccug

SEQ ID NO: 1584854 - RNA, 19 nt, Artificial Sequence
  Description of Artificial Sequence: Synthetic oligonucleotide
uggaauguauaaucagcca

SEQ ID NO: 1584855 - RNA, 19 nt, Artificial Sequence
  Description of Artificial Sequence: Synthetic oligonucleotide
ugaugcucaguuuuccugu

SEQ ID NO: 1584856 - RNA, 19 nt, Artificial Sequence
  Description of Artificial Sequence: Synthetic oligonucleotide
cauugaagcuauagggcag

SEQ ID NO: 1584857 - RNA, 19 nt, Artificial Sequence
  Description of Artificial Sequence: Synthetic oligonucleotide
gaucaagucguaguaaaga

SEQ ID NO: 1584858 - RNA, 19 nt, Artificial Sequence
  Description of Artificial Sequence: Synthetic oligonucleotide
guugguuaaggugauaguc

SEQ ID NO: 1584859 - RNA, 19 nt, Artificial Sequence
  Description of Artificial Sequence: Synthetic oligonucleotide
gaaguaagccacaccgagg

SEQ ID NO: 1584860 - RNA, 19 nt, Artificial Sequence
  Description of Artificial Sequence: Synthetic oligonucleotide
aagccauaucguaggaugg

SEQ ID NO: 1584861 - RNA, 19 nt, Artificial Sequence
  Description of Artificial Sequence: Synthetic oligonucleotide
uucucuggggcaguaacag

SEQ ID NO: 1584862 - RNA, 19 nt, Artificial Sequence
  Description of Artificial Sequence: Synthetic oligonucleotide
cacauugaguagaacauca

SEQ ID NO: 1584863 - RNA, 19 nt, Artificial Sequence
  Description of Artificial Sequence: Synthetic oligonucleotide
uugaaguaagccacaccga

SEQ ID NO: 1584864 - RNA, 19 nt, Artificial Sequence
  Description of Artificial Sequence: Synthetic oligonucleotide
augucaugaacaaacucag

SEQ ID NO: 1584865 - RNA, 19 nt, Artificial Sequence
  Description of Artificial Sequence: Synthetic oligonucleotide
ugggccuggucccauauga

SEQ ID NO: 1584866 - RNA, 19 nt, Artificial Sequence
  Description of Artificial Sequence: Synthetic oligonucleotide
cucgagucaaacuuuguca

SEQ ID NO: 1584867 - RNA, 19 nt, Artificial Sequence
  Description of Artificial Sequence: Synthetic oligonucleotide
guaaagagcccggugaaug

SEQ ID NO: 1584868 - RNA, 19 nt, Artificial Sequence
  Description of Artificial Sequence: Synthetic oligonucleotide
ucccagagaaagagcagag

SEQ ID NO: 1584869 - RNA, 19 nt, Artificial Sequence
  Description of Artificial Sequence: Synthetic oligonucleotide
agcuauagggcagccuucc

SEQ ID NO: 1584870 - RNA, 19 nt, Artificial Sequence
  Description of Artificial Sequence: Synthetic oligonucleotide
ucaaguucuggguuaccgu

SEQ ID NO: 1584871 - RNA, 19 nt, Artificial Sequence
  Description of Artificial Sequence: Synthetic oligonucleotide
uaucguaggauggccuugg

SEQ ID NO: 1584872 - RNA, 19 nt, Artificial Sequence
  Description of Artificial Sequence: Synthetic oligonucleotide
uuguagaccgagcaaguuu

SEQ ID NO: 1584873 - RNA, 19 nt, Artificial Sequence
  Description of Artificial Sequence: Synthetic oligonucleotide
cuaugucaugaacaaacuc

SEQ ID NO: 1584874 - RNA, 19 nt, Artificial Sequence
  Description of Artificial Sequence: Synthetic oligonucleotide
uuguuuaccgggaccuuga

SEQ ID NO: 1584875 - RNA, 19 nt, Artificial Sequence
  Description of Artificial Sequence: Synthetic oligonucleotide
caaucuugcaguugagauc

SEQ ID NO: 1584876 - RNA, 19 nt, Artificial Sequence
  Description of Artificial Sequence: Synthetic oligonucleotide
aagucguaguaaagagccc

SEQ ID NO: 1584877 - RNA, 19 nt, Artificial Sequence
  Description of Artificial Sequence: Synthetic oligonucleotide
gauuuugccuaugaagaga

SEQ ID NO: 1584878 - RNA, 19 nt, Artificial Sequence
  Description of Artificial Sequence: Synthetic oligonucleotide
aagucgggugacucaaaca

SEQ ID NO: 1584879 - RNA, 19 nt, Artificial Sequence
  Description of Artificial Sequence: Synthetic oligonucleotide
augaaagguugguuaaggu

SEQ ID NO: 1584880 - RNA, 19 nt, Artificial Sequence
  Description of Artificial Sequence: Synthetic oligonucleotide
caaguucuggguuaccguc

SEQ ID NO: 1584881 - RNA, 19 nt, Artificial Sequence
  Description of Artificial Sequence: Synthetic oligonucleotide
aggucuauccgaggguugc

SEQ ID NO: 1584882 - RNA, 19 nt, Artificial Sequence
  Description of Artificial Sequence: Synthetic oligonucleotide
uuuaagguaaaagcucuuu

SEQ ID NO: 1584883 - RNA, 19 nt, Artificial Sequence
  Description of Artificial Sequence: Synthetic oligonucleotide
uaggugcuauggauguccg

SEQ ID NO: 1584884 - RNA, 19 nt, Artificial Sequence
  Description of Artificial Sequence: Synthetic oligonucleotide
uacucgaaguuuucucuca

SEQ ID NO: 1584885 - RNA, 19 nt, Artificial Sequence
  Description of Artificial Sequence: Synthetic oligonucleotide
guaggugcuauggaugucc

SEQ ID NO: 1584886 - RNA, 19 nt, Artificial Sequence
  Description of Artificial Sequence: Synthetic oligonucleotide
ucuauccgaggguugccag

SEQ ID NO: 1584887 - RNA, 19 nt, Artificial Sequence
  Description of Artificial Sequence: Synthetic oligonucleotide
guauccaguuguuaauuuc

SEQ ID NO: 1584888 - RNA, 19 nt, Artificial Sequence
  Description of Artificial Sequence: Synthetic oligonucleotide
ugcugaucaagucguagua

SEQ ID NO: 1584889 - RNA, 19 nt, Artificial Sequence
  Description of Artificial Sequence: Synthetic oligonucleotide
gugucugugucucucagga

SEQ ID NO: 1584890 - RNA, 19 nt, Artificial Sequence
  Description of Artificial Sequence: Synthetic oligonucleotide
ccuaugaagagaagggccc

SEQ ID NO: 1584891 - RNA, 19 nt, Artificial Sequence
  Description of Artificial Sequence: Synthetic oligonucleotide
ugguuaaggugauagucua

SEQ ID NO: 1584892 - RNA, 19 nt, Artificial Sequence
  Description of Artificial Sequence: Synthetic oligonucleotide
agccauaucguaggauggc

SEQ ID NO: 1584893 - RNA, 19 nt, Artificial Sequence
  Description of Artificial Sequence: Synthetic oligonucleotide
uguuccacuugggugagcu

SEQ ID NO: 1584894 - RNA, 19 nt, Artificial Sequence
  Description of Artificial Sequence: Synthetic oligonucleotide
gcaaggaguuccuuguagg

SEQ ID NO: 1584895 - RNA, 19 nt, Artificial Sequence
  Description of Artificial Sequence: Synthetic oligonucleotide
ugccuaugaagagaagggc

SEQ ID NO: 1584896 - RNA, 19 nt, Artificial Sequence
  Description of Artificial Sequence: Synthetic oligonucleotide
aguccaagccauaucguag

SEQ ID NO: 1584897 - RNA, 19 nt, Artificial Sequence
  Description of Artificial Sequence: Synthetic oligonucleotide
acuugguaacuuccccuuc

SEQ ID NO: 1584898 - RNA, 19 nt, Artificial Sequence
  Description of Artificial Sequence: Synthetic oligonucleotide
agucuaaugggaaggugag

SEQ ID NO: 1584899 - RNA, 19 nt, Artificial Sequence
  Description of Artificial Sequence: Synthetic oligonucleotide
guauaaucagccauuccuc

SEQ ID NO: 1584900 - RNA, 19 nt, Artificial Sequence
  Description of Artificial Sequence: Synthetic oligonucleotide
uuuuaagguaaaagcucuu

SEQ ID NO: 1584901 - RNA, 19 nt, Artificial Sequence
  Description of Artificial Sequence: Synthetic oligonucleotide
ccagugaggauucugggcc

SEQ ID NO: 1584902 - RNA, 19 nt, Artificial Sequence
  Description of Artificial Sequence: Synthetic oligonucleotide
uuuugccuaugaagagaag

SEQ ID NO: 1584903 - RNA, 19 nt, Artificial Sequence
  Description of Artificial Sequence: Synthetic oligonucleotide
ggauuuugccuaugaagag

SEQ ID NO: 1584904 - RNA, 19 nt, Artificial Sequence
  Description of Artificial Sequence: Synthetic oligonucleotide
uguauccaguuguuaauuu

SEQ ID NO: 1584905 - RNA, 19 nt, Artificial Sequence
  Description of Artificial Sequence: Synthetic oligonucleotide
cucgaucuaugucaugaac

SEQ ID NO: 1584906 - RNA, 19 nt, Artificial Sequence
  Description of Artificial Sequence: Synthetic oligonucleotide
caacaaagcuggaucuuac

SEQ ID NO: 1584907 - RNA, 19 nt, Artificial Sequence
  Description of Artificial Sequence: Synthetic oligonucleotide
aaguuggagacugcugcug

SEQ ID NO: 1584908 - RNA, 19 nt, Artificial Sequence
  Description of Artificial Sequence: Synthetic oligonucleotide
uuugucacccacugccccu

SEQ ID NO: 1584909 - RNA, 19 nt, Artificial Sequence
  Description of Artificial Sequence: Synthetic oligonucleotide
uuuccugucaggggcagcu

SEQ ID NO: 1584910 - RNA, 19 nt, Artificial Sequence
  Description of Artificial Sequence: Synthetic oligonucleotide
auuuugccuaugaagagaa

SEQ ID NO: 1584911 - RNA, 19 nt, Artificial Sequence
  Description of Artificial Sequence: Synthetic oligonucleotide
gguucugacaucaugggga

SEQ ID NO: 1584912 - RNA, 19 nt, Artificial Sequence
  Description of Artificial Sequence: Synthetic oligonucleotide
agcacauugaguagaacau

SEQ ID NO: 1584913 - RNA, 19 nt, Artificial Sequence
  Description of Artificial Sequence: Synthetic oligonucleotide
guuuaccgggaccuugaag

SEQ ID NO: 1584914 - RNA, 19 nt, Artificial Sequence
  Description of Artificial Sequence: Synthetic oligonucleotide
gaagcuauagggcagccuu

SEQ ID NO: 1584915 - RNA, 19 nt, Artificial Sequence
  Description of Artificial Sequence: Synthetic oligonucleotide
ugauuucuccagaggugca

SEQ ID NO: 1584916 - RNA, 19 nt, Artificial Sequence
  Description of Artificial Sequence: Synthetic oligonucleotide
uccaaguggaaguccugga

SEQ ID NO: 1584917 - RNA, 19 nt, Artificial Sequence
  Description of Artificial Sequence: Synthetic oligonucleotide
cagaacguuggcaguuggg

SEQ ID NO: 1584918 - RNA, 19 nt, Artificial Sequence
  Description of Artificial Sequence: Synthetic oligonucleotide
cuggcgacauucuggcugc

SEQ ID NO: 1584919 - RNA, 19 nt, Artificial Sequence
  Description of Artificial Sequence: Synthetic oligonucleotide
cugaucaagucguaguaaa

SEQ ID NO: 1584920 - RNA, 19 nt, Artificial Sequence
  Description of Artificial Sequence: Synthetic oligonucleotide
ugcugccaugcccaagcag

SEQ ID NO: 1584921 - RNA, 19 nt, Artificial Sequence
  Description of Artificial Sequence: Synthetic oligonucleotide
cuuacucgaaguuuucucu

SEQ ID NO: 1584922 - RNA, 19 nt, Artificial Sequence
  Description of Artificial Sequence: Synthetic oligonucleotide
cuuguuuaccgggaccuug

SEQ ID NO: 1584923 - RNA, 19 nt, Artificial Sequence
  Description of Artificial Sequence: Synthetic oligonucleotide
cucucgaucuaugucauga

SEQ ID NO: 1584924 - RNA, 19 nt, Artificial Sequence
  Description of Artificial Sequence: Synthetic oligonucleotide
auagucuaaugggaaggug

SEQ ID NO: 1584925 - RNA, 19 nt, Artificial Sequence
  Description of Artificial Sequence: Synthetic oligonucleotide
ucguaggauggccuugggu

SEQ ID NO: 1584926 - RNA, 19 nt, Artificial Sequence
  Description of Artificial Sequence: Synthetic oligonucleotide
aagcuauagggcagccuuc

SEQ ID NO: 1584927 - RNA, 19 nt, Artificial Sequence
  Description of Artificial Sequence: Synthetic oligonucleotide
caguuguuaauuuccugga

SEQ ID NO: 1584928 - RNA, 19 nt, Artificial Sequence
  Description of Artificial Sequence: Synthetic oligonucleotide
uccaagccauaucguagga

SEQ ID NO: 1584929 - RNA, 19 nt, Artificial Sequence
  Description of Artificial Sequence: Synthetic oligonucleotide
uggaggucuauccgagggu

SEQ ID NO: 1584930 - RNA, 19 nt, Artificial Sequence
  Description of Artificial Sequence: Synthetic oligonucleotide
cuugguaacuuccccuuca

SEQ ID NO: 1584931 - RNA, 19 nt, Artificial Sequence
  Description of Artificial Sequence: Synthetic oligonucleotide
auuucccuuguagaccgag

SEQ ID NO: 1584932 - RNA, 19 nt, Artificial Sequence
  Description of Artificial Sequence: Synthetic oligonucleotide
uguuaauuuccuggagguc

SEQ ID NO: 1584933 - RNA, 19 nt, Artificial Sequence
  Description of Artificial Sequence: Synthetic oligonucleotide
uggaucuuacucgaaguuu

SEQ ID NO: 1584934 - RNA, 19 nt, Artificial Sequence
  Description of Artificial Sequence: Synthetic oligonucleotide
gucguaguaaagagcccgg

SEQ ID NO: 1584935 - RNA, 19 nt, Artificial Sequence
  Description of Artificial Sequence: Synthetic oligonucleotide
cgaguugcugaucaagucg

SEQ ID NO: 1584936 - RNA, 19 nt, Artificial Sequence
  Description of Artificial Sequence: Synthetic oligonucleotide
guaggauggccuuggguuc

SEQ ID NO: 1584937 - RNA, 19 nt, Artificial Sequence
  Description of Artificial Sequence: Synthetic oligonucleotide
ggcuggggaacccucagag

SEQ ID NO: 1584938 - RNA, 19 nt, Artificial Sequence
  Description of Artificial Sequence: Synthetic oligonucleotide
gaguccaagccauaucgua

SEQ ID NO: 1584939 - RNA, 19 nt, Artificial Sequence
  Description of Artificial Sequence: Synthetic oligonucleotide
ucucgaucuaugucaugaa

SEQ ID NO: 1584940 - RNA, 19 nt, Artificial Sequence
  Description of Artificial Sequence: Synthetic oligonucleotide
aaagagcccggugaaugau

SEQ ID NO: 1584941 - RNA, 19 nt, Artificial Sequence
  Description of Artificial Sequence: Synthetic oligonucleotide
ggacuguagcuucaucucc

SEQ ID NO: 1584942 - RNA, 19 nt, Artificial Sequence
  Description of Artificial Sequence: Synthetic oligonucleotide
uguucagcucccagagaaa

SEQ ID NO: 1584943 - RNA, 19 nt, Artificial Sequence
  Description of Artificial Sequence: Synthetic oligonucleotide
gaugcucaguuuuccuguc

SEQ ID NO: 1584944 - RNA, 19 nt, Artificial Sequence
  Description of Artificial Sequence: Synthetic oligonucleotide
ucuugcaguugagaucaga

SEQ ID NO: 1584945 - RNA, 19 nt, Artificial Sequence
  Description of Artificial Sequence: Synthetic oligonucleotide
gugagcuugacagguuugc

SEQ ID NO: 1584946 - RNA, 19 nt, Artificial Sequence
  Description of Artificial Sequence: Synthetic oligonucleotide
guuaccgucaagggcagga

SEQ ID NO: 1584947 - RNA, 19 nt, Artificial Sequence
  Description of Artificial Sequence: Synthetic oligonucleotide
cuugcugaagucgggugac

SEQ ID NO: 1584948 - RNA, 19 nt, Artificial Sequence
  Description of Artificial Sequence: Synthetic oligonucleotide
uuaccgggaccuugaagaa

SEQ ID NO: 1584949 - RNA, 19 nt, Artificial Sequence
  Description of Artificial Sequence: Synthetic oligonucleotide
ggugacucaaacaaggacu

SEQ ID NO: 1584950 - RNA, 19 nt, Artificial Sequence
  Description of Artificial Sequence: Synthetic oligonucleotide
cucauccaaguggaagucc

SEQ ID NO: 1584951 - RNA, 19 nt, Artificial Sequence
  Description of Artificial Sequence: Synthetic oligonucleotide
aucuuacucgaaguuuucu

SEQ ID NO: 1584952 - RNA, 19 nt, Artificial Sequence
  Description of Artificial Sequence: Synthetic oligonucleotide
gaugaugcucaguuuuccu

SEQ ID NO: 1584953 - RNA, 19 nt, Artificial Sequence
  Description of Artificial Sequence: Synthetic oligonucleotide
ggaauguauaaucagccau

SEQ ID NO: 1584954 - RNA, 19 nt, Artificial Sequence
  Description of Artificial Sequence: Synthetic oligonucleotide
auaucguaggauggccuug

SEQ ID NO: 1584955 - RNA, 19 nt, Artificial Sequence
  Description of Artificial Sequence: Synthetic oligonucleotide
ggugucugugucucucagg

SEQ ID NO: 1584956 - RNA, 19 nt, Artificial Sequence
  Description of Artificial Sequence: Synthetic oligonucleotide
cagcuuguuuaccgggacc

SEQ ID NO: 1584957 - RNA, 19 nt, Artificial Sequence
  Description of Artificial Sequence: Synthetic oligonucleotide
gggugacucaaacaaggac

SEQ ID NO: 1584958 - RNA, 19 nt, Artificial Sequence
  Description of Artificial Sequence: Synthetic oligonucleotide
ugaagcuauagggcagccu

SEQ ID NO: 1584959 - RNA, 19 nt, Artificial Sequence
  Description of Artificial Sequence: Synthetic oligonucleotide
ucgucuuucucgagucaaa

SEQ ID NO: 1584960 - RNA, 19 nt, Artificial Sequence
  Description of Artificial Sequence: Synthetic oligonucleotide
aguuccuuguaggugcuau

SEQ ID NO: 1584961 - RNA, 19 nt, Artificial Sequence
  Description of Artificial Sequence: Synthetic oligonucleotide
acucgaaguuuucucucaa

SEQ ID NO: 1584962 - RNA, 19 nt, Artificial Sequence
  Description of Artificial Sequence: Synthetic oligonucleotide
uguuuaccgggaccuugaa

SEQ ID NO: 1584963 - RNA, 19 nt, Artificial Sequence
  Description of Artificial Sequence: Synthetic oligonucleotide
guagaacaucaagugcccc

SEQ ID NO: 1584964 - RNA, 19 nt, Artificial Sequence
  Description of Artificial Sequence: Synthetic oligonucleotide
aucguaggauggccuuggg

SEQ ID NO: 1584965 - RNA, 19 nt, Artificial Sequence
  Description of Artificial Sequence: Synthetic oligonucleotide
uggacucuguucguuguuc

SEQ ID NO: 1584966 - RNA, 19 nt, Artificial Sequence
  Description of Artificial Sequence: Synthetic oligonucleotide
gauagucuaaugggaaggu

SEQ ID NO: 1584967 - RNA, 19 nt, Artificial Sequence
  Description of Artificial Sequence: Synthetic oligonucleotide
uccucuagguuuucuccua

SEQ ID NO: 1584968 - RNA, 19 nt, Artificial Sequence
  Description of Artificial Sequence: Synthetic oligonucleotide
cuucagcucucgaucuaug

SEQ ID NO: 1584969 - RNA, 19 nt, Artificial Sequence
  Description of Artificial Sequence: Synthetic oligonucleotide
cacaccgaggaggaggaug

SEQ ID NO: 1584970 - RNA, 19 nt, Artificial Sequence
  Description of Artificial Sequence: Synthetic oligonucleotide
gugaggcucuccucuauca

SEQ ID NO: 1584971 - RNA, 19 nt, Artificial Sequence
  Description of Artificial Sequence: Synthetic oligonucleotide
gaucuuacucgaaguuuuc

SEQ ID NO: 1584972 - RNA, 19 nt, Artificial Sequence
  Description of Artificial Sequence: Synthetic oligonucleotide
gaacguuggcaguugggcu

SEQ ID NO: 1584973 - RNA, 19 nt, Artificial Sequence
  Description of Artificial Sequence: Synthetic oligonucleotide
accgucaagggcaggaaga

SEQ ID NO: 1584974 - RNA, 19 nt, Artificial Sequence
  Description of Artificial Sequence: Synthetic oligonucleotide
ggauucugggccugguccc

SEQ ID NO: 1584975 - RNA, 19 nt, Artificial Sequence
  Description of Artificial Sequence: Synthetic oligonucleotide
gaaguuggagacugcugcu

SEQ ID NO: 1584976 - RNA, 19 nt, Artificial Sequence
  Description of Artificial Sequence: Synthetic oligonucleotide
guuaaggugauagucuaau

SEQ ID NO: 1584977 - RNA, 19 nt, Artificial Sequence
  Description of Artificial Sequence: Synthetic oligonucleotide
ccaaguggaaguccuggag

SEQ ID NO: 1584978 - RNA, 19 nt, Artificial Sequence
  Description of Artificial Sequence: Synthetic oligonucleotide
ugcugaagucgggugacuc

SEQ ID NO: 1584979 - RNA, 19 nt, Artificial Sequence
  Description of Artificial Sequence: Synthetic oligonucleotide
cuccucauuccacucaaaa

SEQ ID NO: 1584980 - RNA, 19 nt, Artificial Sequence
  Description of Artificial Sequence: Synthetic oligonucleotide
ucguaguaaagagcccggu

SEQ ID NO: 1584981 - RNA, 19 nt, Artificial Sequence
  Description of Artificial Sequence: Synthetic oligonucleotide
augcucaguuuuccuguca

SEQ ID NO: 1584982 - RNA, 19 nt, Artificial Sequence
  Description of Artificial Sequence: Synthetic oligonucleotide
ggugauagucuaaugggaa

SEQ ID NO: 1584983 - RNA, 19 nt, Artificial Sequence
  Description of Artificial Sequence: Synthetic oligonucleotide
acguuggcaguugggcugg

SEQ ID NO: 1584984 - RNA, 19 nt, Artificial Sequence
  Description of Artificial Sequence: Synthetic oligonucleotide
uggucccauaugauuucuc

SEQ ID NO: 1584985 - RNA, 19 nt, Artificial Sequence
  Description of Artificial Sequence: Synthetic oligonucleotide
uaggauggccuuggguucu

SEQ ID NO: 1584986 - RNA, 19 nt, Artificial Sequence
  Description of Artificial Sequence: Synthetic oligonucleotide
auagccgaaguuggagacu

SEQ ID NO: 1584987 - RNA, 19 nt, Artificial Sequence
  Description of Artificial Sequence: Synthetic oligonucleotide
ucuguucguuguucagcuc

SEQ ID NO: 1584988 - RNA, 19 nt, Artificial Sequence
  Description of Artificial Sequence: Synthetic oligonucleotide
aguaaagagcccggugaau

SEQ ID NO: 1584989 - RNA, 19 nt, Artificial Sequence
  Description of Artificial Sequence: Synthetic oligonucleotide
cccuuguagaccgagcaag

SEQ ID NO: 1584990 - RNA, 19 nt, Artificial Sequence
  Description of Artificial Sequence: Synthetic oligonucleotide
gcuauggauguccgaguug

SEQ ID NO: 1584991 - RNA, 19 nt, Artificial Sequence
  Description of Artificial Sequence: Synthetic oligonucleotide
gaggucuauccgaggguug

SEQ ID NO: 1584992 - RNA, 19 nt, Artificial Sequence
  Description of Artificial Sequence: Synthetic oligonucleotide
agaguccaagccauaucgu

SEQ ID NO: 1584993 - RNA, 19 nt, Artificial Sequence
  Description of Artificial Sequence: Synthetic oligonucleotide
caguugagaucagagucca

SEQ ID NO: 1584994 - RNA, 19 nt, Artificial Sequence
  Description of Artificial Sequence: Synthetic oligonucleotide
ggguccaggauuuugccua

SEQ ID NO: 1584995 - RNA, 19 nt, Artificial Sequence
  Description of Artificial Sequence: Synthetic oligonucleotide
uuuuccugucaggggcagc

SEQ ID NO: 1584996 - RNA, 19 nt, Artificial Sequence
  Description of Artificial Sequence: Synthetic oligonucleotide
gucuuucucgagucaaacu

SEQ ID NO: 1584997 - RNA, 19 nt, Artificial Sequence
  Description of Artificial Sequence: Synthetic oligonucleotide
gggacuuucacaguccugu

SEQ ID NO: 1584998 - RNA, 19 nt, Artificial Sequence
  Description of Artificial Sequence: Synthetic oligonucleotide
gugaggauucugggccugg

SEQ ID NO: 1584999 - RNA, 19 nt, Artificial Sequence
  Description of Artificial Sequence: Synthetic oligonucleotide
caucaagugccccuagggu

SEQ ID NO: 1585000 - RNA, 19 nt, Artificial Sequence
  Description of Artificial Sequence: Synthetic oligonucleotide
ggugaggcggacgggcugg

SEQ ID NO: 1585001 - RNA, 19 nt, Artificial Sequence
  Description of Artificial Sequence: Synthetic oligonucleotide
gccauaucguaggauggcc

SEQ ID NO: 1585002 - RNA, 19 nt, Artificial Sequence
  Description of Artificial Sequence: Synthetic oligonucleotide
aagggccccggugucugug

SEQ ID NO: 1585003 - RNA, 19 nt, Artificial Sequence
  Description of Artificial Sequence: Synthetic oligonucleotide
cuggauggucuucagcucu

SEQ ID NO: 1585004 - RNA, 19 nt, Artificial Sequence
  Description of Artificial Sequence: Synthetic oligonucleotide
ggaucucaggcgguacagg

SEQ ID NO: 1585005 - RNA, 19 nt, Artificial Sequence
  Description of Artificial Sequence: Synthetic oligonucleotide
cugaagucgggugacucaa

SEQ ID NO: 1585006 - RNA, 19 nt, Artificial Sequence
  Description of Artificial Sequence: Synthetic oligonucleotide
cuuucucgagucaaacuuu

SEQ ID NO: 1585007 - RNA, 19 nt, Artificial Sequence
  Description of Artificial Sequence: Synthetic oligonucleotide
cguaguaaagagcccggug

SEQ ID NO: 1585008 - RNA, 19 nt, Artificial Sequence
  Description of Artificial Sequence: Synthetic oligonucleotide
aggggcagcugagcaaucu

SEQ ID NO: 1585009 - RNA, 19 nt, Artificial Sequence
  Description of Artificial Sequence: Synthetic oligonucleotide
gucuauccgaggguugcca

SEQ ID NO: 1585010 - RNA, 19 nt, Artificial Sequence
  Description of Artificial Sequence: Synthetic oligonucleotide
gcgguacaggucauagccg

SEQ ID NO: 1585011 - RNA, 19 nt, Artificial Sequence
  Description of Artificial Sequence: Synthetic oligonucleotide
gaccgagcaaguuucccuu

SEQ ID NO: 1585012 - RNA, 19 nt, Artificial Sequence
  Description of Artificial Sequence: Synthetic oligonucleotide
gcuggaucuuacucgaagu

SEQ ID NO: 1585013 - RNA, 19 nt, Artificial Sequence
  Description of Artificial Sequence: Synthetic oligonucleotide
cucgucuuucucgagucaa

SEQ ID NO: 1585014 - RNA, 19 nt, Artificial Sequence
  Description of Artificial Sequence: Synthetic oligonucleotide
gagcaaguuucccuuucau

SEQ ID NO: 1585015 - RNA, 19 nt, Artificial Sequence
  Description of Artificial Sequence: Synthetic oligonucleotide
cauaucguaggauggccuu

SEQ ID NO: 1585016 - RNA, 19 nt, Artificial Sequence
  Description of Artificial Sequence: Synthetic oligonucleotide
cgaucuaugucaugaacaa

SEQ ID NO: 1585017 - RNA, 19 nt, Artificial Sequence
  Description of Artificial Sequence: Synthetic oligonucleotide
gggcagcugagcaaucuug

SEQ ID NO: 1585018 - RNA, 19 nt, Artificial Sequence
  Description of Artificial Sequence: Synthetic oligonucleotide
ccgaguugcugaucaaguc

SEQ ID NO: 1585019 - RNA, 19 nt, Artificial Sequence
  Description of Artificial Sequence: Synthetic oligonucleotide
ccucuagguuuucuccuag

SEQ ID NO: 1585020 - RNA, 19 nt, Artificial Sequence
  Description of Artificial Sequence: Synthetic oligonucleotide
ccgaaguuggagacugcug

SEQ ID NO: 1585021 - RNA, 19 nt, Artificial Sequence
  Description of Artificial Sequence: Synthetic oligonucleotide
agcucucgaucuaugucau

SEQ ID NO: 1585022 - RNA, 19 nt, Artificial Sequence
  Description of Artificial Sequence: Synthetic oligonucleotide
ggggaacccucagagcugc

SEQ ID NO: 1585023 - RNA, 19 nt, Artificial Sequence
  Description of Artificial Sequence: Synthetic oligonucleotide
ccgaggguugccagugagg

SEQ ID NO: 1585024 - RNA, 19 nt, Artificial Sequence
  Description of Artificial Sequence: Synthetic oligonucleotide
accgagcaaguuucccuuu

SEQ ID NO: 1585025 - RNA, 19 nt, Artificial Sequence
  Description of Artificial Sequence: Synthetic oligonucleotide
agccauuccucuagguuuu

SEQ ID NO: 1585026 - RNA, 19 nt, Artificial Sequence
  Description of Artificial Sequence: Synthetic oligonucleotide
ggaucuuacucgaaguuuu

SEQ ID NO: 1585027 - RNA, 19 nt, Artificial Sequence
  Description of Artificial Sequence: Synthetic oligonucleotide
cacuggcuccccugugcug

SEQ ID NO: 1585028 - RNA, 19 nt, Artificial Sequence
  Description of Artificial Sequence: Synthetic oligonucleotide
cuggaucuuacucgaaguu

SEQ ID NO: 1585029 - RNA, 19 nt, Artificial Sequence
  Description of Artificial Sequence: Synthetic oligonucleotide
ccuaggguccaggauuuug

SEQ ID NO: 1585030 - RNA, 19 nt, Artificial Sequence
  Description of Artificial Sequence: Synthetic oligonucleotide
gcugaucaagucguaguaa

SEQ ID NO: 1585031 - RNA, 19 nt, Artificial Sequence
  Description of Artificial Sequence: Synthetic oligonucleotide
gugcuauggauguccgagu

SEQ ID NO: 1585032 - RNA, 19 nt, Artificial Sequence
  Description of Artificial Sequence: Synthetic oligonucleotide
cggugaaugauggacucug

SEQ ID NO: 1585033 - RNA, 19 nt, Artificial Sequence
  Description of Artificial Sequence: Synthetic oligonucleotide
gagcccggugaaugaugga

SEQ ID NO: 1585034 - RNA, 19 nt, Artificial Sequence
  Description of Artificial Sequence: Synthetic oligonucleotide
cccauaugauuucuccaga

SEQ ID NO: 1585035 - RNA, 19 nt, Artificial Sequence
  Description of Artificial Sequence: Synthetic oligonucleotide
gguuaaggugauagucuaa

SEQ ID NO: 1585036 - RNA, 19 nt, Artificial Sequence
  Description of Artificial Sequence: Synthetic oligonucleotide
ggucuauccgaggguugcc

SEQ ID NO: 1585037 - RNA, 19 nt, Artificial Sequence
  Description of Artificial Sequence: Synthetic oligonucleotide
gccuuggguucugacauca

SEQ ID NO: 1585038 - RNA, 19 nt, Artificial Sequence
  Description of Artificial Sequence: Synthetic oligonucleotide
cucucaggacaaagaugaa

SEQ ID NO: 1585039 - RNA, 19 nt, Artificial Sequence
  Description of Artificial Sequence: Synthetic oligonucleotide
gccuuccuggaauguauaa

SEQ ID NO: 1585040 - RNA, 19 nt, Artificial Sequence
  Description of Artificial Sequence: Synthetic oligonucleotide
guucguuguucagcuccca

SEQ ID NO: 1585041 - RNA, 19 nt, Artificial Sequence
  Description of Artificial Sequence: Synthetic oligonucleotide
aguugcugaucaagucgua

SEQ ID NO: 1585042 - RNA, 19 nt, Artificial Sequence
  Description of Artificial Sequence: Synthetic oligonucleotide
ccgagcaaguuucccuuuc

SEQ ID NO: 1585043 - RNA, 19 nt, Artificial Sequence
  Description of Artificial Sequence: Synthetic oligonucleotide
aagugccccuaggguccag

SEQ ID NO: 1585044 - RNA, 19 nt, Artificial Sequence
  Description of Artificial Sequence: Synthetic oligonucleotide
ggguuaccgucaagggcag

SEQ ID NO: 1585045 - RNA, 19 nt, Artificial Sequence
  Description of Artificial Sequence: Synthetic oligonucleotide
ggucaaguucuggguuacc

SEQ ID NO: 1585046 - RNA, 19 nt, Artificial Sequence
  Description of Artificial Sequence: Synthetic oligonucleotide
cagugaggauucugggccu

SEQ ID NO: 1585047 - RNA, 19 nt, Artificial Sequence
  Description of Artificial Sequence: Synthetic oligonucleotide
aguugagaucagaguccaa

SEQ ID NO: 1585048 - RNA, 19 nt, Artificial Sequence
  Description of Artificial Sequence: Synthetic oligonucleotide
agccuuccuggaauguaua

SEQ ID NO: 1585049 - RNA, 19 nt, Artificial Sequence
  Description of Artificial Sequence: Synthetic oligonucleotide
gguuaccgucaagggcagg

SEQ ID NO: 1585050 - RNA, 19 nt, Artificial Sequence
  Description of Artificial Sequence: Synthetic oligonucleotide
ggcgacauucuggcugcug

SEQ ID NO: 1585051 - RNA, 19 nt, Artificial Sequence
  Description of Artificial Sequence: Synthetic oligonucleotide
cuuguagaccgagcaaguu

SEQ ID NO: 1585052 - RNA, 19 nt, Artificial Sequence
  Description of Artificial Sequence: Synthetic oligonucleotide
ccuguauccaguuguuaau

SEQ ID NO: 1585053 - RNA, 19 nt, Artificial Sequence
  Description of Artificial Sequence: Synthetic oligonucleotide
ccuuguagaccgagcaagu

SEQ ID NO: 1585054 - RNA, 19 nt, Artificial Sequence
  Description of Artificial Sequence: Synthetic oligonucleotide
gggugagcuugacagguuu

SEQ ID NO: 1585055 - RNA, 19 nt, Artificial Sequence
  Description of Artificial Sequence: Synthetic oligonucleotide
cacuggaucucaggcggua

SEQ ID NO: 1585056 - RNA, 19 nt, Artificial Sequence
  Description of Artificial Sequence: Synthetic oligonucleotide
gccuggucccauaugauuu

SEQ ID NO: 1585057 - RNA, 19 nt, Artificial Sequence
  Description of Artificial Sequence: Synthetic oligonucleotide
augcccaagcagggcuccu

SEQ ID NO: 1585058 - RNA, 19 nt, Artificial Sequence
  Description of Artificial Sequence: Synthetic oligonucleotide
gccgaaguuggagacugcu

SEQ ID NO: 1585059 - RNA, 19 nt, Artificial Sequence
  Description of Artificial Sequence: Synthetic oligonucleotide
ggccuggucccauaugauu

SEQ ID NO: 1585060 - RNA, 19 nt, Artificial Sequence
  Description of Artificial Sequence: Synthetic oligonucleotide
gcagccuuccuggaaugua

SEQ ID NO: 1585061 - RNA, 19 nt, Artificial Sequence
  Description of Artificial Sequence: Synthetic oligonucleotide
caagugccccuagggucca

SEQ ID NO: 1585062 - RNA, 19 nt, Artificial Sequence
  Description of Artificial Sequence: Synthetic oligonucleotide
uggcgacauucuggcugcu

SEQ ID NO: 1585063 - RNA, 19 nt, Artificial Sequence
  Description of Artificial Sequence: Synthetic oligonucleotide
cgggugacucaaacaagga

SEQ ID NO: 1585064 - RNA, 19 nt, Artificial Sequence
  Description of Artificial Sequence: Synthetic oligonucleotide
gccccggugucugugucuc

SEQ ID NO: 1585065 - RNA, 19 nt, Artificial Sequence
  Description of Artificial Sequence: Synthetic oligonucleotide
cugugucucucaggacaaa

SEQ ID NO: 1585066 - RNA, 19 nt, Artificial Sequence
  Description of Artificial Sequence: Synthetic oligonucleotide
ccgucaagggcaggaagaa

SEQ ID NO: 1585067 - RNA, 19 nt, Artificial Sequence
  Description of Artificial Sequence: Synthetic oligonucleotide
ggggcagcugagcaaucuu

SEQ ID NO: 1585068 - RNA, 19 nt, Artificial Sequence
  Description of Artificial Sequence: Synthetic oligonucleotide
ccaagccauaucguaggau

SEQ ID NO: 1585069 - RNA, 19 nt, Artificial Sequence
  Description of Artificial Sequence: Synthetic oligonucleotide
gcuuguuuaccgggaccuu

SEQ ID NO: 1585070 - RNA, 19 nt, Artificial Sequence
  Description of Artificial Sequence: Synthetic oligonucleotide
gcggacgggcuggaggccu

SEQ ID NO: 1585071 - RNA, 19 nt, Artificial Sequence
  Description of Artificial Sequence: Synthetic oligonucleotide
gggccuggucccauaugau

SEQ ID NO: 1585072 - RNA, 19 nt, Artificial Sequence
  Description of Artificial Sequence: Synthetic oligonucleotide
ccuuggguucugacaucau

SEQ ID NO: 1585073 - RNA, 19 nt, Artificial Sequence
  Description of Artificial Sequence: Synthetic oligonucleotide
gggaacccucagagcugcu

SEQ ID NO: 1585074 - RNA, 19 nt, Artificial Sequence
  Description of Artificial Sequence: Synthetic oligonucleotide
ccacaccgaggaggaggau

SEQ ID NO: 1585075 - RNA, 19 nt, Artificial Sequence
  Description of Artificial Sequence: Synthetic oligonucleotide
aauaaggcggugcuagugg

SEQ ID NO: 1585076 - RNA, 19 nt, Artificial Sequence
  Description of Artificial Sequence: Synthetic oligonucleotide
ugaaguuuggaagugaacc

SEQ ID NO: 1585077 - RNA, 19 nt, Artificial Sequence
  Description of Artificial Sequence: Synthetic oligonucleotide
ugccauuugccuaucaugg

SEQ ID NO: 1585078 - RNA, 19 nt, Artificial Sequence
  Description of Artificial Sequence: Synthetic oligonucleotide
aaagccacgaaaauugggg

SEQ ID NO: 1585079 - RNA, 19 nt, Artificial Sequence
  Description of Artificial Sequence: Synthetic oligonucleotide
aaaauuggggugauaagag

SEQ ID NO: 1585080 - RNA, 19 nt, Artificial Sequence
  Description of Artificial Sequence: Synthetic oligonucleotide
caugucauggcuauacggg

SEQ ID NO: 1585081 - RNA, 19 nt, Artificial Sequence
  Description of Artificial Sequence: Synthetic oligonucleotide
uucuagauagucuuccuca

SEQ ID NO: 1585082 - RNA, 19 nt, Artificial Sequence
  Description of Artificial Sequence: Synthetic oligonucleotide
gacauagccagccugcugc

SEQ ID NO: 1585083 - RNA, 19 nt, Artificial Sequence
  Description of Artificial Sequence: Synthetic oligonucleotide
cuuaauaaggcggugcuag

SEQ ID NO: 1585084 - RNA, 19 nt, Artificial Sequence
  Description of Artificial Sequence: Synthetic oligonucleotide
guaacagucccucucgggg

SEQ ID NO: 1585085 - RNA, 19 nt, Artificial Sequence
  Description of Artificial Sequence: Synthetic oligonucleotide
cuagcaugcuuaauaaggc

SEQ ID NO: 1585086 - RNA, 19 nt, Artificial Sequence
  Description of Artificial Sequence: Synthetic oligonucleotide
auauagagcaggaaggguc

SEQ ID NO: 1585087 - RNA, 19 nt, Artificial Sequence
  Description of Artificial Sequence: Synthetic oligonucleotide
gaaaauuggggugauaaga

SEQ ID NO: 1585088 - RNA, 19 nt, Artificial Sequence
  Description of Artificial Sequence: Synthetic oligonucleotide
ucucaaacaugcauguaga

SEQ ID NO: 1585089 - RNA, 19 nt, Artificial Sequence
  Description of Artificial Sequence: Synthetic oligonucleotide
agacuaugccuuccaaacc

SEQ ID NO: 1585090 - RNA, 19 nt, Artificial Sequence
  Description of Artificial Sequence: Synthetic oligonucleotide
ucgucuuccagguugaaaa

SEQ ID NO: 1585091 - RNA, 19 nt, Artificial Sequence
  Description of Artificial Sequence: Synthetic oligonucleotide
ugugcagcccaugucaugg

SEQ ID NO: 1585092 - RNA, 19 nt, Artificial Sequence
  Description of Artificial Sequence: Synthetic oligonucleotide
ugccuuccaaaccacauug

SEQ ID NO: 1585093 - RNA, 19 nt, Artificial Sequence
  Description of Artificial Sequence: Synthetic oligonucleotide
uaggccaucgcucugugga

SEQ ID NO: 1585094 - RNA, 19 nt, Artificial Sequence
  Description of Artificial Sequence: Synthetic oligonucleotide
ugcuuaaucaugccuugcc

SEQ ID NO: 1585095 - RNA, 19 nt, Artificial Sequence
  Description of Artificial Sequence: Synthetic oligonucleotide
uagcaugcuuaauaaggcg

SEQ ID NO: 1585096 - RNA, 19 nt, Artificial Sequence
  Description of Artificial Sequence: Synthetic oligonucleotide
cuuaaucaugccuugccac

SEQ ID NO: 1585097 - RNA, 19 nt, Artificial Sequence
  Description of Artificial Sequence: Synthetic oligonucleotide
aagcccaucaaaguuccgg

SEQ ID NO: 1585098 - RNA, 19 nt, Artificial Sequence
  Description of Artificial Sequence: Synthetic oligonucleotide
uuuggaagugaaccuaccu

SEQ ID NO: 1585099 - RNA, 19 nt, Artificial Sequence
  Description of Artificial Sequence: Synthetic oligonucleotide
ucuagauagucuuccucag

SEQ ID NO: 1585100 - RNA, 19 nt, Artificial Sequence
  Description of Artificial Sequence: Synthetic oligonucleotide
ucaagcccaucaaaguucc

SEQ ID NO: 1585101 - RNA, 19 nt, Artificial Sequence
  Description of Artificial Sequence: Synthetic oligonucleotide
acggcaggcaauuugggag

SEQ ID NO: 1585102 - RNA, 19 nt, Artificial Sequence
  Description of Artificial Sequence: Synthetic oligonucleotide
uguaacagucccucucggg

SEQ ID NO: 1585103 - RNA, 19 nt, Artificial Sequence
  Description of Artificial Sequence: Synthetic oligonucleotide
uauacgggauuccaaagua

SEQ ID NO: 1585104 - RNA, 19 nt, Artificial Sequence
  Description of Artificial Sequence: Synthetic oligonucleotide
aguaagccagugcugggac

SEQ ID NO: 1585105 - RNA, 19 nt, Artificial Sequence
  Description of Artificial Sequence: Synthetic oligonucleotide
ugaugguccaggcggacag

SEQ ID NO: 1585106 - RNA, 19 nt, Artificial Sequence
  Description of Artificial Sequence: Synthetic oligonucleotide
agggaggguaguuguagcc

SEQ ID NO: 1585107 - RNA, 19 nt, Artificial Sequence
  Description of Artificial Sequence: Synthetic oligonucleotide
acauugugcaacucccuuc

SEQ ID NO: 1585108 - RNA, 19 nt, Artificial Sequence
  Description of Artificial Sequence: Synthetic oligonucleotide
ugaaccuaccugucuacag

SEQ ID NO: 1585109 - RNA, 19 nt, Artificial Sequence
  Description of Artificial Sequence: Synthetic oligonucleotide
gauagucuuccucagggga

SEQ ID NO: 1585110 - RNA, 19 nt, Artificial Sequence
  Description of Artificial Sequence: Synthetic oligonucleotide
cauugugcaacucccuucc

SEQ ID NO: 1585111 - RNA, 19 nt, Artificial Sequence
  Description of Artificial Sequence: Synthetic oligonucleotide
aagagcaccucagagacau

SEQ ID NO: 1585112 - RNA, 19 nt, Artificial Sequence
  Description of Artificial Sequence: Synthetic oligonucleotide
aguugcucaggacccgugc

SEQ ID NO: 1585113 - RNA, 19 nt, Artificial Sequence
  Description of Artificial Sequence: Synthetic oligonucleotide
agugaaccuaccugucuac

SEQ ID NO: 1585114 - RNA, 19 nt, Artificial Sequence
  Description of Artificial Sequence: Synthetic oligonucleotide
ugcuuaauaaggcggugcu

SEQ ID NO: 1585115 - RNA, 19 nt, Artificial Sequence
  Description of Artificial Sequence: Synthetic oligonucleotide
ugucuagcaugcuuaauaa

SEQ ID NO: 1585116 - RNA, 19 nt, Artificial Sequence
  Description of Artificial Sequence: Synthetic oligonucleotide
uacgggauuccaaaguagu

SEQ ID NO: 1585117 - RNA, 19 nt, Artificial Sequence
  Description of Artificial Sequence: Synthetic oligonucleotide
augcuuaauaaggcggugc

SEQ ID NO: 1585118 - RNA, 19 nt, Artificial Sequence
  Description of Artificial Sequence: Synthetic oligonucleotide
aaaaugagaggggaagcgu

SEQ ID NO: 1585119 - RNA, 19 nt, Artificial Sequence
  Description of Artificial Sequence: Synthetic oligonucleotide
caaagccacgaaaauuggg

SEQ ID NO: 1585120 - RNA, 19 nt, Artificial Sequence
  Description of Artificial Sequence: Synthetic oligonucleotide
cauuugccuaucauggcag

SEQ ID NO: 1585121 - RNA, 19 nt, Artificial Sequence
  Description of Artificial Sequence: Synthetic oligonucleotide
agaguaguccgcucgggag

SEQ ID NO: 1585122 - RNA, 19 nt, Artificial Sequence
  Description of Artificial Sequence: Synthetic oligonucleotide
aagccacgaaaauuggggu

SEQ ID NO: 1585123 - RNA, 19 nt, Artificial Sequence
  Description of Artificial Sequence: Synthetic oligonucleotide
uagugcuuaaucaugccuu

SEQ ID NO: 1585124 - RNA, 19 nt, Artificial Sequence
  Description of Artificial Sequence: Synthetic oligonucleotide
gauggaacaguacccugug

SEQ ID NO: 1585125 - RNA, 19 nt, Artificial Sequence
  Description of Artificial Sequence: Synthetic oligonucleotide
augccauuugccuaucaug

SEQ ID NO: 1585126 - RNA, 19 nt, Artificial Sequence
  Description of Artificial Sequence: Synthetic oligonucleotide
uucuuuugccaugugguca

SEQ ID NO: 1585127 - RNA, 19 nt, Artificial Sequence
  Description of Artificial Sequence: Synthetic oligonucleotide
aagugaaccuaccugucua

SEQ ID NO: 1585128 - RNA, 19 nt, Artificial Sequence
  Description of Artificial Sequence: Synthetic oligonucleotide
caucacaagcuuuggcucc

SEQ ID NO: 1585129 - RNA, 19 nt, Artificial Sequence
  Description of Artificial Sequence: Synthetic oligonucleotide
cacacuucugagcccaugg

SEQ ID NO: 1585130 - RNA, 19 nt, Artificial Sequence
  Description of Artificial Sequence: Synthetic oligonucleotide
agcagggagucaccgaagg

SEQ ID NO: 1585131 - RNA, 19 nt, Artificial Sequence
  Description of Artificial Sequence: Synthetic oligonucleotide
ucuguaggggcgcagcuuc

SEQ ID NO: 1585132 - RNA, 19 nt, Artificial Sequence
  Description of Artificial Sequence: Synthetic oligonucleotide
aggccaguaagccagugcu

SEQ ID NO: 1585133 - RNA, 19 nt, Artificial Sequence
  Description of Artificial Sequence: Synthetic oligonucleotide
cuagauagucuuccucagg

SEQ ID NO: 1585134 - RNA, 19 nt, Artificial Sequence
  Description of Artificial Sequence: Synthetic oligonucleotide
aacggcaggcaauuuggga

SEQ ID NO: 1585135 - RNA, 19 nt, Artificial Sequence
  Description of Artificial Sequence: Synthetic oligonucleotide
cccauauagagcaggaagg

SEQ ID NO: 1585136 - RNA, 19 nt, Artificial Sequence
  Description of Artificial Sequence: Synthetic oligonucleotide
caccgaaggguccugagag

SEQ ID NO: 1585137 - RNA, 19 nt, Artificial Sequence
  Description of Artificial Sequence: Synthetic oligonucleotide
uaauaaggcggugcuagug

SEQ ID NO: 1585138 - RNA, 19 nt, Artificial Sequence
  Description of Artificial Sequence: Synthetic oligonucleotide
gaagcguggaguugcucag

SEQ ID NO: 1585139 - RNA, 19 nt, Artificial Sequence
  Description of Artificial Sequence: Synthetic oligonucleotide
cucaaacaugcauguagag

SEQ ID NO: 1585140 - RNA, 19 nt, Artificial Sequence
  Description of Artificial Sequence: Synthetic oligonucleotide
ggaugcuucucaaacaugc

SEQ ID NO: 1585141 - RNA, 19 nt, Artificial Sequence
  Description of Artificial Sequence: Synthetic oligonucleotide
aagaugucuagcaugcuua

SEQ ID NO: 1585142 - RNA, 19 nt, Artificial Sequence
  Description of Artificial Sequence: Synthetic oligonucleotide
uugaucugcccaaccagac

SEQ ID NO: 1585143 - RNA, 19 nt, Artificial Sequence
  Description of Artificial Sequence: Synthetic oligonucleotide
ugcuaguggcauuggcugg

SEQ ID NO: 1585144 - RNA, 19 nt, Artificial Sequence
  Description of Artificial Sequence: Synthetic oligonucleotide
auggcggugucacagacaa

SEQ ID NO: 1585145 - RNA, 19 nt, Artificial Sequence
  Description of Artificial Sequence: Synthetic oligonucleotide
aguaguaaucaaagccacg

SEQ ID NO: 1585146 - RNA, 19 nt, Artificial Sequence
  Description of Artificial Sequence: Synthetic oligonucleotide
gaguaguccgcucgggagc

SEQ ID NO: 1585147 - RNA, 19 nt, Artificial Sequence
  Description of Artificial Sequence: Synthetic oligonucleotide
aaccuaccugucuacaguu

SEQ ID NO: 1585148 - RNA, 19 nt, Artificial Sequence
  Description of Artificial Sequence: Synthetic oligonucleotide
uuuggcaacggcaggcaau

SEQ ID NO: 1585149 - RNA, 19 nt, Artificial Sequence
  Description of Artificial Sequence: Synthetic oligonucleotide
gcccauauagagcaggaag

SEQ ID NO: 1585150 - RNA, 19 nt, Artificial Sequence
  Description of Artificial Sequence: Synthetic oligonucleotide
agggcuaucgccgugggga

SEQ ID NO: 1585151 - RNA, 19 nt, Artificial Sequence
  Description of Artificial Sequence: Synthetic oligonucleotide
uacccugugccccaccugu

SEQ ID NO: 1585152 - RNA, 19 nt, Artificial Sequence
  Description of Artificial Sequence: Synthetic oligonucleotide
ugagaggggaagcguggag

SEQ ID NO: 1585153 - RNA, 19 nt, Artificial Sequence
  Description of Artificial Sequence: Synthetic oligonucleotide
agccacgaaaauuggggug

SEQ ID NO: 1585154 - RNA, 19 nt, Artificial Sequence
  Description of Artificial Sequence: Synthetic oligonucleotide
gucuagcaugcuuaauaag

SEQ ID NO: 1585155 - RNA, 19 nt, Artificial Sequence
  Description of Artificial Sequence: Synthetic oligonucleotide
accgccugguacucggggc

SEQ ID NO: 1585156 - RNA, 19 nt, Artificial Sequence
  Description of Artificial Sequence: Synthetic oligonucleotide
uuaauaaggcggugcuagu

SEQ ID NO: 1585157 - RNA, 19 nt, Artificial Sequence
  Description of Artificial Sequence: Synthetic oligonucleotide
gguacuugccugcucaaug

SEQ ID NO: 1585158 - RNA, 19 nt, Artificial Sequence
  Description of Artificial Sequence: Synthetic oligonucleotide
uugccuaucauggcaguga

SEQ ID NO: 1585159 - RNA, 19 nt, Artificial Sequence
  Description of Artificial Sequence: Synthetic oligonucleotide
uggaugcuucucaaacaug

SEQ ID NO: 1585160 - RNA, 19 nt, Artificial Sequence
  Description of Artificial Sequence: Synthetic oligonucleotide
ugucauggcuauacgggau

SEQ ID NO: 1585161 - RNA, 19 nt, Artificial Sequence
  Description of Artificial Sequence: Synthetic oligonucleotide
gugaccuuuggcagcaccg

SEQ ID NO: 1585162 - RNA, 19 nt, Artificial Sequence
  Description of Artificial Sequence: Synthetic oligonucleotide
uaacagucccucucggggu

SEQ ID NO: 1585163 - RNA, 19 nt, Artificial Sequence
  Description of Artificial Sequence: Synthetic oligonucleotide
aguuguagccggguguguc

SEQ ID NO: 1585164 - RNA, 19 nt, Artificial Sequence
  Description of Artificial Sequence: Synthetic oligonucleotide
ugacauagccagccugcug

SEQ ID NO: 1585165 - RNA, 19 nt, Artificial Sequence
  Description of Artificial Sequence: Synthetic oligonucleotide
aucgccguggggaagaugu

SEQ ID NO: 1585166 - RNA, 19 nt, Artificial Sequence
  Description of Artificial Sequence: Synthetic oligonucleotide
ggaggguaguuguagccgg

SEQ ID NO: 1585167 - RNA, 19 nt, Artificial Sequence
  Description of Artificial Sequence: Synthetic oligonucleotide
ugccuaucauggcagugac

SEQ ID NO: 1585168 - RNA, 19 nt, Artificial Sequence
  Description of Artificial Sequence: Synthetic oligonucleotide
cugagaguaguccgcucgg

SEQ ID NO: 1585169 - RNA, 19 nt, Artificial Sequence
  Description of Artificial Sequence: Synthetic oligonucleotide
ugagaguaguccgcucggg

SEQ ID NO: 1585170 - RNA, 19 nt, Artificial Sequence
  Description of Artificial Sequence: Synthetic oligonucleotide
cacacaguuuggcaacggc

SEQ ID NO: 1585171 - RNA, 19 nt, Artificial Sequence
  Description of Artificial Sequence: Synthetic oligonucleotide
ccaugucauggcuauacgg

SEQ ID NO: 1585172 - RNA, 19 nt, Artificial Sequence
  Description of Artificial Sequence: Synthetic oligonucleotide
agagggaagacuaugccuu

SEQ ID NO: 1585173 - RNA, 19 nt, Artificial Sequence
  Description of Artificial Sequence: Synthetic oligonucleotide
cauuggcuggaacucugcc

SEQ ID NO: 1585174 - RNA, 19 nt, Artificial Sequence
  Description of Artificial Sequence: Synthetic oligonucleotide
agcccaucaaaguuccggu

SEQ ID NO: 1585175 - RNA, 19 nt, Artificial Sequence
  Description of Artificial Sequence: Synthetic oligonucleotide
cuguacgggcgcuggaugc

SEQ ID NO: 1585176 - RNA, 19 nt, Artificial Sequence
  Description of Artificial Sequence: Synthetic oligonucleotide
gaggcaagcuggcuccugc

SEQ ID NO: 1585177 - RNA, 19 nt, Artificial Sequence
  Description of Artificial Sequence: Synthetic oligonucleotide
ugggauggaacaguacccu

SEQ ID NO: 1585178 - RNA, 19 nt, Artificial Sequence
  Description of Artificial Sequence: Synthetic oligonucleotide
acuguacgggcgcuggaug

SEQ ID NO: 1585179 - RNA, 19 nt, Artificial Sequence
  Description of Artificial Sequence: Synthetic oligonucleotide
gcuauacgggauuccaaag

SEQ ID NO: 1585180 - RNA, 19 nt, Artificial Sequence
  Description of Artificial Sequence: Synthetic oligonucleotide
ucaugccuugccacuguac

SEQ ID NO: 1585181 - RNA, 19 nt, Artificial Sequence
  Description of Artificial Sequence: Synthetic oligonucleotide
uaaggcggugcuaguggca

SEQ ID NO: 1585182 - RNA, 19 nt, Artificial Sequence
  Description of Artificial Sequence: Synthetic oligonucleotide
uugccugcucaaugaacgc

SEQ ID NO: 1585183 - RNA, 19 nt, Artificial Sequence
  Description of Artificial Sequence: Synthetic oligonucleotide
ccugagaguaguccgcucg

SEQ ID NO: 1585184 - RNA, 19 nt, Artificial Sequence
  Description of Artificial Sequence: Synthetic oligonucleotide
ugaccuuuggcagcaccgc

SEQ ID NO: 1585185 - RNA, 19 nt, Artificial Sequence
  Description of Artificial Sequence: Synthetic oligonucleotide
uuccgcugguacuugccug

SEQ ID NO: 1585186 - RNA, 19 nt, Artificial Sequence
  Description of Artificial Sequence: Synthetic oligonucleotide
guagaggagcagucuacac

SEQ ID NO: 1585187 - RNA, 19 nt, Artificial Sequence
  Description of Artificial Sequence: Synthetic oligonucleotide
ucucuguaggggcgcagcu

SEQ ID NO: 1585188 - RNA, 19 nt, Artificial Sequence
  Description of Artificial Sequence: Synthetic oligonucleotide
ggaagcguggaguugcuca

SEQ ID NO: 1585189 - RNA, 19 nt, Artificial Sequence
  Description of Artificial Sequence: Synthetic oligonucleotide
uggccagcaugaaguuugg

SEQ ID NO: 1585190 - RNA, 19 nt, Artificial Sequence
  Description of Artificial Sequence: Synthetic oligonucleotide
acacaguuuggcaacggca

SEQ ID NO: 1585191 - RNA, 19 nt, Artificial Sequence
  Description of Artificial Sequence: Synthetic oligonucleotide
acucccuucccaaaguaga

SEQ ID NO: 1585192 - RNA, 19 nt, Artificial Sequence
  Description of Artificial Sequence: Synthetic oligonucleotide
caacggcaggcaauuuggg

SEQ ID NO: 1585193 - RNA, 19 nt, Artificial Sequence
  Description of Artificial Sequence: Synthetic oligonucleotide
cuacagcagggagucaccg

SEQ ID NO: 1585194 - RNA, 19 nt, Artificial Sequence
  Description of Artificial Sequence: Synthetic oligonucleotide
ugcucaggacccgugcucc

SEQ ID NO: 1585195 - RNA, 19 nt, Artificial Sequence
  Description of Artificial Sequence: Synthetic oligonucleotide
gcagucuacacagggagag

SEQ ID NO: 1585196 - RNA, 19 nt, Artificial Sequence
  Description of Artificial Sequence: Synthetic oligonucleotide
uuccgugcaaggccacuca

SEQ ID NO: 1585197 - RNA, 19 nt, Artificial Sequence
  Description of Artificial Sequence: Synthetic oligonucleotide
ucgcucuguggacaugcug

SEQ ID NO: 1585198 - RNA, 19 nt, Artificial Sequence
  Description of Artificial Sequence: Synthetic oligonucleotide
gagaguaguccgcucggga

SEQ ID NO: 1585199 - RNA, 19 nt, Artificial Sequence
  Description of Artificial Sequence: Synthetic oligonucleotide
ugucugugcagcccauguc

SEQ ID NO: 1585200 - RNA, 19 nt, Artificial Sequence
  Description of Artificial Sequence: Synthetic oligonucleotide
ugucuacaguuucuagaua

SEQ ID NO: 1585201 - RNA, 19 nt, Artificial Sequence
  Description of Artificial Sequence: Synthetic oligonucleotide
auuugccuaucauggcagu

SEQ ID NO: 1585202 - RNA, 19 nt, Artificial Sequence
  Description of Artificial Sequence: Synthetic oligonucleotide
agaugucuagcaugcuuaa

SEQ ID NO: 1585203 - RNA, 19 nt, Artificial Sequence
  Description of Artificial Sequence: Synthetic oligonucleotide
gaaccuaccugucuacagu

SEQ ID NO: 1585204 - RNA, 19 nt, Artificial Sequence
  Description of Artificial Sequence: Synthetic oligonucleotide
auggcuauacgggauucca

SEQ ID NO: 1585205 - RNA, 19 nt, Artificial Sequence
  Description of Artificial Sequence: Synthetic oligonucleotide
aggccaucgcucuguggac

SEQ ID NO: 1585206 - RNA, 19 nt, Artificial Sequence
  Description of Artificial Sequence: Synthetic oligonucleotide
uccgguuuggaggcaagcu

SEQ ID NO: 1585207 - RNA, 19 nt, Artificial Sequence
  Description of Artificial Sequence: Synthetic oligonucleotide
aagcguggaguugcucagg

SEQ ID NO: 1585208 - RNA, 19 nt, Artificial Sequence
  Description of Artificial Sequence: Synthetic oligonucleotide
cagggaggguaguuguagc

SEQ ID NO: 1585209 - RNA, 19 nt, Artificial Sequence
  Description of Artificial Sequence: Synthetic oligonucleotide
caucaaaguuccgguuugg

SEQ ID NO: 1585210 - RNA, 19 nt, Artificial Sequence
  Description of Artificial Sequence: Synthetic oligonucleotide
aacagucccucucgggguu

SEQ ID NO: 1585211 - RNA, 19 nt, Artificial Sequence
  Description of Artificial Sequence: Synthetic oligonucleotide
agcguggaguugcucagga

SEQ ID NO: 1585212 - RNA, 19 nt, Artificial Sequence
  Description of Artificial Sequence: Synthetic oligonucleotide
caauggcggugucacagac

SEQ ID NO: 1585213 - RNA, 19 nt, Artificial Sequence
  Description of Artificial Sequence: Synthetic oligonucleotide
guaagccagugcugggacc

SEQ ID NO: 1585214 - RNA, 19 nt, Artificial Sequence
  Description of Artificial Sequence: Synthetic oligonucleotide
guagacauccauggccagc

SEQ ID NO: 1585215 - RNA, 19 nt, Artificial Sequence
  Description of Artificial Sequence: Synthetic oligonucleotide
uggcuauacgggauuccaa

SEQ ID NO: 1585216 - RNA, 19 nt, Artificial Sequence
  Description of Artificial Sequence: Synthetic oligonucleotide
ggcaacggcaggcaauuug

SEQ ID NO: 1585217 - RNA, 19 nt, Artificial Sequence
  Description of Artificial Sequence: Synthetic oligonucleotide
ggagacuugcacgguaggg

SEQ ID NO: 1585218 - RNA, 19 nt, Artificial Sequence
  Description of Artificial Sequence: Synthetic oligonucleotide
agaggggaagcguggaguu

SEQ ID NO: 1585219 - RNA, 19 nt, Artificial Sequence
  Description of Artificial Sequence: Synthetic oligonucleotide
aaggcggugcuaguggcau

SEQ ID NO: 1585220 - RNA, 19 nt, Artificial Sequence
  Description of Artificial Sequence: Synthetic oligonucleotide
aauggcggugucacagaca

SEQ ID NO: 1585221 - RNA, 19 nt, Artificial Sequence
  Description of Artificial Sequence: Synthetic oligonucleotide
uccgcucgggagcuguugu

SEQ ID NO: 1585222 - RNA, 19 nt, Artificial Sequence
  Description of Artificial Sequence: Synthetic oligonucleotide
gggaggguaguuguagccg

SEQ ID NO: 1585223 - RNA, 19 nt, Artificial Sequence
  Description of Artificial Sequence: Synthetic oligonucleotide
caugcuuaauaaggcggug

SEQ ID NO: 1585224 - RNA, 19 nt, Artificial Sequence
  Description of Artificial Sequence: Synthetic oligonucleotide
uaggggcgcagcuucugca

SEQ ID NO: 1585225 - RNA, 19 nt, Artificial Sequence
  Description of Artificial Sequence: Synthetic oligonucleotide
cauggcuauacgggauucc

SEQ ID NO: 1585226 - RNA, 19 nt, Artificial Sequence
  Description of Artificial Sequence: Synthetic oligonucleotide
gaugccauuugccuaucau

SEQ ID NO: 1585227 - RNA, 19 nt, Artificial Sequence
  Description of Artificial Sequence: Synthetic oligonucleotide
gcuuaaucaugccuugcca

SEQ ID NO: 1585228 - RNA, 19 nt, Artificial Sequence
  Description of Artificial Sequence: Synthetic oligonucleotide
uguggacaugcuggacagg

SEQ ID NO: 1585229 - RNA, 19 nt, Artificial Sequence
  Description of Artificial Sequence: Synthetic oligonucleotide
cuagugcuuaaucaugccu

SEQ ID NO: 1585230 - RNA, 19 nt, Artificial Sequence
  Description of Artificial Sequence: Synthetic oligonucleotide
cuauacgggauuccaaagu

SEQ ID NO: 1585231 - RNA, 19 nt, Artificial Sequence
  Description of Artificial Sequence: Synthetic oligonucleotide
gucaccgaaggguccugag

SEQ ID NO: 1585232 - RNA, 19 nt, Artificial Sequence
  Description of Artificial Sequence: Synthetic oligonucleotide
ccuuccaaaccacauugug

SEQ ID NO: 1585233 - RNA, 19 nt, Artificial Sequence
  Description of Artificial Sequence: Synthetic oligonucleotide
cacgcugccugccagcuca

SEQ ID NO: 1585234 - RNA, 19 nt, Artificial Sequence
  Description of Artificial Sequence: Synthetic oligonucleotide
accucggccaagguggucu

SEQ ID NO: 1585235 - RNA, 19 nt, Artificial Sequence
  Description of Artificial Sequence: Synthetic oligonucleotide
uuguagccgggugugucug

SEQ ID NO: 1585236 - RNA, 19 nt, Artificial Sequence
  Description of Artificial Sequence: Synthetic oligonucleotide
uuggcaacggcaggcaauu

SEQ ID NO: 1585237 - RNA, 19 nt, Artificial Sequence
  Description of Artificial Sequence: Synthetic oligonucleotide
accugugaccugccaaaga

SEQ ID NO: 1585238 - RNA, 19 nt, Artificial Sequence
  Description of Artificial Sequence: Synthetic oligonucleotide
ggcuauacgggauuccaaa

SEQ ID NO: 1585239 - RNA, 19 nt, Artificial Sequence
  Description of Artificial Sequence: Synthetic oligonucleotide
aguaguccgcucgggagcu

SEQ ID NO: 1585240 - RNA, 19 nt, Artificial Sequence
  Description of Artificial Sequence: Synthetic oligonucleotide
ccaucacaagcuuuggcuc

SEQ ID NO: 1585241 - RNA, 19 nt, Artificial Sequence
  Description of Artificial Sequence: Synthetic oligonucleotide
uguaggggcgcagcuucug

SEQ ID NO: 1585242 - RNA, 19 nt, Artificial Sequence
  Description of Artificial Sequence: Synthetic oligonucleotide
uuccgguuuggaggcaagc

SEQ ID NO: 1585243 - RNA, 19 nt, Artificial Sequence
  Description of Artificial Sequence: Synthetic oligonucleotide
aggacccgugcucccauca

SEQ ID NO: 1585244 - RNA, 19 nt, Artificial Sequence
  Description of Artificial Sequence: Synthetic oligonucleotide
caagaugccauuugccuau

SEQ ID NO: 1585245 - RNA, 19 nt, Artificial Sequence
  Description of Artificial Sequence: Synthetic oligonucleotide
uacucggggcuuccucucu

SEQ ID NO: 1585246 - RNA, 19 nt, Artificial Sequence
  Description of Artificial Sequence: Synthetic oligonucleotide
guuucuagauagucuuccu

SEQ ID NO: 1585247 - RNA, 19 nt, Artificial Sequence
  Description of Artificial Sequence: Synthetic oligonucleotide
gacccgugcucccaucaca

SEQ ID NO: 1585248 - RNA, 19 nt, Artificial Sequence
  Description of Artificial Sequence: Synthetic oligonucleotide
agaugccauuugccuauca

SEQ ID NO: 1585249 - RNA, 19 nt, Artificial Sequence
  Description of Artificial Sequence: Synthetic oligonucleotide
ggugaccuuuggcagcacc

SEQ ID NO: 1585250 - RNA, 19 nt, Artificial Sequence
  Description of Artificial Sequence: Synthetic oligonucleotide
ugguccaggcggacagucu

SEQ ID NO: 1585251 - RNA, 19 nt, Artificial Sequence
  Description of Artificial Sequence: Synthetic oligonucleotide
uuggggugauaagagccau

SEQ ID NO: 1585252 - RNA, 19 nt, Artificial Sequence
  Description of Artificial Sequence: Synthetic oligonucleotide
gggcacaugcaugugggcc

SEQ ID NO: 1585253 - RNA, 19 nt, Artificial Sequence
  Description of Artificial Sequence: Synthetic oligonucleotide
gcucccaucacaagcuuug

SEQ ID NO: 1585254 - RNA, 19 nt, Artificial Sequence
  Description of Artificial Sequence: Synthetic oligonucleotide
uaguggcauuggcuggaac

SEQ ID NO: 1585255 - RNA, 19 nt, Artificial Sequence
  Description of Artificial Sequence: Synthetic oligonucleotide
gugcuuaaucaugccuugc

SEQ ID NO: 1585256 - RNA, 19 nt, Artificial Sequence
  Description of Artificial Sequence: Synthetic oligonucleotide
ccuaccugucuacaguuuc

SEQ ID NO: 1585257 - RNA, 19 nt, Artificial Sequence
  Description of Artificial Sequence: Synthetic oligonucleotide
gagcuguugucaucagcaa

SEQ ID NO: 1585258 - RNA, 19 nt, Artificial Sequence
  Description of Artificial Sequence: Synthetic oligonucleotide
caccgccugguacucgggg

SEQ ID NO: 1585259 - RNA, 19 nt, Artificial Sequence
  Description of Artificial Sequence: Synthetic oligonucleotide
gggauggaacaguacccug

SEQ ID NO: 1585260 - RNA, 19 nt, Artificial Sequence
  Description of Artificial Sequence: Synthetic oligonucleotide
ccgugcucccaucacaagc

SEQ ID NO: 1585261 - RNA, 19 nt, Artificial Sequence
  Description of Artificial Sequence: Synthetic oligonucleotide
uuccucucuguaggggcgc

SEQ ID NO: 1585262 - RNA, 19 nt, Artificial Sequence
  Description of Artificial Sequence: Synthetic oligonucleotide
agcccaugggccguugucu

SEQ ID NO: 1585263 - RNA, 19 nt, Artificial Sequence
  Description of Artificial Sequence: Synthetic oligonucleotide
ugagcccaugggccguugu

SEQ ID NO: 1585264 - RNA, 19 nt, Artificial Sequence
  Description of Artificial Sequence: Synthetic oligonucleotide
cacgauguugagguuuuca

SEQ ID NO: 1585265 - RNA, 19 nt, Artificial Sequence
  Description of Artificial Sequence: Synthetic oligonucleotide
ccuccauaggccaucgcuc

SEQ ID NO: 1585266 - RNA, 19 nt, Artificial Sequence
  Description of Artificial Sequence: Synthetic oligonucleotide
ggcuacagcagggagucac

SEQ ID NO: 1585267 - RNA, 19 nt, Artificial Sequence
  Description of Artificial Sequence: Synthetic oligonucleotide
gaaggguccugagaguagu

SEQ ID NO: 1585268 - RNA, 19 nt, Artificial Sequence
  Description of Artificial Sequence: Synthetic oligonucleotide
ccaguaauguagaaggccu

SEQ ID NO: 1585269 - RNA, 19 nt, Artificial Sequence
  Description of Artificial Sequence: Synthetic oligonucleotide
gagcccaugggccguuguc

SEQ ID NO: 1585270 - RNA, 19 nt, Artificial Sequence
  Description of Artificial Sequence: Synthetic oligonucleotide
cuuccgugcaaggccacuc

SEQ ID NO: 1585271 - RNA, 19 nt, Artificial Sequence
  Description of Artificial Sequence: Synthetic oligonucleotide
uacuuccgugcaaggccac

SEQ ID NO: 1585272 - RNA, 19 nt, Artificial Sequence
  Description of Artificial Sequence: Synthetic oligonucleotide
ugaacgccacugccuuuuc

SEQ ID NO: 1585273 - RNA, 19 nt, Artificial Sequence
  Description of Artificial Sequence: Synthetic oligonucleotide
uagccgggugugucugugc

SEQ ID NO: 1585274 - RNA, 19 nt, Artificial Sequence
  Description of Artificial Sequence: Synthetic oligonucleotide
gaggggaagcguggaguug

SEQ ID NO: 1585275 - RNA, 19 nt, Artificial Sequence
  Description of Artificial Sequence: Synthetic oligonucleotide
uuccuccauaggccaucgc

SEQ ID NO: 1585276 - RNA, 19 nt, Artificial Sequence
  Description of Artificial Sequence: Synthetic oligonucleotide
guuguagccgggugugucu

SEQ ID NO: 1585277 - RNA, 19 nt, Artificial Sequence
  Description of Artificial Sequence: Synthetic oligonucleotide
guaauguagaaggccuugu

SEQ ID NO: 1585278 - RNA, 19 nt, Artificial Sequence
  Description of Artificial Sequence: Synthetic oligonucleotide
ugggccguugucuccugua

SEQ ID NO: 1585279 - RNA, 19 nt, Artificial Sequence
  Description of Artificial Sequence: Synthetic oligonucleotide
agcagucuacacagggaga

SEQ ID NO: 1585280 - RNA, 19 nt, Artificial Sequence
  Description of Artificial Sequence: Synthetic oligonucleotide
guacccugugccccaccug

SEQ ID NO: 1585281 - RNA, 19 nt, Artificial Sequence
  Description of Artificial Sequence: Synthetic oligonucleotide
ggggcuacagcagggaguc

SEQ ID NO: 1585282 - RNA, 19 nt, Artificial Sequence
  Description of Artificial Sequence: Synthetic oligonucleotide
ugggacccgaugccacgcu

SEQ ID NO: 1585283 - RNA, 19 nt, Artificial Sequence
  Description of Artificial Sequence: Synthetic oligonucleotide
guacucggggcuuccucuc

SEQ ID NO: 1585284 - RNA, 19 nt, Artificial Sequence
  Description of Artificial Sequence: Synthetic oligonucleotide
ccaguaagccagugcuggg

SEQ ID NO: 1585285 - RNA, 19 nt, Artificial Sequence
  Description of Artificial Sequence: Synthetic oligonucleotide
uaguccgcucgggagcugu

SEQ ID NO: 1585286 - RNA, 19 nt, Artificial Sequence
  Description of Artificial Sequence: Synthetic oligonucleotide
cuaccugucuacaguuucu

SEQ ID NO: 1585287 - RNA, 19 nt, Artificial Sequence
  Description of Artificial Sequence: Synthetic oligonucleotide
gcggacagucugcaggccc

SEQ ID NO: 1585288 - RNA, 19 nt, Artificial Sequence
  Description of Artificial Sequence: Synthetic oligonucleotide
aggguaguuguagccgggu

SEQ ID NO: 1585289 - RNA, 19 nt, Artificial Sequence
  Description of Artificial Sequence: Synthetic oligonucleotide
ugguacuugccugcucaau

SEQ ID NO: 1585290 - RNA, 19 nt, Artificial Sequence
  Description of Artificial Sequence: Synthetic oligonucleotide
cugggacccgaugccacgc

SEQ ID NO: 1585291 - RNA, 19 nt, Artificial Sequence
  Description of Artificial Sequence: Synthetic oligonucleotide
cccaugucauggcuauacg

SEQ ID NO: 1585292 - RNA, 19 nt, Artificial Sequence
  Description of Artificial Sequence: Synthetic oligonucleotide
aguuccgguuuggaggcaa

SEQ ID NO: 1585293 - RNA, 19 nt, Artificial Sequence
  Description of Artificial Sequence: Synthetic oligonucleotide
cauauagagcaggaagggu

SEQ ID NO: 1585294 - RNA, 19 nt, Artificial Sequence
  Description of Artificial Sequence: Synthetic oligonucleotide
gugaaccuaccugucuaca

SEQ ID NO: 1585295 - RNA, 19 nt, Artificial Sequence
  Description of Artificial Sequence: Synthetic oligonucleotide
caccugugaccugccaaag

SEQ ID NO: 1585296 - RNA, 19 nt, Artificial Sequence
  Description of Artificial Sequence: Synthetic oligonucleotide
cuccauaggccaucgcucu

SEQ ID NO: 1585297 - RNA, 19 nt, Artificial Sequence
  Description of Artificial Sequence: Synthetic oligonucleotide
cagggcuaucgccgugggg

SEQ ID NO: 1585298 - RNA, 19 nt, Artificial Sequence
  Description of Artificial Sequence: Synthetic oligonucleotide
ccgugcaaggccacucagg

SEQ ID NO: 1585299 - RNA, 19 nt, Artificial Sequence
  Description of Artificial Sequence: Synthetic oligonucleotide
ggcggugcuaguggcauug

SEQ ID NO: 1585300 - RNA, 19 nt, Artificial Sequence
  Description of Artificial Sequence: Synthetic oligonucleotide
uacgggcgcuggaugcuuc

SEQ ID NO: 1585301 - RNA, 19 nt, Artificial Sequence
  Description of Artificial Sequence: Synthetic oligonucleotide
aggcaauuugggaggggcu

SEQ ID NO: 1585302 - RNA, 19 nt, Artificial Sequence
  Description of Artificial Sequence: Synthetic oligonucleotide
ccccaguaauguagaaggc

SEQ ID NO: 1585303 - RNA, 19 nt, Artificial Sequence
  Description of Artificial Sequence: Synthetic oligonucleotide
ggcaggcaauuugggaggg

SEQ ID NO: 1585304 - RNA, 19 nt, Artificial Sequence
  Description of Artificial Sequence: Synthetic oligonucleotide
aggcccauauagagcagga

SEQ ID NO: 1585305 - RNA, 19 nt, Artificial Sequence
  Description of Artificial Sequence: Synthetic oligonucleotide
guuccgguuuggaggcaag

SEQ ID NO: 1585306 - RNA, 19 nt, Artificial Sequence
  Description of Artificial Sequence: Synthetic oligonucleotide
acgggauuccaaaguagua

SEQ ID NO: 1585307 - RNA, 19 nt, Artificial Sequence
  Description of Artificial Sequence: Synthetic oligonucleotide
gcaagaacccuggugaccu

SEQ ID NO: 1585308 - RNA, 19 nt, Artificial Sequence
  Description of Artificial Sequence: Synthetic oligonucleotide
ugugggccaggcccauaua

SEQ ID NO: 1585309 - RNA, 19 nt, Artificial Sequence
  Description of Artificial Sequence: Synthetic oligonucleotide
uaucgccguggggaagaug

SEQ ID NO: 1585310 - RNA, 19 nt, Artificial Sequence
  Description of Artificial Sequence: Synthetic oligonucleotide
gcaauuugggaggggcuac

SEQ ID NO: 1585311 - RNA, 19 nt, Artificial Sequence
  Description of Artificial Sequence: Synthetic oligonucleotide
gguacucggggcuuccucu

SEQ ID NO: 1585312 - RNA, 19 nt, Artificial Sequence
  Description of Artificial Sequence: Synthetic oligonucleotide
agucaccgaaggguccuga

SEQ ID NO: 1585313 - RNA, 19 nt, Artificial Sequence
  Description of Artificial Sequence: Synthetic oligonucleotide
ucggggcuuccucucugua

SEQ ID NO: 1585314 - RNA, 19 nt, Artificial Sequence
  Description of Artificial Sequence: Synthetic oligonucleotide
gccacuguacgggcgcugg

SEQ ID NO: 1585315 - RNA, 19 nt, Artificial Sequence
  Description of Artificial Sequence: Synthetic oligonucleotide
acuuccgugcaaggccacu

SEQ ID NO: 1585316 - RNA, 19 nt, Artificial Sequence
  Description of Artificial Sequence: Synthetic oligonucleotide
uugcacgguagggccuuug

SEQ ID NO: 1585317 - RNA, 19 nt, Artificial Sequence
  Description of Artificial Sequence: Synthetic oligonucleotide
aaguuccgguuuggaggca

SEQ ID NO: 1585318 - RNA, 19 nt, Artificial Sequence
  Description of Artificial Sequence: Synthetic oligonucleotide
gugaccugccaaagagcac

SEQ ID NO: 1585319 - RNA, 19 nt, Artificial Sequence
  Description of Artificial Sequence: Synthetic oligonucleotide
accugccaaagagcaccuc

SEQ ID NO: 1585320 - RNA, 19 nt, Artificial Sequence
  Description of Artificial Sequence: Synthetic oligonucleotide
gcggugucacagacaaggg

SEQ ID NO: 1585321 - RNA, 19 nt, Artificial Sequence
  Description of Artificial Sequence: Synthetic oligonucleotide
gcuacagcagggagucacc

SEQ ID NO: 1585322 - RNA, 19 nt, Artificial Sequence
  Description of Artificial Sequence: Synthetic oligonucleotide
cuccugccagggcuaucgc

SEQ ID NO: 1585323 - RNA, 19 nt, Artificial Sequence
  Description of Artificial Sequence: Synthetic oligonucleotide
acccgugcucccaucacaa

SEQ ID NO: 1585324 - RNA, 19 nt, Artificial Sequence
  Description of Artificial Sequence: Synthetic oligonucleotide
ggauggaacaguacccugu

SEQ ID NO: 1585325 - RNA, 19 nt, Artificial Sequence
  Description of Artificial Sequence: Synthetic oligonucleotide
ucgccguggggaagauguc

SEQ ID NO: 1585326 - RNA, 19 nt, Artificial Sequence
  Description of Artificial Sequence: Synthetic oligonucleotide
gcuaguggcauuggcugga

SEQ ID NO: 1585327 - RNA, 19 nt, Artificial Sequence
  Description of Artificial Sequence: Synthetic oligonucleotide
ggcaauuugggaggggcua

SEQ ID NO: 1585328 - RNA, 19 nt, Artificial Sequence
  Description of Artificial Sequence: Synthetic oligonucleotide
gcuaucgccguggggaaga

SEQ ID NO: 1585329 - RNA, 19 nt, Artificial Sequence
  Description of Artificial Sequence: Synthetic oligonucleotide
augaccugucacacaguuu

SEQ ID NO: 1585330 - RNA, 19 nt, Artificial Sequence
  Description of Artificial Sequence: Synthetic oligonucleotide
gggacccgaugccacgcug

SEQ ID NO: 1585331 - RNA, 19 nt, Artificial Sequence
  Description of Artificial Sequence: Synthetic oligonucleotide
gaagggucuuccgcuggua

SEQ ID NO: 1585332 - RNA, 19 nt, Artificial Sequence
  Description of Artificial Sequence: Synthetic oligonucleotide
cgaaggguccugagaguag

SEQ ID NO: 1585333 - RNA, 19 nt, Artificial Sequence
  Description of Artificial Sequence: Synthetic oligonucleotide
cuucucaaacaugcaugua

SEQ ID NO: 1585334 - RNA, 19 nt, Artificial Sequence
  Description of Artificial Sequence: Synthetic oligonucleotide
ccugugccccaccugugac

SEQ ID NO: 1585335 - RNA, 19 nt, Artificial Sequence
  Description of Artificial Sequence: Synthetic oligonucleotide
ggccaguaagccagugcug

SEQ ID NO: 1585336 - RNA, 19 nt, Artificial Sequence
  Description of Artificial Sequence: Synthetic oligonucleotide
cccaugggccguugucucc

SEQ ID NO: 1585337 - RNA, 19 nt, Artificial Sequence
  Description of Artificial Sequence: Synthetic oligonucleotide
cacaugcaugugggccagg

SEQ ID NO: 1585338 - RNA, 19 nt, Artificial Sequence
  Description of Artificial Sequence: Synthetic oligonucleotide
ggacccgugcucccaucac

SEQ ID NO: 1585339 - RNA, 19 nt, Artificial Sequence
  Description of Artificial Sequence: Synthetic oligonucleotide
gacuugcacgguagggccu

SEQ ID NO: 1585340 - RNA, 19 nt, Artificial Sequence
  Description of Artificial Sequence: Synthetic oligonucleotide
caggacccgugcucccauc

SEQ ID NO: 1585341 - RNA, 19 nt, Artificial Sequence
  Description of Artificial Sequence: Synthetic oligonucleotide
gcccaugggccguugucuc

SEQ ID NO: 1585342 - RNA, 19 nt, Artificial Sequence
  Description of Artificial Sequence: Synthetic oligonucleotide
gcucaggacccgugcuccc

SEQ ID NO: 1585343 - RNA, 19 nt, Artificial Sequence
  Description of Artificial Sequence: Synthetic oligonucleotide
cagaggaguuguguuuucu

SEQ ID NO: 1585344 - RNA, 19 nt, Artificial Sequence
  Description of Artificial Sequence: Synthetic oligonucleotide
guccugagaguaguccgcu

SEQ ID NO: 1585345 - RNA, 19 nt, Artificial Sequence
  Description of Artificial Sequence: Synthetic oligonucleotide
gcuuaauaaggcggugcua

SEQ ID NO: 1585346 - RNA, 19 nt, Artificial Sequence
  Description of Artificial Sequence: Synthetic oligonucleotide
gcguggaguugcucaggac

SEQ ID NO: 1585347 - RNA, 19 nt, Artificial Sequence
  Description of Artificial Sequence: Synthetic oligonucleotide
gggccguugucuccuguaa

SEQ ID NO: 1585348 - RNA, 19 nt, Artificial Sequence
  Description of Artificial Sequence: Synthetic oligonucleotide
ccaggcccauauagagcag

SEQ ID NO: 1585349 - RNA, 19 nt, Artificial Sequence
  Description of Artificial Sequence: Synthetic oligonucleotide
ggcuaucgccguggggaag

SEQ ID NO: 1585350 - RNA, 19 nt, Artificial Sequence
  Description of Artificial Sequence: Synthetic oligonucleotide
ggagucaccgaaggguccu

SEQ ID NO: 1585351 - RNA, 19 nt, Artificial Sequence
  Description of Artificial Sequence: Synthetic oligonucleotide
ggccaucgcucuguggaca

SEQ ID NO: 1585352 - RNA, 19 nt, Artificial Sequence
  Description of Artificial Sequence: Synthetic oligonucleotide
cgugcaaggccacucaggu

SEQ ID NO: 1585353 - RNA, 19 nt, Artificial Sequence
  Description of Artificial Sequence: Synthetic oligonucleotide
cgugcucccaucacaagcu

SEQ ID NO: 1585354 - RNA, 19 nt, Artificial Sequence
  Description of Artificial Sequence: Synthetic oligonucleotide
guaguccgcucgggagcug

SEQ ID NO: 1585355 - RNA, 19 nt, Artificial Sequence
  Description of Artificial Sequence: Synthetic oligonucleotide
gcggugcuaguggcauugg

SEQ ID NO: 1585356 - RNA, 19 nt, Artificial Sequence
  Description of Artificial Sequence: Synthetic oligonucleotide
gggcuaucgccguggggaa

SEQ ID NO: 1585357 - RNA, 19 nt, Artificial Sequence
  Description of Artificial Sequence: Synthetic oligonucleotide
ggcccauauagagcaggaa

SEQ ID NO: 1585358 - RNA, 19 nt, Artificial Sequence
  Description of Artificial Sequence: Synthetic oligonucleotide
uggcaacggcaggcaauuu

SEQ ID NO: 1585359 - RNA, 19 nt, Artificial Sequence
  Description of Artificial Sequence: Synthetic oligonucleotide
ccgaaggguccugagagua

SEQ ID NO: 1585360 - RNA, 19 nt, Artificial Sequence
  Description of Artificial Sequence: Synthetic oligonucleotide
agucccucucgggguuccu

SEQ ID NO: 1585361 - RNA, 19 nt, Artificial Sequence
  Description of Artificial Sequence: Synthetic oligonucleotide
cacuguacgggcgcuggau

SEQ ID NO: 1585362 - RNA, 19 nt, Artificial Sequence
  Description of Artificial Sequence: Synthetic oligonucleotide
ccgaugccacgcugccugc

SEQ ID NO: 1585363 - RNA, 19 nt, Artificial Sequence
  Description of Artificial Sequence: Synthetic oligonucleotide
gcagcccaugucauggcua

SEQ ID NO: 1585364 - RNA, 19 nt, Artificial Sequence
  Description of Artificial Sequence: Synthetic oligonucleotide
gugcaaggccacucagguu

SEQ ID NO: 1585365 - RNA, 19 nt, Artificial Sequence
  Description of Artificial Sequence: Synthetic oligonucleotide
gugccccaccugugaccug

SEQ ID NO: 1585366 - RNA, 19 nt, Artificial Sequence
  Description of Artificial Sequence: Synthetic oligonucleotide
ggaguugcucaggacccgu

SEQ ID NO: 1585367 - RNA, 19 nt, Artificial Sequence
  Description of Artificial Sequence: Synthetic oligonucleotide
gccuaucauggcagugaca

SEQ ID NO: 1585368 - RNA, 19 nt, Artificial Sequence
  Description of Artificial Sequence: Synthetic oligonucleotide
gggaagcguggaguugcuc

SEQ ID NO: 1585369 - RNA, 19 nt, Artificial Sequence
  Description of Artificial Sequence: Synthetic oligonucleotide
gugcucccaucacaagcuu

SEQ ID NO: 1585370 - RNA, 19 nt, Artificial Sequence
  Description of Artificial Sequence: Synthetic oligonucleotide
cccugugccccaccuguga

SEQ ID NO: 1585371 - RNA, 19 nt, Artificial Sequence
  Description of Artificial Sequence: Synthetic oligonucleotide
caccucggccaaggugguc

SEQ ID NO: 1585372 - RNA, 19 nt, Artificial Sequence
  Description of Artificial Sequence: Synthetic oligonucleotide
ggucaacuuuguccuugau

SEQ ID NO: 1585373 - RNA, 19 nt, Artificial Sequence
  Description of Artificial Sequence: Synthetic oligonucleotide
gccaucgcucuguggacau

SEQ ID NO: 1585374 - RNA, 19 nt, Artificial Sequence
  Description of Artificial Sequence: Synthetic oligonucleotide
cucuguaggggcgcagcuu

SEQ ID NO: 1585375 - RNA, 19 nt, Artificial Sequence
  Description of Artificial Sequence: Synthetic oligonucleotide
ggugcccaagaugccauuu

SEQ ID NO: 1585376 - RNA, 19 nt, Artificial Sequence
  Description of Artificial Sequence: Synthetic oligonucleotide
gcccaucaaaguuccgguu

SEQ ID NO: 1585377 - RNA, 19 nt, Artificial Sequence
  Description of Artificial Sequence: Synthetic oligonucleotide
gccuuccaaaccacauugu

SEQ ID NO: 1585378 - RNA, 19 nt, Artificial Sequence
  Description of Artificial Sequence: Synthetic oligonucleotide
aguccgcucgggagcuguu

SEQ ID NO: 1585379 - RNA, 19 nt, Artificial Sequence
  Description of Artificial Sequence: Synthetic oligonucleotide
caagaacccuggugaccuu

SEQ ID NO: 1585380 - RNA, 19 nt, Artificial Sequence
  Description of Artificial Sequence: Synthetic oligonucleotide
guacgggcgcuggaugcuu

SEQ ID NO: 1585381 - RNA, 19 nt, Artificial Sequence
  Description of Artificial Sequence: Synthetic oligonucleotide
cgccacugccuuuucuaaa

SEQ ID NO: 1585382 - RNA, 19 nt, Artificial Sequence
  Description of Artificial Sequence: Synthetic oligonucleotide
ccacuguacgggcgcugga

SEQ ID NO: 1585383 - RNA, 19 nt, Artificial Sequence
  Description of Artificial Sequence: Synthetic oligonucleotide
ccaugggccguugucuccu

SEQ ID NO: 1585384 - RNA, 19 nt, Artificial Sequence
  Description of Artificial Sequence: Synthetic oligonucleotide
cuaucgccguggggaagau

SEQ ID NO: 1585385 - RNA, 19 nt, Artificial Sequence
  Description of Artificial Sequence: Synthetic oligonucleotide
cagcaucgucuuccagguu

SEQ ID NO: 1585386 - RNA, 19 nt, Artificial Sequence
  Description of Artificial Sequence: Synthetic oligonucleotide
gcccaaccagacuguccau

SEQ ID NO: 1585387 - RNA, 19 nt, Artificial Sequence
  Description of Artificial Sequence: Synthetic oligonucleotide
cuugcacgguagggccuuu

SEQ ID NO: 1585388 - RNA, 19 nt, Artificial Sequence
  Description of Artificial Sequence: Synthetic oligonucleotide
cgggcgcuggaugcuucuc

SEQ ID NO: 1585389 - RNA, 19 nt, Artificial Sequence
  Description of Artificial Sequence: Synthetic oligonucleotide
uuugauuaguauaagaacg

SEQ ID NO: 1585390 - RNA, 19 nt, Artificial Sequence
  Description of Artificial Sequence: Synthetic oligonucleotide
auuaaaacaccgcuaaacc

SEQ ID NO: 1585391 - RNA, 19 nt, Artificial Sequence
  Description of Artificial Sequence: Synthetic oligonucleotide
agaauuuauucucugaugg

SEQ ID NO: 1585392 - RNA, 19 nt, Artificial Sequence
  Description of Artificial Sequence: Synthetic oligonucleotide
aauguuaguuauccaagcc

SEQ ID NO: 1585393 - RNA, 19 nt, Artificial Sequence
  Description of Artificial Sequence: Synthetic oligonucleotide
uaucacaaagucaauaggg

SEQ ID NO: 1585394 - RNA, 19 nt, Artificial Sequence
  Description of Artificial Sequence: Synthetic oligonucleotide
uguaacaucgcaaauauaa

SEQ ID NO: 1585395 - RNA, 19 nt, Artificial Sequence
  Description of Artificial Sequence: Synthetic oligonucleotide
ucuacuuagucuuaaaacc

SEQ ID NO: 1585396 - RNA, 19 nt, Artificial Sequence
  Description of Artificial Sequence: Synthetic oligonucleotide
uguuuuaacaauuuagucu

SEQ ID NO: 1585397 - RNA, 19 nt, Artificial Sequence
  Description of Artificial Sequence: Synthetic oligonucleotide
aaagucuuaccauacuuuc

SEQ ID NO: 1585398 - RNA, 19 nt, Artificial Sequence
  Description of Artificial Sequence: Synthetic oligonucleotide
uuauaaacacauuacaggu

SEQ ID NO: 1585399 - RNA, 19 nt, Artificial Sequence
  Description of Artificial Sequence: Synthetic oligonucleotide
uuuucuuacacacaucuac

SEQ ID NO: 1585400 - RNA, 19 nt, Artificial Sequence
  Description of Artificial Sequence: Synthetic oligonucleotide
ucuagagccaaauauaacu

SEQ ID NO: 1585401 - RNA, 19 nt, Artificial Sequence
  Description of Artificial Sequence: Synthetic oligonucleotide
uauguuuuaacaauuuagu

SEQ ID NO: 1585402 - RNA, 19 nt, Artificial Sequence
  Description of Artificial Sequence: Synthetic oligonucleotide
uggauaaugagcaaagugu

SEQ ID NO: 1585403 - RNA, 19 nt, Artificial Sequence
  Description of Artificial Sequence: Synthetic oligonucleotide
uaacaucgcaaauauaagg

SEQ ID NO: 1585404 - RNA, 19 nt, Artificial Sequence
  Description of Artificial Sequence: Synthetic oligonucleotide
uuaaaauuacuagacaucu

SEQ ID NO: 1585405 - RNA, 19 nt, Artificial Sequence
  Description of Artificial Sequence: Synthetic oligonucleotide
uggugaaugacuuugauua

SEQ ID NO: 1585406 - RNA, 19 nt, Artificial Sequence
  Description of Artificial Sequence: Synthetic oligonucleotide
gagacuaagaacuuguuca

SEQ ID NO: 1585407 - RNA, 19 nt, Artificial Sequence
  Description of Artificial Sequence: Synthetic oligonucleotide
auuaguauaagaacgugcg

SEQ ID NO: 1585408 - RNA, 19 nt, Artificial Sequence
  Description of Artificial Sequence: Synthetic oligonucleotide
acaauuuacacaucaagca

SEQ ID NO: 1585409 - RNA, 19 nt, Artificial Sequence
  Description of Artificial Sequence: Synthetic oligonucleotide
ugcauaaugugcaaaauaa

SEQ ID NO: 1585410 - RNA, 19 nt, Artificial Sequence
  Description of Artificial Sequence: Synthetic oligonucleotide
ugauacaauuuacacauca

SEQ ID NO: 1585411 - RNA, 19 nt, Artificial Sequence
  Description of Artificial Sequence: Synthetic oligonucleotide
acuaagaacuuguucaguc

SEQ ID NO: 1585412 - RNA, 19 nt, Artificial Sequence
  Description of Artificial Sequence: Synthetic oligonucleotide
aaaugauaacaagacuacc

SEQ ID NO: 1585413 - RNA, 19 nt, Artificial Sequence
  Description of Artificial Sequence: Synthetic oligonucleotide
uaaaugauaacaagacuac

SEQ ID NO: 1585414 - RNA, 19 nt, Artificial Sequence
  Description of Artificial Sequence: Synthetic oligonucleotide
uuuagucuauuuaaaauau

SEQ ID NO: 1585415 - RNA, 19 nt, Artificial Sequence
  Description of Artificial Sequence: Synthetic oligonucleotide
uguuaguuauccaagccug

SEQ ID NO: 1585416 - RNA, 19 nt, Artificial Sequence
  Description of Artificial Sequence: Synthetic oligonucleotide
auguuuuaacaauuuaguc

SEQ ID NO: 1585417 - RNA, 19 nt, Artificial Sequence
  Description of Artificial Sequence: Synthetic oligonucleotide
aaccaaagugaaguaaacc

SEQ ID NO: 1585418 - RNA, 19 nt, Artificial Sequence
  Description of Artificial Sequence: Synthetic oligonucleotide
gagugauucaguuaacacc

SEQ ID NO: 1585419 - RNA, 19 nt, Artificial Sequence
  Description of Artificial Sequence: Synthetic oligonucleotide
auaaugagcaaaguguaac

SEQ ID NO: 1585420 - RNA, 19 nt, Artificial Sequence
  Description of Artificial Sequence: Synthetic oligonucleotide
ugccuuacaacuuuguuca

SEQ ID NO: 1585421 - RNA, 19 nt, Artificial Sequence
  Description of Artificial Sequence: Synthetic oligonucleotide
aacuacaaucaucucauca

SEQ ID NO: 1585422 - RNA, 19 nt, Artificial Sequence
  Description of Artificial Sequence: Synthetic oligonucleotide
uaaggacucagaaugcuag

SEQ ID NO: 1585423 - RNA, 19 nt, Artificial Sequence
  Description of Artificial Sequence: Synthetic oligonucleotide
uaaaacaccgcuaaaccaa

SEQ ID NO: 1585424 - RNA, 19 nt, Artificial Sequence
  Description of Artificial Sequence: Synthetic oligonucleotide
uagucuuaaaaccauugca

SEQ ID NO: 1585425 - RNA, 19 nt, Artificial Sequence
  Description of Artificial Sequence: Synthetic oligonucleotide
cuuugauuaguauaagaac

SEQ ID NO: 1585426 - RNA, 19 nt, Artificial Sequence
  Description of Artificial Sequence: Synthetic oligonucleotide
agagugauucaguuaacac

SEQ ID NO: 1585427 - RNA, 19 nt, Artificial Sequence
  Description of Artificial Sequence: Synthetic oligonucleotide
aauagauaauggcacauua

SEQ ID NO: 1585428 - RNA, 19 nt, Artificial Sequence
  Description of Artificial Sequence: Synthetic oligonucleotide
uauuaaaacaccgcuaaac

SEQ ID NO: 1585429 - RNA, 19 nt, Artificial Sequence
  Description of Artificial Sequence: Synthetic oligonucleotide
ugugcaaaauaaaaggcaa

SEQ ID NO: 1585430 - RNA, 19 nt, Artificial Sequence
  Description of Artificial Sequence: Synthetic oligonucleotide
acauucaacaacagaaacc

SEQ ID NO: 1585431 - RNA, 19 nt, Artificial Sequence
  Description of Artificial Sequence: Synthetic oligonucleotide
aagcacuaaagucuuacca

SEQ ID NO: 1585432 - RNA, 19 nt, Artificial Sequence
  Description of Artificial Sequence: Synthetic oligonucleotide
aacugcagucaucuauugc

SEQ ID NO: 1585433 - RNA, 19 nt, Artificial Sequence
  Description of Artificial Sequence: Synthetic oligonucleotide
ugacaauaguguaguaugg

SEQ ID NO: 1585434 - RNA, 19 nt, Artificial Sequence
  Description of Artificial Sequence: Synthetic oligonucleotide
aguaauggcaucugaaacu

SEQ ID NO: 1585435 - RNA, 19 nt, Artificial Sequence
  Description of Artificial Sequence: Synthetic oligonucleotide
cacaacuuauuauaaacac

SEQ ID NO: 1585436 - RNA, 19 nt, Artificial Sequence
  Description of Artificial Sequence: Synthetic oligonucleotide
uaucauacauuauauaauu

SEQ ID NO: 1585437 - RNA, 19 nt, Artificial Sequence
  Description of Artificial Sequence: Synthetic oligonucleotide
agagacuaagaacuuguuc

SEQ ID NO: 1585438 - RNA, 19 nt, Artificial Sequence
  Description of Artificial Sequence: Synthetic oligonucleotide
uugauuaguauaagaacgu

SEQ ID NO: 1585439 - RNA, 19 nt, Artificial Sequence
  Description of Artificial Sequence: Synthetic oligonucleotide
aagacuaccaucacagcuc

SEQ ID NO: 1585440 - RNA, 19 nt, Artificial Sequence
  Description of Artificial Sequence: Synthetic oligonucleotide
gugacaauaguguaguaug

SEQ ID NO: 1585441 - RNA, 19 nt, Artificial Sequence
  Description of Artificial Sequence: Synthetic oligonucleotide
gauuaguauaagaacgugc

SEQ ID NO: 1585442 - RNA, 19 nt, Artificial Sequence
  Description of Artificial Sequence: Synthetic oligonucleotide
aguguaacuacaaucaucu

SEQ ID NO: 1585443 - RNA, 19 nt, Artificial Sequence
  Description of Artificial Sequence: Synthetic oligonucleotide
aacaucgcaaauauaagga

SEQ ID NO: 1585444 - RNA, 19 nt, Artificial Sequence
  Description of Artificial Sequence: Synthetic oligonucleotide
ucaauagggacucugcaaa

SEQ ID NO: 1585445 - RNA, 19 nt, Artificial Sequence
  Description of Artificial Sequence: Synthetic oligonucleotide
acaucgcaaauauaaggac

SEQ ID NO: 1585446 - RNA, 19 nt, Artificial Sequence
  Description of Artificial Sequence: Synthetic oligonucleotide
acucaacuauuuuacaaag

SEQ ID NO: 1585447 - RNA, 19 nt, Artificial Sequence
  Description of Artificial Sequence: Synthetic oligonucleotide
cuaauagucuuccuuuugc

SEQ ID NO: 1585448 - RNA, 19 nt, Artificial Sequence
  Description of Artificial Sequence: Synthetic oligonucleotide
aauagggacucugcaaaac

SEQ ID NO: 1585449 - RNA, 19 nt, Artificial Sequence
  Description of Artificial Sequence: Synthetic oligonucleotide
uuaacguaacugcagaaua

SEQ ID NO: 1585450 - RNA, 19 nt, Artificial Sequence
  Description of Artificial Sequence: Synthetic oligonucleotide
ucuuaaaaccauugcaggu

SEQ ID NO: 1585451 - RNA, 19 nt, Artificial Sequence
  Description of Artificial Sequence: Synthetic oligonucleotide
uaggacucaacuauuuuac

SEQ ID NO: 1585452 - RNA, 19 nt, Artificial Sequence
  Description of Artificial Sequence: Synthetic oligonucleotide
uggaauguuaguuauccaa

SEQ ID NO: 1585453 - RNA, 19 nt, Artificial Sequence
  Description of Artificial Sequence: Synthetic oligonucleotide
guaguauggaugcagaaca

SEQ ID NO: 1585454 - RNA, 19 nt, Artificial Sequence
  Description of Artificial Sequence: Synthetic oligonucleotide
uagucaugcaaacuguaca

SEQ ID NO: 1585455 - RNA, 19 nt, Artificial Sequence
  Description of Artificial Sequence: Synthetic oligonucleotide
aaguguaacuacaaucauc

SEQ ID NO: 1585456 - RNA, 19 nt, Artificial Sequence
  Description of Artificial Sequence: Synthetic oligonucleotide
aacccuguaucauacauua

SEQ ID NO: 1585457 - RNA, 19 nt, Artificial Sequence
  Description of Artificial Sequence: Synthetic oligonucleotide
uuuacagaauggaauccug

SEQ ID NO: 1585458 - RNA, 19 nt, Artificial Sequence
  Description of Artificial Sequence: Synthetic oligonucleotide
ucugaaacugcagucaucu

SEQ ID NO: 1585459 - RNA, 19 nt, Artificial Sequence
  Description of Artificial Sequence: Synthetic oligonucleotide
agugauucaguuaacaccu

SEQ ID NO: 1585460 - RNA, 19 nt, Artificial Sequence
  Description of Artificial Sequence: Synthetic oligonucleotide
uacuagacaucugauaacc

SEQ ID NO: 1585461 - RNA, 19 nt, Artificial Sequence
  Description of Artificial Sequence: Synthetic oligonucleotide
ugggcaaagaaauggaggu

SEQ ID NO: 1585462 - RNA, 19 nt, Artificial Sequence
  Description of Artificial Sequence: Synthetic oligonucleotide
ucuuaccauacuuucauuc

SEQ ID NO: 1585463 - RNA, 19 nt, Artificial Sequence
  Description of Artificial Sequence: Synthetic oligonucleotide
uagacaucugauaacccug

SEQ ID NO: 1585464 - RNA, 19 nt, Artificial Sequence
  Description of Artificial Sequence: Synthetic oligonucleotide
uuacagaauggaauccugc

SEQ ID NO: 1585465 - RNA, 19 nt, Artificial Sequence
  Description of Artificial Sequence: Synthetic oligonucleotide
uggcacauuagaaaacuca

SEQ ID NO: 1585466 - RNA, 19 nt, Artificial Sequence
  Description of Artificial Sequence: Synthetic oligonucleotide
caauaguguaguauggaug

SEQ ID NO: 1585467 - RNA, 19 nt, Artificial Sequence
  Description of Artificial Sequence: Synthetic oligonucleotide
ucugcuacaccaacucuag

SEQ ID NO: 1585468 - RNA, 19 nt, Artificial Sequence
  Description of Artificial Sequence: Synthetic oligonucleotide
ugaugguuuagucaugcaa

SEQ ID NO: 1585469 - RNA, 19 nt, Artificial Sequence
  Description of Artificial Sequence: Synthetic oligonucleotide
auaacaagacuaccaucac

SEQ ID NO: 1585470 - RNA, 19 nt, Artificial Sequence
  Description of Artificial Sequence: Synthetic oligonucleotide
aagaacgugcgugaagcac

SEQ ID NO: 1585471 - RNA, 19 nt, Artificial Sequence
  Description of Artificial Sequence: Synthetic oligonucleotide
accacaauggauuaaugau

SEQ ID NO: 1585472 - RNA, 19 nt, Artificial Sequence
  Description of Artificial Sequence: Synthetic oligonucleotide
gguuuagucaugcaaacug

SEQ ID NO: 1585473 - RNA, 19 nt, Artificial Sequence
  Description of Artificial Sequence: Synthetic oligonucleotide
aguauaagaacgugcguga

SEQ ID NO: 1585474 - RNA, 19 nt, Artificial Sequence
  Description of Artificial Sequence: Synthetic oligonucleotide
guucauaucacaaagucaa

SEQ ID NO: 1585475 - RNA, 19 nt, Artificial Sequence
  Description of Artificial Sequence: Synthetic oligonucleotide
ugauaacccuguaucauac

SEQ ID NO: 1585476 - RNA, 19 nt, Artificial Sequence
  Description of Artificial Sequence: Synthetic oligonucleotide
caucugauaacccuguauc

SEQ ID NO: 1585477 - RNA, 19 nt, Artificial Sequence
  Description of Artificial Sequence: Synthetic oligonucleotide
uuagucaugcaaacuguac

SEQ ID NO: 1585478 - RNA, 19 nt, Artificial Sequence
  Description of Artificial Sequence: Synthetic oligonucleotide
aacaccgcuaaaccaaagu

SEQ ID NO: 1585479 - RNA, 19 nt, Artificial Sequence
  Description of Artificial Sequence: Synthetic oligonucleotide
aaaauagauaauggcacau

SEQ ID NO: 1585480 - RNA, 19 nt, Artificial Sequence
  Description of Artificial Sequence: Synthetic oligonucleotide
uauuuacagaauggaaucc

SEQ ID NO: 1585481 - RNA, 19 nt, Artificial Sequence
  Description of Artificial Sequence: Synthetic oligonucleotide
uaaugagcaaaguguaacu

SEQ ID NO: 1585482 - RNA, 19 nt, Artificial Sequence
  Description of Artificial Sequence: Synthetic oligonucleotide
auauaaggacucagaaugc

SEQ ID NO: 1585483 - RNA, 19 nt, Artificial Sequence
  Description of Artificial Sequence: Synthetic oligonucleotide
aucgcaaauauaaggacuc

SEQ ID NO: 1585484 - RNA, 19 nt, Artificial Sequence
  Description of Artificial Sequence: Synthetic oligonucleotide
gcaagaaucagucuuccag

SEQ ID NO: 1585485 - RNA, 19 nt, Artificial Sequence
  Description of Artificial Sequence: Synthetic oligonucleotide
gacuacacaacuuauuaua

SEQ ID NO: 1585486 - RNA, 19 nt, Artificial Sequence
  Description of Artificial Sequence: Synthetic oligonucleotide
augauaacaagacuaccau

SEQ ID NO: 1585487 - RNA, 19 nt, Artificial Sequence
  Description of Artificial Sequence: Synthetic oligonucleotide
agaacacagguuuaaaaua

SEQ ID NO: 1585488 - RNA, 19 nt, Artificial Sequence
  Description of Artificial Sequence: Synthetic oligonucleotide
acaccgcuaaaccaaagug

SEQ ID NO: 1585489 - RNA, 19 nt, Artificial Sequence
  Description of Artificial Sequence: Synthetic oligonucleotide
gguauaaaugauaacaaga

SEQ ID NO: 1585490 - RNA, 19 nt, Artificial Sequence
  Description of Artificial Sequence: Synthetic oligonucleotide
ugcgugaagcacuaaaguc

SEQ ID NO: 1585491 - RNA, 19 nt, Artificial Sequence
  Description of Artificial Sequence: Synthetic oligonucleotide
auggauuaaugauacaauu

SEQ ID NO: 1585492 - RNA, 19 nt, Artificial Sequence
  Description of Artificial Sequence: Synthetic oligonucleotide
ucccuagugccuuacaacu

SEQ ID NO: 1585493 - RNA, 19 nt, Artificial Sequence
  Description of Artificial Sequence: Synthetic oligonucleotide
cacacacacacacacacac

SEQ ID NO: 1585494 - RNA, 19 nt, Artificial Sequence
  Description of Artificial Sequence: Synthetic oligonucleotide
uuaguauaagaacgugcgu

SEQ ID NO: 1585495 - RNA, 19 nt, Artificial Sequence
  Description of Artificial Sequence: Synthetic oligonucleotide
agcacuaaagucuuaccau

SEQ ID NO: 1585496 - RNA, 19 nt, Artificial Sequence
  Description of Artificial Sequence: Synthetic oligonucleotide
uaacguaacugcagaauaa

SEQ ID NO: 1585497 - RNA, 19 nt, Artificial Sequence
  Description of Artificial Sequence: Synthetic oligonucleotide
gaaugcuagguacagaagu

SEQ ID NO: 1585498 - RNA, 19 nt, Artificial Sequence
  Description of Artificial Sequence: Synthetic oligonucleotide
cucaguauuccacagguga

SEQ ID NO: 1585499 - RNA, 19 nt, Artificial Sequence
  Description of Artificial Sequence: Synthetic oligonucleotide
aacaagcuacaucauggaa

SEQ ID NO: 1585500 - RNA, 19 nt, Artificial Sequence
  Description of Artificial Sequence: Synthetic oligonucleotide
ucaguauuccacaggugac

SEQ ID NO: 1585501 - RNA, 19 nt, Artificial Sequence
  Description of Artificial Sequence: Synthetic oligonucleotide
ugauuaguauaagaacgug

SEQ ID NO: 1585502 - RNA, 19 nt, Artificial Sequence
  Description of Artificial Sequence: Synthetic oligonucleotide
ugaagcacuaaagucuuac

SEQ ID NO: 1585503 - RNA, 19 nt, Artificial Sequence
  Description of Artificial Sequence: Synthetic oligonucleotide
cuacuuagucuuaaaacca

SEQ ID NO: 1585504 - RNA, 19 nt, Artificial Sequence
  Description of Artificial Sequence: Synthetic oligonucleotide
uuuaacguaacugcagaau

SEQ ID NO: 1585505 - RNA, 19 nt, Artificial Sequence
  Description of Artificial Sequence: Synthetic oligonucleotide
gaagcacuaaagucuuacc

SEQ ID NO: 1585506 - RNA, 19 nt, Artificial Sequence
  Description of Artificial Sequence: Synthetic oligonucleotide
uaguauggaugcagaacag

SEQ ID NO: 1585507 - RNA, 19 nt, Artificial Sequence
  Description of Artificial Sequence: Synthetic oligonucleotide
augacuuugauuaguauaa

SEQ ID NO: 1585508 - RNA, 19 nt, Artificial Sequence
  Description of Artificial Sequence: Synthetic oligonucleotide
agucaugcaaacuguacau

SEQ ID NO: 1585509 - RNA, 19 nt, Artificial Sequence
  Description of Artificial Sequence: Synthetic oligonucleotide
aucacacacacgugcgcgc

SEQ ID NO: 1585510 - RNA, 19 nt, Artificial Sequence
  Description of Artificial Sequence: Synthetic oligonucleotide
uuuuaacguaacugcagaa

SEQ ID NO: 1585511 - RNA, 19 nt, Artificial Sequence
  Description of Artificial Sequence: Synthetic oligonucleotide
ugauaacaagacuaccauc

SEQ ID NO: 1585512 - RNA, 19 nt, Artificial Sequence
  Description of Artificial Sequence: Synthetic oligonucleotide
uauaaggacucagaaugcu

SEQ ID NO: 1585513 - RNA, 19 nt, Artificial Sequence
  Description of Artificial Sequence: Synthetic oligonucleotide
caacuuauuauaaacacau

SEQ ID NO: 1585514 - RNA, 19 nt, Artificial Sequence
  Description of Artificial Sequence: Synthetic oligonucleotide
uuacuagacaucugauaac

SEQ ID NO: 1585515 - RNA, 19 nt, Artificial Sequence
  Description of Artificial Sequence: Synthetic oligonucleotide
gcaaaguguaacuacaauc

SEQ ID NO: 1585516 - RNA, 19 nt, Artificial Sequence
  Description of Artificial Sequence: Synthetic oligonucleotide
uacuuagucuuaaaaccau

SEQ ID NO: 1585517 - RNA, 19 nt, Artificial Sequence
  Description of Artificial Sequence: Synthetic oligonucleotide
uuauuaaaacaccgcuaaa

SEQ ID NO: 1585518 - RNA, 19 nt, Artificial Sequence
  Description of Artificial Sequence: Synthetic oligonucleotide
cuuaccauacuuucauuca

SEQ ID NO: 1585519 - RNA, 19 nt, Artificial Sequence
  Description of Artificial Sequence: Synthetic oligonucleotide
cacacacacacaucaaaac

SEQ ID NO: 1585520 - RNA, 19 nt, Artificial Sequence
  Description of Artificial Sequence: Synthetic oligonucleotide
uaccauacuuucauucacu

SEQ ID NO: 1585521 - RNA, 19 nt, Artificial Sequence
  Description of Artificial Sequence: Synthetic oligonucleotide
aaaccauugcaggugguga

SEQ ID NO: 1585522 - RNA, 19 nt, Artificial Sequence
  Description of Artificial Sequence: Synthetic oligonucleotide
guaacaucgcaaauauaag

SEQ ID NO: 1585523 - RNA, 19 nt, Artificial Sequence
  Description of Artificial Sequence: Synthetic oligonucleotide
acuaaagucuuaccauacu

SEQ ID NO: 1585524 - RNA, 19 nt, Artificial Sequence
  Description of Artificial Sequence: Synthetic oligonucleotide
cacacacacacacacauca

SEQ ID NO: 1585525 - RNA, 19 nt, Artificial Sequence
  Description of Artificial Sequence: Synthetic oligonucleotide
aaugagcaaaguguaacua

SEQ ID NO: 1585526 - RNA, 19 nt, Artificial Sequence
  Description of Artificial Sequence: Synthetic oligonucleotide
aucugauaacccuguauca

SEQ ID NO: 1585527 - RNA, 19 nt, Artificial Sequence
  Description of Artificial Sequence: Synthetic oligonucleotide
gugccuuacaacuuuguuc

SEQ ID NO: 1585528 - RNA, 19 nt, Artificial Sequence
  Description of Artificial Sequence: Synthetic oligonucleotide
ucauaucacaaagucaaua

SEQ ID NO: 1585529 - RNA, 19 nt, Artificial Sequence
  Description of Artificial Sequence: Synthetic oligonucleotide
cacuaaagucuuaccauac

SEQ ID NO: 1585530 - RNA, 19 nt, Artificial Sequence
  Description of Artificial Sequence: Synthetic oligonucleotide
gaacagacuacacaacuua

SEQ ID NO: 1585531 - RNA, 19 nt, Artificial Sequence
  Description of Artificial Sequence: Synthetic oligonucleotide
auaguacaguuuguguaac

SEQ ID NO: 1585532 - RNA, 19 nt, Artificial Sequence
  Description of Artificial Sequence: Synthetic oligonucleotide
acuagacaucugauaaccc

SEQ ID NO: 1585533 - RNA, 19 nt, Artificial Sequence
  Description of Artificial Sequence: Synthetic oligonucleotide
acaacuuauuauaaacaca

SEQ ID NO: 1585534 - RNA, 19 nt, Artificial Sequence
  Description of Artificial Sequence: Synthetic oligonucleotide
aggugacuggauaaugagc

SEQ ID NO: 1585535 - RNA, 19 nt, Artificial Sequence
  Description of Artificial Sequence: Synthetic oligonucleotide
agucaauagggacucugca

SEQ ID NO: 1585536 - RNA, 19 nt, Artificial Sequence
  Description of Artificial Sequence: Synthetic oligonucleotide
uuagucuauuuaaaauauu

SEQ ID NO: 1585537 - RNA, 19 nt, Artificial Sequence
  Description of Artificial Sequence: Synthetic oligonucleotide
guauggaugcagaacagac

SEQ ID NO: 1585538 - RNA, 19 nt, Artificial Sequence
  Description of Artificial Sequence: Synthetic oligonucleotide
aacucuagagccaaauaua

SEQ ID NO: 1585539 - RNA, 19 nt, Artificial Sequence
  Description of Artificial Sequence: Synthetic oligonucleotide
aacguaacugcagaauaaa

SEQ ID NO: 1585540 - RNA, 19 nt, Artificial Sequence
  Description of Artificial Sequence: Synthetic oligonucleotide
uaguuauccaagccugcac

SEQ ID NO: 1585541 - RNA, 19 nt, Artificial Sequence
  Description of Artificial Sequence: Synthetic oligonucleotide
cugaucgucugcuacacca

SEQ ID NO: 1585542 - RNA, 19 nt, Artificial Sequence
  Description of Artificial Sequence: Synthetic oligonucleotide
ccauuuauuaaaacaccgc

SEQ ID NO: 1585543 - RNA, 19 nt, Artificial Sequence
  Description of Artificial Sequence: Synthetic oligonucleotide
ggaauguuaguuauccaag

SEQ ID NO: 1585544 - RNA, 19 nt, Artificial Sequence
  Description of Artificial Sequence: Synthetic oligonucleotide
uucccuagugccuuacaac

SEQ ID NO: 1585545 - RNA, 19 nt, Artificial Sequence
  Description of Artificial Sequence: Synthetic oligonucleotide
aacuuugguauaaaugaua

SEQ ID NO: 1585546 - RNA, 19 nt, Artificial Sequence
  Description of Artificial Sequence: Synthetic oligonucleotide
uucuuacacacaucuacua

SEQ ID NO: 1585547 - RNA, 19 nt, Artificial Sequence
  Description of Artificial Sequence: Synthetic oligonucleotide
agcaaauuuuaaaauuacu

SEQ ID NO: 1585548 - RNA, 19 nt, Artificial Sequence
  Description of Artificial Sequence: Synthetic oligonucleotide
acacacauucaacaacaga

SEQ ID NO: 1585549 - RNA, 19 nt, Artificial Sequence
  Description of Artificial Sequence: Synthetic oligonucleotide
aguaaaccacaauggauua

SEQ ID NO: 1585550 - RNA, 19 nt, Artificial Sequence
  Description of Artificial Sequence: Synthetic oligonucleotide
acaucugauaacccuguau

SEQ ID NO: 1585551 - RNA, 19 nt, Artificial Sequence
  Description of Artificial Sequence: Synthetic oligonucleotide
caucagaacaagcuacauc

SEQ ID NO: 1585552 - RNA, 19 nt, Artificial Sequence
  Description of Artificial Sequence: Synthetic oligonucleotide
agacuacacaacuuauuau

SEQ ID NO: 1585553 - RNA, 19 nt, Artificial Sequence
  Description of Artificial Sequence: Synthetic oligonucleotide
acaucauggaauguuaguu

SEQ ID NO: 1585554 - RNA, 19 nt, Artificial Sequence
  Description of Artificial Sequence: Synthetic oligonucleotide
aaguuuucuuacacacauc

SEQ ID NO: 1585555 - RNA, 19 nt, Artificial Sequence
  Description of Artificial Sequence: Synthetic oligonucleotide
guugcuacuggguaggacu

SEQ ID NO: 1585556 - RNA, 19 nt, Artificial Sequence
  Description of Artificial Sequence: Synthetic oligonucleotide
ggcacauuagaaaacucag

SEQ ID NO: 1585557 - RNA, 19 nt, Artificial Sequence
  Description of Artificial Sequence: Synthetic oligonucleotide
cauuacagguauuuacaga

SEQ ID NO: 1585558 - RNA, 19 nt, Artificial Sequence
  Description of Artificial Sequence: Synthetic oligonucleotide
ugacuuugauuaguauaag

SEQ ID NO: 1585559 - RNA, 19 nt, Artificial Sequence
  Description of Artificial Sequence: Synthetic oligonucleotide
agcaaaguguaacuacaau

SEQ ID NO: 1585560 - RNA, 19 nt, Artificial Sequence
  Description of Artificial Sequence: Synthetic oligonucleotide
cucuagagccaaauauaac

SEQ ID NO: 1585561 - RNA, 19 nt, Artificial Sequence
  Description of Artificial Sequence: Synthetic oligonucleotide
acaauuuagucuauuuaaa

SEQ ID NO: 1585562 - RNA, 19 nt, Artificial Sequence
  Description of Artificial Sequence: Synthetic oligonucleotide
aucuauugccagcaucaca

SEQ ID NO: 1585563 - RNA, 19 nt, Artificial Sequence
  Description of Artificial Sequence: Synthetic oligonucleotide
acuuguucagucugaucgu

SEQ ID NO: 1585564 - RNA, 19 nt, Artificial Sequence
  Description of Artificial Sequence: Synthetic oligonucleotide
aagucuuaccauacuuuca

SEQ ID NO: 1585565 - RNA, 19 nt, Artificial Sequence
  Description of Artificial Sequence: Synthetic oligonucleotide
acacagguuuaaaauacug

SEQ ID NO: 1585566 - RNA, 19 nt, Artificial Sequence
  Description of Artificial Sequence: Synthetic oligonucleotide
agacuaccaucacagcuca

SEQ ID NO: 1585567 - RNA, 19 nt, Artificial Sequence
  Description of Artificial Sequence: Synthetic oligonucleotide
augcuagguacagaaguag

SEQ ID NO: 1585568 - RNA, 19 nt, Artificial Sequence
  Description of Artificial Sequence: Synthetic oligonucleotide
ggaauccugcuuuaaugcc

SEQ ID NO: 1585569 - RNA, 19 nt, Artificial Sequence
  Description of Artificial Sequence: Synthetic oligonucleotide
cagacuacacaacuuauua

SEQ ID NO: 1585570 - RNA, 19 nt, Artificial Sequence
  Description of Artificial Sequence: Synthetic oligonucleotide
uaagaacgugcgugaagca

SEQ ID NO: 1585571 - RNA, 19 nt, Artificial Sequence
  Description of Artificial Sequence: Synthetic oligonucleotide
acagaauggaauccugcuu

SEQ ID NO: 1585572 - RNA, 19 nt, Artificial Sequence
  Description of Artificial Sequence: Synthetic oligonucleotide
acuacacaacuuauuauaa

SEQ ID NO: 1585573 - RNA, 19 nt, Artificial Sequence
  Description of Artificial Sequence: Synthetic oligonucleotide
aacagacuacacaacuuau

SEQ ID NO: 1585574 - RNA, 19 nt, Artificial Sequence
  Description of Artificial Sequence: Synthetic oligonucleotide
uucauaucacaaagucaau

SEQ ID NO: 1585575 - RNA, 19 nt, Artificial Sequence
  Description of Artificial Sequence: Synthetic oligonucleotide
caccgcuaaaccaaaguga

SEQ ID NO: 1585576 - RNA, 19 nt, Artificial Sequence
  Description of Artificial Sequence: Synthetic oligonucleotide
gauaaugagcaaaguguaa

SEQ ID NO: 1585577 - RNA, 19 nt, Artificial Sequence
  Description of Artificial Sequence: Synthetic oligonucleotide
acucuagagccaaauauaa

SEQ ID NO: 1585578 - RNA, 19 nt, Artificial Sequence
  Description of Artificial Sequence: Synthetic oligonucleotide
cuagacaucugauaacccu

SEQ ID NO: 1585579 - RNA, 19 nt, Artificial Sequence
  Description of Artificial Sequence: Synthetic oligonucleotide
aaaacaccgcuaaaccaaa

SEQ ID NO: 1585580 - RNA, 19 nt, Artificial Sequence
  Description of Artificial Sequence: Synthetic oligonucleotide
aggacucaacuauuuuaca

SEQ ID NO: 1585581 - RNA, 19 nt, Artificial Sequence
  Description of Artificial Sequence: Synthetic oligonucleotide
agaacgugcgugaagcacu

SEQ ID NO: 1585582 - RNA, 19 nt, Artificial Sequence
  Description of Artificial Sequence: Synthetic oligonucleotide
ggugaaugacuuugauuag

SEQ ID NO: 1585583 - RNA, 19 nt, Artificial Sequence
  Description of Artificial Sequence: Synthetic oligonucleotide
ucaagaacacagguuuaaa

SEQ ID NO: 1585584 - RNA, 19 nt, Artificial Sequence
  Description of Artificial Sequence: Synthetic oligonucleotide
aguugcuacuggguaggac

SEQ ID NO: 1585585 - RNA, 19 nt, Artificial Sequence
  Description of Artificial Sequence: Synthetic oligonucleotide
ucugaucgucugcuacacc

SEQ ID NO: 1585586 - RNA, 19 nt, Artificial Sequence
  Description of Artificial Sequence: Synthetic oligonucleotide
cuagugccuuacaacuuug

SEQ ID NO: 1585587 - RNA, 19 nt, Artificial Sequence
  Description of Artificial Sequence: Synthetic oligonucleotide
uaguggugacaauagugua

SEQ ID NO: 1585588 - RNA, 19 nt, Artificial Sequence
  Description of Artificial Sequence: Synthetic oligonucleotide
cagucugaucgucugcuac

SEQ ID NO: 1585589 - RNA, 19 nt, Artificial Sequence
  Description of Artificial Sequence: Synthetic oligonucleotide
caagacuaccaucacagcu

SEQ ID NO: 1585590 - RNA, 19 nt, Artificial Sequence
  Description of Artificial Sequence: Synthetic oligonucleotide
aguguaguauggaugcaga

SEQ ID NO: 1585591 - RNA, 19 nt, Artificial Sequence
  Description of Artificial Sequence: Synthetic oligonucleotide
ugguuuagucaugcaaacu

SEQ ID NO: 1585592 - RNA, 19 nt, Artificial Sequence
  Description of Artificial Sequence: Synthetic oligonucleotide
accgcuaaaccaaagugaa

SEQ ID NO: 1585593 - RNA, 19 nt, Artificial Sequence
  Description of Artificial Sequence: Synthetic oligonucleotide
caucgcaaauauaaggacu

SEQ ID NO: 1585594 - RNA, 19 nt, Artificial Sequence
  Description of Artificial Sequence: Synthetic oligonucleotide
cuaaaccaaagugaaguaa

SEQ ID NO: 1585595 - RNA, 19 nt, Artificial Sequence
  Description of Artificial Sequence: Synthetic oligonucleotide
gguacagaaguagugguga

SEQ ID NO: 1585596 - RNA, 19 nt, Artificial Sequence
  Description of Artificial Sequence: Synthetic oligonucleotide
uagugccuuacaacuuugu

SEQ ID NO: 1585597 - RNA, 19 nt, Artificial Sequence
  Description of Artificial Sequence: Synthetic oligonucleotide
guaguggugacaauagugu

SEQ ID NO: 1585598 - RNA, 19 nt, Artificial Sequence
  Description of Artificial Sequence: Synthetic oligonucleotide
agcuacaucauggaauguu

SEQ ID NO: 1585599 - RNA, 19 nt, Artificial Sequence
  Description of Artificial Sequence: Synthetic oligonucleotide
ucagucuuccagagacuaa

SEQ ID NO: 1585600 - RNA, 19 nt, Artificial Sequence
  Description of Artificial Sequence: Synthetic oligonucleotide
ucagaaugcuagguacaga

SEQ ID NO: 1585601 - RNA, 19 nt, Artificial Sequence
  Description of Artificial Sequence: Synthetic oligonucleotide
aggacucagaaugcuaggu

SEQ ID NO: 1585602 - RNA, 19 nt, Artificial Sequence
  Description of Artificial Sequence: Synthetic oligonucleotide
acacacacacacaucaaaa

SEQ ID NO: 1585603 - RNA, 19 nt, Artificial Sequence
  Description of Artificial Sequence: Synthetic oligonucleotide
auggcacauuagaaaacuc

SEQ ID NO: 1585604 - RNA, 19 nt, Artificial Sequence
  Description of Artificial Sequence: Synthetic oligonucleotide
aaucagucuuccagagacu

SEQ ID NO: 1585605 - RNA, 19 nt, Artificial Sequence
  Description of Artificial Sequence: Synthetic oligonucleotide
ucuucccuagugccuuaca

SEQ ID NO: 1585606 - RNA, 19 nt, Artificial Sequence
  Description of Artificial Sequence: Synthetic oligonucleotide
aucagucuuccagagacua

SEQ ID NO: 1585607 - RNA, 19 nt, Artificial Sequence
  Description of Artificial Sequence: Synthetic oligonucleotide
acgugcgugaagcacuaaa

SEQ ID NO: 1585608 - RNA, 19 nt, Artificial Sequence
  Description of Artificial Sequence: Synthetic oligonucleotide
ucgcaaauauaaggacuca

SEQ ID NO: 1585609 - RNA, 19 nt, Artificial Sequence
  Description of Artificial Sequence: Synthetic oligonucleotide
aucugaaacugcagucauc

SEQ ID NO: 1585610 - RNA, 19 nt, Artificial Sequence
  Description of Artificial Sequence: Synthetic oligonucleotide
uggguaggacucaacuauu

SEQ ID NO: 1585611 - RNA, 19 nt, Artificial Sequence
  Description of Artificial Sequence: Synthetic oligonucleotide
cuaaagucuuaccauacuu

SEQ ID NO: 1585612 - RNA, 19 nt, Artificial Sequence
  Description of Artificial Sequence: Synthetic oligonucleotide
gcagucaucuauugccagc

SEQ ID NO: 1585613 - RNA, 19 nt, Artificial Sequence
  Description of Artificial Sequence: Synthetic oligonucleotide
cacacacacacacaucaaa

SEQ ID NO: 1585614 - RNA, 19 nt, Artificial Sequence
  Description of Artificial Sequence: Synthetic oligonucleotide
augauacaauuuacacauc

SEQ ID NO: 1585615 - RNA, 19 nt, Artificial Sequence
  Description of Artificial Sequence: Synthetic oligonucleotide
agacaucugauaacccugu

SEQ ID NO: 1585616 - RNA, 19 nt, Artificial Sequence
  Description of Artificial Sequence: Synthetic oligonucleotide
caccuccauuuauuaaaac

SEQ ID NO: 1585617 - RNA, 19 nt, Artificial Sequence
  Description of Artificial Sequence: Synthetic oligonucleotide
ggauaaugagcaaagugua

SEQ ID NO: 1585618 - RNA, 19 nt, Artificial Sequence
  Description of Artificial Sequence: Synthetic oligonucleotide
acacacacacacacacauc

SEQ ID NO: 1585619 - RNA, 19 nt, Artificial Sequence
  Description of Artificial Sequence: Synthetic oligonucleotide
cuagagccaaauauaacuu

SEQ ID NO: 1585620 - RNA, 19 nt, Artificial Sequence
  Description of Artificial Sequence: Synthetic oligonucleotide
cuucccuagugccuuacaa

SEQ ID NO: 1585621 - RNA, 19 nt, Artificial Sequence
  Description of Artificial Sequence: Synthetic oligonucleotide
auaaggacucagaaugcua

SEQ ID NO: 1585622 - RNA, 19 nt, Artificial Sequence
  Description of Artificial Sequence: Synthetic oligonucleotide
ugcgcgcgcgcgcacacac

SEQ ID NO: 1585623 - RNA, 19 nt, Artificial Sequence
  Description of Artificial Sequence: Synthetic oligonucleotide
cacacacacacacacacau

SEQ ID NO: 1585624 - RNA, 19 nt, Artificial Sequence
  Description of Artificial Sequence: Synthetic oligonucleotide
auaguguaguauggaugca

SEQ ID NO: 1585625 - RNA, 19 nt, Artificial Sequence
  Description of Artificial Sequence: Synthetic oligonucleotide
cgugcgugaagcacuaaag

SEQ ID NO: 1585626 - RNA, 19 nt, Artificial Sequence
  Description of Artificial Sequence: Synthetic oligonucleotide
gugcgugaagcacuaaagu

SEQ ID NO: 1585627 - RNA, 19 nt, Artificial Sequence
  Description of Artificial Sequence: Synthetic oligonucleotide
acuuagucuuaaaaccauu

SEQ ID NO: 1585628 - RNA, 19 nt, Artificial Sequence
  Description of Artificial Sequence: Synthetic oligonucleotide
guuaacaccuccauuuauu

SEQ ID NO: 1585629 - RNA, 19 nt, Artificial Sequence
  Description of Artificial Sequence: Synthetic oligonucleotide
cgcacacacacacacacac

SEQ ID NO: 1585630 - RNA, 19 nt, Artificial Sequence
  Description of Artificial Sequence: Synthetic oligonucleotide
acacacgugcgcgcgcgcg

SEQ ID NO: 1585631 - RNA, 19 nt, Artificial Sequence
  Description of Artificial Sequence: Synthetic oligonucleotide
caauagggacucugcaaaa

SEQ ID NO: 1585632 - RNA, 19 nt, Artificial Sequence
  Description of Artificial Sequence: Synthetic oligonucleotide
gcacuaaagucuuaccaua

SEQ ID NO: 1585633 - RNA, 19 nt, Artificial Sequence
  Description of Artificial Sequence: Synthetic oligonucleotide
cuacuggguaggacucaac

SEQ ID NO: 1585634 - RNA, 19 nt, Artificial Sequence
  Description of Artificial Sequence: Synthetic oligonucleotide
guguaacuacaaucaucuc

SEQ ID NO: 1585635 - RNA, 19 nt, Artificial Sequence
  Description of Artificial Sequence: Synthetic oligonucleotide
cccuguaucauacauuaua

SEQ ID NO: 1585636 - RNA, 19 nt, Artificial Sequence
  Description of Artificial Sequence: Synthetic oligonucleotide
gacuaagaacuuguucagu

SEQ ID NO: 1585637 - RNA, 19 nt, Artificial Sequence
  Description of Artificial Sequence: Synthetic oligonucleotide
cugcaaaacuuugguauaa

SEQ ID NO: 1585638 - RNA, 19 nt, Artificial Sequence
  Description of Artificial Sequence: Synthetic oligonucleotide
acacacacacacacacaca

SEQ ID NO: 1585639 - RNA, 19 nt, Artificial Sequence
  Description of Artificial Sequence: Synthetic oligonucleotide
uucuucccuagugccuuac

SEQ ID NO: 1585640 - RNA, 19 nt, Artificial Sequence
  Description of Artificial Sequence: Synthetic oligonucleotide
gacaucugauaacccugua

SEQ ID NO: 1585641 - RNA, 19 nt, Artificial Sequence
  Description of Artificial Sequence: Synthetic oligonucleotide
gcgugaagcacuaaagucu

SEQ ID NO: 1585642 - RNA, 19 nt, Artificial Sequence
  Description of Artificial Sequence: Synthetic oligonucleotide
ggugacaauaguguaguau

SEQ ID NO: 1585643 - RNA, 19 nt, Artificial Sequence
  Description of Artificial Sequence: Synthetic oligonucleotide
cacacgugcgcgcgcgcgc

SEQ ID NO: 1585644 - RNA, 19 nt, Artificial Sequence
  Description of Artificial Sequence: Synthetic oligonucleotide
uggugacaauaguguagua

SEQ ID NO: 1585645 - RNA, 19 nt, Artificial Sequence
  Description of Artificial Sequence: Synthetic oligonucleotide
ccuguaucauacauuauau

SEQ ID NO: 1585646 - RNA, 19 nt, Artificial Sequence
  Description of Artificial Sequence: Synthetic oligonucleotide
cgcaaauauaaggacucag

SEQ ID NO: 1585647 - RNA, 19 nt, Artificial Sequence
  Description of Artificial Sequence: Synthetic oligonucleotide
ggacucagaaugcuaggua

SEQ ID NO: 1585648 - RNA, 19 nt, Artificial Sequence
  Description of Artificial Sequence: Synthetic oligonucleotide
cgcgcacacacacacacac

SEQ ID NO: 1585649 - RNA, 19 nt, Artificial Sequence
  Description of Artificial Sequence: Synthetic oligonucleotide
ccagagacuaagaacuugu

SEQ ID NO: 1585650 - RNA, 19 nt, Artificial Sequence
  Description of Artificial Sequence: Synthetic oligonucleotide
acacacacacacacaucaa

SEQ ID NO: 1585651 - RNA, 19 nt, Artificial Sequence
  Description of Artificial Sequence: Synthetic oligonucleotide
gaacgugcgugaagcacua

SEQ ID NO: 1585652 - RNA, 19 nt, Artificial Sequence
  Description of Artificial Sequence: Synthetic oligonucleotide
ccgcuaaaccaaagugaag

SEQ ID NO: 1585653 - RNA, 19 nt, Artificial Sequence
  Description of Artificial Sequence: Synthetic oligonucleotide
ccaaaaugacaagagcaaa

SEQ ID NO: 1585654 - RNA, 19 nt, Artificial Sequence
  Description of Artificial Sequence: Synthetic oligonucleotide
gugauucaguuaacaccuc

SEQ ID NO: 1585655 - RNA, 19 nt, Artificial Sequence
  Description of Artificial Sequence: Synthetic oligonucleotide
auccaagccugcacaguaa

SEQ ID NO: 1585656 - RNA, 19 nt, Artificial Sequence
  Description of Artificial Sequence: Synthetic oligonucleotide
cgcuaaaccaaagugaagu

SEQ ID NO: 1585657 - RNA, 19 nt, Artificial Sequence
  Description of Artificial Sequence: Synthetic oligonucleotide
ggagagugauucaguuaac

SEQ ID NO: 1585658 - RNA, 19 nt, Artificial Sequence
  Description of Artificial Sequence: Synthetic oligonucleotide
cgcgcgcacacacacacac

SEQ ID NO: 1585659 - RNA, 19 nt, Artificial Sequence
  Description of Artificial Sequence: Synthetic oligonucleotide
gguaggacucaacuauuuu

SEQ ID NO: 1585660 - RNA, 19 nt, Artificial Sequence
  Description of Artificial Sequence: Synthetic oligonucleotide
aacgugcgugaagcacuaa

SEQ ID NO: 1585661 - RNA, 19 nt, Artificial Sequence
  Description of Artificial Sequence: Synthetic oligonucleotide
cugaaacugcagucaucua

SEQ ID NO: 1585662 - RNA, 19 nt, Artificial Sequence
  Description of Artificial Sequence: Synthetic oligonucleotide
acacgugcgcgcgcgcgca

SEQ ID NO: 1585663 - RNA, 19 nt, Artificial Sequence
  Description of Artificial Sequence: Synthetic oligonucleotide
cagagacuaagaacuuguu

SEQ ID NO: 1585664 - RNA, 19 nt, Artificial Sequence
  Description of Artificial Sequence: Synthetic oligonucleotide
ccaacucuagagccaaaua

SEQ ID NO: 1585665 - RNA, 19 nt, Artificial Sequence
  Description of Artificial Sequence: Synthetic oligonucleotide
acccuguaucauacauuau

SEQ ID NO: 1585666 - RNA, 19 nt, Artificial Sequence
  Description of Artificial Sequence: Synthetic oligonucleotide
gcuacuggguaggacucaa

SEQ ID NO: 1585667 - RNA, 19 nt, Artificial Sequence
  Description of Artificial Sequence: Synthetic oligonucleotide
gcacacacacacacacaca

SEQ ID NO: 1585668 - RNA, 19 nt, Artificial Sequence
  Description of Artificial Sequence: Synthetic oligonucleotide
ccuagugccuuacaacuuu

SEQ ID NO: 1585669 - RNA, 19 nt, Artificial Sequence
  Description of Artificial Sequence: Synthetic oligonucleotide
acgugcgcgcgcgcgcaca

SEQ ID NO: 1585670 - RNA, 19 nt, Artificial Sequence
  Description of Artificial Sequence: Synthetic oligonucleotide
cacgugcgcgcgcgcgcac

SEQ ID NO: 1585671 - RNA, 19 nt, Artificial Sequence
  Description of Artificial Sequence: Synthetic oligonucleotide
ggguaggacucaacuauuu

SEQ ID NO: 1585672 - RNA, 19 nt, Artificial Sequence
  Description of Artificial Sequence: Synthetic oligonucleotide
gcgcacacacacacacaca

SEQ ID NO: 1585673 - RNA, 19 nt, Artificial Sequence
  Description of Artificial Sequence: Synthetic oligonucleotide
gcgcgcacacacacacaca

SEQ ID NO: 1585674 - RNA, 19 nt, Artificial Sequence
  Description of Artificial Sequence: Synthetic oligonucleotide
cccuagugccuuacaacuu

SEQ ID NO: 1585675 - RNA, 19 nt, Artificial Sequence
  Description of Artificial Sequence: Synthetic oligonucleotide
cgugcgcgcgcgcgcacac

SEQ ID NO: 1585676 - RNA, 19 nt, Artificial Sequence
  Description of Artificial Sequence: Synthetic oligonucleotide
cgucugcuacaccaacucu

SEQ ID NO: 1585677 - RNA, 19 nt, Artificial Sequence
  Description of Artificial Sequence: Synthetic oligonucleotide
gugcgcgcgcgcgcacaca

SEQ ID NO: 1585678 - RNA, 19 nt, Artificial Sequence
  Description of Artificial Sequence: Synthetic oligonucleotide
gcgcgcgcacacacacaca

SEQ ID NO: 1585679 - RNA, 19 nt, Artificial Sequence
  Description of Artificial Sequence: Synthetic oligonucleotide
gcgcgcgcgcgcacacaca

SEQ ID NO: 1585680 - RNA, 19 nt, Artificial Sequence
  Description of Artificial Sequence: Synthetic oligonucleotide
uuaucaauuacuuuaauag

SEQ ID NO: 1585681 - RNA, 19 nt, Artificial Sequence
  Description of Artificial Sequence: Synthetic oligonucleotide
aaaauagccacuucauucc

SEQ ID NO: 1585682 - RNA, 19 nt, Artificial Sequence
  Description of Artificial Sequence: Synthetic oligonucleotide
aaucauuuccaacauaucu

SEQ ID NO: 1585683 - RNA, 19 nt, Artificial Sequence
  Description of Artificial Sequence: Synthetic oligonucleotide
gauuugucaacacugaagc

SEQ ID NO: 1585684 - RNA, 19 nt, Artificial Sequence
  Description of Artificial Sequence: Synthetic oligonucleotide
ugcagauucuguaaaauag

SEQ ID NO: 1585685 - RNA, 19 nt, Artificial Sequence
  Description of Artificial Sequence: Synthetic oligonucleotide
uguaacguucuccaauucg

SEQ ID NO: 1585686 - RNA, 19 nt, Artificial Sequence
  Description of Artificial Sequence: Synthetic oligonucleotide
ugugugaccaugaacuuag

SEQ ID NO: 1585687 - RNA, 19 nt, Artificial Sequence
  Description of Artificial Sequence: Synthetic oligonucleotide
uccaguggcagcaagaaca

SEQ ID NO: 1585688 - RNA, 19 nt, Artificial Sequence
  Description of Artificial Sequence: Synthetic oligonucleotide
agcgucaucacuuucaugu

SEQ ID NO: 1585689 - RNA, 19 nt, Artificial Sequence
  Description of Artificial Sequence: Synthetic oligonucleotide
gauuuggucauuuauaucu

SEQ ID NO: 1585690 - RNA, 19 nt, Artificial Sequence
  Description of Artificial Sequence: Synthetic oligonucleotide
gacagaaucauuuccaaca

SEQ ID NO: 1585691 - RNA, 19 nt, Artificial Sequence
  Description of Artificial Sequence: Synthetic oligonucleotide
aaaguaaaccaccguauca

SEQ ID NO: 1585692 - RNA, 19 nt, Artificial Sequence
  Description of Artificial Sequence: Synthetic oligonucleotide
aaauuggccagaaccaagc

SEQ ID NO: 1585693 - RNA, 19 nt, Artificial Sequence
  Description of Artificial Sequence: Synthetic oligonucleotide
aacaaaguaaaccaccgua

SEQ ID NO: 1585694 - RNA, 19 nt, Artificial Sequence
  Description of Artificial Sequence: Synthetic oligonucleotide
cucgccauggauuuggugg

SEQ ID NO: 1585695 - RNA, 19 nt, Artificial Sequence
  Description of Artificial Sequence: Synthetic oligonucleotide
ucauuuccaacauaucucc

SEQ ID NO: 1585696 - RNA, 19 nt, Artificial Sequence
  Description of Artificial Sequence: Synthetic oligonucleotide
uccaauucgaguuucaaau

SEQ ID NO: 1585697 - RNA, 19 nt, Artificial Sequence
  Description of Artificial Sequence: Synthetic oligonucleotide
uccagauuuacaaucccag

SEQ ID NO: 1585698 - RNA, 19 nt, Artificial Sequence
  Description of Artificial Sequence: Synthetic oligonucleotide
aaugcuuuggguauucgag

SEQ ID NO: 1585699 - RNA, 19 nt, Artificial Sequence
  Description of Artificial Sequence: Synthetic oligonucleotide
aauccuguagccaaggaug

SEQ ID NO: 1585700 - RNA, 19 nt, Artificial Sequence
  Description of Artificial Sequence: Synthetic oligonucleotide
acgguuguagccuuuacuc

SEQ ID NO: 1585701 - RNA, 19 nt, Artificial Sequence
  Description of Artificial Sequence: Synthetic oligonucleotide
ugucaagccuccaauaaug

SEQ ID NO: 1585702 - RNA, 19 nt, Artificial Sequence
  Description of Artificial Sequence: Synthetic oligonucleotide
uuuugugcuacaucgaguc

SEQ ID NO: 1585703 - RNA, 19 nt, Artificial Sequence
  Description of Artificial Sequence: Synthetic oligonucleotide
aaauagccacuucauuccg

SEQ ID NO: 1585704 - RNA, 19 nt, Artificial Sequence
  Description of Artificial Sequence: Synthetic oligonucleotide
aguaauucguucuggaagu

SEQ ID NO: 1585705 - RNA, 19 nt, Artificial Sequence
  Description of Artificial Sequence: Synthetic oligonucleotide
gaucuuguggcgaagauac

SEQ ID NO: 1585706 - RNA, 19 nt, Artificial Sequence
  Description of Artificial Sequence: Synthetic oligonucleotide
gauuccucaaugcaacaag

SEQ ID NO: 1585707 - RNA, 19 nt, Artificial Sequence
  Description of Artificial Sequence: Synthetic oligonucleotide
ugggguuucaaacaugcac

SEQ ID NO: 1585708 - RNA, 19 nt, Artificial Sequence
  Description of Artificial Sequence: Synthetic oligonucleotide
uaagagauuugucaacacu

SEQ ID NO: 1585709 - RNA, 19 nt, Artificial Sequence
  Description of Artificial Sequence: Synthetic oligonucleotide
auuacuuuaauagccacgu

SEQ ID NO: 1585710 - RNA, 19 nt, Artificial Sequence
  Description of Artificial Sequence: Synthetic oligonucleotide
aauguaacguucuccaauu

SEQ ID NO: 1585711 - RNA, 19 nt, Artificial Sequence
  Description of Artificial Sequence: Synthetic oligonucleotide
ugaacuuaguaauucguuc

SEQ ID NO: 1585712 - RNA, 19 nt, Artificial Sequence
  Description of Artificial Sequence: Synthetic oligonucleotide
acaaguaucugugugacca

SEQ ID NO: 1585713 - RNA, 19 nt, Artificial Sequence
  Description of Artificial Sequence: Synthetic oligonucleotide
uuccuuauaauauuuugau

SEQ ID NO: 1585714 - RNA, 19 nt, Artificial Sequence
  Description of Artificial Sequence: Synthetic oligonucleotide
aaucucaucuuaucaauua

SEQ ID NO: 1585715 - RNA, 19 nt, Artificial Sequence
  Description of Artificial Sequence: Synthetic oligonucleotide
acuacaaagacucguucug

SEQ ID NO: 1585716 - RNA, 19 nt, Artificial Sequence
  Description of Artificial Sequence: Synthetic oligonucleotide
cuugugaaaugcuggagag

SEQ ID NO: 1585717 - RNA, 19 nt, Artificial Sequence
  Description of Artificial Sequence: Synthetic oligonucleotide
aucauuuccaacauaucuc

SEQ ID NO: 1585718 - RNA, 19 nt, Artificial Sequence
  Description of Artificial Sequence: Synthetic oligonucleotide
ugguaaacgcugcugaugu

SEQ ID NO: 1585719 - RNA, 19 nt, Artificial Sequence
  Description of Artificial Sequence: Synthetic oligonucleotide
uacagaaauacugguagcc

SEQ ID NO: 1585720 - RNA, 19 nt, Artificial Sequence
  Description of Artificial Sequence: Synthetic oligonucleotide
cuuguggcgaagauacucg

SEQ ID NO: 1585721 - RNA, 19 nt, Artificial Sequence
  Description of Artificial Sequence: Synthetic oligonucleotide
ugaaaguggaauuuccuua

SEQ ID NO: 1585722 - RNA, 19 nt, Artificial Sequence
  Description of Artificial Sequence: Synthetic oligonucleotide
aacagucguggguuacugc

SEQ ID NO: 1585723 - RNA, 19 nt, Artificial Sequence
  Description of Artificial Sequence: Synthetic oligonucleotide
aaagaucugguaaacgcug

SEQ ID NO: 1585724 - RNA, 19 nt, Artificial Sequence
  Description of Artificial Sequence: Synthetic oligonucleotide
gagaguuagauacagaaau

SEQ ID NO: 1585725 - RNA, 19 nt, Artificial Sequence
  Description of Artificial Sequence: Synthetic oligonucleotide
uuuacuccugagaacuuca

SEQ ID NO: 1585726 - RNA, 19 nt, Artificial Sequence
  Description of Artificial Sequence: Synthetic oligonucleotide
aagauacucggagaauuuc

SEQ ID NO: 1585727 - RNA, 19 nt, Artificial Sequence
  Description of Artificial Sequence: Synthetic oligonucleotide
uccaauaaugccucuuucu

SEQ ID NO: 1585728 - RNA, 19 nt, Artificial Sequence
  Description of Artificial Sequence: Synthetic oligonucleotide
uggauuuggucauuuauau

SEQ ID NO: 1585729 - RNA, 19 nt, Artificial Sequence
  Description of Artificial Sequence: Synthetic oligonucleotide
uagccuuuacuccugagaa

SEQ ID NO: 1585730 - RNA, 19 nt, Artificial Sequence
  Description of Artificial Sequence: Synthetic oligonucleotide
cuagggaacgguuguagcc

SEQ ID NO: 1585731 - RNA, 19 nt, Artificial Sequence
  Description of Artificial Sequence: Synthetic oligonucleotide
ugacuaagagauuugucaa

SEQ ID NO: 1585732 - RNA, 19 nt, Artificial Sequence
  Description of Artificial Sequence: Synthetic oligonucleotide
agaaucauuuccaacauau

SEQ ID NO: 1585733 - RNA, 19 nt, Artificial Sequence
  Description of Artificial Sequence: Synthetic oligonucleotide
cuuucauguguaauguaac

SEQ ID NO: 1585734 - RNA, 19 nt, Artificial Sequence
  Description of Artificial Sequence: Synthetic oligonucleotide
ucgaguccaacuccagugg

SEQ ID NO: 1585735 - RNA, 19 nt, Artificial Sequence
  Description of Artificial Sequence: Synthetic oligonucleotide
acaggguuaugagagcugc

SEQ ID NO: 1585736 - RNA, 19 nt, Artificial Sequence
  Description of Artificial Sequence: Synthetic oligonucleotide
aaggaugacuaagagauuu

SEQ ID NO: 1585737 - RNA, 19 nt, Artificial Sequence
  Description of Artificial Sequence: Synthetic oligonucleotide
uuuaaaucacagugcacaa

SEQ ID NO: 1585738 - RNA, 19 nt, Artificial Sequence
  Description of Artificial Sequence: Synthetic oligonucleotide
aaccaagcaccucgucugc

SEQ ID NO: 1585739 - RNA, 19 nt, Artificial Sequence
  Description of Artificial Sequence: Synthetic oligonucleotide
accaugaacuuaguaauuc

SEQ ID NO: 1585740 - RNA, 19 nt, Artificial Sequence
  Description of Artificial Sequence: Synthetic oligonucleotide
gcaaagaucugguaaacgc

SEQ ID NO: 1585741 - RNA, 19 nt, Artificial Sequence
  Description of Artificial Sequence: Synthetic oligonucleotide
gugaccaugaacuuaguaa

SEQ ID NO: 1585742 - RNA, 19 nt, Artificial Sequence
  Description of Artificial Sequence: Synthetic oligonucleotide
agaaccaagcaccucgucu

SEQ ID NO: 1585743 - RNA, 19 nt, Artificial Sequence
  Description of Artificial Sequence: Synthetic oligonucleotide
uuucucgccauggauuugg

SEQ ID NO: 1585744 - RNA, 19 nt, Artificial Sequence
  Description of Artificial Sequence: Synthetic oligonucleotide
augcguguauuucccaucg

SEQ ID NO: 1585745 - RNA, 19 nt, Artificial Sequence
  Description of Artificial Sequence: Synthetic oligonucleotide
caauucgaguuucaaauuc

SEQ ID NO: 1585746 - RNA, 19 nt, Artificial Sequence
  Description of Artificial Sequence: Synthetic oligonucleotide
uaauucguucuggaagucg

SEQ ID NO: 1585747 - RNA, 19 nt, Artificial Sequence
  Description of Artificial Sequence: Synthetic oligonucleotide
uuaauagccacgucccuuc

SEQ ID NO: 1585748 - RNA, 19 nt, Artificial Sequence
  Description of Artificial Sequence: Synthetic oligonucleotide
aauucgaguuucaaauucu

SEQ ID NO: 1585749 - RNA, 19 nt, Artificial Sequence
  Description of Artificial Sequence: Synthetic oligonucleotide
uucauguguaauguaacgu

SEQ ID NO: 1585750 - RNA, 19 nt, Artificial Sequence
  Description of Artificial Sequence: Synthetic oligonucleotide
cuaaguaggcuggaguucc

SEQ ID NO: 1585751 - RNA, 19 nt, Artificial Sequence
  Description of Artificial Sequence: Synthetic oligonucleotide
uucauuccggaguugacuc

SEQ ID NO: 1585752 - RNA, 19 nt, Artificial Sequence
  Description of Artificial Sequence: Synthetic oligonucleotide
aacguucuccaauucgagu

SEQ ID NO: 1585753 - RNA, 19 nt, Artificial Sequence
  Description of Artificial Sequence: Synthetic oligonucleotide
uccaacauaucuccaugga

SEQ ID NO: 1585754 - RNA, 19 nt, Artificial Sequence
  Description of Artificial Sequence: Synthetic oligonucleotide
auguagauuccucaaugca

SEQ ID NO: 1585755 - RNA, 19 nt, Artificial Sequence
  Description of Artificial Sequence: Synthetic oligonucleotide
gcaagcagcacauuuucgg

SEQ ID NO: 1585756 - RNA, 19 nt, Artificial Sequence
  Description of Artificial Sequence: Synthetic oligonucleotide
aauucguucuggaagucga

SEQ ID NO: 1585757 - RNA, 19 nt, Artificial Sequence
  Description of Artificial Sequence: Synthetic oligonucleotide
uugaagggaaaugugccgc

SEQ ID NO: 1585758 - RNA, 19 nt, Artificial Sequence
  Description of Artificial Sequence: Synthetic oligonucleotide
uguauuucccaucgagcgu

SEQ ID NO: 1585759 - RNA, 19 nt, Artificial Sequence
  Description of Artificial Sequence: Synthetic oligonucleotide
ugaugcgugcaacccaaag

SEQ ID NO: 1585760 - RNA, 19 nt, Artificial Sequence
  Description of Artificial Sequence: Synthetic oligonucleotide
uuuacaaucccaggguggu

SEQ ID NO: 1585761 - RNA, 19 nt, Artificial Sequence
  Description of Artificial Sequence: Synthetic oligonucleotide
guaaacgcugcugaugucc

SEQ ID NO: 1585762 - RNA, 19 nt, Artificial Sequence
  Description of Artificial Sequence: Synthetic oligonucleotide
cacuccagauuuacaaucc

SEQ ID NO: 1585763 - RNA, 19 nt, Artificial Sequence
  Description of Artificial Sequence: Synthetic oligonucleotide
caaauuggccagaaccaag

SEQ ID NO: 1585764 - RNA, 19 nt, Artificial Sequence
  Description of Artificial Sequence: Synthetic oligonucleotide
acuuaguaauucguucugg

SEQ ID NO: 1585765 - RNA, 19 nt, Artificial Sequence
  Description of Artificial Sequence: Synthetic oligonucleotide
gacuaagagauuugucaac

SEQ ID NO: 1585766 - RNA, 19 nt, Artificial Sequence
  Description of Artificial Sequence: Synthetic oligonucleotide
ucgagcgucaucacuuuca

SEQ ID NO: 1585767 - RNA, 19 nt, Artificial Sequence
  Description of Artificial Sequence: Synthetic oligonucleotide
uucccaucgagcgucauca

SEQ ID NO: 1585768 - RNA, 19 nt, Artificial Sequence
  Description of Artificial Sequence: Synthetic oligonucleotide
uugugcuacaucgagucca

SEQ ID NO: 1585769 - RNA, 19 nt, Artificial Sequence
  Description of Artificial Sequence: Synthetic oligonucleotide
cugccuugugaaaugcugg

SEQ ID NO: 1585770 - RNA, 19 nt, Artificial Sequence
  Description of Artificial Sequence: Synthetic oligonucleotide
uggagauuucucgccaugg

SEQ ID NO: 1585771 - RNA, 19 nt, Artificial Sequence
  Description of Artificial Sequence: Synthetic oligonucleotide
aauagccacuucauuccgg

SEQ ID NO: 1585772 - RNA, 19 nt, Artificial Sequence
  Description of Artificial Sequence: Synthetic oligonucleotide
gaacuuaguaauucguucu

SEQ ID NO: 1585773 - RNA, 19 nt, Artificial Sequence
  Description of Artificial Sequence: Synthetic oligonucleotide
ucuagggaacgguuguagc

SEQ ID NO: 1585774 - RNA, 19 nt, Artificial Sequence
  Description of Artificial Sequence: Synthetic oligonucleotide
uagccaaggaugacuaaga

SEQ ID NO: 1585775 - RNA, 19 nt, Artificial Sequence
  Description of Artificial Sequence: Synthetic oligonucleotide
ucgccauggauuugguggg

SEQ ID NO: 1585776 - RNA, 19 nt, Artificial Sequence
  Description of Artificial Sequence: Synthetic oligonucleotide
uacaaucccaggguggugc

SEQ ID NO: 1585777 - RNA, 19 nt, Artificial Sequence
  Description of Artificial Sequence: Synthetic oligonucleotide
ccaacaaaguaaaccaccg

SEQ ID NO: 1585778 - RNA, 19 nt, Artificial Sequence
  Description of Artificial Sequence: Synthetic oligonucleotide
ucguucugggguuucaaac

SEQ ID NO: 1585779 - RNA, 19 nt, Artificial Sequence
  Description of Artificial Sequence: Synthetic oligonucleotide
uuguggcgaagauacucgg

SEQ ID NO: 1585780 - RNA, 19 nt, Artificial Sequence
  Description of Artificial Sequence: Synthetic oligonucleotide
caaaguaaaccaccguauc

SEQ ID NO: 1585781 - RNA, 19 nt, Artificial Sequence
  Description of Artificial Sequence: Synthetic oligonucleotide
gagguuguguguguaugcg

SEQ ID NO: 1585782 - RNA, 19 nt, Artificial Sequence
  Description of Artificial Sequence: Synthetic oligonucleotide
aaagacucguucugggguu

SEQ ID NO: 1585783 - RNA, 19 nt, Artificial Sequence
  Description of Artificial Sequence: Synthetic oligonucleotide
uaaacgcugcugaugucca

SEQ ID NO: 1585784 - RNA, 19 nt, Artificial Sequence
  Description of Artificial Sequence: Synthetic oligonucleotide
ucacuggagauuucucgcc

SEQ ID NO: 1585785 - RNA, 19 nt, Artificial Sequence
  Description of Artificial Sequence: Synthetic oligonucleotide
uuugugcuacaucgagucc

SEQ ID NO: 1585786 - RNA, 19 nt, Artificial Sequence
  Description of Artificial Sequence: Synthetic oligonucleotide
ucgucugcaaagaucuggu

SEQ ID NO: 1585787 - RNA, 19 nt, Artificial Sequence
  Description of Artificial Sequence: Synthetic oligonucleotide
ucuuguggcgaagauacuc

SEQ ID NO: 1585788 - RNA, 19 nt, Artificial Sequence
  Description of Artificial Sequence: Synthetic oligonucleotide
ugguggguacauaaaugca

SEQ ID NO: 1585789 - RNA, 19 nt, Artificial Sequence
  Description of Artificial Sequence: Synthetic oligonucleotide
aaaccaccguaucagugau

SEQ ID NO: 1585790 - RNA, 19 nt, Artificial Sequence
  Description of Artificial Sequence: Synthetic oligonucleotide
ggagaauuucugaaagugg

SEQ ID NO: 1585791 - RNA, 19 nt, Artificial Sequence
  Description of Artificial Sequence: Synthetic oligonucleotide
auagccacuucauuccgga

SEQ ID NO: 1585792 - RNA, 19 nt, Artificial Sequence
  Description of Artificial Sequence: Synthetic oligonucleotide
ucacuacaaagacucguuc

SEQ ID NO: 1585793 - RNA, 19 nt, Artificial Sequence
  Description of Artificial Sequence: Synthetic oligonucleotide
uuacuccugagaacuucag

SEQ ID NO: 1585794 - RNA, 19 nt, Artificial Sequence
  Description of Artificial Sequence: Synthetic oligonucleotide
agccuuuacuccugagaac

SEQ ID NO: 1585795 - RNA, 19 nt, Artificial Sequence
  Description of Artificial Sequence: Synthetic oligonucleotide
aguuagauacagaaauacu

SEQ ID NO: 1585796 - RNA, 19 nt, Artificial Sequence
  Description of Artificial Sequence: Synthetic oligonucleotide
aaugaugcgugcaacccaa

SEQ ID NO: 1585797 - RNA, 19 nt, Artificial Sequence
  Description of Artificial Sequence: Synthetic oligonucleotide
aguaaaccaccguaucagu

SEQ ID NO: 1585798 - RNA, 19 nt, Artificial Sequence
  Description of Artificial Sequence: Synthetic oligonucleotide
aaacgcugcugauguccac

SEQ ID NO: 1585799 - RNA, 19 nt, Artificial Sequence
  Description of Artificial Sequence: Synthetic oligonucleotide
agccacuucauuccggagu

SEQ ID NO: 1585800 - RNA, 19 nt, Artificial Sequence
  Description of Artificial Sequence: Synthetic oligonucleotide
agccaaggaugacuaagag

SEQ ID NO: 1585801 - RNA, 19 nt, Artificial Sequence
  Description of Artificial Sequence: Synthetic oligonucleotide
cuggagagaucuuguggcg

SEQ ID NO: 1585802 - RNA, 19 nt, Artificial Sequence
  Description of Artificial Sequence: Synthetic oligonucleotide
aaguaucugugugaccaug

SEQ ID NO: 1585803 - RNA, 19 nt, Artificial Sequence
  Description of Artificial Sequence: Synthetic oligonucleotide
ucuccugaaccugagaguu

SEQ ID NO: 1585804 - RNA, 19 nt, Artificial Sequence
  Description of Artificial Sequence: Synthetic oligonucleotide
ugaaccugagaguuagaua

SEQ ID NO: 1585805 - RNA, 19 nt, Artificial Sequence
  Description of Artificial Sequence: Synthetic oligonucleotide
uuucgggcuuuaaaucaca

SEQ ID NO: 1585806 - RNA, 19 nt, Artificial Sequence
  Description of Artificial Sequence: Synthetic oligonucleotide
accaccguaucagugauga

SEQ ID NO: 1585807 - RNA, 19 nt, Artificial Sequence
  Description of Artificial Sequence: Synthetic oligonucleotide
aaaacagucguggguuacu

SEQ ID NO: 1585808 - RNA, 19 nt, Artificial Sequence
  Description of Artificial Sequence: Synthetic oligonucleotide
cucaaugcaacaaguaucu

SEQ ID NO: 1585809 - RNA, 19 nt, Artificial Sequence
  Description of Artificial Sequence: Synthetic oligonucleotide
agucuuucuguguuucccu

SEQ ID NO: 1585810 - RNA, 19 nt, Artificial Sequence
  Description of Artificial Sequence: Synthetic oligonucleotide
auacucggagaauuucuga

SEQ ID NO: 1585811 - RNA, 19 nt, Artificial Sequence
  Description of Artificial Sequence: Synthetic oligonucleotide
ggguauucgagguugugug

SEQ ID NO: 1585812 - RNA, 19 nt, Artificial Sequence
  Description of Artificial Sequence: Synthetic oligonucleotide
guaacguucuccaauucga

SEQ ID NO: 1585813 - RNA, 19 nt, Artificial Sequence
  Description of Artificial Sequence: Synthetic oligonucleotide
uaugcguguauuucccauc

SEQ ID NO: 1585814 - RNA, 19 nt, Artificial Sequence
  Description of Artificial Sequence: Synthetic oligonucleotide
gcaagaacaggguuaugag

SEQ ID NO: 1585815 - RNA, 19 nt, Artificial Sequence
  Description of Artificial Sequence: Synthetic oligonucleotide
ucgcuggacagaaucauuu

SEQ ID NO: 1585816 - RNA, 19 nt, Artificial Sequence
  Description of Artificial Sequence: Synthetic oligonucleotide
caacaaguaucugugugac

SEQ ID NO: 1585817 - RNA, 19 nt, Artificial Sequence
  Description of Artificial Sequence: Synthetic oligonucleotide
acaaaguaaaccaccguau

SEQ ID NO: 1585818 - RNA, 19 nt, Artificial Sequence
  Description of Artificial Sequence: Synthetic oligonucleotide
uguggcgaagauacucgga

SEQ ID NO: 1585819 - RNA, 19 nt, Artificial Sequence
  Description of Artificial Sequence: Synthetic oligonucleotide
guagccuuuacuccugaga

SEQ ID NO: 1585820 - RNA, 19 nt, Artificial Sequence
  Description of Artificial Sequence: Synthetic oligonucleotide
gcuuuugugcuacaucgag

SEQ ID NO: 1585821 - RNA, 19 nt, Artificial Sequence
  Description of Artificial Sequence: Synthetic oligonucleotide
ucggagaauuucugaaagu

SEQ ID NO: 1585822 - RNA, 19 nt, Artificial Sequence
  Description of Artificial Sequence: Synthetic oligonucleotide
guaaaccaccguaucagug

SEQ ID NO: 1585823 - RNA, 19 nt, Artificial Sequence
  Description of Artificial Sequence: Synthetic oligonucleotide
uguaugcguguauuuccca

SEQ ID NO: 1585824 - RNA, 19 nt, Artificial Sequence
  Description of Artificial Sequence: Synthetic oligonucleotide
uugaccuggagaaguacuu

SEQ ID NO: 1585825 - RNA, 19 nt, Artificial Sequence
  Description of Artificial Sequence: Synthetic oligonucleotide
agauucuguaaaauagcca

SEQ ID NO: 1585826 - RNA, 19 nt, Artificial Sequence
  Description of Artificial Sequence: Synthetic oligonucleotide
guauucgagguugugugug

SEQ ID NO: 1585827 - RNA, 19 nt, Artificial Sequence
  Description of Artificial Sequence: Synthetic oligonucleotide
ugcgugcaacccaaaguca

SEQ ID NO: 1585828 - RNA, 19 nt, Artificial Sequence
  Description of Artificial Sequence: Synthetic oligonucleotide
aaugccaaauuggccagaa

SEQ ID NO: 1585829 - RNA, 19 nt, Artificial Sequence
  Description of Artificial Sequence: Synthetic oligonucleotide
accugagaguuagauacag

SEQ ID NO: 1585830 - RNA, 19 nt, Artificial Sequence
  Description of Artificial Sequence: Synthetic oligonucleotide
uagggaacgguuguagccu

SEQ ID NO: 1585831 - RNA, 19 nt, Artificial Sequence
  Description of Artificial Sequence: Synthetic oligonucleotide
agauacucggagaauuucu

SEQ ID NO: 1585832 - RNA, 19 nt, Artificial Sequence
  Description of Artificial Sequence: Synthetic oligonucleotide
guauuucccaucgagcguc

SEQ ID NO: 1585833 - RNA, 19 nt, Artificial Sequence
  Description of Artificial Sequence: Synthetic oligonucleotide
auaauccuguagccaagga

SEQ ID NO: 1585834 - RNA, 19 nt, Artificial Sequence
  Description of Artificial Sequence: Synthetic oligonucleotide
uauucgagguugugugugu

SEQ ID NO: 1585835 - RNA, 19 nt, Artificial Sequence
  Description of Artificial Sequence: Synthetic oligonucleotide
cgggcuuuaaaucacagug

SEQ ID NO: 1585836 - RNA, 19 nt, Artificial Sequence
  Description of Artificial Sequence: Synthetic oligonucleotide
uggguauucgagguugugu

SEQ ID NO: 1585837 - RNA, 19 nt, Artificial Sequence
  Description of Artificial Sequence: Synthetic oligonucleotide
ugugcuacaucgaguccaa

SEQ ID NO: 1585838 - RNA, 19 nt, Artificial Sequence
  Description of Artificial Sequence: Synthetic oligonucleotide
agagauuugucaacacuga

SEQ ID NO: 1585839 - RNA, 19 nt, Artificial Sequence
  Description of Artificial Sequence: Synthetic oligonucleotide
aacgcugcugauguccaca

SEQ ID NO: 1585840 - RNA, 19 nt, Artificial Sequence
  Description of Artificial Sequence: Synthetic oligonucleotide
acucggagaauuucugaaa

SEQ ID NO: 1585841 - RNA, 19 nt, Artificial Sequence
  Description of Artificial Sequence: Synthetic oligonucleotide
ucgggcuuuaaaucacagu

SEQ ID NO: 1585842 - RNA, 19 nt, Artificial Sequence
  Description of Artificial Sequence: Synthetic oligonucleotide
aguugacucuccugcuuug

SEQ ID NO: 1585843 - RNA, 19 nt, Artificial Sequence
  Description of Artificial Sequence: Synthetic oligonucleotide
cagugcacaauauucuuaa

SEQ ID NO: 1585844 - RNA, 19 nt, Artificial Sequence
  Description of Artificial Sequence: Synthetic oligonucleotide
gaguuacaggcaugagggc

SEQ ID NO: 1585845 - RNA, 19 nt, Artificial Sequence
  Description of Artificial Sequence: Synthetic oligonucleotide
uuaugagagcugcucccau

SEQ ID NO: 1585846 - RNA, 19 nt, Artificial Sequence
  Description of Artificial Sequence: Synthetic oligonucleotide
ccaacauaucuccauggag

SEQ ID NO: 1585847 - RNA, 19 nt, Artificial Sequence
  Description of Artificial Sequence: Synthetic oligonucleotide
uucguucuggaagucgacu

SEQ ID NO: 1585848 - RNA, 19 nt, Artificial Sequence
  Description of Artificial Sequence: Synthetic oligonucleotide
ucaaaacagucguggguua

SEQ ID NO: 1585849 - RNA, 19 nt, Artificial Sequence
  Description of Artificial Sequence: Synthetic oligonucleotide
caaagaucugguaaacgcu

SEQ ID NO: 1585850 - RNA, 19 nt, Artificial Sequence
  Description of Artificial Sequence: Synthetic oligonucleotide
guguaugcguguauuuccc

SEQ ID NO: 1585851 - RNA, 19 nt, Artificial Sequence
  Description of Artificial Sequence: Synthetic oligonucleotide
uggagagaucuuguggcga

SEQ ID NO: 1585852 - RNA, 19 nt, Artificial Sequence
  Description of Artificial Sequence: Synthetic oligonucleotide
uguuaggcauuuugcuguc

SEQ ID NO: 1585853 - RNA, 19 nt, Artificial Sequence
  Description of Artificial Sequence: Synthetic oligonucleotide
uccggaguugacucuccug

SEQ ID NO: 1585854 - RNA, 19 nt, Artificial Sequence
  Description of Artificial Sequence: Synthetic oligonucleotide
accguaucagugaugauuu

SEQ ID NO: 1585855 - RNA, 19 nt, Artificial Sequence
  Description of Artificial Sequence: Synthetic oligonucleotide
ugcaacccaaagucacaca

SEQ ID NO: 1585856 - RNA, 19 nt, Artificial Sequence
  Description of Artificial Sequence: Synthetic oligonucleotide
augaacuuaguaauucguu

SEQ ID NO: 1585857 - RNA, 19 nt, Artificial Sequence
  Description of Artificial Sequence: Synthetic oligonucleotide
ucauuccggaguugacucu

SEQ ID NO: 1585858 - RNA, 19 nt, Artificial Sequence
  Description of Artificial Sequence: Synthetic oligonucleotide
ucugugugaccaugaacuu

SEQ ID NO: 1585859 - RNA, 19 nt, Artificial Sequence
  Description of Artificial Sequence: Synthetic oligonucleotide
ggauuugguggguacauaa

SEQ ID NO: 1585860 - RNA, 19 nt, Artificial Sequence
  Description of Artificial Sequence: Synthetic oligonucleotide
auucguucuggaagucgac

SEQ ID NO: 1585861 - RNA, 19 nt, Artificial Sequence
  Description of Artificial Sequence: Synthetic oligonucleotide
ccggaguugacucuccugc

SEQ ID NO: 1585862 - RNA, 19 nt, Artificial Sequence
  Description of Artificial Sequence: Synthetic oligonucleotide
agagaucuuguggcgaaga

SEQ ID NO: 1585863 - RNA, 19 nt, Artificial Sequence
  Description of Artificial Sequence: Synthetic oligonucleotide
ucucgccauggauuuggug

SEQ ID NO: 1585864 - RNA, 19 nt, Artificial Sequence
  Description of Artificial Sequence: Synthetic oligonucleotide
ugcugucaagccuccaaua

SEQ ID NO: 1585865 - RNA, 19 nt, Artificial Sequence
  Description of Artificial Sequence: Synthetic oligonucleotide
agaguuagauacagaaaua

SEQ ID NO: 1585866 - RNA, 19 nt, Artificial Sequence
  Description of Artificial Sequence: Synthetic oligonucleotide
uacuugcuugaggaguuac

SEQ ID NO: 1585867 - RNA, 19 nt, Artificial Sequence
  Description of Artificial Sequence: Synthetic oligonucleotide
caaaacagucguggguuac

SEQ ID NO: 1585868 - RNA, 19 nt, Artificial Sequence
  Description of Artificial Sequence: Synthetic oligonucleotide
augcaacaaguaucugugu

SEQ ID NO: 1585869 - RNA, 19 nt, Artificial Sequence
  Description of Artificial Sequence: Synthetic oligonucleotide
uucgcuggacagaaucauu

SEQ ID NO: 1585870 - RNA, 19 nt, Artificial Sequence
  Description of Artificial Sequence: Synthetic oligonucleotide
caaugaugcgugcaaccca

SEQ ID NO: 1585871 - RNA, 19 nt, Artificial Sequence
  Description of Artificial Sequence: Synthetic oligonucleotide
caaagacucguucuggggu

SEQ ID NO: 1585872 - RNA, 19 nt, Artificial Sequence
  Description of Artificial Sequence: Synthetic oligonucleotide
gaacgguuguagccuuuac

SEQ ID NO: 1585873 - RNA, 19 nt, Artificial Sequence
  Description of Artificial Sequence: Synthetic oligonucleotide
guuaugagagcugcuccca

SEQ ID NO: 1585874 - RNA, 19 nt, Artificial Sequence
  Description of Artificial Sequence: Synthetic oligonucleotide
aggaugacuaagagauuug

SEQ ID NO: 1585875 - RNA, 19 nt, Artificial Sequence
  Description of Artificial Sequence: Synthetic oligonucleotide
cacuacaaagacucguucu

SEQ ID NO: 1585876 - RNA, 19 nt, Artificial Sequence
  Description of Artificial Sequence: Synthetic oligonucleotide
gauuugguggguacauaaa

SEQ ID NO: 1585877 - RNA, 19 nt, Artificial Sequence
  Description of Artificial Sequence: Synthetic oligonucleotide
cuccaauucgaguuucaaa

SEQ ID NO: 1585878 - RNA, 19 nt, Artificial Sequence
  Description of Artificial Sequence: Synthetic oligonucleotide
cuggagauuucucgccaug

SEQ ID NO: 1585879 - RNA, 19 nt, Artificial Sequence
  Description of Artificial Sequence: Synthetic oligonucleotide
ugcguguauuucccaucga

SEQ ID NO: 1585880 - RNA, 19 nt, Artificial Sequence
  Description of Artificial Sequence: Synthetic oligonucleotide
ggcgaagauacucggagaa

SEQ ID NO: 1585881 - RNA, 19 nt, Artificial Sequence
  Description of Artificial Sequence: Synthetic oligonucleotide
uuggguauucgagguugug

SEQ ID NO: 1585882 - RNA, 19 nt, Artificial Sequence
  Description of Artificial Sequence: Synthetic oligonucleotide
uucaggggcuaaguaggcu

SEQ ID NO: 1585883 - RNA, 19 nt, Artificial Sequence
  Description of Artificial Sequence: Synthetic oligonucleotide
cauuccggaguugacucuc

SEQ ID NO: 1585884 - RNA, 19 nt, Artificial Sequence
  Description of Artificial Sequence: Synthetic oligonucleotide
uuacaaucccaggguggug

SEQ ID NO: 1585885 - RNA, 19 nt, Artificial Sequence
  Description of Artificial Sequence: Synthetic oligonucleotide
cuugaccuggagaaguacu

SEQ ID NO: 1585886 - RNA, 19 nt, Artificial Sequence
  Description of Artificial Sequence: Synthetic oligonucleotide
uuccggaguugacucuccu

SEQ ID NO: 1585887 - RNA, 19 nt, Artificial Sequence
  Description of Artificial Sequence: Synthetic oligonucleotide
ucuccugcuuuguggggaa

SEQ ID NO: 1585888 - RNA, 19 nt, Artificial Sequence
  Description of Artificial Sequence: Synthetic oligonucleotide
gagcgucaucacuuucaug

SEQ ID NO: 1585889 - RNA, 19 nt, Artificial Sequence
  Description of Artificial Sequence: Synthetic oligonucleotide
agcaccucgucugcaaaga

SEQ ID NO: 1585890 - RNA, 19 nt, Artificial Sequence
  Description of Artificial Sequence: Synthetic oligonucleotide
guuguuuaucaaaucaauu

SEQ ID NO: 1585891 - RNA, 19 nt, Artificial Sequence
  Description of Artificial Sequence: Synthetic oligonucleotide
gaggaguuacaggcaugag

SEQ ID NO: 1585892 - RNA, 19 nt, Artificial Sequence
  Description of Artificial Sequence: Synthetic oligonucleotide
ucguggguuacugccuugu

SEQ ID NO: 1585893 - RNA, 19 nt, Artificial Sequence
  Description of Artificial Sequence: Synthetic oligonucleotide
agucguggguuacugccuu

SEQ ID NO: 1585894 - RNA, 19 nt, Artificial Sequence
  Description of Artificial Sequence: Synthetic oligonucleotide
ggagaaguacuugcuugag

SEQ ID NO: 1585895 - RNA, 19 nt, Artificial Sequence
  Description of Artificial Sequence: Synthetic oligonucleotide
ggaaucucaucuuaucaau

SEQ ID NO: 1585896 - RNA, 19 nt, Artificial Sequence
  Description of Artificial Sequence: Synthetic oligonucleotide
cugaaaguggaauuuccuu

SEQ ID NO: 1585897 - RNA, 19 nt, Artificial Sequence
  Description of Artificial Sequence: Synthetic oligonucleotide
ggagauuucucgccaugga

SEQ ID NO: 1585898 - RNA, 19 nt, Artificial Sequence
  Description of Artificial Sequence: Synthetic oligonucleotide
cauggauuugguggguaca

SEQ ID NO: 1585899 - RNA, 19 nt, Artificial Sequence
  Description of Artificial Sequence: Synthetic oligonucleotide
guaauucguucuggaaguc

SEQ ID NO: 1585900 - RNA, 19 nt, Artificial Sequence
  Description of Artificial Sequence: Synthetic oligonucleotide
cagauucauuuugaaacaa

SEQ ID NO: 1585901 - RNA, 19 nt, Artificial Sequence
  Description of Artificial Sequence: Synthetic oligonucleotide
agcuuuugugcuacaucga

SEQ ID NO: 1585902 - RNA, 19 nt, Artificial Sequence
  Description of Artificial Sequence: Synthetic oligonucleotide
ccaucacuacaaagacucg

SEQ ID NO: 1585903 - RNA, 19 nt, Artificial Sequence
  Description of Artificial Sequence: Synthetic oligonucleotide
gggguuucaaacaugcacu

SEQ ID NO: 1585904 - RNA, 19 nt, Artificial Sequence
  Description of Artificial Sequence: Synthetic oligonucleotide
guaugcguguauuucccau

SEQ ID NO: 1585905 - RNA, 19 nt, Artificial Sequence
  Description of Artificial Sequence: Synthetic oligonucleotide
aaugugccgcugaggcuca

SEQ ID NO: 1585906 - RNA, 19 nt, Artificial Sequence
  Description of Artificial Sequence: Synthetic oligonucleotide
caucacuacaaagacucgu

SEQ ID NO: 1585907 - RNA, 19 nt, Artificial Sequence
  Description of Artificial Sequence: Synthetic oligonucleotide
gaagauacucggagaauuu

SEQ ID NO: 1585908 - RNA, 19 nt, Artificial Sequence
  Description of Artificial Sequence: Synthetic oligonucleotide
aaccaccguaucagugaug

SEQ ID NO: 1585909 - RNA, 19 nt, Artificial Sequence
  Description of Artificial Sequence: Synthetic oligonucleotide
cugaccgccggaaugacuu

SEQ ID NO: 1585910 - RNA, 19 nt, Artificial Sequence
  Description of Artificial Sequence: Synthetic oligonucleotide
cuucauuccggaguugacu

SEQ ID NO: 1585911 - RNA, 19 nt, Artificial Sequence
  Description of Artificial Sequence: Synthetic oligonucleotide
ugcucccauuguucucccc

SEQ ID NO: 1585912 - RNA, 19 nt, Artificial Sequence
  Description of Artificial Sequence: Synthetic oligonucleotide
agacucguucugggguuuc

SEQ ID NO: 1585913 - RNA, 19 nt, Artificial Sequence
  Description of Artificial Sequence: Synthetic oligonucleotide
cauucuccugaaccugaga

SEQ ID NO: 1585914 - RNA, 19 nt, Artificial Sequence
  Description of Artificial Sequence: Synthetic oligonucleotide
uggauuugguggguacaua

SEQ ID NO: 1585915 - RNA, 19 nt, Artificial Sequence
  Description of Artificial Sequence: Synthetic oligonucleotide
guagacgaugacucccacu

SEQ ID NO: 1585916 - RNA, 19 nt, Artificial Sequence
  Description of Artificial Sequence: Synthetic oligonucleotide
gagaucuuguggcgaagau

SEQ ID NO: 1585917 - RNA, 19 nt, Artificial Sequence
  Description of Artificial Sequence: Synthetic oligonucleotide
acgcugcugauguccacau

SEQ ID NO: 1585918 - RNA, 19 nt, Artificial Sequence
  Description of Artificial Sequence: Synthetic oligonucleotide
ccauggauuugguggguac

SEQ ID NO: 1585919 - RNA, 19 nt, Artificial Sequence
  Description of Artificial Sequence: Synthetic oligonucleotide
caacaaaguaaaccaccgu

SEQ ID NO: 1585920 - RNA, 19 nt, Artificial Sequence
  Description of Artificial Sequence: Synthetic oligonucleotide
cgguuguagccuuuacucc

SEQ ID NO: 1585921 - RNA, 19 nt, Artificial Sequence
  Description of Artificial Sequence: Synthetic oligonucleotide
cucguucugggguuucaaa

SEQ ID NO: 1585922 - RNA, 19 nt, Artificial Sequence
  Description of Artificial Sequence: Synthetic oligonucleotide
cagaaccaagcaccucguc

SEQ ID NO: 1585923 - RNA, 19 nt, Artificial Sequence
  Description of Artificial Sequence: Synthetic oligonucleotide
gcuaaguaggcuggaguuc

SEQ ID NO: 1585924 - RNA, 19 nt, Artificial Sequence
  Description of Artificial Sequence: Synthetic oligonucleotide
gcgucaucacuuucaugug

SEQ ID NO: 1585925 - RNA, 19 nt, Artificial Sequence
  Description of Artificial Sequence: Synthetic oligonucleotide
acgucccuuccagucuuuc

SEQ ID NO: 1585926 - RNA, 19 nt, Artificial Sequence
  Description of Artificial Sequence: Synthetic oligonucleotide
ccagucuuucuguguuucc

SEQ ID NO: 1585927 - RNA, 19 nt, Artificial Sequence
  Description of Artificial Sequence: Synthetic oligonucleotide
augagggccuggcgaauuu

SEQ ID NO: 1585928 - RNA, 19 nt, Artificial Sequence
  Description of Artificial Sequence: Synthetic oligonucleotide
gucguggguuacugccuug

SEQ ID NO: 1585929 - RNA, 19 nt, Artificial Sequence
  Description of Artificial Sequence: Synthetic oligonucleotide
gcgugcaacccaaagucac

SEQ ID NO: 1585930 - RNA, 19 nt, Artificial Sequence
  Description of Artificial Sequence: Synthetic oligonucleotide
cugggguuucaaacaugca

SEQ ID NO: 1585931 - RNA, 19 nt, Artificial Sequence
  Description of Artificial Sequence: Synthetic oligonucleotide
uagccacgucccuuccagu

SEQ ID NO: 1585932 - RNA, 19 nt, Artificial Sequence
  Description of Artificial Sequence: Synthetic oligonucleotide
ggggccauaaugaaaugcu

SEQ ID NO: 1585933 - RNA, 19 nt, Artificial Sequence
  Description of Artificial Sequence: Synthetic oligonucleotide
ucccaucgagcgucaucac

SEQ ID NO: 1585934 - RNA, 19 nt, Artificial Sequence
  Description of Artificial Sequence: Synthetic oligonucleotide
cugaaccugagaguuagau

SEQ ID NO: 1585935 - RNA, 19 nt, Artificial Sequence
  Description of Artificial Sequence: Synthetic oligonucleotide
caccguaucagugaugauu

SEQ ID NO: 1585936 - RNA, 19 nt, Artificial Sequence
  Description of Artificial Sequence: Synthetic oligonucleotide
auucgagguugugugugua

SEQ ID NO: 1585937 - RNA, 19 nt, Artificial Sequence
  Description of Artificial Sequence: Synthetic oligonucleotide
guuaggcauuuugcuguca

SEQ ID NO: 1585938 - RNA, 19 nt, Artificial Sequence
  Description of Artificial Sequence: Synthetic oligonucleotide
gguuacugccuugugaaau

SEQ ID NO: 1585939 - RNA, 19 nt, Artificial Sequence
  Description of Artificial Sequence: Synthetic oligonucleotide
cugugugaccaugaacuua

SEQ ID NO: 1585940 - RNA, 19 nt, Artificial Sequence
  Description of Artificial Sequence: Synthetic oligonucleotide
gguauucgagguugugugu

SEQ ID NO: 1585941 - RNA, 19 nt, Artificial Sequence
  Description of Artificial Sequence: Synthetic oligonucleotide
gguaaacgcugcugauguc

SEQ ID NO: 1585942 - RNA, 19 nt, Artificial Sequence
  Description of Artificial Sequence: Synthetic oligonucleotide
acucguucugggguuucaa

SEQ ID NO: 1585943 - RNA, 19 nt, Artificial Sequence
  Description of Artificial Sequence: Synthetic oligonucleotide
gacucguucugggguuuca

SEQ ID NO: 1585944 - RNA, 19 nt, Artificial Sequence
  Description of Artificial Sequence: Synthetic oligonucleotide
caucgaguccaacuccagu

SEQ ID NO: 1585945 - RNA, 19 nt, Artificial Sequence
  Description of Artificial Sequence: Synthetic oligonucleotide
cguaucagugaugauuuca

SEQ ID NO: 1585946 - RNA, 19 nt, Artificial Sequence
  Description of Artificial Sequence: Synthetic oligonucleotide
cccauuguucuccccaaca

SEQ ID NO: 1585947 - RNA, 19 nt, Artificial Sequence
  Description of Artificial Sequence: Synthetic oligonucleotide
gggcuaaguaggcuggagu

SEQ ID NO: 1585948 - RNA, 19 nt, Artificial Sequence
  Description of Artificial Sequence: Synthetic oligonucleotide
gcugaugcaagcagcacau

SEQ ID NO: 1585949 - RNA, 19 nt, Artificial Sequence
  Description of Artificial Sequence: Synthetic oligonucleotide
guugacucuccugcuuugu

SEQ ID NO: 1585950 - RNA, 19 nt, Artificial Sequence
  Description of Artificial Sequence: Synthetic oligonucleotide
ccuugaccuggagaaguac

SEQ ID NO: 1585951 - RNA, 19 nt, Artificial Sequence
  Description of Artificial Sequence: Synthetic oligonucleotide
ccaaauuggccagaaccaa

SEQ ID NO: 1585952 - RNA, 19 nt, Artificial Sequence
  Description of Artificial Sequence: Synthetic oligonucleotide
caacacugaagcgcuuucu

SEQ ID NO: 1585953 - RNA, 19 nt, Artificial Sequence
  Description of Artificial Sequence: Synthetic oligonucleotide
ccaucgagcgucaucacuu

SEQ ID NO: 1585954 - RNA, 19 nt, Artificial Sequence
  Description of Artificial Sequence: Synthetic oligonucleotide
guggggaaucucaucuuau

SEQ ID NO: 1585955 - RNA, 19 nt, Artificial Sequence
  Description of Artificial Sequence: Synthetic oligonucleotide
caggguuaugagagcugcu

SEQ ID NO: 1585956 - RNA, 19 nt, Artificial Sequence
  Description of Artificial Sequence: Synthetic oligonucleotide
ggaacgguuguagccuuua

SEQ ID NO: 1585957 - RNA, 19 nt, Artificial Sequence
  Description of Artificial Sequence: Synthetic oligonucleotide
cgugcaacccaaagucaca

SEQ ID NO: 1585958 - RNA, 19 nt, Artificial Sequence
  Description of Artificial Sequence: Synthetic oligonucleotide
augugccgcugaggcucac

SEQ ID NO: 1585959 - RNA, 19 nt, Artificial Sequence
  Description of Artificial Sequence: Synthetic oligonucleotide
ccguaucagugaugauuuc

SEQ ID NO: 1585960 - RNA, 19 nt, Artificial Sequence
  Description of Artificial Sequence: Synthetic oligonucleotide
ccaauucgaguuucaaauu

SEQ ID NO: 1585961 - RNA, 19 nt, Artificial Sequence
  Description of Artificial Sequence: Synthetic oligonucleotide
caucgagcgucaucacuuu

SEQ ID NO: 1585962 - RNA, 19 nt, Artificial Sequence
  Description of Artificial Sequence: Synthetic oligonucleotide
cguagacgaugacucccac

SEQ ID NO: 1585963 - RNA, 19 nt, Artificial Sequence
  Description of Artificial Sequence: Synthetic oligonucleotide
gccacgucccuuccagucu

SEQ ID NO: 1585964 - RNA, 19 nt, Artificial Sequence
  Description of Artificial Sequence: Synthetic oligonucleotide
ccauaucaucuggguuggg

SEQ ID NO: 1585965 - RNA, 19 nt, Artificial Sequence
  Description of Artificial Sequence: Synthetic oligonucleotide
cgaagauacucggagaauu

SEQ ID NO: 1585966 - RNA, 19 nt, Artificial Sequence
  Description of Artificial Sequence: Synthetic oligonucleotide
gggccuggcgaauuugcuu

SEQ ID NO: 1585967 - RNA, 19 nt, Artificial Sequence
  Description of Artificial Sequence: Synthetic oligonucleotide
caugagggccuggcgaauu

SEQ ID NO: 1585968 - RNA, 19 nt, Artificial Sequence
  Description of Artificial Sequence: Synthetic oligonucleotide
cccaucgagcgucaucacu

SEQ ID NO: 1585969 - RNA, 19 nt, Artificial Sequence
  Description of Artificial Sequence: Synthetic oligonucleotide
gcgaagauacucggagaau

SEQ ID NO: 1585970 - RNA, 19 nt, Artificial Sequence
  Description of Artificial Sequence: Synthetic oligonucleotide
gcaccucgucugcaaagau

SEQ ID NO: 1585971 - RNA, 19 nt, Artificial Sequence
  Description of Artificial Sequence: Synthetic oligonucleotide
gugugaccaugaacuuagu

SEQ ID NO: 1585972 - RNA, 19 nt, Artificial Sequence
  Description of Artificial Sequence: Synthetic oligonucleotide
cgagcgucaucacuuucau

SEQ ID NO: 1585973 - RNA, 19 nt, Artificial Sequence
  Description of Artificial Sequence: Synthetic oligonucleotide
cgucccuuccagucuuucu

SEQ ID NO: 1585974 - RNA, 19 nt, Artificial Sequence
  Description of Artificial Sequence: Synthetic oligonucleotide
cacgucccuuccagucuuu

SEQ ID NO: 1585975 - RNA, 19 nt, Artificial Sequence
  Description of Artificial Sequence: Synthetic oligonucleotide
gcaugagggccuggcgaau

SEQ ID NO: 1585976 - RNA, 19 nt, Artificial Sequence
  Description of Artificial Sequence: Synthetic oligonucleotide
ccaccguaucagugaugau

SEQ ID NO: 1585977 - RNA, 19 nt, Artificial Sequence
  Description of Artificial Sequence: Synthetic oligonucleotide
aauaugguggaagagaagc

SEQ ID NO: 1585978 - RNA, 19 nt, Artificial Sequence
  Description of Artificial Sequence: Synthetic oligonucleotide
ugugauaauaaucagagaa

SEQ ID NO: 1585979 - RNA, 19 nt, Artificial Sequence
  Description of Artificial Sequence: Synthetic oligonucleotide
auaauaaucagagaagccc

SEQ ID NO: 1585980 - RNA, 19 nt, Artificial Sequence
  Description of Artificial Sequence: Synthetic oligonucleotide
aauugucacagccuugucc

SEQ ID NO: 1585981 - RNA, 19 nt, Artificial Sequence
  Description of Artificial Sequence: Synthetic oligonucleotide
aaauugguaugcaauaucc

SEQ ID NO: 1585982 - RNA, 19 nt, Artificial Sequence
  Description of Artificial Sequence: Synthetic oligonucleotide
cuugugauaauaaucagag

SEQ ID NO: 1585983 - RNA, 19 nt, Artificial Sequence
  Description of Artificial Sequence: Synthetic oligonucleotide
ucugcauucaagcuggagg

SEQ ID NO: 1585984 - RNA, 19 nt, Artificial Sequence
  Description of Artificial Sequence: Synthetic oligonucleotide
aguauuuugucacauauca

SEQ ID NO: 1585985 - RNA, 19 nt, Artificial Sequence
  Description of Artificial Sequence: Synthetic oligonucleotide
caugaaaagcuauacaagg

SEQ ID NO: 1585986 - RNA, 19 nt, Artificial Sequence
  Description of Artificial Sequence: Synthetic oligonucleotide
aaauguaaguauuuuguca

SEQ ID NO: 1585987 - RNA, 19 nt, Artificial Sequence
  Description of Artificial Sequence: Synthetic oligonucleotide
uauacaaggacaaagcauc

SEQ ID NO: 1585988 - RNA, 19 nt, Artificial Sequence
  Description of Artificial Sequence: Synthetic oligonucleotide
auagcuagaccucugauag

SEQ ID NO: 1585989 - RNA, 19 nt, Artificial Sequence
  Description of Artificial Sequence: Synthetic oligonucleotide
aguaccaugagucugagaa

SEQ ID NO: 1585990 - RNA, 19 nt, Artificial Sequence
  Description of Artificial Sequence: Synthetic oligonucleotide
aauagcucccugcaccucc

SEQ ID NO: 1585991 - RNA, 19 nt, Artificial Sequence
  Description of Artificial Sequence: Synthetic oligonucleotide
gauccuacauucuuaaugc

SEQ ID NO: 1585992 - RNA, 19 nt, Artificial Sequence
  Description of Artificial Sequence: Synthetic oligonucleotide
ugauaauaaucagagaagc

SEQ ID NO: 1585993 - RNA, 19 nt, Artificial Sequence
  Description of Artificial Sequence: Synthetic oligonucleotide
uucuguguaauccaaguga

SEQ ID NO: 1585994 - RNA, 19 nt, Artificial Sequence
  Description of Artificial Sequence: Synthetic oligonucleotide
aacuuucuauuuuaccguc

SEQ ID NO: 1585995 - RNA, 19 nt, Artificial Sequence
  Description of Artificial Sequence: Synthetic oligonucleotide
uguguaauccaagugauac

SEQ ID NO: 1585996 - RNA, 19 nt, Artificial Sequence
  Description of Artificial Sequence: Synthetic oligonucleotide
uaauaaucagagaagcccu

SEQ ID NO: 1585997 - RNA, 19 nt, Artificial Sequence
  Description of Artificial Sequence: Synthetic oligonucleotide
acaggcuuuagaaacaagc

SEQ ID NO: 1585998 - RNA, 19 nt, Artificial Sequence
  Description of Artificial Sequence: Synthetic oligonucleotide
gaggaugcagaauagcucc

SEQ ID NO: 1585999 - RNA, 19 nt, Artificial Sequence
  Description of Artificial Sequence: Synthetic oligonucleotide
auggugaaggguuagagcu

SEQ ID NO: 1586000 - RNA, 19 nt, Artificial Sequence
  Description of Artificial Sequence: Synthetic oligonucleotide
caagugauacuccaggccg

SEQ ID NO: 1586001 - RNA, 19 nt, Artificial Sequence
  Description of Artificial Sequence: Synthetic oligonucleotide
cacauaucaacucuugacc

SEQ ID NO: 1586002 - RNA, 19 nt, Artificial Sequence
  Description of Artificial Sequence: Synthetic oligonucleotide
aacugcacguuacacuaac

SEQ ID NO: 1586003 - RNA, 19 nt, Artificial Sequence
  Description of Artificial Sequence: Synthetic oligonucleotide
ugaaagcacucccaaagcc

SEQ ID NO: 1586004 - RNA, 19 nt, Artificial Sequence
  Description of Artificial Sequence: Synthetic oligonucleotide
cuaacaguccuccagcacc

SEQ ID NO: 1586005 - RNA, 19 nt, Artificial Sequence
  Description of Artificial Sequence: Synthetic oligonucleotide
guuaaacccaggcugaggc

SEQ ID NO: 1586006 - RNA, 19 nt, Artificial Sequence
  Description of Artificial Sequence: Synthetic oligonucleotide
aagcuauacaaggacaaag

SEQ ID NO: 1586007 - RNA, 19 nt, Artificial Sequence
  Description of Artificial Sequence: Synthetic oligonucleotide
uaccaugagucugagaagg

SEQ ID NO: 1586008 - RNA, 19 nt, Artificial Sequence
  Description of Artificial Sequence: Synthetic oligonucleotide
uuugcauccaauguuugcc

SEQ ID NO: 1586009 - RNA, 19 nt, Artificial Sequence
  Description of Artificial Sequence: Synthetic oligonucleotide
auugcugccgaacaaauau

SEQ ID NO: 1586010 - RNA, 19 nt, Artificial Sequence
  Description of Artificial Sequence: Synthetic oligonucleotide
accccaaugguaauaaugc

SEQ ID NO: 1586011 - RNA, 19 nt, Artificial Sequence
  Description of Artificial Sequence: Synthetic oligonucleotide
agcuauacaaggacaaagc

SEQ ID NO: 1586012 - RNA, 19 nt, Artificial Sequence
  Description of Artificial Sequence: Synthetic oligonucleotide
gauguuaaagagaugguga

SEQ ID NO: 1586013 - RNA, 19 nt, Artificial Sequence
  Description of Artificial Sequence: Synthetic oligonucleotide
uaaagagauggugauaaca

SEQ ID NO: 1586014 - RNA, 19 nt, Artificial Sequence
  Description of Artificial Sequence: Synthetic oligonucleotide
gauaauaaucagagaagcc

SEQ ID NO: 1586015 - RNA, 19 nt, Artificial Sequence
  Description of Artificial Sequence: Synthetic oligonucleotide
auuauccagauguuaaaga

SEQ ID NO: 1586016 - RNA, 19 nt, Artificial Sequence
  Description of Artificial Sequence: Synthetic oligonucleotide
gaauauggaggguacucag

SEQ ID NO: 1586017 - RNA, 19 nt, Artificial Sequence
  Description of Artificial Sequence: Synthetic oligonucleotide
uguaauccaagugauacuc

SEQ ID NO: 1586018 - RNA, 19 nt, Artificial Sequence
  Description of Artificial Sequence: Synthetic oligonucleotide
auccaagugauacuccagg

SEQ ID NO: 1586019 - RNA, 19 nt, Artificial Sequence
  Description of Artificial Sequence: Synthetic oligonucleotide
auaggguccagucuccggg

SEQ ID NO: 1586020 - RNA, 19 nt, Artificial Sequence
  Description of Artificial Sequence: Synthetic oligonucleotide
aggcuuuagaaacaagcag

SEQ ID NO: 1586021 - RNA, 19 nt, Artificial Sequence
  Description of Artificial Sequence: Synthetic oligonucleotide
acauaucaacucuugacca

SEQ ID NO: 1586022 - RNA, 19 nt, Artificial Sequence
  Description of Artificial Sequence: Synthetic oligonucleotide
guagcggucauggugaagg

SEQ ID NO: 1586023 - RNA, 19 nt, Artificial Sequence
  Description of Artificial Sequence: Synthetic oligonucleotide
uuugccuccaacuuucuau

SEQ ID NO: 1586024 - RNA, 19 nt, Artificial Sequence
  Description of Artificial Sequence: Synthetic oligonucleotide
uggaggaugcagaauagcu

SEQ ID NO: 1586025 - RNA, 19 nt, Artificial Sequence
  Description of Artificial Sequence: Synthetic oligonucleotide
ugcugccgaacaaauaucc

SEQ ID NO: 1586026 - RNA, 19 nt, Artificial Sequence
  Description of Artificial Sequence: Synthetic oligonucleotide
agcuagaccucugauagcg

SEQ ID NO: 1586027 - RNA, 19 nt, Artificial Sequence
  Description of Artificial Sequence: Synthetic oligonucleotide
uuuaccgucuucuggugcc

SEQ ID NO: 1586028 - RNA, 19 nt, Artificial Sequence
  Description of Artificial Sequence: Synthetic oligonucleotide
gcaaguaguaccccaaugg

SEQ ID NO: 1586029 - RNA, 19 nt, Artificial Sequence
  Description of Artificial Sequence: Synthetic oligonucleotide
aggaacaguuuauaaacca

SEQ ID NO: 1586030 - RNA, 19 nt, Artificial Sequence
  Description of Artificial Sequence: Synthetic oligonucleotide
augcagaauagcucccugc

SEQ ID NO: 1586031 - RNA, 19 nt, Artificial Sequence
  Description of Artificial Sequence: Synthetic oligonucleotide
gugauaauaaucagagaag

SEQ ID NO: 1586032 - RNA, 19 nt, Artificial Sequence
  Description of Artificial Sequence: Synthetic oligonucleotide
ucuguguaauccaagugau

SEQ ID NO: 1586033 - RNA, 19 nt, Artificial Sequence
  Description of Artificial Sequence: Synthetic oligonucleotide
ucuuacauucccacuguac

SEQ ID NO: 1586034 - RNA, 19 nt, Artificial Sequence
  Description of Artificial Sequence: Synthetic oligonucleotide
cagaguaauuucagcaucc

SEQ ID NO: 1586035 - RNA, 19 nt, Artificial Sequence
  Description of Artificial Sequence: Synthetic oligonucleotide
ugguguagcggucauggug

SEQ ID NO: 1586036 - RNA, 19 nt, Artificial Sequence
  Description of Artificial Sequence: Synthetic oligonucleotide
agauguuaaagagauggug

SEQ ID NO: 1586037 - RNA, 19 nt, Artificial Sequence
  Description of Artificial Sequence: Synthetic oligonucleotide
auauccaaaucagucuuac

SEQ ID NO: 1586038 - RNA, 19 nt, Artificial Sequence
  Description of Artificial Sequence: Synthetic oligonucleotide
ggacucauagccuucacag

SEQ ID NO: 1586039 - RNA, 19 nt, Artificial Sequence
  Description of Artificial Sequence: Synthetic oligonucleotide
ggauccuacauucuuaaug

SEQ ID NO: 1586040 - RNA, 19 nt, Artificial Sequence
  Description of Artificial Sequence: Synthetic oligonucleotide
aaguauuuugucacauauc

SEQ ID NO: 1586041 - RNA, 19 nt, Artificial Sequence
  Description of Artificial Sequence: Synthetic oligonucleotide
cauucaagcuggaggaugc

SEQ ID NO: 1586042 - RNA, 19 nt, Artificial Sequence
  Description of Artificial Sequence: Synthetic oligonucleotide
aggguuagagcuuucacau

SEQ ID NO: 1586043 - RNA, 19 nt, Artificial Sequence
  Description of Artificial Sequence: Synthetic oligonucleotide
ucugaggaguacaacuugu

SEQ ID NO: 1586044 - RNA, 19 nt, Artificial Sequence
  Description of Artificial Sequence: Synthetic oligonucleotide
ugaguaggcacgacuauuc

SEQ ID NO: 1586045 - RNA, 19 nt, Artificial Sequence
  Description of Artificial Sequence: Synthetic oligonucleotide
ugaauugucacagccuugu

SEQ ID NO: 1586046 - RNA, 19 nt, Artificial Sequence
  Description of Artificial Sequence: Synthetic oligonucleotide
gugaagacggugcuuggcg

SEQ ID NO: 1586047 - RNA, 19 nt, Artificial Sequence
  Description of Artificial Sequence: Synthetic oligonucleotide
uaagauggguaguaccaug

SEQ ID NO: 1586048 - RNA, 19 nt, Artificial Sequence
  Description of Artificial Sequence: Synthetic oligonucleotide
auuucagcaucccacagua

SEQ ID NO: 1586049 - RNA, 19 nt, Artificial Sequence
  Description of Artificial Sequence: Synthetic oligonucleotide
agagcuuucacaucucgaa

SEQ ID NO: 1586050 - RNA, 19 nt, Artificial Sequence
  Description of Artificial Sequence: Synthetic oligonucleotide
ggauauucccauuauccag

SEQ ID NO: 1586051 - RNA, 19 nt, Artificial Sequence
  Description of Artificial Sequence: Synthetic oligonucleotide
ugauaacaagucagaaacu

SEQ ID NO: 1586052 - RNA, 19 nt, Artificial Sequence
  Description of Artificial Sequence: Synthetic oligonucleotide
ugguaugcaauauccaaau

SEQ ID NO: 1586053 - RNA, 19 nt, Artificial Sequence
  Description of Artificial Sequence: Synthetic oligonucleotide
uucaacuggggaauagggu

SEQ ID NO: 1586054 - RNA, 19 nt, Artificial Sequence
  Description of Artificial Sequence: Synthetic oligonucleotide
uuugggaguguaggcaucg

SEQ ID NO: 1586055 - RNA, 19 nt, Artificial Sequence
  Description of Artificial Sequence: Synthetic oligonucleotide
uggcgcugggugaagacgg

SEQ ID NO: 1586056 - RNA, 19 nt, Artificial Sequence
  Description of Artificial Sequence: Synthetic oligonucleotide
aagugauacuccaggccgc

SEQ ID NO: 1586057 - RNA, 19 nt, Artificial Sequence
  Description of Artificial Sequence: Synthetic oligonucleotide
agcgcugggaauauggagg

SEQ ID NO: 1586058 - RNA, 19 nt, Artificial Sequence
  Description of Artificial Sequence: Synthetic oligonucleotide
caagcagaguaauuucagc

SEQ ID NO: 1586059 - RNA, 19 nt, Artificial Sequence
  Description of Artificial Sequence: Synthetic oligonucleotide
guaggcacgacuauuccag

SEQ ID NO: 1586060 - RNA, 19 nt, Artificial Sequence
  Description of Artificial Sequence: Synthetic oligonucleotide
gauauucccauuauccaga

SEQ ID NO: 1586061 - RNA, 19 nt, Artificial Sequence
  Description of Artificial Sequence: Synthetic oligonucleotide
caaaucagucuuacauucc

SEQ ID NO: 1586062 - RNA, 19 nt, Artificial Sequence
  Description of Artificial Sequence: Synthetic oligonucleotide
uguacaucauagccauccc

SEQ ID NO: 1586063 - RNA, 19 nt, Artificial Sequence
  Description of Artificial Sequence: Synthetic oligonucleotide
guaauaaugccacaggaau

SEQ ID NO: 1586064 - RNA, 19 nt, Artificial Sequence
  Description of Artificial Sequence: Synthetic oligonucleotide
gccaguuaaacccaggcug

SEQ ID NO: 1586065 - RNA, 19 nt, Artificial Sequence
  Description of Artificial Sequence: Synthetic oligonucleotide
aguaguaccccaaugguaa

SEQ ID NO: 1586066 - RNA, 19 nt, Artificial Sequence
  Description of Artificial Sequence: Synthetic oligonucleotide
uuuuggauauucccauuau

SEQ ID NO: 1586067 - RNA, 19 nt, Artificial Sequence
  Description of Artificial Sequence: Synthetic oligonucleotide
aaauauccuaacaguccuc

SEQ ID NO: 1586068 - RNA, 19 nt, Artificial Sequence
  Description of Artificial Sequence: Synthetic oligonucleotide
uaucacuuugggaguguag

SEQ ID NO: 1586069 - RNA, 19 nt, Artificial Sequence
  Description of Artificial Sequence: Synthetic oligonucleotide
agccuuguccugugaaagc

SEQ ID NO: 1586070 - RNA, 19 nt, Artificial Sequence
  Description of Artificial Sequence: Synthetic oligonucleotide
auguuaaagagauggugau

SEQ ID NO: 1586071 - RNA, 19 nt, Artificial Sequence
  Description of Artificial Sequence: Synthetic oligonucleotide
cacaacuuuuggauauucc

SEQ ID NO: 1586072 - RNA, 19 nt, Artificial Sequence
  Description of Artificial Sequence: Synthetic oligonucleotide
uuuccaaauugguaugcaa

SEQ ID NO: 1586073 - RNA, 19 nt, Artificial Sequence
  Description of Artificial Sequence: Synthetic oligonucleotide
cauaucaacucuugaccac

SEQ ID NO: 1586074 - RNA, 19 nt, Artificial Sequence
  Description of Artificial Sequence: Synthetic oligonucleotide
aauugguaugcaauaucca

SEQ ID NO: 1586075 - RNA, 19 nt, Artificial Sequence
  Description of Artificial Sequence: Synthetic oligonucleotide
gagcuuucacaucucgaag

SEQ ID NO: 1586076 - RNA, 19 nt, Artificial Sequence
  Description of Artificial Sequence: Synthetic oligonucleotide
cauacuggucuucugagga

SEQ ID NO: 1586077 - RNA, 19 nt, Artificial Sequence
  Description of Artificial Sequence: Synthetic oligonucleotide
caacucuugaccacaaaca

SEQ ID NO: 1586078 - RNA, 19 nt, Artificial Sequence
  Description of Artificial Sequence: Synthetic oligonucleotide
acuugugauaauaaucaga

SEQ ID NO: 1586079 - RNA, 19 nt, Artificial Sequence
  Description of Artificial Sequence: Synthetic oligonucleotide
ucacuuugggaguguaggc

SEQ ID NO: 1586080 - RNA, 19 nt, Artificial Sequence
  Description of Artificial Sequence: Synthetic oligonucleotide
acugaggaacaguuuauaa

SEQ ID NO: 1586081 - RNA, 19 nt, Artificial Sequence
  Description of Artificial Sequence: Synthetic oligonucleotide
gaggaacaguuuauaaacc

SEQ ID NO: 1586082 - RNA, 19 nt, Artificial Sequence
  Description of Artificial Sequence: Synthetic oligonucleotide
caacuggggaauagggucc

SEQ ID NO: 1586083 - RNA, 19 nt, Artificial Sequence
  Description of Artificial Sequence: Synthetic oligonucleotide
guucuguguaauccaagug

SEQ ID NO: 1586084 - RNA, 19 nt, Artificial Sequence
  Description of Artificial Sequence: Synthetic oligonucleotide
aagacggugcuuggcggcc

SEQ ID NO: 1586085 - RNA, 19 nt, Artificial Sequence
  Description of Artificial Sequence: Synthetic oligonucleotide
agaauagcucccugcaccu

SEQ ID NO: 1586086 - RNA, 19 nt, Artificial Sequence
  Description of Artificial Sequence: Synthetic oligonucleotide
aucgcaaccagcugugccu

SEQ ID NO: 1586087 - RNA, 19 nt, Artificial Sequence
  Description of Artificial Sequence: Synthetic oligonucleotide
gcacguuacacuaacauac

SEQ ID NO: 1586088 - RNA, 19 nt, Artificial Sequence
  Description of Artificial Sequence: Synthetic oligonucleotide
aggaguacaacuugugaua

SEQ ID NO: 1586089 - RNA, 19 nt, Artificial Sequence
  Description of Artificial Sequence: Synthetic oligonucleotide
aguaggcacgacuauucca

SEQ ID NO: 1586090 - RNA, 19 nt, Artificial Sequence
  Description of Artificial Sequence: Synthetic oligonucleotide
agcuggaggaugcagaaua

SEQ ID NO: 1586091 - RNA, 19 nt, Artificial Sequence
  Description of Artificial Sequence: Synthetic oligonucleotide
agaauaugguggaagagaa

SEQ ID NO: 1586092 - RNA, 19 nt, Artificial Sequence
  Description of Artificial Sequence: Synthetic oligonucleotide
ggugguguagcggucaugg

SEQ ID NO: 1586093 - RNA, 19 nt, Artificial Sequence
  Description of Artificial Sequence: Synthetic oligonucleotide
gaugcagaauagcucccug

SEQ ID NO: 1586094 - RNA, 19 nt, Artificial Sequence
  Description of Artificial Sequence: Synthetic oligonucleotide
aucucgaagcaguauucug

SEQ ID NO: 1586095 - RNA, 19 nt, Artificial Sequence
  Description of Artificial Sequence: Synthetic oligonucleotide
uagcgcugggaauauggag

SEQ ID NO: 1586096 - RNA, 19 nt, Artificial Sequence
  Description of Artificial Sequence: Synthetic oligonucleotide
uugugauaauaaucagaga

SEQ ID NO: 1586097 - RNA, 19 nt, Artificial Sequence
  Description of Artificial Sequence: Synthetic oligonucleotide
ugcacguuacacuaacaua

SEQ ID NO: 1586098 - RNA, 19 nt, Artificial Sequence
  Description of Artificial Sequence: Synthetic oligonucleotide
augaaaagcuauacaagga

SEQ ID NO: 1586099 - RNA, 19 nt, Artificial Sequence
  Description of Artificial Sequence: Synthetic oligonucleotide
ucagucuuacauucccacu

SEQ ID NO: 1586100 - RNA, 19 nt, Artificial Sequence
  Description of Artificial Sequence: Synthetic oligonucleotide
aacuuugcauccaauguuu

SEQ ID NO: 1586101 - RNA, 19 nt, Artificial Sequence
  Description of Artificial Sequence: Synthetic oligonucleotide
ucccacaguagccaucacu

SEQ ID NO: 1586102 - RNA, 19 nt, Artificial Sequence
  Description of Artificial Sequence: Synthetic oligonucleotide
uccugugaaagcacuccca

SEQ ID NO: 1586103 - RNA, 19 nt, Artificial Sequence
  Description of Artificial Sequence: Synthetic oligonucleotide
uuaaagagauggugauaac

SEQ ID NO: 1586104 - RNA, 19 nt, Artificial Sequence
  Description of Artificial Sequence: Synthetic oligonucleotide
aaucugaggaguacaacuu

SEQ ID NO: 1586105 - RNA, 19 nt, Artificial Sequence
  Description of Artificial Sequence: Synthetic oligonucleotide
gaagacggugcuuggcggc

SEQ ID NO: 1586106 - RNA, 19 nt, Artificial Sequence
  Description of Artificial Sequence: Synthetic oligonucleotide
ccaaaucagucuuacauuc

SEQ ID NO: 1586107 - RNA, 19 nt, Artificial Sequence
  Description of Artificial Sequence: Synthetic oligonucleotide
cuccaacacacuucaacug

SEQ ID NO: 1586108 - RNA, 19 nt, Artificial Sequence
  Description of Artificial Sequence: Synthetic oligonucleotide
uggugaguaggcacgacua

SEQ ID NO: 1586109 - RNA, 19 nt, Artificial Sequence
  Description of Artificial Sequence: Synthetic oligonucleotide
auuuuaccgucuucuggug

SEQ ID NO: 1586110 - RNA, 19 nt, Artificial Sequence
  Description of Artificial Sequence: Synthetic oligonucleotide
agauggguaguaccaugag

SEQ ID NO: 1586111 - RNA, 19 nt, Artificial Sequence
  Description of Artificial Sequence: Synthetic oligonucleotide
uccagucuccgggaggugg

SEQ ID NO: 1586112 - RNA, 19 nt, Artificial Sequence
  Description of Artificial Sequence: Synthetic oligonucleotide
aguuaaacccaggcugagg

SEQ ID NO: 1586113 - RNA, 19 nt, Artificial Sequence
  Description of Artificial Sequence: Synthetic oligonucleotide
uggggaauaggguccaguc

SEQ ID NO: 1586114 - RNA, 19 nt, Artificial Sequence
  Description of Artificial Sequence: Synthetic oligonucleotide
gaguaggcacgacuauucc

SEQ ID NO: 1586115 - RNA, 19 nt, Artificial Sequence
  Description of Artificial Sequence: Synthetic oligonucleotide
acaucucgaagcaguauuc

SEQ ID NO: 1586116 - RNA, 19 nt, Artificial Sequence
  Description of Artificial Sequence: Synthetic oligonucleotide
ugggaguguaggcaucgca

SEQ ID NO: 1586117 - RNA, 19 nt, Artificial Sequence
  Description of Artificial Sequence: Synthetic oligonucleotide
gaggaguacaacuugugau

SEQ ID NO: 1586118 - RNA, 19 nt, Artificial Sequence
  Description of Artificial Sequence: Synthetic oligonucleotide
gggaauaggguccagucuc

SEQ ID NO: 1586119 - RNA, 19 nt, Artificial Sequence
  Description of Artificial Sequence: Synthetic oligonucleotide
agccaguuaaacccaggcu

SEQ ID NO: 1586120 - RNA, 19 nt, Artificial Sequence
  Description of Artificial Sequence: Synthetic oligonucleotide
aggcaucgcaaccagcugu

SEQ ID NO: 1586121 - RNA, 19 nt, Artificial Sequence
  Description of Artificial Sequence: Synthetic oligonucleotide
caucgcaaccagcugugcc

SEQ ID NO: 1586122 - RNA, 19 nt, Artificial Sequence
  Description of Artificial Sequence: Synthetic oligonucleotide
ugguguuuugcagacuccu

SEQ ID NO: 1586123 - RNA, 19 nt, Artificial Sequence
  Description of Artificial Sequence: Synthetic oligonucleotide
cugggaauauggaggguac

SEQ ID NO: 1586124 - RNA, 19 nt, Artificial Sequence
  Description of Artificial Sequence: Synthetic oligonucleotide
agcauagcuagaccucuga

SEQ ID NO: 1586125 - RNA, 19 nt, Artificial Sequence
  Description of Artificial Sequence: Synthetic oligonucleotide
aggacucauagccuucaca

SEQ ID NO: 1586126 - RNA, 19 nt, Artificial Sequence
  Description of Artificial Sequence: Synthetic oligonucleotide
uaucaacucuugaccacaa

SEQ ID NO: 1586127 - RNA, 19 nt, Artificial Sequence
  Description of Artificial Sequence: Synthetic oligonucleotide
gaauaggguccagucuccg

SEQ ID NO: 1586128 - RNA, 19 nt, Artificial Sequence
  Description of Artificial Sequence: Synthetic oligonucleotide
uaggcacgacuauuccagg

SEQ ID NO: 1586129 - RNA, 19 nt, Artificial Sequence
  Description of Artificial Sequence: Synthetic oligonucleotide
gggucguuccagcacaggg

SEQ ID NO: 1586130 - RNA, 19 nt, Artificial Sequence
  Description of Artificial Sequence: Synthetic oligonucleotide
uauugcugccgaacaaaua

SEQ ID NO: 1586131 - RNA, 19 nt, Artificial Sequence
  Description of Artificial Sequence: Synthetic oligonucleotide
aaguaguaccccaauggua

SEQ ID NO: 1586132 - RNA, 19 nt, Artificial Sequence
  Description of Artificial Sequence: Synthetic oligonucleotide
agggauccuacauucuuaa

SEQ ID NO: 1586133 - RNA, 19 nt, Artificial Sequence
  Description of Artificial Sequence: Synthetic oligonucleotide
gguaagauggguaguacca

SEQ ID NO: 1586134 - RNA, 19 nt, Artificial Sequence
  Description of Artificial Sequence: Synthetic oligonucleotide
agcgacaccgggaacucac

SEQ ID NO: 1586135 - RNA, 19 nt, Artificial Sequence
  Description of Artificial Sequence: Synthetic oligonucleotide
gguuagagcuuucacaucu

SEQ ID NO: 1586136 - RNA, 19 nt, Artificial Sequence
  Description of Artificial Sequence: Synthetic oligonucleotide
auucccacuguacaucaua

SEQ ID NO: 1586137 - RNA, 19 nt, Artificial Sequence
  Description of Artificial Sequence: Synthetic oligonucleotide
uguuaaagagauggugaua

SEQ ID NO: 1586138 - RNA, 19 nt, Artificial Sequence
  Description of Artificial Sequence: Synthetic oligonucleotide
agacccgcugcggaagugc

SEQ ID NO: 1586139 - RNA, 19 nt, Artificial Sequence
  Description of Artificial Sequence: Synthetic oligonucleotide
guacaucauagccauccca

SEQ ID NO: 1586140 - RNA, 19 nt, Artificial Sequence
  Description of Artificial Sequence: Synthetic oligonucleotide
cuuuuggauauucccauua

SEQ ID NO: 1586141 - RNA, 19 nt, Artificial Sequence
  Description of Artificial Sequence: Synthetic oligonucleotide
uaggcaucgcaaccagcug

SEQ ID NO: 1586142 - RNA, 19 nt, Artificial Sequence
  Description of Artificial Sequence: Synthetic oligonucleotide
aauauccaaaucagucuua

SEQ ID NO: 1586143 - RNA, 19 nt, Artificial Sequence
  Description of Artificial Sequence: Synthetic oligonucleotide
ggguaagauggguaguacc

SEQ ID NO: 1586144 - RNA, 19 nt, Artificial Sequence
  Description of Artificial Sequence: Synthetic oligonucleotide
ucccacuguacaucauagc

SEQ ID NO: 1586145 - RNA, 19 nt, Artificial Sequence
  Description of Artificial Sequence: Synthetic oligonucleotide
uggugauaacaagucagaa

SEQ ID NO: 1586146 - RNA, 19 nt, Artificial Sequence
  Description of Artificial Sequence: Synthetic oligonucleotide
gucguuccagcacagggca

SEQ ID NO: 1586147 - RNA, 19 nt, Artificial Sequence
  Description of Artificial Sequence: Synthetic oligonucleotide
acguuacacuaacauacaa

SEQ ID NO: 1586148 - RNA, 19 nt, Artificial Sequence
  Description of Artificial Sequence: Synthetic oligonucleotide
cacgacuauuccaggugcc

SEQ ID NO: 1586149 - RNA, 19 nt, Artificial Sequence
  Description of Artificial Sequence: Synthetic oligonucleotide
gucgccgcccuauugcugc

SEQ ID NO: 1586150 - RNA, 19 nt, Artificial Sequence
  Description of Artificial Sequence: Synthetic oligonucleotide
cauagcuagaccucugaua

SEQ ID NO: 1586151 - RNA, 19 nt, Artificial Sequence
  Description of Artificial Sequence: Synthetic oligonucleotide
ucgaagcaguauucuguca

SEQ ID NO: 1586152 - RNA, 19 nt, Artificial Sequence
  Description of Artificial Sequence: Synthetic oligonucleotide
ucccgggcggccgacagcg

SEQ ID NO: 1586153 - RNA, 19 nt, Artificial Sequence
  Description of Artificial Sequence: Synthetic oligonucleotide
guccugugaaagcacuccc

SEQ ID NO: 1586154 - RNA, 19 nt, Artificial Sequence
  Description of Artificial Sequence: Synthetic oligonucleotide
ggaacaguuuauaaaccac

SEQ ID NO: 1586155 - RNA, 19 nt, Artificial Sequence
  Description of Artificial Sequence: Synthetic oligonucleotide
cugaauugucacagccuug

SEQ ID NO: 1586156 - RNA, 19 nt, Artificial Sequence
  Description of Artificial Sequence: Synthetic oligonucleotide
ccaagugauacuccaggcc

SEQ ID NO: 1586157 - RNA, 19 nt, Artificial Sequence
  Description of Artificial Sequence: Synthetic oligonucleotide
ucuggcaucacaggcuuua

SEQ ID NO: 1586158 - RNA, 19 nt, Artificial Sequence
  Description of Artificial Sequence: Synthetic oligonucleotide
ggccugaauugucacagcc

SEQ ID NO: 1586159 - RNA, 19 nt, Artificial Sequence
  Description of Artificial Sequence: Synthetic oligonucleotide
auagccaucccagccuuug

SEQ ID NO: 1586160 - RNA, 19 nt, Artificial Sequence
  Description of Artificial Sequence: Synthetic oligonucleotide
auccuacauucuuaaugcu

SEQ ID NO: 1586161 - RNA, 19 nt, Artificial Sequence
  Description of Artificial Sequence: Synthetic oligonucleotide
agcggccacggccauggcg

SEQ ID NO: 1586162 - RNA, 19 nt, Artificial Sequence
  Description of Artificial Sequence: Synthetic oligonucleotide
auggugauaacaagucaga

SEQ ID NO: 1586163 - RNA, 19 nt, Artificial Sequence
  Description of Artificial Sequence: Synthetic oligonucleotide
uaaugcucccucuggcauc

SEQ ID NO: 1586164 - RNA, 19 nt, Artificial Sequence
  Description of Artificial Sequence: Synthetic oligonucleotide
ugcauccaauguuugccuc

SEQ ID NO: 1586165 - RNA, 19 nt, Artificial Sequence
  Description of Artificial Sequence: Synthetic oligonucleotide
auauucccauuauccagau

SEQ ID NO: 1586166 - RNA, 19 nt, Artificial Sequence
  Description of Artificial Sequence: Synthetic oligonucleotide
aacccugggccugaauugu

SEQ ID NO: 1586167 - RNA, 19 nt, Artificial Sequence
  Description of Artificial Sequence: Synthetic oligonucleotide
cugguguuuugcagacucc

SEQ ID NO: 1586168 - RNA, 19 nt, Artificial Sequence
  Description of Artificial Sequence: Synthetic oligonucleotide
ucacagcucaccaccguuu

SEQ ID NO: 1586169 - RNA, 19 nt, Artificial Sequence
  Description of Artificial Sequence: Synthetic oligonucleotide
ggcacgacuauuccaggug

SEQ ID NO: 1586170 - RNA, 19 nt, Artificial Sequence
  Description of Artificial Sequence: Synthetic oligonucleotide
gcaauauccaaaucagucu

SEQ ID NO: 1586171 - RNA, 19 nt, Artificial Sequence
  Description of Artificial Sequence: Synthetic oligonucleotide
aggcacgacuauuccaggu

SEQ ID NO: 1586172 - RNA, 19 nt, Artificial Sequence
  Description of Artificial Sequence: Synthetic oligonucleotide
gguguagcggucaugguga

SEQ ID NO: 1586173 - RNA, 19 nt, Artificial Sequence
  Description of Artificial Sequence: Synthetic oligonucleotide
uagcuagaccucugauagc

SEQ ID NO: 1586174 - RNA, 19 nt, Artificial Sequence
  Description of Artificial Sequence: Synthetic oligonucleotide
uguaucacuuugggagugu

SEQ ID NO: 1586175 - RNA, 19 nt, Artificial Sequence
  Description of Artificial Sequence: Synthetic oligonucleotide
acauaggcaacagcaagua

SEQ ID NO: 1586176 - RNA, 19 nt, Artificial Sequence
  Description of Artificial Sequence: Synthetic oligonucleotide
gguaauaaugccacaggaa

SEQ ID NO: 1586177 - RNA, 19 nt, Artificial Sequence
  Description of Artificial Sequence: Synthetic oligonucleotide
gucagggucguuccagcac

SEQ ID NO: 1586178 - RNA, 19 nt, Artificial Sequence
  Description of Artificial Sequence: Synthetic oligonucleotide
gcauccaauguuugccucc

SEQ ID NO: 1586179 - RNA, 19 nt, Artificial Sequence
  Description of Artificial Sequence: Synthetic oligonucleotide
ggaguguaggcaucgcaac

SEQ ID NO: 1586180 - RNA, 19 nt, Artificial Sequence
  Description of Artificial Sequence: Synthetic oligonucleotide
cugccgaacaaauauccua

SEQ ID NO: 1586181 - RNA, 19 nt, Artificial Sequence
  Description of Artificial Sequence: Synthetic oligonucleotide
cacaggcuuuagaaacaag

SEQ ID NO: 1586182 - RNA, 19 nt, Artificial Sequence
  Description of Artificial Sequence: Synthetic oligonucleotide
aacuggggaauagggucca

SEQ ID NO: 1586183 - RNA, 19 nt, Artificial Sequence
  Description of Artificial Sequence: Synthetic oligonucleotide
acuuucuauuuuaccgucu

SEQ ID NO: 1586184 - RNA, 19 nt, Artificial Sequence
  Description of Artificial Sequence: Synthetic oligonucleotide
gccuccaacacacuucaac

SEQ ID NO: 1586185 - RNA, 19 nt, Artificial Sequence
  Description of Artificial Sequence: Synthetic oligonucleotide
gcacgacuauuccaggugc

SEQ ID NO: 1586186 - RNA, 19 nt, Artificial Sequence
  Description of Artificial Sequence: Synthetic oligonucleotide
ucccauuauccagauguua

SEQ ID NO: 1586187 - RNA, 19 nt, Artificial Sequence
  Description of Artificial Sequence: Synthetic oligonucleotide
accaugagucugagaaggg

SEQ ID NO: 1586188 - RNA, 19 nt, Artificial Sequence
  Description of Artificial Sequence: Synthetic oligonucleotide
uucccauuauccagauguu

SEQ ID NO: 1586189 - RNA, 19 nt, Artificial Sequence
  Description of Artificial Sequence: Synthetic oligonucleotide
caauauccaaaucagucuu

SEQ ID NO: 1586190 - RNA, 19 nt, Artificial Sequence
  Description of Artificial Sequence: Synthetic oligonucleotide
guaggcaucgcaaccagcu

SEQ ID NO: 1586191 - RNA, 19 nt, Artificial Sequence
  Description of Artificial Sequence: Synthetic oligonucleotide
cuguaucacuuugggagug

SEQ ID NO: 1586192 - RNA, 19 nt, Artificial Sequence
  Description of Artificial Sequence: Synthetic oligonucleotide
aggguacucagaauauggu

SEQ ID NO: 1586193 - RNA, 19 nt, Artificial Sequence
  Description of Artificial Sequence: Synthetic oligonucleotide
ucguuccagcacagggcag

SEQ ID NO: 1586194 - RNA, 19 nt, Artificial Sequence
  Description of Artificial Sequence: Synthetic oligonucleotide
cauggcgcugggugaagac

SEQ ID NO: 1586195 - RNA, 19 nt, Artificial Sequence
  Description of Artificial Sequence: Synthetic oligonucleotide
caaguaguaccccaauggu

SEQ ID NO: 1586196 - RNA, 19 nt, Artificial Sequence
  Description of Artificial Sequence: Synthetic oligonucleotide
augcaauauccaaaucagu

SEQ ID NO: 1586197 - RNA, 19 nt, Artificial Sequence
  Description of Artificial Sequence: Synthetic oligonucleotide
cacauaggcaacagcaagu

SEQ ID NO: 1586198 - RNA, 19 nt, Artificial Sequence
  Description of Artificial Sequence: Synthetic oligonucleotide
cacuucaacuggggaauag

SEQ ID NO: 1586199 - RNA, 19 nt, Artificial Sequence
  Description of Artificial Sequence: Synthetic oligonucleotide
ggaauauggaggguacuca

SEQ ID NO: 1586200 - RNA, 19 nt, Artificial Sequence
  Description of Artificial Sequence: Synthetic oligonucleotide
caccauauccugaugcugu

SEQ ID NO: 1586201 - RNA, 19 nt, Artificial Sequence
  Description of Artificial Sequence: Synthetic oligonucleotide
caucccagccuuuguucug

SEQ ID NO: 1586202 - RNA, 19 nt, Artificial Sequence
  Description of Artificial Sequence: Synthetic oligonucleotide
ugggaauauggaggguacu

SEQ ID NO: 1586203 - RNA, 19 nt, Artificial Sequence
  Description of Artificial Sequence: Synthetic oligonucleotide
gacggugcuuggcggcccg

SEQ ID NO: 1586204 - RNA, 19 nt, Artificial Sequence
  Description of Artificial Sequence: Synthetic oligonucleotide
uguagcggucauggugaag

SEQ ID NO: 1586205 - RNA, 19 nt, Artificial Sequence
  Description of Artificial Sequence: Synthetic oligonucleotide
guaguaccaugagucugag

SEQ ID NO: 1586206 - RNA, 19 nt, Artificial Sequence
  Description of Artificial Sequence: Synthetic oligonucleotide
cugaggacucauagccuuc

SEQ ID NO: 1586207 - RNA, 19 nt, Artificial Sequence
  Description of Artificial Sequence: Synthetic oligonucleotide
acgacuauuccaggugcca

SEQ ID NO: 1586208 - RNA, 19 nt, Artificial Sequence
  Description of Artificial Sequence: Synthetic oligonucleotide
ggacaaagcaucacacaac

SEQ ID NO: 1586209 - RNA, 19 nt, Artificial Sequence
  Description of Artificial Sequence: Synthetic oligonucleotide
cuagaccucugauagcgcu

SEQ ID NO: 1586210 - RNA, 19 nt, Artificial Sequence
  Description of Artificial Sequence: Synthetic oligonucleotide
gcauucaagcuggaggaug

SEQ ID NO: 1586211 - RNA, 19 nt, Artificial Sequence
  Description of Artificial Sequence: Synthetic oligonucleotide
aucaacucuugaccacaaa

SEQ ID NO: 1586212 - RNA, 19 nt, Artificial Sequence
  Description of Artificial Sequence: Synthetic oligonucleotide
auagcgcugggaauaugga

SEQ ID NO: 1586213 - RNA, 19 nt, Artificial Sequence
  Description of Artificial Sequence: Synthetic oligonucleotide
uaguaccaugagucugaga

SEQ ID NO: 1586214 - RNA, 19 nt, Artificial Sequence
  Description of Artificial Sequence: Synthetic oligonucleotide
cccauuauccagauguuaa

SEQ ID NO: 1586215 - RNA, 19 nt, Artificial Sequence
  Description of Artificial Sequence: Synthetic oligonucleotide
acagcaaguaguaccccaa

SEQ ID NO: 1586216 - RNA, 19 nt, Artificial Sequence
  Description of Artificial Sequence: Synthetic oligonucleotide
ccuaguucuguguaaucca

SEQ ID NO: 1586217 - RNA, 19 nt, Artificial Sequence
  Description of Artificial Sequence: Synthetic oligonucleotide
gggaauauggaggguacuc

SEQ ID NO: 1586218 - RNA, 19 nt, Artificial Sequence
  Description of Artificial Sequence: Synthetic oligonucleotide
ccccaaugguaauaaugcc

SEQ ID NO: 1586219 - RNA, 19 nt, Artificial Sequence
  Description of Artificial Sequence: Synthetic oligonucleotide
gccgacagcggccacggcc

SEQ ID NO: 1586220 - RNA, 19 nt, Artificial Sequence
  Description of Artificial Sequence: Synthetic oligonucleotide
uaguaccccaaugguaaua

SEQ ID NO: 1586221 - RNA, 19 nt, Artificial Sequence
  Description of Artificial Sequence: Synthetic oligonucleotide
agacggugcuuggcggccc

SEQ ID NO: 1586222 - RNA, 19 nt, Artificial Sequence
  Description of Artificial Sequence: Synthetic oligonucleotide
ucuccgggaggugguguag

SEQ ID NO: 1586223 - RNA, 19 nt, Artificial Sequence
  Description of Artificial Sequence: Synthetic oligonucleotide
cagcauagcuagaccucug

SEQ ID NO: 1586224 - RNA, 19 nt, Artificial Sequence
  Description of Artificial Sequence: Synthetic oligonucleotide
cugcggaagugcucccgcc

SEQ ID NO: 1586225 - RNA, 19 nt, Artificial Sequence
  Description of Artificial Sequence: Synthetic oligonucleotide
guuagagcuuucacaucuc

SEQ ID NO: 1586226 - RNA, 19 nt, Artificial Sequence
  Description of Artificial Sequence: Synthetic oligonucleotide
gagggauccuacauucuua

SEQ ID NO: 1586227 - RNA, 19 nt, Artificial Sequence
  Description of Artificial Sequence: Synthetic oligonucleotide
ggaauaggguccagucucc

SEQ ID NO: 1586228 - RNA, 19 nt, Artificial Sequence
  Description of Artificial Sequence: Synthetic oligonucleotide
ggggucgccgcccuauugc

SEQ ID NO: 1586229 - RNA, 19 nt, Artificial Sequence
  Description of Artificial Sequence: Synthetic oligonucleotide
ggaggguacucagaauaug

SEQ ID NO: 1586230 - RNA, 19 nt, Artificial Sequence
  Description of Artificial Sequence: Synthetic oligonucleotide
uuaccgucuucuggugcca

SEQ ID NO: 1586231 - RNA, 19 nt, Artificial Sequence
  Description of Artificial Sequence: Synthetic oligonucleotide
caacagcaggcagcgugcg

SEQ ID NO: 1586232 - RNA, 19 nt, Artificial Sequence
  Description of Artificial Sequence: Synthetic oligonucleotide
ugauagcgcugggaauaug

SEQ ID NO: 1586233 - RNA, 19 nt, Artificial Sequence
  Description of Artificial Sequence: Synthetic oligonucleotide
cuuggcggcccgagacccg

SEQ ID NO: 1586234 - RNA, 19 nt, Artificial Sequence
  Description of Artificial Sequence: Synthetic oligonucleotide
ugcauucaagcuggaggau

SEQ ID NO: 1586235 - RNA, 19 nt, Artificial Sequence
  Description of Artificial Sequence: Synthetic oligonucleotide
cucaagcugccugugcuca

SEQ ID NO: 1586236 - RNA, 19 nt, Artificial Sequence
  Description of Artificial Sequence: Synthetic oligonucleotide
ccaguuaaacccaggcuga

SEQ ID NO: 1586237 - RNA, 19 nt, Artificial Sequence
  Description of Artificial Sequence: Synthetic oligonucleotide
cacuuugaacugcacguua

SEQ ID NO: 1586238 - RNA, 19 nt, Artificial Sequence
  Description of Artificial Sequence: Synthetic oligonucleotide
gcagaauagcucccugcac

SEQ ID NO: 1586239 - RNA, 19 nt, Artificial Sequence
  Description of Artificial Sequence: Synthetic oligonucleotide
cauccaauguuugccucca

SEQ ID NO: 1586240 - RNA, 19 nt, Artificial Sequence
  Description of Artificial Sequence: Synthetic oligonucleotide
cagcgugcggcucccgggc

SEQ ID NO: 1586241 - RNA, 19 nt, Artificial Sequence
  Description of Artificial Sequence: Synthetic oligonucleotide
gaggacauacuggucuucu

SEQ ID NO: 1586242 - RNA, 19 nt, Artificial Sequence
  Description of Artificial Sequence: Synthetic oligonucleotide
aggccuaguucuguguaau

SEQ ID NO: 1586243 - RNA, 19 nt, Artificial Sequence
  Description of Artificial Sequence: Synthetic oligonucleotide
cacaucucgaagcaguauu

SEQ ID NO: 1586244 - RNA, 19 nt, Artificial Sequence
  Description of Artificial Sequence: Synthetic oligonucleotide
guaggauggaggguaagau

SEQ ID NO: 1586245 - RNA, 19 nt, Artificial Sequence
  Description of Artificial Sequence: Synthetic oligonucleotide
gcaacagcaggcagcgugc

SEQ ID NO: 1586246 - RNA, 19 nt, Artificial Sequence
  Description of Artificial Sequence: Synthetic oligonucleotide
ccgaacaaauauccuaaca

SEQ ID NO: 1586247 - RNA, 19 nt, Artificial Sequence
  Description of Artificial Sequence: Synthetic oligonucleotide
auucaagcuggaggaugca

SEQ ID NO: 1586248 - RNA, 19 nt, Artificial Sequence
  Description of Artificial Sequence: Synthetic oligonucleotide
agcggucauggugaagggu

SEQ ID NO: 1586249 - RNA, 19 nt, Artificial Sequence
  Description of Artificial Sequence: Synthetic oligonucleotide
acugcacguuacacuaaca

SEQ ID NO: 1586250 - RNA, 19 nt, Artificial Sequence
  Description of Artificial Sequence: Synthetic oligonucleotide
ccuaacaguccuccagcac

SEQ ID NO: 1586251 - RNA, 19 nt, Artificial Sequence
  Description of Artificial Sequence: Synthetic oligonucleotide
agggucguuccagcacagg

SEQ ID NO: 1586252 - RNA, 19 nt, Artificial Sequence
  Description of Artificial Sequence: Synthetic oligonucleotide
gaauagcucccugcaccuc

SEQ ID NO: 1586253 - RNA, 19 nt, Artificial Sequence
  Description of Artificial Sequence: Synthetic oligonucleotide
gacaccgggaacucaccau

SEQ ID NO: 1586254 - RNA, 19 nt, Artificial Sequence
  Description of Artificial Sequence: Synthetic oligonucleotide
cugggccugaauugucaca

SEQ ID NO: 1586255 - RNA, 19 nt, Artificial Sequence
  Description of Artificial Sequence: Synthetic oligonucleotide
cuguguaauccaagugaua

SEQ ID NO: 1586256 - RNA, 19 nt, Artificial Sequence
  Description of Artificial Sequence: Synthetic oligonucleotide
cuccgggaggugguguagc

SEQ ID NO: 1586257 - RNA, 19 nt, Artificial Sequence
  Description of Artificial Sequence: Synthetic oligonucleotide
ggcagcgugcggcucccgg

SEQ ID NO: 1586258 - RNA, 19 nt, Artificial Sequence
  Description of Artificial Sequence: Synthetic oligonucleotide
gggaguguaggcaucgcaa

SEQ ID NO: 1586259 - RNA, 19 nt, Artificial Sequence
  Description of Artificial Sequence: Synthetic oligonucleotide
gucuuacauucccacugua

SEQ ID NO: 1586260 - RNA, 19 nt, Artificial Sequence
  Description of Artificial Sequence: Synthetic oligonucleotide
gccaguccagaacccuggg

SEQ ID NO: 1586261 - RNA, 19 nt, Artificial Sequence
  Description of Artificial Sequence: Synthetic oligonucleotide
ccacaaacaacaggacaug

SEQ ID NO: 1586262 - RNA, 19 nt, Artificial Sequence
  Description of Artificial Sequence: Synthetic oligonucleotide
acaaagcaucacacaacuu

SEQ ID NO: 1586263 - RNA, 19 nt, Artificial Sequence
  Description of Artificial Sequence: Synthetic oligonucleotide
gaacugcacguuacacuaa

SEQ ID NO: 1586264 - RNA, 19 nt, Artificial Sequence
  Description of Artificial Sequence: Synthetic oligonucleotide
ggguuagagcuuucacauc

SEQ ID NO: 1586265 - RNA, 19 nt, Artificial Sequence
  Description of Artificial Sequence: Synthetic oligonucleotide
gcccuauugcugccgaaca

SEQ ID NO: 1586266 - RNA, 19 nt, Artificial Sequence
  Description of Artificial Sequence: Synthetic oligonucleotide
acccugggccugaauuguc

SEQ ID NO: 1586267 - RNA, 19 nt, Artificial Sequence
  Description of Artificial Sequence: Synthetic oligonucleotide
gcuuggcggcccgagaccc

SEQ ID NO: 1586268 - RNA, 19 nt, Artificial Sequence
  Description of Artificial Sequence: Synthetic oligonucleotide
gagacccgcugcggaagug

SEQ ID NO: 1586269 - RNA, 19 nt, Artificial Sequence
  Description of Artificial Sequence: Synthetic oligonucleotide
uccaggccgcaggaacccc

SEQ ID NO: 1586270 - RNA, 19 nt, Artificial Sequence
  Description of Artificial Sequence: Synthetic oligonucleotide
guaucacuuugggagugua

SEQ ID NO: 1586271 - RNA, 19 nt, Artificial Sequence
  Description of Artificial Sequence: Synthetic oligonucleotide
auccaauguuugccuccaa

SEQ ID NO: 1586272 - RNA, 19 nt, Artificial Sequence
  Description of Artificial Sequence: Synthetic oligonucleotide
ccaccauauccugaugcug

SEQ ID NO: 1586273 - RNA, 19 nt, Artificial Sequence
  Description of Artificial Sequence: Synthetic oligonucleotide
acuggggaauaggguccag

SEQ ID NO: 1586274 - RNA, 19 nt, Artificial Sequence
  Description of Artificial Sequence: Synthetic oligonucleotide
caucucgaagcaguauucu

SEQ ID NO: 1586275 - RNA, 19 nt, Artificial Sequence
  Description of Artificial Sequence: Synthetic oligonucleotide
ggggaauaggguccagucu

SEQ ID NO: 1586276 - RNA, 19 nt, Artificial Sequence
  Description of Artificial Sequence: Synthetic oligonucleotide
ggaggugguguagcgguca

SEQ ID NO: 1586277 - RNA, 19 nt, Artificial Sequence
  Description of Artificial Sequence: Synthetic oligonucleotide
ggccuaguucuguguaauc

SEQ ID NO: 1586278 - RNA, 19 nt, Artificial Sequence
  Description of Artificial Sequence: Synthetic oligonucleotide
gcuagaccucugauagcgc

SEQ ID NO: 1586279 - RNA, 19 nt, Artificial Sequence
  Description of Artificial Sequence: Synthetic oligonucleotide
guaguaccccaaugguaau

SEQ ID NO: 1586280 - RNA, 19 nt, Artificial Sequence
  Description of Artificial Sequence: Synthetic oligonucleotide
ccugaauugucacagccuu

SEQ ID NO: 1586281 - RNA, 19 nt, Artificial Sequence
  Description of Artificial Sequence: Synthetic oligonucleotide
gccaccauauccugaugcu

SEQ ID NO: 1586282 - RNA, 19 nt, Artificial Sequence
  Description of Artificial Sequence: Synthetic oligonucleotide
ggguaggauggaggguaag

SEQ ID NO: 1586283 - RNA, 19 nt, Artificial Sequence
  Description of Artificial Sequence: Synthetic oligonucleotide
ccgacagcggccacggcca

SEQ ID NO: 1586284 - RNA, 19 nt, Artificial Sequence
  Description of Artificial Sequence: Synthetic oligonucleotide
ggugaguaggcacgacuau

SEQ ID NO: 1586285 - RNA, 19 nt, Artificial Sequence
  Description of Artificial Sequence: Synthetic oligonucleotide
ggugcuuggcggcccgaga

SEQ ID NO: 1586286 - RNA, 19 nt, Artificial Sequence
  Description of Artificial Sequence: Synthetic oligonucleotide
guguagcggucauggugaa

SEQ ID NO: 1586287 - RNA, 19 nt, Artificial Sequence
  Description of Artificial Sequence: Synthetic oligonucleotide
gugaaggguuagagcuuuc

SEQ ID NO: 1586288 - RNA, 19 nt, Artificial Sequence
  Description of Artificial Sequence: Synthetic oligonucleotide
gcgugcggcucccgggcgg

SEQ ID NO: 1586289 - RNA, 19 nt, Artificial Sequence
  Description of Artificial Sequence: Synthetic oligonucleotide
ccuuuguucuggcacugua

SEQ ID NO: 1586290 - RNA, 19 nt, Artificial Sequence
  Description of Artificial Sequence: Synthetic oligonucleotide
gcauagcuagaccucugau

SEQ ID NO: 1586291 - RNA, 19 nt, Artificial Sequence
  Description of Artificial Sequence: Synthetic oligonucleotide
cccugaggacauacugguc

SEQ ID NO: 1586292 - RNA, 19 nt, Artificial Sequence
  Description of Artificial Sequence: Synthetic oligonucleotide
gcggccgacagcggccacg

SEQ ID NO: 1586293 - RNA, 19 nt, Artificial Sequence
  Description of Artificial Sequence: Synthetic oligonucleotide
cuggggaauaggguccagu

SEQ ID NO: 1586294 - RNA, 19 nt, Artificial Sequence
  Description of Artificial Sequence: Synthetic oligonucleotide
ggcccgagacccgcugcgg

SEQ ID NO: 1586295 - RNA, 19 nt, Artificial Sequence
  Description of Artificial Sequence: Synthetic oligonucleotide
ggucgccgcccuauugcug

SEQ ID NO: 1586296 - RNA, 19 nt, Artificial Sequence
  Description of Artificial Sequence: Synthetic oligonucleotide
cagggccggccaccagcag

SEQ ID NO: 1586297 - RNA, 19 nt, Artificial Sequence
  Description of Artificial Sequence: Synthetic oligonucleotide
gcggucauggugaaggguu

SEQ ID NO: 1586298 - RNA, 19 nt, Artificial Sequence
  Description of Artificial Sequence: Synthetic oligonucleotide
gcagcgacaccgggaacuc

SEQ ID NO: 1586299 - RNA, 19 nt, Artificial Sequence
  Description of Artificial Sequence: Synthetic oligonucleotide
gcgacaccgggaacucacc

SEQ ID NO: 1586300 - RNA, 19 nt, Artificial Sequence
  Description of Artificial Sequence: Synthetic oligonucleotide
gacccgcugcggaagugcu

SEQ ID NO: 1586301 - RNA, 19 nt, Artificial Sequence
  Description of Artificial Sequence: Synthetic oligonucleotide
ggcggcccgagacccgcug

SEQ ID NO: 1586302 - RNA, 19 nt, Artificial Sequence
  Description of Artificial Sequence: Synthetic oligonucleotide
guccagucuccgggaggug

SEQ ID NO: 1586303 - RNA, 19 nt, Artificial Sequence
  Description of Artificial Sequence: Synthetic oligonucleotide
gcugccgaacaaauauccu

SEQ ID NO: 1586304 - RNA, 19 nt, Artificial Sequence
  Description of Artificial Sequence: Synthetic oligonucleotide
cccuauugcugccgaacaa

SEQ ID NO: 1586305 - RNA, 19 nt, Artificial Sequence
  Description of Artificial Sequence: Synthetic oligonucleotide
cauucccacuguacaucau

SEQ ID NO: 1586306 - RNA, 19 nt, Artificial Sequence
  Description of Artificial Sequence: Synthetic oligonucleotide
cugauagcgcugggaauau

SEQ ID NO: 1586307 - RNA, 19 nt, Artificial Sequence
  Description of Artificial Sequence: Synthetic oligonucleotide
caggaaccccugaggacau

SEQ ID NO: 1586308 - RNA, 19 nt, Artificial Sequence
  Description of Artificial Sequence: Synthetic oligonucleotide
augcucccucuggcaucac

SEQ ID NO: 1586309 - RNA, 19 nt, Artificial Sequence
  Description of Artificial Sequence: Synthetic oligonucleotide
cgcccuauugcugccgaac

SEQ ID NO: 1586310 - RNA, 19 nt, Artificial Sequence
  Description of Artificial Sequence: Synthetic oligonucleotide
gcgcugggugaagacggug

SEQ ID NO: 1586311 - RNA, 19 nt, Artificial Sequence
  Description of Artificial Sequence: Synthetic oligonucleotide
gccgcccuauugcugccga

SEQ ID NO: 1586312 - RNA, 19 nt, Artificial Sequence
  Description of Artificial Sequence: Synthetic oligonucleotide
gcccgagacccgcugcgga

SEQ ID NO: 1586313 - RNA, 19 nt, Artificial Sequence
  Description of Artificial Sequence: Synthetic oligonucleotide
gggauccuacauucuuaau

SEQ ID NO: 1586314 - RNA, 19 nt, Artificial Sequence
  Description of Artificial Sequence: Synthetic oligonucleotide
gggucgccgcccuauugcu

SEQ ID NO: 1586315 - RNA, 19 nt, Artificial Sequence
  Description of Artificial Sequence: Synthetic oligonucleotide
cggcccgagacccgcugcg

SEQ ID NO: 1586316 - RNA, 19 nt, Artificial Sequence
  Description of Artificial Sequence: Synthetic oligonucleotide
gccauggcgcugggugaag

SEQ ID NO: 1586317 - RNA, 19 nt, Artificial Sequence
  Description of Artificial Sequence: Synthetic oligonucleotide
cgacaccgggaacucacca

SEQ ID NO: 1586318 - RNA, 19 nt, Artificial Sequence
  Description of Artificial Sequence: Synthetic oligonucleotide
cagcgacaccgggaacuca

SEQ ID NO: 1586319 - RNA, 19 nt, Artificial Sequence
  Description of Artificial Sequence: Synthetic oligonucleotide
cccagccuuuguucuggca

SEQ ID NO: 1586320 - RNA, 19 nt, Artificial Sequence
  Description of Artificial Sequence: Synthetic oligonucleotide
cgcugcggaagugcucccg

SEQ ID NO: 1586321 - RNA, 19 nt, Artificial Sequence
  Description of Artificial Sequence: Synthetic oligonucleotide
gcgcuccugcagcauagcu

SEQ ID NO: 1586322 - RNA, 19 nt, Artificial Sequence
  Description of Artificial Sequence: Synthetic oligonucleotide
cggccgacagcggccacgg

SEQ ID NO: 1586323 - RNA, 19 nt, Artificial Sequence
  Description of Artificial Sequence: Synthetic oligonucleotide
cccgagacccgcugcggaa

SEQ ID NO: 1586324 - RNA, 19 nt, Artificial Sequence
  Description of Artificial Sequence: Synthetic oligonucleotide
ccucuggcaucacaggcuu

SEQ ID NO: 1586325 - RNA, 19 nt, Artificial Sequence
  Description of Artificial Sequence: Synthetic oligonucleotide
cugggugaagacggugcuu

SEQ ID NO: 1586326 - RNA, 19 nt, Artificial Sequence
  Description of Artificial Sequence: Synthetic oligonucleotide
guauucugucagggucguu

SEQ ID NO: 1586327 - RNA, 19 nt, Artificial Sequence
  Description of Artificial Sequence: Synthetic oligonucleotide
cgccgcccuauugcugccg

SEQ ID NO: 1586328 - RNA, 19 nt, Artificial Sequence
  Description of Artificial Sequence: Synthetic oligonucleotide
ggcggccgacagcggccac

SEQ ID NO: 1586329 - RNA, 19 nt, Artificial Sequence
  Description of Artificial Sequence: Synthetic oligonucleotide
ggcgcugggugaagacggu

SEQ ID NO: 1586330 - RNA, 19 nt, Artificial Sequence
  Description of Artificial Sequence: Synthetic oligonucleotide
ccgcccuauugcugccgaa

SEQ ID NO: 1586331 - RNA, 19 nt, Artificial Sequence
  Description of Artificial Sequence: Synthetic oligonucleotide
cgagacccgcugcggaagu

SEQ ID NO: 1586332 - RNA, 19 nt, Artificial Sequence
  Description of Artificial Sequence: Synthetic oligonucleotide
cccugguguuuugcagacu

SEQ ID NO: 1586333 - RNA, 19 nt, Artificial Sequence
  Description of Artificial Sequence: Synthetic oligonucleotide
cgacagcggccacggccau

SEQ ID NO: 1586334 - RNA, 19 nt, Artificial Sequence
  Description of Artificial Sequence: Synthetic oligonucleotide
uugaauucagaucugaucu

SEQ ID NO: 1586335 - RNA, 19 nt, Artificial Sequence
  Description of Artificial Sequence: Synthetic oligonucleotide
ugucucaugucacagacgg

SEQ ID NO: 1586336 - RNA, 19 nt, Artificial Sequence
  Description of Artificial Sequence: Synthetic oligonucleotide
uucaauaggcccaaaauca

SEQ ID NO: 1586337 - RNA, 19 nt, Artificial Sequence
  Description of Artificial Sequence: Synthetic oligonucleotide
ugugucagaaaugauaucc

SEQ ID NO: 1586338 - RNA, 19 nt, Artificial Sequence
  Description of Artificial Sequence: Synthetic oligonucleotide
uuauucacgacacauuaca

SEQ ID NO: 1586339 - RNA, 19 nt, Artificial Sequence
  Description of Artificial Sequence: Synthetic oligonucleotide
ugauccacuaugcugagcc

SEQ ID NO: 1586340 - RNA, 19 nt, Artificial Sequence
  Description of Artificial Sequence: Synthetic oligonucleotide
auugucauuucacagggag

SEQ ID NO: 1586341 - RNA, 19 nt, Artificial Sequence
  Description of Artificial Sequence: Synthetic oligonucleotide
aaaaugguuuauucacgac

SEQ ID NO: 1586342 - RNA, 19 nt, Artificial Sequence
  Description of Artificial Sequence: Synthetic oligonucleotide
caugauucugaucaggacc

SEQ ID NO: 1586343 - RNA, 19 nt, Artificial Sequence
  Description of Artificial Sequence: Synthetic oligonucleotide
aauaggcccaaaaucaccg

SEQ ID NO: 1586344 - RNA, 19 nt, Artificial Sequence
  Description of Artificial Sequence: Synthetic oligonucleotide
uucucuaggacauuaggug

SEQ ID NO: 1586345 - RNA, 19 nt, Artificial Sequence
  Description of Artificial Sequence: Synthetic oligonucleotide
agggacuugccauauuucc

SEQ ID NO: 1586346 - RNA, 19 nt, Artificial Sequence
  Description of Artificial Sequence: Synthetic oligonucleotide
uguaggguuugacugaccc

SEQ ID NO: 1586347 - RNA, 19 nt, Artificial Sequence
  Description of Artificial Sequence: Synthetic oligonucleotide
ucuguuaaucuccugcagc

SEQ ID NO: 1586348 - RNA, 19 nt, Artificial Sequence
  Description of Artificial Sequence: Synthetic oligonucleotide
uucacgacacauuacauaa

SEQ ID NO: 1586349 - RNA, 19 nt, Artificial Sequence
  Description of Artificial Sequence: Synthetic oligonucleotide
gauucucuaggacauuagg

SEQ ID NO: 1586350 - RNA, 19 nt, Artificial Sequence
  Description of Artificial Sequence: Synthetic oligonucleotide
agacgguacagccaacucc

SEQ ID NO: 1586351 - RNA, 19 nt, Artificial Sequence
  Description of Artificial Sequence: Synthetic oligonucleotide
uuucaccccagcaucauag

SEQ ID NO: 1586352 - RNA, 19 nt, Artificial Sequence
  Description of Artificial Sequence: Synthetic oligonucleotide
agggcuguaguucuuguac

SEQ ID NO: 1586353 - RNA, 19 nt, Artificial Sequence
  Description of Artificial Sequence: Synthetic oligonucleotide
ugaaagccucccuagaagc

SEQ ID NO: 1586354 - RNA, 19 nt, Artificial Sequence
  Description of Artificial Sequence: Synthetic oligonucleotide
uuugcaagggcgaccauca

SEQ ID NO: 1586355 - RNA, 19 nt, Artificial Sequence
  Description of Artificial Sequence: Synthetic oligonucleotide
aguucguagucaaugaccg

SEQ ID NO: 1586356 - RNA, 19 nt, Artificial Sequence
  Description of Artificial Sequence: Synthetic oligonucleotide
uaagauaggggaugggucu

SEQ ID NO: 1586357 - RNA, 19 nt, Artificial Sequence
  Description of Artificial Sequence: Synthetic oligonucleotide
uggacaguagacauuuuga

SEQ ID NO: 1586358 - RNA, 19 nt, Artificial Sequence
  Description of Artificial Sequence: Synthetic oligonucleotide
uugacugacccauaggcac

SEQ ID NO: 1586359 - RNA, 19 nt, Artificial Sequence
  Description of Artificial Sequence: Synthetic oligonucleotide
cucucagcaucaaaguugg

SEQ ID NO: 1586360 - RNA, 19 nt, Artificial Sequence
  Description of Artificial Sequence: Synthetic oligonucleotide
cuucaguucagaagcgucg

SEQ ID NO: 1586361 - RNA, 19 nt, Artificial Sequence
  Description of Artificial Sequence: Synthetic oligonucleotide
agaagcgucguauugggca

SEQ ID NO: 1586362 - RNA, 19 nt, Artificial Sequence
  Description of Artificial Sequence: Synthetic oligonucleotide
ugauagucacccuuggugu

SEQ ID NO: 1586363 - RNA, 19 nt, Artificial Sequence
  Description of Artificial Sequence: Synthetic oligonucleotide
uugacagccgucucgaugu

SEQ ID NO: 1586364 - RNA, 19 nt, Artificial Sequence
  Description of Artificial Sequence: Synthetic oligonucleotide
cuugcacaggauuucgugg

SEQ ID NO: 1586365 - RNA, 19 nt, Artificial Sequence
  Description of Artificial Sequence: Synthetic oligonucleotide
aggugucuucaauaggccc

SEQ ID NO: 1586366 - RNA, 19 nt, Artificial Sequence
  Description of Artificial Sequence: Synthetic oligonucleotide
uaugcugagcccuucaguc

SEQ ID NO: 1586367 - RNA, 19 nt, Artificial Sequence
  Description of Artificial Sequence: Synthetic oligonucleotide
cugauagucacccuuggug

SEQ ID NO: 1586368 - RNA, 19 nt, Artificial Sequence
  Description of Artificial Sequence: Synthetic oligonucleotide
ucuggagcagaugaucucg

SEQ ID NO: 1586369 - RNA, 19 nt, Artificial Sequence
  Description of Artificial Sequence: Synthetic oligonucleotide
auaggcgaaggcaaugucc

SEQ ID NO: 1586370 - RNA, 19 nt, Artificial Sequence
  Description of Artificial Sequence: Synthetic oligonucleotide
uuugacugacccauaggca

SEQ ID NO: 1586371 - RNA, 19 nt, Artificial Sequence
  Description of Artificial Sequence: Synthetic oligonucleotide
aauguccugucucugugca

SEQ ID NO: 1586372 - RNA, 19 nt, Artificial Sequence
  Description of Artificial Sequence: Synthetic oligonucleotide
agcaucauagagcucccgg

SEQ ID NO: 1586373 - RNA, 19 nt, Artificial Sequence
  Description of Artificial Sequence: Synthetic oligonucleotide
uuuauucacgacacauuac

SEQ ID NO: 1586374 - RNA, 19 nt, Artificial Sequence
  Description of Artificial Sequence: Synthetic oligonucleotide
uuuccuuuucaccccagca

SEQ ID NO: 1586375 - RNA, 19 nt, Artificial Sequence
  Description of Artificial Sequence: Synthetic oligonucleotide
cauugcugcgguuagucag

SEQ ID NO: 1586376 - RNA, 19 nt, Artificial Sequence
  Description of Artificial Sequence: Synthetic oligonucleotide
caguucguagucaaugacc

SEQ ID NO: 1586377 - RNA, 19 nt, Artificial Sequence
  Description of Artificial Sequence: Synthetic oligonucleotide
uuguacacucuguuaaucu

SEQ ID NO: 1586378 - RNA, 19 nt, Artificial Sequence
  Description of Artificial Sequence: Synthetic oligonucleotide
cuaagauaggggauggguc

SEQ ID NO: 1586379 - RNA, 19 nt, Artificial Sequence
  Description of Artificial Sequence: Synthetic oligonucleotide
gacccauaggcacuugggg

SEQ ID NO: 1586380 - RNA, 19 nt, Artificial Sequence
  Description of Artificial Sequence: Synthetic oligonucleotide
cuugucacgaguucccuug

SEQ ID NO: 1586381 - RNA, 19 nt, Artificial Sequence
  Description of Artificial Sequence: Synthetic oligonucleotide
uacauaagaggcgaagugu

SEQ ID NO: 1586382 - RNA, 19 nt, Artificial Sequence
  Description of Artificial Sequence: Synthetic oligonucleotide
cugcgcucagucaugaugc

SEQ ID NO: 1586383 - RNA, 19 nt, Artificial Sequence
  Description of Artificial Sequence: Synthetic oligonucleotide
ucuucggcccuuugcaagg

SEQ ID NO: 1586384 - RNA, 19 nt, Artificial Sequence
  Description of Artificial Sequence: Synthetic oligonucleotide
ugugcauugcugcgguuag

SEQ ID NO: 1586385 - RNA, 19 nt, Artificial Sequence
  Description of Artificial Sequence: Synthetic oligonucleotide
acauaagaggcgaaguguc

SEQ ID NO: 1586386 - RNA, 19 nt, Artificial Sequence
  Description of Artificial Sequence: Synthetic oligonucleotide
gacgguacagccaacuccc

SEQ ID NO: 1586387 - RNA, 19 nt, Artificial Sequence
  Description of Artificial Sequence: Synthetic oligonucleotide
guuuauucacgacacauua

SEQ ID NO: 1586388 - RNA, 19 nt, Artificial Sequence
  Description of Artificial Sequence: Synthetic oligonucleotide
caauaggcccaaaaucacc

SEQ ID NO: 1586389 - RNA, 19 nt, Artificial Sequence
  Description of Artificial Sequence: Synthetic oligonucleotide
uaugcuagggcagcuaaga

SEQ ID NO: 1586390 - RNA, 19 nt, Artificial Sequence
  Description of Artificial Sequence: Synthetic oligonucleotide
gcugcgguuagucagaaug

SEQ ID NO: 1586391 - RNA, 19 nt, Artificial Sequence
  Description of Artificial Sequence: Synthetic oligonucleotide
ucaaugaccgaaccauccu

SEQ ID NO: 1586392 - RNA, 19 nt, Artificial Sequence
  Description of Artificial Sequence: Synthetic oligonucleotide
uguacacucuguuaaucuc

SEQ ID NO: 1586393 - RNA, 19 nt, Artificial Sequence
  Description of Artificial Sequence: Synthetic oligonucleotide
acugcgcucagucaugaug

SEQ ID NO: 1586394 - RNA, 19 nt, Artificial Sequence
  Description of Artificial Sequence: Synthetic oligonucleotide
ucaguucguagucaaugac

SEQ ID NO: 1586395 - RNA, 19 nt, Artificial Sequence
  Description of Artificial Sequence: Synthetic oligonucleotide
uagucaaugaccgaaccau

SEQ ID NO: 1586396 - RNA, 19 nt, Artificial Sequence
  Description of Artificial Sequence: Synthetic oligonucleotide
auaagaggcgaagugucuc

SEQ ID NO: 1586397 - RNA, 19 nt, Artificial Sequence
  Description of Artificial Sequence: Synthetic oligonucleotide
gaagcgucguauugggcag

SEQ ID NO: 1586398 - RNA, 19 nt, Artificial Sequence
  Description of Artificial Sequence: Synthetic oligonucleotide
ucagaauguugacaauggu

SEQ ID NO: 1586399 - RNA, 19 nt, Artificial Sequence
  Description of Artificial Sequence: Synthetic oligonucleotide
gaagugucucaugucacag

SEQ ID NO: 1586400 - RNA, 19 nt, Artificial Sequence
  Description of Artificial Sequence: Synthetic oligonucleotide
gaaggcaauguccugucuc

SEQ ID NO: 1586401 - RNA, 19 nt, Artificial Sequence
  Description of Artificial Sequence: Synthetic oligonucleotide
ugucauaagggcuguaguu

SEQ ID NO: 1586402 - RNA, 19 nt, Artificial Sequence
  Description of Artificial Sequence: Synthetic oligonucleotide
cauuaggugggcacacagg

SEQ ID NO: 1586403 - RNA, 19 nt, Artificial Sequence
  Description of Artificial Sequence: Synthetic oligonucleotide
ugaucaggaccuugucacg

SEQ ID NO: 1586404 - RNA, 19 nt, Artificial Sequence
  Description of Artificial Sequence: Synthetic oligonucleotide
aucaguucguagucaauga

SEQ ID NO: 1586405 - RNA, 19 nt, Artificial Sequence
  Description of Artificial Sequence: Synthetic oligonucleotide
ugaugcugauccacuuggg

SEQ ID NO: 1586406 - RNA, 19 nt, Artificial Sequence
  Description of Artificial Sequence: Synthetic oligonucleotide
cuucugauagucacccuug

SEQ ID NO: 1586407 - RNA, 19 nt, Artificial Sequence
  Description of Artificial Sequence: Synthetic oligonucleotide
ucuugaauucagaucugau

SEQ ID NO: 1586408 - RNA, 19 nt, Artificial Sequence
  Description of Artificial Sequence: Synthetic oligonucleotide
gauuucguggacaguagac

SEQ ID NO: 1586409 - RNA, 19 nt, Artificial Sequence
  Description of Artificial Sequence: Synthetic oligonucleotide
aaugaccgaaccauccucu

SEQ ID NO: 1586410 - RNA, 19 nt, Artificial Sequence
  Description of Artificial Sequence: Synthetic oligonucleotide
agaucggucuuguacauuu

SEQ ID NO: 1586411 - RNA, 19 nt, Artificial Sequence
  Description of Artificial Sequence: Synthetic oligonucleotide
ugguuuauucacgacacau

SEQ ID NO: 1586412 - RNA, 19 nt, Artificial Sequence
  Description of Artificial Sequence: Synthetic oligonucleotide
caaaaucaccgacuccagg

SEQ ID NO: 1586413 - RNA, 19 nt, Artificial Sequence
  Description of Artificial Sequence: Synthetic oligonucleotide
uauucacgacacauuacau

SEQ ID NO: 1586414 - RNA, 19 nt, Artificial Sequence
  Description of Artificial Sequence: Synthetic oligonucleotide
caucaaaguugguguaggg

SEQ ID NO: 1586415 - RNA, 19 nt, Artificial Sequence
  Description of Artificial Sequence: Synthetic oligonucleotide
ucggcccuuugcaagggcg

SEQ ID NO: 1586416 - RNA, 19 nt, Artificial Sequence
  Description of Artificial Sequence: Synthetic oligonucleotide
ugaucgcccuccaagcuga

SEQ ID NO: 1586417 - RNA, 19 nt, Artificial Sequence
  Description of Artificial Sequence: Synthetic oligonucleotide
gagugaucgcccuccaagc

SEQ ID NO: 1586418 - RNA, 19 nt, Artificial Sequence
  Description of Artificial Sequence: Synthetic oligonucleotide
gauccacuugggaacgucg

SEQ ID NO: 1586419 - RNA, 19 nt, Artificial Sequence
  Description of Artificial Sequence: Synthetic oligonucleotide
uaagaggcgaagugucuca

SEQ ID NO: 1586420 - RNA, 19 nt, Artificial Sequence
  Description of Artificial Sequence: Synthetic oligonucleotide
uguaguaguagagggacuu

SEQ ID NO: 1586421 - RNA, 19 nt, Artificial Sequence
  Description of Artificial Sequence: Synthetic oligonucleotide
ucacgacacauuacauaag

SEQ ID NO: 1586422 - RNA, 19 nt, Artificial Sequence
  Description of Artificial Sequence: Synthetic oligonucleotide
auucacgacacauuacaua

SEQ ID NO: 1586423 - RNA, 19 nt, Artificial Sequence
  Description of Artificial Sequence: Synthetic oligonucleotide
auucucuaggacauuaggu

SEQ ID NO: 1586424 - RNA, 19 nt, Artificial Sequence
  Description of Artificial Sequence: Synthetic oligonucleotide
ucaugucacagacgguaca

SEQ ID NO: 1586425 - RNA, 19 nt, Artificial Sequence
  Description of Artificial Sequence: Synthetic oligonucleotide
caugucauaagggcuguag

SEQ ID NO: 1586426 - RNA, 19 nt, Artificial Sequence
  Description of Artificial Sequence: Synthetic oligonucleotide
ucgauguucagagcguccc

SEQ ID NO: 1586427 - RNA, 19 nt, Artificial Sequence
  Description of Artificial Sequence: Synthetic oligonucleotide
acuaugcugagcccuucag

SEQ ID NO: 1586428 - RNA, 19 nt, Artificial Sequence
  Description of Artificial Sequence: Synthetic oligonucleotide
aagugucucaugucacaga

SEQ ID NO: 1586429 - RNA, 19 nt, Artificial Sequence
  Description of Artificial Sequence: Synthetic oligonucleotide
auuucguggacaguagaca

SEQ ID NO: 1586430 - RNA, 19 nt, Artificial Sequence
  Description of Artificial Sequence: Synthetic oligonucleotide
gucaaugaccgaaccaucc

SEQ ID NO: 1586431 - RNA, 19 nt, Artificial Sequence
  Description of Artificial Sequence: Synthetic oligonucleotide
cuugacagccgucucgaug

SEQ ID NO: 1586432 - RNA, 19 nt, Artificial Sequence
  Description of Artificial Sequence: Synthetic oligonucleotide
uaguucuuguaccuuucaa

SEQ ID NO: 1586433 - RNA, 19 nt, Artificial Sequence
  Description of Artificial Sequence: Synthetic oligonucleotide
uaggcccaaaaucaccgac

SEQ ID NO: 1586434 - RNA, 19 nt, Artificial Sequence
  Description of Artificial Sequence: Synthetic oligonucleotide
ugucagaaaugauauccuu

SEQ ID NO: 1586435 - RNA, 19 nt, Artificial Sequence
  Description of Artificial Sequence: Synthetic oligonucleotide
uguucauuucuuuggcaua

SEQ ID NO: 1586436 - RNA, 19 nt, Artificial Sequence
  Description of Artificial Sequence: Synthetic oligonucleotide
uucacugcgggagaccaug

SEQ ID NO: 1586437 - RNA, 19 nt, Artificial Sequence
  Description of Artificial Sequence: Synthetic oligonucleotide
cuccggguccauuaguggc

SEQ ID NO: 1586438 - RNA, 19 nt, Artificial Sequence
  Description of Artificial Sequence: Synthetic oligonucleotide
cuggucaaucaguucguag

SEQ ID NO: 1586439 - RNA, 19 nt, Artificial Sequence
  Description of Artificial Sequence: Synthetic oligonucleotide
cacgacacauuacauaaga

SEQ ID NO: 1586440 - RNA, 19 nt, Artificial Sequence
  Description of Artificial Sequence: Synthetic oligonucleotide
ucugauaggcgaaggcaau

SEQ ID NO: 1586441 - RNA, 19 nt, Artificial Sequence
  Description of Artificial Sequence: Synthetic oligonucleotide
aucagcuuucggaagucac

SEQ ID NO: 1586442 - RNA, 19 nt, Artificial Sequence
  Description of Artificial Sequence: Synthetic oligonucleotide
ugauaggcgaaggcaaugu

SEQ ID NO: 1586443 - RNA, 19 nt, Artificial Sequence
  Description of Artificial Sequence: Synthetic oligonucleotide
guagucaaugaccgaacca

SEQ ID NO: 1586444 - RNA, 19 nt, Artificial Sequence
  Description of Artificial Sequence: Synthetic oligonucleotide
cauacagccggucagcaaa

SEQ ID NO: 1586445 - RNA, 19 nt, Artificial Sequence
  Description of Artificial Sequence: Synthetic oligonucleotide
cacauuacauaagaggcga

SEQ ID NO: 1586446 - RNA, 19 nt, Artificial Sequence
  Description of Artificial Sequence: Synthetic oligonucleotide
ucguagucaaugaccgaac

SEQ ID NO: 1586447 - RNA, 19 nt, Artificial Sequence
  Description of Artificial Sequence: Synthetic oligonucleotide
guaguagagggacuugcca

SEQ ID NO: 1586448 - RNA, 19 nt, Artificial Sequence
  Description of Artificial Sequence: Synthetic oligonucleotide
cucuucggcccuuugcaag

SEQ ID NO: 1586449 - RNA, 19 nt, Artificial Sequence
  Description of Artificial Sequence: Synthetic oligonucleotide
gucauaagggcuguaguuc

SEQ ID NO: 1586450 - RNA, 19 nt, Artificial Sequence
  Description of Artificial Sequence: Synthetic oligonucleotide
gucacgaguucccuugccc

SEQ ID NO: 1586451 - RNA, 19 nt, Artificial Sequence
  Description of Artificial Sequence: Synthetic oligonucleotide
aagauaggggaugggucug

SEQ ID NO: 1586452 - RNA, 19 nt, Artificial Sequence
  Description of Artificial Sequence: Synthetic oligonucleotide
cucccuagaagccgagcgg

SEQ ID NO: 1586453 - RNA, 19 nt, Artificial Sequence
  Description of Artificial Sequence: Synthetic oligonucleotide
cugacccauaggcacuugg

SEQ ID NO: 1586454 - RNA, 19 nt, Artificial Sequence
  Description of Artificial Sequence: Synthetic oligonucleotide
ucccuagaagccgagcggc

SEQ ID NO: 1586455 - RNA, 19 nt, Artificial Sequence
  Description of Artificial Sequence: Synthetic oligonucleotide
ggucuugacagccgucucg

SEQ ID NO: 1586456 - RNA, 19 nt, Artificial Sequence
  Description of Artificial Sequence: Synthetic oligonucleotide
agugaucgcccuccaagcu

SEQ ID NO: 1586457 - RNA, 19 nt, Artificial Sequence
  Description of Artificial Sequence: Synthetic oligonucleotide
gguuugacugacccauagg

SEQ ID NO: 1586458 - RNA, 19 nt, Artificial Sequence
  Description of Artificial Sequence: Synthetic oligonucleotide
caaugaccgaaccauccuc

SEQ ID NO: 1586459 - RNA, 19 nt, Artificial Sequence
  Description of Artificial Sequence: Synthetic oligonucleotide
gauaggcgaaggcaauguc

SEQ ID NO: 1586460 - RNA, 19 nt, Artificial Sequence
  Description of Artificial Sequence: Synthetic oligonucleotide
ugucacgaguucccuugcc

SEQ ID NO: 1586461 - RNA, 19 nt, Artificial Sequence
  Description of Artificial Sequence: Synthetic oligonucleotide
ugcauugcugcgguuaguc

SEQ ID NO: 1586462 - RNA, 19 nt, Artificial Sequence
  Description of Artificial Sequence: Synthetic oligonucleotide
gccgucucgauguucagag

SEQ ID NO: 1586463 - RNA, 19 nt, Artificial Sequence
  Description of Artificial Sequence: Synthetic oligonucleotide
agauaggggaugggucugc

SEQ ID NO: 1586464 - RNA, 19 nt, Artificial Sequence
  Description of Artificial Sequence: Synthetic oligonucleotide
agcagaugaucucgaugag

SEQ ID NO: 1586465 - RNA, 19 nt, Artificial Sequence
  Description of Artificial Sequence: Synthetic oligonucleotide
cuaugcuagggcagcuaag

SEQ ID NO: 1586466 - RNA, 19 nt, Artificial Sequence
  Description of Artificial Sequence: Synthetic oligonucleotide
ugggcaggugucuucaaua

SEQ ID NO: 1586467 - RNA, 19 nt, Artificial Sequence
  Description of Artificial Sequence: Synthetic oligonucleotide
auaagggcuguaguucuug

SEQ ID NO: 1586468 - RNA, 19 nt, Artificial Sequence
  Description of Artificial Sequence: Synthetic oligonucleotide
gauccacuaugcugagccc

SEQ ID NO: 1586469 - RNA, 19 nt, Artificial Sequence
  Description of Artificial Sequence: Synthetic oligonucleotide
gugaucgcccuccaagcug

SEQ ID NO: 1586470 - RNA, 19 nt, Artificial Sequence
  Description of Artificial Sequence: Synthetic oligonucleotide
cagccaacucccuggaaug

SEQ ID NO: 1586471 - RNA, 19 nt, Artificial Sequence
  Description of Artificial Sequence: Synthetic oligonucleotide
gauaggggaugggucugcg

SEQ ID NO: 1586472 - RNA, 19 nt, Artificial Sequence
  Description of Artificial Sequence: Synthetic oligonucleotide
uccacuugggaacgucggu

SEQ ID NO: 1586473 - RNA, 19 nt, Artificial Sequence
  Description of Artificial Sequence: Synthetic oligonucleotide
ggagcagaugaucucgaug

SEQ ID NO: 1586474 - RNA, 19 nt, Artificial Sequence
  Description of Artificial Sequence: Synthetic oligonucleotide
ugagcuugcacaggauuuc

SEQ ID NO: 1586475 - RNA, 19 nt, Artificial Sequence
  Description of Artificial Sequence: Synthetic oligonucleotide
uucugaucaggaccuuguc

SEQ ID NO: 1586476 - RNA, 19 nt, Artificial Sequence
  Description of Artificial Sequence: Synthetic oligonucleotide
uugucacgaguucccuugc

SEQ ID NO: 1586477 - RNA, 19 nt, Artificial Sequence
  Description of Artificial Sequence: Synthetic oligonucleotide
ucaugaugcugauccacuu

SEQ ID NO: 1586478 - RNA, 19 nt, Artificial Sequence
  Description of Artificial Sequence: Synthetic oligonucleotide
acgacacauuacauaagag

SEQ ID NO: 1586479 - RNA, 19 nt, Artificial Sequence
  Description of Artificial Sequence: Synthetic oligonucleotide
ucugcggcucuauugucau

SEQ ID NO: 1586480 - RNA, 19 nt, Artificial Sequence
  Description of Artificial Sequence: Synthetic oligonucleotide
auucugaucaggaccuugu

SEQ ID NO: 1586481 - RNA, 19 nt, Artificial Sequence
  Description of Artificial Sequence: Synthetic oligonucleotide
ggaacgucgguuccuuucc

SEQ ID NO: 1586482 - RNA, 19 nt, Artificial Sequence
  Description of Artificial Sequence: Synthetic oligonucleotide
acaguagugccuucugaua

SEQ ID NO: 1586483 - RNA, 19 nt, Artificial Sequence
  Description of Artificial Sequence: Synthetic oligonucleotide
gaucaggaccuugucacga

SEQ ID NO: 1586484 - RNA, 19 nt, Artificial Sequence
  Description of Artificial Sequence: Synthetic oligonucleotide
cuucucugauaggcgaagg

SEQ ID NO: 1586485 - RNA, 19 nt, Artificial Sequence
  Description of Artificial Sequence: Synthetic oligonucleotide
ugcggcucuauugucauuu

SEQ ID NO: 1586486 - RNA, 19 nt, Artificial Sequence
  Description of Artificial Sequence: Synthetic oligonucleotide
uuuucaccccagcaucaua

SEQ ID NO: 1586487 - RNA, 19 nt, Artificial Sequence
  Description of Artificial Sequence: Synthetic oligonucleotide
aggcgaagugucucauguc

SEQ ID NO: 1586488 - RNA, 19 nt, Artificial Sequence
  Description of Artificial Sequence: Synthetic oligonucleotide
cacuugggaacgucgguuc

SEQ ID NO: 1586489 - RNA, 19 nt, Artificial Sequence
  Description of Artificial Sequence: Synthetic oligonucleotide
gcuugcacaggauuucgug

SEQ ID NO: 1586490 - RNA, 19 nt, Artificial Sequence
  Description of Artificial Sequence: Synthetic oligonucleotide
gcgaccaucagcuuucgga

SEQ ID NO: 1586491 - RNA, 19 nt, Artificial Sequence
  Description of Artificial Sequence: Synthetic oligonucleotide
cuguuaaucuccugcagcu

SEQ ID NO: 1586492 - RNA, 19 nt, Artificial Sequence
  Description of Artificial Sequence: Synthetic oligonucleotide
uucccuugcccuucaugga

SEQ ID NO: 1586493 - RNA, 19 nt, Artificial Sequence
  Description of Artificial Sequence: Synthetic oligonucleotide
ggguuugacugacccauag

SEQ ID NO: 1586494 - RNA, 19 nt, Artificial Sequence
  Description of Artificial Sequence: Synthetic oligonucleotide
uucaccccagcaucauaga

SEQ ID NO: 1586495 - RNA, 19 nt, Artificial Sequence
  Description of Artificial Sequence: Synthetic oligonucleotide
augguuuauucacgacaca

SEQ ID NO: 1586496 - RNA, 19 nt, Artificial Sequence
  Description of Artificial Sequence: Synthetic oligonucleotide
cuucaacauguccacuuca

SEQ ID NO: 1586497 - RNA, 19 nt, Artificial Sequence
  Description of Artificial Sequence: Synthetic oligonucleotide
ccucccuagaagccgagcg

SEQ ID NO: 1586498 - RNA, 19 nt, Artificial Sequence
  Description of Artificial Sequence: Synthetic oligonucleotide
gacuucagcgcugacggaa

SEQ ID NO: 1586499 - RNA, 19 nt, Artificial Sequence
  Description of Artificial Sequence: Synthetic oligonucleotide
agcuuucggaagucaccag

SEQ ID NO: 1586500 - RNA, 19 nt, Artificial Sequence
  Description of Artificial Sequence: Synthetic oligonucleotide
ggacaguagacauuuugaa

SEQ ID NO: 1586501 - RNA, 19 nt, Artificial Sequence
  Description of Artificial Sequence: Synthetic oligonucleotide
ggugucuugcuggauguag

SEQ ID NO: 1586502 - RNA, 19 nt, Artificial Sequence
  Description of Artificial Sequence: Synthetic oligonucleotide
acagccgucucgauguuca

SEQ ID NO: 1586503 - RNA, 19 nt, Artificial Sequence
  Description of Artificial Sequence: Synthetic oligonucleotide
agaggcgaagugucucaug

SEQ ID NO: 1586504 - RNA, 19 nt, Artificial Sequence
  Description of Artificial Sequence: Synthetic oligonucleotide
aagcgucguauugggcagg

SEQ ID NO: 1586505 - RNA, 19 nt, Artificial Sequence
  Description of Artificial Sequence: Synthetic oligonucleotide
augaucucgaugagggagu

SEQ ID NO: 1586506 - RNA, 19 nt, Artificial Sequence
  Description of Artificial Sequence: Synthetic oligonucleotide
aggauuucguggacaguag

SEQ ID NO: 1586507 - RNA, 19 nt, Artificial Sequence
  Description of Artificial Sequence: Synthetic oligonucleotide
cacuccuuuggucuugaca

SEQ ID NO: 1586508 - RNA, 19 nt, Artificial Sequence
  Description of Artificial Sequence: Synthetic oligonucleotide
ucguauugggcaggugucu

SEQ ID NO: 1586509 - RNA, 19 nt, Artificial Sequence
  Description of Artificial Sequence: Synthetic oligonucleotide
gcucuauugucauuucaca

SEQ ID NO: 1586510 - RNA, 19 nt, Artificial Sequence
  Description of Artificial Sequence: Synthetic oligonucleotide
ucagcgcugacggaagcuc

SEQ ID NO: 1586511 - RNA, 19 nt, Artificial Sequence
  Description of Artificial Sequence: Synthetic oligonucleotide
cagaagcgucguauugggc

SEQ ID NO: 1586512 - RNA, 19 nt, Artificial Sequence
  Description of Artificial Sequence: Synthetic oligonucleotide
cugauaggcgaaggcaaug

SEQ ID NO: 1586513 - RNA, 19 nt, Artificial Sequence
  Description of Artificial Sequence: Synthetic oligonucleotide
auugcugcgguuagucaga

SEQ ID NO: 1586514 - RNA, 19 nt, Artificial Sequence
  Description of Artificial Sequence: Synthetic oligonucleotide
cccaaaaucaccgacucca

SEQ ID NO: 1586515 - RNA, 19 nt, Artificial Sequence
  Description of Artificial Sequence: Synthetic oligonucleotide
uugcaagggcgaccaucag

SEQ ID NO: 1586516 - RNA, 19 nt, Artificial Sequence
  Description of Artificial Sequence: Synthetic oligonucleotide
caggauuucguggacagua

SEQ ID NO: 1586517 - RNA, 19 nt, Artificial Sequence
  Description of Artificial Sequence: Synthetic oligonucleotide
ucacugcgggagaccauga

SEQ ID NO: 1586518 - RNA, 19 nt, Artificial Sequence
  Description of Artificial Sequence: Synthetic oligonucleotide
guugguucuggagcagaug

SEQ ID NO: 1586519 - RNA, 19 nt, Artificial Sequence
  Description of Artificial Sequence: Synthetic oligonucleotide
caccagaugugucagaaau

SEQ ID NO: 1586520 - RNA, 19 nt, Artificial Sequence
  Description of Artificial Sequence: Synthetic oligonucleotide
cagcgcugacggaagcucc

SEQ ID NO: 1586521 - RNA, 19 nt, Artificial Sequence
  Description of Artificial Sequence: Synthetic oligonucleotide
ugcgggagaccaugauucu

SEQ ID NO: 1586522 - RNA, 19 nt, Artificial Sequence
  Description of Artificial Sequence: Synthetic oligonucleotide
ucuccaccgcacagguaca

SEQ ID NO: 1586523 - RNA, 19 nt, Artificial Sequence
  Description of Artificial Sequence: Synthetic oligonucleotide
guauugggcaggugucuuc

SEQ ID NO: 1586524 - RNA, 19 nt, Artificial Sequence
  Description of Artificial Sequence: Synthetic oligonucleotide
ugauccacuugggaacguc

SEQ ID NO: 1586525 - RNA, 19 nt, Artificial Sequence
  Description of Artificial Sequence: Synthetic oligonucleotide
agguacaguagugccuucu

SEQ ID NO: 1586526 - RNA, 19 nt, Artificial Sequence
  Description of Artificial Sequence: Synthetic oligonucleotide
ugcgguuagucagaauguu

SEQ ID NO: 1586527 - RNA, 19 nt, Artificial Sequence
  Description of Artificial Sequence: Synthetic oligonucleotide
augcuagggcagcuaagau

SEQ ID NO: 1586528 - RNA, 19 nt, Artificial Sequence
  Description of Artificial Sequence: Synthetic oligonucleotide
gggcagcuaagauagggga

SEQ ID NO: 1586529 - RNA, 19 nt, Artificial Sequence
  Description of Artificial Sequence: Synthetic oligonucleotide
gucguauugggcagguguc

SEQ ID NO: 1586530 - RNA, 19 nt, Artificial Sequence
  Description of Artificial Sequence: Synthetic oligonucleotide
aagaggcgaagugucucau

SEQ ID NO: 1586531 - RNA, 19 nt, Artificial Sequence
  Description of Artificial Sequence: Synthetic oligonucleotide
acagccggucagcaaagua

SEQ ID NO: 1586532 - RNA, 19 nt, Artificial Sequence
  Description of Artificial Sequence: Synthetic oligonucleotide
auacagccggucagcaaag

SEQ ID NO: 1586533 - RNA, 19 nt, Artificial Sequence
  Description of Artificial Sequence: Synthetic oligonucleotide
ggauuucguggacaguaga

SEQ ID NO: 1586534 - RNA, 19 nt, Artificial Sequence
  Description of Artificial Sequence: Synthetic oligonucleotide
ugaccucauccacuccuuu

SEQ ID NO: 1586535 - RNA, 19 nt, Artificial Sequence
  Description of Artificial Sequence: Synthetic oligonucleotide
uggagugaucgcccuccaa

SEQ ID NO: 1586536 - RNA, 19 nt, Artificial Sequence
  Description of Artificial Sequence: Synthetic oligonucleotide
ucagagcgucccucucagc

SEQ ID NO: 1586537 - RNA, 19 nt, Artificial Sequence
  Description of Artificial Sequence: Synthetic oligonucleotide
aaguugguguaggguuuga

SEQ ID NO: 1586538 - RNA, 19 nt, Artificial Sequence
  Description of Artificial Sequence: Synthetic oligonucleotide
gggaacgucgguuccuuuc

SEQ ID NO: 1586539 - RNA, 19 nt, Artificial Sequence
  Description of Artificial Sequence: Synthetic oligonucleotide
ugcgcucagucaugaugcu

SEQ ID NO: 1586540 - RNA, 19 nt, Artificial Sequence
  Description of Artificial Sequence: Synthetic oligonucleotide
ugacuucagcgcugacgga

SEQ ID NO: 1586541 - RNA, 19 nt, Artificial Sequence
  Description of Artificial Sequence: Synthetic oligonucleotide
gacauuaggugggcacaca

SEQ ID NO: 1586542 - RNA, 19 nt, Artificial Sequence
  Description of Artificial Sequence: Synthetic oligonucleotide
cuucggcccuuugcaaggg

SEQ ID NO: 1586543 - RNA, 19 nt, Artificial Sequence
  Description of Artificial Sequence: Synthetic oligonucleotide
ccaggcuaugcuagggcag

SEQ ID NO: 1586544 - RNA, 19 nt, Artificial Sequence
  Description of Artificial Sequence: Synthetic oligonucleotide
uggagucauacagccgguc

SEQ ID NO: 1586545 - RNA, 19 nt, Artificial Sequence
  Description of Artificial Sequence: Synthetic oligonucleotide
gguguaggguuugacugac

SEQ ID NO: 1586546 - RNA, 19 nt, Artificial Sequence
  Description of Artificial Sequence: Synthetic oligonucleotide
gcgcugaaagccucccuag

SEQ ID NO: 1586547 - RNA, 19 nt, Artificial Sequence
  Description of Artificial Sequence: Synthetic oligonucleotide
gcuaugcuagggcagcuaa

SEQ ID NO: 1586548 - RNA, 19 nt, Artificial Sequence
  Description of Artificial Sequence: Synthetic oligonucleotide
gggcgccuagcgcugaaag

SEQ ID NO: 1586549 - RNA, 19 nt, Artificial Sequence
  Description of Artificial Sequence: Synthetic oligonucleotide
gucugcggcucuauuguca

SEQ ID NO: 1586550 - RNA, 19 nt, Artificial Sequence
  Description of Artificial Sequence: Synthetic oligonucleotide
gaucggucuuguacauuuc

SEQ ID NO: 1586551 - RNA, 19 nt, Artificial Sequence
  Description of Artificial Sequence: Synthetic oligonucleotide
gcgguuagucagaauguug

SEQ ID NO: 1586552 - RNA, 19 nt, Artificial Sequence
  Description of Artificial Sequence: Synthetic oligonucleotide
gcaagggcgaccaucagcu

SEQ ID NO: 1586553 - RNA, 19 nt, Artificial Sequence
  Description of Artificial Sequence: Synthetic oligonucleotide
gcuaagauaggggaugggu

SEQ ID NO: 1586554 - RNA, 19 nt, Artificial Sequence
  Description of Artificial Sequence: Synthetic oligonucleotide
cuaugcugagcccuucagu

SEQ ID NO: 1586555 - RNA, 19 nt, Artificial Sequence
  Description of Artificial Sequence: Synthetic oligonucleotide
caaaguugguguaggguuu

SEQ ID NO: 1586556 - RNA, 19 nt, Artificial Sequence
  Description of Artificial Sequence: Synthetic oligonucleotide
acacugcgcucagucauga

SEQ ID NO: 1586557 - RNA, 19 nt, Artificial Sequence
  Description of Artificial Sequence: Synthetic oligonucleotide
ccuagcgcugaaagccucc

SEQ ID NO: 1586558 - RNA, 19 nt, Artificial Sequence
  Description of Artificial Sequence: Synthetic oligonucleotide
uugggaacgucgguuccuu

SEQ ID NO: 1586559 - RNA, 19 nt, Artificial Sequence
  Description of Artificial Sequence: Synthetic oligonucleotide
acauuacauaagaggcgaa

SEQ ID NO: 1586560 - RNA, 19 nt, Artificial Sequence
  Description of Artificial Sequence: Synthetic oligonucleotide
gccagauaaggcugacuuc

SEQ ID NO: 1586561 - RNA, 19 nt, Artificial Sequence
  Description of Artificial Sequence: Synthetic oligonucleotide
cugcgguuagucagaaugu

SEQ ID NO: 1586562 - RNA, 19 nt, Artificial Sequence
  Description of Artificial Sequence: Synthetic oligonucleotide
cagucaugaugcugaucca

SEQ ID NO: 1586563 - RNA, 19 nt, Artificial Sequence
  Description of Artificial Sequence: Synthetic oligonucleotide
agccgucucgauguucaga

SEQ ID NO: 1586564 - RNA, 19 nt, Artificial Sequence
  Description of Artificial Sequence: Synthetic oligonucleotide
ccuagaagccgagcggccc

SEQ ID NO: 1586565 - RNA, 19 nt, Artificial Sequence
  Description of Artificial Sequence: Synthetic oligonucleotide
cugggccgggcgccuagcg

SEQ ID NO: 1586566 - RNA, 19 nt, Artificial Sequence
  Description of Artificial Sequence: Synthetic oligonucleotide
uacagccggucagcaaagu

SEQ ID NO: 1586567 - RNA, 19 nt, Artificial Sequence
  Description of Artificial Sequence: Synthetic oligonucleotide
gguggcacacacugcgcuc

SEQ ID NO: 1586568 - RNA, 19 nt, Artificial Sequence
  Description of Artificial Sequence: Synthetic oligonucleotide
agcuugcacaggauuucgu

SEQ ID NO: 1586569 - RNA, 19 nt, Artificial Sequence
  Description of Artificial Sequence: Synthetic oligonucleotide
gacagccgucucgauguuc

SEQ ID NO: 1586570 - RNA, 19 nt, Artificial Sequence
  Description of Artificial Sequence: Synthetic oligonucleotide
agcgucguauugggcaggu

SEQ ID NO: 1586571 - RNA, 19 nt, Artificial Sequence
  Description of Artificial Sequence: Synthetic oligonucleotide
auggagucauacagccggu

SEQ ID NO: 1586572 - RNA, 19 nt, Artificial Sequence
  Description of Artificial Sequence: Synthetic oligonucleotide
aggcgcuccggguccauua

SEQ ID NO: 1586573 - RNA, 19 nt, Artificial Sequence
  Description of Artificial Sequence: Synthetic oligonucleotide
uugcugcgguuagucagaa

SEQ ID NO: 1586574 - RNA, 19 nt, Artificial Sequence
  Description of Artificial Sequence: Synthetic oligonucleotide
agcgcugacggaagcuccu

SEQ ID NO: 1586575 - RNA, 19 nt, Artificial Sequence
  Description of Artificial Sequence: Synthetic oligonucleotide
gaacgucgguuccuuuccu

SEQ ID NO: 1586576 - RNA, 19 nt, Artificial Sequence
  Description of Artificial Sequence: Synthetic oligonucleotide
gggucugcggcucuauugu

SEQ ID NO: 1586577 - RNA, 19 nt, Artificial Sequence
  Description of Artificial Sequence: Synthetic oligonucleotide
gcgaaggcaauguccuguc

SEQ ID NO: 1586578 - RNA, 19 nt, Artificial Sequence
  Description of Artificial Sequence: Synthetic oligonucleotide
ggcgcuccggguccauuag

SEQ ID NO: 1586579 - RNA, 19 nt, Artificial Sequence
  Description of Artificial Sequence: Synthetic oligonucleotide
guguggagugaucgcccuc

SEQ ID NO: 1586580 - RNA, 19 nt, Artificial Sequence
  Description of Artificial Sequence: Synthetic oligonucleotide
gcgaagugucucaugucac

SEQ ID NO: 1586581 - RNA, 19 nt, Artificial Sequence
  Description of Artificial Sequence: Synthetic oligonucleotide
cagccgucucgauguucag

SEQ ID NO: 1586582 - RNA, 19 nt, Artificial Sequence
  Description of Artificial Sequence: Synthetic oligonucleotide
ggcgaccaucagcuuucgg

SEQ ID NO: 1586583 - RNA, 19 nt, Artificial Sequence
  Description of Artificial Sequence: Synthetic oligonucleotide
ugacagccgucucgauguu

SEQ ID NO: 1586584 - RNA, 19 nt, Artificial Sequence
  Description of Artificial Sequence: Synthetic oligonucleotide
cccuagaagccgagcggcc

SEQ ID NO: 1586585 - RNA, 19 nt, Artificial Sequence
  Description of Artificial Sequence: Synthetic oligonucleotide
uagagcucccgggcauccu

SEQ ID NO: 1586586 - RNA, 19 nt, Artificial Sequence
  Description of Artificial Sequence: Synthetic oligonucleotide
ugcugcgguuagucagaau

SEQ ID NO: 1586587 - RNA, 19 nt, Artificial Sequence
  Description of Artificial Sequence: Synthetic oligonucleotide
ugggaacgucgguuccuuu

SEQ ID NO: 1586588 - RNA, 19 nt, Artificial Sequence
  Description of Artificial Sequence: Synthetic oligonucleotide
gaucgcccuccaagcugag

SEQ ID NO: 1586589 - RNA, 19 nt, Artificial Sequence
  Description of Artificial Sequence: Synthetic oligonucleotide
gguuuauucacgacacauu

SEQ ID NO: 1586590 - RNA, 19 nt, Artificial Sequence
  Description of Artificial Sequence: Synthetic oligonucleotide
ggucugcggcucuauuguc

SEQ ID NO: 1586591 - RNA, 19 nt, Artificial Sequence
  Description of Artificial Sequence: Synthetic oligonucleotide
uggugucuugcuggaugua

SEQ ID NO: 1586592 - RNA, 19 nt, Artificial Sequence
  Description of Artificial Sequence: Synthetic oligonucleotide
guggccagauaaggcugac

SEQ ID NO: 1586593 - RNA, 19 nt, Artificial Sequence
  Description of Artificial Sequence: Synthetic oligonucleotide
caggaccuugucacgaguu

SEQ ID NO: 1586594 - RNA, 19 nt, Artificial Sequence
  Description of Artificial Sequence: Synthetic oligonucleotide
cuugggaacgucgguuccu

SEQ ID NO: 1586595 - RNA, 19 nt, Artificial Sequence
  Description of Artificial Sequence: Synthetic oligonucleotide
cgucguauugggcaggugu

SEQ ID NO: 1586596 - RNA, 19 nt, Artificial Sequence
  Description of Artificial Sequence: Synthetic oligonucleotide
gcgcucagucaugaugcug

SEQ ID NO: 1586597 - RNA, 19 nt, Artificial Sequence
  Description of Artificial Sequence: Synthetic oligonucleotide
gcucuucggcccuuugcaa

SEQ ID NO: 1586598 - RNA, 19 nt, Artificial Sequence
  Description of Artificial Sequence: Synthetic oligonucleotide
agccucccuagaagccgag

SEQ ID NO: 1586599 - RNA, 19 nt, Artificial Sequence
  Description of Artificial Sequence: Synthetic oligonucleotide
ccgggcauccuggucaauc

SEQ ID NO: 1586600 - RNA, 19 nt, Artificial Sequence
  Description of Artificial Sequence: Synthetic oligonucleotide
gacugacccauaggcacuu

SEQ ID NO: 1586601 - RNA, 19 nt, Artificial Sequence
  Description of Artificial Sequence: Synthetic oligonucleotide
ccaccgcacagguacagua

SEQ ID NO: 1586602 - RNA, 19 nt, Artificial Sequence
  Description of Artificial Sequence: Synthetic oligonucleotide
gcggcucuauugucauuuc

SEQ ID NO: 1586603 - RNA, 19 nt, Artificial Sequence
  Description of Artificial Sequence: Synthetic oligonucleotide
ccggucagcaaaguacaga

SEQ ID NO: 1586604 - RNA, 19 nt, Artificial Sequence
  Description of Artificial Sequence: Synthetic oligonucleotide
gcugacggaagcuccuuuu

SEQ ID NO: 1586605 - RNA, 19 nt, Artificial Sequence
  Description of Artificial Sequence: Synthetic oligonucleotide
aggguuugacugacccaua

SEQ ID NO: 1586606 - RNA, 19 nt, Artificial Sequence
  Description of Artificial Sequence: Synthetic oligonucleotide
ggcagcuaagauaggggau

SEQ ID NO: 1586607 - RNA, 19 nt, Artificial Sequence
  Description of Artificial Sequence: Synthetic oligonucleotide
cacgaguucccuugcccuu

SEQ ID NO: 1586608 - RNA, 19 nt, Artificial Sequence
  Description of Artificial Sequence: Synthetic oligonucleotide
caucuccaccgcacaggua

SEQ ID NO: 1586609 - RNA, 19 nt, Artificial Sequence
  Description of Artificial Sequence: Synthetic oligonucleotide
gcccuucagucaucuccac

SEQ ID NO: 1586610 - RNA, 19 nt, Artificial Sequence
  Description of Artificial Sequence: Synthetic oligonucleotide
gccucccuagaagccgagc

SEQ ID NO: 1586611 - RNA, 19 nt, Artificial Sequence
  Description of Artificial Sequence: Synthetic oligonucleotide
cuucacugcgggagaccau

SEQ ID NO: 1586612 - RNA, 19 nt, Artificial Sequence
  Description of Artificial Sequence: Synthetic oligonucleotide
gccuagcgcugaaagccuc

SEQ ID NO: 1586613 - RNA, 19 nt, Artificial Sequence
  Description of Artificial Sequence: Synthetic oligonucleotide
gugaccucauccacuccuu

SEQ ID NO: 1586614 - RNA, 19 nt, Artificial Sequence
  Description of Artificial Sequence: Synthetic oligonucleotide
ggcuaugcuagggcagcua

SEQ ID NO: 1586615 - RNA, 19 nt, Artificial Sequence
  Description of Artificial Sequence: Synthetic oligonucleotide
cggcucuauugucauuuca

SEQ ID NO: 1586616 - RNA, 19 nt, Artificial Sequence
  Description of Artificial Sequence: Synthetic oligonucleotide
gugcauugcugcgguuagu

SEQ ID NO: 1586617 - RNA, 19 nt, Artificial Sequence
  Description of Artificial Sequence: Synthetic oligonucleotide
ccagaucggucuuguacau

SEQ ID NO: 1586618 - RNA, 19 nt, Artificial Sequence
  Description of Artificial Sequence: Synthetic oligonucleotide
cugauccacuugggaacgu

SEQ ID NO: 1586619 - RNA, 19 nt, Artificial Sequence
  Description of Artificial Sequence: Synthetic oligonucleotide
gcgucguauugggcaggug

SEQ ID NO: 1586620 - RNA, 19 nt, Artificial Sequence
  Description of Artificial Sequence: Synthetic oligonucleotide
gccuucugauagucacccu

SEQ ID NO: 1586621 - RNA, 19 nt, Artificial Sequence
  Description of Artificial Sequence: Synthetic oligonucleotide
caagggcgaccaucagcuu

SEQ ID NO: 1586622 - RNA, 19 nt, Artificial Sequence
  Description of Artificial Sequence: Synthetic oligonucleotide
cggguccauuaguggcaag

SEQ ID NO: 1586623 - RNA, 19 nt, Artificial Sequence
  Description of Artificial Sequence: Synthetic oligonucleotide
ccacuugggaacgucgguu

SEQ ID NO: 1586624 - RNA, 19 nt, Artificial Sequence
  Description of Artificial Sequence: Synthetic oligonucleotide
gcugauucucuaggacauu

SEQ ID NO: 1586625 - RNA, 19 nt, Artificial Sequence
  Description of Artificial Sequence: Synthetic oligonucleotide
gcgcuccggguccauuagu

SEQ ID NO: 1586626 - RNA, 19 nt, Artificial Sequence
  Description of Artificial Sequence: Synthetic oligonucleotide
cgauguucagagcgucccu

SEQ ID NO: 1586627 - RNA, 19 nt, Artificial Sequence
  Description of Artificial Sequence: Synthetic oligonucleotide
gaggcgcuccggguccauu

SEQ ID NO: 1586628 - RNA, 19 nt, Artificial Sequence
  Description of Artificial Sequence: Synthetic oligonucleotide
gggaggcgcuccgggucca

SEQ ID NO: 1586629 - RNA, 19 nt, Artificial Sequence
  Description of Artificial Sequence: Synthetic oligonucleotide
gcgcugacggaagcuccuu

SEQ ID NO: 1586630 - RNA, 19 nt, Artificial Sequence
  Description of Artificial Sequence: Synthetic oligonucleotide
ggaggcgcuccggguccau

SEQ ID NO: 1586631 - RNA, 19 nt, Artificial Sequence
  Description of Artificial Sequence: Synthetic oligonucleotide
cgacuccagguggccagau

SEQ ID NO: 1586632 - RNA, 19 nt, Artificial Sequence
  Description of Artificial Sequence: Synthetic oligonucleotide
aauaccauagagcagcagc

SEQ ID NO: 1586633 - RNA, 19 nt, Artificial Sequence
  Description of Artificial Sequence: Synthetic oligonucleotide
  modified_base (5)..(5): a, c, u, g, unknown or other
aucancuuuggcuagaagc

SEQ ID NO: 1586634 - RNA, 19 nt, Artificial Sequence
  Description of Artificial Sequence: Synthetic oligonucleotide
  modified_base (18)..(18): a, c, u, g, unknown or other
agauacauuauacacacnc

SEQ ID NO: 1586635 - RNA, 19 nt, Artificial Sequence
  Description of Artificial Sequence: Synthetic oligonucleotide
uaucaaauuaccaauacca

SEQ ID NO: 1586636 - RNA, 19 nt, Artificial Sequence
  Description of Artificial Sequence: Synthetic oligonucleotide
aaugcuaucuuauuuaaca

SEQ ID NO: 1586637 - RNA, 19 nt, Artificial Sequence
  Description of Artificial Sequence: Synthetic oligonucleotide
aauggagauaaauauucgg

SEQ ID NO: 1586638 - RNA, 19 nt, Artificial Sequence
  Description of Artificial Sequence: Synthetic oligonucleotide
aacaaguagucuuagaaca

SEQ ID NO: 1586639 - RNA, 19 nt, Artificial Sequence
  Description of Artificial Sequence: Synthetic oligonucleotide
aacaguaaacaucacgagg

SEQ ID NO: 1586640 - RNA, 19 nt, Artificial Sequence
  Description of Artificial Sequence: Synthetic oligonucleotide
agagcuaauauuuugccac

SEQ ID NO: 1586641 - RNA, 19 nt, Artificial Sequence
  Description of Artificial Sequence: Synthetic oligonucleotide
uguaacaguaaacaucacg

SEQ ID NO: 1586642 - RNA, 19 nt, Artificial Sequence
  Description of Artificial Sequence: Synthetic oligonucleotide
caugaaaggacacugaggg

SEQ ID NO: 1586643 - RNA, 19 nt, Artificial Sequence
  Description of Artificial Sequence: Synthetic oligonucleotide
aauagagcuaauauuuugc

SEQ ID NO: 1586644 - RNA, 19 nt, Artificial Sequence
  Description of Artificial Sequence: Synthetic oligonucleotide
aauauguucaaaugaacgu

SEQ ID NO: 1586645 - RNA, 19 nt, Artificial Sequence
  Description of Artificial Sequence: Synthetic oligonucleotide
aacaguacuugcucaaacc

SEQ ID NO: 1586646 - RNA, 19 nt, Artificial Sequence
  Description of Artificial Sequence: Synthetic oligonucleotide
auaccuaugacuccaaaac

SEQ ID NO: 1586647 - RNA, 19 nt, Artificial Sequence
  Description of Artificial Sequence: Synthetic oligonucleotide
aaugaacguacacuguggc

SEQ ID NO: 1586648 - RNA, 19 nt, Artificial Sequence
  Description of Artificial Sequence: Synthetic oligonucleotide
aaagucccaaaauagagcu

SEQ ID NO: 1586649 - RNA, 19 nt, Artificial Sequence
  Description of Artificial Sequence: Synthetic oligonucleotide
auaucaaauuaccaauacc

SEQ ID NO: 1586650 - RNA, 19 nt, Artificial Sequence
  Description of Artificial Sequence: Synthetic oligonucleotide
aagacuuugccacaaaaca

SEQ ID NO: 1586651 - RNA, 19 nt, Artificial Sequence
  Description of Artificial Sequence: Synthetic oligonucleotide
  modified_base (4)..(4): a, c, u, g, unknown or other
ucancuuuggcuagaagcc

SEQ ID NO: 1586652 - RNA, 19 nt, Artificial Sequence
  Description of Artificial Sequence: Synthetic oligonucleotide
uaguagaacaccaacauuc

SEQ ID NO: 1586653 - RNA, 19 nt, Artificial Sequence
  Description of Artificial Sequence: Synthetic oligonucleotide
uggauaaugaacacggcag

SEQ ID NO: 1586654 - RNA, 19 nt, Artificial Sequence
  Description of Artificial Sequence: Synthetic oligonucleotide
aaaacacuaauaccuauga

SEQ ID NO: 1586655 - RNA, 19 nt, Artificial Sequence
  Description of Artificial Sequence: Synthetic oligonucleotide
auagagcuaauauuuugcc

SEQ ID NO: 1586656 - RNA, 19 nt, Artificial Sequence
  Description of Artificial Sequence: Synthetic oligonucleotide
uuaaugaugaaaagguaga

SEQ ID NO: 1586657 - RNA, 19 nt, Artificial Sequence
  Description of Artificial Sequence: Synthetic oligonucleotide
uuucauaagcuuacaaaag

SEQ ID NO: 1586658 - RNA, 19 nt, Artificial Sequence
  Description of Artificial Sequence: Synthetic oligonucleotide
uucauaagcuuacaaaaga

SEQ ID NO: 1586659 - RNA, 19 nt, Artificial Sequence
  Description of Artificial Sequence: Synthetic oligonucleotide
aaacaguacuugcucaaac

SEQ ID NO: 1586660 - RNA, 19 nt, Artificial Sequence
  Description of Artificial Sequence: Synthetic oligonucleotide
auuaaugaugaaaagguag

SEQ ID NO: 1586661 - RNA, 19 nt, Artificial Sequence
  Description of Artificial Sequence: Synthetic oligonucleotide
uaacuguugauacuucagg

SEQ ID NO: 1586662 - RNA, 19 nt, Artificial Sequence
  Description of Artificial Sequence: Synthetic oligonucleotide
uucuauuuaggauaucccc

SEQ ID NO: 1586663 - RNA, 19 nt, Artificial Sequence
  Description of Artificial Sequence: Synthetic oligonucleotide
ucuauuuaggauaucccca

SEQ ID NO: 1586664 - RNA, 19 nt, Artificial Sequence
  Description of Artificial Sequence: Synthetic oligonucleotide
uuauucucaagucauuaca

SEQ ID NO: 1586665 - RNA, 19 nt, Artificial Sequence
  Description of Artificial Sequence: Synthetic oligonucleotide
uaacauaucaagcuaugcu

SEQ ID NO: 1586666 - RNA, 19 nt, Artificial Sequence
  Description of Artificial Sequence: Synthetic oligonucleotide
aaacacuaauaccuaugac

SEQ ID NO: 1586667 - RNA, 19 nt, Artificial Sequence
  Description of Artificial Sequence: Synthetic oligonucleotide
ucaggugugacauauuuac

SEQ ID NO: 1586668 - RNA, 19 nt, Artificial Sequence
  Description of Artificial Sequence: Synthetic oligonucleotide
gagauaaauauucggagac

SEQ ID NO: 1586669 - RNA, 19 nt, Artificial Sequence
  Description of Artificial Sequence: Synthetic oligonucleotide
ucaaacuaacuguugauac

SEQ ID NO: 1586670 - RNA, 19 nt, Artificial Sequence
  Description of Artificial Sequence: Synthetic oligonucleotide
uggagauaaauauucggag

SEQ ID NO: 1586671 - RNA, 19 nt, Artificial Sequence
  Description of Artificial Sequence: Synthetic oligonucleotide
uauccccacaauuaaaugc

SEQ ID NO: 1586672 - RNA, 19 nt, Artificial Sequence
  Description of Artificial Sequence: Synthetic oligonucleotide
gucauuacaguguucaacc

SEQ ID NO: 1586673 - RNA, 19 nt, Artificial Sequence
  Description of Artificial Sequence: Synthetic oligonucleotide
uguucagucacuuuuggaa

SEQ ID NO: 1586674 - RNA, 19 nt, Artificial Sequence
  Description of Artificial Sequence: Synthetic oligonucleotide
agauucguaaaauccucgc

SEQ ID NO: 1586675 - RNA, 19 nt, Artificial Sequence
  Description of Artificial Sequence: Synthetic oligonucleotide
acaauucuaaaugagaaga

SEQ ID NO: 1586676 - RNA, 19 nt, Artificial Sequence
  Description of Artificial Sequence: Synthetic oligonucleotide
ucaugaaaggacacugagg

SEQ ID NO: 1586677 - RNA, 19 nt, Artificial Sequence
  Description of Artificial Sequence: Synthetic oligonucleotide
uugaauaaggcuaauucua

SEQ ID NO: 1586678 - RNA, 19 nt, Artificial Sequence
  Description of Artificial Sequence: Synthetic oligonucleotide
aggugugacauauuuacag

SEQ ID NO: 1586679 - RNA, 19 nt, Artificial Sequence
  Description of Artificial Sequence: Synthetic oligonucleotide
uggacauacaaagauagca

SEQ ID NO: 1586680 - RNA, 19 nt, Artificial Sequence
  Description of Artificial Sequence: Synthetic oligonucleotide
uauguucaaaugaacguac

SEQ ID NO: 1586681 - RNA, 19 nt, Artificial Sequence
  Description of Artificial Sequence: Synthetic oligonucleotide
aacuguugauacuucaggu

SEQ ID NO: 1586682 - RNA, 19 nt, Artificial Sequence
  Description of Artificial Sequence: Synthetic oligonucleotide
auuccuaugcuuuugaaua

SEQ ID NO: 1586683 - RNA, 19 nt, Artificial Sequence
  Description of Artificial Sequence: Synthetic oligonucleotide
aauauucggagacgcugac

SEQ ID NO: 1586684 - RNA, 19 nt, Artificial Sequence
  Description of Artificial Sequence: Synthetic oligonucleotide
aauaccuaugacuccaaaa

SEQ ID NO: 1586685 - RNA, 19 nt, Artificial Sequence
  Description of Artificial Sequence: Synthetic oligonucleotide
acacuaauaccuaugacuc

SEQ ID NO: 1586686 - RNA, 19 nt, Artificial Sequence
  Description of Artificial Sequence: Synthetic oligonucleotide
ucugguaucucugacauaa

SEQ ID NO: 1586687 - RNA, 19 nt, Artificial Sequence
  Description of Artificial Sequence: Synthetic oligonucleotide
caugguauagcuugagacc

SEQ ID NO: 1586688 - RNA, 19 nt, Artificial Sequence
  Description of Artificial Sequence: Synthetic oligonucleotide
uauucggagacgcugacaa

SEQ ID NO: 1586689 - RNA, 19 nt, Artificial Sequence
  Description of Artificial Sequence: Synthetic oligonucleotide
gacgcugacaaucacaaga

SEQ ID NO: 1586690 - RNA, 19 nt, Artificial Sequence
  Description of Artificial Sequence: Synthetic oligonucleotide
ugaacguacacuguggcug

SEQ ID NO: 1586691 - RNA, 19 nt, Artificial Sequence
  Description of Artificial Sequence: Synthetic oligonucleotide
auaaaugcuaucuuauuua

SEQ ID NO: 1586692 - RNA, 19 nt, Artificial Sequence
  Description of Artificial Sequence: Synthetic oligonucleotide
aauauugcacagguaguag

SEQ ID NO: 1586693 - RNA, 19 nt, Artificial Sequence
  Description of Artificial Sequence: Synthetic oligonucleotide
uacaguauucaaacuaacu

SEQ ID NO: 1586694 - RNA, 19 nt, Artificial Sequence
  Description of Artificial Sequence: Synthetic oligonucleotide
aaaugaacguacacugugg

SEQ ID NO: 1586695 - RNA, 19 nt, Artificial Sequence
  Description of Artificial Sequence: Synthetic oligonucleotide
ugccaagugucuauacucg

SEQ ID NO: 1586696 - RNA, 19 nt, Artificial Sequence
  Description of Artificial Sequence: Synthetic oligonucleotide
ugugguuuucaccacggca

SEQ ID NO: 1586697 - RNA, 19 nt, Artificial Sequence
  Description of Artificial Sequence: Synthetic oligonucleotide
cuaugcuuuugaauaaggc

SEQ ID NO: 1586698 - RNA, 19 nt, Artificial Sequence
  Description of Artificial Sequence: Synthetic oligonucleotide
aauacugccaagugucuau

SEQ ID NO: 1586699 - RNA, 19 nt, Artificial Sequence
  Description of Artificial Sequence: Synthetic oligonucleotide
aaugcauacucaaauuugu

SEQ ID NO: 1586700 - RNA, 19 nt, Artificial Sequence
  Description of Artificial Sequence: Synthetic oligonucleotide
uuacuuuugaggucugagc

SEQ ID NO: 1586701 - RNA, 19 nt, Artificial Sequence
  Description of Artificial Sequence: Synthetic oligonucleotide
augaguggggcagacagcc

SEQ ID NO: 1586702 - RNA, 19 nt, Artificial Sequence
  Description of Artificial Sequence: Synthetic oligonucleotide
ugaaaggagauacauuaua

SEQ ID NO: 1586703 - RNA, 19 nt, Artificial Sequence
  Description of Artificial Sequence: Synthetic oligonucleotide
agucauuacaguguucaac

SEQ ID NO: 1586704 - RNA, 19 nt, Artificial Sequence
  Description of Artificial Sequence: Synthetic oligonucleotide
cuucuauuuaggauauccc

SEQ ID NO: 1586705 - RNA, 19 nt, Artificial Sequence
  Description of Artificial Sequence: Synthetic oligonucleotide
uagguuauuaaugaugaaa

SEQ ID NO: 1586706 - RNA, 19 nt, Artificial Sequence
  Description of Artificial Sequence: Synthetic oligonucleotide
ggagauacauuauacacac

SEQ ID NO: 1586707 - RNA, 19 nt, Artificial Sequence
  Description of Artificial Sequence: Synthetic oligonucleotide
aagaaaacagcgccaggcu

SEQ ID NO: 1586708 - RNA, 19 nt, Artificial Sequence
  Description of Artificial Sequence: Synthetic oligonucleotide
agaaaacagcgccaggcuc

SEQ ID NO: 1586709 - RNA, 19 nt, Artificial Sequence
  Description of Artificial Sequence: Synthetic oligonucleotide
acuguugauacuucaggug

SEQ ID NO: 1586710 - RNA, 19 nt, Artificial Sequence
  Description of Artificial Sequence: Synthetic oligonucleotide
aaaugcuaucuuauuuaac

SEQ ID NO: 1586711 - RNA, 19 nt, Artificial Sequence
  Description of Artificial Sequence: Synthetic oligonucleotide
aagcuuacaaaagaaugga

SEQ ID NO: 1586712 - RNA, 19 nt, Artificial Sequence
  Description of Artificial Sequence: Synthetic oligonucleotide
uuaaaugcauacucaaauu

SEQ ID NO: 1586713 - RNA, 19 nt, Artificial Sequence
  Description of Artificial Sequence: Synthetic oligonucleotide
ugaauaaggcuaauucuau

SEQ ID NO: 1586714 - RNA, 19 nt, Artificial Sequence
  Description of Artificial Sequence: Synthetic oligonucleotide
uuaacauaucaagcuaugc

SEQ ID NO: 1586715 - RNA, 19 nt, Artificial Sequence
  Description of Artificial Sequence: Synthetic oligonucleotide
aaauccucgcuucuccaug

SEQ ID NO: 1586716 - RNA, 19 nt, Artificial Sequence
  Description of Artificial Sequence: Synthetic oligonucleotide
uaaaugcuaucuuauuuaa

SEQ ID NO: 1586717 - RNA, 19 nt, Artificial Sequence
  Description of Artificial Sequence: Synthetic oligonucleotide
agguguaacaguaaacauc

SEQ ID NO: 1586718 - RNA, 19 nt, Artificial Sequence
  Description of Artificial Sequence: Synthetic oligonucleotide
aaacuaacuguugauacuu

SEQ ID NO: 1586719 - RNA, 19 nt, Artificial Sequence
  Description of Artificial Sequence: Synthetic oligonucleotide
agacagaaauauugcacag

SEQ ID NO: 1586720 - RNA, 19 nt, Artificial Sequence
  Description of Artificial Sequence: Synthetic oligonucleotide
ugugacauauuuacaggaa

SEQ ID NO: 1586721 - RNA, 19 nt, Artificial Sequence
  Description of Artificial Sequence: Synthetic oligonucleotide
acaguuaaagccaaucaug

SEQ ID NO: 1586722 - RNA, 19 nt, Artificial Sequence
  Description of Artificial Sequence: Synthetic oligonucleotide
uuaggauauccccacaauu

SEQ ID NO: 1586723 - RNA, 19 nt, Artificial Sequence
  Description of Artificial Sequence: Synthetic oligonucleotide
uaaacaguuaaagccaauc

SEQ ID NO: 1586724 - RNA, 19 nt, Artificial Sequence
  Description of Artificial Sequence: Synthetic oligonucleotide
cucaugaaaggacacugag

SEQ ID NO: 1586725 - RNA, 19 nt, Artificial Sequence
  Description of Artificial Sequence: Synthetic oligonucleotide
acuaauaccuaugacucca

SEQ ID NO: 1586726 - RNA, 19 nt, Artificial Sequence
  Description of Artificial Sequence: Synthetic oligonucleotide
uuaguagagguacuucuau

SEQ ID NO: 1586727 - RNA, 19 nt, Artificial Sequence
  Description of Artificial Sequence: Synthetic oligonucleotide
agauaaauauucggagacg

SEQ ID NO: 1586728 - RNA, 19 nt, Artificial Sequence
  Description of Artificial Sequence: Synthetic oligonucleotide
uggaaauaccauagagcag

SEQ ID NO: 1586729 - RNA, 19 nt, Artificial Sequence
  Description of Artificial Sequence: Synthetic oligonucleotide
uuccuagguauguuuauga

SEQ ID NO: 1586730 - RNA, 19 nt, Artificial Sequence
  Description of Artificial Sequence: Synthetic oligonucleotide
auucguaaaauccucgcuu

SEQ ID NO: 1586731 - RNA, 19 nt, Artificial Sequence
  Description of Artificial Sequence: Synthetic oligonucleotide
uagagcuaauauuuugcca

SEQ ID NO: 1586732 - RNA, 19 nt, Artificial Sequence
  Description of Artificial Sequence: Synthetic oligonucleotide
uuuaguagagguacuucua

SEQ ID NO: 1586733 - RNA, 19 nt, Artificial Sequence
  Description of Artificial Sequence: Synthetic oligonucleotide
uguugauacuucaggugug

SEQ ID NO: 1586734 - RNA, 19 nt, Artificial Sequence
  Description of Artificial Sequence: Synthetic oligonucleotide
aagcaaacacuuaagacuu

SEQ ID NO: 1586735 - RNA, 19 nt, Artificial Sequence
  Description of Artificial Sequence: Synthetic oligonucleotide
uauacucggguuccuaggu

SEQ ID NO: 1586736 - RNA, 19 nt, Artificial Sequence
  Description of Artificial Sequence: Synthetic oligonucleotide
ggauauagguuauuaauga

SEQ ID NO: 1586737 - RNA, 19 nt, Artificial Sequence
  Description of Artificial Sequence: Synthetic oligonucleotide
acuaacuguugauacuuca

SEQ ID NO: 1586738 - RNA, 19 nt, Artificial Sequence
  Description of Artificial Sequence: Synthetic oligonucleotide
aaauauucggagacgcuga

SEQ ID NO: 1586739 - RNA, 19 nt, Artificial Sequence
  Description of Artificial Sequence: Synthetic oligonucleotide
acaauuaaaugcauacuca

SEQ ID NO: 1586740 - RNA, 19 nt, Artificial Sequence
  Description of Artificial Sequence: Synthetic oligonucleotide
  modified_base (2)..(2): a, c, u, g, unknown or other
ancuuuggcuagaagccuc

SEQ ID NO: 1586741 - RNA, 19 nt, Artificial Sequence
  Description of Artificial Sequence: Synthetic oligonucleotide
agagauucguaaaauccuc

SEQ ID NO: 1586742 - RNA, 19 nt, Artificial Sequence
  Description of Artificial Sequence: Synthetic oligonucleotide
uacgcacugaaccauucac

SEQ ID NO: 1586743 - RNA, 19 nt, Artificial Sequence
  Description of Artificial Sequence: Synthetic oligonucleotide
ggugugacauauuuacagg

SEQ ID NO: 1586744 - RNA, 19 nt, Artificial Sequence
  Description of Artificial Sequence: Synthetic oligonucleotide
ugcuacugaaauuaauuuu

SEQ ID NO: 1586745 - RNA, 19 nt, Artificial Sequence
  Description of Artificial Sequence: Synthetic oligonucleotide
uucguaaaauccucgcuuc

SEQ ID NO: 1586746 - RNA, 19 nt, Artificial Sequence
  Description of Artificial Sequence: Synthetic oligonucleotide
cuauacucggguuccuagg

SEQ ID NO: 1586747 - RNA, 19 nt, Artificial Sequence
  Description of Artificial Sequence: Synthetic oligonucleotide
cuuguucagucacuuuugg

SEQ ID NO: 1586748 - RNA, 19 nt, Artificial Sequence
  Description of Artificial Sequence: Synthetic oligonucleotide
uuuaggauauccccacaau

SEQ ID NO: 1586749 - RNA, 19 nt, Artificial Sequence
  Description of Artificial Sequence: Synthetic oligonucleotide
agguuauuaaugaugaaaa

SEQ ID NO: 1586750 - RNA, 19 nt, Artificial Sequence
  Description of Artificial Sequence: Synthetic oligonucleotide
ugcuuuugaauaaggcuaa

SEQ ID NO: 1586751 - RNA, 19 nt, Artificial Sequence
  Description of Artificial Sequence: Synthetic oligonucleotide
caauaccaaaauauguuca

SEQ ID NO: 1586752 - RNA, 19 nt, Artificial Sequence
  Description of Artificial Sequence: Synthetic oligonucleotide
  modified_base (13)..(13): a, c, u, g, unknown or other
ucaccucuaucancuuugg

SEQ ID NO: 1586753 - RNA, 19 nt, Artificial Sequence
  Description of Artificial Sequence: Synthetic oligonucleotide
auaaugaacacggcagcag

SEQ ID NO: 1586754 - RNA, 19 nt, Artificial Sequence
  Description of Artificial Sequence: Synthetic oligonucleotide
aaggguaguaacugcuuaa

SEQ ID NO: 1586755 - RNA, 19 nt, Artificial Sequence
  Description of Artificial Sequence: Synthetic oligonucleotide
aaaauccucgcuucuccau

SEQ ID NO: 1586756 - RNA, 19 nt, Artificial Sequence
  Description of Artificial Sequence: Synthetic oligonucleotide
uuggacauacaaagauagc

SEQ ID NO: 1586757 - RNA, 19 nt, Artificial Sequence
  Description of Artificial Sequence: Synthetic oligonucleotide
auaaggcuaauucuauaaa

SEQ ID NO: 1586758 - RNA, 19 nt, Artificial Sequence
  Description of Artificial Sequence: Synthetic oligonucleotide
  modified_base (19)..(19): a, c, u, g, unknown or other
aaccauucaccucuaucan

SEQ ID NO: 1586759 - RNA, 19 nt, Artificial Sequence
  Description of Artificial Sequence: Synthetic oligonucleotide
uuuggcuagaagccucaug

SEQ ID NO: 1586760 - RNA, 19 nt, Artificial Sequence
  Description of Artificial Sequence: Synthetic oligonucleotide
ugguaucucugacauaaau

SEQ ID NO: 1586761 - RNA, 19 nt, Artificial Sequence
  Description of Artificial Sequence: Synthetic oligonucleotide
acgugcucccaccuuacac

SEQ ID NO: 1586762 - RNA, 19 nt, Artificial Sequence
  Description of Artificial Sequence: Synthetic oligonucleotide
cuugaaguucccuggcuug

SEQ ID NO: 1586763 - RNA, 19 nt, Artificial Sequence
  Description of Artificial Sequence: Synthetic oligonucleotide
  modified_base (13)..(13): a, c, u, g, unknown or other
cauuauacacacncaacaa

SEQ ID NO: 1586764 - RNA, 19 nt, Artificial Sequence
  Description of Artificial Sequence: Synthetic oligonucleotide
aauuggacauacaaagaua

SEQ ID NO: 1586765 - RNA, 19 nt, Artificial Sequence
  Description of Artificial Sequence: Synthetic oligonucleotide
gcucaaaccagucugucgc

SEQ ID NO: 1586766 - RNA, 19 nt, Artificial Sequence
  Description of Artificial Sequence: Synthetic oligonucleotide
gcuagaagccucaugaaag

SEQ ID NO: 1586767 - RNA, 19 nt, Artificial Sequence
  Description of Artificial Sequence: Synthetic oligonucleotide
uacaaagauagcaggugua

SEQ ID NO: 1586768 - RNA, 19 nt, Artificial Sequence
  Description of Artificial Sequence: Synthetic oligonucleotide
caguacuugcucaaaccag

SEQ ID NO: 1586769 - RNA, 19 nt, Artificial Sequence
  Description of Artificial Sequence: Synthetic oligonucleotide
  modified_base (6)..(6): a, c, u, g, unknown or other
uaucancuuuggcuagaag

SEQ ID NO: 1586770 - RNA, 19 nt, Artificial Sequence
  Description of Artificial Sequence: Synthetic oligonucleotide
ggccaauacgcacugaacc

SEQ ID NO: 1586771 - RNA, 19 nt, Artificial Sequence
  Description of Artificial Sequence: Synthetic oligonucleotide
aagaauggagauaaauauu

SEQ ID NO: 1586772 - RNA, 19 nt, Artificial Sequence
  Description of Artificial Sequence: Synthetic oligonucleotide
agucacuuuuggaagcucg

SEQ ID NO: 1586773 - RNA, 19 nt, Artificial Sequence
  Description of Artificial Sequence: Synthetic oligonucleotide
uucaaacuaacuguugaua

SEQ ID NO: 1586774 - RNA, 19 nt, Artificial Sequence
  Description of Artificial Sequence: Synthetic oligonucleotide
ugaccuuggcaagagauuc

SEQ ID NO: 1586775 - RNA, 19 nt, Artificial Sequence
  Description of Artificial Sequence: Synthetic oligonucleotide
ucaagcuaugcuacugaaa

SEQ ID NO: 1586776 - RNA, 19 nt, Artificial Sequence
  Description of Artificial Sequence: Synthetic oligonucleotide
agucccaaaauagagcuaa

SEQ ID NO: 1586777 - RNA, 19 nt, Artificial Sequence
  Description of Artificial Sequence: Synthetic oligonucleotide
gauaaugaacacggcagca

SEQ ID NO: 1586778 - RNA, 19 nt, Artificial Sequence
  Description of Artificial Sequence: Synthetic oligonucleotide
gaaaacagcgccaggcuca

SEQ ID NO: 1586779 - RNA, 19 nt, Artificial Sequence
  Description of Artificial Sequence: Synthetic oligonucleotide
gccuggauaaugaacacgg

SEQ ID NO: 1586780 - RNA, 19 nt, Artificial Sequence
  Description of Artificial Sequence: Synthetic oligonucleotide
uccaugguauagcuugaga

SEQ ID NO: 1586781 - RNA, 19 nt, Artificial Sequence
  Description of Artificial Sequence: Synthetic oligonucleotide
cuggauaaugaacacggca

SEQ ID NO: 1586782 - RNA, 19 nt, Artificial Sequence
  Description of Artificial Sequence: Synthetic oligonucleotide
acugccaagugucuauacu

SEQ ID NO: 1586783 - RNA, 19 nt, Artificial Sequence
  Description of Artificial Sequence: Synthetic oligonucleotide
aggagauacauuauacaca

SEQ ID NO: 1586784 - RNA, 19 nt, Artificial Sequence
  Description of Artificial Sequence: Synthetic oligonucleotide
aguguucaaccaauuggac

SEQ ID NO: 1586785 - RNA, 19 nt, Artificial Sequence
  Description of Artificial Sequence: Synthetic oligonucleotide
agguacuucuauuuaggau

SEQ ID NO: 1586786 - RNA, 19 nt, Artificial Sequence
  Description of Artificial Sequence: Synthetic oligonucleotide
uggcaagagauucguaaaa

SEQ ID NO: 1586787 - RNA, 19 nt, Artificial Sequence
  Description of Artificial Sequence: Synthetic oligonucleotide
aggauauccccacaauuaa

SEQ ID NO: 1586788 - RNA, 19 nt, Artificial Sequence
  Description of Artificial Sequence: Synthetic oligonucleotide
uucggagacgcugacaauc

SEQ ID NO: 1586789 - RNA, 19 nt, Artificial Sequence
  Description of Artificial Sequence: Synthetic oligonucleotide
ggagauaaauauucggaga

SEQ ID NO: 1586790 - RNA, 19 nt, Artificial Sequence
  Description of Artificial Sequence: Synthetic oligonucleotide
ccaugguauagcuugagac

SEQ ID NO: 1586791 - RNA, 19 nt, Artificial Sequence
  Description of Artificial Sequence: Synthetic oligonucleotide
gguaucucugacauaaaug

SEQ ID NO: 1586792 - RNA, 19 nt, Artificial Sequence
  Description of Artificial Sequence: Synthetic oligonucleotide
caaccaauuggacauacaa

SEQ ID NO: 1586793 - RNA, 19 nt, Artificial Sequence
  Description of Artificial Sequence: Synthetic oligonucleotide
cagguaguagaacaccaac

SEQ ID NO: 1586794 - RNA, 19 nt, Artificial Sequence
  Description of Artificial Sequence: Synthetic oligonucleotide
acauacaaagauagcaggu

SEQ ID NO: 1586795 - RNA, 19 nt, Artificial Sequence
  Description of Artificial Sequence: Synthetic oligonucleotide
aguauucaaacuaacuguu

SEQ ID NO: 1586796 - RNA, 19 nt, Artificial Sequence
  Description of Artificial Sequence: Synthetic oligonucleotide
uguaggacuuuggagcaca

SEQ ID NO: 1586797 - RNA, 19 nt, Artificial Sequence
  Description of Artificial Sequence: Synthetic oligonucleotide
cacuaauaccuaugacucc

SEQ ID NO: 1586798 - RNA, 19 nt, Artificial Sequence
  Description of Artificial Sequence: Synthetic oligonucleotide
uccuaugcuuuugaauaag

SEQ ID NO: 1586799 - RNA, 19 nt, Artificial Sequence
  Description of Artificial Sequence: Synthetic oligonucleotide
uuguucagucacuuuugga

SEQ ID NO: 1586800 - RNA, 19 nt, Artificial Sequence
  Description of Artificial Sequence: Synthetic oligonucleotide
accaauaccaaaauauguu

SEQ ID NO: 1586801 - RNA, 19 nt, Artificial Sequence
  Description of Artificial Sequence: Synthetic oligonucleotide
aaguagucuuagaacauaa

SEQ ID NO: 1586802 - RNA, 19 nt, Artificial Sequence
  Description of Artificial Sequence: Synthetic oligonucleotide
acgcacugaaccauucacc

SEQ ID NO: 1586803 - RNA, 19 nt, Artificial Sequence
  Description of Artificial Sequence: Synthetic oligonucleotide
ugucgcucaacaccagaac

SEQ ID NO: 1586804 - RNA, 19 nt, Artificial Sequence
  Description of Artificial Sequence: Synthetic oligonucleotide
aguacuugcucaaaccagu

SEQ ID NO: 1586805 - RNA, 19 nt, Artificial Sequence
  Description of Artificial Sequence: Synthetic oligonucleotide
aaauaccauagagcagcag

SEQ ID NO: 1586806 - RNA, 19 nt, Artificial Sequence
  Description of Artificial Sequence: Synthetic oligonucleotide
ggauaaugaacacggcagc

SEQ ID NO: 1586807 - RNA, 19 nt, Artificial Sequence
  Description of Artificial Sequence: Synthetic oligonucleotide
ugguuuucaccacggcagc

SEQ ID NO: 1586808 - RNA, 19 nt, Artificial Sequence
  Description of Artificial Sequence: Synthetic oligonucleotide
ucuaaguccacuggcucac

SEQ ID NO: 1586809 - RNA, 19 nt, Artificial Sequence
  Description of Artificial Sequence: Synthetic oligonucleotide
ucaaccaauuggacauaca

SEQ ID NO: 1586810 - RNA, 19 nt, Artificial Sequence
  Description of Artificial Sequence: Synthetic oligonucleotide
aagccucaugaaaggacac

SEQ ID NO: 1586811 - RNA, 19 nt, Artificial Sequence
  Description of Artificial Sequence: Synthetic oligonucleotide
aaaacaguacuugcucaaa

SEQ ID NO: 1586812 - RNA, 19 nt, Artificial Sequence
  Description of Artificial Sequence: Synthetic oligonucleotide
ggcacuuggauauagguua

SEQ ID NO: 1586813 - RNA, 19 nt, Artificial Sequence
  Description of Artificial Sequence: Synthetic oligonucleotide
ucguaaaauccucgcuucu

SEQ ID NO: 1586814 - RNA, 19 nt, Artificial Sequence
  Description of Artificial Sequence: Synthetic oligonucleotide
uccuagguauguuuaugaa

SEQ ID NO: 1586815 - RNA, 19 nt, Artificial Sequence
  Description of Artificial Sequence: Synthetic oligonucleotide
  modified_base (9)..(9): a, c, u, g, unknown or other
cucuaucancuuuggcuag

SEQ ID NO: 1586816 - RNA, 19 nt, Artificial Sequence
  Description of Artificial Sequence: Synthetic oligonucleotide
uucaggugugacauauuua

SEQ ID NO: 1586817 - RNA, 19 nt, Artificial Sequence
  Description of Artificial Sequence: Synthetic oligonucleotide
cuuggauauagguuauuaa

SEQ ID NO: 1586818 - RNA, 19 nt, Artificial Sequence
  Description of Artificial Sequence: Synthetic oligonucleotide
auccccacaauuaaaugca

SEQ ID NO: 1586819 - RNA, 19 nt, Artificial Sequence
  Description of Artificial Sequence: Synthetic oligonucleotide
ugguauagcuugagaccag

SEQ ID NO: 1586820 - RNA, 19 nt, Artificial Sequence
  Description of Artificial Sequence: Synthetic oligonucleotide
cauguaggacuuuggagca

SEQ ID NO: 1586821 - RNA, 19 nt, Artificial Sequence
  Description of Artificial Sequence: Synthetic oligonucleotide
guauucaaacuaacuguug

SEQ ID NO: 1586822 - RNA, 19 nt, Artificial Sequence
  Description of Artificial Sequence: Synthetic oligonucleotide
  modified_base (8)..(8): a, c, u, g, unknown or other
ucuaucancuuuggcuaga

SEQ ID NO: 1586823 - RNA, 19 nt, Artificial Sequence
  Description of Artificial Sequence: Synthetic oligonucleotide
agucuggaccuugaaguuc

SEQ ID NO: 1586824 - RNA, 19 nt, Artificial Sequence
  Description of Artificial Sequence: Synthetic oligonucleotide
uaauaccuaugacuccaaa

SEQ ID NO: 1586825 - RNA, 19 nt, Artificial Sequence
  Description of Artificial Sequence: Synthetic oligonucleotide
uccaacaaguagucuuaga

SEQ ID NO: 1586826 - RNA, 19 nt, Artificial Sequence
  Description of Artificial Sequence: Synthetic oligonucleotide
augaacguacacuguggcu

SEQ ID NO: 1586827 - RNA, 19 nt, Artificial Sequence
  Description of Artificial Sequence: Synthetic oligonucleotide
cuaugacuccaaaacagaa

SEQ ID NO: 1586828 - RNA, 19 nt, Artificial Sequence
  Description of Artificial Sequence: Synthetic oligonucleotide
gcuuacaaaagaauggaga

SEQ ID NO: 1586829 - RNA, 19 nt, Artificial Sequence
  Description of Artificial Sequence: Synthetic oligonucleotide
auauaucaaauuaccaaua

SEQ ID NO: 1586830 - RNA, 19 nt, Artificial Sequence
  Description of Artificial Sequence: Synthetic oligonucleotide
uacucggguuccuagguau

SEQ ID NO: 1586831 - RNA, 19 nt, Artificial Sequence
  Description of Artificial Sequence: Synthetic oligonucleotide
agcuuacaaaagaauggag

SEQ ID NO: 1586832 - RNA, 19 nt, Artificial Sequence
  Description of Artificial Sequence: Synthetic oligonucleotide
aagugucuauacucggguu

SEQ ID NO: 1586833 - RNA, 19 nt, Artificial Sequence
  Description of Artificial Sequence: Synthetic oligonucleotide
gucacuuuuggaagcucgg

SEQ ID NO: 1586834 - RNA, 19 nt, Artificial Sequence
  Description of Artificial Sequence: Synthetic oligonucleotide
uugccaccaugaaauauau

SEQ ID NO: 1586835 - RNA, 19 nt, Artificial Sequence
  Description of Artificial Sequence: Synthetic oligonucleotide
ucccaccuuacacaucacu

SEQ ID NO: 1586836 - RNA, 19 nt, Artificial Sequence
  Description of Artificial Sequence: Synthetic oligonucleotide
agguaguagaacaccaaca

SEQ ID NO: 1586837 - RNA, 19 nt, Artificial Sequence
  Description of Artificial Sequence: Synthetic oligonucleotide
gaccuugaaguucccuggc

SEQ ID NO: 1586838 - RNA, 19 nt, Artificial Sequence
  Description of Artificial Sequence: Synthetic oligonucleotide
aguuaaagccaaucaugua

SEQ ID NO: 1586839 - RNA, 19 nt, Artificial Sequence
  Description of Artificial Sequence: Synthetic oligonucleotide
cacggcagcaaauuucuca

SEQ ID NO: 1586840 - RNA, 19 nt, Artificial Sequence
  Description of Artificial Sequence: Synthetic oligonucleotide
gacuuuggagcacaauucu

SEQ ID NO: 1586841 - RNA, 19 nt, Artificial Sequence
  Description of Artificial Sequence: Synthetic oligonucleotide
gagacgcugacaaucacaa

SEQ ID NO: 1586842 - RNA, 19 nt, Artificial Sequence
  Description of Artificial Sequence: Synthetic oligonucleotide
gauauccccacaauuaaau

SEQ ID NO: 1586843 - RNA, 19 nt, Artificial Sequence
  Description of Artificial Sequence: Synthetic oligonucleotide
caguuaaagccaaucaugu

SEQ ID NO: 1586844 - RNA, 19 nt, Artificial Sequence
  Description of Artificial Sequence: Synthetic oligonucleotide
gaagcucgguuuucucuug

SEQ ID NO: 1586845 - RNA, 19 nt, Artificial Sequence
  Description of Artificial Sequence: Synthetic oligonucleotide
caauuggacauacaaagau

SEQ ID NO: 1586846 - RNA, 19 nt, Artificial Sequence
  Description of Artificial Sequence: Synthetic oligonucleotide
gaaggguaguaacugcuua

SEQ ID NO: 1586847 - RNA, 19 nt, Artificial Sequence
  Description of Artificial Sequence: Synthetic oligonucleotide
gaggccaauacgcacugaa

SEQ ID NO: 1586848 - RNA, 19 nt, Artificial Sequence
  Description of Artificial Sequence: Synthetic oligonucleotide
ucagucacuuuuggaagcu

SEQ ID NO: 1586849 - RNA, 19 nt, Artificial Sequence
  Description of Artificial Sequence: Synthetic oligonucleotide
cauaaaugcuaucuuauuu

SEQ ID NO: 1586850 - RNA, 19 nt, Artificial Sequence
  Description of Artificial Sequence: Synthetic oligonucleotide
aaaccagucugucgcucaa

SEQ ID NO: 1586851 - RNA, 19 nt, Artificial Sequence
  Description of Artificial Sequence: Synthetic oligonucleotide
cuguugauacuucaggugu

SEQ ID NO: 1586852 - RNA, 19 nt, Artificial Sequence
  Description of Artificial Sequence: Synthetic oligonucleotide
gcagguguaacaguaaaca

SEQ ID NO: 1586853 - RNA, 19 nt, Artificial Sequence
  Description of Artificial Sequence: Synthetic oligonucleotide
agucugucgcucaacacca

SEQ ID NO: 1586854 - RNA, 19 nt, Artificial Sequence
  Description of Artificial Sequence: Synthetic oligonucleotide
auagguuauuaaugaugaa

SEQ ID NO: 1586855 - RNA, 19 nt, Artificial Sequence
  Description of Artificial Sequence: Synthetic oligonucleotide
uaguagagguacuucuauu

SEQ ID NO: 1586856 - RNA, 19 nt, Artificial Sequence
  Description of Artificial Sequence: Synthetic oligonucleotide
  modified_base (15)..(15): a, c, u, g, unknown or other
auucaccucuaucancuuu

SEQ ID NO: 1586857 - RNA, 19 nt, Artificial Sequence
  Description of Artificial Sequence: Synthetic oligonucleotide
caccacggcagcaaauuuc

SEQ ID NO: 1586858 - RNA, 19 nt, Artificial Sequence
  Description of Artificial Sequence: Synthetic oligonucleotide
ccaagugucuauacucggg

SEQ ID NO: 1586859 - RNA, 19 nt, Artificial Sequence
  Description of Artificial Sequence: Synthetic oligonucleotide
uggcuguaccaaagaaaac

SEQ ID NO: 1586860 - RNA, 19 nt, Artificial Sequence
  Description of Artificial Sequence: Synthetic oligonucleotide
ugagcagagcuuguucagu

SEQ ID NO: 1586861 - RNA, 19 nt, Artificial Sequence
  Description of Artificial Sequence: Synthetic oligonucleotide
guagagguacuucuauuua

SEQ ID NO: 1586862 - RNA, 19 nt, Artificial Sequence
  Description of Artificial Sequence: Synthetic oligonucleotide
uucaccacggcagcaaauu

SEQ ID NO: 1586863 - RNA, 19 nt, Artificial Sequence
  Description of Artificial Sequence: Synthetic oligonucleotide
uuucaccacggcagcaaau

SEQ ID NO: 1586864 - RNA, 19 nt, Artificial Sequence
  Description of Artificial Sequence: Synthetic oligonucleotide
ccaacaaguagucuuagaa

SEQ ID NO: 1586865 - RNA, 19 nt, Artificial Sequence
  Description of Artificial Sequence: Synthetic oligonucleotide
gguaguagaacaccaacau

SEQ ID NO: 1586866 - RNA, 19 nt, Artificial Sequence
  Description of Artificial Sequence: Synthetic oligonucleotide
aggccaauacgcacugaac

SEQ ID NO: 1586867 - RNA, 19 nt, Artificial Sequence
  Description of Artificial Sequence: Synthetic oligonucleotide
cauuccuguucugaaagga

SEQ ID NO: 1586868 - RNA, 19 nt, Artificial Sequence
  Description of Artificial Sequence: Synthetic oligonucleotide
caaacuaacuguugauacu

SEQ ID NO: 1586869 - RNA, 19 nt, Artificial Sequence
  Description of Artificial Sequence: Synthetic oligonucleotide
gaaauaccauagagcagca

SEQ ID NO: 1586870 - RNA, 19 nt, Artificial Sequence
  Description of Artificial Sequence: Synthetic oligonucleotide
acaaguagucuuagaacau

SEQ ID NO: 1586871 - RNA, 19 nt, Artificial Sequence
  Description of Artificial Sequence: Synthetic oligonucleotide
guugauacuucagguguga

SEQ ID NO: 1586872 - RNA, 19 nt, Artificial Sequence
  Description of Artificial Sequence: Synthetic oligonucleotide
aucacgaggcacauuccug

SEQ ID NO: 1586873 - RNA, 19 nt, Artificial Sequence
  Description of Artificial Sequence: Synthetic oligonucleotide
uugauacuucaggugugac

SEQ ID NO: 1586874 - RNA, 19 nt, Artificial Sequence
  Description of Artificial Sequence: Synthetic oligonucleotide
acguacacuguggcuguac

SEQ ID NO: 1586875 - RNA, 19 nt, Artificial Sequence
  Description of Artificial Sequence: Synthetic oligonucleotide
gucgcucaacaccagaacu

SEQ ID NO: 1586876 - RNA, 19 nt, Artificial Sequence
  Description of Artificial Sequence: Synthetic oligonucleotide
agacgcugacaaucacaag

SEQ ID NO: 1586877 - RNA, 19 nt, Artificial Sequence
  Description of Artificial Sequence: Synthetic oligonucleotide
aaaacagcgccaggcucau

SEQ ID NO: 1586878 - RNA, 19 nt, Artificial Sequence
  Description of Artificial Sequence: Synthetic oligonucleotide
guuguccugugguuuucac

SEQ ID NO: 1586879 - RNA, 19 nt, Artificial Sequence
  Description of Artificial Sequence: Synthetic oligonucleotide
uccccacaauuaaaugcau

SEQ ID NO: 1586880 - RNA, 19 nt, Artificial Sequence
  Description of Artificial Sequence: Synthetic oligonucleotide
accuuggcaagagauucgu

SEQ ID NO: 1586881 - RNA, 19 nt, Artificial Sequence
  Description of Artificial Sequence: Synthetic oligonucleotide
  modified_base (10)..(10): a, c, u, g, unknown or other
ccucuaucancuuuggcua

SEQ ID NO: 1586882 - RNA, 19 nt, Artificial Sequence
  Description of Artificial Sequence: Synthetic oligonucleotide
aguagucuuagaacauaaa

SEQ ID NO: 1586883 - RNA, 19 nt, Artificial Sequence
  Description of Artificial Sequence: Synthetic oligonucleotide
aggguaguaacugcuuaaa

SEQ ID NO: 1586884 - RNA, 19 nt, Artificial Sequence
  Description of Artificial Sequence: Synthetic oligonucleotide
cugugguuuucaccacggc

SEQ ID NO: 1586885 - RNA, 19 nt, Artificial Sequence
  Description of Artificial Sequence: Synthetic oligonucleotide
caagugucuauacucgggu

SEQ ID NO: 1586886 - RNA, 19 nt, Artificial Sequence
  Description of Artificial Sequence: Synthetic oligonucleotide
auauucggagacgcugaca

SEQ ID NO: 1586887 - RNA, 19 nt, Artificial Sequence
  Description of Artificial Sequence: Synthetic oligonucleotide
acgcugacaaucacaagaa

SEQ ID NO: 1586888 - RNA, 19 nt, Artificial Sequence
  Description of Artificial Sequence: Synthetic oligonucleotide
gaacguacacuguggcugu

SEQ ID NO: 1586889 - RNA, 19 nt, Artificial Sequence
  Description of Artificial Sequence: Synthetic oligonucleotide
agcucgguuuucucuugga

SEQ ID NO: 1586890 - RNA, 19 nt, Artificial Sequence
  Description of Artificial Sequence: Synthetic oligonucleotide
ggcuagaagccucaugaaa

SEQ ID NO: 1586891 - RNA, 19 nt, Artificial Sequence
  Description of Artificial Sequence: Synthetic oligonucleotide
aguuuauucucaagucauu

SEQ ID NO: 1586892 - RNA, 19 nt, Artificial Sequence
  Description of Artificial Sequence: Synthetic oligonucleotide
ccuaugacuccaaaacaga

SEQ ID NO: 1586893 - RNA, 19 nt, Artificial Sequence
  Description of Artificial Sequence: Synthetic oligonucleotide
auacucggguuccuaggua

SEQ ID NO: 1586894 - RNA, 19 nt, Artificial Sequence
  Description of Artificial Sequence: Synthetic oligonucleotide
ccaauuggacauacaaaga

SEQ ID NO: 1586895 - RNA, 19 nt, Artificial Sequence
  Description of Artificial Sequence: Synthetic oligonucleotide
caggcacuuggauauaggu

SEQ ID NO: 1586896 - RNA, 19 nt, Artificial Sequence
  Description of Artificial Sequence: Synthetic oligonucleotide
accuuacacaucacugacu

SEQ ID NO: 1586897 - RNA, 19 nt, Artificial Sequence
  Description of Artificial Sequence: Synthetic oligonucleotide
cugagcaguuuauucucaa

SEQ ID NO: 1586898 - RNA, 19 nt, Artificial Sequence
  Description of Artificial Sequence: Synthetic oligonucleotide
caaguagucuuagaacaua

SEQ ID NO: 1586899 - RNA, 19 nt, Artificial Sequence
  Description of Artificial Sequence: Synthetic oligonucleotide
guaguagaacaccaacauu

SEQ ID NO: 1586900 - RNA, 19 nt, Artificial Sequence
  Description of Artificial Sequence: Synthetic oligonucleotide
  modified_base (7)..(7): a, c, u, g, unknown or other
cuaucancuuuggcuagaa

SEQ ID NO: 1586901 - RNA, 19 nt, Artificial Sequence
  Description of Artificial Sequence: Synthetic oligonucleotide
ccuggauaaugaacacggc

SEQ ID NO: 1586902 - RNA, 19 nt, Artificial Sequence
  Description of Artificial Sequence: Synthetic oligonucleotide
agacagucuggaccuugaa

SEQ ID NO: 1586903 - RNA, 19 nt, Artificial Sequence
  Description of Artificial Sequence: Synthetic oligonucleotide
aggcacuuggauauagguu

SEQ ID NO: 1586904 - RNA, 19 nt, Artificial Sequence
  Description of Artificial Sequence: Synthetic oligonucleotide
aguucccuggcuugaccuu

SEQ ID NO: 1586905 - RNA, 19 nt, Artificial Sequence
  Description of Artificial Sequence: Synthetic oligonucleotide
aagucccaaaauagagcua

SEQ ID NO: 1586906 - RNA, 19 nt, Artificial Sequence
  Description of Artificial Sequence: Synthetic oligonucleotide
auucggagacgcugacaau

SEQ ID NO: 1586907 - RNA, 19 nt, Artificial Sequence
  Description of Artificial Sequence: Synthetic oligonucleotide
ccaccuuacacaucacuga

SEQ ID NO: 1586908 - RNA, 19 nt, Artificial Sequence
  Description of Artificial Sequence: Synthetic oligonucleotide
ggagacgcugacaaucaca

SEQ ID NO: 1586909 - RNA, 19 nt, Artificial Sequence
  Description of Artificial Sequence: Synthetic oligonucleotide
cagguguaacaguaaacau

SEQ ID NO: 1586910 - RNA, 19 nt, Artificial Sequence
  Description of Artificial Sequence: Synthetic oligonucleotide
cuaaguccacuggcucacc

SEQ ID NO: 1586911 - RNA, 19 nt, Artificial Sequence
  Description of Artificial Sequence: Synthetic oligonucleotide
agccaaucauguaggacuu

SEQ ID NO: 1586912 - RNA, 19 nt, Artificial Sequence
  Description of Artificial Sequence: Synthetic oligonucleotide
guacuucuauuuaggauau

SEQ ID NO: 1586913 - RNA, 19 nt, Artificial Sequence
  Description of Artificial Sequence: Synthetic oligonucleotide
ggacuggaaauaccauaga

SEQ ID NO: 1586914 - RNA, 19 nt, Artificial Sequence
  Description of Artificial Sequence: Synthetic oligonucleotide
cguacacuguggcuguacc

SEQ ID NO: 1586915 - RNA, 19 nt, Artificial Sequence
  Description of Artificial Sequence: Synthetic oligonucleotide
uacuucuauuuaggauauc

SEQ ID NO: 1586916 - RNA, 19 nt, Artificial Sequence
  Description of Artificial Sequence: Synthetic oligonucleotide
acucggguuccuagguaug

SEQ ID NO: 1586917 - RNA, 19 nt, Artificial Sequence
  Description of Artificial Sequence: Synthetic oligonucleotide
auacugccaagugucuaua

SEQ ID NO: 1586918 - RNA, 19 nt, Artificial Sequence
  Description of Artificial Sequence: Synthetic oligonucleotide
caauacugccaagugucua

SEQ ID NO: 1586919 - RNA, 19 nt, Artificial Sequence
  Description of Artificial Sequence: Synthetic oligonucleotide
ucggguuccuagguauguu

SEQ ID NO: 1586920 - RNA, 19 nt, Artificial Sequence
  Description of Artificial Sequence: Synthetic oligonucleotide
  modified_base (3)..(3): a, c, u, g, unknown or other
cancuuuggcuagaagccu

SEQ ID NO: 1586921 - RNA, 19 nt, Artificial Sequence
  Description of Artificial Sequence: Synthetic oligonucleotide
gcacugaaccauucaccuc

SEQ ID NO: 1586922 - RNA, 19 nt, Artificial Sequence
  Description of Artificial Sequence: Synthetic oligonucleotide
gcagccugggaaaagcaaa

SEQ ID NO: 1586923 - RNA, 19 nt, Artificial Sequence
  Description of Artificial Sequence: Synthetic oligonucleotide
cguaaaauccucgcuucuc

SEQ ID NO: 1586924 - RNA, 19 nt, Artificial Sequence
  Description of Artificial Sequence: Synthetic oligonucleotide
gucugucgcucaacaccag

SEQ ID NO: 1586925 - RNA, 19 nt, Artificial Sequence
  Description of Artificial Sequence: Synthetic oligonucleotide
ggcaucaucuaaguccacu

SEQ ID NO: 1586926 - RNA, 19 nt, Artificial Sequence
  Description of Artificial Sequence: Synthetic oligonucleotide
aacguacacuguggcugua

SEQ ID NO: 1586927 - RNA, 19 nt, Artificial Sequence
  Description of Artificial Sequence: Synthetic oligonucleotide
caauacgcacugaaccauu

SEQ ID NO: 1586928 - RNA, 19 nt, Artificial Sequence
  Description of Artificial Sequence: Synthetic oligonucleotide
agaggccaauacgcacuga

SEQ ID NO: 1586929 - RNA, 19 nt, Artificial Sequence
  Description of Artificial Sequence: Synthetic oligonucleotide
gcagacagcccacgugcuc

SEQ ID NO: 1586930 - RNA, 19 nt, Artificial Sequence
  Description of Artificial Sequence: Synthetic oligonucleotide
gagggacuggaaauaccau

SEQ ID NO: 1586931 - RNA, 19 nt, Artificial Sequence
  Description of Artificial Sequence: Synthetic oligonucleotide
acugaaccauucaccucua

SEQ ID NO: 1586932 - RNA, 19 nt, Artificial Sequence
  Description of Artificial Sequence: Synthetic oligonucleotide
  modified_base (16)..(16): a, c, u, g, unknown or other
cauucaccucuaucancuu

SEQ ID NO: 1586933 - RNA, 19 nt, Artificial Sequence
  Description of Artificial Sequence: Synthetic oligonucleotide
cgcuucuccaugguauagc

SEQ ID NO: 1586934 - RNA, 19 nt, Artificial Sequence
  Description of Artificial Sequence: Synthetic oligonucleotide
cacgugcucccaccuuaca

SEQ ID NO: 1586935 - RNA, 19 nt, Artificial Sequence
  Description of Artificial Sequence: Synthetic oligonucleotide
ccucgcuucuccaugguau

SEQ ID NO: 1586936 - RNA, 19 nt, Artificial Sequence
  Description of Artificial Sequence: Synthetic oligonucleotide
cgcugacaaucacaagaac

SEQ ID NO: 1586937 - RNA, 19 nt, Artificial Sequence
  Description of Artificial Sequence: Synthetic oligonucleotide
cucggguuccuagguaugu

SEQ ID NO: 1586938 - RNA, 19 nt, Artificial Sequence
  Description of Artificial Sequence: Synthetic oligonucleotide
ccccacaauuaaaugcaua

SEQ ID NO: 1586939 - RNA, 19 nt, Artificial Sequence
  Description of Artificial Sequence: Synthetic oligonucleotide
cccacgugcucccaccuua

SEQ ID NO: 1586940 - RNA, 19 nt, Artificial Sequence
  Description of Artificial Sequence: Synthetic oligonucleotide
ccacggcagcaaauuucuc

SEQ ID NO: 1586941 - RNA, 19 nt, Artificial Sequence
  Description of Artificial Sequence: Synthetic oligonucleotide
ccaauacgcacugaaccau

SEQ ID NO: 1586942 - RNA, 19 nt, Artificial Sequence
  Description of Artificial Sequence: Synthetic oligonucleotide
gucccaaaauagagcuaau

SEQ ID NO: 1586943 - RNA, 19 nt, Artificial Sequence
  Description of Artificial Sequence: Synthetic oligonucleotide
cuuuggcuagaagccucau

SEQ ID NO: 1586944 - RNA, 19 nt, Artificial Sequence
  Description of Artificial Sequence: Synthetic oligonucleotide
ccuuggcaagagauucgua

SEQ ID NO: 1586945 - RNA, 19 nt, Artificial Sequence
  Description of Artificial Sequence: Synthetic oligonucleotide
gcuuuugaauaaggcuaau

SEQ ID NO: 1586946 - RNA, 19 nt, Artificial Sequence
  Description of Artificial Sequence: Synthetic oligonucleotide
ccagaacuacagguucuuu

SEQ ID NO: 1586947 - RNA, 19 nt, Artificial Sequence
  Description of Artificial Sequence: Synthetic oligonucleotide
ucuaguuugguaaagauac

SEQ ID NO: 1586948 - RNA, 19 nt, Artificial Sequence
  Description of Artificial Sequence: Synthetic oligonucleotide
uguuccuuaaguuugagag

SEQ ID NO: 1586949 - RNA, 19 nt, Artificial Sequence
  Description of Artificial Sequence: Synthetic oligonucleotide
aaauccuuccuugagaagc

SEQ ID NO: 1586950 - RNA, 19 nt, Artificial Sequence
  Description of Artificial Sequence: Synthetic oligonucleotide
ugucacauaaugcaguugg

SEQ ID NO: 1586951 - RNA, 19 nt, Artificial Sequence
  Description of Artificial Sequence: Synthetic oligonucleotide
ugaucuacauccuugaaag

SEQ ID NO: 1586952 - RNA, 19 nt, Artificial Sequence
  Description of Artificial Sequence: Synthetic oligonucleotide
ucuuaauaaaggcaucucg

SEQ ID NO: 1586953 - RNA, 19 nt, Artificial Sequence
  Description of Artificial Sequence: Synthetic oligonucleotide
ucugcuaagucucuguugg

SEQ ID NO: 1586954 - RNA, 19 nt, Artificial Sequence
  Description of Artificial Sequence: Synthetic oligonucleotide
ucuaauggcauugacauag

SEQ ID NO: 1586955 - RNA, 19 nt, Artificial Sequence
  Description of Artificial Sequence: Synthetic oligonucleotide
gauaccaccagacagaguc

SEQ ID NO: 1586956 - RNA, 19 nt, Artificial Sequence
  Description of Artificial Sequence: Synthetic oligonucleotide
auuugauuagaucagucag

SEQ ID NO: 1586957 - RNA, 19 nt, Artificial Sequence
  Description of Artificial Sequence: Synthetic oligonucleotide
uuugauuugauuagaucag

SEQ ID NO: 1586958 - RNA, 19 nt, Artificial Sequence
  Description of Artificial Sequence: Synthetic oligonucleotide
agauguaugaagugaauuc

SEQ ID NO: 1586959 - RNA, 19 nt, Artificial Sequence
  Description of Artificial Sequence: Synthetic oligonucleotide
aaaccuacaaaguuagcug

SEQ ID NO: 1586960 - RNA, 19 nt, Artificial Sequence
  Description of Artificial Sequence: Synthetic oligonucleotide
cuuaauaaaggcaucucgc

SEQ ID NO: 1586961 - RNA, 19 nt, Artificial Sequence
  Description of Artificial Sequence: Synthetic oligonucleotide
cuuugauuugauuagauca

SEQ ID NO: 1586962 - RNA, 19 nt, Artificial Sequence
  Description of Artificial Sequence: Synthetic oligonucleotide
ugaagaaagagguaguaac

SEQ ID NO: 1586963 - RNA, 19 nt, Artificial Sequence
  Description of Artificial Sequence: Synthetic oligonucleotide
aauggccucacucucaaug

SEQ ID NO: 1586964 - RNA, 19 nt, Artificial Sequence
  Description of Artificial Sequence: Synthetic oligonucleotide
uuggaauaggugaagaugu

SEQ ID NO: 1586965 - RNA, 19 nt, Artificial Sequence
  Description of Artificial Sequence: Synthetic oligonucleotide
uacaaauucaccacuuagc

SEQ ID NO: 1586966 - RNA, 19 nt, Artificial Sequence
  Description of Artificial Sequence: Synthetic oligonucleotide
aaguuugagagauauaauu

SEQ ID NO: 1586967 - RNA, 19 nt, Artificial Sequence
  Description of Artificial Sequence: Synthetic oligonucleotide
uugacuaugauaccaccag

SEQ ID NO: 1586968 - RNA, 19 nt, Artificial Sequence
  Description of Artificial Sequence: Synthetic oligonucleotide
aaagguuggaaagaaaccu

SEQ ID NO: 1586969 - RNA, 19 nt, Artificial Sequence
  Description of Artificial Sequence: Synthetic oligonucleotide
uuugauuagaucagucagc

SEQ ID NO: 1586970 - RNA, 19 nt, Artificial Sequence
  Description of Artificial Sequence: Synthetic oligonucleotide
uuguucuacaaauucacca

SEQ ID NO: 1586971 - RNA, 19 nt, Artificial Sequence
  Description of Artificial Sequence: Synthetic oligonucleotide
aagacaaagcacuuucucu

SEQ ID NO: 1586972 - RNA, 19 nt, Artificial Sequence
  Description of Artificial Sequence: Synthetic oligonucleotide
agagguaguaaccaccagg

SEQ ID NO: 1586973 - RNA, 19 nt, Artificial Sequence
  Description of Artificial Sequence: Synthetic oligonucleotide
gauuagaucagucagcucu

SEQ ID NO: 1586974 - RNA, 19 nt, Artificial Sequence
  Description of Artificial Sequence: Synthetic oligonucleotide
aguuagcugagucaucuac

SEQ ID NO: 1586975 - RNA, 19 nt, Artificial Sequence
  Description of Artificial Sequence: Synthetic oligonucleotide
ucuaucugggccaaaguca

SEQ ID NO: 1586976 - RNA, 19 nt, Artificial Sequence
  Description of Artificial Sequence: Synthetic oligonucleotide
augacuuugauuugauuag

SEQ ID NO: 1586977 - RNA, 19 nt, Artificial Sequence
  Description of Artificial Sequence: Synthetic oligonucleotide
uaugauaccaccagacaga

SEQ ID NO: 1586978 - RNA, 19 nt, Artificial Sequence
  Description of Artificial Sequence: Synthetic oligonucleotide
uaaagauacuuccucugag

SEQ ID NO: 1586979 - RNA, 19 nt, Artificial Sequence
  Description of Artificial Sequence: Synthetic oligonucleotide
ugauagauuuuccauuagc

SEQ ID NO: 1586980 - RNA, 19 nt, Artificial Sequence
  Description of Artificial Sequence: Synthetic oligonucleotide
cacauaaugcaguuggucc

SEQ ID NO: 1586981 - RNA, 19 nt, Artificial Sequence
  Description of Artificial Sequence: Synthetic oligonucleotide
aagaaaccuacaaaguuag

SEQ ID NO: 1586982 - RNA, 19 nt, Artificial Sequence
  Description of Artificial Sequence: Synthetic oligonucleotide
ucugcuaugagcuguuccc

SEQ ID NO: 1586983 - RNA, 19 nt, Artificial Sequence
  Description of Artificial Sequence: Synthetic oligonucleotide
uuaauaaaggcaucucgcu

SEQ ID NO: 1586984 - RNA, 19 nt, Artificial Sequence
  Description of Artificial Sequence: Synthetic oligonucleotide
uacucaucagcagugauag

SEQ ID NO: 1586985 - RNA, 19 nt, Artificial Sequence
  Description of Artificial Sequence: Synthetic oligonucleotide
uuagaagaguuucagccac

SEQ ID NO: 1586986 - RNA, 19 nt, Artificial Sequence
  Description of Artificial Sequence: Synthetic oligonucleotide
auacguuccacuucaaucu

SEQ ID NO: 1586987 - RNA, 19 nt, Artificial Sequence
  Description of Artificial Sequence: Synthetic oligonucleotide
cuaauugucucuaguuugg

SEQ ID NO: 1586988 - RNA, 19 nt, Artificial Sequence
  Description of Artificial Sequence: Synthetic oligonucleotide
aaaguuagcugagucaucu

SEQ ID NO: 1586989 - RNA, 19 nt, Artificial Sequence
  Description of Artificial Sequence: Synthetic oligonucleotide
uuuagaagaguuucagcca

SEQ ID NO: 1586990 - RNA, 19 nt, Artificial Sequence
  Description of Artificial Sequence: Synthetic oligonucleotide
agaaagagguaguaaccac

SEQ ID NO: 1586991 - RNA, 19 nt, Artificial Sequence
  Description of Artificial Sequence: Synthetic oligonucleotide
uguucuacaaauucaccac

SEQ ID NO: 1586992 - RNA, 19 nt, Artificial Sequence
  Description of Artificial Sequence: Synthetic oligonucleotide
uucacuuuucuuaucagau

SEQ ID NO: 1586993 - RNA, 19 nt, Artificial Sequence
  Description of Artificial Sequence: Synthetic oligonucleotide
acuuugauuugauuagauc

SEQ ID NO: 1586994 - RNA, 19 nt, Artificial Sequence
  Description of Artificial Sequence: Synthetic oligonucleotide
acgagcugaugacacaucc

SEQ ID NO: 1586995 - RNA, 19 nt, Artificial Sequence
  Description of Artificial Sequence: Synthetic oligonucleotide
agagucuugacauuggaau

SEQ ID NO: 1586996 - RNA, 19 nt, Artificial Sequence
  Description of Artificial Sequence: Synthetic oligonucleotide
aaccuacaaaguuagcuga

SEQ ID NO: 1586997 - RNA, 19 nt, Artificial Sequence
  Description of Artificial Sequence: Synthetic oligonucleotide
uaugaagugaauucugcaa

SEQ ID NO: 1586998 - RNA, 19 nt, Artificial Sequence
  Description of Artificial Sequence: Synthetic oligonucleotide
uuagcugagucaucuaccc

SEQ ID NO: 1586999 - RNA, 19 nt, Artificial Sequence
  Description of Artificial Sequence: Synthetic oligonucleotide
uaguucuccacuucuaaug

SEQ ID NO: 1587000 - RNA, 19 nt, Artificial Sequence
  Description of Artificial Sequence: Synthetic oligonucleotide
ucugcucucguucugaaau

SEQ ID NO: 1587001 - RNA, 19 nt, Artificial Sequence
  Description of Artificial Sequence: Synthetic oligonucleotide
ucuagcuccagugagaaau

SEQ ID NO: 1587002 - RNA, 19 nt, Artificial Sequence
  Description of Artificial Sequence: Synthetic oligonucleotide
ugaaauccuuccuugagaa

SEQ ID NO: 1587003 - RNA, 19 nt, Artificial Sequence
  Description of Artificial Sequence: Synthetic oligonucleotide
cuugacauuggaauaggug

SEQ ID NO: 1587004 - RNA, 19 nt, Artificial Sequence
  Description of Artificial Sequence: Synthetic oligonucleotide
uugaucuacauccuugaaa

SEQ ID NO: 1587005 - RNA, 19 nt, Artificial Sequence
  Description of Artificial Sequence: Synthetic oligonucleotide
agccacgucaucuuuggac

SEQ ID NO: 1587006 - RNA, 19 nt, Artificial Sequence
  Description of Artificial Sequence: Synthetic oligonucleotide
cuucauagugcucaauggc

SEQ ID NO: 1587007 - RNA, 19 nt, Artificial Sequence
  Description of Artificial Sequence: Synthetic oligonucleotide
agaacuuccugaugcagag

SEQ ID NO: 1587008 - RNA, 19 nt, Artificial Sequence
  Description of Artificial Sequence: Synthetic oligonucleotide
gaagaaagagguaguaacc

SEQ ID NO: 1587009 - RNA, 19 nt, Artificial Sequence
  Description of Artificial Sequence: Synthetic oligonucleotide
aauccuuccuugagaagcc

SEQ ID NO: 1587010 - RNA, 19 nt, Artificial Sequence
  Description of Artificial Sequence: Synthetic oligonucleotide
uguugguagcuucagcagc

SEQ ID NO: 1587011 - RNA, 19 nt, Artificial Sequence
  Description of Artificial Sequence: Synthetic oligonucleotide
uuuagaaaauguccccugu

SEQ ID NO: 1587012 - RNA, 19 nt, Artificial Sequence
  Description of Artificial Sequence: Synthetic oligonucleotide
uuggaaagaaaccuacaaa

SEQ ID NO: 1587013 - RNA, 19 nt, Artificial Sequence
  Description of Artificial Sequence: Synthetic oligonucleotide
gaauaggugaagauguaug

SEQ ID NO: 1587014 - RNA, 19 nt, Artificial Sequence
  Description of Artificial Sequence: Synthetic oligonucleotide
aaagaaaccuacaaaguua

SEQ ID NO: 1587015 - RNA, 19 nt, Artificial Sequence
  Description of Artificial Sequence: Synthetic oligonucleotide
uucgcuaccagcugguccc

SEQ ID NO: 1587016 - RNA, 19 nt, Artificial Sequence
  Description of Artificial Sequence: Synthetic oligonucleotide
ucuuuagaagaguuucagc

SEQ ID NO: 1587017 - RNA, 19 nt, Artificial Sequence
  Description of Artificial Sequence: Synthetic oligonucleotide
gaaagagguaguaaccacc

SEQ ID NO: 1587018 - RNA, 19 nt, Artificial Sequence
  Description of Artificial Sequence: Synthetic oligonucleotide
uccacuucaaucucccuug

SEQ ID NO: 1587019 - RNA, 19 nt, Artificial Sequence
  Description of Artificial Sequence: Synthetic oligonucleotide
cuucaaucucccuugcugc

SEQ ID NO: 1587020 - RNA, 19 nt, Artificial Sequence
  Description of Artificial Sequence: Synthetic oligonucleotide
guaaccaccagguuuagaa

SEQ ID NO: 1587021 - RNA, 19 nt, Artificial Sequence
  Description of Artificial Sequence: Synthetic oligonucleotide
ucagggucaacgaauguuc

SEQ ID NO: 1587022 - RNA, 19 nt, Artificial Sequence
  Description of Artificial Sequence: Synthetic oligonucleotide
auaaaggcaucucgcuucg

SEQ ID NO: 1587023 - RNA, 19 nt, Artificial Sequence
  Description of Artificial Sequence: Synthetic oligonucleotide
ucaucuaccccacucugcu

SEQ ID NO: 1587024 - RNA, 19 nt, Artificial Sequence
  Description of Artificial Sequence: Synthetic oligonucleotide
guaaacguggcccauugac

SEQ ID NO: 1587025 - RNA, 19 nt, Artificial Sequence
  Description of Artificial Sequence: Synthetic oligonucleotide
ucagugagcuguuucacgu

SEQ ID NO: 1587026 - RNA, 19 nt, Artificial Sequence
  Description of Artificial Sequence: Synthetic oligonucleotide
agugauagauuuuccauua

SEQ ID NO: 1587027 - RNA, 19 nt, Artificial Sequence
  Description of Artificial Sequence: Synthetic oligonucleotide
ucagccacgucaucuuugg

SEQ ID NO: 1587028 - RNA, 19 nt, Artificial Sequence
  Description of Artificial Sequence: Synthetic oligonucleotide
cuuuauacguuccacuuca

SEQ ID NO: 1587029 - RNA, 19 nt, Artificial Sequence
  Description of Artificial Sequence: Synthetic oligonucleotide
aaacguggcccauugacua

SEQ ID NO: 1587030 - RNA, 19 nt, Artificial Sequence
  Description of Artificial Sequence: Synthetic oligonucleotide
gaaaauguccccuguuuga

SEQ ID NO: 1587031 - RNA, 19 nt, Artificial Sequence
  Description of Artificial Sequence: Synthetic oligonucleotide
aaagagguaguaaccacca

SEQ ID NO: 1587032 - RNA, 19 nt, Artificial Sequence
  Description of Artificial Sequence: Synthetic oligonucleotide
cuuguucuacaaauucacc

SEQ ID NO: 1587033 - RNA, 19 nt, Artificial Sequence
  Description of Artificial Sequence: Synthetic oligonucleotide
uaaacguggcccauugacu

SEQ ID NO: 1587034 - RNA, 19 nt, Artificial Sequence
  Description of Artificial Sequence: Synthetic oligonucleotide
acauaaugcaguuggucca

SEQ ID NO: 1587035 - RNA, 19 nt, Artificial Sequence
  Description of Artificial Sequence: Synthetic oligonucleotide
ugucuuuagaagaguuuca

SEQ ID NO: 1587036 - RNA, 19 nt, Artificial Sequence
  Description of Artificial Sequence: Synthetic oligonucleotide
uuccuuaaguuugagagau

SEQ ID NO: 1587037 - RNA, 19 nt, Artificial Sequence
  Description of Artificial Sequence: Synthetic oligonucleotide
aauguccccuguuugacuu

SEQ ID NO: 1587038 - RNA, 19 nt, Artificial Sequence
  Description of Artificial Sequence: Synthetic oligonucleotide
agcuucagccuuuauacgu

SEQ ID NO: 1587039 - RNA, 19 nt, Artificial Sequence
  Description of Artificial Sequence: Synthetic oligonucleotide
ugguaaagauacuuccucu

SEQ ID NO: 1587040 - RNA, 19 nt, Artificial Sequence
  Description of Artificial Sequence: Synthetic oligonucleotide
ugacugaucugucuuuaga

SEQ ID NO: 1587041 - RNA, 19 nt, Artificial Sequence
  Description of Artificial Sequence: Synthetic oligonucleotide
guuuagaaaauguccccug

SEQ ID NO: 1587042 - RNA, 19 nt, Artificial Sequence
  Description of Artificial Sequence: Synthetic oligonucleotide
agucuugacauuggaauag

SEQ ID NO: 1587043 - RNA, 19 nt, Artificial Sequence
  Description of Artificial Sequence: Synthetic oligonucleotide
auggccucacucucaaugg

SEQ ID NO: 1587044 - RNA, 19 nt, Artificial Sequence
  Description of Artificial Sequence: Synthetic oligonucleotide
ucucuaauugucucuaguu

SEQ ID NO: 1587045 - RNA, 19 nt, Artificial Sequence
  Description of Artificial Sequence: Synthetic oligonucleotide
cuccugguaacucuuuucc

SEQ ID NO: 1587046 - RNA, 19 nt, Artificial Sequence
  Description of Artificial Sequence: Synthetic oligonucleotide
aagucaggacagcauucuc

SEQ ID NO: 1587047 - RNA, 19 nt, Artificial Sequence
  Description of Artificial Sequence: Synthetic oligonucleotide
ugagcaacgagcugaugac

SEQ ID NO: 1587048 - RNA, 19 nt, Artificial Sequence
  Description of Artificial Sequence: Synthetic oligonucleotide
acuaugauaccaccagaca

SEQ ID NO: 1587049 - RNA, 19 nt, Artificial Sequence
  Description of Artificial Sequence: Synthetic oligonucleotide
uagaaaauguccccuguuu

SEQ ID NO: 1587050 - RNA, 19 nt, Artificial Sequence
  Description of Artificial Sequence: Synthetic oligonucleotide
ucucgcuucgcuaccagcu

SEQ ID NO: 1587051 - RNA, 19 nt, Artificial Sequence
  Description of Artificial Sequence: Synthetic oligonucleotide
gacuaugauaccaccagac

SEQ ID NO: 1587052 - RNA, 19 nt, Artificial Sequence
  Description of Artificial Sequence: Synthetic oligonucleotide
gauagauuuuccauuagcu

SEQ ID NO: 1587053 - RNA, 19 nt, Artificial Sequence
  Description of Artificial Sequence: Synthetic oligonucleotide
agcagugauagauuuucca

SEQ ID NO: 1587054 - RNA, 19 nt, Artificial Sequence
  Description of Artificial Sequence: Synthetic oligonucleotide
acaaaguuagcugagucau

SEQ ID NO: 1587055 - RNA, 19 nt, Artificial Sequence
  Description of Artificial Sequence: Synthetic oligonucleotide
aagauguaugaagugaauu

SEQ ID NO: 1587056 - RNA, 19 nt, Artificial Sequence
  Description of Artificial Sequence: Synthetic oligonucleotide
gaaaccuacaaaguuagcu

SEQ ID NO: 1587057 - RNA, 19 nt, Artificial Sequence
  Description of Artificial Sequence: Synthetic oligonucleotide
cauugacuaugauaccacc

SEQ ID NO: 1587058 - RNA, 19 nt, Artificial Sequence
  Description of Artificial Sequence: Synthetic oligonucleotide
ugaaguuuucugcucucgu

SEQ ID NO: 1587059 - RNA, 19 nt, Artificial Sequence
  Description of Artificial Sequence: Synthetic oligonucleotide
aaauauccuccagcaaauc

SEQ ID NO: 1587060 - RNA, 19 nt, Artificial Sequence
  Description of Artificial Sequence: Synthetic oligonucleotide
gaaagaaaccuacaaaguu

SEQ ID NO: 1587061 - RNA, 19 nt, Artificial Sequence
  Description of Artificial Sequence: Synthetic oligonucleotide
uagaagaguuucagccacg

SEQ ID NO: 1587062 - RNA, 19 nt, Artificial Sequence
  Description of Artificial Sequence: Synthetic oligonucleotide
agcuucuagcuccagugag

SEQ ID NO: 1587063 - RNA, 19 nt, Artificial Sequence
  Description of Artificial Sequence: Synthetic oligonucleotide
uuuuaugcucucgaucucu

SEQ ID NO: 1587064 - RNA, 19 nt, Artificial Sequence
  Description of Artificial Sequence: Synthetic oligonucleotide
guuccagguacucaucagc

SEQ ID NO: 1587065 - RNA, 19 nt, Artificial Sequence
  Description of Artificial Sequence: Synthetic oligonucleotide
caucucuucugccuggagc

SEQ ID NO: 1587066 - RNA, 19 nt, Artificial Sequence
  Description of Artificial Sequence: Synthetic oligonucleotide
aaauguccccuguuugacu

SEQ ID NO: 1587067 - RNA, 19 nt, Artificial Sequence
  Description of Artificial Sequence: Synthetic oligonucleotide
ugacuaugauaccaccaga

SEQ ID NO: 1587068 - RNA, 19 nt, Artificial Sequence
  Description of Artificial Sequence: Synthetic oligonucleotide
cucguucugaaauccuucc

SEQ ID NO: 1587069 - RNA, 19 nt, Artificial Sequence
  Description of Artificial Sequence: Synthetic oligonucleotide
ucuuaaugaagaccucaau

SEQ ID NO: 1587070 - RNA, 19 nt, Artificial Sequence
  Description of Artificial Sequence: Synthetic oligonucleotide
aauugucucuaguuuggua

SEQ ID NO: 1587071 - RNA, 19 nt, Artificial Sequence
  Description of Artificial Sequence: Synthetic oligonucleotide
cugucuuuagaagaguuuc

SEQ ID NO: 1587072 - RNA, 19 nt, Artificial Sequence
  Description of Artificial Sequence: Synthetic oligonucleotide
ugagugacugaucugucuu

SEQ ID NO: 1587073 - RNA, 19 nt, Artificial Sequence
  Description of Artificial Sequence: Synthetic oligonucleotide
aggcaucucgcuucgcuac

SEQ ID NO: 1587074 - RNA, 19 nt, Artificial Sequence
  Description of Artificial Sequence: Synthetic oligonucleotide
ucuacaaauucaccacuua

SEQ ID NO: 1587075 - RNA, 19 nt, Artificial Sequence
  Description of Artificial Sequence: Synthetic oligonucleotide
cuaagucucuguugguagc

SEQ ID NO: 1587076 - RNA, 19 nt, Artificial Sequence
  Description of Artificial Sequence: Synthetic oligonucleotide
cugaucugucuuuagaaga

SEQ ID NO: 1587077 - RNA, 19 nt, Artificial Sequence
  Description of Artificial Sequence: Synthetic oligonucleotide
gguaaagauacuuccucug

SEQ ID NO: 1587078 - RNA, 19 nt, Artificial Sequence
  Description of Artificial Sequence: Synthetic oligonucleotide
cucuaucugggccaaaguc

SEQ ID NO: 1587079 - RNA, 19 nt, Artificial Sequence
  Description of Artificial Sequence: Synthetic oligonucleotide
uucucuaucugggccaaag

SEQ ID NO: 1587080 - RNA, 19 nt, Artificial Sequence
  Description of Artificial Sequence: Synthetic oligonucleotide
aagagguaguaaccaccag

SEQ ID NO: 1587081 - RNA, 19 nt, Artificial Sequence
  Description of Artificial Sequence: Synthetic oligonucleotide
aucuaccccacucugcuca

SEQ ID NO: 1587082 - RNA, 19 nt, Artificial Sequence
  Description of Artificial Sequence: Synthetic oligonucleotide
cucagugagcuguuucacg

SEQ ID NO: 1587083 - RNA, 19 nt, Artificial Sequence
  Description of Artificial Sequence: Synthetic oligonucleotide
agcaacgagcugaugacac

SEQ ID NO: 1587084 - RNA, 19 nt, Artificial Sequence
  Description of Artificial Sequence: Synthetic oligonucleotide
uuagaaaauguccccuguu

SEQ ID NO: 1587085 - RNA, 19 nt, Artificial Sequence
  Description of Artificial Sequence: Synthetic oligonucleotide
aagaccucaauggccucac

SEQ ID NO: 1587086 - RNA, 19 nt, Artificial Sequence
  Description of Artificial Sequence: Synthetic oligonucleotide
uuugaagaaagagguagua

SEQ ID NO: 1587087 - RNA, 19 nt, Artificial Sequence
  Description of Artificial Sequence: Synthetic oligonucleotide
uuuugcuucucugcuaagu

SEQ ID NO: 1587088 - RNA, 19 nt, Artificial Sequence
  Description of Artificial Sequence: Synthetic oligonucleotide
ugcaggguaguucuccacu

SEQ ID NO: 1587089 - RNA, 19 nt, Artificial Sequence
  Description of Artificial Sequence: Synthetic oligonucleotide
acuucuaauggcauugaca

SEQ ID NO: 1587090 - RNA, 19 nt, Artificial Sequence
  Description of Artificial Sequence: Synthetic oligonucleotide
uuauacguuccacuucaau

SEQ ID NO: 1587091 - RNA, 19 nt, Artificial Sequence
  Description of Artificial Sequence: Synthetic oligonucleotide
aguuugagagauauaauuu

SEQ ID NO: 1587092 - RNA, 19 nt, Artificial Sequence
  Description of Artificial Sequence: Synthetic oligonucleotide
ucucguucugaaauccuuc

SEQ ID NO: 1587093 - RNA, 19 nt, Artificial Sequence
  Description of Artificial Sequence: Synthetic oligonucleotide
ucuugacauuggaauaggu

SEQ ID NO: 1587094 - RNA, 19 nt, Artificial Sequence
  Description of Artificial Sequence: Synthetic oligonucleotide
cugagcaacgagcugauga

SEQ ID NO: 1587095 - RNA, 19 nt, Artificial Sequence
  Description of Artificial Sequence: Synthetic oligonucleotide
cucuuggugaaguuuucug

SEQ ID NO: 1587096 - RNA, 19 nt, Artificial Sequence
  Description of Artificial Sequence: Synthetic oligonucleotide
ucaacgaauguuccaggua

SEQ ID NO: 1587097 - RNA, 19 nt, Artificial Sequence
  Description of Artificial Sequence: Synthetic oligonucleotide
ucugucuuuagaagaguuu

SEQ ID NO: 1587098 - RNA, 19 nt, Artificial Sequence
  Description of Artificial Sequence: Synthetic oligonucleotide
uucagccacgucaucuuug

SEQ ID NO: 1587099 - RNA, 19 nt, Artificial Sequence
  Description of Artificial Sequence: Synthetic oligonucleotide
caggugaugacuuugauuu

SEQ ID NO: 1587100 - RNA, 19 nt, Artificial Sequence
  Description of Artificial Sequence: Synthetic oligonucleotide
aucucgcuucgcuaccagc

SEQ ID NO: 1587101 - RNA, 19 nt, Artificial Sequence
  Description of Artificial Sequence: Synthetic oligonucleotide
ucgcuucgcuaccagcugg

SEQ ID NO: 1587102 - RNA, 19 nt, Artificial Sequence
  Description of Artificial Sequence: Synthetic oligonucleotide
uucagccuuuauacguucc

SEQ ID NO: 1587103 - RNA, 19 nt, Artificial Sequence
  Description of Artificial Sequence: Synthetic oligonucleotide
gauguaugaagugaauucu

SEQ ID NO: 1587104 - RNA, 19 nt, Artificial Sequence
  Description of Artificial Sequence: Synthetic oligonucleotide
uuugaucuacauccuugaa

SEQ ID NO: 1587105 - RNA, 19 nt, Artificial Sequence
  Description of Artificial Sequence: Synthetic oligonucleotide
guuagcugagucaucuacc

SEQ ID NO: 1587106 - RNA, 19 nt, Artificial Sequence
  Description of Artificial Sequence: Synthetic oligonucleotide
uugauuugauuagaucagu

SEQ ID NO: 1587107 - RNA, 19 nt, Artificial Sequence
  Description of Artificial Sequence: Synthetic oligonucleotide
ggaacuuuugaucuacauc

SEQ ID NO: 1587108 - RNA, 19 nt, Artificial Sequence
  Description of Artificial Sequence: Synthetic oligonucleotide
agucaucuaccccacucug

SEQ ID NO: 1587109 - RNA, 19 nt, Artificial Sequence
  Description of Artificial Sequence: Synthetic oligonucleotide
gaaccuucugguucaucug

SEQ ID NO: 1587110 - RNA, 19 nt, Artificial Sequence
  Description of Artificial Sequence: Synthetic oligonucleotide
caaagucaggacagcauuc

SEQ ID NO: 1587111 - RNA, 19 nt, Artificial Sequence
  Description of Artificial Sequence: Synthetic oligonucleotide
auugacuaugauaccacca

SEQ ID NO: 1587112 - RNA, 19 nt, Artificial Sequence
  Description of Artificial Sequence: Synthetic oligonucleotide
ucaauggccucacucucaa

SEQ ID NO: 1587113 - RNA, 19 nt, Artificial Sequence
  Description of Artificial Sequence: Synthetic oligonucleotide
cuguugguagcuucagcag

SEQ ID NO: 1587114 - RNA, 19 nt, Artificial Sequence
  Description of Artificial Sequence: Synthetic oligonucleotide
uccccuaauuucuucugga

SEQ ID NO: 1587115 - RNA, 19 nt, Artificial Sequence
  Description of Artificial Sequence: Synthetic oligonucleotide
gcaaaucugagcaacgagc

SEQ ID NO: 1587116 - RNA, 19 nt, Artificial Sequence
  Description of Artificial Sequence: Synthetic oligonucleotide
cugguaacucuuuuccuuc

SEQ ID NO: 1587117 - RNA, 19 nt, Artificial Sequence
  Description of Artificial Sequence: Synthetic oligonucleotide
ucugucacauaaugcaguu

SEQ ID NO: 1587118 - RNA, 19 nt, Artificial Sequence
  Description of Artificial Sequence: Synthetic oligonucleotide
gcuaagucucuguugguag

SEQ ID NO: 1587119 - RNA, 19 nt, Artificial Sequence
  Description of Artificial Sequence: Synthetic oligonucleotide
cuucgcuaccagcuggucc

SEQ ID NO: 1587120 - RNA, 19 nt, Artificial Sequence
  Description of Artificial Sequence: Synthetic oligonucleotide
aauggccuuuugcacugca

SEQ ID NO: 1587121 - RNA, 19 nt, Artificial Sequence
  Description of Artificial Sequence: Synthetic oligonucleotide
ugacuuugauuugauuaga

SEQ ID NO: 1587122 - RNA, 19 nt, Artificial Sequence
  Description of Artificial Sequence: Synthetic oligonucleotide
aggugaagauguaugaagu

SEQ ID NO: 1587123 - RNA, 19 nt, Artificial Sequence
  Description of Artificial Sequence: Synthetic oligonucleotide
guccccuaauuucuucugg

SEQ ID NO: 1587124 - RNA, 19 nt, Artificial Sequence
  Description of Artificial Sequence: Synthetic oligonucleotide
ggugaagauguaugaagug

SEQ ID NO: 1587125 - RNA, 19 nt, Artificial Sequence
  Description of Artificial Sequence: Synthetic oligonucleotide
aggguaguucuccacuucu

SEQ ID NO: 1587126 - RNA, 19 nt, Artificial Sequence
  Description of Artificial Sequence: Synthetic oligonucleotide
ugggaagaacuuccugaug

SEQ ID NO: 1587127 - RNA, 19 nt, Artificial Sequence
  Description of Artificial Sequence: Synthetic oligonucleotide
ugcucucguucugaaaucc

SEQ ID NO: 1587128 - RNA, 19 nt, Artificial Sequence
  Description of Artificial Sequence: Synthetic oligonucleotide
ucugguucaucuguucuuc

SEQ ID NO: 1587129 - RNA, 19 nt, Artificial Sequence
  Description of Artificial Sequence: Synthetic oligonucleotide
ucguucugaaauccuuccu

SEQ ID NO: 1587130 - RNA, 19 nt, Artificial Sequence
  Description of Artificial Sequence: Synthetic oligonucleotide
gugauagauuuuccauuag

SEQ ID NO: 1587131 - RNA, 19 nt, Artificial Sequence
  Description of Artificial Sequence: Synthetic oligonucleotide
uguuucacgugcuccuggu

SEQ ID NO: 1587132 - RNA, 19 nt, Artificial Sequence
  Description of Artificial Sequence: Synthetic oligonucleotide
uguaaacguggcccauuga

SEQ ID NO: 1587133 - RNA, 19 nt, Artificial Sequence
  Description of Artificial Sequence: Synthetic oligonucleotide
cauucuccaugcaggguag

SEQ ID NO: 1587134 - RNA, 19 nt, Artificial Sequence
  Description of Artificial Sequence: Synthetic oligonucleotide
uggcccauugacuaugaua

SEQ ID NO: 1587135 - RNA, 19 nt, Artificial Sequence
  Description of Artificial Sequence: Synthetic oligonucleotide
guuccuuaaguuugagaga

SEQ ID NO: 1587136 - RNA, 19 nt, Artificial Sequence
  Description of Artificial Sequence: Synthetic oligonucleotide
uuaugcucucgaucucuug

SEQ ID NO: 1587137 - RNA, 19 nt, Artificial Sequence
  Description of Artificial Sequence: Synthetic oligonucleotide
ugcagcugaguucucuauc

SEQ ID NO: 1587138 - RNA, 19 nt, Artificial Sequence
  Description of Artificial Sequence: Synthetic oligonucleotide
gugaaguuuucugcucucg

SEQ ID NO: 1587139 - RNA, 19 nt, Artificial Sequence
  Description of Artificial Sequence: Synthetic oligonucleotide
uaaccaccagguuuagaaa

SEQ ID NO: 1587140 - RNA, 19 nt, Artificial Sequence
  Description of Artificial Sequence: Synthetic oligonucleotide
ugcucucgaucucuuggug

SEQ ID NO: 1587141 - RNA, 19 nt, Artificial Sequence
  Description of Artificial Sequence: Synthetic oligonucleotide
cucugcuaagucucuguug

SEQ ID NO: 1587142 - RNA, 19 nt, Artificial Sequence
  Description of Artificial Sequence: Synthetic oligonucleotide
aacuuuugaucuacauccu

SEQ ID NO: 1587143 - RNA, 19 nt, Artificial Sequence
  Description of Artificial Sequence: Synthetic oligonucleotide
acgaauguuccagguacuc

SEQ ID NO: 1587144 - RNA, 19 nt, Artificial Sequence
  Description of Artificial Sequence: Synthetic oligonucleotide
cugagcaggccugucaaag

SEQ ID NO: 1587145 - RNA, 19 nt, Artificial Sequence
  Description of Artificial Sequence: Synthetic oligonucleotide
cagggucaacgaauguucc

SEQ ID NO: 1587146 - RNA, 19 nt, Artificial Sequence
  Description of Artificial Sequence: Synthetic oligonucleotide
ugugagugacugaucuguc

SEQ ID NO: 1587147 - RNA, 19 nt, Artificial Sequence
  Description of Artificial Sequence: Synthetic oligonucleotide
uucacgugcuccugguaac

SEQ ID NO: 1587148 - RNA, 19 nt, Artificial Sequence
  Description of Artificial Sequence: Synthetic oligonucleotide
caaaucugagcaacgagcu

SEQ ID NO: 1587149 - RNA, 19 nt, Artificial Sequence
  Description of Artificial Sequence: Synthetic oligonucleotide
guaguaaccaccagguuua

SEQ ID NO: 1587150 - RNA, 19 nt, Artificial Sequence
  Description of Artificial Sequence: Synthetic oligonucleotide
caccacuuagcucuucuuc

SEQ ID NO: 1587151 - RNA, 19 nt, Artificial Sequence
  Description of Artificial Sequence: Synthetic oligonucleotide
gagucuugacauuggaaua

SEQ ID NO: 1587152 - RNA, 19 nt, Artificial Sequence
  Description of Artificial Sequence: Synthetic oligonucleotide
uccugguaacucuuuuccu

SEQ ID NO: 1587153 - RNA, 19 nt, Artificial Sequence
  Description of Artificial Sequence: Synthetic oligonucleotide
uuuaugcucucgaucucuu

SEQ ID NO: 1587154 - RNA, 19 nt, Artificial Sequence
  Description of Artificial Sequence: Synthetic oligonucleotide
ugaugcagagccgaggcuu

SEQ ID NO: 1587155 - RNA, 19 nt, Artificial Sequence
  Description of Artificial Sequence: Synthetic oligonucleotide
cagcuucagccuuuauacg

SEQ ID NO: 1587156 - RNA, 19 nt, Artificial Sequence
  Description of Artificial Sequence: Synthetic oligonucleotide
ggcuuguuaaaguuuucac

SEQ ID NO: 1587157 - RNA, 19 nt, Artificial Sequence
  Description of Artificial Sequence: Synthetic oligonucleotide
ugcuaugagcuguucccgu

SEQ ID NO: 1587158 - RNA, 19 nt, Artificial Sequence
  Description of Artificial Sequence: Synthetic oligonucleotide
auaggugaagauguaugaa

SEQ ID NO: 1587159 - RNA, 19 nt, Artificial Sequence
  Description of Artificial Sequence: Synthetic oligonucleotide
gagccgaggcuuguuaaag

SEQ ID NO: 1587160 - RNA, 19 nt, Artificial Sequence
  Description of Artificial Sequence: Synthetic oligonucleotide
aacgagcugaugacacauc

SEQ ID NO: 1587161 - RNA, 19 nt, Artificial Sequence
  Description of Artificial Sequence: Synthetic oligonucleotide
uuuauacguuccacuucaa

SEQ ID NO: 1587162 - RNA, 19 nt, Artificial Sequence
  Description of Artificial Sequence: Synthetic oligonucleotide
ugguccauggccugcuggu

SEQ ID NO: 1587163 - RNA, 19 nt, Artificial Sequence
  Description of Artificial Sequence: Synthetic oligonucleotide
ucucugcuaagucucuguu

SEQ ID NO: 1587164 - RNA, 19 nt, Artificial Sequence
  Description of Artificial Sequence: Synthetic oligonucleotide
gagguaguaaccaccaggu

SEQ ID NO: 1587165 - RNA, 19 nt, Artificial Sequence
  Description of Artificial Sequence: Synthetic oligonucleotide
guauggugcauuucccaga

SEQ ID NO: 1587166 - RNA, 19 nt, Artificial Sequence
  Description of Artificial Sequence: Synthetic oligonucleotide
agaagaguuucagccacgu

SEQ ID NO: 1587167 - RNA, 19 nt, Artificial Sequence
  Description of Artificial Sequence: Synthetic oligonucleotide
cucuaguuugguaaagaua

SEQ ID NO: 1587168 - RNA, 19 nt, Artificial Sequence
  Description of Artificial Sequence: Synthetic oligonucleotide
gugacugaucugucuuuag

SEQ ID NO: 1587169 - RNA, 19 nt, Artificial Sequence
  Description of Artificial Sequence: Synthetic oligonucleotide
ggucaacgaauguuccagg

SEQ ID NO: 1587170 - RNA, 19 nt, Artificial Sequence
  Description of Artificial Sequence: Synthetic oligonucleotide
agggucaacgaauguucca

SEQ ID NO: 1587171 - RNA, 19 nt, Artificial Sequence
  Description of Artificial Sequence: Synthetic oligonucleotide
gaucuacauccuugaaaga

SEQ ID NO: 1587172 - RNA, 19 nt, Artificial Sequence
  Description of Artificial Sequence: Synthetic oligonucleotide
ugcuaagucucuguuggua

SEQ ID NO: 1587173 - RNA, 19 nt, Artificial Sequence
  Description of Artificial Sequence: Synthetic oligonucleotide
aacgaauguuccagguacu

SEQ ID NO: 1587174 - RNA, 19 nt, Artificial Sequence
  Description of Artificial Sequence: Synthetic oligonucleotide
gggucaacgaauguuccag

SEQ ID NO: 1587175 - RNA, 19 nt, Artificial Sequence
  Description of Artificial Sequence: Synthetic oligonucleotide
cugcuaugagcuguucccg

SEQ ID NO: 1587176 - RNA, 19 nt, Artificial Sequence
  Description of Artificial Sequence: Synthetic oligonucleotide
augcucucgaucucuuggu

SEQ ID NO: 1587177 - RNA, 19 nt, Artificial Sequence
  Description of Artificial Sequence: Synthetic oligonucleotide
gagcugaugacacauccau

SEQ ID NO: 1587178 - RNA, 19 nt, Artificial Sequence
  Description of Artificial Sequence: Synthetic oligonucleotide
aacguggcccauugacuau

SEQ ID NO: 1587179 - RNA, 19 nt, Artificial Sequence
  Description of Artificial Sequence: Synthetic oligonucleotide
gguaguaaccaccagguuu

SEQ ID NO: 1587180 - RNA, 19 nt, Artificial Sequence
  Description of Artificial Sequence: Synthetic oligonucleotide
cuagcuccagugagaaauc

SEQ ID NO: 1587181 - RNA, 19 nt, Artificial Sequence
  Description of Artificial Sequence: Synthetic oligonucleotide
aagccguuccuguuccuua

SEQ ID NO: 1587182 - RNA, 19 nt, Artificial Sequence
  Description of Artificial Sequence: Synthetic oligonucleotide
caaaguuagcugagucauc

SEQ ID NO: 1587183 - RNA, 19 nt, Artificial Sequence
  Description of Artificial Sequence: Synthetic oligonucleotide
gaugcagagccgaggcuug

SEQ ID NO: 1587184 - RNA, 19 nt, Artificial Sequence
  Description of Artificial Sequence: Synthetic oligonucleotide
accuacaaaguuagcugag

SEQ ID NO: 1587185 - RNA, 19 nt, Artificial Sequence
  Description of Artificial Sequence: Synthetic oligonucleotide
ugauuagaucagucagcuc

SEQ ID NO: 1587186 - RNA, 19 nt, Artificial Sequence
  Description of Artificial Sequence: Synthetic oligonucleotide
ccugaugcagagccgaggc

SEQ ID NO: 1587187 - RNA, 19 nt, Artificial Sequence
  Description of Artificial Sequence: Synthetic oligonucleotide
ugaugacuuugauuugauu

SEQ ID NO: 1587188 - RNA, 19 nt, Artificial Sequence
  Description of Artificial Sequence: Synthetic oligonucleotide
cacuucuaauggcauugac

SEQ ID NO: 1587189 - RNA, 19 nt, Artificial Sequence
  Description of Artificial Sequence: Synthetic oligonucleotide
cauugacauaggucagcac

SEQ ID NO: 1587190 - RNA, 19 nt, Artificial Sequence
  Description of Artificial Sequence: Synthetic oligonucleotide
agcuccagugagaaaucuc

SEQ ID NO: 1587191 - RNA, 19 nt, Artificial Sequence
  Description of Artificial Sequence: Synthetic oligonucleotide
ccagcaaaucugagcaacg

SEQ ID NO: 1587192 - RNA, 19 nt, Artificial Sequence
  Description of Artificial Sequence: Synthetic oligonucleotide
uucuaauggcauugacaua

SEQ ID NO: 1587193 - RNA, 19 nt, Artificial Sequence
  Description of Artificial Sequence: Synthetic oligonucleotide
gaagaguuucagccacguc

SEQ ID NO: 1587194 - RNA, 19 nt, Artificial Sequence
  Description of Artificial Sequence: Synthetic oligonucleotide
ccauugacuaugauaccac

SEQ ID NO: 1587195 - RNA, 19 nt, Artificial Sequence
  Description of Artificial Sequence: Synthetic oligonucleotide
cuguucccguuccugcugc

SEQ ID NO: 1587196 - RNA, 19 nt, Artificial Sequence
  Description of Artificial Sequence: Synthetic oligonucleotide
uucuggaacuuuugaucua

SEQ ID NO: 1587197 - RNA, 19 nt, Artificial Sequence
  Description of Artificial Sequence: Synthetic oligonucleotide
cucugugagugacugaucu

SEQ ID NO: 1587198 - RNA, 19 nt, Artificial Sequence
  Description of Artificial Sequence: Synthetic oligonucleotide
acgugcuccugguaacucu

SEQ ID NO: 1587199 - RNA, 19 nt, Artificial Sequence
  Description of Artificial Sequence: Synthetic oligonucleotide
gaagaccucaauggccuca

SEQ ID NO: 1587200 - RNA, 19 nt, Artificial Sequence
  Description of Artificial Sequence: Synthetic oligonucleotide
gucaucuaccccacucugc

SEQ ID NO: 1587201 - RNA, 19 nt, Artificial Sequence
  Description of Artificial Sequence: Synthetic oligonucleotide
cccuaauuucuucuggaac

SEQ ID NO: 1587202 - RNA, 19 nt, Artificial Sequence
  Description of Artificial Sequence: Synthetic oligonucleotide
gagucaucuaccccacucu

SEQ ID NO: 1587203 - RNA, 19 nt, Artificial Sequence
  Description of Artificial Sequence: Synthetic oligonucleotide
cagugagaaaucucucaga

SEQ ID NO: 1587204 - RNA, 19 nt, Artificial Sequence
  Description of Artificial Sequence: Synthetic oligonucleotide
auacuuccucugagcaggc

SEQ ID NO: 1587205 - RNA, 19 nt, Artificial Sequence
  Description of Artificial Sequence: Synthetic oligonucleotide
agagccgaggcuuguuaaa

SEQ ID NO: 1587206 - RNA, 19 nt, Artificial Sequence
  Description of Artificial Sequence: Synthetic oligonucleotide
gccugucaaagacaaagca

SEQ ID NO: 1587207 - RNA, 19 nt, Artificial Sequence
  Description of Artificial Sequence: Synthetic oligonucleotide
ucagaguauggugcauuuc

SEQ ID NO: 1587208 - RNA, 19 nt, Artificial Sequence
  Description of Artificial Sequence: Synthetic oligonucleotide
acuuccugaugcagagccg

SEQ ID NO: 1587209 - RNA, 19 nt, Artificial Sequence
  Description of Artificial Sequence: Synthetic oligonucleotide
aaucucccuugcugccucu

SEQ ID NO: 1587210 - RNA, 19 nt, Artificial Sequence
  Description of Artificial Sequence: Synthetic oligonucleotide
cuuccugaugcagagccga

SEQ ID NO: 1587211 - RNA, 19 nt, Artificial Sequence
  Description of Artificial Sequence: Synthetic oligonucleotide
ugauaccaccagacagagu

SEQ ID NO: 1587212 - RNA, 19 nt, Artificial Sequence
  Description of Artificial Sequence: Synthetic oligonucleotide
cuuaaguuugagagauaua

SEQ ID NO: 1587213 - RNA, 19 nt, Artificial Sequence
  Description of Artificial Sequence: Synthetic oligonucleotide
guuucugugggcaggugaa

SEQ ID NO: 1587214 - RNA, 19 nt, Artificial Sequence
  Description of Artificial Sequence: Synthetic oligonucleotide
auggugcauuucccagagg

SEQ ID NO: 1587215 - RNA, 19 nt, Artificial Sequence
  Description of Artificial Sequence: Synthetic oligonucleotide
caccagacagagucuugac

SEQ ID NO: 1587216 - RNA, 19 nt, Artificial Sequence
  Description of Artificial Sequence: Synthetic oligonucleotide
cauuucccagaggacuggc

SEQ ID NO: 1587217 - RNA, 19 nt, Artificial Sequence
  Description of Artificial Sequence: Synthetic oligonucleotide
gucaacgaauguuccaggu

SEQ ID NO: 1587218 - RNA, 19 nt, Artificial Sequence
  Description of Artificial Sequence: Synthetic oligonucleotide
uagcuccagugagaaaucu

SEQ ID NO: 1587219 - RNA, 19 nt, Artificial Sequence
  Description of Artificial Sequence: Synthetic oligonucleotide
caaucucccuugcugccuc

SEQ ID NO: 1587220 - RNA, 19 nt, Artificial Sequence
  Description of Artificial Sequence: Synthetic oligonucleotide
cucgcuucgcuaccagcug

SEQ ID NO: 1587221 - RNA, 19 nt, Artificial Sequence
  Description of Artificial Sequence: Synthetic oligonucleotide
cugcucucguucugaaauc

SEQ ID NO: 1587222 - RNA, 19 nt, Artificial Sequence
  Description of Artificial Sequence: Synthetic oligonucleotide
cagccuuuauacguuccac

SEQ ID NO: 1587223 - RNA, 19 nt, Artificial Sequence
  Description of Artificial Sequence: Synthetic oligonucleotide
cuuccuugagaagccguuc

SEQ ID NO: 1587224 - RNA, 19 nt, Artificial Sequence
  Description of Artificial Sequence: Synthetic oligonucleotide
agugacugaucugucuuua

SEQ ID NO: 1587225 - RNA, 19 nt, Artificial Sequence
  Description of Artificial Sequence: Synthetic oligonucleotide
cugccucugugagugacug

SEQ ID NO: 1587226 - RNA, 19 nt, Artificial Sequence
  Description of Artificial Sequence: Synthetic oligonucleotide
uccuuaaguuugagagaua

SEQ ID NO: 1587227 - RNA, 19 nt, Artificial Sequence
  Description of Artificial Sequence: Synthetic oligonucleotide
ggaaagaaaccuacaaagu

SEQ ID NO: 1587228 - RNA, 19 nt, Artificial Sequence
  Description of Artificial Sequence: Synthetic oligonucleotide
gguccccuaauuucuucug

SEQ ID NO: 1587229 - RNA, 19 nt, Artificial Sequence
  Description of Artificial Sequence: Synthetic oligonucleotide
agcugaugacacauccaug

SEQ ID NO: 1587230 - RNA, 19 nt, Artificial Sequence
  Description of Artificial Sequence: Synthetic oligonucleotide
cagcugaguucucuaucug

SEQ ID NO: 1587231 - RNA, 19 nt, Artificial Sequence
  Description of Artificial Sequence: Synthetic oligonucleotide
guacucaucagcagugaua

SEQ ID NO: 1587232 - RNA, 19 nt, Artificial Sequence
  Description of Artificial Sequence: Synthetic oligonucleotide
cacaaagguuggaaagaaa

SEQ ID NO: 1587233 - RNA, 19 nt, Artificial Sequence
  Description of Artificial Sequence: Synthetic oligonucleotide
auaaugcaguugguccaug

SEQ ID NO: 1587234 - RNA, 19 nt, Artificial Sequence
  Description of Artificial Sequence: Synthetic oligonucleotide
cugugagugacugaucugu

SEQ ID NO: 1587235 - RNA, 19 nt, Artificial Sequence
  Description of Artificial Sequence: Synthetic oligonucleotide
caucucgcuucgcuaccag

SEQ ID NO: 1587236 - RNA, 19 nt, Artificial Sequence
  Description of Artificial Sequence: Synthetic oligonucleotide
cugguccccuaauuucuuc

SEQ ID NO: 1587237 - RNA, 19 nt, Artificial Sequence
  Description of Artificial Sequence: Synthetic oligonucleotide
gaaaucucucagagcccac

SEQ ID NO: 1587238 - RNA, 19 nt, Artificial Sequence
  Description of Artificial Sequence: Synthetic oligonucleotide
caggguaguucuccacuuc

SEQ ID NO: 1587239 - RNA, 19 nt, Artificial Sequence
  Description of Artificial Sequence: Synthetic oligonucleotide
gguaacucuuuuccuucuc

SEQ ID NO: 1587240 - RNA, 19 nt, Artificial Sequence
  Description of Artificial Sequence: Synthetic oligonucleotide
gacuuugauuugauuagau

SEQ ID NO: 1587241 - RNA, 19 nt, Artificial Sequence
  Description of Artificial Sequence: Synthetic oligonucleotide
cguuccacuucaaucuccc

SEQ ID NO: 1587242 - RNA, 19 nt, Artificial Sequence
  Description of Artificial Sequence: Synthetic oligonucleotide
gagcaacgagcugaugaca

SEQ ID NO: 1587243 - RNA, 19 nt, Artificial Sequence
  Description of Artificial Sequence: Synthetic oligonucleotide
auucaccacuuagcucuuc

SEQ ID NO: 1587244 - RNA, 19 nt, Artificial Sequence
  Description of Artificial Sequence: Synthetic oligonucleotide
accagcugguccccuaauu

SEQ ID NO: 1587245 - RNA, 19 nt, Artificial Sequence
  Description of Artificial Sequence: Synthetic oligonucleotide
gagccccuuuccaggagcc

SEQ ID NO: 1587246 - RNA, 19 nt, Artificial Sequence
  Description of Artificial Sequence: Synthetic oligonucleotide
gaagauguaugaagugaau

SEQ ID NO: 1587247 - RNA, 19 nt, Artificial Sequence
  Description of Artificial Sequence: Synthetic oligonucleotide
gcagugauagauuuuccau

SEQ ID NO: 1587248 - RNA, 19 nt, Artificial Sequence
  Description of Artificial Sequence: Synthetic oligonucleotide
agccguuccuguuccuuaa

SEQ ID NO: 1587249 - RNA, 19 nt, Artificial Sequence
  Description of Artificial Sequence: Synthetic oligonucleotide
agguaguaaccaccagguu

SEQ ID NO: 1587250 - RNA, 19 nt, Artificial Sequence
  Description of Artificial Sequence: Synthetic oligonucleotide
aguaaccaccagguuuaga

SEQ ID NO: 1587251 - RNA, 19 nt, Artificial Sequence
  Description of Artificial Sequence: Synthetic oligonucleotide
gguuuagaaaauguccccu

SEQ ID NO: 1587252 - RNA, 19 nt, Artificial Sequence
  Description of Artificial Sequence: Synthetic oligonucleotide
acguggcccauugacuaug

SEQ ID NO: 1587253 - RNA, 19 nt, Artificial Sequence
  Description of Artificial Sequence: Synthetic oligonucleotide
caccagguuuagaaaaugu

SEQ ID NO: 1587254 - RNA, 19 nt, Artificial Sequence
  Description of Artificial Sequence: Synthetic oligonucleotide
agcauucuccaugcagggu

SEQ ID NO: 1587255 - RNA, 19 nt, Artificial Sequence
  Description of Artificial Sequence: Synthetic oligonucleotide
uucuagcuccagugagaaa

SEQ ID NO: 1587256 - RNA, 19 nt, Artificial Sequence
  Description of Artificial Sequence: Synthetic oligonucleotide
agguacucaucagcaguga

SEQ ID NO: 1587257 - RNA, 19 nt, Artificial Sequence
  Description of Artificial Sequence: Synthetic oligonucleotide
caucagcagugauagauuu

SEQ ID NO: 1587258 - RNA, 19 nt, Artificial Sequence
  Description of Artificial Sequence: Synthetic oligonucleotide
aguucucuaucugggccaa

SEQ ID NO: 1587259 - RNA, 19 nt, Artificial Sequence
  Description of Artificial Sequence: Synthetic oligonucleotide
uaaaggcaucucgcuucgc

SEQ ID NO: 1587260 - RNA, 19 nt, Artificial Sequence
  Description of Artificial Sequence: Synthetic oligonucleotide
gcauugacauaggucagca

SEQ ID NO: 1587261 - RNA, 19 nt, Artificial Sequence
  Description of Artificial Sequence: Synthetic oligonucleotide
cccauugacuaugauacca

SEQ ID NO: 1587262 - RNA, 19 nt, Artificial Sequence
  Description of Artificial Sequence: Synthetic oligonucleotide
cauaggucagcaccaggcu

SEQ ID NO: 1587263 - RNA, 19 nt, Artificial Sequence
  Description of Artificial Sequence: Synthetic oligonucleotide
auagugcucaauggccuuu

SEQ ID NO: 1587264 - RNA, 19 nt, Artificial Sequence
  Description of Artificial Sequence: Synthetic oligonucleotide
aauucaccacuuagcucuu

SEQ ID NO: 1587265 - RNA, 19 nt, Artificial Sequence
  Description of Artificial Sequence: Synthetic oligonucleotide
ggugcauuucccagaggac

SEQ ID NO: 1587266 - RNA, 19 nt, Artificial Sequence
  Description of Artificial Sequence: Synthetic oligonucleotide
uuucugcuaugagcuguuc

SEQ ID NO: 1587267 - RNA, 19 nt, Artificial Sequence
  Description of Artificial Sequence: Synthetic oligonucleotide
ugccucugugagugacuga

SEQ ID NO: 1587268 - RNA, 19 nt, Artificial Sequence
  Description of Artificial Sequence: Synthetic oligonucleotide
caguugguccauggccugc

SEQ ID NO: 1587269 - RNA, 19 nt, Artificial Sequence
  Description of Artificial Sequence: Synthetic oligonucleotide
gccuuuugcacugcagcug

SEQ ID NO: 1587270 - RNA, 19 nt, Artificial Sequence
  Description of Artificial Sequence: Synthetic oligonucleotide
uaccagcugguccccuaau

SEQ ID NO: 1587271 - RNA, 19 nt, Artificial Sequence
  Description of Artificial Sequence: Synthetic oligonucleotide
ggccucacucucaaugggc

SEQ ID NO: 1587272 - RNA, 19 nt, Artificial Sequence
  Description of Artificial Sequence: Synthetic oligonucleotide
ggcaucucgcuucgcuacc

SEQ ID NO: 1587273 - RNA, 19 nt, Artificial Sequence
  Description of Artificial Sequence: Synthetic oligonucleotide
cauuagcuucuagcuccag

SEQ ID NO: 1587274 - RNA, 19 nt, Artificial Sequence
  Description of Artificial Sequence: Synthetic oligonucleotide
cagagccgaggcuuguuaa

SEQ ID NO: 1587275 - RNA, 19 nt, Artificial Sequence
  Description of Artificial Sequence: Synthetic oligonucleotide
ccacuuagcucuucuucuc

SEQ ID NO: 1587276 - RNA, 19 nt, Artificial Sequence
  Description of Artificial Sequence: Synthetic oligonucleotide
cuggagccccuuuccagga

SEQ ID NO: 1587277 - RNA, 19 nt, Artificial Sequence
  Description of Artificial Sequence: Synthetic oligonucleotide
cacgucaucuuuggacuca

SEQ ID NO: 1587278 - RNA, 19 nt, Artificial Sequence
  Description of Artificial Sequence: Synthetic oligonucleotide
aggagccugguuauacuuu

SEQ ID NO: 1587279 - RNA, 19 nt, Artificial Sequence
  Description of Artificial Sequence: Synthetic oligonucleotide
uuccucugagcaggccugu

SEQ ID NO: 1587280 - RNA, 19 nt, Artificial Sequence
  Description of Artificial Sequence: Synthetic oligonucleotide
agaccucaauggccucacu

SEQ ID NO: 1587281 - RNA, 19 nt, Artificial Sequence
  Description of Artificial Sequence: Synthetic oligonucleotide
cucgaucucuuggugaagu

SEQ ID NO: 1587282 - RNA, 19 nt, Artificial Sequence
  Description of Artificial Sequence: Synthetic oligonucleotide
guuucacgugcuccuggua

SEQ ID NO: 1587283 - RNA, 19 nt, Artificial Sequence
  Description of Artificial Sequence: Synthetic oligonucleotide
gcccauugacuaugauacc

SEQ ID NO: 1587284 - RNA, 19 nt, Artificial Sequence
  Description of Artificial Sequence: Synthetic oligonucleotide
gcuucuagcuccagugaga

SEQ ID NO: 1587285 - RNA, 19 nt, Artificial Sequence
  Description of Artificial Sequence: Synthetic oligonucleotide
ggaauaggugaagauguau

SEQ ID NO: 1587286 - RNA, 19 nt, Artificial Sequence
  Description of Artificial Sequence: Synthetic oligonucleotide
cucucguucugaaauccuu

SEQ ID NO: 1587287 - RNA, 19 nt, Artificial Sequence
  Description of Artificial Sequence: Synthetic oligonucleotide
cacgugcuccugguaacuc

SEQ ID NO: 1587288 - RNA, 19 nt, Artificial Sequence
  Description of Artificial Sequence: Synthetic oligonucleotide
acgucaucuuuggacucaa

SEQ ID NO: 1587289 - RNA, 19 nt, Artificial Sequence
  Description of Artificial Sequence: Synthetic oligonucleotide
caauggccuuuugcacugc

SEQ ID NO: 1587290 - RNA, 19 nt, Artificial Sequence
  Description of Artificial Sequence: Synthetic oligonucleotide
ggccuuuugcacugcagcu

SEQ ID NO: 1587291 - RNA, 19 nt, Artificial Sequence
  Description of Artificial Sequence: Synthetic oligonucleotide
cccacacaaagguuggaaa

SEQ ID NO: 1587292 - RNA, 19 nt, Artificial Sequence
  Description of Artificial Sequence: Synthetic oligonucleotide
cauaaugcaguugguccau

SEQ ID NO: 1587293 - RNA, 19 nt, Artificial Sequence
  Description of Artificial Sequence: Synthetic oligonucleotide
ucgcuaccagcuggucccc

SEQ ID NO: 1587294 - RNA, 19 nt, Artificial Sequence
  Description of Artificial Sequence: Synthetic oligonucleotide
caccaggcucuguaaacgu

SEQ ID NO: 1587295 - RNA, 19 nt, Artificial Sequence
  Description of Artificial Sequence: Synthetic oligonucleotide
gccguuccuguuccuuaag

SEQ ID NO: 1587296 - RNA, 19 nt, Artificial Sequence
  Description of Artificial Sequence: Synthetic oligonucleotide
gugaauucugcaacuuguu

SEQ ID NO: 1587297 - RNA, 19 nt, Artificial Sequence
  Description of Artificial Sequence: Synthetic oligonucleotide
ugcagagccgaggcuuguu

SEQ ID NO: 1587298 - RNA, 19 nt, Artificial Sequence
  Description of Artificial Sequence: Synthetic oligonucleotide
cauagugcucaauggccuu

SEQ ID NO: 1587299 - RNA, 19 nt, Artificial Sequence
  Description of Artificial Sequence: Synthetic oligonucleotide
uccucugagcaggccuguc

SEQ ID NO: 1587300 - RNA, 19 nt, Artificial Sequence
  Description of Artificial Sequence: Synthetic oligonucleotide
caggagccugguuauacuu

SEQ ID NO: 1587301 - RNA, 19 nt, Artificial Sequence
  Description of Artificial Sequence: Synthetic oligonucleotide
ccuguuccuuaaguuugag

SEQ ID NO: 1587302 - RNA, 19 nt, Artificial Sequence
  Description of Artificial Sequence: Synthetic oligonucleotide
gaagccguuccuguuccuu

SEQ ID NO: 1587303 - RNA, 19 nt, Artificial Sequence
  Description of Artificial Sequence: Synthetic oligonucleotide
ccacgucaucuuuggacuc

SEQ ID NO: 1587304 - RNA, 19 nt, Artificial Sequence
  Description of Artificial Sequence: Synthetic oligonucleotide
cuucagaguauggugcauu

SEQ ID NO: 1587305 - RNA, 19 nt, Artificial Sequence
  Description of Artificial Sequence: Synthetic oligonucleotide
gugaaccuucugguucauc

SEQ ID NO: 1587306 - RNA, 19 nt, Artificial Sequence
  Description of Artificial Sequence: Synthetic oligonucleotide
augcagagccgaggcuugu

SEQ ID NO: 1587307 - RNA, 19 nt, Artificial Sequence
  Description of Artificial Sequence: Synthetic oligonucleotide
ccaaagucaggacagcauu

SEQ ID NO: 1587308 - RNA, 19 nt, Artificial Sequence
  Description of Artificial Sequence: Synthetic oligonucleotide
cucaggugaugacuuugau

SEQ ID NO: 1587309 - RNA, 19 nt, Artificial Sequence
  Description of Artificial Sequence: Synthetic oligonucleotide
ccccuaauuucuucuggaa

SEQ ID NO: 1587310 - RNA, 19 nt, Artificial Sequence
  Description of Artificial Sequence: Synthetic oligonucleotide
gcagagccgaggcuuguua

SEQ ID NO: 1587311 - RNA, 19 nt, Artificial Sequence
  Description of Artificial Sequence: Synthetic oligonucleotide
cugaugcagagccgaggcu

SEQ ID NO: 1587312 - RNA, 19 nt, Artificial Sequence
  Description of Artificial Sequence: Synthetic oligonucleotide
gggccaaagucaggacagc

SEQ ID NO: 1587313 - RNA, 19 nt, Artificial Sequence
  Description of Artificial Sequence: Synthetic oligonucleotide
cacucucaaugggccugug

SEQ ID NO: 1587314 - RNA, 19 nt, Artificial Sequence
  Description of Artificial Sequence: Synthetic oligonucleotide
cgaauguuccagguacuca

SEQ ID NO: 1587315 - RNA, 19 nt, Artificial Sequence
  Description of Artificial Sequence: Synthetic oligonucleotide
cagccacgucaucuuugga

SEQ ID NO: 1587316 - RNA, 19 nt, Artificial Sequence
  Description of Artificial Sequence: Synthetic oligonucleotide
gcuaugagcuguucccguu

SEQ ID NO: 1587317 - RNA, 19 nt, Artificial Sequence
  Description of Artificial Sequence: Synthetic oligonucleotide
cacugcagcugaguucucu

SEQ ID NO: 1587318 - RNA, 19 nt, Artificial Sequence
  Description of Artificial Sequence: Synthetic oligonucleotide
gccaaagucaggacagcau

SEQ ID NO: 1587319 - RNA, 19 nt, Artificial Sequence
  Description of Artificial Sequence: Synthetic oligonucleotide
gcaggguaguucuccacuu

SEQ ID NO: 1587320 - RNA, 19 nt, Artificial Sequence
  Description of Artificial Sequence: Synthetic oligonucleotide
cgaggcuuguuaaaguuuu

SEQ ID NO: 1587321 - RNA, 19 nt, Artificial Sequence
  Description of Artificial Sequence: Synthetic oligonucleotide
ccagcugguccccuaauuu

SEQ ID NO: 1587322 - RNA, 19 nt, Artificial Sequence
  Description of Artificial Sequence: Synthetic oligonucleotide
guucucuaucugggccaaa

SEQ ID NO: 1587323 - RNA, 19 nt, Artificial Sequence
  Description of Artificial Sequence: Synthetic oligonucleotide
gcuucgcuaccagcugguc

SEQ ID NO: 1587324 - RNA, 19 nt, Artificial Sequence
  Description of Artificial Sequence: Synthetic oligonucleotide
cugccaucaucagcucaua

SEQ ID NO: 1587325 - RNA, 19 nt, Artificial Sequence
  Description of Artificial Sequence: Synthetic oligonucleotide
gcucucguucugaaauccu

SEQ ID NO: 1587326 - RNA, 19 nt, Artificial Sequence
  Description of Artificial Sequence: Synthetic oligonucleotide
guggcccauugacuaugau

SEQ ID NO: 1587327 - RNA, 19 nt, Artificial Sequence
  Description of Artificial Sequence: Synthetic oligonucleotide
ccguuccuguuccuuaagu

SEQ ID NO: 1587328 - RNA, 19 nt, Artificial Sequence
  Description of Artificial Sequence: Synthetic oligonucleotide
ccucacucucaaugggccu

SEQ ID NO: 1587329 - RNA, 19 nt, Artificial Sequence
  Description of Artificial Sequence: Synthetic oligonucleotide
cccacucugcucaggugau

SEQ ID NO: 1587330 - RNA, 19 nt, Artificial Sequence
  Description of Artificial Sequence: Synthetic oligonucleotide
gcugguccccuaauuucuu

SEQ ID NO: 1587331 - RNA, 19 nt, Artificial Sequence
  Description of Artificial Sequence: Synthetic oligonucleotide
cgaucucuuggugaaguuu

SEQ ID NO: 1587332 - RNA, 19 nt, Artificial Sequence
  Description of Artificial Sequence: Synthetic oligonucleotide
ggugaaccuucugguucau

SEQ ID NO: 1587333 - RNA, 19 nt, Artificial Sequence
  Description of Artificial Sequence: Synthetic oligonucleotide
cgcuucgcuaccagcuggu

SEQ ID NO: 1587334 - RNA, 19 nt, Artificial Sequence
  Description of Artificial Sequence: Synthetic oligonucleotide
cccagaggacuggcucuuu

SEQ ID NO: 1587335 - RNA, 19 nt, Artificial Sequence
  Description of Artificial Sequence: Synthetic oligonucleotide
ugcauuaugaaaauggugg

SEQ ID NO: 1587336 - RNA, 19 nt, Artificial Sequence
  Description of Artificial Sequence: Synthetic oligonucleotide
aaaaggaaauuacugauuc

SEQ ID NO: 1587337 - RNA, 19 nt, Artificial Sequence
  Description of Artificial Sequence: Synthetic oligonucleotide
aauccaauuucccauaguc

SEQ ID NO: 1587338 - RNA, 19 nt, Artificial Sequence
  Description of Artificial Sequence: Synthetic oligonucleotide
aacauaaauggccaguuag

SEQ ID NO: 1587339 - RNA, 19 nt, Artificial Sequence
  Description of Artificial Sequence: Synthetic oligonucleotide
aaagacagucauaugaggc

SEQ ID NO: 1587340 - RNA, 19 nt, Artificial Sequence
  Description of Artificial Sequence: Synthetic oligonucleotide
uuuagguuaucauacagug

SEQ ID NO: 1587341 - RNA, 19 nt, Artificial Sequence
  Description of Artificial Sequence: Synthetic oligonucleotide
  modified_base (3)..(3): a, c, u, g, unknown or other
acngacacaggacagaggg

SEQ ID NO: 1587342 - RNA, 19 nt, Artificial Sequence
  Description of Artificial Sequence: Synthetic oligonucleotide
aacuugaauauuauagugc

SEQ ID NO: 1587343 - RNA, 19 nt, Artificial Sequence
  Description of Artificial Sequence: Synthetic oligonucleotide
ucuuccaacauaaauggcc

SEQ ID NO: 1587344 - RNA, 19 nt, Artificial Sequence
  Description of Artificial Sequence: Synthetic oligonucleotide
uuauagugcauuaugaaaa

SEQ ID NO: 1587345 - RNA, 19 nt, Artificial Sequence
  Description of Artificial Sequence: Synthetic oligonucleotide
uauacuuagacacagcaau

SEQ ID NO: 1587346 - RNA, 19 nt, Artificial Sequence
  Description of Artificial Sequence: Synthetic oligonucleotide
aauagcaucuacccucuac

SEQ ID NO: 1587347 - RNA, 19 nt, Artificial Sequence
  Description of Artificial Sequence: Synthetic oligonucleotide
aauuuuaacuaauuucaga

SEQ ID NO: 1587348 - RNA, 19 nt, Artificial Sequence
  Description of Artificial Sequence: Synthetic oligonucleotide
aaugaggauaaaauauugc

SEQ ID NO: 1587349 - RNA, 19 nt, Artificial Sequence
  Description of Artificial Sequence: Synthetic oligonucleotide
gauucuacaaauauuggcc

SEQ ID NO: 1587350 - RNA, 19 nt, Artificial Sequence
  Description of Artificial Sequence: Synthetic oligonucleotide
aaauauugcacaagaacgg

SEQ ID NO: 1587351 - RNA, 19 nt, Artificial Sequence
  Description of Artificial Sequence: Synthetic oligonucleotide
uuaccaauuagcauacucc

SEQ ID NO: 1587352 - RNA, 19 nt, Artificial Sequence
  Description of Artificial Sequence: Synthetic oligonucleotide
auagcaucuacccucuacc

SEQ ID NO: 1587353 - RNA, 19 nt, Artificial Sequence
  Description of Artificial Sequence: Synthetic oligonucleotide
uucaaugaggauaaaauau

SEQ ID NO: 1587354 - RNA, 19 nt, Artificial Sequence
  Description of Artificial Sequence: Synthetic oligonucleotide
uuuaacuaauuucagaauu

SEQ ID NO: 1587355 - RNA, 19 nt, Artificial Sequence
  Description of Artificial Sequence: Synthetic oligonucleotide
uuaauaaacuuucaggcua

SEQ ID NO: 1587356 - RNA, 19 nt, Artificial Sequence
  Description of Artificial Sequence: Synthetic oligonucleotide
auuaugaaaaugguggacg

SEQ ID NO: 1587357 - RNA, 19 nt, Artificial Sequence
  Description of Artificial Sequence: Synthetic oligonucleotide
aauggaauuucaaugaaca

SEQ ID NO: 1587358 - RNA, 19 nt, Artificial Sequence
  Description of Artificial Sequence: Synthetic oligonucleotide
aaucaaucagcaaaugccg

SEQ ID NO: 1587359 - RNA, 19 nt, Artificial Sequence
  Description of Artificial Sequence: Synthetic oligonucleotide
uuccuuugcauccucacgg

SEQ ID NO: 1587360 - RNA, 19 nt, Artificial Sequence
  Description of Artificial Sequence: Synthetic oligonucleotide
aguagcacagaguuugccc

SEQ ID NO: 1587361 - RNA, 19 nt, Artificial Sequence
  Description of Artificial Sequence: Synthetic oligonucleotide
aaguaaacauuuuagguua

SEQ ID NO: 1587362 - RNA, 19 nt, Artificial Sequence
  Description of Artificial Sequence: Synthetic oligonucleotide
aacaacaacaacaacaaaa

SEQ ID NO: 1587363 - RNA, 19 nt, Artificial Sequence
  Description of Artificial Sequence: Synthetic oligonucleotide
ugaaaagcuuaccaaaaca

SEQ ID NO: 1587364 - RNA, 19 nt, Artificial Sequence
  Description of Artificial Sequence: Synthetic oligonucleotide
uucuguuucgcucucacug

SEQ ID NO: 1587365 - RNA, 19 nt, Artificial Sequence
  Description of Artificial Sequence: Synthetic oligonucleotide
acauuuuagguuaucauac

SEQ ID NO: 1587366 - RNA, 19 nt, Artificial Sequence
  Description of Artificial Sequence: Synthetic oligonucleotide
aaauauuggccaccgaugu

SEQ ID NO: 1587367 - RNA, 19 nt, Artificial Sequence
  Description of Artificial Sequence: Synthetic oligonucleotide
gguucuuauacuuagacac

SEQ ID NO: 1587368 - RNA, 19 nt, Artificial Sequence
  Description of Artificial Sequence: Synthetic oligonucleotide
uaccaauuagcauacuccg

SEQ ID NO: 1587369 - RNA, 19 nt, Artificial Sequence
  Description of Artificial Sequence: Synthetic oligonucleotide
gauguuucaaucaaucagc

SEQ ID NO: 1587370 - RNA, 19 nt, Artificial Sequence
  Description of Artificial Sequence: Synthetic oligonucleotide
uuucaaugaacauuuggca

SEQ ID NO: 1587371 - RNA, 19 nt, Artificial Sequence
  Description of Artificial Sequence: Synthetic oligonucleotide
augcgagggacguagagcc

SEQ ID NO: 1587372 - RNA, 19 nt, Artificial Sequence
  Description of Artificial Sequence: Synthetic oligonucleotide
ugaggauaaaauauugcac

SEQ ID NO: 1587373 - RNA, 19 nt, Artificial Sequence
  Description of Artificial Sequence: Synthetic oligonucleotide
augaggauaaaauauugca

SEQ ID NO: 1587374 - RNA, 19 nt, Artificial Sequence
  Description of Artificial Sequence: Synthetic oligonucleotide
ugugugguaaccacgcuag

SEQ ID NO: 1587375 - RNA, 19 nt, Artificial Sequence
  Description of Artificial Sequence: Synthetic oligonucleotide
uagguuaucauacaguguu

SEQ ID NO: 1587376 - RNA, 19 nt, Artificial Sequence
  Description of Artificial Sequence: Synthetic oligonucleotide
auuaauaaacuuucaggcu

SEQ ID NO: 1587377 - RNA, 19 nt, Artificial Sequence
  Description of Artificial Sequence: Synthetic oligonucleotide
aaaacaacaacaacaacaa

SEQ ID NO: 1587378 - RNA, 19 nt, Artificial Sequence
  Description of Artificial Sequence: Synthetic oligonucleotide
ugauguaaaaguuggauuu

SEQ ID NO: 1587379 - RNA, 19 nt, Artificial Sequence
  Description of Artificial Sequence: Synthetic oligonucleotide
auuuuagguuaucauacag

SEQ ID NO: 1587380 - RNA, 19 nt, Artificial Sequence
  Description of Artificial Sequence: Synthetic oligonucleotide
uuuuagguuaucauacagu

SEQ ID NO: 1587381 - RNA, 19 nt, Artificial Sequence
  Description of Artificial Sequence: Synthetic oligonucleotide
auaauugauauccuuaauu

SEQ ID NO: 1587382 - RNA, 19 nt, Artificial Sequence
  Description of Artificial Sequence: Synthetic oligonucleotide
aagaaugagcuacauuaug

SEQ ID NO: 1587383 - RNA, 19 nt, Artificial Sequence
  Description of Artificial Sequence: Synthetic oligonucleotide
cacagugauggucagaccg

SEQ ID NO: 1587384 - RNA, 19 nt, Artificial Sequence
  Description of Artificial Sequence: Synthetic oligonucleotide
aacgguuuuguguaaagaa

SEQ ID NO: 1587385 - RNA, 19 nt, Artificial Sequence
  Description of Artificial Sequence: Synthetic oligonucleotide
uguuagaaccccauuuacc

SEQ ID NO: 1587386 - RNA, 19 nt, Artificial Sequence
  Description of Artificial Sequence: Synthetic oligonucleotide
aguaggacucucuuugugg

SEQ ID NO: 1587387 - RNA, 19 nt, Artificial Sequence
  Description of Artificial Sequence: Synthetic oligonucleotide
acucaauuaauaaacuuuc

SEQ ID NO: 1587388 - RNA, 19 nt, Artificial Sequence
  Description of Artificial Sequence: Synthetic oligonucleotide
uuuaccaauuagcauacuc

SEQ ID NO: 1587389 - RNA, 19 nt, Artificial Sequence
  Description of Artificial Sequence: Synthetic oligonucleotide
aaaaucccacaguacaaug

SEQ ID NO: 1587390 - RNA, 19 nt, Artificial Sequence
  Description of Artificial Sequence: Synthetic oligonucleotide
aagacagucauaugaggcu

SEQ ID NO: 1587391 - RNA, 19 nt, Artificial Sequence
  Description of Artificial Sequence: Synthetic oligonucleotide
guagaaguuguauaaaaca

SEQ ID NO: 1587392 - RNA, 19 nt, Artificial Sequence
  Description of Artificial Sequence: Synthetic oligonucleotide
auuauagugcauuaugaaa

SEQ ID NO: 1587393 - RNA, 19 nt, Artificial Sequence
  Description of Artificial Sequence: Synthetic oligonucleotide
ucccauaaagaaaugugug

SEQ ID NO: 1587394 - RNA, 19 nt, Artificial Sequence
  Description of Artificial Sequence: Synthetic oligonucleotide
aaagcuuaccaaaacauaa

SEQ ID NO: 1587395 - RNA, 19 nt, Artificial Sequence
  Description of Artificial Sequence: Synthetic oligonucleotide
uuaacuaauuucagaauua

SEQ ID NO: 1587396 - RNA, 19 nt, Artificial Sequence
  Description of Artificial Sequence: Synthetic oligonucleotide
uauuauagugcauuaugaa

SEQ ID NO: 1587397 - RNA, 19 nt, Artificial Sequence
  Description of Artificial Sequence: Synthetic oligonucleotide
aguagaaguuguauaaaac

SEQ ID NO: 1587398 - RNA, 19 nt, Artificial Sequence
  Description of Artificial Sequence: Synthetic oligonucleotide
uucccauaaagaaaugugu

SEQ ID NO: 1587399 - RNA, 19 nt, Artificial Sequence
  Description of Artificial Sequence: Synthetic oligonucleotide
uuguauaaaacaaucucuu

SEQ ID NO: 1587400 - RNA, 19 nt, Artificial Sequence
  Description of Artificial Sequence: Synthetic oligonucleotide
agcaacagacacuauuuuc

SEQ ID NO: 1587401 - RNA, 19 nt, Artificial Sequence
  Description of Artificial Sequence: Synthetic oligonucleotide
guuagaaccccauuuacca

SEQ ID NO: 1587402 - RNA, 19 nt, Artificial Sequence
  Description of Artificial Sequence: Synthetic oligonucleotide
aauauuggccaccgauguc

SEQ ID NO: 1587403 - RNA, 19 nt, Artificial Sequence
  Description of Artificial Sequence: Synthetic oligonucleotide
ucaaugaggauaaaauauu

SEQ ID NO: 1587404 - RNA, 19 nt, Artificial Sequence
  Description of Artificial Sequence: Synthetic oligonucleotide
  modified_base (5)..(5): a, c, u, g, unknown or other
aaacngacacaggacagag

SEQ ID NO: 1587405 - RNA, 19 nt, Artificial Sequence
  Description of Artificial Sequence: Synthetic oligonucleotide
uucaaucaaaggcacuggc

SEQ ID NO: 1587406 - RNA, 19 nt, Artificial Sequence
  Description of Artificial Sequence: Synthetic oligonucleotide
cuggaaaagaaugagcuac

SEQ ID NO: 1587407 - RNA, 19 nt, Artificial Sequence
  Description of Artificial Sequence: Synthetic oligonucleotide
uccuaguacaccaucuucu

SEQ ID NO: 1587408 - RNA, 19 nt, Artificial Sequence
  Description of Artificial Sequence: Synthetic oligonucleotide
ucucuuuggccucauuucc

SEQ ID NO: 1587409 - RNA, 19 nt, Artificial Sequence
  Description of Artificial Sequence: Synthetic oligonucleotide
caaugaggauaaaauauug

SEQ ID NO: 1587410 - RNA, 19 nt, Artificial Sequence
  Description of Artificial Sequence: Synthetic oligonucleotide
ucuuaugaugccagggaug

SEQ ID NO: 1587411 - RNA, 19 nt, Artificial Sequence
  Description of Artificial Sequence: Synthetic oligonucleotide
acauaaauggccaguuagc

SEQ ID NO: 1587412 - RNA, 19 nt, Artificial Sequence
  Description of Artificial Sequence: Synthetic oligonucleotide
cuuauacuuagacacagca

SEQ ID NO: 1587413 - RNA, 19 nt, Artificial Sequence
  Description of Artificial Sequence: Synthetic oligonucleotide
agucauaugaggcuguaaa

SEQ ID NO: 1587414 - RNA, 19 nt, Artificial Sequence
  Description of Artificial Sequence: Synthetic oligonucleotide
ucuguugaguuccuaguac

SEQ ID NO: 1587415 - RNA, 19 nt, Artificial Sequence
  Description of Artificial Sequence: Synthetic oligonucleotide
uuagacacagcaauauuuu

SEQ ID NO: 1587416 - RNA, 19 nt, Artificial Sequence
  Description of Artificial Sequence: Synthetic oligonucleotide
aauauugcacaagaacggu

SEQ ID NO: 1587417 - RNA, 19 nt, Artificial Sequence
  Description of Artificial Sequence: Synthetic oligonucleotide
uugaauauuauagugcauu

SEQ ID NO: 1587418 - RNA, 19 nt, Artificial Sequence
  Description of Artificial Sequence: Synthetic oligonucleotide
uuaccaaaacauaauugau

SEQ ID NO: 1587419 - RNA, 19 nt, Artificial Sequence
  Description of Artificial Sequence: Synthetic oligonucleotide
caaagacagucauaugagg

SEQ ID NO: 1587420 - RNA, 19 nt, Artificial Sequence
  Description of Artificial Sequence: Synthetic oligonucleotide
aaucccacaguacaaugaa

SEQ ID NO: 1587421 - RNA, 19 nt, Artificial Sequence
  Description of Artificial Sequence: Synthetic oligonucleotide
cucaguagcacagaguuug

SEQ ID NO: 1587422 - RNA, 19 nt, Artificial Sequence
  Description of Artificial Sequence: Synthetic oligonucleotide
ucaaucaaaggcacuggcu

SEQ ID NO: 1587423 - RNA, 19 nt, Artificial Sequence
  Description of Artificial Sequence: Synthetic oligonucleotide
uacugugugguaaccacgc

SEQ ID NO: 1587424 - RNA, 19 nt, Artificial Sequence
  Description of Artificial Sequence: Synthetic oligonucleotide
aaggaaauuacugauucua

SEQ ID NO: 1587425 - RNA, 19 nt, Artificial Sequence
  Description of Artificial Sequence: Synthetic oligonucleotide
uuauacuuagacacagcaa

SEQ ID NO: 1587426 - RNA, 19 nt, Artificial Sequence
  Description of Artificial Sequence: Synthetic oligonucleotide
acaagaacgguuuugugua

SEQ ID NO: 1587427 - RNA, 19 nt, Artificial Sequence
  Description of Artificial Sequence: Synthetic oligonucleotide
uaaauagcaucuacccucu

SEQ ID NO: 1587428 - RNA, 19 nt, Artificial Sequence
  Description of Artificial Sequence: Synthetic oligonucleotide
acucuuuccaugugaccgc

SEQ ID NO: 1587429 - RNA, 19 nt, Artificial Sequence
  Description of Artificial Sequence: Synthetic oligonucleotide
ucccacaguacaaugaaau

SEQ ID NO: 1587430 - RNA, 19 nt, Artificial Sequence
  Description of Artificial Sequence: Synthetic oligonucleotide
cauuuaccaauuagcauac

SEQ ID NO: 1587431 - RNA, 19 nt, Artificial Sequence
  Description of Artificial Sequence: Synthetic oligonucleotide
aacauaauugauauccuua

SEQ ID NO: 1587432 - RNA, 19 nt, Artificial Sequence
  Description of Artificial Sequence: Synthetic oligonucleotide
ugaauauuauagugcauua

SEQ ID NO: 1587433 - RNA, 19 nt, Artificial Sequence
  Description of Artificial Sequence: Synthetic oligonucleotide
auauuauagugcauuauga

SEQ ID NO: 1587434 - RNA, 19 nt, Artificial Sequence
  Description of Artificial Sequence: Synthetic oligonucleotide
aaguuguauaaaacaaucu

SEQ ID NO: 1587435 - RNA, 19 nt, Artificial Sequence
  Description of Artificial Sequence: Synthetic oligonucleotide
uuucaaucaaaggcacugg

SEQ ID NO: 1587436 - RNA, 19 nt, Artificial Sequence
  Description of Artificial Sequence: Synthetic oligonucleotide
acuucuuaugaugccaggg

SEQ ID NO: 1587437 - RNA, 19 nt, Artificial Sequence
  Description of Artificial Sequence: Synthetic oligonucleotide
uaacucaauuaauaaacuu

SEQ ID NO: 1587438 - RNA, 19 nt, Artificial Sequence
  Description of Artificial Sequence: Synthetic oligonucleotide
acagaguuugcccaccgug

SEQ ID NO: 1587439 - RNA, 19 nt, Artificial Sequence
  Description of Artificial Sequence: Synthetic oligonucleotide
gugauggucagaccgguag

SEQ ID NO: 1587440 - RNA, 19 nt, Artificial Sequence
  Description of Artificial Sequence: Synthetic oligonucleotide
  modified_base (6)..(6): a, c, u, g, unknown or other
aaaacngacacaggacaga

SEQ ID NO: 1587441 - RNA, 19 nt, Artificial Sequence
  Description of Artificial Sequence: Synthetic oligonucleotide
uccaaacaagaacaagagu

SEQ ID NO: 1587442 - RNA, 19 nt, Artificial Sequence
  Description of Artificial Sequence: Synthetic oligonucleotide
auuuauaacugugcauguc

SEQ ID NO: 1587443 - RNA, 19 nt, Artificial Sequence
  Description of Artificial Sequence: Synthetic oligonucleotide
agagccuagguuuucugug

SEQ ID NO: 1587444 - RNA, 19 nt, Artificial Sequence
  Description of Artificial Sequence: Synthetic oligonucleotide
uguccaaugcgucacuguc

SEQ ID NO: 1587445 - RNA, 19 nt, Artificial Sequence
  Description of Artificial Sequence: Synthetic oligonucleotide
uuccaugugaccgcuaccc

SEQ ID NO: 1587446 - RNA, 19 nt, Artificial Sequence
  Description of Artificial Sequence: Synthetic oligonucleotide
uguugaguuccuaguacac

SEQ ID NO: 1587447 - RNA, 19 nt, Artificial Sequence
  Description of Artificial Sequence: Synthetic oligonucleotide
aguacuucaaugaggauaa

SEQ ID NO: 1587448 - RNA, 19 nt, Artificial Sequence
  Description of Artificial Sequence: Synthetic oligonucleotide
uucuuaugaugccagggau

SEQ ID NO: 1587449 - RNA, 19 nt, Artificial Sequence
  Description of Artificial Sequence: Synthetic oligonucleotide
ugugguaaccacgcuagcc

SEQ ID NO: 1587450 - RNA, 19 nt, Artificial Sequence
  Description of Artificial Sequence: Synthetic oligonucleotide
ucuguuucgcucucacugc

SEQ ID NO: 1587451 - RNA, 19 nt, Artificial Sequence
  Description of Artificial Sequence: Synthetic oligonucleotide
auauuggccaccgaugucu

SEQ ID NO: 1587452 - RNA, 19 nt, Artificial Sequence
  Description of Artificial Sequence: Synthetic oligonucleotide
auccaaacaagaacaagag

SEQ ID NO: 1587453 - RNA, 19 nt, Artificial Sequence
  Description of Artificial Sequence: Synthetic oligonucleotide
ugacuuugagaugucagac

SEQ ID NO: 1587454 - RNA, 19 nt, Artificial Sequence
  Description of Artificial Sequence: Synthetic oligonucleotide
uaguacaccaucuucuguu

SEQ ID NO: 1587455 - RNA, 19 nt, Artificial Sequence
  Description of Artificial Sequence: Synthetic oligonucleotide
uuagguguguggcucagua

SEQ ID NO: 1587456 - RNA, 19 nt, Artificial Sequence
  Description of Artificial Sequence: Synthetic oligonucleotide
uaauacuguuagaacccca

SEQ ID NO: 1587457 - RNA, 19 nt, Artificial Sequence
  Description of Artificial Sequence: Synthetic oligonucleotide
agaccgguaguugaguagg

SEQ ID NO: 1587458 - RNA, 19 nt, Artificial Sequence
  Description of Artificial Sequence: Synthetic oligonucleotide
acuuuuaacucaauuaaua

SEQ ID NO: 1587459 - RNA, 19 nt, Artificial Sequence
  Description of Artificial Sequence: Synthetic oligonucleotide
uguuucgcucucacugccg

SEQ ID NO: 1587460 - RNA, 19 nt, Artificial Sequence
  Description of Artificial Sequence: Synthetic oligonucleotide
uuugcauccucacggucac

SEQ ID NO: 1587461 - RNA, 19 nt, Artificial Sequence
  Description of Artificial Sequence: Synthetic oligonucleotide
cuacccuaaggucuccugg

SEQ ID NO: 1587462 - RNA, 19 nt, Artificial Sequence
  Description of Artificial Sequence: Synthetic oligonucleotide
uuaugcucagggcugggaa

SEQ ID NO: 1587463 - RNA, 19 nt, Artificial Sequence
  Description of Artificial Sequence: Synthetic oligonucleotide
aaaagcuuaccaaaacaua

SEQ ID NO: 1587464 - RNA, 19 nt, Artificial Sequence
  Description of Artificial Sequence: Synthetic oligonucleotide
cacgcuagccaugaaaagc

SEQ ID NO: 1587465 - RNA, 19 nt, Artificial Sequence
  Description of Artificial Sequence: Synthetic oligonucleotide
cacuggcuggaaaagaaug

SEQ ID NO: 1587466 - RNA, 19 nt, Artificial Sequence
  Description of Artificial Sequence: Synthetic oligonucleotide
guagcuaccaauuggccaa

SEQ ID NO: 1587467 - RNA, 19 nt, Artificial Sequence
  Description of Artificial Sequence: Synthetic oligonucleotide
ugugaccgcuacccuaagg

SEQ ID NO: 1587468 - RNA, 19 nt, Artificial Sequence
  Description of Artificial Sequence: Synthetic oligonucleotide
aacuuuuaacucaauuaau

SEQ ID NO: 1587469 - RNA, 19 nt, Artificial Sequence
  Description of Artificial Sequence: Synthetic oligonucleotide
uccaaugcgucacugucau

SEQ ID NO: 1587470 - RNA, 19 nt, Artificial Sequence
  Description of Artificial Sequence: Synthetic oligonucleotide
uguggcaauggaauuucaa

SEQ ID NO: 1587471 - RNA, 19 nt, Artificial Sequence
  Description of Artificial Sequence: Synthetic oligonucleotide
gacuucuuaugaugccagg

SEQ ID NO: 1587472 - RNA, 19 nt, Artificial Sequence
  Description of Artificial Sequence: Synthetic oligonucleotide
uugcccaccguguguaagg

SEQ ID NO: 1587473 - RNA, 19 nt, Artificial Sequence
  Description of Artificial Sequence: Synthetic oligonucleotide
ugucaucucuucucugaag

SEQ ID NO: 1587474 - RNA, 19 nt, Artificial Sequence
  Description of Artificial Sequence: Synthetic oligonucleotide
uuccuaguacaccaucuuc

SEQ ID NO: 1587475 - RNA, 19 nt, Artificial Sequence
  Description of Artificial Sequence: Synthetic oligonucleotide
cuaccaauuggccaaacaa

SEQ ID NO: 1587476 - RNA, 19 nt, Artificial Sequence
  Description of Artificial Sequence: Synthetic oligonucleotide
gacacuauuuucaaucaaa

SEQ ID NO: 1587477 - RNA, 19 nt, Artificial Sequence
  Description of Artificial Sequence: Synthetic oligonucleotide
cacucuguugaguuccuag

SEQ ID NO: 1587478 - RNA, 19 nt, Artificial Sequence
  Description of Artificial Sequence: Synthetic oligonucleotide
ugggaugcgagggacguag

SEQ ID NO: 1587479 - RNA, 19 nt, Artificial Sequence
  Description of Artificial Sequence: Synthetic oligonucleotide
aaacaacaacaacaacaaa

SEQ ID NO: 1587480 - RNA, 19 nt, Artificial Sequence
  Description of Artificial Sequence: Synthetic oligonucleotide
agacuuagguguguggcuc

SEQ ID NO: 1587481 - RNA, 19 nt, Artificial Sequence
  Description of Artificial Sequence: Synthetic oligonucleotide
uacccuaaggucuccuggc

SEQ ID NO: 1587482 - RNA, 19 nt, Artificial Sequence
  Description of Artificial Sequence: Synthetic oligonucleotide
cuucaaugaggauaaaaua

SEQ ID NO: 1587483 - RNA, 19 nt, Artificial Sequence
  Description of Artificial Sequence: Synthetic oligonucleotide
gaugcgagggacguagagc

SEQ ID NO: 1587484 - RNA, 19 nt, Artificial Sequence
  Description of Artificial Sequence: Synthetic oligonucleotide
aucauacaguguuacaaua

SEQ ID NO: 1587485 - RNA, 19 nt, Artificial Sequence
  Description of Artificial Sequence: Synthetic oligonucleotide
guagcacagaguuugccca

SEQ ID NO: 1587486 - RNA, 19 nt, Artificial Sequence
  Description of Artificial Sequence: Synthetic oligonucleotide
ggauaugauguuucaauca

SEQ ID NO: 1587487 - RNA, 19 nt, Artificial Sequence
  Description of Artificial Sequence: Synthetic oligonucleotide
ugugcagacccauggugug

SEQ ID NO: 1587488 - RNA, 19 nt, Artificial Sequence
  Description of Artificial Sequence: Synthetic oligonucleotide
uacuuagacacagcaauau

SEQ ID NO: 1587489 - RNA, 19 nt, Artificial Sequence
  Description of Artificial Sequence: Synthetic oligonucleotide
aucagcaaaugccgaguag

SEQ ID NO: 1587490 - RNA, 19 nt, Artificial Sequence
  Description of Artificial Sequence: Synthetic oligonucleotide
cuugguacugugugguaac

SEQ ID NO: 1587491 - RNA, 19 nt, Artificial Sequence
  Description of Artificial Sequence: Synthetic oligonucleotide
  modified_base (4)..(4): a, c, u, g, unknown or other
aacngacacaggacagagg

SEQ ID NO: 1587492 - RNA, 19 nt, Artificial Sequence
  Description of Artificial Sequence: Synthetic oligonucleotide
agccccaguacuucaauga

SEQ ID NO: 1587493 - RNA, 19 nt, Artificial Sequence
  Description of Artificial Sequence: Synthetic oligonucleotide
cuguuagaaccccauuuac

SEQ ID NO: 1587494 - RNA, 19 nt, Artificial Sequence
  Description of Artificial Sequence: Synthetic oligonucleotide
uggucagaccgguaguuga

SEQ ID NO: 1587495 - RNA, 19 nt, Artificial Sequence
  Description of Artificial Sequence: Synthetic oligonucleotide
cuuaugaugccagggauga

SEQ ID NO: 1587496 - RNA, 19 nt, Artificial Sequence
  Description of Artificial Sequence: Synthetic oligonucleotide
cccauaaagaaaugugugc

SEQ ID NO: 1587497 - RNA, 19 nt, Artificial Sequence
  Description of Artificial Sequence: Synthetic oligonucleotide
agaguuugcccaccgugug

SEQ ID NO: 1587498 - RNA, 19 nt, Artificial Sequence
  Description of Artificial Sequence: Synthetic oligonucleotide
uauaaacuuuuaacucaau

SEQ ID NO: 1587499 - RNA, 19 nt, Artificial Sequence
  Description of Artificial Sequence: Synthetic oligonucleotide
uucaaucaaucagcaaaug

SEQ ID NO: 1587500 - RNA, 19 nt, Artificial Sequence
  Description of Artificial Sequence: Synthetic oligonucleotide
gcacaaguaaacauuuuag

SEQ ID NO: 1587501 - RNA, 19 nt, Artificial Sequence
  Description of Artificial Sequence: Synthetic oligonucleotide
uuagaaccccauuuaccaa

SEQ ID NO: 1587502 - RNA, 19 nt, Artificial Sequence
  Description of Artificial Sequence: Synthetic oligonucleotide
gugguaaccacgcuagcca

SEQ ID NO: 1587503 - RNA, 19 nt, Artificial Sequence
  Description of Artificial Sequence: Synthetic oligonucleotide
uuccaacauaaauggccag

SEQ ID NO: 1587504 - RNA, 19 nt, Artificial Sequence
  Description of Artificial Sequence: Synthetic oligonucleotide
cuucuuaugaugccaggga

SEQ ID NO: 1587505 - RNA, 19 nt, Artificial Sequence
  Description of Artificial Sequence: Synthetic oligonucleotide
guaauacuguuagaacccc

SEQ ID NO: 1587506 - RNA, 19 nt, Artificial Sequence
  Description of Artificial Sequence: Synthetic oligonucleotide
guugaguuccuaguacacc

SEQ ID NO: 1587507 - RNA, 19 nt, Artificial Sequence
  Description of Artificial Sequence: Synthetic oligonucleotide
ugauggucagaccgguagu

SEQ ID NO: 1587508 - RNA, 19 nt, Artificial Sequence
  Description of Artificial Sequence: Synthetic oligonucleotide
gaugucagacuuaggugug

SEQ ID NO: 1587509 - RNA, 19 nt, Artificial Sequence
  Description of Artificial Sequence: Synthetic oligonucleotide
cugacuuugagaugucaga

SEQ ID NO: 1587510 - RNA, 19 nt, Artificial Sequence
  Description of Artificial Sequence: Synthetic oligonucleotide
ggauaaaauauugcacaag

SEQ ID NO: 1587511 - RNA, 19 nt, Artificial Sequence
  Description of Artificial Sequence: Synthetic oligonucleotide
aaugccgaguagcuaccaa

SEQ ID NO: 1587512 - RNA, 19 nt, Artificial Sequence
  Description of Artificial Sequence: Synthetic oligonucleotide
uuagcauacuccggucugc

SEQ ID NO: 1587513 - RNA, 19 nt, Artificial Sequence
  Description of Artificial Sequence: Synthetic oligonucleotide
accaauuagcauacuccgg

SEQ ID NO: 1587514 - RNA, 19 nt, Artificial Sequence
  Description of Artificial Sequence: Synthetic oligonucleotide
caagaguagaaguuguaua

SEQ ID NO: 1587515 - RNA, 19 nt, Artificial Sequence
  Description of Artificial Sequence: Synthetic oligonucleotide
gcuacauuaugcucagggc

SEQ ID NO: 1587516 - RNA, 19 nt, Artificial Sequence
  Description of Artificial Sequence: Synthetic oligonucleotide
auaacugugcauguccaau

SEQ ID NO: 1587517 - RNA, 19 nt, Artificial Sequence
  Description of Artificial Sequence: Synthetic oligonucleotide
gggauaugauguuucaauc

SEQ ID NO: 1587518 - RNA, 19 nt, Artificial Sequence
  Description of Artificial Sequence: Synthetic oligonucleotide
acuuagacacagcaauauu

SEQ ID NO: 1587519 - RNA, 19 nt, Artificial Sequence
  Description of Artificial Sequence: Synthetic oligonucleotide
aguuccuaguacaccaucu

SEQ ID NO: 1587520 - RNA, 19 nt, Artificial Sequence
  Description of Artificial Sequence: Synthetic oligonucleotide
cagaccgguaguugaguag

SEQ ID NO: 1587521 - RNA, 19 nt, Artificial Sequence
  Description of Artificial Sequence: Synthetic oligonucleotide
agcacagaguuugcccacc

SEQ ID NO: 1587522 - RNA, 19 nt, Artificial Sequence
  Description of Artificial Sequence: Synthetic oligonucleotide
cccaccguguguaaggucc

SEQ ID NO: 1587523 - RNA, 19 nt, Artificial Sequence
  Description of Artificial Sequence: Synthetic oligonucleotide
agacacuauuuucaaucaa

SEQ ID NO: 1587524 - RNA, 19 nt, Artificial Sequence
  Description of Artificial Sequence: Synthetic oligonucleotide
uuugcccaccguguguaag

SEQ ID NO: 1587525 - RNA, 19 nt, Artificial Sequence
  Description of Artificial Sequence: Synthetic oligonucleotide
gucauaugaggcuguaaaa

SEQ ID NO: 1587526 - RNA, 19 nt, Artificial Sequence
  Description of Artificial Sequence: Synthetic oligonucleotide
guggacgaggaaccaaaug

SEQ ID NO: 1587527 - RNA, 19 nt, Artificial Sequence
  Description of Artificial Sequence: Synthetic oligonucleotide
cuguuucgcucucacugcc

SEQ ID NO: 1587528 - RNA, 19 nt, Artificial Sequence
  Description of Artificial Sequence: Synthetic oligonucleotide
ugucagacuuaggugugug

SEQ ID NO: 1587529 - RNA, 19 nt, Artificial Sequence
  Description of Artificial Sequence: Synthetic oligonucleotide
auguuucaaucaaucagca

SEQ ID NO: 1587530 - RNA, 19 nt, Artificial Sequence
  Description of Artificial Sequence: Synthetic oligonucleotide
gguuaucauacaguguuac

SEQ ID NO: 1587531 - RNA, 19 nt, Artificial Sequence
  Description of Artificial Sequence: Synthetic oligonucleotide
acgcuagccaugaaaagcu

SEQ ID NO: 1587532 - RNA, 19 nt, Artificial Sequence
  Description of Artificial Sequence: Synthetic oligonucleotide
ccgaguagcuaccaauugg

SEQ ID NO: 1587533 - RNA, 19 nt, Artificial Sequence
  Description of Artificial Sequence: Synthetic oligonucleotide
ugccgaguagcuaccaauu

SEQ ID NO: 1587534 - RNA, 19 nt, Artificial Sequence
  Description of Artificial Sequence: Synthetic oligonucleotide
uagccccaguacuucaaug

SEQ ID NO: 1587535 - RNA, 19 nt, Artificial Sequence
  Description of Artificial Sequence: Synthetic oligonucleotide
caguacuucaaugaggaua

SEQ ID NO: 1587536 - RNA, 19 nt, Artificial Sequence
  Description of Artificial Sequence: Synthetic oligonucleotide
gaaauccauuuauaacugu

SEQ ID NO: 1587537 - RNA, 19 nt, Artificial Sequence
  Description of Artificial Sequence: Synthetic oligonucleotide
aagaacgguuuuguguaaa

SEQ ID NO: 1587538 - RNA, 19 nt, Artificial Sequence
  Description of Artificial Sequence: Synthetic oligonucleotide
gaacgguuuuguguaaaga

SEQ ID NO: 1587539 - RNA, 19 nt, Artificial Sequence
  Description of Artificial Sequence: Synthetic oligonucleotide
cauacuccggucugcugug

SEQ ID NO: 1587540 - RNA, 19 nt, Artificial Sequence
  Description of Artificial Sequence: Synthetic oligonucleotide
augccgaguagcuaccaau

SEQ ID NO: 1587541 - RNA, 19 nt, Artificial Sequence
  Description of Artificial Sequence: Synthetic oligonucleotide
gaguuccuaguacaccauc

SEQ ID NO: 1587542 - RNA, 19 nt, Artificial Sequence
  Description of Artificial Sequence: Synthetic oligonucleotide
cgaguagcuaccaauuggc

SEQ ID NO: 1587543 - RNA, 19 nt, Artificial Sequence
  Description of Artificial Sequence: Synthetic oligonucleotide
accgguaguugaguaggac

SEQ ID NO: 1587544 - RNA, 19 nt, Artificial Sequence
  Description of Artificial Sequence: Synthetic oligonucleotide
ggaauuucaaugaacauuu

SEQ ID NO: 1587545 - RNA, 19 nt, Artificial Sequence
  Description of Artificial Sequence: Synthetic oligonucleotide
acggucacucuguugaguu

SEQ ID NO: 1587546 - RNA, 19 nt, Artificial Sequence
  Description of Artificial Sequence: Synthetic oligonucleotide
caaugcgucacugucaucu

SEQ ID NO: 1587547 - RNA, 19 nt, Artificial Sequence
  Description of Artificial Sequence: Synthetic oligonucleotide
ugaccgcuacccuaagguc

SEQ ID NO: 1587548 - RNA, 19 nt, Artificial Sequence
  Description of Artificial Sequence: Synthetic oligonucleotide
aauaaacuuucaggcuaaa

SEQ ID NO: 1587549 - RNA, 19 nt, Artificial Sequence
  Description of Artificial Sequence: Synthetic oligonucleotide
uccaugugaccgcuacccu

SEQ ID NO: 1587550 - RNA, 19 nt, Artificial Sequence
  Description of Artificial Sequence: Synthetic oligonucleotide
acgguuuuguguaaagaaa

SEQ ID NO: 1587551 - RNA, 19 nt, Artificial Sequence
  Description of Artificial Sequence: Synthetic oligonucleotide
guucuuauacuuagacaca

SEQ ID NO: 1587552 - RNA, 19 nt, Artificial Sequence
  Description of Artificial Sequence: Synthetic oligonucleotide
uagccaugaaaagcuuacc

SEQ ID NO: 1587553 - RNA, 19 nt, Artificial Sequence
  Description of Artificial Sequence: Synthetic oligonucleotide
ugguacugugugguaacca

SEQ ID NO: 1587554 - RNA, 19 nt, Artificial Sequence
  Description of Artificial Sequence: Synthetic oligonucleotide
gggaugacacacuucaaaa

SEQ ID NO: 1587555 - RNA, 19 nt, Artificial Sequence
  Description of Artificial Sequence: Synthetic oligonucleotide
accacgcuagccaugaaaa

SEQ ID NO: 1587556 - RNA, 19 nt, Artificial Sequence
  Description of Artificial Sequence: Synthetic oligonucleotide
gcauuaugaaaauggugga

SEQ ID NO: 1587557 - RNA, 19 nt, Artificial Sequence
  Description of Artificial Sequence: Synthetic oligonucleotide
gugauguaaaaguuggauu

SEQ ID NO: 1587558 - RNA, 19 nt, Artificial Sequence
  Description of Artificial Sequence: Synthetic oligonucleotide
uugguacugugugguaacc

SEQ ID NO: 1587559 - RNA, 19 nt, Artificial Sequence
  Description of Artificial Sequence: Synthetic oligonucleotide
acgaggaaccaaaugacuu

SEQ ID NO: 1587560 - RNA, 19 nt, Artificial Sequence
  Description of Artificial Sequence: Synthetic oligonucleotide
guaagguccuggguucuag

SEQ ID NO: 1587561 - RNA, 19 nt, Artificial Sequence
  Description of Artificial Sequence: Synthetic oligonucleotide
accguguguaagguccugg

SEQ ID NO: 1587562 - RNA, 19 nt, Artificial Sequence
  Description of Artificial Sequence: Synthetic oligonucleotide
agccuagguuuucugugca

SEQ ID NO: 1587563 - RNA, 19 nt, Artificial Sequence
  Description of Artificial Sequence: Synthetic oligonucleotide
guggcaauggaauuucaau

SEQ ID NO: 1587564 - RNA, 19 nt, Artificial Sequence
  Description of Artificial Sequence: Synthetic oligonucleotide
gccaccgaugucuugguac

SEQ ID NO: 1587565 - RNA, 19 nt, Artificial Sequence
  Description of Artificial Sequence: Synthetic oligonucleotide
gacuuagguguguggcuca

SEQ ID NO: 1587566 - RNA, 19 nt, Artificial Sequence
  Description of Artificial Sequence: Synthetic oligonucleotide
ccuaguacaccaucuucug

SEQ ID NO: 1587567 - RNA, 19 nt, Artificial Sequence
  Description of Artificial Sequence: Synthetic oligonucleotide
acugugugguaaccacgcu

SEQ ID NO: 1587568 - RNA, 19 nt, Artificial Sequence
  Description of Artificial Sequence: Synthetic oligonucleotide
auggucagaccgguaguug

SEQ ID NO: 1587569 - RNA, 19 nt, Artificial Sequence
  Description of Artificial Sequence: Synthetic oligonucleotide
ggacgaggaaccaaaugac

SEQ ID NO: 1587570 - RNA, 19 nt, Artificial Sequence
  Description of Artificial Sequence: Synthetic oligonucleotide
ucccauaguccugaauuuu

SEQ ID NO: 1587571 - RNA, 19 nt, Artificial Sequence
  Description of Artificial Sequence: Synthetic oligonucleotide
uauuggccaccgaugucuu

SEQ ID NO: 1587572 - RNA, 19 nt, Artificial Sequence
  Description of Artificial Sequence: Synthetic oligonucleotide
accgaugucuugguacugu

SEQ ID NO: 1587573 - RNA, 19 nt, Artificial Sequence
  Description of Artificial Sequence: Synthetic oligonucleotide
acuuagguguguggcucag

SEQ ID NO: 1587574 - RNA, 19 nt, Artificial Sequence
  Description of Artificial Sequence: Synthetic oligonucleotide
acuccggucugcuguggca

SEQ ID NO: 1587575 - RNA, 19 nt, Artificial Sequence
  Description of Artificial Sequence: Synthetic oligonucleotide
uagcauacuccggucugcu

SEQ ID NO: 1587576 - RNA, 19 nt, Artificial Sequence
  Description of Artificial Sequence: Synthetic oligonucleotide
ccccauuuaccaauuagca

SEQ ID NO: 1587577 - RNA, 19 nt, Artificial Sequence
  Description of Artificial Sequence: Synthetic oligonucleotide
ugcagacccauggugugau

SEQ ID NO: 1587578 - RNA, 19 nt, Artificial Sequence
  Description of Artificial Sequence: Synthetic oligonucleotide
cucuguugaguuccuagua

SEQ ID NO: 1587579 - RNA, 19 nt, Artificial Sequence
  Description of Artificial Sequence: Synthetic oligonucleotide
cauuaugcucagggcuggg

SEQ ID NO: 1587580 - RNA, 19 nt, Artificial Sequence
  Description of Artificial Sequence: Synthetic oligonucleotide
ggacguagagccuagguuu

SEQ ID NO: 1587581 - RNA, 19 nt, Artificial Sequence
  Description of Artificial Sequence: Synthetic oligonucleotide
gaccgcuacccuaaggucu

SEQ ID NO: 1587582 - RNA, 19 nt, Artificial Sequence
  Description of Artificial Sequence: Synthetic oligonucleotide
agacccauggugugaugua

SEQ ID NO: 1587583 - RNA, 19 nt, Artificial Sequence
  Description of Artificial Sequence: Synthetic oligonucleotide
cugugugguaaccacgcua

SEQ ID NO: 1587584 - RNA, 19 nt, Artificial Sequence
  Description of Artificial Sequence: Synthetic oligonucleotide
agcuaccaauuggccaaac

SEQ ID NO: 1587585 - RNA, 19 nt, Artificial Sequence
  Description of Artificial Sequence: Synthetic oligonucleotide
ugcgagggacguagagccu

SEQ ID NO: 1587586 - RNA, 19 nt, Artificial Sequence
  Description of Artificial Sequence: Synthetic oligonucleotide
guucuagccccaguacuuc

SEQ ID NO: 1587587 - RNA, 19 nt, Artificial Sequence
  Description of Artificial Sequence: Synthetic oligonucleotide
acguagagccuagguuuuc

SEQ ID NO: 1587588 - RNA, 19 nt, Artificial Sequence
  Description of Artificial Sequence: Synthetic oligonucleotide
gccgaguagcuaccaauug

SEQ ID NO: 1587589 - RNA, 19 nt, Artificial Sequence
  Description of Artificial Sequence: Synthetic oligonucleotide
cauaauugauauccuuaau

SEQ ID NO: 1587590 - RNA, 19 nt, Artificial Sequence
  Description of Artificial Sequence: Synthetic oligonucleotide
gcuaccaauuggccaaaca

SEQ ID NO: 1587591 - RNA, 19 nt, Artificial Sequence
  Description of Artificial Sequence: Synthetic oligonucleotide
uuucgcucucacugccguc

SEQ ID NO: 1587592 - RNA, 19 nt, Artificial Sequence
  Description of Artificial Sequence: Synthetic oligonucleotide
ccauggugugauguaaaag

SEQ ID NO: 1587593 - RNA, 19 nt, Artificial Sequence
  Description of Artificial Sequence: Synthetic oligonucleotide
gugugguaaccacgcuagc

SEQ ID NO: 1587594 - RNA, 19 nt, Artificial Sequence
  Description of Artificial Sequence: Synthetic oligonucleotide
gacccauggugugauguaa

SEQ ID NO: 1587595 - RNA, 19 nt, Artificial Sequence
  Description of Artificial Sequence: Synthetic oligonucleotide
cagaguuugcccaccgugu

SEQ ID NO: 1587596 - RNA, 19 nt, Artificial Sequence
  Description of Artificial Sequence: Synthetic oligonucleotide
augugaccgcuacccuaag

SEQ ID NO: 1587597 - RNA, 19 nt, Artificial Sequence
  Description of Artificial Sequence: Synthetic oligonucleotide
guccaaugcgucacuguca

SEQ ID NO: 1587598 - RNA, 19 nt, Artificial Sequence
  Description of Artificial Sequence: Synthetic oligonucleotide
auacuccggucugcugugg

SEQ ID NO: 1587599 - RNA, 19 nt, Artificial Sequence
  Description of Artificial Sequence: Synthetic oligonucleotide
gcuacccuaaggucuccug

SEQ ID NO: 1587600 - RNA, 19 nt, Artificial Sequence
  Description of Artificial Sequence: Synthetic oligonucleotide
agcaaaugccgaguagcua

SEQ ID NO: 1587601 - RNA, 19 nt, Artificial Sequence
  Description of Artificial Sequence: Synthetic oligonucleotide
gcauacuccggucugcugu

SEQ ID NO: 1587602 - RNA, 19 nt, Artificial Sequence
  Description of Artificial Sequence: Synthetic oligonucleotide
  modified_base (2)..(2): a, c, u, g, unknown or other
cngacacaggacagaggga

SEQ ID NO: 1587603 - RNA, 19 nt, Artificial Sequence
  Description of Artificial Sequence: Synthetic oligonucleotide
aucuacccucuacccaaaa

SEQ ID NO: 1587604 - RNA, 19 nt, Artificial Sequence
  Description of Artificial Sequence: Synthetic oligonucleotide
gaguuugcccaccgugugu

SEQ ID NO: 1587605 - RNA, 19 nt, Artificial Sequence
  Description of Artificial Sequence: Synthetic oligonucleotide
uguaagguccuggguucua

SEQ ID NO: 1587606 - RNA, 19 nt, Artificial Sequence
  Description of Artificial Sequence: Synthetic oligonucleotide
caagaacgguuuuguguaa

SEQ ID NO: 1587607 - RNA, 19 nt, Artificial Sequence
  Description of Artificial Sequence: Synthetic oligonucleotide
gcuggaaaagaaugagcua

SEQ ID NO: 1587608 - RNA, 19 nt, Artificial Sequence
  Description of Artificial Sequence: Synthetic oligonucleotide
cagcaaaugccgaguagcu

SEQ ID NO: 1587609 - RNA, 19 nt, Artificial Sequence
  Description of Artificial Sequence: Synthetic oligonucleotide
ccaguuagcugggauauga

SEQ ID NO: 1587610 - RNA, 19 nt, Artificial Sequence
  Description of Artificial Sequence: Synthetic oligonucleotide
cagacuuagguguguggcu

SEQ ID NO: 1587611 - RNA, 19 nt, Artificial Sequence
  Description of Artificial Sequence: Synthetic oligonucleotide
gccuagguuuucugugcag

SEQ ID NO: 1587612 - RNA, 19 nt, Artificial Sequence
  Description of Artificial Sequence: Synthetic oligonucleotide
gugugcagacccauggugu

SEQ ID NO: 1587613 - RNA, 19 nt, Artificial Sequence
  Description of Artificial Sequence: Synthetic oligonucleotide
ccacgcuagccaugaaaag

SEQ ID NO: 1587614 - RNA, 19 nt, Artificial Sequence
  Description of Artificial Sequence: Synthetic oligonucleotide
caaucagcaaaugccgagu

SEQ ID NO: 1587615 - RNA, 19 nt, Artificial Sequence
  Description of Artificial Sequence: Synthetic oligonucleotide
gguaaccacgcuagccaug

SEQ ID NO: 1587616 - RNA, 19 nt, Artificial Sequence
  Description of Artificial Sequence: Synthetic oligonucleotide
agguuaucauacaguguua

SEQ ID NO: 1587617 - RNA, 19 nt, Artificial Sequence
  Description of Artificial Sequence: Synthetic oligonucleotide
gauggucagaccgguaguu

SEQ ID NO: 1587618 - RNA, 19 nt, Artificial Sequence
  Description of Artificial Sequence: Synthetic oligonucleotide
uaaccacgcuagccaugaa

SEQ ID NO: 1587619 - RNA, 19 nt, Artificial Sequence
  Description of Artificial Sequence: Synthetic oligonucleotide
caguacaaugaaauccauu

SEQ ID NO: 1587620 - RNA, 19 nt, Artificial Sequence
  Description of Artificial Sequence: Synthetic oligonucleotide
augugugcacugacuuuga

SEQ ID NO: 1587621 - RNA, 19 nt, Artificial Sequence
  Description of Artificial Sequence: Synthetic oligonucleotide
ggguucuagccccaguacu

SEQ ID NO: 1587622 - RNA, 19 nt, Artificial Sequence
  Description of Artificial Sequence: Synthetic oligonucleotide
uccggucugcuguggcaau

SEQ ID NO: 1587623 - RNA, 19 nt, Artificial Sequence
  Description of Artificial Sequence: Synthetic oligonucleotide
ccauaguccugaauuuuaa

SEQ ID NO: 1587624 - RNA, 19 nt, Artificial Sequence
  Description of Artificial Sequence: Synthetic oligonucleotide
ccgaugucuugguacugug

SEQ ID NO: 1587625 - RNA, 19 nt, Artificial Sequence
  Description of Artificial Sequence: Synthetic oligonucleotide
uagcuaccaauuggccaaa

SEQ ID NO: 1587626 - RNA, 19 nt, Artificial Sequence
  Description of Artificial Sequence: Synthetic oligonucleotide
gaccgguaguugaguagga

SEQ ID NO: 1587627 - RNA, 19 nt, Artificial Sequence
  Description of Artificial Sequence: Synthetic oligonucleotide
uggccucauuucccauaaa

SEQ ID NO: 1587628 - RNA, 19 nt, Artificial Sequence
  Description of Artificial Sequence: Synthetic oligonucleotide
cagacccauggugugaugu

SEQ ID NO: 1587629 - RNA, 19 nt, Artificial Sequence
  Description of Artificial Sequence: Synthetic oligonucleotide
gcugggaaaggcuucuuuu

SEQ ID NO: 1587630 - RNA, 19 nt, Artificial Sequence
  Description of Artificial Sequence: Synthetic oligonucleotide
caccgaugucuugguacug

SEQ ID NO: 1587631 - RNA, 19 nt, Artificial Sequence
  Description of Artificial Sequence: Synthetic oligonucleotide
cccauaguccugaauuuua

SEQ ID NO: 1587632 - RNA, 19 nt, Artificial Sequence
  Description of Artificial Sequence: Synthetic oligonucleotide
gggacguagagccuagguu

SEQ ID NO: 1587633 - RNA, 19 nt, Artificial Sequence
  Description of Artificial Sequence: Synthetic oligonucleotide
gacguagagccuagguuuu

SEQ ID NO: 1587634 - RNA, 19 nt, Artificial Sequence
  Description of Artificial Sequence: Synthetic oligonucleotide
agugauggucagaccggua

SEQ ID NO: 1587635 - RNA, 19 nt, Artificial Sequence
  Description of Artificial Sequence: Synthetic oligonucleotide
ccgguaguugaguaggacu

SEQ ID NO: 1587636 - RNA, 19 nt, Artificial Sequence
  Description of Artificial Sequence: Synthetic oligonucleotide
cuccggucugcuguggcaa

SEQ ID NO: 1587637 - RNA, 19 nt, Artificial Sequence
  Description of Artificial Sequence: Synthetic oligonucleotide
cagucauaugaggcuguaa

SEQ ID NO: 1587638 - RNA, 19 nt, Artificial Sequence
  Description of Artificial Sequence: Synthetic oligonucleotide
gucagaccgguaguugagu

SEQ ID NO: 1587639 - RNA, 19 nt, Artificial Sequence
  Description of Artificial Sequence: Synthetic oligonucleotide
ggugggaugcgagggacgu

SEQ ID NO: 1587640 - RNA, 19 nt, Artificial Sequence
  Description of Artificial Sequence: Synthetic oligonucleotide
gguucuagccccaguacuu

SEQ ID NO: 1587641 - RNA, 19 nt, Artificial Sequence
  Description of Artificial Sequence: Synthetic oligonucleotide
cuagccccaguacuucaau

SEQ ID NO: 1587642 - RNA, 19 nt, Artificial Sequence
  Description of Artificial Sequence: Synthetic oligonucleotide
cacagaguuugcccaccgu

SEQ ID NO: 1587643 - RNA, 19 nt, Artificial Sequence
  Description of Artificial Sequence: Synthetic oligonucleotide
cgagggacguagagccuag

SEQ ID NO: 1587644 - RNA, 19 nt, Artificial Sequence
  Description of Artificial Sequence: Synthetic oligonucleotide
cagugauggucagaccggu

SEQ ID NO: 1587645 - RNA, 19 nt, Artificial Sequence
  Description of Artificial Sequence: Synthetic oligonucleotide
ccaccgaugucuugguacu

SEQ ID NO: 1587646 - RNA, 19 nt, Artificial Sequence
  Description of Artificial Sequence: Synthetic oligonucleotide
guacuucaaugaggauaaa

SEQ ID NO: 1587647 - RNA, 19 nt, Artificial Sequence
  Description of Artificial Sequence: Synthetic oligonucleotide
gcgagggacguagagccua

SEQ ID NO: 1587648 - RNA, 19 nt, Artificial Sequence
  Description of Artificial Sequence: Synthetic oligonucleotide
cgucugccaaggugggaug

SEQ ID NO: 1587649 - RNA, 19 nt, Artificial Sequence
  Description of Artificial Sequence: Synthetic oligonucleotide
cuuagguguguggcucagu

SEQ ID NO: 1587650 - RNA, 19 nt, Artificial Sequence
  Description of Artificial Sequence: Synthetic oligonucleotide
ccaaugcgucacugucauc

SEQ ID NO: 1587651 - RNA, 19 nt, Artificial Sequence
  Description of Artificial Sequence: Synthetic oligonucleotide
gcauguccaaugcgucacu

SEQ ID NO: 1587652 - RNA, 19 nt, Artificial Sequence
  Description of Artificial Sequence: Synthetic oligonucleotide
gcacugacuuugagauguc

SEQ ID NO: 1587653 - RNA, 19 nt, Artificial Sequence
  Description of Artificial Sequence: Synthetic oligonucleotide
gguggacgaggaaccaaau

SEQ ID NO: 1587654 - RNA, 19 nt, Artificial Sequence
  Description of Artificial Sequence: Synthetic oligonucleotide
gggaugcgagggacguaga

SEQ ID NO: 1587655 - RNA, 19 nt, Artificial Sequence
  Description of Artificial Sequence: Synthetic oligonucleotide
cgaugucuugguacugugu

SEQ ID NO: 1587656 - RNA, 19 nt, Artificial Sequence
  Description of Artificial Sequence: Synthetic oligonucleotide
ggccaccgaugucuuggua

SEQ ID NO: 1587657 - RNA, 19 nt, Artificial Sequence
  Description of Artificial Sequence: Synthetic oligonucleotide
ccaccguguguaagguccu

SEQ ID NO: 1587658 - RNA, 19 nt, Artificial Sequence
  Description of Artificial Sequence: Synthetic oligonucleotide
gccgucugccaagguggga

SEQ ID NO: 1587659 - RNA, 19 nt, Artificial Sequence
  Description of Artificial Sequence: Synthetic oligonucleotide
ccgcuacccuaaggucucc

SEQ ID NO: 1587660 - RNA, 19 nt, Artificial Sequence
  Description of Artificial Sequence: Synthetic oligonucleotide
cgcuacccuaaggucuccu

SEQ ID NO: 1587661 - RNA, 19 nt, Artificial Sequence
  Description of Artificial Sequence: Synthetic oligonucleotide
  modified_base (11)..(11): a, c, u, g, unknown or other
agugaaaauancuuuacag

SEQ ID NO: 1587662 - RNA, 19 nt, Artificial Sequence
  Description of Artificial Sequence: Synthetic oligonucleotide
  modified_base (9)..(9): a, c, u, g, unknown or other
ugaaaauancuuuacagcc

SEQ ID NO: 1587663 - RNA, 19 nt, Artificial Sequence
  Description of Artificial Sequence: Synthetic oligonucleotide
aacuauagaguggagaacc

SEQ ID NO: 1587664 - RNA, 19 nt, Artificial Sequence
  Description of Artificial Sequence: Synthetic oligonucleotide
aauuguguaagugagcaac

SEQ ID NO: 1587665 - RNA, 19 nt, Artificial Sequence
  Description of Artificial Sequence: Synthetic oligonucleotide
gaguguuugaagcaaaugg

SEQ ID NO: 1587666 - RNA, 19 nt, Artificial Sequence
  Description of Artificial Sequence: Synthetic oligonucleotide
  modified_base (10)..(10): a, c, u, g, unknown or other
gugaaaauancuuuacagc

SEQ ID NO: 1587667 - RNA, 19 nt, Artificial Sequence
  Description of Artificial Sequence: Synthetic oligonucleotide
uuuccuaugggccacacug

SEQ ID NO: 1587668 - RNA, 19 nt, Artificial Sequence
  Description of Artificial Sequence: Synthetic oligonucleotide
guguuagccacacagaugg

SEQ ID NO: 1587669 - RNA, 19 nt, Artificial Sequence
  Description of Artificial Sequence: Synthetic oligonucleotide
aaccaaagcaacuucagcu

SEQ ID NO: 1587670 - RNA, 19 nt, Artificial Sequence
  Description of Artificial Sequence: Synthetic oligonucleotide
cagaauauugggaaaacgg

SEQ ID NO: 1587671 - RNA, 19 nt, Artificial Sequence
  Description of Artificial Sequence: Synthetic oligonucleotide
uccaauguaacacuggaac

SEQ ID NO: 1587672 - RNA, 19 nt, Artificial Sequence
  Description of Artificial Sequence: Synthetic oligonucleotide
uauagaguggagaaccagg

SEQ ID NO: 1587673 - RNA, 19 nt, Artificial Sequence
  Description of Artificial Sequence: Synthetic oligonucleotide
  modified_base (2)..(2): a, c, u, g, unknown or other
ancuuuacagccuuugaga

SEQ ID NO: 1587674 - RNA, 19 nt, Artificial Sequence
  Description of Artificial Sequence: Synthetic oligonucleotide
gaagcgacagucuagcuag

SEQ ID NO: 1587675 - RNA, 19 nt, Artificial Sequence
  Description of Artificial Sequence: Synthetic oligonucleotide
aguaacaccaguccgaugu

SEQ ID NO: 1587676 - RNA, 19 nt, Artificial Sequence
  Description of Artificial Sequence: Synthetic oligonucleotide
auauugggaaaacggaagc

SEQ ID NO: 1587677 - RNA, 19 nt, Artificial Sequence
  Description of Artificial Sequence: Synthetic oligonucleotide
uaauccacaguuauggcgc

SEQ ID NO: 1587678 - RNA, 19 nt, Artificial Sequence
  Description of Artificial Sequence: Synthetic oligonucleotide
ugugagaguauauuguaag

SEQ ID NO: 1587679 - RNA, 19 nt, Artificial Sequence
  Description of Artificial Sequence: Synthetic oligonucleotide
acacaauucugagagaugc

SEQ ID NO: 1587680 - RNA, 19 nt, Artificial Sequence
  Description of Artificial Sequence: Synthetic oligonucleotide
agugauaacccagugauuc

SEQ ID NO: 1587681 - RNA, 19 nt, Artificial Sequence
  Description of Artificial Sequence: Synthetic oligonucleotide
uuaugaaacuauagagugg

SEQ ID NO: 1587682 - RNA, 19 nt, Artificial Sequence
  Description of Artificial Sequence: Synthetic oligonucleotide
  modified_base (3)..(3): a, c, u, g, unknown or other
uancuuuacagccuuugag

SEQ ID NO: 1587683 - RNA, 19 nt, Artificial Sequence
  Description of Artificial Sequence: Synthetic oligonucleotide
aucacugaaaagucaaaac

SEQ ID NO: 1587684 - RNA, 19 nt, Artificial Sequence
  Description of Artificial Sequence: Synthetic oligonucleotide
aaauuuggaguguuugaag

SEQ ID NO: 1587685 - RNA, 19 nt, Artificial Sequence
  Description of Artificial Sequence: Synthetic oligonucleotide
aaauguaauccacaguuau

SEQ ID NO: 1587686 - RNA, 19 nt, Artificial Sequence
  Description of Artificial Sequence: Synthetic oligonucleotide
uggguuauacagcagaugu

SEQ ID NO: 1587687 - RNA, 19 nt, Artificial Sequence
  Description of Artificial Sequence: Synthetic oligonucleotide
aaaacggaagcuccaaugu

SEQ ID NO: 1587688 - RNA, 19 nt, Artificial Sequence
  Description of Artificial Sequence: Synthetic oligonucleotide
  modified_base (7)..(7): a, c, u, g, unknown or other
aaaauancuuuacagccuu

SEQ ID NO: 1587689 - RNA, 19 nt, Artificial Sequence
  Description of Artificial Sequence: Synthetic oligonucleotide
uauuguaagacaucacuga

SEQ ID NO: 1587690 - RNA, 19 nt, Artificial Sequence
  Description of Artificial Sequence: Synthetic oligonucleotide
uuuucagcugacauuagga

SEQ ID NO: 1587691 - RNA, 19 nt, Artificial Sequence
  Description of Artificial Sequence: Synthetic oligonucleotide
guaauccacaguuauggcg

SEQ ID NO: 1587692 - RNA, 19 nt, Artificial Sequence
  Description of Artificial Sequence: Synthetic oligonucleotide
aguguuugaagcaaauggc

SEQ ID NO: 1587693 - RNA, 19 nt, Artificial Sequence
  Description of Artificial Sequence: Synthetic oligonucleotide
  modified_base (8)..(8): a, c, u, g, unknown or other
uuuguuunuucccaucucu

SEQ ID NO: 1587694 - RNA, 19 nt, Artificial Sequence
  Description of Artificial Sequence: Synthetic oligonucleotide
uuuacagccuuugagaaga

SEQ ID NO: 1587695 - RNA, 19 nt, Artificial Sequence
  Description of Artificial Sequence: Synthetic oligonucleotide
ugugaagacacguuuucag

SEQ ID NO: 1587696 - RNA, 19 nt, Artificial Sequence
  Description of Artificial Sequence: Synthetic oligonucleotide
acaguuauggcgcuuuggg

SEQ ID NO: 1587697 - RNA, 19 nt, Artificial Sequence
  Description of Artificial Sequence: Synthetic oligonucleotide
gaaacuauagaguggagaa

SEQ ID NO: 1587698 - RNA, 19 nt, Artificial Sequence
  Description of Artificial Sequence: Synthetic oligonucleotide
uguaacacuggaacgccgg

SEQ ID NO: 1587699 - RNA, 19 nt, Artificial Sequence
  Description of Artificial Sequence: Synthetic oligonucleotide
  modified_base (5)..(5): a, c, u, g, unknown or other
aauancuuuacagccuuug

SEQ ID NO: 1587700 - RNA, 19 nt, Artificial Sequence
  Description of Artificial Sequence: Synthetic oligonucleotide
aguauauuguaagacauca

SEQ ID NO: 1587701 - RNA, 19 nt, Artificial Sequence
  Description of Artificial Sequence: Synthetic oligonucleotide
agaaguuucaagccccaac

SEQ ID NO: 1587702 - RNA, 19 nt, Artificial Sequence
  Description of Artificial Sequence: Synthetic oligonucleotide
aggagugaaaauuuggagu

SEQ ID NO: 1587703 - RNA, 19 nt, Artificial Sequence
  Description of Artificial Sequence: Synthetic oligonucleotide
ucaaaacuuuucuucacug

SEQ ID NO: 1587704 - RNA, 19 nt, Artificial Sequence
  Description of Artificial Sequence: Synthetic oligonucleotide
ugagaauagacagaugaca

SEQ ID NO: 1587705 - RNA, 19 nt, Artificial Sequence
  Description of Artificial Sequence: Synthetic oligonucleotide
ugagaagacaggaaauugu

SEQ ID NO: 1587706 - RNA, 19 nt, Artificial Sequence
  Description of Artificial Sequence: Synthetic oligonucleotide
agcuuaauaucuccucgcc

SEQ ID NO: 1587707 - RNA, 19 nt, Artificial Sequence
  Description of Artificial Sequence: Synthetic oligonucleotide
gaaauuguguaagugagca

SEQ ID NO: 1587708 - RNA, 19 nt, Artificial Sequence
  Description of Artificial Sequence: Synthetic oligonucleotide
  modified_base (4)..(4): a, c, u, g, unknown or other
uuunuucccaucucuuuca

SEQ ID NO: 1587709 - RNA, 19 nt, Artificial Sequence
  Description of Artificial Sequence: Synthetic oligonucleotide
  modified_base (15)..(15): a, c, u, g, unknown or other
aaacagugaaaauancuuu

SEQ ID NO: 1587710 - RNA, 19 nt, Artificial Sequence
  Description of Artificial Sequence: Synthetic oligonucleotide
aguggaaugucacggcggc

SEQ ID NO: 1587711 - RNA, 19 nt, Artificial Sequence
  Description of Artificial Sequence: Synthetic oligonucleotide
uuauuauggcuacauaaau

SEQ ID NO: 1587712 - RNA, 19 nt, Artificial Sequence
  Description of Artificial Sequence: Synthetic oligonucleotide
ucagaauauugggaaaacg

SEQ ID NO: 1587713 - RNA, 19 nt, Artificial Sequence
  Description of Artificial Sequence: Synthetic oligonucleotide
uauuauggcuacauaaaua

SEQ ID NO: 1587714 - RNA, 19 nt, Artificial Sequence
  Description of Artificial Sequence: Synthetic oligonucleotide
aauagaucuugugagagua

SEQ ID NO: 1587715 - RNA, 19 nt, Artificial Sequence
  Description of Artificial Sequence: Synthetic oligonucleotide
gagaguauauuguaagaca

SEQ ID NO: 1587716 - RNA, 19 nt, Artificial Sequence
  Description of Artificial Sequence: Synthetic oligonucleotide
ugagaguauauuguaagac

SEQ ID NO: 1587717 - RNA, 19 nt, Artificial Sequence
  Description of Artificial Sequence: Synthetic oligonucleotide
ugaaacuauagaguggaga

SEQ ID NO: 1587718 - RNA, 19 nt, Artificial Sequence
  Description of Artificial Sequence: Synthetic oligonucleotide
ugaaccacacagcacaaaa

SEQ ID NO: 1587719 - RNA, 19 nt, Artificial Sequence
  Description of Artificial Sequence: Synthetic oligonucleotide
accaguccgauguuguccc

SEQ ID NO: 1587720 - RNA, 19 nt, Artificial Sequence
  Description of Artificial Sequence: Synthetic oligonucleotide
ugcaaguccuucauaauuc

SEQ ID NO: 1587721 - RNA, 19 nt, Artificial Sequence
  Description of Artificial Sequence: Synthetic oligonucleotide
auagcaaauucugaaccac

SEQ ID NO: 1587722 - RNA, 19 nt, Artificial Sequence
  Description of Artificial Sequence: Synthetic oligonucleotide
caauguaacacuggaacgc

SEQ ID NO: 1587723 - RNA, 19 nt, Artificial Sequence
  Description of Artificial Sequence: Synthetic oligonucleotide
uguaagaagcgacagucua

SEQ ID NO: 1587724 - RNA, 19 nt, Artificial Sequence
  Description of Artificial Sequence: Synthetic oligonucleotide
aggaguuguguucauuggg

SEQ ID NO: 1587725 - RNA, 19 nt, Artificial Sequence
  Description of Artificial Sequence: Synthetic oligonucleotide
guuuucagcugacauuagg

SEQ ID NO: 1587726 - RNA, 19 nt, Artificial Sequence
  Description of Artificial Sequence: Synthetic oligonucleotide
auugggaaaacggaagcuc

SEQ ID NO: 1587727 - RNA, 19 nt, Artificial Sequence
  Description of Artificial Sequence: Synthetic oligonucleotide
aggaaauuguguaagugag

SEQ ID NO: 1587728 - RNA, 19 nt, Artificial Sequence
  Description of Artificial Sequence: Synthetic oligonucleotide
cucgccguggguuauacag

SEQ ID NO: 1587729 - RNA, 19 nt, Artificial Sequence
  Description of Artificial Sequence: Synthetic oligonucleotide
aaaauucucuguccccgug

SEQ ID NO: 1587730 - RNA, 19 nt, Artificial Sequence
  Description of Artificial Sequence: Synthetic oligonucleotide
uguguaagugagcaacaga

SEQ ID NO: 1587731 - RNA, 19 nt, Artificial Sequence
  Description of Artificial Sequence: Synthetic oligonucleotide
uaagaagcgacagucuagc

SEQ ID NO: 1587732 - RNA, 19 nt, Artificial Sequence
  Description of Artificial Sequence: Synthetic oligonucleotide
auagacagaugacaagcug

SEQ ID NO: 1587733 - RNA, 19 nt, Artificial Sequence
  Description of Artificial Sequence: Synthetic oligonucleotide
auauuguaagacaucacug

SEQ ID NO: 1587734 - RNA, 19 nt, Artificial Sequence
  Description of Artificial Sequence: Synthetic oligonucleotide
ugugaauuguccuccaaua

SEQ ID NO: 1587735 - RNA, 19 nt, Artificial Sequence
  Description of Artificial Sequence: Synthetic oligonucleotide
ucuguagaggugugaauug

SEQ ID NO: 1587736 - RNA, 19 nt, Artificial Sequence
  Description of Artificial Sequence: Synthetic oligonucleotide
uguguuagccacacagaug

SEQ ID NO: 1587737 - RNA, 19 nt, Artificial Sequence
  Description of Artificial Sequence: Synthetic oligonucleotide
aauguaauccacaguuaug

SEQ ID NO: 1587738 - RNA, 19 nt, Artificial Sequence
  Description of Artificial Sequence: Synthetic oligonucleotide
uguuccauaauggucuucu

SEQ ID NO: 1587739 - RNA, 19 nt, Artificial Sequence
  Description of Artificial Sequence: Synthetic oligonucleotide
uugagaagacaggaaauug

SEQ ID NO: 1587740 - RNA, 19 nt, Artificial Sequence
  Description of Artificial Sequence: Synthetic oligonucleotide
aaauucucuguccccguga

SEQ ID NO: 1587741 - RNA, 19 nt, Artificial Sequence
  Description of Artificial Sequence: Synthetic oligonucleotide
caggagugaaaauuuggag

SEQ ID NO: 1587742 - RNA, 19 nt, Artificial Sequence
  Description of Artificial Sequence: Synthetic oligonucleotide
agcaguggaaugucacggc

SEQ ID NO: 1587743 - RNA, 19 nt, Artificial Sequence
  Description of Artificial Sequence: Synthetic oligonucleotide
gaagacacguuuucagcug

SEQ ID NO: 1587744 - RNA, 19 nt, Artificial Sequence
  Description of Artificial Sequence: Synthetic oligonucleotide
agcauugccaauuguguga

SEQ ID NO: 1587745 - RNA, 19 nt, Artificial Sequence
  Description of Artificial Sequence: Synthetic oligonucleotide
agaauauugggaaaacgga

SEQ ID NO: 1587746 - RNA, 19 nt, Artificial Sequence
  Description of Artificial Sequence: Synthetic oligonucleotide
  modified_base (5)..(5): a, c, u, g, unknown or other
guuunuucccaucucuuuc

SEQ ID NO: 1587747 - RNA, 19 nt, Artificial Sequence
  Description of Artificial Sequence: Synthetic oligonucleotide
aaguuucaagccccaacca

SEQ ID NO: 1587748 - RNA, 19 nt, Artificial Sequence
  Description of Artificial Sequence: Synthetic oligonucleotide
uguguguuagccacacaga

SEQ ID NO: 1587749 - RNA, 19 nt, Artificial Sequence
  Description of Artificial Sequence: Synthetic oligonucleotide
uccaauagaucuugugaga

SEQ ID NO: 1587750 - RNA, 19 nt, Artificial Sequence
  Description of Artificial Sequence: Synthetic oligonucleotide
aauagacagaugacaagcu

SEQ ID NO: 1587751 - RNA, 19 nt, Artificial Sequence
  Description of Artificial Sequence: Synthetic oligonucleotide
gagcuuaauaucuccucgc

SEQ ID NO: 1587752 - RNA, 19 nt, Artificial Sequence
  Description of Artificial Sequence: Synthetic oligonucleotide
aaguccuucauaauucagu

SEQ ID NO: 1587753 - RNA, 19 nt, Artificial Sequence
  Description of Artificial Sequence: Synthetic oligonucleotide
  modified_base (4)..(4): a, c, u, g, unknown or other
auancuuuacagccuuuga

SEQ ID NO: 1587754 - RNA, 19 nt, Artificial Sequence
  Description of Artificial Sequence: Synthetic oligonucleotide
uuaauaucuccucgccgug

SEQ ID NO: 1587755 - RNA, 19 nt, Artificial Sequence
  Description of Artificial Sequence: Synthetic oligonucleotide
uccgauguugucccugucc

SEQ ID NO: 1587756 - RNA, 19 nt, Artificial Sequence
  Description of Artificial Sequence: Synthetic oligonucleotide
ugacauuaggaccucuguc

SEQ ID NO: 1587757 - RNA, 19 nt, Artificial Sequence
  Description of Artificial Sequence: Synthetic oligonucleotide
auugccaauugugugagcu

SEQ ID NO: 1587758 - RNA, 19 nt, Artificial Sequence
  Description of Artificial Sequence: Synthetic oligonucleotide
aagacacguuuucagcuga

SEQ ID NO: 1587759 - RNA, 19 nt, Artificial Sequence
  Description of Artificial Sequence: Synthetic oligonucleotide
uggaaugucacggcggcag

SEQ ID NO: 1587760 - RNA, 19 nt, Artificial Sequence
  Description of Artificial Sequence: Synthetic oligonucleotide
gacauuaggaccucugucu

SEQ ID NO: 1587761 - RNA, 19 nt, Artificial Sequence
  Description of Artificial Sequence: Synthetic oligonucleotide
cauaauggucuucuugaac

SEQ ID NO: 1587762 - RNA, 19 nt, Artificial Sequence
  Description of Artificial Sequence: Synthetic oligonucleotide
accgucuuuccuaugggcc

SEQ ID NO: 1587763 - RNA, 19 nt, Artificial Sequence
  Description of Artificial Sequence: Synthetic oligonucleotide
  modified_base (7)..(7): a, c, u, g, unknown or other
uuguuunuucccaucucuu

SEQ ID NO: 1587764 - RNA, 19 nt, Artificial Sequence
  Description of Artificial Sequence: Synthetic oligonucleotide
uccccgugaagacuguucc

SEQ ID NO: 1587765 - RNA, 19 nt, Artificial Sequence
  Description of Artificial Sequence: Synthetic oligonucleotide
uucaucuuauauucacagu

SEQ ID NO: 1587766 - RNA, 19 nt, Artificial Sequence
  Description of Artificial Sequence: Synthetic oligonucleotide
gaagcuaccgucuuuccua

SEQ ID NO: 1587767 - RNA, 19 nt, Artificial Sequence
  Description of Artificial Sequence: Synthetic oligonucleotide
uacagcagauguguguuag

SEQ ID NO: 1587768 - RNA, 19 nt, Artificial Sequence
  Description of Artificial Sequence: Synthetic oligonucleotide
gaauauugggaaaacggaa

SEQ ID NO: 1587769 - RNA, 19 nt, Artificial Sequence
  Description of Artificial Sequence: Synthetic oligonucleotide
cuuuacagccuuugagaag

SEQ ID NO: 1587770 - RNA, 19 nt, Artificial Sequence
  Description of Artificial Sequence: Synthetic oligonucleotide
acaauucugagagaugccu

SEQ ID NO: 1587771 - RNA, 19 nt, Artificial Sequence
  Description of Artificial Sequence: Synthetic oligonucleotide
gagaugccuagguuugggg

SEQ ID NO: 1587772 - RNA, 19 nt, Artificial Sequence
  Description of Artificial Sequence: Synthetic oligonucleotide
uuugagaagacaggaaauu

SEQ ID NO: 1587773 - RNA, 19 nt, Artificial Sequence
  Description of Artificial Sequence: Synthetic oligonucleotide
gagaauagacagaugacaa

SEQ ID NO: 1587774 - RNA, 19 nt, Artificial Sequence
  Description of Artificial Sequence: Synthetic oligonucleotide
uaacccagugauuccagac

SEQ ID NO: 1587775 - RNA, 19 nt, Artificial Sequence
  Description of Artificial Sequence: Synthetic oligonucleotide
ugacaagcugaaguggugc

SEQ ID NO: 1587776 - RNA, 19 nt, Artificial Sequence
  Description of Artificial Sequence: Synthetic oligonucleotide
uaauaucuccucgccgugg

SEQ ID NO: 1587777 - RNA, 19 nt, Artificial Sequence
  Description of Artificial Sequence: Synthetic oligonucleotide
ugugugagcuuaauaucuc

SEQ ID NO: 1587778 - RNA, 19 nt, Artificial Sequence
  Description of Artificial Sequence: Synthetic oligonucleotide
ugauaacccagugauucca

SEQ ID NO: 1587779 - RNA, 19 nt, Artificial Sequence
  Description of Artificial Sequence: Synthetic oligonucleotide
ugccucauauacacaauuc

SEQ ID NO: 1587780 - RNA, 19 nt, Artificial Sequence
  Description of Artificial Sequence: Synthetic oligonucleotide
uguagaggugugaauuguc

SEQ ID NO: 1587781 - RNA, 19 nt, Artificial Sequence
  Description of Artificial Sequence: Synthetic oligonucleotide
gugucaggaagguaaugag

SEQ ID NO: 1587782 - RNA, 19 nt, Artificial Sequence
  Description of Artificial Sequence: Synthetic oligonucleotide
  modified_base (18)..(18): a, c, u, g, unknown or other
ugcaaacagugaaaauanc

SEQ ID NO: 1587783 - RNA, 19 nt, Artificial Sequence
  Description of Artificial Sequence: Synthetic oligonucleotide
acaggaaauuguguaagug

SEQ ID NO: 1587784 - RNA, 19 nt, Artificial Sequence
  Description of Artificial Sequence: Synthetic oligonucleotide
acugacaggagugaaaauu

SEQ ID NO: 1587785 - RNA, 19 nt, Artificial Sequence
  Description of Artificial Sequence: Synthetic oligonucleotide
cuuaauaucuccucgccgu

SEQ ID NO: 1587786 - RNA, 19 nt, Artificial Sequence
  Description of Artificial Sequence: Synthetic oligonucleotide
gcuaccgucuuuccuaugg

SEQ ID NO: 1587787 - RNA, 19 nt, Artificial Sequence
  Description of Artificial Sequence: Synthetic oligonucleotide
  modified_base (16)..(16): a, c, u, g, unknown or other
caaacagugaaaauancuu

SEQ ID NO: 1587788 - RNA, 19 nt, Artificial Sequence
  Description of Artificial Sequence: Synthetic oligonucleotide
  modified_base (6)..(6): a, c, u, g, unknown or other
uguuunuucccaucucuuu

SEQ ID NO: 1587789 - RNA, 19 nt, Artificial Sequence
  Description of Artificial Sequence: Synthetic oligonucleotide
auuaggaccucugucuucu

SEQ ID NO: 1587790 - RNA, 19 nt, Artificial Sequence
  Description of Artificial Sequence: Synthetic oligonucleotide
aguuucaagccccaaccaa

SEQ ID NO: 1587791 - RNA, 19 nt, Artificial Sequence
  Description of Artificial Sequence: Synthetic oligonucleotide
uccuccaauagaucuugug

SEQ ID NO: 1587792 - RNA, 19 nt, Artificial Sequence
  Description of Artificial Sequence: Synthetic oligonucleotide
gauggggcagaagcuaccg

SEQ ID NO: 1587793 - RNA, 19 nt, Artificial Sequence
  Description of Artificial Sequence: Synthetic oligonucleotide
ccaauguaacacuggaacg

SEQ ID NO: 1587794 - RNA, 19 nt, Artificial Sequence
  Description of Artificial Sequence: Synthetic oligonucleotide
gaaguggugcugcagaugu

SEQ ID NO: 1587795 - RNA, 19 nt, Artificial Sequence
  Description of Artificial Sequence: Synthetic oligonucleotide
  modified_base (2)..(2): a, c, u, g, unknown or other
unuucccaucucuuucaag

SEQ ID NO: 1587796 - RNA, 19 nt, Artificial Sequence
  Description of Artificial Sequence: Synthetic oligonucleotide
  modified_base (8)..(8): a, c, u, g, unknown or other
gaaaauancuuuacagccu

SEQ ID NO: 1587797 - RNA, 19 nt, Artificial Sequence
  Description of Artificial Sequence: Synthetic oligonucleotide
guagaggugugaauugucc

SEQ ID NO: 1587798 - RNA, 19 nt, Artificial Sequence
  Description of Artificial Sequence: Synthetic oligonucleotide
aacggaagcuccaauguaa

SEQ ID NO: 1587799 - RNA, 19 nt, Artificial Sequence
  Description of Artificial Sequence: Synthetic oligonucleotide
guaagaagcgacagucuag

SEQ ID NO: 1587800 - RNA, 19 nt, Artificial Sequence
  Description of Artificial Sequence: Synthetic oligonucleotide
agguggucaccucuggaag

SEQ ID NO: 1587801 - RNA, 19 nt, Artificial Sequence
  Description of Artificial Sequence: Synthetic oligonucleotide
agaagcgacagucuagcua

SEQ ID NO: 1587802 - RNA, 19 nt, Artificial Sequence
  Description of Artificial Sequence: Synthetic oligonucleotide
ugcagaugugaagacacgu

SEQ ID NO: 1587803 - RNA, 19 nt, Artificial Sequence
  Description of Artificial Sequence: Synthetic oligonucleotide
gcuuaauaucuccucgccg

SEQ ID NO: 1587804 - RNA, 19 nt, Artificial Sequence
  Description of Artificial Sequence: Synthetic oligonucleotide
cagccuuugagaagacagg

SEQ ID NO: 1587805 - RNA, 19 nt, Artificial Sequence
  Description of Artificial Sequence: Synthetic oligonucleotide
agaagcuaccgucuuuccu

SEQ ID NO: 1587806 - RNA, 19 nt, Artificial Sequence
  Description of Artificial Sequence: Synthetic oligonucleotide
cauugggaaguccauucac

SEQ ID NO: 1587807 - RNA, 19 nt, Artificial Sequence
  Description of Artificial Sequence: Synthetic oligonucleotide
ugggaaaacggaagcucca

SEQ ID NO: 1587808 - RNA, 19 nt, Artificial Sequence
  Description of Artificial Sequence: Synthetic oligonucleotide
uguuccuggccagauaccu

SEQ ID NO: 1587809 - RNA, 19 nt, Artificial Sequence
  Description of Artificial Sequence: Synthetic oligonucleotide
gugugagcuuaauaucucc

SEQ ID NO: 1587810 - RNA, 19 nt, Artificial Sequence
  Description of Artificial Sequence: Synthetic oligonucleotide
acacguuuucagcugacau

SEQ ID NO: 1587811 - RNA, 19 nt, Artificial Sequence
  Description of Artificial Sequence: Synthetic oligonucleotide
ucggguuuccuuccugucu

SEQ ID NO: 1587812 - RNA, 19 nt, Artificial Sequence
  Description of Artificial Sequence: Synthetic oligonucleotide
ucacacguggacucaacau

SEQ ID NO: 1587813 - RNA, 19 nt, Artificial Sequence
  Description of Artificial Sequence: Synthetic oligonucleotide
gaguggagaaccaggaaca

SEQ ID NO: 1587814 - RNA, 19 nt, Artificial Sequence
  Description of Artificial Sequence: Synthetic oligonucleotide
aucucugcaagcagcauug

SEQ ID NO: 1587815 - RNA, 19 nt, Artificial Sequence
  Description of Artificial Sequence: Synthetic oligonucleotide
gauaacccagugauuccag

SEQ ID NO: 1587816 - RNA, 19 nt, Artificial Sequence
  Description of Artificial Sequence: Synthetic oligonucleotide
uaccgucuuuccuaugggc

SEQ ID NO: 1587817 - RNA, 19 nt, Artificial Sequence
  Description of Artificial Sequence: Synthetic oligonucleotide
cagcagauguguguuagcc

SEQ ID NO: 1587818 - RNA, 19 nt, Artificial Sequence
  Description of Artificial Sequence: Synthetic oligonucleotide
ggaagcuccaauguaacac

SEQ ID NO: 1587819 - RNA, 19 nt, Artificial Sequence
  Description of Artificial Sequence: Synthetic oligonucleotide
cuauagaguggagaaccag

SEQ ID NO: 1587820 - RNA, 19 nt, Artificial Sequence
  Description of Artificial Sequence: Synthetic oligonucleotide
acguuuucagcugacauua

SEQ ID NO: 1587821 - RNA, 19 nt, Artificial Sequence
  Description of Artificial Sequence: Synthetic oligonucleotide
gugauaacccagugauucc

SEQ ID NO: 1587822 - RNA, 19 nt, Artificial Sequence
  Description of Artificial Sequence: Synthetic oligonucleotide
aauccacaguuauggcgcu

SEQ ID NO: 1587823 - RNA, 19 nt, Artificial Sequence
  Description of Artificial Sequence: Synthetic oligonucleotide
agagaugccuagguuuggg

SEQ ID NO: 1587824 - RNA, 19 nt, Artificial Sequence
  Description of Artificial Sequence: Synthetic oligonucleotide
ccucauauacacaauucug

SEQ ID NO: 1587825 - RNA, 19 nt, Artificial Sequence
  Description of Artificial Sequence: Synthetic oligonucleotide
  modified_base (3)..(3): a, c, u, g, unknown or other
uunuucccaucucuuucaa

SEQ ID NO: 1587826 - RNA, 19 nt, Artificial Sequence
  Description of Artificial Sequence: Synthetic oligonucleotide
agacagagcacaucugcau

SEQ ID NO: 1587827 - RNA, 19 nt, Artificial Sequence
  Description of Artificial Sequence: Synthetic oligonucleotide
cagcauugccaauugugug

SEQ ID NO: 1587828 - RNA, 19 nt, Artificial Sequence
  Description of Artificial Sequence: Synthetic oligonucleotide
cuugugagaguauauugua

SEQ ID NO: 1587829 - RNA, 19 nt, Artificial Sequence
  Description of Artificial Sequence: Synthetic oligonucleotide
aagaagcgacagucuagcu

SEQ ID NO: 1587830 - RNA, 19 nt, Artificial Sequence
  Description of Artificial Sequence: Synthetic oligonucleotide
gugagcuuaauaucuccuc

SEQ ID NO: 1587831 - RNA, 19 nt, Artificial Sequence
  Description of Artificial Sequence: Synthetic oligonucleotide
cuaccgucuuuccuauggg

SEQ ID NO: 1587832 - RNA, 19 nt, Artificial Sequence
  Description of Artificial Sequence: Synthetic oligonucleotide
cagauaccuuuccaauugc

SEQ ID NO: 1587833 - RNA, 19 nt, Artificial Sequence
  Description of Artificial Sequence: Synthetic oligonucleotide
gcaaauggcacagccgucg

SEQ ID NO: 1587834 - RNA, 19 nt, Artificial Sequence
  Description of Artificial Sequence: Synthetic oligonucleotide
aagccccaaccaaagcaac

SEQ ID NO: 1587835 - RNA, 19 nt, Artificial Sequence
  Description of Artificial Sequence: Synthetic oligonucleotide
auugggaaguccauucaca

SEQ ID NO: 1587836 - RNA, 19 nt, Artificial Sequence
  Description of Artificial Sequence: Synthetic oligonucleotide
agccuuugagaagacagga

SEQ ID NO: 1587837 - RNA, 19 nt, Artificial Sequence
  Description of Artificial Sequence: Synthetic oligonucleotide
gcuagaaguuucaagcccc

SEQ ID NO: 1587838 - RNA, 19 nt, Artificial Sequence
  Description of Artificial Sequence: Synthetic oligonucleotide
auaacccagugauuccaga

SEQ ID NO: 1587839 - RNA, 19 nt, Artificial Sequence
  Description of Artificial Sequence: Synthetic oligonucleotide
acggaagcuccaauguaac

SEQ ID NO: 1587840 - RNA, 19 nt, Artificial Sequence
  Description of Artificial Sequence: Synthetic oligonucleotide
caaauggcacagccgucgg

SEQ ID NO: 1587841 - RNA, 19 nt, Artificial Sequence
  Description of Artificial Sequence: Synthetic oligonucleotide
cuaugggccacacuggaaa

SEQ ID NO: 1587842 - RNA, 19 nt, Artificial Sequence
  Description of Artificial Sequence: Synthetic oligonucleotide
cugcagaugugaagacacg

SEQ ID NO: 1587843 - RNA, 19 nt, Artificial Sequence
  Description of Artificial Sequence: Synthetic oligonucleotide
uuccuggccagauaccuuu

SEQ ID NO: 1587844 - RNA, 19 nt, Artificial Sequence
  Description of Artificial Sequence: Synthetic oligonucleotide
guuguguucauugggaagu

SEQ ID NO: 1587845 - RNA, 19 nt, Artificial Sequence
  Description of Artificial Sequence: Synthetic oligonucleotide
acauuaggaccucugucuu

SEQ ID NO: 1587846 - RNA, 19 nt, Artificial Sequence
  Description of Artificial Sequence: Synthetic oligonucleotide
acaccaguccgauguuguc

SEQ ID NO: 1587847 - RNA, 19 nt, Artificial Sequence
  Description of Artificial Sequence: Synthetic oligonucleotide
cuuccuuuaugaaacuaua

SEQ ID NO: 1587848 - RNA, 19 nt, Artificial Sequence
  Description of Artificial Sequence: Synthetic oligonucleotide
ggcgcuuugggaauggcag

SEQ ID NO: 1587849 - RNA, 19 nt, Artificial Sequence
  Description of Artificial Sequence: Synthetic oligonucleotide
ggugcugcagaugugaaga

SEQ ID NO: 1587850 - RNA, 19 nt, Artificial Sequence
  Description of Artificial Sequence: Synthetic oligonucleotide
ucgccguggguuauacagc

SEQ ID NO: 1587851 - RNA, 19 nt, Artificial Sequence
  Description of Artificial Sequence: Synthetic oligonucleotide
uggcgcuuugggaauggca

SEQ ID NO: 1587852 - RNA, 19 nt, Artificial Sequence
  Description of Artificial Sequence: Synthetic oligonucleotide
uauggcgcuuugggaaugg

SEQ ID NO: 1587853 - RNA, 19 nt, Artificial Sequence
  Description of Artificial Sequence: Synthetic oligonucleotide
uggucugaggaguuguguu

SEQ ID NO: 1587854 - RNA, 19 nt, Artificial Sequence
  Description of Artificial Sequence: Synthetic oligonucleotide
gaacagaauuaaagucacc

SEQ ID NO: 1587855 - RNA, 19 nt, Artificial Sequence
  Description of Artificial Sequence: Synthetic oligonucleotide
aagcuaccgucuuuccuau

SEQ ID NO: 1587856 - RNA, 19 nt, Artificial Sequence
  Description of Artificial Sequence: Synthetic oligonucleotide
guaacacuggaacgccggc

SEQ ID NO: 1587857 - RNA, 19 nt, Artificial Sequence
  Description of Artificial Sequence: Synthetic oligonucleotide
ugccaauugugugagcuua

SEQ ID NO: 1587858 - RNA, 19 nt, Artificial Sequence
  Description of Artificial Sequence: Synthetic oligonucleotide
cacaguuauggcgcuuugg

SEQ ID NO: 1587859 - RNA, 19 nt, Artificial Sequence
  Description of Artificial Sequence: Synthetic oligonucleotide
agcuccaauguaacacugg

SEQ ID NO: 1587860 - RNA, 19 nt, Artificial Sequence
  Description of Artificial Sequence: Synthetic oligonucleotide
gucaaaacuuuucuucacu

SEQ ID NO: 1587861 - RNA, 19 nt, Artificial Sequence
  Description of Artificial Sequence: Synthetic oligonucleotide
acgauggggcagaagcuac

SEQ ID NO: 1587862 - RNA, 19 nt, Artificial Sequence
  Description of Artificial Sequence: Synthetic oligonucleotide
guuucaagccccaaccaaa

SEQ ID NO: 1587863 - RNA, 19 nt, Artificial Sequence
  Description of Artificial Sequence: Synthetic oligonucleotide
aguccgauguugucccugu

SEQ ID NO: 1587864 - RNA, 19 nt, Artificial Sequence
  Description of Artificial Sequence: Synthetic oligonucleotide
cauuaggaccucugucuuc

SEQ ID NO: 1587865 - RNA, 19 nt, Artificial Sequence
  Description of Artificial Sequence: Synthetic oligonucleotide
ccaaccaaagcaacuucag

SEQ ID NO: 1587866 - RNA, 19 nt, Artificial Sequence
  Description of Artificial Sequence: Synthetic oligonucleotide
augugaagacacguuuuca

SEQ ID NO: 1587867 - RNA, 19 nt, Artificial Sequence
  Description of Artificial Sequence: Synthetic oligonucleotide
agacaucacugaaaaguca

SEQ ID NO: 1587868 - RNA, 19 nt, Artificial Sequence
  Description of Artificial Sequence: Synthetic oligonucleotide
aagacuguuccuggccaga

SEQ ID NO: 1587869 - RNA, 19 nt, Artificial Sequence
  Description of Artificial Sequence: Synthetic oligonucleotide
acuauagaguggagaacca

SEQ ID NO: 1587870 - RNA, 19 nt, Artificial Sequence
  Description of Artificial Sequence: Synthetic oligonucleotide
caaaacuuuucuucacugu

SEQ ID NO: 1587871 - RNA, 19 nt, Artificial Sequence
  Description of Artificial Sequence: Synthetic oligonucleotide
uguuagccacacagaugga

SEQ ID NO: 1587872 - RNA, 19 nt, Artificial Sequence
  Description of Artificial Sequence: Synthetic oligonucleotide
uugggaauggcaggugguc

SEQ ID NO: 1587873 - RNA, 19 nt, Artificial Sequence
  Description of Artificial Sequence: Synthetic oligonucleotide
cuggguucacugacaggag

SEQ ID NO: 1587874 - RNA, 19 nt, Artificial Sequence
  Description of Artificial Sequence: Synthetic oligonucleotide
cuagaaguuucaagcccca

SEQ ID NO: 1587875 - RNA, 19 nt, Artificial Sequence
  Description of Artificial Sequence: Synthetic oligonucleotide
agacagaugacaagcugaa

SEQ ID NO: 1587876 - RNA, 19 nt, Artificial Sequence
  Description of Artificial Sequence: Synthetic oligonucleotide
uuauggcgcuuugggaaug

SEQ ID NO: 1587877 - RNA, 19 nt, Artificial Sequence
  Description of Artificial Sequence: Synthetic oligonucleotide
  modified_base (17)..(17): a, c, u, g, unknown or other
gcaaacagugaaaauancu

SEQ ID NO: 1587878 - RNA, 19 nt, Artificial Sequence
  Description of Artificial Sequence: Synthetic oligonucleotide
ccagcaguggaaugucacg

SEQ ID NO: 1587879 - RNA, 19 nt, Artificial Sequence
  Description of Artificial Sequence: Synthetic oligonucleotide
ucccuguccagcaguggaa

SEQ ID NO: 1587880 - RNA, 19 nt, Artificial Sequence
  Description of Artificial Sequence: Synthetic oligonucleotide
cuguuccuggccagauacc

SEQ ID NO: 1587881 - RNA, 19 nt, Artificial Sequence
  Description of Artificial Sequence: Synthetic oligonucleotide
agaugugaagacacguuuu

SEQ ID NO: 1587882 - RNA, 19 nt, Artificial Sequence
  Description of Artificial Sequence: Synthetic oligonucleotide
ggaguguuugaagcaaaug

SEQ ID NO: 1587883 - RNA, 19 nt, Artificial Sequence
  Description of Artificial Sequence: Synthetic oligonucleotide
gaguaacaccaguccgaug

SEQ ID NO: 1587884 - RNA, 19 nt, Artificial Sequence
  Description of Artificial Sequence: Synthetic oligonucleotide
  modified_base (6)..(6): a, c, u, g, unknown or other
aaauancuuuacagccuuu

SEQ ID NO: 1587885 - RNA, 19 nt, Artificial Sequence
  Description of Artificial Sequence: Synthetic oligonucleotide
guguguuagccacacagau

SEQ ID NO: 1587886 - RNA, 19 nt, Artificial Sequence
  Description of Artificial Sequence: Synthetic oligonucleotide
gcgacagucuagcuagaag

SEQ ID NO: 1587887 - RNA, 19 nt, Artificial Sequence
  Description of Artificial Sequence: Synthetic oligonucleotide
ggaguuguguucauuggga

SEQ ID NO: 1587888 - RNA, 19 nt, Artificial Sequence
  Description of Artificial Sequence: Synthetic oligonucleotide
agaucuugugagaguauau

SEQ ID NO: 1587889 - RNA, 19 nt, Artificial Sequence
  Description of Artificial Sequence: Synthetic oligonucleotide
caguuauggcgcuuuggga

SEQ ID NO: 1587890 - RNA, 19 nt, Artificial Sequence
  Description of Artificial Sequence: Synthetic oligonucleotide
cgucagauggcuaucgcug

SEQ ID NO: 1587891 - RNA, 19 nt, Artificial Sequence
  Description of Artificial Sequence: Synthetic oligonucleotide
caauucugagagaugccua

SEQ ID NO: 1587892 - RNA, 19 nt, Artificial Sequence
  Description of Artificial Sequence: Synthetic oligonucleotide
cuugcucuguaagaagcga

SEQ ID NO: 1587893 - RNA, 19 nt, Artificial Sequence
  Description of Artificial Sequence: Synthetic oligonucleotide
uggcuaucgcugucugucu

SEQ ID NO: 1587894 - RNA, 19 nt, Artificial Sequence
  Description of Artificial Sequence: Synthetic oligonucleotide
acacguggacucaacauuu

SEQ ID NO: 1587895 - RNA, 19 nt, Artificial Sequence
  Description of Artificial Sequence: Synthetic oligonucleotide
cucacacguggacucaaca

SEQ ID NO: 1587896 - RNA, 19 nt, Artificial Sequence
  Description of Artificial Sequence: Synthetic oligonucleotide
uugccaauugugugagcuu

SEQ ID NO: 1587897 - RNA, 19 nt, Artificial Sequence
  Description of Artificial Sequence: Synthetic oligonucleotide
gcggcagaacuccacuggg

SEQ ID NO: 1587898 - RNA, 19 nt, Artificial Sequence
  Description of Artificial Sequence: Synthetic oligonucleotide
caauugugugagcuuaaua

SEQ ID NO: 1587899 - RNA, 19 nt, Artificial Sequence
  Description of Artificial Sequence: Synthetic oligonucleotide
aacgccggcagugucugua

SEQ ID NO: 1587900 - RNA, 19 nt, Artificial Sequence
  Description of Artificial Sequence: Synthetic oligonucleotide
cugacaggagugaaaauuu

SEQ ID NO: 1587901 - RNA, 19 nt, Artificial Sequence
  Description of Artificial Sequence: Synthetic oligonucleotide
cacuggaacgccggcagug

SEQ ID NO: 1587902 - RNA, 19 nt, Artificial Sequence
  Description of Artificial Sequence: Synthetic oligonucleotide
auggcgcuuugggaauggc

SEQ ID NO: 1587903 - RNA, 19 nt, Artificial Sequence
  Description of Artificial Sequence: Synthetic oligonucleotide
aggugugaauuguccucca

SEQ ID NO: 1587904 - RNA, 19 nt, Artificial Sequence
  Description of Artificial Sequence: Synthetic oligonucleotide
gacgauggggcagaagcua

SEQ ID NO: 1587905 - RNA, 19 nt, Artificial Sequence
  Description of Artificial Sequence: Synthetic oligonucleotide
agguggucugaggaguugu

SEQ ID NO: 1587906 - RNA, 19 nt, Artificial Sequence
  Description of Artificial Sequence: Synthetic oligonucleotide
gccucauauacacaauucu

SEQ ID NO: 1587907 - RNA, 19 nt, Artificial Sequence
  Description of Artificial Sequence: Synthetic oligonucleotide
uagaaguuucaagccccaa

SEQ ID NO: 1587908 - RNA, 19 nt, Artificial Sequence
  Description of Artificial Sequence: Synthetic oligonucleotide
caauagaucuugugagagu

SEQ ID NO: 1587909 - RNA, 19 nt, Artificial Sequence
  Description of Artificial Sequence: Synthetic oligonucleotide
cagcaugcaaacagugaaa

SEQ ID NO: 1587910 - RNA, 19 nt, Artificial Sequence
  Description of Artificial Sequence: Synthetic oligonucleotide
gugugaauuguccuccaau

SEQ ID NO: 1587911 - RNA, 19 nt, Artificial Sequence
  Description of Artificial Sequence: Synthetic oligonucleotide
ucucugcaagcagcauugc

SEQ ID NO: 1587912 - RNA, 19 nt, Artificial Sequence
  Description of Artificial Sequence: Synthetic oligonucleotide
acgccggcagugucuguag

SEQ ID NO: 1587913 - RNA, 19 nt, Artificial Sequence
  Description of Artificial Sequence: Synthetic oligonucleotide
ggguuauacagcagaugug

SEQ ID NO: 1587914 - RNA, 19 nt, Artificial Sequence
  Description of Artificial Sequence: Synthetic oligonucleotide
uggucaccucuggaagucc

SEQ ID NO: 1587915 - RNA, 19 nt, Artificial Sequence
  Description of Artificial Sequence: Synthetic oligonucleotide
gcugacauuaggaccucug

SEQ ID NO: 1587916 - RNA, 19 nt, Artificial Sequence
  Description of Artificial Sequence: Synthetic oligonucleotide
gcgcuuugggaauggcagg

SEQ ID NO: 1587917 - RNA, 19 nt, Artificial Sequence
  Description of Artificial Sequence: Synthetic oligonucleotide
acuggaacgccggcagugu

SEQ ID NO: 1587918 - RNA, 19 nt, Artificial Sequence
  Description of Artificial Sequence: Synthetic oligonucleotide
guuauggcgcuuugggaau

SEQ ID NO: 1587919 - RNA, 19 nt, Artificial Sequence
  Description of Artificial Sequence: Synthetic oligonucleotide
ggcagguggucaccucugg

SEQ ID NO: 1587920 - RNA, 19 nt, Artificial Sequence
  Description of Artificial Sequence: Synthetic oligonucleotide
cagaugugaagacacguuu

SEQ ID NO: 1587921 - RNA, 19 nt, Artificial Sequence
  Description of Artificial Sequence: Synthetic oligonucleotide
ggaagguaaugagaauaga

SEQ ID NO: 1587922 - RNA, 19 nt, Artificial Sequence
  Description of Artificial Sequence: Synthetic oligonucleotide
aagccugaacuuggccagu

SEQ ID NO: 1587923 - RNA, 19 nt, Artificial Sequence
  Description of Artificial Sequence: Synthetic oligonucleotide
cuguaagaagcgacagucu

SEQ ID NO: 1587924 - RNA, 19 nt, Artificial Sequence
  Description of Artificial Sequence: Synthetic oligonucleotide
acacuggaacgccggcagu

SEQ ID NO: 1587925 - RNA, 19 nt, Artificial Sequence
  Description of Artificial Sequence: Synthetic oligonucleotide
cccaaccaaagcaacuuca

SEQ ID NO: 1587926 - RNA, 19 nt, Artificial Sequence
  Description of Artificial Sequence: Synthetic oligonucleotide
gauggcuaucgcugucugu

SEQ ID NO: 1587927 - RNA, 19 nt, Artificial Sequence
  Description of Artificial Sequence: Synthetic oligonucleotide
ucacggcggcagaacucca

SEQ ID NO: 1587928 - RNA, 19 nt, Artificial Sequence
  Description of Artificial Sequence: Synthetic oligonucleotide
cacaugacgauggggcaga

SEQ ID NO: 1587929 - RNA, 19 nt, Artificial Sequence
  Description of Artificial Sequence: Synthetic oligonucleotide
agccccaaccaaagcaacu

SEQ ID NO: 1587930 - RNA, 19 nt, Artificial Sequence
  Description of Artificial Sequence: Synthetic oligonucleotide
cugcugugccucauauaca

SEQ ID NO: 1587931 - RNA, 19 nt, Artificial Sequence
  Description of Artificial Sequence: Synthetic oligonucleotide
gacagucuagcuagaaguu

SEQ ID NO: 1587932 - RNA, 19 nt, Artificial Sequence
  Description of Artificial Sequence: Synthetic oligonucleotide
caguccgauguugucccug

SEQ ID NO: 1587933 - RNA, 19 nt, Artificial Sequence
  Description of Artificial Sequence: Synthetic oligonucleotide
cuggaacgccggcaguguc

SEQ ID NO: 1587934 - RNA, 19 nt, Artificial Sequence
  Description of Artificial Sequence: Synthetic oligonucleotide
cacacguggacucaacauu

SEQ ID NO: 1587935 - RNA, 19 nt, Artificial Sequence
  Description of Artificial Sequence: Synthetic oligonucleotide
uccucgccguggguuauac

SEQ ID NO: 1587936 - RNA, 19 nt, Artificial Sequence
  Description of Artificial Sequence: Synthetic oligonucleotide
ccugaucucuguuccauaa

SEQ ID NO: 1587937 - RNA, 19 nt, Artificial Sequence
  Description of Artificial Sequence: Synthetic oligonucleotide
agcuaccgucuuuccuaug

SEQ ID NO: 1587938 - RNA, 19 nt, Artificial Sequence
  Description of Artificial Sequence: Synthetic oligonucleotide
agcgacagucuagcuagaa

SEQ ID NO: 1587939 - RNA, 19 nt, Artificial Sequence
  Description of Artificial Sequence: Synthetic oligonucleotide
ggaacgccggcagugucug

SEQ ID NO: 1587940 - RNA, 19 nt, Artificial Sequence
  Description of Artificial Sequence: Synthetic oligonucleotide
gacuguuccuggccagaua

SEQ ID NO: 1587941 - RNA, 19 nt, Artificial Sequence
  Description of Artificial Sequence: Synthetic oligonucleotide
cgacagucuagcuagaagu

SEQ ID NO: 1587942 - RNA, 19 nt, Artificial Sequence
  Description of Artificial Sequence: Synthetic oligonucleotide
ggccaaauuggaauagaua

SEQ ID NO: 1587943 - RNA, 19 nt, Artificial Sequence
  Description of Artificial Sequence: Synthetic oligonucleotide
gccugaacuuggccaguag

SEQ ID NO: 1587944 - RNA, 19 nt, Artificial Sequence
  Description of Artificial Sequence: Synthetic oligonucleotide
cagguggucugaggaguug

SEQ ID NO: 1587945 - RNA, 19 nt, Artificial Sequence
  Description of Artificial Sequence: Synthetic oligonucleotide
ggugugaauuguccuccaa

SEQ ID NO: 1587946 - RNA, 19 nt, Artificial Sequence
  Description of Artificial Sequence: Synthetic oligonucleotide
cuguagaggugugaauugu

SEQ ID NO: 1587947 - RNA, 19 nt, Artificial Sequence
  Description of Artificial Sequence: Synthetic oligonucleotide
gcuuccgucagauggcuau

SEQ ID NO: 1587948 - RNA, 19 nt, Artificial Sequence
  Description of Artificial Sequence: Synthetic oligonucleotide
gguggucaccucuggaagu

SEQ ID NO: 1587949 - RNA, 19 nt, Artificial Sequence
  Description of Artificial Sequence: Synthetic oligonucleotide
ggaaugucacggcggcaga

SEQ ID NO: 1587950 - RNA, 19 nt, Artificial Sequence
  Description of Artificial Sequence: Synthetic oligonucleotide
cccagugauuccagacuug

SEQ ID NO: 1587951 - RNA, 19 nt, Artificial Sequence
  Description of Artificial Sequence: Synthetic oligonucleotide
ccgucuuuccuaugggcca

SEQ ID NO: 1587952 - RNA, 19 nt, Artificial Sequence
  Description of Artificial Sequence: Synthetic oligonucleotide
ggaaaacggaagcuccaau

SEQ ID NO: 1587953 - RNA, 19 nt, Artificial Sequence
  Description of Artificial Sequence: Synthetic oligonucleotide
gggaaaacggaagcuccaa

SEQ ID NO: 1587954 - RNA, 19 nt, Artificial Sequence
  Description of Artificial Sequence: Synthetic oligonucleotide
ggggccaaauuggaauaga

SEQ ID NO: 1587955 - RNA, 19 nt, Artificial Sequence
  Description of Artificial Sequence: Synthetic oligonucleotide
agccugaacuuggccagua

SEQ ID NO: 1587956 - RNA, 19 nt, Artificial Sequence
  Description of Artificial Sequence: Synthetic oligonucleotide
cuuuccuaugggccacacu

SEQ ID NO: 1587957 - RNA, 19 nt, Artificial Sequence
  Description of Artificial Sequence: Synthetic oligonucleotide
guaacaccaguccgauguu

SEQ ID NO: 1587958 - RNA, 19 nt, Artificial Sequence
  Description of Artificial Sequence: Synthetic oligonucleotide
ccucacacguggacucaac

SEQ ID NO: 1587959 - RNA, 19 nt, Artificial Sequence
  Description of Artificial Sequence: Synthetic oligonucleotide
guggaaugucacggcggca

SEQ ID NO: 1587960 - RNA, 19 nt, Artificial Sequence
  Description of Artificial Sequence: Synthetic oligonucleotide
ggaguaacaccaguccgau

SEQ ID NO: 1587961 - RNA, 19 nt, Artificial Sequence
  Description of Artificial Sequence: Synthetic oligonucleotide
gcaagcagcauugccaauu

SEQ ID NO: 1587962 - RNA, 19 nt, Artificial Sequence
  Description of Artificial Sequence: Synthetic oligonucleotide
ccacaguuauggcgcuuug

SEQ ID NO: 1587963 - RNA, 19 nt, Artificial Sequence
  Description of Artificial Sequence: Synthetic oligonucleotide
auccacaguuauggcgcuu

SEQ ID NO: 1587964 - RNA, 19 nt, Artificial Sequence
  Description of Artificial Sequence: Synthetic oligonucleotide
acaugacgauggggcagaa

SEQ ID NO: 1587965 - RNA, 19 nt, Artificial Sequence
  Description of Artificial Sequence: Synthetic oligonucleotide
ccuaugggccacacuggaa

SEQ ID NO: 1587966 - RNA, 19 nt, Artificial Sequence
  Description of Artificial Sequence: Synthetic oligonucleotide
gcagaugugaagacacguu

SEQ ID NO: 1587967 - RNA, 19 nt, Artificial Sequence
  Description of Artificial Sequence: Synthetic oligonucleotide
gccaauugugugagcuuaa

SEQ ID NO: 1587968 - RNA, 19 nt, Artificial Sequence
  Description of Artificial Sequence: Synthetic oligonucleotide
cacguggacucaacauuuu

SEQ ID NO: 1587969 - RNA, 19 nt, Artificial Sequence
  Description of Artificial Sequence: Synthetic oligonucleotide
ggcagaagcuaccgucuuu

SEQ ID NO: 1587970 - RNA, 19 nt, Artificial Sequence
  Description of Artificial Sequence: Synthetic oligonucleotide
ccgucggguuuccuuccug

SEQ ID NO: 1587971 - RNA, 19 nt, Artificial Sequence
  Description of Artificial Sequence: Synthetic oligonucleotide
guuccuggccagauaccuu

SEQ ID NO: 1587972 - RNA, 19 nt, Artificial Sequence
  Description of Artificial Sequence: Synthetic oligonucleotide
ggcuaucgcugucugucuu

SEQ ID NO: 1587973 - RNA, 19 nt, Artificial Sequence
  Description of Artificial Sequence: Synthetic oligonucleotide
ggccugaucucuguuccau

SEQ ID NO: 1587974 - RNA, 19 nt, Artificial Sequence
  Description of Artificial Sequence: Synthetic oligonucleotide
gccccaaccaaagcaacuu

SEQ ID NO: 1587975 - RNA, 19 nt, Artificial Sequence
  Description of Artificial Sequence: Synthetic oligonucleotide
guccuccaauagaucuugu

SEQ ID NO: 1587976 - RNA, 19 nt, Artificial Sequence
  Description of Artificial Sequence: Synthetic oligonucleotide
gaacgccggcagugucugu

SEQ ID NO: 1587977 - RNA, 19 nt, Artificial Sequence
  Description of Artificial Sequence: Synthetic oligonucleotide
cguggguuauacagcagau

SEQ ID NO: 1587978 - RNA, 19 nt, Artificial Sequence
  Description of Artificial Sequence: Synthetic oligonucleotide
ccaauugugugagcuuaau

SEQ ID NO: 1587979 - RNA, 19 nt, Artificial Sequence
  Description of Artificial Sequence: Synthetic oligonucleotide
gcacagccgucggguuucc

SEQ ID NO: 1587980 - RNA, 19 nt, Artificial Sequence
  Description of Artificial Sequence: Synthetic oligonucleotide
ccucgccguggguuauaca

SEQ ID NO: 1587981 - RNA, 19 nt, Artificial Sequence
  Description of Artificial Sequence: Synthetic oligonucleotide
gccgucggguuuccuuccu

SEQ ID NO: 1587982 - RNA, 19 nt, Artificial Sequence
  Description of Artificial Sequence: Synthetic oligonucleotide
cuccucgccguggguuaua

SEQ ID NO: 1587983 - RNA, 19 nt, Artificial Sequence
  Description of Artificial Sequence: Synthetic oligonucleotide
cggcagaacuccacugggu

SEQ ID NO: 1587984 - RNA, 19 nt, Artificial Sequence
  Description of Artificial Sequence: Synthetic oligonucleotide
cacagccgucggguuuccu

SEQ ID NO: 1587985 - RNA, 19 nt, Artificial Sequence
  Description of Artificial Sequence: Synthetic oligonucleotide
  modified_base (1)..(1): a, c, u, g, unknown or other
ncuuuacagccuuugagaa

SEQ ID NO: 1587986 - RNA, 19 nt, Artificial Sequence
  Description of Artificial Sequence: Synthetic oligonucleotide
aaagggaucauuuggcagc

SEQ ID NO: 1587987 - RNA, 19 nt, Artificial Sequence
  Description of Artificial Sequence: Synthetic oligonucleotide
uuuuauuucauccuggcga

SEQ ID NO: 1587988 - RNA, 19 nt, Artificial Sequence
  Description of Artificial Sequence: Synthetic oligonucleotide
aguauuacuucucaguggc

SEQ ID NO: 1587989 - RNA, 19 nt, Artificial Sequence
  Description of Artificial Sequence: Synthetic oligonucleotide
aauaguguugacuugccuc

SEQ ID NO: 1587990 - RNA, 19 nt, Artificial Sequence
  Description of Artificial Sequence: Synthetic oligonucleotide
ucucaauugacccugaaug

SEQ ID NO: 1587991 - RNA, 19 nt, Artificial Sequence
  Description of Artificial Sequence: Synthetic oligonucleotide
auaaauagcaccgaaguac

SEQ ID NO: 1587992 - RNA, 19 nt, Artificial Sequence
  Description of Artificial Sequence: Synthetic oligonucleotide
agcuauguaaaauauuuac

SEQ ID NO: 1587993 - RNA, 19 nt, Artificial Sequence
  Description of Artificial Sequence: Synthetic oligonucleotide
uauaaguuucuaaagaagu

SEQ ID NO: 1587994 - RNA, 19 nt, Artificial Sequence
  Description of Artificial Sequence: Synthetic oligonucleotide
uauagcuucggaaauagug

SEQ ID NO: 1587995 - RNA, 19 nt, Artificial Sequence
  Description of Artificial Sequence: Synthetic oligonucleotide
aaaccuuacagcaaagccc

SEQ ID NO: 1587996 - RNA, 19 nt, Artificial Sequence
  Description of Artificial Sequence: Synthetic oligonucleotide
uuuuaucucaacaacucag

SEQ ID NO: 1587997 - RNA, 19 nt, Artificial Sequence
  Description of Artificial Sequence: Synthetic oligonucleotide
uuuaucucaacaacucagg

SEQ ID NO: 1587998 - RNA, 19 nt, Artificial Sequence
  Description of Artificial Sequence: Synthetic oligonucleotide
uuuggcagcacauugcuag

SEQ ID NO: 1587999 - RNA, 19 nt, Artificial Sequence
  Description of Artificial Sequence: Synthetic oligonucleotide
aaccuuacagcaaagcccc

SEQ ID NO: 1588000 - RNA, 19 nt, Artificial Sequence
  Description of Artificial Sequence: Synthetic oligonucleotide
aagugcgcagcucagcugc

SEQ ID NO: 1588001 - RNA, 19 nt, Artificial Sequence
  Description of Artificial Sequence: Synthetic oligonucleotide
aaguauuacuucucagugg

SEQ ID NO: 1588002 - RNA, 19 nt, Artificial Sequence
  Description of Artificial Sequence: Synthetic oligonucleotide
gaaguauuacuucucagug

SEQ ID NO: 1588003 - RNA, 19 nt, Artificial Sequence
  Description of Artificial Sequence: Synthetic oligonucleotide
auuaaagggaucauuuggc

SEQ ID NO: 1588004 - RNA, 19 nt, Artificial Sequence
  Description of Artificial Sequence: Synthetic oligonucleotide
aauccugcgacaguaaauc

SEQ ID NO: 1588005 - RNA, 19 nt, Artificial Sequence
  Description of Artificial Sequence: Synthetic oligonucleotide
ucuuuuauggucagaaccu

SEQ ID NO: 1588006 - RNA, 19 nt, Artificial Sequence
  Description of Artificial Sequence: Synthetic oligonucleotide
ugauugaaagcuuggaucu

SEQ ID NO: 1588007 - RNA, 19 nt, Artificial Sequence
  Description of Artificial Sequence: Synthetic oligonucleotide
uaaauagcaccgaaguacc

SEQ ID NO: 1588008 - RNA, 19 nt, Artificial Sequence
  Description of Artificial Sequence: Synthetic oligonucleotide
acauauaaguuucuaaaga

SEQ ID NO: 1588009 - RNA, 19 nt, Artificial Sequence
  Description of Artificial Sequence: Synthetic oligonucleotide
aaguuggcaaauuugcggu

SEQ ID NO: 1588010 - RNA, 19 nt, Artificial Sequence
  Description of Artificial Sequence: Synthetic oligonucleotide
uucaaaaccuuacagcaaa

SEQ ID NO: 1588011 - RNA, 19 nt, Artificial Sequence
  Description of Artificial Sequence: Synthetic oligonucleotide
ucuaauaaauagcaccgaa

SEQ ID NO: 1588012 - RNA, 19 nt, Artificial Sequence
  Description of Artificial Sequence: Synthetic oligonucleotide
aagcuuggaucuucaaaac

SEQ ID NO: 1588013 - RNA, 19 nt, Artificial Sequence
  Description of Artificial Sequence: Synthetic oligonucleotide
aauuugcgguuauaauuuc

SEQ ID NO: 1588014 - RNA, 19 nt, Artificial Sequence
  Description of Artificial Sequence: Synthetic oligonucleotide
ggaggauuuguauuaaagg

SEQ ID NO: 1588015 - RNA, 19 nt, Artificial Sequence
  Description of Artificial Sequence: Synthetic oligonucleotide
uaaagggaucauuuggcag

SEQ ID NO: 1588016 - RNA, 19 nt, Artificial Sequence
  Description of Artificial Sequence: Synthetic oligonucleotide
cugauugaaagcuuggauc

SEQ ID NO: 1588017 - RNA, 19 nt, Artificial Sequence
  Description of Artificial Sequence: Synthetic oligonucleotide
ucagggucgucgaagaacc

SEQ ID NO: 1588018 - RNA, 19 nt, Artificial Sequence
  Description of Artificial Sequence: Synthetic oligonucleotide
aucucaacaacucagggua

SEQ ID NO: 1588019 - RNA, 19 nt, Artificial Sequence
  Description of Artificial Sequence: Synthetic oligonucleotide
uauauuuagcuauguaaaa

SEQ ID NO: 1588020 - RNA, 19 nt, Artificial Sequence
  Description of Artificial Sequence: Synthetic oligonucleotide
aguguuacaaagugcgcag

SEQ ID NO: 1588021 - RNA, 19 nt, Artificial Sequence
  Description of Artificial Sequence: Synthetic oligonucleotide
auugcuaguggucucucuc

SEQ ID NO: 1588022 - RNA, 19 nt, Artificial Sequence
  Description of Artificial Sequence: Synthetic oligonucleotide
aaauccugcaauucucccu

SEQ ID NO: 1588023 - RNA, 19 nt, Artificial Sequence
  Description of Artificial Sequence: Synthetic oligonucleotide
aaauuugcgguuauaauuu

SEQ ID NO: 1588024 - RNA, 19 nt, Artificial Sequence
  Description of Artificial Sequence: Synthetic oligonucleotide
ugauucaccacccgcuucc

SEQ ID NO: 1588025 - RNA, 19 nt, Artificial Sequence
  Description of Artificial Sequence: Synthetic oligonucleotide
uuaaagggaucauuuggca

SEQ ID NO: 1588026 - RNA, 19 nt, Artificial Sequence
  Description of Artificial Sequence: Synthetic oligonucleotide
uuuacggggcagcagagac

SEQ ID NO: 1588027 - RNA, 19 nt, Artificial Sequence
  Description of Artificial Sequence: Synthetic oligonucleotide
aucuuuuggggcgucaacc

SEQ ID NO: 1588028 - RNA, 19 nt, Artificial Sequence
  Description of Artificial Sequence: Synthetic oligonucleotide
guugacuugccucauggcc

SEQ ID NO: 1588029 - RNA, 19 nt, Artificial Sequence
  Description of Artificial Sequence: Synthetic oligonucleotide
ucggaaauaguguugacuu

SEQ ID NO: 1588030 - RNA, 19 nt, Artificial Sequence
  Description of Artificial Sequence: Synthetic oligonucleotide
auauaaguuucuaaagaag

SEQ ID NO: 1588031 - RNA, 19 nt, Artificial Sequence
  Description of Artificial Sequence: Synthetic oligonucleotide
ucaauugacccugaaugag

SEQ ID NO: 1588032 - RNA, 19 nt, Artificial Sequence
  Description of Artificial Sequence: Synthetic oligonucleotide
caaucugccgguccaaucg

SEQ ID NO: 1588033 - RNA, 19 nt, Artificial Sequence
  Description of Artificial Sequence: Synthetic oligonucleotide
auagcaccgaaguaccuuc

SEQ ID NO: 1588034 - RNA, 19 nt, Artificial Sequence
  Description of Artificial Sequence: Synthetic oligonucleotide
uggcaacucacauauaagu

SEQ ID NO: 1588035 - RNA, 19 nt, Artificial Sequence
  Description of Artificial Sequence: Synthetic oligonucleotide
caauugacccugaaugagg

SEQ ID NO: 1588036 - RNA, 19 nt, Artificial Sequence
  Description of Artificial Sequence: Synthetic oligonucleotide
auucuuuuauggucagaac

SEQ ID NO: 1588037 - RNA, 19 nt, Artificial Sequence
  Description of Artificial Sequence: Synthetic oligonucleotide
uuugcgguuauaauuucaa

SEQ ID NO: 1588038 - RNA, 19 nt, Artificial Sequence
  Description of Artificial Sequence: Synthetic oligonucleotide
ucuaucugcucaucaaucu

SEQ ID NO: 1588039 - RNA, 19 nt, Artificial Sequence
  Description of Artificial Sequence: Synthetic oligonucleotide
auaguguugacuugccuca

SEQ ID NO: 1588040 - RNA, 19 nt, Artificial Sequence
  Description of Artificial Sequence: Synthetic oligonucleotide
ugaccggaguguuacaaag

SEQ ID NO: 1588041 - RNA, 19 nt, Artificial Sequence
  Description of Artificial Sequence: Synthetic oligonucleotide
uacccaaggggacacaaca

SEQ ID NO: 1588042 - RNA, 19 nt, Artificial Sequence
  Description of Artificial Sequence: Synthetic oligonucleotide
aaugcuucggcgguguucu

SEQ ID NO: 1588043 - RNA, 19 nt, Artificial Sequence
  Description of Artificial Sequence: Synthetic oligonucleotide
aaacucgucccacucuuug

SEQ ID NO: 1588044 - RNA, 19 nt, Artificial Sequence
  Description of Artificial Sequence: Synthetic oligonucleotide
uuuauuucauccuggcgau

SEQ ID NO: 1588045 - RNA, 19 nt, Artificial Sequence
  Description of Artificial Sequence: Synthetic oligonucleotide
guauuaaagggaucauuug

SEQ ID NO: 1588046 - RNA, 19 nt, Artificial Sequence
  Description of Artificial Sequence: Synthetic oligonucleotide
ucuauccucuuccgguugg

SEQ ID NO: 1588047 - RNA, 19 nt, Artificial Sequence
  Description of Artificial Sequence: Synthetic oligonucleotide
aaauaguguugacuugccu

SEQ ID NO: 1588048 - RNA, 19 nt, Artificial Sequence
  Description of Artificial Sequence: Synthetic oligonucleotide
caaucgucccuccucaucc

SEQ ID NO: 1588049 - RNA, 19 nt, Artificial Sequence
  Description of Artificial Sequence: Synthetic oligonucleotide
guguugacuugccucaugg

SEQ ID NO: 1588050 - RNA, 19 nt, Artificial Sequence
  Description of Artificial Sequence: Synthetic oligonucleotide
uggggcgucaaccuuccgg

SEQ ID NO: 1588051 - RNA, 19 nt, Artificial Sequence
  Description of Artificial Sequence: Synthetic oligonucleotide
aaucaacuguaaaacacga

SEQ ID NO: 1588052 - RNA, 19 nt, Artificial Sequence
  Description of Artificial Sequence: Synthetic oligonucleotide
acuauagcuucggaaauag

SEQ ID NO: 1588053 - RNA, 19 nt, Artificial Sequence
  Description of Artificial Sequence: Synthetic oligonucleotide
uucuaaagaagugacuuau

SEQ ID NO: 1588054 - RNA, 19 nt, Artificial Sequence
  Description of Artificial Sequence: Synthetic oligonucleotide
uaaauccugcaauucuccc

SEQ ID NO: 1588055 - RNA, 19 nt, Artificial Sequence
  Description of Artificial Sequence: Synthetic oligonucleotide
uugcuaguggucucucucg

SEQ ID NO: 1588056 - RNA, 19 nt, Artificial Sequence
  Description of Artificial Sequence: Synthetic oligonucleotide
uuugcgucuaccucagggu

SEQ ID NO: 1588057 - RNA, 19 nt, Artificial Sequence
  Description of Artificial Sequence: Synthetic oligonucleotide
accggaguguuacaaagug

SEQ ID NO: 1588058 - RNA, 19 nt, Artificial Sequence
  Description of Artificial Sequence: Synthetic oligonucleotide
aaccucuuuaaguuuguuu

SEQ ID NO: 1588059 - RNA, 19 nt, Artificial Sequence
  Description of Artificial Sequence: Synthetic oligonucleotide
uggguugcucccuuggugc

SEQ ID NO: 1588060 - RNA, 19 nt, Artificial Sequence
  Description of Artificial Sequence: Synthetic oligonucleotide
gauucuauccucuuccggu

SEQ ID NO: 1588061 - RNA, 19 nt, Artificial Sequence
  Description of Artificial Sequence: Synthetic oligonucleotide
ucaauuccagcacccauau

SEQ ID NO: 1588062 - RNA, 19 nt, Artificial Sequence
  Description of Artificial Sequence: Synthetic oligonucleotide
gagacugauugaaagcuug

SEQ ID NO: 1588063 - RNA, 19 nt, Artificial Sequence
  Description of Artificial Sequence: Synthetic oligonucleotide
gaaagcuuggaucuucaaa

SEQ ID NO: 1588064 - RNA, 19 nt, Artificial Sequence
  Description of Artificial Sequence: Synthetic oligonucleotide
agaagugacuuaucuaaau

SEQ ID NO: 1588065 - RNA, 19 nt, Artificial Sequence
  Description of Artificial Sequence: Synthetic oligonucleotide
cuaguggucucucucgaag

SEQ ID NO: 1588066 - RNA, 19 nt, Artificial Sequence
  Description of Artificial Sequence: Synthetic oligonucleotide
agcaacuauagcuucggaa

SEQ ID NO: 1588067 - RNA, 19 nt, Artificial Sequence
  Description of Artificial Sequence: Synthetic oligonucleotide
uccugcgacaguaaauccu

SEQ ID NO: 1588068 - RNA, 19 nt, Artificial Sequence
  Description of Artificial Sequence: Synthetic oligonucleotide
auccugcgacaguaaaucc

SEQ ID NO: 1588069 - RNA, 19 nt, Artificial Sequence
  Description of Artificial Sequence: Synthetic oligonucleotide
aggauuuguauuaaaggga

SEQ ID NO: 1588070 - RNA, 19 nt, Artificial Sequence
  Description of Artificial Sequence: Synthetic oligonucleotide
uuccgguuggugcucaggc

SEQ ID NO: 1588071 - RNA, 19 nt, Artificial Sequence
  Description of Artificial Sequence: Synthetic oligonucleotide
caccgaaguaccuuccccg

SEQ ID NO: 1588072 - RNA, 19 nt, Artificial Sequence
  Description of Artificial Sequence: Synthetic oligonucleotide
acaugggucugccacagga

SEQ ID NO: 1588073 - RNA, 19 nt, Artificial Sequence
  Description of Artificial Sequence: Synthetic oligonucleotide
ggaaauaguguugacuugc

SEQ ID NO: 1588074 - RNA, 19 nt, Artificial Sequence
  Description of Artificial Sequence: Synthetic oligonucleotide
agcaccgaaguaccuuccc

SEQ ID NO: 1588075 - RNA, 19 nt, Artificial Sequence
  Description of Artificial Sequence: Synthetic oligonucleotide
ucucucucgaagaggcaag

SEQ ID NO: 1588076 - RNA, 19 nt, Artificial Sequence
  Description of Artificial Sequence: Synthetic oligonucleotide
auagcuucggaaauagugu

SEQ ID NO: 1588077 - RNA, 19 nt, Artificial Sequence
  Description of Artificial Sequence: Synthetic oligonucleotide
cagacgguuguacuuggcg

SEQ ID NO: 1588078 - RNA, 19 nt, Artificial Sequence
  Description of Artificial Sequence: Synthetic oligonucleotide
uucucaauugacccugaau

SEQ ID NO: 1588079 - RNA, 19 nt, Artificial Sequence
  Description of Artificial Sequence: Synthetic oligonucleotide
aagcggaggaugccaaucu

SEQ ID NO: 1588080 - RNA, 19 nt, Artificial Sequence
  Description of Artificial Sequence: Synthetic oligonucleotide
ugaaacucgucccacucuu

SEQ ID NO: 1588081 - RNA, 19 nt, Artificial Sequence
  Description of Artificial Sequence: Synthetic oligonucleotide
acauccguggcucuccucu

SEQ ID NO: 1588082 - RNA, 19 nt, Artificial Sequence
  Description of Artificial Sequence: Synthetic oligonucleotide
agaggcaagcgaguguucg

SEQ ID NO: 1588083 - RNA, 19 nt, Artificial Sequence
  Description of Artificial Sequence: Synthetic oligonucleotide
ucgucgaagaacccuucug

SEQ ID NO: 1588084 - RNA, 19 nt, Artificial Sequence
  Description of Artificial Sequence: Synthetic oligonucleotide
gaccuuugcgucuaccuca

SEQ ID NO: 1588085 - RNA, 19 nt, Artificial Sequence
  Description of Artificial Sequence: Synthetic oligonucleotide
cuaaagaagugacuuaucu

SEQ ID NO: 1588086 - RNA, 19 nt, Artificial Sequence
  Description of Artificial Sequence: Synthetic oligonucleotide
gaguguuacaaagugcgca

SEQ ID NO: 1588087 - RNA, 19 nt, Artificial Sequence
  Description of Artificial Sequence: Synthetic oligonucleotide
agacgguuguacuuggcga

SEQ ID NO: 1588088 - RNA, 19 nt, Artificial Sequence
  Description of Artificial Sequence: Synthetic oligonucleotide
ucugccgguccaaucgucc

SEQ ID NO: 1588089 - RNA, 19 nt, Artificial Sequence
  Description of Artificial Sequence: Synthetic oligonucleotide
uuaccucaaacauuuucua

SEQ ID NO: 1588090 - RNA, 19 nt, Artificial Sequence
  Description of Artificial Sequence: Synthetic oligonucleotide
uauuacuucucaguggcuu

SEQ ID NO: 1588091 - RNA, 19 nt, Artificial Sequence
  Description of Artificial Sequence: Synthetic oligonucleotide
uacggggcagcagagacug

SEQ ID NO: 1588092 - RNA, 19 nt, Artificial Sequence
  Description of Artificial Sequence: Synthetic oligonucleotide
uuuuccacccgacgguaac

SEQ ID NO: 1588093 - RNA, 19 nt, Artificial Sequence
  Description of Artificial Sequence: Synthetic oligonucleotide
uccccgaaguauuacuucu

SEQ ID NO: 1588094 - RNA, 19 nt, Artificial Sequence
  Description of Artificial Sequence: Synthetic oligonucleotide
uucuaauaaauagcaccga

SEQ ID NO: 1588095 - RNA, 19 nt, Artificial Sequence
  Description of Artificial Sequence: Synthetic oligonucleotide
uucauccuggcgauuccgc

SEQ ID NO: 1588096 - RNA, 19 nt, Artificial Sequence
  Description of Artificial Sequence: Synthetic oligonucleotide
cggaguguuacaaagugcg

SEQ ID NO: 1588097 - RNA, 19 nt, Artificial Sequence
  Description of Artificial Sequence: Synthetic oligonucleotide
uagcuauguaaaauauuua

SEQ ID NO: 1588098 - RNA, 19 nt, Artificial Sequence
  Description of Artificial Sequence: Synthetic oligonucleotide
uuuggggcgucaaccuucc

SEQ ID NO: 1588099 - RNA, 19 nt, Artificial Sequence
  Description of Artificial Sequence: Synthetic oligonucleotide
aaucugccgguccaaucgu

SEQ ID NO: 1588100 - RNA, 19 nt, Artificial Sequence
  Description of Artificial Sequence: Synthetic oligonucleotide
cucggcuacucuuucccgg

SEQ ID NO: 1588101 - RNA, 19 nt, Artificial Sequence
  Description of Artificial Sequence: Synthetic oligonucleotide
cucaauugacccugaauga

SEQ ID NO: 1588102 - RNA, 19 nt, Artificial Sequence
  Description of Artificial Sequence: Synthetic oligonucleotide
caaauuugcgguuauaauu

SEQ ID NO: 1588103 - RNA, 19 nt, Artificial Sequence
  Description of Artificial Sequence: Synthetic oligonucleotide
aguaccuuccccgaaguau

SEQ ID NO: 1588104 - RNA, 19 nt, Artificial Sequence
  Description of Artificial Sequence: Synthetic oligonucleotide
cucacauauaaguuucuaa

SEQ ID NO: 1588105 - RNA, 19 nt, Artificial Sequence
  Description of Artificial Sequence: Synthetic oligonucleotide
ccugaaugaggaacuaagg

SEQ ID NO: 1588106 - RNA, 19 nt, Artificial Sequence
  Description of Artificial Sequence: Synthetic oligonucleotide
ugugcaucuggaagaugcu

SEQ ID NO: 1588107 - RNA, 19 nt, Artificial Sequence
  Description of Artificial Sequence: Synthetic oligonucleotide
uccgguuggugcucaggcg

SEQ ID NO: 1588108 - RNA, 19 nt, Artificial Sequence
  Description of Artificial Sequence: Synthetic oligonucleotide
uuucacccgccaauccugc

SEQ ID NO: 1588109 - RNA, 19 nt, Artificial Sequence
  Description of Artificial Sequence: Synthetic oligonucleotide
ucucucgaagaggcaagcg

SEQ ID NO: 1588110 - RNA, 19 nt, Artificial Sequence
  Description of Artificial Sequence: Synthetic oligonucleotide
uugcgucuaccucaggguc

SEQ ID NO: 1588111 - RNA, 19 nt, Artificial Sequence
  Description of Artificial Sequence: Synthetic oligonucleotide
ugcuaguggucucucucga

SEQ ID NO: 1588112 - RNA, 19 nt, Artificial Sequence
  Description of Artificial Sequence: Synthetic oligonucleotide
gggaggauuuguauuaaag

SEQ ID NO: 1588113 - RNA, 19 nt, Artificial Sequence
  Description of Artificial Sequence: Synthetic oligonucleotide
gaguguucguugucuuugc

SEQ ID NO: 1588114 - RNA, 19 nt, Artificial Sequence
  Description of Artificial Sequence: Synthetic oligonucleotide
agacugauugaaagcuugg

SEQ ID NO: 1588115 - RNA, 19 nt, Artificial Sequence
  Description of Artificial Sequence: Synthetic oligonucleotide
ucacccgccaauccugcga

SEQ ID NO: 1588116 - RNA, 19 nt, Artificial Sequence
  Description of Artificial Sequence: Synthetic oligonucleotide
ggauucuauccucuuccgg

SEQ ID NO: 1588117 - RNA, 19 nt, Artificial Sequence
  Description of Artificial Sequence: Synthetic oligonucleotide
ucgaagaacccuucuggua

SEQ ID NO: 1588118 - RNA, 19 nt, Artificial Sequence
  Description of Artificial Sequence: Synthetic oligonucleotide
aacaugggucugccacagg

SEQ ID NO: 1588119 - RNA, 19 nt, Artificial Sequence
  Description of Artificial Sequence: Synthetic oligonucleotide
aacuauagcuucggaaaua

SEQ ID NO: 1588120 - RNA, 19 nt, Artificial Sequence
  Description of Artificial Sequence: Synthetic oligonucleotide
ggcuuauuuuaucucaaca

SEQ ID NO: 1588121 - RNA, 19 nt, Artificial Sequence
  Description of Artificial Sequence: Synthetic oligonucleotide
auuacuucucaguggcuua

SEQ ID NO: 1588122 - RNA, 19 nt, Artificial Sequence
  Description of Artificial Sequence: Synthetic oligonucleotide
caugggucugccacaggag

SEQ ID NO: 1588123 - RNA, 19 nt, Artificial Sequence
  Description of Artificial Sequence: Synthetic oligonucleotide
aagggaucauuuggcagca

SEQ ID NO: 1588124 - RNA, 19 nt, Artificial Sequence
  Description of Artificial Sequence: Synthetic oligonucleotide
agcagaagcggaggaugcc

SEQ ID NO: 1588125 - RNA, 19 nt, Artificial Sequence
  Description of Artificial Sequence: Synthetic oligonucleotide
aguuucuaaagaagugacu

SEQ ID NO: 1588126 - RNA, 19 nt, Artificial Sequence
  Description of Artificial Sequence: Synthetic oligonucleotide
aaucgucccuccucauccu

SEQ ID NO: 1588127 - RNA, 19 nt, Artificial Sequence
  Description of Artificial Sequence: Synthetic oligonucleotide
uuccccgaaguauuacuuc

SEQ ID NO: 1588128 - RNA, 19 nt, Artificial Sequence
  Description of Artificial Sequence: Synthetic oligonucleotide
aguguugacuugccucaug

SEQ ID NO: 1588129 - RNA, 19 nt, Artificial Sequence
  Description of Artificial Sequence: Synthetic oligonucleotide
cucagggucgucgaagaac

SEQ ID NO: 1588130 - RNA, 19 nt, Artificial Sequence
  Description of Artificial Sequence: Synthetic oligonucleotide
gauuuguauuaaagggauc

SEQ ID NO: 1588131 - RNA, 19 nt, Artificial Sequence
  Description of Artificial Sequence: Synthetic oligonucleotide
gacgguuguacuuggcgaa

SEQ ID NO: 1588132 - RNA, 19 nt, Artificial Sequence
  Description of Artificial Sequence: Synthetic oligonucleotide
uugcgguuauaauuucaaa

SEQ ID NO: 1588133 - RNA, 19 nt, Artificial Sequence
  Description of Artificial Sequence: Synthetic oligonucleotide
aaagccccuuucacccgcc

SEQ ID NO: 1588134 - RNA, 19 nt, Artificial Sequence
  Description of Artificial Sequence: Synthetic oligonucleotide
uuucucaauugacccugaa

SEQ ID NO: 1588135 - RNA, 19 nt, Artificial Sequence
  Description of Artificial Sequence: Synthetic oligonucleotide
uuacggggcagcagagacu

SEQ ID NO: 1588136 - RNA, 19 nt, Artificial Sequence
  Description of Artificial Sequence: Synthetic oligonucleotide
gacaguaaauccugcaauu

SEQ ID NO: 1588137 - RNA, 19 nt, Artificial Sequence
  Description of Artificial Sequence: Synthetic oligonucleotide
uugaccggaguguuacaaa

SEQ ID NO: 1588138 - RNA, 19 nt, Artificial Sequence
  Description of Artificial Sequence: Synthetic oligonucleotide
uuggcaaauuugcgguuau

SEQ ID NO: 1588139 - RNA, 19 nt, Artificial Sequence
  Description of Artificial Sequence: Synthetic oligonucleotide
auuugcgguuauaauuuca

SEQ ID NO: 1588140 - RNA, 19 nt, Artificial Sequence
  Description of Artificial Sequence: Synthetic oligonucleotide
uuuuacggggcagcagaga

SEQ ID NO: 1588141 - RNA, 19 nt, Artificial Sequence
  Description of Artificial Sequence: Synthetic oligonucleotide
gggauucuauccucuuccg

SEQ ID NO: 1588142 - RNA, 19 nt, Artificial Sequence
  Description of Artificial Sequence: Synthetic oligonucleotide
aacucacauauaaguuucu

SEQ ID NO: 1588143 - RNA, 19 nt, Artificial Sequence
  Description of Artificial Sequence: Synthetic oligonucleotide
uucacccgccaauccugcg

SEQ ID NO: 1588144 - RNA, 19 nt, Artificial Sequence
  Description of Artificial Sequence: Synthetic oligonucleotide
aacggggauucuauccucu

SEQ ID NO: 1588145 - RNA, 19 nt, Artificial Sequence
  Description of Artificial Sequence: Synthetic oligonucleotide
gcgaacggggauucuaucc

SEQ ID NO: 1588146 - RNA, 19 nt, Artificial Sequence
  Description of Artificial Sequence: Synthetic oligonucleotide
uucguugucuuugcccugu

SEQ ID NO: 1588147 - RNA, 19 nt, Artificial Sequence
  Description of Artificial Sequence: Synthetic oligonucleotide
ucggcuacucuuucccggu

SEQ ID NO: 1588148 - RNA, 19 nt, Artificial Sequence
  Description of Artificial Sequence: Synthetic oligonucleotide
gaacggggauucuauccuc

SEQ ID NO: 1588149 - RNA, 19 nt, Artificial Sequence
  Description of Artificial Sequence: Synthetic oligonucleotide
gaagcggaggaugccaauc

SEQ ID NO: 1588150 - RNA, 19 nt, Artificial Sequence
  Description of Artificial Sequence: Synthetic oligonucleotide
ccugcgacaguaaauccug

SEQ ID NO: 1588151 - RNA, 19 nt, Artificial Sequence
  Description of Artificial Sequence: Synthetic oligonucleotide
ucggcgguguucucccucc

SEQ ID NO: 1588152 - RNA, 19 nt, Artificial Sequence
  Description of Artificial Sequence: Synthetic oligonucleotide
uucucccgucuccaccucc

SEQ ID NO: 1588153 - RNA, 19 nt, Artificial Sequence
  Description of Artificial Sequence: Synthetic oligonucleotide
guggucucucucgaagagg

SEQ ID NO: 1588154 - RNA, 19 nt, Artificial Sequence
  Description of Artificial Sequence: Synthetic oligonucleotide
uaaugcuucggcgguguuc

SEQ ID NO: 1588155 - RNA, 19 nt, Artificial Sequence
  Description of Artificial Sequence: Synthetic oligonucleotide
cgucgaagaacccuucugg

SEQ ID NO: 1588156 - RNA, 19 nt, Artificial Sequence
  Description of Artificial Sequence: Synthetic oligonucleotide
ugaucuuuuggggcgucaa

SEQ ID NO: 1588157 - RNA, 19 nt, Artificial Sequence
  Description of Artificial Sequence: Synthetic oligonucleotide
ggaugccaaucuuugcgcc

SEQ ID NO: 1588158 - RNA, 19 nt, Artificial Sequence
  Description of Artificial Sequence: Synthetic oligonucleotide
acgguuguacuuggcgaac

SEQ ID NO: 1588159 - RNA, 19 nt, Artificial Sequence
  Description of Artificial Sequence: Synthetic oligonucleotide
ugcuucggcgguguucucc

SEQ ID NO: 1588160 - RNA, 19 nt, Artificial Sequence
  Description of Artificial Sequence: Synthetic oligonucleotide
uggcgaacggggauucuau

SEQ ID NO: 1588161 - RNA, 19 nt, Artificial Sequence
  Description of Artificial Sequence: Synthetic oligonucleotide
gugccuuucagcucggcua

SEQ ID NO: 1588162 - RNA, 19 nt, Artificial Sequence
  Description of Artificial Sequence: Synthetic oligonucleotide
cuucggaaauaguguugac

SEQ ID NO: 1588163 - RNA, 19 nt, Artificial Sequence
  Description of Artificial Sequence: Synthetic oligonucleotide
ucccacggaggccuuggcu

SEQ ID NO: 1588164 - RNA, 19 nt, Artificial Sequence
  Description of Artificial Sequence: Synthetic oligonucleotide
agucccagcagaagcggag

SEQ ID NO: 1588165 - RNA, 19 nt, Artificial Sequence
  Description of Artificial Sequence: Synthetic oligonucleotide
guccaaucgucccuccuca

SEQ ID NO: 1588166 - RNA, 19 nt, Artificial Sequence
  Description of Artificial Sequence: Synthetic oligonucleotide
uuacuucucaguggcuuau

SEQ ID NO: 1588167 - RNA, 19 nt, Artificial Sequence
  Description of Artificial Sequence: Synthetic oligonucleotide
caguaaauccugcaauucu

SEQ ID NO: 1588168 - RNA, 19 nt, Artificial Sequence
  Description of Artificial Sequence: Synthetic oligonucleotide
acauugcuaguggucucuc

SEQ ID NO: 1588169 - RNA, 19 nt, Artificial Sequence
  Description of Artificial Sequence: Synthetic oligonucleotide
agcuucggaaauaguguug

SEQ ID NO: 1588170 - RNA, 19 nt, Artificial Sequence
  Description of Artificial Sequence: Synthetic oligonucleotide
ugccccagacgguuguacu

SEQ ID NO: 1588171 - RNA, 19 nt, Artificial Sequence
  Description of Artificial Sequence: Synthetic oligonucleotide
ucccagaacaugggucugc

SEQ ID NO: 1588172 - RNA, 19 nt, Artificial Sequence
  Description of Artificial Sequence: Synthetic oligonucleotide
ucuugaccggaguguuaca

SEQ ID NO: 1588173 - RNA, 19 nt, Artificial Sequence
  Description of Artificial Sequence: Synthetic oligonucleotide
aguuggcaaauuugcgguu

SEQ ID NO: 1588174 - RNA, 19 nt, Artificial Sequence
  Description of Artificial Sequence: Synthetic oligonucleotide
cagagacugauugaaagcu

SEQ ID NO: 1588175 - RNA, 19 nt, Artificial Sequence
  Description of Artificial Sequence: Synthetic oligonucleotide
cugcgacaguaaauccugc

SEQ ID NO: 1588176 - RNA, 19 nt, Artificial Sequence
  Description of Artificial Sequence: Synthetic oligonucleotide
ggcgucaaccuuccggacc

SEQ ID NO: 1588177 - RNA, 19 nt, Artificial Sequence
  Description of Artificial Sequence: Synthetic oligonucleotide
guguuacaaagugcgcagc

SEQ ID NO: 1588178 - RNA, 19 nt, Artificial Sequence
  Description of Artificial Sequence: Synthetic oligonucleotide
cacucuaucugcucaucaa

SEQ ID NO: 1588179 - RNA, 19 nt, Artificial Sequence
  Description of Artificial Sequence: Synthetic oligonucleotide
agggucgucgaagaacccu

SEQ ID NO: 1588180 - RNA, 19 nt, Artificial Sequence
  Description of Artificial Sequence: Synthetic oligonucleotide
cucucucgaagaggcaagc

SEQ ID NO: 1588181 - RNA, 19 nt, Artificial Sequence
  Description of Artificial Sequence: Synthetic oligonucleotide
acucacauauaaguuucua

SEQ ID NO: 1588182 - RNA, 19 nt, Artificial Sequence
  Description of Artificial Sequence: Synthetic oligonucleotide
uuggugccuuucagcucgg

SEQ ID NO: 1588183 - RNA, 19 nt, Artificial Sequence
  Description of Artificial Sequence: Synthetic oligonucleotide
uucggcgguguucucccuc

SEQ ID NO: 1588184 - RNA, 19 nt, Artificial Sequence
  Description of Artificial Sequence: Synthetic oligonucleotide
caagcgaguguucguuguc

SEQ ID NO: 1588185 - RNA, 19 nt, Artificial Sequence
  Description of Artificial Sequence: Synthetic oligonucleotide
gcuucggaaauaguguuga

SEQ ID NO: 1588186 - RNA, 19 nt, Artificial Sequence
  Description of Artificial Sequence: Synthetic oligonucleotide
caaagugcgcagcucagcu

SEQ ID NO: 1588187 - RNA, 19 nt, Artificial Sequence
  Description of Artificial Sequence: Synthetic oligonucleotide
ccgaaguauuacuucucag

SEQ ID NO: 1588188 - RNA, 19 nt, Artificial Sequence
  Description of Artificial Sequence: Synthetic oligonucleotide
ccggagucccagcagaagc

SEQ ID NO: 1588189 - RNA, 19 nt, Artificial Sequence
  Description of Artificial Sequence: Synthetic oligonucleotide
gucucucucgaagaggcaa

SEQ ID NO: 1588190 - RNA, 19 nt, Artificial Sequence
  Description of Artificial Sequence: Synthetic oligonucleotide
uuggcgaacggggauucua

SEQ ID NO: 1588191 - RNA, 19 nt, Artificial Sequence
  Description of Artificial Sequence: Synthetic oligonucleotide
gucgaagaacccuucuggu

SEQ ID NO: 1588192 - RNA, 19 nt, Artificial Sequence
  Description of Artificial Sequence: Synthetic oligonucleotide
ccggaguguuacaaagugc

SEQ ID NO: 1588193 - RNA, 19 nt, Artificial Sequence
  Description of Artificial Sequence: Synthetic oligonucleotide
ccgguuggugcucaggcgc

SEQ ID NO: 1588194 - RNA, 19 nt, Artificial Sequence
  Description of Artificial Sequence: Synthetic oligonucleotide
gguccaaucgucccuccuc

SEQ ID NO: 1588195 - RNA, 19 nt, Artificial Sequence
  Description of Artificial Sequence: Synthetic oligonucleotide
cuugaccggaguguuacaa

SEQ ID NO: 1588196 - RNA, 19 nt, Artificial Sequence
  Description of Artificial Sequence: Synthetic oligonucleotide
guaccugaggucccacgga

SEQ ID NO: 1588197 - RNA, 19 nt, Artificial Sequence
  Description of Artificial Sequence: Synthetic oligonucleotide
accuuugcgucuaccucag

SEQ ID NO: 1588198 - RNA, 19 nt, Artificial Sequence
  Description of Artificial Sequence: Synthetic oligonucleotide
cacccgccaauccugcgac

SEQ ID NO: 1588199 - RNA, 19 nt, Artificial Sequence
  Description of Artificial Sequence: Synthetic oligonucleotide
agaagcggaggaugccaau

SEQ ID NO: 1588200 - RNA, 19 nt, Artificial Sequence
  Description of Artificial Sequence: Synthetic oligonucleotide
ggaccuuugcgucuaccuc

SEQ ID NO: 1588201 - RNA, 19 nt, Artificial Sequence
  Description of Artificial Sequence: Synthetic oligonucleotide
uaccuuccccgaaguauua

SEQ ID NO: 1588202 - RNA, 19 nt, Artificial Sequence
  Description of Artificial Sequence: Synthetic oligonucleotide
ggcgucuugguucuccaca

SEQ ID NO: 1588203 - RNA, 19 nt, Artificial Sequence
  Description of Artificial Sequence: Synthetic oligonucleotide
guuggcaaauuugcgguua

SEQ ID NO: 1588204 - RNA, 19 nt, Artificial Sequence
  Description of Artificial Sequence: Synthetic oligonucleotide
ucccggugcugcuuuccca

SEQ ID NO: 1588205 - RNA, 19 nt, Artificial Sequence
  Description of Artificial Sequence: Synthetic oligonucleotide
guucaauuccagcacccau

SEQ ID NO: 1588206 - RNA, 19 nt, Artificial Sequence
  Description of Artificial Sequence: Synthetic oligonucleotide
gcuucggcgguguucuccc

SEQ ID NO: 1588207 - RNA, 19 nt, Artificial Sequence
  Description of Artificial Sequence: Synthetic oligonucleotide
ggaguguuacaaagugcgc

SEQ ID NO: 1588208 - RNA, 19 nt, Artificial Sequence
  Description of Artificial Sequence: Synthetic oligonucleotide
ccgacgguaacacucuauc

SEQ ID NO: 1588209 - RNA, 19 nt, Artificial Sequence
  Description of Artificial Sequence: Synthetic oligonucleotide
gcgacaguaaauccugcaa

SEQ ID NO: 1588210 - RNA, 19 nt, Artificial Sequence
  Description of Artificial Sequence: Synthetic oligonucleotide
ggguucaauuccagcaccc

SEQ ID NO: 1588211 - RNA, 19 nt, Artificial Sequence
  Description of Artificial Sequence: Synthetic oligonucleotide
aagccccuuucacccgcca

SEQ ID NO: 1588212 - RNA, 19 nt, Artificial Sequence
  Description of Artificial Sequence: Synthetic oligonucleotide
guggcuuauuuuaucucaa

SEQ ID NO: 1588213 - RNA, 19 nt, Artificial Sequence
  Description of Artificial Sequence: Synthetic oligonucleotide
uuggggcgucaaccuuccg

SEQ ID NO: 1588214 - RNA, 19 nt, Artificial Sequence
  Description of Artificial Sequence: Synthetic oligonucleotide
ggagcucgcucuugaccgg

SEQ ID NO: 1588215 - RNA, 19 nt, Artificial Sequence
  Description of Artificial Sequence: Synthetic oligonucleotide
gcucggcuacucuuucccg

SEQ ID NO: 1588216 - RNA, 19 nt, Artificial Sequence
  Description of Artificial Sequence: Synthetic oligonucleotide
agcggaggaugccaaucuu

SEQ ID NO: 1588217 - RNA, 19 nt, Artificial Sequence
  Description of Artificial Sequence: Synthetic oligonucleotide
aucugccgguccaaucguc

SEQ ID NO: 1588218 - RNA, 19 nt, Artificial Sequence
  Description of Artificial Sequence: Synthetic oligonucleotide
ccuucugguaaugcuucgg

SEQ ID NO: 1588219 - RNA, 19 nt, Artificial Sequence
  Description of Artificial Sequence: Synthetic oligonucleotide
uccaaucugccgguccaau

SEQ ID NO: 1588220 - RNA, 19 nt, Artificial Sequence
  Description of Artificial Sequence: Synthetic oligonucleotide
cagggucgucgaagaaccc

SEQ ID NO: 1588221 - RNA, 19 nt, Artificial Sequence
  Description of Artificial Sequence: Synthetic oligonucleotide
ccuuuugaaacucguccca

SEQ ID NO: 1588222 - RNA, 19 nt, Artificial Sequence
  Description of Artificial Sequence: Synthetic oligonucleotide
uccaaucgucccuccucau

SEQ ID NO: 1588223 - RNA, 19 nt, Artificial Sequence
  Description of Artificial Sequence: Synthetic oligonucleotide
caacuauagcuucggaaau

SEQ ID NO: 1588224 - RNA, 19 nt, Artificial Sequence
  Description of Artificial Sequence: Synthetic oligonucleotide
auccugcaauucucccuca

SEQ ID NO: 1588225 - RNA, 19 nt, Artificial Sequence
  Description of Artificial Sequence: Synthetic oligonucleotide
uggcgauuccgcagcuuuu

SEQ ID NO: 1588226 - RNA, 19 nt, Artificial Sequence
  Description of Artificial Sequence: Synthetic oligonucleotide
caauccugcgacaguaaau

SEQ ID NO: 1588227 - RNA, 19 nt, Artificial Sequence
  Description of Artificial Sequence: Synthetic oligonucleotide
cagaagcggaggaugccaa

SEQ ID NO: 1588228 - RNA, 19 nt, Artificial Sequence
  Description of Artificial Sequence: Synthetic oligonucleotide
gaggcaagcgaguguucgu

SEQ ID NO: 1588229 - RNA, 19 nt, Artificial Sequence
  Description of Artificial Sequence: Synthetic oligonucleotide
cgaaguauuacuucucagu

SEQ ID NO: 1588230 - RNA, 19 nt, Artificial Sequence
  Description of Artificial Sequence: Synthetic oligonucleotide
cugcgccggccgaagggcc

SEQ ID NO: 1588231 - RNA, 19 nt, Artificial Sequence
  Description of Artificial Sequence: Synthetic oligonucleotide
ccacucuuuguccaucuga

SEQ ID NO: 1588232 - RNA, 19 nt, Artificial Sequence
  Description of Artificial Sequence: Synthetic oligonucleotide
ggguugcucccuuggugcc

SEQ ID NO: 1588233 - RNA, 19 nt, Artificial Sequence
  Description of Artificial Sequence: Synthetic oligonucleotide
gccgaagggcccuggguug

SEQ ID NO: 1588234 - RNA, 19 nt, Artificial Sequence
  Description of Artificial Sequence: Synthetic oligonucleotide
cgaguguucguugucuuug

SEQ ID NO: 1588235 - RNA, 19 nt, Artificial Sequence
  Description of Artificial Sequence: Synthetic oligonucleotide
cucaucgagguggagggcu

SEQ ID NO: 1588236 - RNA, 19 nt, Artificial Sequence
  Description of Artificial Sequence: Synthetic oligonucleotide
uggcaaauuugcgguuaua

SEQ ID NO: 1588237 - RNA, 19 nt, Artificial Sequence
  Description of Artificial Sequence: Synthetic oligonucleotide
cccgaaguauuacuucuca

SEQ ID NO: 1588238 - RNA, 19 nt, Artificial Sequence
  Description of Artificial Sequence: Synthetic oligonucleotide
uuccggaccuuugcgucua

SEQ ID NO: 1588239 - RNA, 19 nt, Artificial Sequence
  Description of Artificial Sequence: Synthetic oligonucleotide
gcagaagcggaggaugcca

SEQ ID NO: 1588240 - RNA, 19 nt, Artificial Sequence
  Description of Artificial Sequence: Synthetic oligonucleotide
auuuggcagcacauugcua

SEQ ID NO: 1588241 - RNA, 19 nt, Artificial Sequence
  Description of Artificial Sequence: Synthetic oligonucleotide
cugccccagacgguuguac

SEQ ID NO: 1588242 - RNA, 19 nt, Artificial Sequence
  Description of Artificial Sequence: Synthetic oligonucleotide
gaccggaguguuacaaagu

SEQ ID NO: 1588243 - RNA, 19 nt, Artificial Sequence
  Description of Artificial Sequence: Synthetic oligonucleotide
ccaaucgucccuccucauc

SEQ ID NO: 1588244 - RNA, 19 nt, Artificial Sequence
  Description of Artificial Sequence: Synthetic oligonucleotide
gucgucgaagaacccuucu

SEQ ID NO: 1588245 - RNA, 19 nt, Artificial Sequence
  Description of Artificial Sequence: Synthetic oligonucleotide
ggcgauuccgcagcuuuuc

SEQ ID NO: 1588246 - RNA, 19 nt, Artificial Sequence
  Description of Artificial Sequence: Synthetic oligonucleotide
gguacccaaggggacacaa

SEQ ID NO: 1588247 - RNA, 19 nt, Artificial Sequence
  Description of Artificial Sequence: Synthetic oligonucleotide
gagcucgcucuugaccgga

SEQ ID NO: 1588248 - RNA, 19 nt, Artificial Sequence
  Description of Artificial Sequence: Synthetic oligonucleotide
cauugcuaguggucucucu

SEQ ID NO: 1588249 - RNA, 19 nt, Artificial Sequence
  Description of Artificial Sequence: Synthetic oligonucleotide
ccagacgguuguacuuggc

SEQ ID NO: 1588250 - RNA, 19 nt, Artificial Sequence
  Description of Artificial Sequence: Synthetic oligonucleotide
ggcgaacggggauucuauc

SEQ ID NO: 1588251 - RNA, 19 nt, Artificial Sequence
  Description of Artificial Sequence: Synthetic oligonucleotide
cagcaacuauagcuucgga

SEQ ID NO: 1588252 - RNA, 19 nt, Artificial Sequence
  Description of Artificial Sequence: Synthetic oligonucleotide
ggcaacucacauauaaguu

SEQ ID NO: 1588253 - RNA, 19 nt, Artificial Sequence
  Description of Artificial Sequence: Synthetic oligonucleotide
cuuccggaccuuugcgucu

SEQ ID NO: 1588254 - RNA, 19 nt, Artificial Sequence
  Description of Artificial Sequence: Synthetic oligonucleotide
cguguauuucugcuuucuc

SEQ ID NO: 1588255 - RNA, 19 nt, Artificial Sequence
  Description of Artificial Sequence: Synthetic oligonucleotide
cacauugcuaguggucucu

SEQ ID NO: 1588256 - RNA, 19 nt, Artificial Sequence
  Description of Artificial Sequence: Synthetic oligonucleotide
gcgucaaccuuccggaccu

SEQ ID NO: 1588257 - RNA, 19 nt, Artificial Sequence
  Description of Artificial Sequence: Synthetic oligonucleotide
uccggaccuuugcgucuac

SEQ ID NO: 1588258 - RNA, 19 nt, Artificial Sequence
  Description of Artificial Sequence: Synthetic oligonucleotide
cuggcgauuccgcagcuuu

SEQ ID NO: 1588259 - RNA, 19 nt, Artificial Sequence
  Description of Artificial Sequence: Synthetic oligonucleotide
ccccgaaguauuacuucuc

SEQ ID NO: 1588260 - RNA, 19 nt, Artificial Sequence
  Description of Artificial Sequence: Synthetic oligonucleotide
gcaagcgaguguucguugu

SEQ ID NO: 1588261 - RNA, 19 nt, Artificial Sequence
  Description of Artificial Sequence: Synthetic oligonucleotide
agcucgcucuugaccggag

SEQ ID NO: 1588262 - RNA, 19 nt, Artificial Sequence
  Description of Artificial Sequence: Synthetic oligonucleotide
ugcucccuuggugccuuuc

SEQ ID NO: 1588263 - RNA, 19 nt, Artificial Sequence
  Description of Artificial Sequence: Synthetic oligonucleotide
gcuaguggucucucucgaa

SEQ ID NO: 1588264 - RNA, 19 nt, Artificial Sequence
  Description of Artificial Sequence: Synthetic oligonucleotide
gaagggcccuggguugcuc

SEQ ID NO: 1588265 - RNA, 19 nt, Artificial Sequence
  Description of Artificial Sequence: Synthetic oligonucleotide
gguaaugcuucggcggugu

SEQ ID NO: 1588266 - RNA, 19 nt, Artificial Sequence
  Description of Artificial Sequence: Synthetic oligonucleotide
ccccagacgguuguacuug

SEQ ID NO: 1588267 - RNA, 19 nt, Artificial Sequence
  Description of Artificial Sequence: Synthetic oligonucleotide
cacccgacgguaacacucu

SEQ ID NO: 1588268 - RNA, 19 nt, Artificial Sequence
  Description of Artificial Sequence: Synthetic oligonucleotide
cguugucuuugcccugugc

SEQ ID NO: 1588269 - RNA, 19 nt, Artificial Sequence
  Description of Artificial Sequence: Synthetic oligonucleotide
acccgccaauccugcgaca

SEQ ID NO: 1588270 - RNA, 19 nt, Artificial Sequence
  Description of Artificial Sequence: Synthetic oligonucleotide
caccacccgcuuccccgcc

SEQ ID NO: 1588271 - RNA, 19 nt, Artificial Sequence
  Description of Artificial Sequence: Synthetic oligonucleotide
acccgacgguaacacucua

SEQ ID NO: 1588272 - RNA, 19 nt, Artificial Sequence
  Description of Artificial Sequence: Synthetic oligonucleotide
aucgagguggagggcugua

SEQ ID NO: 1588273 - RNA, 19 nt, Artificial Sequence
  Description of Artificial Sequence: Synthetic oligonucleotide
accuuacagcaaagccccu

SEQ ID NO: 1588274 - RNA, 19 nt, Artificial Sequence
  Description of Artificial Sequence: Synthetic oligonucleotide
cugaggcgcugcgccggcc

SEQ ID NO: 1588275 - RNA, 19 nt, Artificial Sequence
  Description of Artificial Sequence: Synthetic oligonucleotide
ccuugggaggauuuguauu

SEQ ID NO: 1588276 - RNA, 19 nt, Artificial Sequence
  Description of Artificial Sequence: Synthetic oligonucleotide
gccuugggaggauuuguau

SEQ ID NO: 1588277 - RNA, 19 nt, Artificial Sequence
  Description of Artificial Sequence: Synthetic oligonucleotide
ccgaagggcccuggguugc

SEQ ID NO: 1588278 - RNA, 19 nt, Artificial Sequence
  Description of Artificial Sequence: Synthetic oligonucleotide
cgacaguaaauccugcaau

SEQ ID NO: 1588279 - RNA, 19 nt, Artificial Sequence
  Description of Artificial Sequence: Synthetic oligonucleotide
cgaacggggauucuauccu

SEQ ID NO: 1588280 - RNA, 19 nt, Artificial Sequence
  Description of Artificial Sequence: Synthetic oligonucleotide
gccgguccaaucgucccuc

SEQ ID NO: 1588281 - RNA, 19 nt, Artificial Sequence
  Description of Artificial Sequence: Synthetic oligonucleotide
cccgccggagucccagcag

SEQ ID NO: 1588282 - RNA, 19 nt, Artificial Sequence
  Description of Artificial Sequence: Synthetic oligonucleotide
ccucaucgagguggagggc

SEQ ID NO: 1588283 - RNA, 19 nt, Artificial Sequence
  Description of Artificial Sequence: Synthetic oligonucleotide
ccgguccaaucgucccucc

SEQ ID NO: 1588284 - RNA, 19 nt, Artificial Sequence
  Description of Artificial Sequence: Synthetic oligonucleotide
ccggccgaagggcccuggg

SEQ ID NO: 1588285 - RNA, 19 nt, Artificial Sequence
  Description of Artificial Sequence: Synthetic oligonucleotide
gcgcugcgccggccgaagg

SEQ ID NO: 1588286 - RNA, 19 nt, Artificial Sequence
  Description of Artificial Sequence: Synthetic oligonucleotide
gcgcagcucagcugcccca

SEQ ID NO: 1588287 - RNA, 19 nt, Artificial Sequence
  Description of Artificial Sequence: Synthetic oligonucleotide
ccggaccuuugcgucuacc

SEQ ID NO: 1588288 - RNA, 19 nt, Artificial Sequence
  Description of Artificial Sequence: Synthetic oligonucleotide
ccgaaguaccuuccccgaa

SEQ ID NO: 1588289 - RNA, 19 nt, Artificial Sequence
  Description of Artificial Sequence: Synthetic oligonucleotide
gggucgucgaagaacccuu

SEQ ID NO: 1588290 - RNA, 19 nt, Artificial Sequence
  Description of Artificial Sequence: Synthetic oligonucleotide
cgacgguaacacucuaucu

SEQ ID NO: 1588291 - RNA, 19 nt, Artificial Sequence
  Description of Artificial Sequence: Synthetic oligonucleotide
cggaccuuugcgucuaccu

SEQ ID NO: 1588292 - RNA, 19 nt, Artificial Sequence
  Description of Artificial Sequence: Synthetic oligonucleotide
gcgaguguucguugucuuu

SEQ ID NO: 1588293 - RNA, 19 nt, Artificial Sequence
  Description of Artificial Sequence: Synthetic oligonucleotide
gccccagacgguuguacuu

SEQ ID NO: 1588294 - RNA, 19 nt, Artificial Sequence
  Description of Artificial Sequence: Synthetic oligonucleotide
gcucgcucuugaccggagu

SEQ ID NO: 1588295 - RNA, 19 nt, Artificial Sequence
  Description of Artificial Sequence: Synthetic oligonucleotide
cuuccccgccggaguccca

SEQ ID NO: 1588296 - RNA, 19 nt, Artificial Sequence
  Description of Artificial Sequence: Synthetic oligonucleotide
ccucuuccgguuggugcuc

SEQ ID NO: 1588297 - RNA, 19 nt, Artificial Sequence
  Description of Artificial Sequence: Synthetic oligonucleotide
gcucuugaccggaguguua

SEQ ID NO: 1588298 - RNA, 19 nt, Artificial Sequence
  Description of Artificial Sequence: Synthetic oligonucleotide
cgccaauccugcgacagua

SEQ ID NO: 1588299 - RNA, 19 nt, Artificial Sequence
  Description of Artificial Sequence: Synthetic oligonucleotide
gccggccgaagggcccugg

SEQ ID NO: 1588300 - RNA, 19 nt, Artificial Sequence
  Description of Artificial Sequence: Synthetic oligonucleotide
cccgacgguaacacucuau

SEQ ID NO: 1588301 - RNA, 19 nt, Artificial Sequence
  Description of Artificial Sequence: Synthetic oligonucleotide
gaggucccacggaggccuu

SEQ ID NO: 1588302 - RNA, 19 nt, Artificial Sequence
  Description of Artificial Sequence: Synthetic oligonucleotide
ccgccaauccugcgacagu

SEQ ID NO: 1588303 - RNA, 19 nt, Artificial Sequence
  Description of Artificial Sequence: Synthetic oligonucleotide
cgcucuugaccggaguguu

SEQ ID NO: 1588304 - RNA, 19 nt, Artificial Sequence
  Description of Artificial Sequence: Synthetic oligonucleotide
ccuggcgauuccgcagcuu

SEQ ID NO: 1588305 - RNA, 19 nt, Artificial Sequence
  Description of Artificial Sequence: Synthetic oligonucleotide
cggcgguguucucccuccu

SEQ ID NO: 1588306 - RNA, 19 nt, Artificial Sequence
  Description of Artificial Sequence: Synthetic oligonucleotide
uugacuuuaaugaacacag

SEQ ID NO: 1588307 - RNA, 19 nt, Artificial Sequence
  Description of Artificial Sequence: Synthetic oligonucleotide
auaacauugaacaaagacc

SEQ ID NO: 1588308 - RNA, 19 nt, Artificial Sequence
  Description of Artificial Sequence: Synthetic oligonucleotide
auaguuauaauucuuaaga

SEQ ID NO: 1588309 - RNA, 19 nt, Artificial Sequence
  Description of Artificial Sequence: Synthetic oligonucleotide
aaugaaagaauguggccgc

SEQ ID NO: 1588310 - RNA, 19 nt, Artificial Sequence
  Description of Artificial Sequence: Synthetic oligonucleotide
aaaugaaagaauguggccg

SEQ ID NO: 1588311 - RNA, 19 nt, Artificial Sequence
  Description of Artificial Sequence: Synthetic oligonucleotide
uaaaguagcaccaacuugc

SEQ ID NO: 1588312 - RNA, 19 nt, Artificial Sequence
  Description of Artificial Sequence: Synthetic oligonucleotide
uguauaacauugaacaaag

SEQ ID NO: 1588313 - RNA, 19 nt, Artificial Sequence
  Description of Artificial Sequence: Synthetic oligonucleotide
ucuuaaaagaccagugugg

SEQ ID NO: 1588314 - RNA, 19 nt, Artificial Sequence
  Description of Artificial Sequence: Synthetic oligonucleotide
acaaugugcauuuuauucc

SEQ ID NO: 1588315 - RNA, 19 nt, Artificial Sequence
  Description of Artificial Sequence: Synthetic oligonucleotide
uggagaacuggaaagaggg

SEQ ID NO: 1588316 - RNA, 19 nt, Artificial Sequence
  Description of Artificial Sequence: Synthetic oligonucleotide
uuaccaauuauguauguag

SEQ ID NO: 1588317 - RNA, 19 nt, Artificial Sequence
  Description of Artificial Sequence: Synthetic oligonucleotide
auaaauuaguguuggagag

SEQ ID NO: 1588318 - RNA, 19 nt, Artificial Sequence
  Description of Artificial Sequence: Synthetic oligonucleotide
uuggagagaaaucuaauug

SEQ ID NO: 1588319 - RNA, 19 nt, Artificial Sequence
  Description of Artificial Sequence: Synthetic oligonucleotide
ucuucuaagucaucgaugc

SEQ ID NO: 1588320 - RNA, 19 nt, Artificial Sequence
  Description of Artificial Sequence: Synthetic oligonucleotide
aaugcaucgaaggaguuuc

SEQ ID NO: 1588321 - RNA, 19 nt, Artificial Sequence
  Description of Artificial Sequence: Synthetic oligonucleotide
aaacccauagucuugucug

SEQ ID NO: 1588322 - RNA, 19 nt, Artificial Sequence
  Description of Artificial Sequence: Synthetic oligonucleotide
gacuuuaaugaacacaggc

SEQ ID NO: 1588323 - RNA, 19 nt, Artificial Sequence
  Description of Artificial Sequence: Synthetic oligonucleotide
aaugcuaugaaguguggca

SEQ ID NO: 1588324 - RNA, 19 nt, Artificial Sequence
  Description of Artificial Sequence: Synthetic oligonucleotide
uauaguuauaauucuuaag

SEQ ID NO: 1588325 - RNA, 19 nt, Artificial Sequence
  Description of Artificial Sequence: Synthetic oligonucleotide
aauuuaguuacugaucucu

SEQ ID NO: 1588326 - RNA, 19 nt, Artificial Sequence
  Description of Artificial Sequence: Synthetic oligonucleotide
agaucuuuuacccugacau

SEQ ID NO: 1588327 - RNA, 19 nt, Artificial Sequence
  Description of Artificial Sequence: Synthetic oligonucleotide
uacaaugugcauuuuauuc

SEQ ID NO: 1588328 - RNA, 19 nt, Artificial Sequence
  Description of Artificial Sequence: Synthetic oligonucleotide
agaaagaaccuugaucucc

SEQ ID NO: 1588329 - RNA, 19 nt, Artificial Sequence
  Description of Artificial Sequence: Synthetic oligonucleotide
cuaaaugcuaugaagugug

SEQ ID NO: 1588330 - RNA, 19 nt, Artificial Sequence
  Description of Artificial Sequence: Synthetic oligonucleotide
uuaaguaaguaccccaacu

SEQ ID NO: 1588331 - RNA, 19 nt, Artificial Sequence
  Description of Artificial Sequence: Synthetic oligonucleotide
aaaugcuaugaaguguggc

SEQ ID NO: 1588332 - RNA, 19 nt, Artificial Sequence
  Description of Artificial Sequence: Synthetic oligonucleotide
uuaguuacugaucucucug

SEQ ID NO: 1588333 - RNA, 19 nt, Artificial Sequence
  Description of Artificial Sequence: Synthetic oligonucleotide
agacccuugacuuuaauga

SEQ ID NO: 1588334 - RNA, 19 nt, Artificial Sequence
  Description of Artificial Sequence: Synthetic oligonucleotide
caauuauguauguagugcc

SEQ ID NO: 1588335 - RNA, 19 nt, Artificial Sequence
  Description of Artificial Sequence: Synthetic oligonucleotide
uaauuguauaacauugaac

SEQ ID NO: 1588336 - RNA, 19 nt, Artificial Sequence
  Description of Artificial Sequence: Synthetic oligonucleotide
aacgagagggaaaugaaag

SEQ ID NO: 1588337 - RNA, 19 nt, Artificial Sequence
  Description of Artificial Sequence: Synthetic oligonucleotide
agaaaucuaauuguauaac

SEQ ID NO: 1588338 - RNA, 19 nt, Artificial Sequence
  Description of Artificial Sequence: Synthetic oligonucleotide
acuuuaaugaacacaggcg

SEQ ID NO: 1588339 - RNA, 19 nt, Artificial Sequence
  Description of Artificial Sequence: Synthetic oligonucleotide
accaacuugcaccugcacc

SEQ ID NO: 1588340 - RNA, 19 nt, Artificial Sequence
  Description of Artificial Sequence: Synthetic oligonucleotide
uucaaguuguucgucaccg

SEQ ID NO: 1588341 - RNA, 19 nt, Artificial Sequence
  Description of Artificial Sequence: Synthetic oligonucleotide
aucuuuuacccugacaugg

SEQ ID NO: 1588342 - RNA, 19 nt, Artificial Sequence
  Description of Artificial Sequence: Synthetic oligonucleotide
ugccuaaaugcuaugaagu

SEQ ID NO: 1588343 - RNA, 19 nt, Artificial Sequence
  Description of Artificial Sequence: Synthetic oligonucleotide
aauggcacguuuaaguaag

SEQ ID NO: 1588344 - RNA, 19 nt, Artificial Sequence
  Description of Artificial Sequence: Synthetic oligonucleotide
aaaacaacgagagggaaau

SEQ ID NO: 1588345 - RNA, 19 nt, Artificial Sequence
  Description of Artificial Sequence: Synthetic oligonucleotide
uguaucuuuccccacuccc

SEQ ID NO: 1588346 - RNA, 19 nt, Artificial Sequence
  Description of Artificial Sequence: Synthetic oligonucleotide
guuguuuagcuccaguaag

SEQ ID NO: 1588347 - RNA, 19 nt, Artificial Sequence
  Description of Artificial Sequence: Synthetic oligonucleotide
uacauauaguuauaauucu

SEQ ID NO: 1588348 - RNA, 19 nt, Artificial Sequence
  Description of Artificial Sequence: Synthetic oligonucleotide
agaggggcaauccacauug

SEQ ID NO: 1588349 - RNA, 19 nt, Artificial Sequence
  Description of Artificial Sequence: Synthetic oligonucleotide
ucaagcucggcacauuugc

SEQ ID NO: 1588350 - RNA, 19 nt, Artificial Sequence
  Description of Artificial Sequence: Synthetic oligonucleotide
uggagagaaaucuaauugu

SEQ ID NO: 1588351 - RNA, 19 nt, Artificial Sequence
  Description of Artificial Sequence: Synthetic oligonucleotide
aucuaauuguauaacauug

SEQ ID NO: 1588352 - RNA, 19 nt, Artificial Sequence
  Description of Artificial Sequence: Synthetic oligonucleotide
uucaaugaugaccagcuua

SEQ ID NO: 1588353 - RNA, 19 nt, Artificial Sequence
  Description of Artificial Sequence: Synthetic oligonucleotide
aaaucuaauuguauaacau

SEQ ID NO: 1588354 - RNA, 19 nt, Artificial Sequence
  Description of Artificial Sequence: Synthetic oligonucleotide
aagucaucgaugcuuuucu

SEQ ID NO: 1588355 - RNA, 19 nt, Artificial Sequence
  Description of Artificial Sequence: Synthetic oligonucleotide
aacaacgagagggaaauga

SEQ ID NO: 1588356 - RNA, 19 nt, Artificial Sequence
  Description of Artificial Sequence: Synthetic oligonucleotide
uuuacccugacauggagaa

SEQ ID NO: 1588357 - RNA, 19 nt, Artificial Sequence
  Description of Artificial Sequence: Synthetic oligonucleotide
caucgaaggaguuucuggg

SEQ ID NO: 1588358 - RNA, 19 nt, Artificial Sequence
  Description of Artificial Sequence: Synthetic oligonucleotide
acuuucaaugaugaccagc

SEQ ID NO: 1588359 - RNA, 19 nt, Artificial Sequence
  Description of Artificial Sequence: Synthetic oligonucleotide
cucuuaaaagaccagugug

SEQ ID NO: 1588360 - RNA, 19 nt, Artificial Sequence
  Description of Artificial Sequence: Synthetic oligonucleotide
aaguaccccaacuugggcu

SEQ ID NO: 1588361 - RNA, 19 nt, Artificial Sequence
  Description of Artificial Sequence: Synthetic oligonucleotide
agauguuucggugacagug

SEQ ID NO: 1588362 - RNA, 19 nt, Artificial Sequence
  Description of Artificial Sequence: Synthetic oligonucleotide
uuugcagauguuucgguga

SEQ ID NO: 1588363 - RNA, 19 nt, Artificial Sequence
  Description of Artificial Sequence: Synthetic oligonucleotide
aacaucagucuucuuggug

SEQ ID NO: 1588364 - RNA, 19 nt, Artificial Sequence
  Description of Artificial Sequence: Synthetic oligonucleotide
uaaggagguuuucacaugu

SEQ ID NO: 1588365 - RNA, 19 nt, Artificial Sequence
  Description of Artificial Sequence: Synthetic oligonucleotide
cugagcacgauccaacucc

SEQ ID NO: 1588366 - RNA, 19 nt, Artificial Sequence
  Description of Artificial Sequence: Synthetic oligonucleotide
uguuuaaaguagcaccaac

SEQ ID NO: 1588367 - RNA, 19 nt, Artificial Sequence
  Description of Artificial Sequence: Synthetic oligonucleotide
cuuaaaagaccaguguggc

SEQ ID NO: 1588368 - RNA, 19 nt, Artificial Sequence
  Description of Artificial Sequence: Synthetic oligonucleotide
uccaauuuaguuacugauc

SEQ ID NO: 1588369 - RNA, 19 nt, Artificial Sequence
  Description of Artificial Sequence: Synthetic oligonucleotide
aaagaauguggccgcagcu

SEQ ID NO: 1588370 - RNA, 19 nt, Artificial Sequence
  Description of Artificial Sequence: Synthetic oligonucleotide
augccuaaaugcuaugaag

SEQ ID NO: 1588371 - RNA, 19 nt, Artificial Sequence
  Description of Artificial Sequence: Synthetic oligonucleotide
acauuugccuucugagagc

SEQ ID NO: 1588372 - RNA, 19 nt, Artificial Sequence
  Description of Artificial Sequence: Synthetic oligonucleotide
aauguggccgcagcuaagg

SEQ ID NO: 1588373 - RNA, 19 nt, Artificial Sequence
  Description of Artificial Sequence: Synthetic oligonucleotide
uaaguaaguaccccaacuu

SEQ ID NO: 1588374 - RNA, 19 nt, Artificial Sequence
  Description of Artificial Sequence: Synthetic oligonucleotide
accaauuauguauguagug

SEQ ID NO: 1588375 - RNA, 19 nt, Artificial Sequence
  Description of Artificial Sequence: Synthetic oligonucleotide
aggcguaagaaacccauag

SEQ ID NO: 1588376 - RNA, 19 nt, Artificial Sequence
  Description of Artificial Sequence: Synthetic oligonucleotide
aaauggcacguuuaaguaa

SEQ ID NO: 1588377 - RNA, 19 nt, Artificial Sequence
  Description of Artificial Sequence: Synthetic oligonucleotide
uaaaugcuaugaagugugg

SEQ ID NO: 1588378 - RNA, 19 nt, Artificial Sequence
  Description of Artificial Sequence: Synthetic oligonucleotide
uaccaauuauguauguagu

SEQ ID NO: 1588379 - RNA, 19 nt, Artificial Sequence
  Description of Artificial Sequence: Synthetic oligonucleotide
aacccauagucuugucugg

SEQ ID NO: 1588380 - RNA, 19 nt, Artificial Sequence
  Description of Artificial Sequence: Synthetic oligonucleotide
auauaguuauaauucuuaa

SEQ ID NO: 1588381 - RNA, 19 nt, Artificial Sequence
  Description of Artificial Sequence: Synthetic oligonucleotide
ugucuggaaguaaaacuca

SEQ ID NO: 1588382 - RNA, 19 nt, Artificial Sequence
  Description of Artificial Sequence: Synthetic oligonucleotide
uuccuuuguuuaaaguagc

SEQ ID NO: 1588383 - RNA, 19 nt, Artificial Sequence
  Description of Artificial Sequence: Synthetic oligonucleotide
ggaaaugaaagaauguggc

SEQ ID NO: 1588384 - RNA, 19 nt, Artificial Sequence
  Description of Artificial Sequence: Synthetic oligonucleotide
acucuuaaaagaccagugu

SEQ ID NO: 1588385 - RNA, 19 nt, Artificial Sequence
  Description of Artificial Sequence: Synthetic oligonucleotide
gaaagaauguggccgcagc

SEQ ID NO: 1588386 - RNA, 19 nt, Artificial Sequence
  Description of Artificial Sequence: Synthetic oligonucleotide
ugacuuuaaugaacacagg

SEQ ID NO: 1588387 - RNA, 19 nt, Artificial Sequence
  Description of Artificial Sequence: Synthetic oligonucleotide
cacguuuaaguaaguaccc

SEQ ID NO: 1588388 - RNA, 19 nt, Artificial Sequence
  Description of Artificial Sequence: Synthetic oligonucleotide
ucaguugggaaggaacagg

SEQ ID NO: 1588389 - RNA, 19 nt, Artificial Sequence
  Description of Artificial Sequence: Synthetic oligonucleotide
uggcuaagcagacugcaug

SEQ ID NO: 1588390 - RNA, 19 nt, Artificial Sequence
  Description of Artificial Sequence: Synthetic oligonucleotide
cauugaaugcucucccugc

SEQ ID NO: 1588391 - RNA, 19 nt, Artificial Sequence
  Description of Artificial Sequence: Synthetic oligonucleotide
gugccuagaucuuuuaccc

SEQ ID NO: 1588392 - RNA, 19 nt, Artificial Sequence
  Description of Artificial Sequence: Synthetic oligonucleotide
ugaaugcucucccugcuga

SEQ ID NO: 1588393 - RNA, 19 nt, Artificial Sequence
  Description of Artificial Sequence: Synthetic oligonucleotide
uucuuugcagauguuucgg

SEQ ID NO: 1588394 - RNA, 19 nt, Artificial Sequence
  Description of Artificial Sequence: Synthetic oligonucleotide
aaguagcaccaacuugcac

SEQ ID NO: 1588395 - RNA, 19 nt, Artificial Sequence
  Description of Artificial Sequence: Synthetic oligonucleotide
uuuaaugaacacaggcgua

SEQ ID NO: 1588396 - RNA, 19 nt, Artificial Sequence
  Description of Artificial Sequence: Synthetic oligonucleotide
aaauguccuacaaugugca

SEQ ID NO: 1588397 - RNA, 19 nt, Artificial Sequence
  Description of Artificial Sequence: Synthetic oligonucleotide
ucuucuuggugacuccacc

SEQ ID NO: 1588398 - RNA, 19 nt, Artificial Sequence
  Description of Artificial Sequence: Synthetic oligonucleotide
uccacauugaaugcucucc

SEQ ID NO: 1588399 - RNA, 19 nt, Artificial Sequence
  Description of Artificial Sequence: Synthetic oligonucleotide
ucugcgaguacuucucagc

SEQ ID NO: 1588400 - RNA, 19 nt, Artificial Sequence
  Description of Artificial Sequence: Synthetic oligonucleotide
uaaggucugguccagcauc

SEQ ID NO: 1588401 - RNA, 19 nt, Artificial Sequence
  Description of Artificial Sequence: Synthetic oligonucleotide
auuguauaacauugaacaa

SEQ ID NO: 1588402 - RNA, 19 nt, Artificial Sequence
  Description of Artificial Sequence: Synthetic oligonucleotide
ucuccaauuuaguuacuga

SEQ ID NO: 1588403 - RNA, 19 nt, Artificial Sequence
  Description of Artificial Sequence: Synthetic oligonucleotide
gacucuuaaaagaccagug

SEQ ID NO: 1588404 - RNA, 19 nt, Artificial Sequence
  Description of Artificial Sequence: Synthetic oligonucleotide
uuaguguuggagagaaauc

SEQ ID NO: 1588405 - RNA, 19 nt, Artificial Sequence
  Description of Artificial Sequence: Synthetic oligonucleotide
ucucuucuaagucaucgau

SEQ ID NO: 1588406 - RNA, 19 nt, Artificial Sequence
  Description of Artificial Sequence: Synthetic oligonucleotide
uguucagagaugcuacauc

SEQ ID NO: 1588407 - RNA, 19 nt, Artificial Sequence
  Description of Artificial Sequence: Synthetic oligonucleotide
acguuuaaguaaguacccc

SEQ ID NO: 1588408 - RNA, 19 nt, Artificial Sequence
  Description of Artificial Sequence: Synthetic oligonucleotide
gggaaaugaaagaaugugg

SEQ ID NO: 1588409 - RNA, 19 nt, Artificial Sequence
  Description of Artificial Sequence: Synthetic oligonucleotide
uugucagaaagaaccuuga

SEQ ID NO: 1588410 - RNA, 19 nt, Artificial Sequence
  Description of Artificial Sequence: Synthetic oligonucleotide
caucuggugcauacuaagg

SEQ ID NO: 1588411 - RNA, 19 nt, Artificial Sequence
  Description of Artificial Sequence: Synthetic oligonucleotide
cauauaguuauaauucuua

SEQ ID NO: 1588412 - RNA, 19 nt, Artificial Sequence
  Description of Artificial Sequence: Synthetic oligonucleotide
uccuuuguuuaaaguagca

SEQ ID NO: 1588413 - RNA, 19 nt, Artificial Sequence
  Description of Artificial Sequence: Synthetic oligonucleotide
acacaggcguaagaaaccc

SEQ ID NO: 1588414 - RNA, 19 nt, Artificial Sequence
  Description of Artificial Sequence: Synthetic oligonucleotide
uguccuacaaugugcauuu

SEQ ID NO: 1588415 - RNA, 19 nt, Artificial Sequence
  Description of Artificial Sequence: Synthetic oligonucleotide
ggugacuccaccuuggcac

SEQ ID NO: 1588416 - RNA, 19 nt, Artificial Sequence
  Description of Artificial Sequence: Synthetic oligonucleotide
cuuggugacuccaccuugg

SEQ ID NO: 1588417 - RNA, 19 nt, Artificial Sequence
  Description of Artificial Sequence: Synthetic oligonucleotide
gcaagugucaguugggaag

SEQ ID NO: 1588418 - RNA, 19 nt, Artificial Sequence
  Description of Artificial Sequence: Synthetic oligonucleotide
cuuuaaugaacacaggcgu

SEQ ID NO: 1588419 - RNA, 19 nt, Artificial Sequence
  Description of Artificial Sequence: Synthetic oligonucleotide
caaccugggaaauggcacg

SEQ ID NO: 1588420 - RNA, 19 nt, Artificial Sequence
  Description of Artificial Sequence: Synthetic oligonucleotide
guaaguaccccaacuuggg

SEQ ID NO: 1588421 - RNA, 19 nt, Artificial Sequence
  Description of Artificial Sequence: Synthetic oligonucleotide
aaagaaccuugaucuccuc

SEQ ID NO: 1588422 - RNA, 19 nt, Artificial Sequence
  Description of Artificial Sequence: Synthetic oligonucleotide
aguaaggucugguccagca

SEQ ID NO: 1588423 - RNA, 19 nt, Artificial Sequence
  Description of Artificial Sequence: Synthetic oligonucleotide
uaaguaccccaacuugggc

SEQ ID NO: 1588424 - RNA, 19 nt, Artificial Sequence
  Description of Artificial Sequence: Synthetic oligonucleotide
ucuuuuacccugacaugga

SEQ ID NO: 1588425 - RNA, 19 nt, Artificial Sequence
  Description of Artificial Sequence: Synthetic oligonucleotide
uuaaaagaccaguguggcu

SEQ ID NO: 1588426 - RNA, 19 nt, Artificial Sequence
  Description of Artificial Sequence: Synthetic oligonucleotide
uuuuaccaauuauguaugu

SEQ ID NO: 1588427 - RNA, 19 nt, Artificial Sequence
  Description of Artificial Sequence: Synthetic oligonucleotide
uaaauuaguguuggagaga

SEQ ID NO: 1588428 - RNA, 19 nt, Artificial Sequence
  Description of Artificial Sequence: Synthetic oligonucleotide
aacuugcaccugcaccugg

SEQ ID NO: 1588429 - RNA, 19 nt, Artificial Sequence
  Description of Artificial Sequence: Synthetic oligonucleotide
caagugucaguugggaagg

SEQ ID NO: 1588430 - RNA, 19 nt, Artificial Sequence
  Description of Artificial Sequence: Synthetic oligonucleotide
uguuggagagaaaucuaau

SEQ ID NO: 1588431 - RNA, 19 nt, Artificial Sequence
  Description of Artificial Sequence: Synthetic oligonucleotide
cucuucuaagucaucgaug

SEQ ID NO: 1588432 - RNA, 19 nt, Artificial Sequence
  Description of Artificial Sequence: Synthetic oligonucleotide
ugugaggcuuccuacccug

SEQ ID NO: 1588433 - RNA, 19 nt, Artificial Sequence
  Description of Artificial Sequence: Synthetic oligonucleotide
cuaauuguauaacauugaa

SEQ ID NO: 1588434 - RNA, 19 nt, Artificial Sequence
  Description of Artificial Sequence: Synthetic oligonucleotide
cuugcggucagcaucuuca

SEQ ID NO: 1588435 - RNA, 19 nt, Artificial Sequence
  Description of Artificial Sequence: Synthetic oligonucleotide
ucgaaggaguuucugggaa

SEQ ID NO: 1588436 - RNA, 19 nt, Artificial Sequence
  Description of Artificial Sequence: Synthetic oligonucleotide
aaugucaaccugggaaaug

SEQ ID NO: 1588437 - RNA, 19 nt, Artificial Sequence
  Description of Artificial Sequence: Synthetic oligonucleotide
ugcgucuguucagagaugc

SEQ ID NO: 1588438 - RNA, 19 nt, Artificial Sequence
  Description of Artificial Sequence: Synthetic oligonucleotide
aguuacugaucucucugca

SEQ ID NO: 1588439 - RNA, 19 nt, Artificial Sequence
  Description of Artificial Sequence: Synthetic oligonucleotide
aaagaggggcaauccacau

SEQ ID NO: 1588440 - RNA, 19 nt, Artificial Sequence
  Description of Artificial Sequence: Synthetic oligonucleotide
gaugcgucuguucagagau

SEQ ID NO: 1588441 - RNA, 19 nt, Artificial Sequence
  Description of Artificial Sequence: Synthetic oligonucleotide
gaucucucugcaaacucag

SEQ ID NO: 1588442 - RNA, 19 nt, Artificial Sequence
  Description of Artificial Sequence: Synthetic oligonucleotide
uaagcagacugcaugccua

SEQ ID NO: 1588443 - RNA, 19 nt, Artificial Sequence
  Description of Artificial Sequence: Synthetic oligonucleotide
gcacguuuaaguaaguacc

SEQ ID NO: 1588444 - RNA, 19 nt, Artificial Sequence
  Description of Artificial Sequence: Synthetic oligonucleotide
ugggaaauggcacguuuaa

SEQ ID NO: 1588445 - RNA, 19 nt, Artificial Sequence
  Description of Artificial Sequence: Synthetic oligonucleotide
ucuggugcauacuaagguu

SEQ ID NO: 1588446 - RNA, 19 nt, Artificial Sequence
  Description of Artificial Sequence: Synthetic oligonucleotide
uucacauguuguuuagcuc

SEQ ID NO: 1588447 - RNA, 19 nt, Artificial Sequence
  Description of Artificial Sequence: Synthetic oligonucleotide
agcuggaugcgucuguuca

SEQ ID NO: 1588448 - RNA, 19 nt, Artificial Sequence
  Description of Artificial Sequence: Synthetic oligonucleotide
ccaauuauguauguagugc

SEQ ID NO: 1588449 - RNA, 19 nt, Artificial Sequence
  Description of Artificial Sequence: Synthetic oligonucleotide
ggcacguuuaaguaaguac

SEQ ID NO: 1588450 - RNA, 19 nt, Artificial Sequence
  Description of Artificial Sequence: Synthetic oligonucleotide
cugcgaguacuucucagcc

SEQ ID NO: 1588451 - RNA, 19 nt, Artificial Sequence
  Description of Artificial Sequence: Synthetic oligonucleotide
caauccacauugaaugcuc

SEQ ID NO: 1588452 - RNA, 19 nt, Artificial Sequence
  Description of Artificial Sequence: Synthetic oligonucleotide
ugacagugguuaaaaguau

SEQ ID NO: 1588453 - RNA, 19 nt, Artificial Sequence
  Description of Artificial Sequence: Synthetic oligonucleotide
ucuuuccccacucccugcc

SEQ ID NO: 1588454 - RNA, 19 nt, Artificial Sequence
  Description of Artificial Sequence: Synthetic oligonucleotide
uucaagcucggcacauuug

SEQ ID NO: 1588455 - RNA, 19 nt, Artificial Sequence
  Description of Artificial Sequence: Synthetic oligonucleotide
acgagagggaaaugaaaga

SEQ ID NO: 1588456 - RNA, 19 nt, Artificial Sequence
  Description of Artificial Sequence: Synthetic oligonucleotide
ggcugcaagugucaguugg

SEQ ID NO: 1588457 - RNA, 19 nt, Artificial Sequence
  Description of Artificial Sequence: Synthetic oligonucleotide
auguauguagugccuagau

SEQ ID NO: 1588458 - RNA, 19 nt, Artificial Sequence
  Description of Artificial Sequence: Synthetic oligonucleotide
caggacucuuaaaagacca

SEQ ID NO: 1588459 - RNA, 19 nt, Artificial Sequence
  Description of Artificial Sequence: Synthetic oligonucleotide
uuuucacauguuguuuagc

SEQ ID NO: 1588460 - RNA, 19 nt, Artificial Sequence
  Description of Artificial Sequence: Synthetic oligonucleotide
uuuaccaauuauguaugua

SEQ ID NO: 1588461 - RNA, 19 nt, Artificial Sequence
  Description of Artificial Sequence: Synthetic oligonucleotide
gcaucgaaggaguuucugg

SEQ ID NO: 1588462 - RNA, 19 nt, Artificial Sequence
  Description of Artificial Sequence: Synthetic oligonucleotide
ugaaagaauguggccgcag

SEQ ID NO: 1588463 - RNA, 19 nt, Artificial Sequence
  Description of Artificial Sequence: Synthetic oligonucleotide
ucuuugcagauguuucggu

SEQ ID NO: 1588464 - RNA, 19 nt, Artificial Sequence
  Description of Artificial Sequence: Synthetic oligonucleotide
gcguaagaaacccauaguc

SEQ ID NO: 1588465 - RNA, 19 nt, Artificial Sequence
  Description of Artificial Sequence: Synthetic oligonucleotide
cuucaaguuguucgucacc

SEQ ID NO: 1588466 - RNA, 19 nt, Artificial Sequence
  Description of Artificial Sequence: Synthetic oligonucleotide
ugccuuucuguaucuuucc

SEQ ID NO: 1588467 - RNA, 19 nt, Artificial Sequence
  Description of Artificial Sequence: Synthetic oligonucleotide
agaauguggccgcagcuaa

SEQ ID NO: 1588468 - RNA, 19 nt, Artificial Sequence
  Description of Artificial Sequence: Synthetic oligonucleotide
uagugccuagaucuuuuac

SEQ ID NO: 1588469 - RNA, 19 nt, Artificial Sequence
  Description of Artificial Sequence: Synthetic oligonucleotide
ugucagaaagaaccuugau

SEQ ID NO: 1588470 - RNA, 19 nt, Artificial Sequence
  Description of Artificial Sequence: Synthetic oligonucleotide
ggaaauggcacguuuaagu

SEQ ID NO: 1588471 - RNA, 19 nt, Artificial Sequence
  Description of Artificial Sequence: Synthetic oligonucleotide
uugcaccugcaccugguug

SEQ ID NO: 1588472 - RNA, 19 nt, Artificial Sequence
  Description of Artificial Sequence: Synthetic oligonucleotide
ggaguuucugggaagcagg

SEQ ID NO: 1588473 - RNA, 19 nt, Artificial Sequence
  Description of Artificial Sequence: Synthetic oligonucleotide
aaaugcaucgaaggaguuu

SEQ ID NO: 1588474 - RNA, 19 nt, Artificial Sequence
  Description of Artificial Sequence: Synthetic oligonucleotide
ugaggcuuccuacccuggc

SEQ ID NO: 1588475 - RNA, 19 nt, Artificial Sequence
  Description of Artificial Sequence: Synthetic oligonucleotide
ugagcacgauccaacuccu

SEQ ID NO: 1588476 - RNA, 19 nt, Artificial Sequence
  Description of Artificial Sequence: Synthetic oligonucleotide
aucgaaggaguuucuggga

SEQ ID NO: 1588477 - RNA, 19 nt, Artificial Sequence
  Description of Artificial Sequence: Synthetic oligonucleotide
uccuacccuggcuaagcag

SEQ ID NO: 1588478 - RNA, 19 nt, Artificial Sequence
  Description of Artificial Sequence: Synthetic oligonucleotide
uacugaucucucugcaaac

SEQ ID NO: 1588479 - RNA, 19 nt, Artificial Sequence
  Description of Artificial Sequence: Synthetic oligonucleotide
cuccucauauuugucuucc

SEQ ID NO: 1588480 - RNA, 19 nt, Artificial Sequence
  Description of Artificial Sequence: Synthetic oligonucleotide
uucagcuggaucuccugaa

SEQ ID NO: 1588481 - RNA, 19 nt, Artificial Sequence
  Description of Artificial Sequence: Synthetic oligonucleotide
aauguccuacaaugugcau

SEQ ID NO: 1588482 - RNA, 19 nt, Artificial Sequence
  Description of Artificial Sequence: Synthetic oligonucleotide
cuagcugguucuuugcaga

SEQ ID NO: 1588483 - RNA, 19 nt, Artificial Sequence
  Description of Artificial Sequence: Synthetic oligonucleotide
caauuuaguuacugaucuc

SEQ ID NO: 1588484 - RNA, 19 nt, Artificial Sequence
  Description of Artificial Sequence: Synthetic oligonucleotide
ugcaagugucaguugggaa

SEQ ID NO: 1588485 - RNA, 19 nt, Artificial Sequence
  Description of Artificial Sequence: Synthetic oligonucleotide
uguucgucaccguuuucaa

SEQ ID NO: 1588486 - RNA, 19 nt, Artificial Sequence
  Description of Artificial Sequence: Synthetic oligonucleotide
ggcuaagcagacugcaugc

SEQ ID NO: 1588487 - RNA, 19 nt, Artificial Sequence
  Description of Artificial Sequence: Synthetic oligonucleotide
cuggaaagaggggcaaucc

SEQ ID NO: 1588488 - RNA, 19 nt, Artificial Sequence
  Description of Artificial Sequence: Synthetic oligonucleotide
gcaucuggugcauacuaag

SEQ ID NO: 1588489 - RNA, 19 nt, Artificial Sequence
  Description of Artificial Sequence: Synthetic oligonucleotide
uucuuggugacuccaccuu

SEQ ID NO: 1588490 - RNA, 19 nt, Artificial Sequence
  Description of Artificial Sequence: Synthetic oligonucleotide
guuucggugacagugguua

SEQ ID NO: 1588491 - RNA, 19 nt, Artificial Sequence
  Description of Artificial Sequence: Synthetic oligonucleotide
ugcccuagcugguucuuug

SEQ ID NO: 1588492 - RNA, 19 nt, Artificial Sequence
  Description of Artificial Sequence: Synthetic oligonucleotide
gccuagaucuuuuacccug

SEQ ID NO: 1588493 - RNA, 19 nt, Artificial Sequence
  Description of Artificial Sequence: Synthetic oligonucleotide
agcuggaucuccugaauuu

SEQ ID NO: 1588494 - RNA, 19 nt, Artificial Sequence
  Description of Artificial Sequence: Synthetic oligonucleotide
agaaacccauagucuuguc

SEQ ID NO: 1588495 - RNA, 19 nt, Artificial Sequence
  Description of Artificial Sequence: Synthetic oligonucleotide
gccuaaaugcuaugaagug

SEQ ID NO: 1588496 - RNA, 19 nt, Artificial Sequence
  Description of Artificial Sequence: Synthetic oligonucleotide
gugcauuuuauuccauauc

SEQ ID NO: 1588497 - RNA, 19 nt, Artificial Sequence
  Description of Artificial Sequence: Synthetic oligonucleotide
gauggaaggggcugcaagu

SEQ ID NO: 1588498 - RNA, 19 nt, Artificial Sequence
  Description of Artificial Sequence: Synthetic oligonucleotide
aguuguucgucaccguuuu

SEQ ID NO: 1588499 - RNA, 19 nt, Artificial Sequence
  Description of Artificial Sequence: Synthetic oligonucleotide
acuugcggucagcaucuuc

SEQ ID NO: 1588500 - RNA, 19 nt, Artificial Sequence
  Description of Artificial Sequence: Synthetic oligonucleotide
agaccaguguggcuuccag

SEQ ID NO: 1588501 - RNA, 19 nt, Artificial Sequence
  Description of Artificial Sequence: Synthetic oligonucleotide
aagcagacugcaugccuaa

SEQ ID NO: 1588502 - RNA, 19 nt, Artificial Sequence
  Description of Artificial Sequence: Synthetic oligonucleotide
aguaccccaacuugggcuu

SEQ ID NO: 1588503 - RNA, 19 nt, Artificial Sequence
  Description of Artificial Sequence: Synthetic oligonucleotide
guuuaaguaaguaccccaa

SEQ ID NO: 1588504 - RNA, 19 nt, Artificial Sequence
  Description of Artificial Sequence: Synthetic oligonucleotide
acugaucucucugcaaacu

SEQ ID NO: 1588505 - RNA, 19 nt, Artificial Sequence
  Description of Artificial Sequence: Synthetic oligonucleotide
auacuugcggucagcaucu

SEQ ID NO: 1588506 - RNA, 19 nt, Artificial Sequence
  Description of Artificial Sequence: Synthetic oligonucleotide
uggaugcgucuguucagag

SEQ ID NO: 1588507 - RNA, 19 nt, Artificial Sequence
  Description of Artificial Sequence: Synthetic oligonucleotide
cuuccuacccuggcuaagc

SEQ ID NO: 1588508 - RNA, 19 nt, Artificial Sequence
  Description of Artificial Sequence: Synthetic oligonucleotide
ugcgaguacuucucagccu

SEQ ID NO: 1588509 - RNA, 19 nt, Artificial Sequence
  Description of Artificial Sequence: Synthetic oligonucleotide
gcgaguacuucucagccug

SEQ ID NO: 1588510 - RNA, 19 nt, Artificial Sequence
  Description of Artificial Sequence: Synthetic oligonucleotide
ugcaucgaaggaguuucug

SEQ ID NO: 1588511 - RNA, 19 nt, Artificial Sequence
  Description of Artificial Sequence: Synthetic oligonucleotide
gcauacuaagguuuucuuc

SEQ ID NO: 1588512 - RNA, 19 nt, Artificial Sequence
  Description of Artificial Sequence: Synthetic oligonucleotide
ucaaguuguucgucaccgu

SEQ ID NO: 1588513 - RNA, 19 nt, Artificial Sequence
  Description of Artificial Sequence: Synthetic oligonucleotide
uuccuacccuggcuaagca

SEQ ID NO: 1588514 - RNA, 19 nt, Artificial Sequence
  Description of Artificial Sequence: Synthetic oligonucleotide
ggcaauccacauugaaugc

SEQ ID NO: 1588515 - RNA, 19 nt, Artificial Sequence
  Description of Artificial Sequence: Synthetic oligonucleotide
ucggugacagugguuaaaa

SEQ ID NO: 1588516 - RNA, 19 nt, Artificial Sequence
  Description of Artificial Sequence: Synthetic oligonucleotide
gugucaguugggaaggaac

SEQ ID NO: 1588517 - RNA, 19 nt, Artificial Sequence
  Description of Artificial Sequence: Synthetic oligonucleotide
aucgaugcuuuucuccaau

SEQ ID NO: 1588518 - RNA, 19 nt, Artificial Sequence
  Description of Artificial Sequence: Synthetic oligonucleotide
aaggucugguccagcaucu

SEQ ID NO: 1588519 - RNA, 19 nt, Artificial Sequence
  Description of Artificial Sequence: Synthetic oligonucleotide
ugcuaugaaguguggcaau

SEQ ID NO: 1588520 - RNA, 19 nt, Artificial Sequence
  Description of Artificial Sequence: Synthetic oligonucleotide
ugccuagaucuuuuacccu

SEQ ID NO: 1588521 - RNA, 19 nt, Artificial Sequence
  Description of Artificial Sequence: Synthetic oligonucleotide
gaaguguggcaaugucaac

SEQ ID NO: 1588522 - RNA, 19 nt, Artificial Sequence
  Description of Artificial Sequence: Synthetic oligonucleotide
aaguuguucgucaccguuu

SEQ ID NO: 1588523 - RNA, 19 nt, Artificial Sequence
  Description of Artificial Sequence: Synthetic oligonucleotide
guuacugaucucucugcaa

SEQ ID NO: 1588524 - RNA, 19 nt, Artificial Sequence
  Description of Artificial Sequence: Synthetic oligonucleotide
uggugcauacuaagguuuu

SEQ ID NO: 1588525 - RNA, 19 nt, Artificial Sequence
  Description of Artificial Sequence: Synthetic oligonucleotide
agaugcuacaucagcuuca

SEQ ID NO: 1588526 - RNA, 19 nt, Artificial Sequence
  Description of Artificial Sequence: Synthetic oligonucleotide
auguccuacaaugugcauu

SEQ ID NO: 1588527 - RNA, 19 nt, Artificial Sequence
  Description of Artificial Sequence: Synthetic oligonucleotide
ugcaugccuaaaugcuaug

SEQ ID NO: 1588528 - RNA, 19 nt, Artificial Sequence
  Description of Artificial Sequence: Synthetic oligonucleotide
aaccugggaaauggcacgu

SEQ ID NO: 1588529 - RNA, 19 nt, Artificial Sequence
  Description of Artificial Sequence: Synthetic oligonucleotide
aaacaacgagagggaaaug

SEQ ID NO: 1588530 - RNA, 19 nt, Artificial Sequence
  Description of Artificial Sequence: Synthetic oligonucleotide
gguucuuugcagauguuuc

SEQ ID NO: 1588531 - RNA, 19 nt, Artificial Sequence
  Description of Artificial Sequence: Synthetic oligonucleotide
ucgucaccguuuucaauuc

SEQ ID NO: 1588532 - RNA, 19 nt, Artificial Sequence
  Description of Artificial Sequence: Synthetic oligonucleotide
gaaagaaccuugaucuccu

SEQ ID NO: 1588533 - RNA, 19 nt, Artificial Sequence
  Description of Artificial Sequence: Synthetic oligonucleotide
cauagucuugucuggaagu

SEQ ID NO: 1588534 - RNA, 19 nt, Artificial Sequence
  Description of Artificial Sequence: Synthetic oligonucleotide
gaaccuugaucuccuccuc

SEQ ID NO: 1588535 - RNA, 19 nt, Artificial Sequence
  Description of Artificial Sequence: Synthetic oligonucleotide
acaggcguaagaaacccau

SEQ ID NO: 1588536 - RNA, 19 nt, Artificial Sequence
  Description of Artificial Sequence: Synthetic oligonucleotide
augcucucccugcugagau

SEQ ID NO: 1588537 - RNA, 19 nt, Artificial Sequence
  Description of Artificial Sequence: Synthetic oligonucleotide
cacguuccaggucacuuuc

SEQ ID NO: 1588538 - RNA, 19 nt, Artificial Sequence
  Description of Artificial Sequence: Synthetic oligonucleotide
agucuugucuggaaguaaa

SEQ ID NO: 1588539 - RNA, 19 nt, Artificial Sequence
  Description of Artificial Sequence: Synthetic oligonucleotide
guagcaccaacuugcaccu

SEQ ID NO: 1588540 - RNA, 19 nt, Artificial Sequence
  Description of Artificial Sequence: Synthetic oligonucleotide
gcaaugucaaccugggaaa

SEQ ID NO: 1588541 - RNA, 19 nt, Artificial Sequence
  Description of Artificial Sequence: Synthetic oligonucleotide
cuuacgggccaccucuuca

SEQ ID NO: 1588542 - RNA, 19 nt, Artificial Sequence
  Description of Artificial Sequence: Synthetic oligonucleotide
acaacgagagggaaaugaa

SEQ ID NO: 1588543 - RNA, 19 nt, Artificial Sequence
  Description of Artificial Sequence: Synthetic oligonucleotide
cuacccuggcuaagcagac

SEQ ID NO: 1588544 - RNA, 19 nt, Artificial Sequence
  Description of Artificial Sequence: Synthetic oligonucleotide
auagucuugucuggaagua

SEQ ID NO: 1588545 - RNA, 19 nt, Artificial Sequence
  Description of Artificial Sequence: Synthetic oligonucleotide
uggcacucuggcuggaaau

SEQ ID NO: 1588546 - RNA, 19 nt, Artificial Sequence
  Description of Artificial Sequence: Synthetic oligonucleotide
caacgagagggaaaugaaa

SEQ ID NO: 1588547 - RNA, 19 nt, Artificial Sequence
  Description of Artificial Sequence: Synthetic oligonucleotide
aaaaugcaucgaaggaguu

SEQ ID NO: 1588548 - RNA, 19 nt, Artificial Sequence
  Description of Artificial Sequence: Synthetic oligonucleotide
ccacauugaaugcucuccc

SEQ ID NO: 1588549 - RNA, 19 nt, Artificial Sequence
  Description of Artificial Sequence: Synthetic oligonucleotide
uuccagacccuugacuuua

SEQ ID NO: 1588550 - RNA, 19 nt, Artificial Sequence
  Description of Artificial Sequence: Synthetic oligonucleotide
uuuugggcucggcuuucaa

SEQ ID NO: 1588551 - RNA, 19 nt, Artificial Sequence
  Description of Artificial Sequence: Synthetic oligonucleotide
gaauguggccgcagcuaag

SEQ ID NO: 1588552 - RNA, 19 nt, Artificial Sequence
  Description of Artificial Sequence: Synthetic oligonucleotide
ccuagcugguucuuugcag

SEQ ID NO: 1588553 - RNA, 19 nt, Artificial Sequence
  Description of Artificial Sequence: Synthetic oligonucleotide
uucggugacagugguuaaa

SEQ ID NO: 1588554 - RNA, 19 nt, Artificial Sequence
  Description of Artificial Sequence: Synthetic oligonucleotide
uguuucggugacagugguu

SEQ ID NO: 1588555 - RNA, 19 nt, Artificial Sequence
  Description of Artificial Sequence: Synthetic oligonucleotide
ugcacguuccaggucacuu

SEQ ID NO: 1588556 - RNA, 19 nt, Artificial Sequence
  Description of Artificial Sequence: Synthetic oligonucleotide
uuucggugacagugguuaa

SEQ ID NO: 1588557 - RNA, 19 nt, Artificial Sequence
  Description of Artificial Sequence: Synthetic oligonucleotide
uagcugguucuuugcagau

SEQ ID NO: 1588558 - RNA, 19 nt, Artificial Sequence
  Description of Artificial Sequence: Synthetic oligonucleotide
gaccaguguggcuuccaga

SEQ ID NO: 1588559 - RNA, 19 nt, Artificial Sequence
  Description of Artificial Sequence: Synthetic oligonucleotide
gacgcuccugagcacgauc

SEQ ID NO: 1588560 - RNA, 19 nt, Artificial Sequence
  Description of Artificial Sequence: Synthetic oligonucleotide
ggccagacgcuccugagca

SEQ ID NO: 1588561 - RNA, 19 nt, Artificial Sequence
  Description of Artificial Sequence: Synthetic oligonucleotide
acugcaugccuaaaugcua

SEQ ID NO: 1588562 - RNA, 19 nt, Artificial Sequence
  Description of Artificial Sequence: Synthetic oligonucleotide
gcuaugaaguguggcaaug

SEQ ID NO: 1588563 - RNA, 19 nt, Artificial Sequence
  Description of Artificial Sequence: Synthetic oligonucleotide
ugcucucccugcugagaug

SEQ ID NO: 1588564 - RNA, 19 nt, Artificial Sequence
  Description of Artificial Sequence: Synthetic oligonucleotide
cagcaaugugcuuggccuc

SEQ ID NO: 1588565 - RNA, 19 nt, Artificial Sequence
  Description of Artificial Sequence: Synthetic oligonucleotide
cccuugacuuuaaugaaca

SEQ ID NO: 1588566 - RNA, 19 nt, Artificial Sequence
  Description of Artificial Sequence: Synthetic oligonucleotide
acauguuguuuagcuccag

SEQ ID NO: 1588567 - RNA, 19 nt, Artificial Sequence
  Description of Artificial Sequence: Synthetic oligonucleotide
gggaaauggcacguuuaag

SEQ ID NO: 1588568 - RNA, 19 nt, Artificial Sequence
  Description of Artificial Sequence: Synthetic oligonucleotide
uggcacguuuaaguaagua

SEQ ID NO: 1588569 - RNA, 19 nt, Artificial Sequence
  Description of Artificial Sequence: Synthetic oligonucleotide
augaaagaauguggccgca

SEQ ID NO: 1588570 - RNA, 19 nt, Artificial Sequence
  Description of Artificial Sequence: Synthetic oligonucleotide
ccuacccuggcuaagcaga

SEQ ID NO: 1588571 - RNA, 19 nt, Artificial Sequence
  Description of Artificial Sequence: Synthetic oligonucleotide
cuaagcagacugcaugccu

SEQ ID NO: 1588572 - RNA, 19 nt, Artificial Sequence
  Description of Artificial Sequence: Synthetic oligonucleotide
cuucuuggugacuccaccu

SEQ ID NO: 1588573 - RNA, 19 nt, Artificial Sequence
  Description of Artificial Sequence: Synthetic oligonucleotide
cguuuaaguaaguacccca

SEQ ID NO: 1588574 - RNA, 19 nt, Artificial Sequence
  Description of Artificial Sequence: Synthetic oligonucleotide
gaacuggaaagaggggcaa

SEQ ID NO: 1588575 - RNA, 19 nt, Artificial Sequence
  Description of Artificial Sequence: Synthetic oligonucleotide
guguggcaaugucaaccug

SEQ ID NO: 1588576 - RNA, 19 nt, Artificial Sequence
  Description of Artificial Sequence: Synthetic oligonucleotide
uggcuuccagacccuugac

SEQ ID NO: 1588577 - RNA, 19 nt, Artificial Sequence
  Description of Artificial Sequence: Synthetic oligonucleotide
aagugucaguugggaagga

SEQ ID NO: 1588578 - RNA, 19 nt, Artificial Sequence
  Description of Artificial Sequence: Synthetic oligonucleotide
auguggccgcagcuaagga

SEQ ID NO: 1588579 - RNA, 19 nt, Artificial Sequence
  Description of Artificial Sequence: Synthetic oligonucleotide
acccauagucuugucugga

SEQ ID NO: 1588580 - RNA, 19 nt, Artificial Sequence
  Description of Artificial Sequence: Synthetic oligonucleotide
uccagacccuugacuuuaa

SEQ ID NO: 1588581 - RNA, 19 nt, Artificial Sequence
  Description of Artificial Sequence: Synthetic oligonucleotide
uuacccugacauggagaac

SEQ ID NO: 1588582 - RNA, 19 nt, Artificial Sequence
  Description of Artificial Sequence: Synthetic oligonucleotide
cugggaagcagguguuuaa

SEQ ID NO: 1588583 - RNA, 19 nt, Artificial Sequence
  Description of Artificial Sequence: Synthetic oligonucleotide
gugcauacuaagguuuucu

SEQ ID NO: 1588584 - RNA, 19 nt, Artificial Sequence
  Description of Artificial Sequence: Synthetic oligonucleotide
cuggugcauacuaagguuu

SEQ ID NO: 1588585 - RNA, 19 nt, Artificial Sequence
  Description of Artificial Sequence: Synthetic oligonucleotide
gcuaagcagacugcaugcc

SEQ ID NO: 1588586 - RNA, 19 nt, Artificial Sequence
  Description of Artificial Sequence: Synthetic oligonucleotide
ccaacuugcaccugcaccu

SEQ ID NO: 1588587 - RNA, 19 nt, Artificial Sequence
  Description of Artificial Sequence: Synthetic oligonucleotide
uggccgcagcuaaggaggu

SEQ ID NO: 1588588 - RNA, 19 nt, Artificial Sequence
  Description of Artificial Sequence: Synthetic oligonucleotide
cagcuuacgggccaccucu

SEQ ID NO: 1588589 - RNA, 19 nt, Artificial Sequence
  Description of Artificial Sequence: Synthetic oligonucleotide
cuucugcgaguacuucuca

SEQ ID NO: 1588590 - RNA, 19 nt, Artificial Sequence
  Description of Artificial Sequence: Synthetic oligonucleotide
cauguuguuuagcuccagu

SEQ ID NO: 1588591 - RNA, 19 nt, Artificial Sequence
  Description of Artificial Sequence: Synthetic oligonucleotide
ggaugcgucuguucagaga

SEQ ID NO: 1588592 - RNA, 19 nt, Artificial Sequence
  Description of Artificial Sequence: Synthetic oligonucleotide
cacaggcguaagaaaccca

SEQ ID NO: 1588593 - RNA, 19 nt, Artificial Sequence
  Description of Artificial Sequence: Synthetic oligonucleotide
cuggaugcgucuguucaga

SEQ ID NO: 1588594 - RNA, 19 nt, Artificial Sequence
  Description of Artificial Sequence: Synthetic oligonucleotide
gggaagcagguguuuaaaa

SEQ ID NO: 1588595 - RNA, 19 nt, Artificial Sequence
  Description of Artificial Sequence: Synthetic oligonucleotide
cagugguuaaaaguauaua

SEQ ID NO: 1588596 - RNA, 19 nt, Artificial Sequence
  Description of Artificial Sequence: Synthetic oligonucleotide
cugcaagugucaguuggga

SEQ ID NO: 1588597 - RNA, 19 nt, Artificial Sequence
  Description of Artificial Sequence: Synthetic oligonucleotide
uacgggccaccucuucaua

SEQ ID NO: 1588598 - RNA, 19 nt, Artificial Sequence
  Description of Artificial Sequence: Synthetic oligonucleotide
ggcaugagccacuuucucu

SEQ ID NO: 1588599 - RNA, 19 nt, Artificial Sequence
  Description of Artificial Sequence: Synthetic oligonucleotide
accagcuuacgggccaccu

SEQ ID NO: 1588600 - RNA, 19 nt, Artificial Sequence
  Description of Artificial Sequence: Synthetic oligonucleotide
cugcaugccuaaaugcuau

SEQ ID NO: 1588601 - RNA, 19 nt, Artificial Sequence
  Description of Artificial Sequence: Synthetic oligonucleotide
gcaugccuaaaugcuauga

SEQ ID NO: 1588602 - RNA, 19 nt, Artificial Sequence
  Description of Artificial Sequence: Synthetic oligonucleotide
caucgaugcuuuucuccaa

SEQ ID NO: 1588603 - RNA, 19 nt, Artificial Sequence
  Description of Artificial Sequence: Synthetic oligonucleotide
ggacucuuaaaagaccagu

SEQ ID NO: 1588604 - RNA, 19 nt, Artificial Sequence
  Description of Artificial Sequence: Synthetic oligonucleotide
caguaaggucugguccagc

SEQ ID NO: 1588605 - RNA, 19 nt, Artificial Sequence
  Description of Artificial Sequence: Synthetic oligonucleotide
uacccuggcuaagcagacu

SEQ ID NO: 1588606 - RNA, 19 nt, Artificial Sequence
  Description of Artificial Sequence: Synthetic oligonucleotide
gucuugucuggaaguaaaa

SEQ ID NO: 1588607 - RNA, 19 nt, Artificial Sequence
  Description of Artificial Sequence: Synthetic oligonucleotide
ucggcacauuugccuucug

SEQ ID NO: 1588608 - RNA, 19 nt, Artificial Sequence
  Description of Artificial Sequence: Synthetic oligonucleotide
cuaugaaguguggcaaugu

SEQ ID NO: 1588609 - RNA, 19 nt, Artificial Sequence
  Description of Artificial Sequence: Synthetic oligonucleotide
caaguuguucgucaccguu

SEQ ID NO: 1588610 - RNA, 19 nt, Artificial Sequence
  Description of Artificial Sequence: Synthetic oligonucleotide
cagcuggaugcgucuguuc

SEQ ID NO: 1588611 - RNA, 19 nt, Artificial Sequence
  Description of Artificial Sequence: Synthetic oligonucleotide
ggcguaagaaacccauagu

SEQ ID NO: 1588612 - RNA, 19 nt, Artificial Sequence
  Description of Artificial Sequence: Synthetic oligonucleotide
guaaggucugguccagcau

SEQ ID NO: 1588613 - RNA, 19 nt, Artificial Sequence
  Description of Artificial Sequence: Synthetic oligonucleotide
cuucaagcucggcacauuu

SEQ ID NO: 1588614 - RNA, 19 nt, Artificial Sequence
  Description of Artificial Sequence: Synthetic oligonucleotide
acccugacauggagaacug

SEQ ID NO: 1588615 - RNA, 19 nt, Artificial Sequence
  Description of Artificial Sequence: Synthetic oligonucleotide
ggcacucuggcuggaaauc

SEQ ID NO: 1588616 - RNA, 19 nt, Artificial Sequence
  Description of Artificial Sequence: Synthetic oligonucleotide
ggugcauacuaagguuuuc

SEQ ID NO: 1588617 - RNA, 19 nt, Artificial Sequence
  Description of Artificial Sequence: Synthetic oligonucleotide
gcccuagcugguucuuugc

SEQ ID NO: 1588618 - RNA, 19 nt, Artificial Sequence
  Description of Artificial Sequence: Synthetic oligonucleotide
gugacuccaccuuggcacu

SEQ ID NO: 1588619 - RNA, 19 nt, Artificial Sequence
  Description of Artificial Sequence: Synthetic oligonucleotide
ccuaaaugcuaugaagugu

SEQ ID NO: 1588620 - RNA, 19 nt, Artificial Sequence
  Description of Artificial Sequence: Synthetic oligonucleotide
guuccaggucacuuucaau

SEQ ID NO: 1588621 - RNA, 19 nt, Artificial Sequence
  Description of Artificial Sequence: Synthetic oligonucleotide
caggcguaagaaacccaua

SEQ ID NO: 1588622 - RNA, 19 nt, Artificial Sequence
  Description of Artificial Sequence: Synthetic oligonucleotide
caacaucagucuucuuggu

SEQ ID NO: 1588623 - RNA, 19 nt, Artificial Sequence
  Description of Artificial Sequence: Synthetic oligonucleotide
ggguuccuuuguuuaaagu

SEQ ID NO: 1588624 - RNA, 19 nt, Artificial Sequence
  Description of Artificial Sequence: Synthetic oligonucleotide
auggcacguuuaaguaagu

SEQ ID NO: 1588625 - RNA, 19 nt, Artificial Sequence
  Description of Artificial Sequence: Synthetic oligonucleotide
guucgucaccguuuucaau

SEQ ID NO: 1588626 - RNA, 19 nt, Artificial Sequence
  Description of Artificial Sequence: Synthetic oligonucleotide
augcgucuguucagagaug

SEQ ID NO: 1588627 - RNA, 19 nt, Artificial Sequence
  Description of Artificial Sequence: Synthetic oligonucleotide
guaccccaacuugggcuug

SEQ ID NO: 1588628 - RNA, 19 nt, Artificial Sequence
  Description of Artificial Sequence: Synthetic oligonucleotide
acguuccaggucacuuuca

SEQ ID NO: 1588629 - RNA, 19 nt, Artificial Sequence
  Description of Artificial Sequence: Synthetic oligonucleotide
ccaguaaggucugguccag

SEQ ID NO: 1588630 - RNA, 19 nt, Artificial Sequence
  Description of Artificial Sequence: Synthetic oligonucleotide
gcagacugcaugccuaaau

SEQ ID NO: 1588631 - RNA, 19 nt, Artificial Sequence
  Description of Artificial Sequence: Synthetic oligonucleotide
gaggggcaauccacauuga

SEQ ID NO: 1588632 - RNA, 19 nt, Artificial Sequence
  Description of Artificial Sequence: Synthetic oligonucleotide
ggggcaauccacauugaau

SEQ ID NO: 1588633 - RNA, 19 nt, Artificial Sequence
  Description of Artificial Sequence: Synthetic oligonucleotide
cuguucagagaugcuacau

SEQ ID NO: 1588634 - RNA, 19 nt, Artificial Sequence
  Description of Artificial Sequence: Synthetic oligonucleotide
agcagacugcaugccuaaa

SEQ ID NO: 1588635 - RNA, 19 nt, Artificial Sequence
  Description of Artificial Sequence: Synthetic oligonucleotide
cccugacauggagaacugg

SEQ ID NO: 1588636 - RNA, 19 nt, Artificial Sequence
  Description of Artificial Sequence: Synthetic oligonucleotide
gcuuacgggccaccucuuc

SEQ ID NO: 1588637 - RNA, 19 nt, Artificial Sequence
  Description of Artificial Sequence: Synthetic oligonucleotide
gcucggcacauuugccuuc

SEQ ID NO: 1588638 - RNA, 19 nt, Artificial Sequence
  Description of Artificial Sequence: Synthetic oligonucleotide
ccagcuuacgggccaccuc

SEQ ID NO: 1588639 - RNA, 19 nt, Artificial Sequence
  Description of Artificial Sequence: Synthetic oligonucleotide
gacuccaccuuggcacucu

SEQ ID NO: 1588640 - RNA, 19 nt, Artificial Sequence
  Description of Artificial Sequence: Synthetic oligonucleotide
caaugucaaccugggaaau

SEQ ID NO: 1588641 - RNA, 19 nt, Artificial Sequence
  Description of Artificial Sequence: Synthetic oligonucleotide
gggcugcaagugucaguug

SEQ ID NO: 1588642 - RNA, 19 nt, Artificial Sequence
  Description of Artificial Sequence: Synthetic oligonucleotide
ggcuuccuacccuggcuaa

SEQ ID NO: 1588643 - RNA, 19 nt, Artificial Sequence
  Description of Artificial Sequence: Synthetic oligonucleotide
ccaggguuccuuuguuuaa

SEQ ID NO: 1588644 - RNA, 19 nt, Artificial Sequence
  Description of Artificial Sequence: Synthetic oligonucleotide
cccauagucuugucuggaa

SEQ ID NO: 1588645 - RNA, 19 nt, Artificial Sequence
  Description of Artificial Sequence: Synthetic oligonucleotide
cccuagcugguucuuugca

SEQ ID NO: 1588646 - RNA, 19 nt, Artificial Sequence
  Description of Artificial Sequence: Synthetic oligonucleotide
cagcuggaucuccugaauu

SEQ ID NO: 1588647 - RNA, 19 nt, Artificial Sequence
  Description of Artificial Sequence: Synthetic oligonucleotide
cagauguuucggugacagu

SEQ ID NO: 1588648 - RNA, 19 nt, Artificial Sequence
  Description of Artificial Sequence: Synthetic oligonucleotide
agacgcuccugagcacgau

SEQ ID NO: 1588649 - RNA, 19 nt, Artificial Sequence
  Description of Artificial Sequence: Synthetic oligonucleotide
cuaagucaucgaugcuuuu

SEQ ID NO: 1588650 - RNA, 19 nt, Artificial Sequence
  Description of Artificial Sequence: Synthetic oligonucleotide
ggcucggcuuucaaugacu

SEQ ID NO: 1588651 - RNA, 19 nt, Artificial Sequence
  Description of Artificial Sequence: Synthetic oligonucleotide
cgucuguucagagaugcua

SEQ ID NO: 1588652 - RNA, 19 nt, Artificial Sequence
  Description of Artificial Sequence: Synthetic oligonucleotide
agcuuacgggccaccucuu

SEQ ID NO: 1588653 - RNA, 19 nt, Artificial Sequence
  Description of Artificial Sequence: Synthetic oligonucleotide
cucggcuuucaaugacuuu

SEQ ID NO: 1588654 - RNA, 19 nt, Artificial Sequence
  Description of Artificial Sequence: Synthetic oligonucleotide
cuugcaccugcaccugguu

SEQ ID NO: 1588655 - RNA, 19 nt, Artificial Sequence
  Description of Artificial Sequence: Synthetic oligonucleotide
ccaacuugggcuugccuuu

SEQ ID NO: 1588656 - RNA, 19 nt, Artificial Sequence
  Description of Artificial Sequence: Synthetic oligonucleotide
ccucugcacguuccagguc

SEQ ID NO: 1588657 - RNA, 19 nt, Artificial Sequence
  Description of Artificial Sequence: Synthetic oligonucleotide
gcacguuccaggucacuuu

SEQ ID NO: 1588658 - RNA, 19 nt, Artificial Sequence
  Description of Artificial Sequence: Synthetic oligonucleotide
uacuugcggucagcaucuu

SEQ ID NO: 1588659 - RNA, 19 nt, Artificial Sequence
  Description of Artificial Sequence: Synthetic oligonucleotide
cccgcuccucugcacguuc

SEQ ID NO: 1588660 - RNA, 19 nt, Artificial Sequence
  Description of Artificial Sequence: Synthetic oligonucleotide
gcucggcuuucaaugacuu

SEQ ID NO: 1588661 - RNA, 19 nt, Artificial Sequence
  Description of Artificial Sequence: Synthetic oligonucleotide
gggaaggaacaggacucuu

SEQ ID NO: 1588662 - RNA, 19 nt, Artificial Sequence
  Description of Artificial Sequence: Synthetic oligonucleotide
gcgucuguucagagaugcu

SEQ ID NO: 1588663 - RNA, 19 nt, Artificial Sequence
  Description of Artificial Sequence: Synthetic oligonucleotide
cccugcccuagcugguucu

SEQ ID NO: 1588664 - RNA, 19 nt, Artificial Sequence
  Description of Artificial Sequence: Synthetic oligonucleotide
cugcccuagcugguucuuu

SEQ ID NO: 1588665 - RNA, 19 nt, Artificial Sequence
  Description of Artificial Sequence: Synthetic oligonucleotide
ccccaacuugggcuugccu

SEQ ID NO: 1588666 - RNA, 19 nt, Artificial Sequence
  Description of Artificial Sequence: Synthetic oligonucleotide
ccccaggguuccuuuguuu

SEQ ID NO: 1588667 - RNA, 19 nt, Artificial Sequence
  Description of Artificial Sequence: Synthetic oligonucleotide
ggccgcagcuaaggagguu

SEQ ID NO: 1588668 - RNA, 19 nt, Artificial Sequence
  Description of Artificial Sequence: Synthetic oligonucleotide
aaaguagagacauugaggc

SEQ ID NO: 1588669 - RNA, 19 nt, Artificial Sequence
  Description of Artificial Sequence: Synthetic oligonucleotide
aauuuauugacuccagugc

SEQ ID NO: 1588670 - RNA, 19 nt, Artificial Sequence
  Description of Artificial Sequence: Synthetic oligonucleotide
auuuauugacuccagugcc

SEQ ID NO: 1588671 - RNA, 19 nt, Artificial Sequence
  Description of Artificial Sequence: Synthetic oligonucleotide
uaagcuaaggcacaauucc

SEQ ID NO: 1588672 - RNA, 19 nt, Artificial Sequence
  Description of Artificial Sequence: Synthetic oligonucleotide
uuccuaucaaauaaaagug

SEQ ID NO: 1588673 - RNA, 19 nt, Artificial Sequence
  Description of Artificial Sequence: Synthetic oligonucleotide
uaauuuauugacuccagug

SEQ ID NO: 1588674 - RNA, 19 nt, Artificial Sequence
  Description of Artificial Sequence: Synthetic oligonucleotide
uaucaaaguaggcuuaucc

SEQ ID NO: 1588675 - RNA, 19 nt, Artificial Sequence
  Description of Artificial Sequence: Synthetic oligonucleotide
uccuaucaaauaaaagugg

SEQ ID NO: 1588676 - RNA, 19 nt, Artificial Sequence
  Description of Artificial Sequence: Synthetic oligonucleotide
uaucaaauaaaaguggcug

SEQ ID NO: 1588677 - RNA, 19 nt, Artificial Sequence
  Description of Artificial Sequence: Synthetic oligonucleotide
gaaacugucaaagaugagc

SEQ ID NO: 1588678 - RNA, 19 nt, Artificial Sequence
  Description of Artificial Sequence: Synthetic oligonucleotide
gaagacuuaagcuaaggca

SEQ ID NO: 1588679 - RNA, 19 nt, Artificial Sequence
  Description of Artificial Sequence: Synthetic oligonucleotide
cugaccauaauuuauugac

SEQ ID NO: 1588680 - RNA, 19 nt, Artificial Sequence
  Description of Artificial Sequence: Synthetic oligonucleotide
aaauguaaacucgccgucc

SEQ ID NO: 1588681 - RNA, 19 nt, Artificial Sequence
  Description of Artificial Sequence: Synthetic oligonucleotide
aaucagggcaucugagagc

SEQ ID NO: 1588682 - RNA, 19 nt, Artificial Sequence
  Description of Artificial Sequence: Synthetic oligonucleotide
agaaauguaaacucgccgu

SEQ ID NO: 1588683 - RNA, 19 nt, Artificial Sequence
  Description of Artificial Sequence: Synthetic oligonucleotide
ucuauggauuccuugaugu

SEQ ID NO: 1588684 - RNA, 19 nt, Artificial Sequence
  Description of Artificial Sequence: Synthetic oligonucleotide
gaagguuccgaucacgugc

SEQ ID NO: 1588685 - RNA, 19 nt, Artificial Sequence
  Description of Artificial Sequence: Synthetic oligonucleotide
auaaaaguggcuguccugg

SEQ ID NO: 1588686 - RNA, 19 nt, Artificial Sequence
  Description of Artificial Sequence: Synthetic oligonucleotide
ucuuccuaucaaauaaaag

SEQ ID NO: 1588687 - RNA, 19 nt, Artificial Sequence
  Description of Artificial Sequence: Synthetic oligonucleotide
aauaaaaguggcuguccug

SEQ ID NO: 1588688 - RNA, 19 nt, Artificial Sequence
  Description of Artificial Sequence: Synthetic oligonucleotide
aguuguacugcuugacccc

SEQ ID NO: 1588689 - RNA, 19 nt, Artificial Sequence
  Description of Artificial Sequence: Synthetic oligonucleotide
aaagccuguaguccccggc

SEQ ID NO: 1588690 - RNA, 19 nt, Artificial Sequence
  Description of Artificial Sequence: Synthetic oligonucleotide
uccaaacuagcguuggccg

SEQ ID NO: 1588691 - RNA, 19 nt, Artificial Sequence
  Description of Artificial Sequence: Synthetic oligonucleotide
uuucgagacucacugacca

SEQ ID NO: 1588692 - RNA, 19 nt, Artificial Sequence
  Description of Artificial Sequence: Synthetic oligonucleotide
aacagcacgcccugagggc

SEQ ID NO: 1588693 - RNA, 19 nt, Artificial Sequence
  Description of Artificial Sequence: Synthetic oligonucleotide
aaacugucaaagaugagcu

SEQ ID NO: 1588694 - RNA, 19 nt, Artificial Sequence
  Description of Artificial Sequence: Synthetic oligonucleotide
cuuccuaucaaauaaaagu

SEQ ID NO: 1588695 - RNA, 19 nt, Artificial Sequence
  Description of Artificial Sequence: Synthetic oligonucleotide
uuaagcuaaggcacaauuc

SEQ ID NO: 1588696 - RNA, 19 nt, Artificial Sequence
  Description of Artificial Sequence: Synthetic oligonucleotide
gaccauaauuuauugacuc

SEQ ID NO: 1588697 - RNA, 19 nt, Artificial Sequence
  Description of Artificial Sequence: Synthetic oligonucleotide
uguggcuggggcuacgugg

SEQ ID NO: 1588698 - RNA, 19 nt, Artificial Sequence
  Description of Artificial Sequence: Synthetic oligonucleotide
uugucauggaagaagcgcu

SEQ ID NO: 1588699 - RNA, 19 nt, Artificial Sequence
  Description of Artificial Sequence: Synthetic oligonucleotide
uacucggucuccaaacuag

SEQ ID NO: 1588700 - RNA, 19 nt, Artificial Sequence
  Description of Artificial Sequence: Synthetic oligonucleotide
uuuauugacuccagugccu

SEQ ID NO: 1588701 - RNA, 19 nt, Artificial Sequence
  Description of Artificial Sequence: Synthetic oligonucleotide
caguuguacugcuugaccc

SEQ ID NO: 1588702 - RNA, 19 nt, Artificial Sequence
  Description of Artificial Sequence: Synthetic oligonucleotide
gagugugcagaccugcagg

SEQ ID NO: 1588703 - RNA, 19 nt, Artificial Sequence
  Description of Artificial Sequence: Synthetic oligonucleotide
agaugugucuccuucccag

SEQ ID NO: 1588704 - RNA, 19 nt, Artificial Sequence
  Description of Artificial Sequence: Synthetic oligonucleotide
cuugucauggaagaagcgc

SEQ ID NO: 1588705 - RNA, 19 nt, Artificial Sequence
  Description of Artificial Sequence: Synthetic oligonucleotide
gaaacaggcacuguugcug

SEQ ID NO: 1588706 - RNA, 19 nt, Artificial Sequence
  Description of Artificial Sequence: Synthetic oligonucleotide
uauagccccacacuacagc

SEQ ID NO: 1588707 - RNA, 19 nt, Artificial Sequence
  Description of Artificial Sequence: Synthetic oligonucleotide
ucccuuuguuccuugaggc

SEQ ID NO: 1588708 - RNA, 19 nt, Artificial Sequence
  Description of Artificial Sequence: Synthetic oligonucleotide
ugaccauaauuuauugacu

SEQ ID NO: 1588709 - RNA, 19 nt, Artificial Sequence
  Description of Artificial Sequence: Synthetic oligonucleotide
ugagcucaaagaacacuag

SEQ ID NO: 1588710 - RNA, 19 nt, Artificial Sequence
  Description of Artificial Sequence: Synthetic oligonucleotide
ugcaggacggcuaccaaca

SEQ ID NO: 1588711 - RNA, 19 nt, Artificial Sequence
  Description of Artificial Sequence: Synthetic oligonucleotide
gaaguugacccgcuccagg

SEQ ID NO: 1588712 - RNA, 19 nt, Artificial Sequence
  Description of Artificial Sequence: Synthetic oligonucleotide
ucaccaggcacuauuaauu

SEQ ID NO: 1588713 - RNA, 19 nt, Artificial Sequence
  Description of Artificial Sequence: Synthetic oligonucleotide
aaucuacuugcacucccug

SEQ ID NO: 1588714 - RNA, 19 nt, Artificial Sequence
  Description of Artificial Sequence: Synthetic oligonucleotide
gaaauguaaacucgccguc

SEQ ID NO: 1588715 - RNA, 19 nt, Artificial Sequence
  Description of Artificial Sequence: Synthetic oligonucleotide
agacacauggggccacugc

SEQ ID NO: 1588716 - RNA, 19 nt, Artificial Sequence
  Description of Artificial Sequence: Synthetic oligonucleotide
aaacaggcacuguugcuga

SEQ ID NO: 1588717 - RNA, 19 nt, Artificial Sequence
  Description of Artificial Sequence: Synthetic oligonucleotide
aaguugacccgcuccaggu

SEQ ID NO: 1588718 - RNA, 19 nt, Artificial Sequence
  Description of Artificial Sequence: Synthetic oligonucleotide
caaagggucugcaaucuac

SEQ ID NO: 1588719 - RNA, 19 nt, Artificial Sequence
  Description of Artificial Sequence: Synthetic oligonucleotide
uugaagguuccgaucacgu

SEQ ID NO: 1588720 - RNA, 19 nt, Artificial Sequence
  Description of Artificial Sequence: Synthetic oligonucleotide
caucugagagccauauagc

SEQ ID NO: 1588721 - RNA, 19 nt, Artificial Sequence
  Description of Artificial Sequence: Synthetic oligonucleotide
ugagugugcagaccugcag

SEQ ID NO: 1588722 - RNA, 19 nt, Artificial Sequence
  Description of Artificial Sequence: Synthetic oligonucleotide
cugaccagaaguugacccg

SEQ ID NO: 1588723 - RNA, 19 nt, Artificial Sequence
  Description of Artificial Sequence: Synthetic oligonucleotide
uucagcccaaccuucuacc

SEQ ID NO: 1588724 - RNA, 19 nt, Artificial Sequence
  Description of Artificial Sequence: Synthetic oligonucleotide
uacagggcgcuugucaugg

SEQ ID NO: 1588725 - RNA, 19 nt, Artificial Sequence
  Description of Artificial Sequence: Synthetic oligonucleotide
cuugaccccauccugauga

SEQ ID NO: 1588726 - RNA, 19 nt, Artificial Sequence
  Description of Artificial Sequence: Synthetic oligonucleotide
aaguagagacauugaggcu

SEQ ID NO: 1588727 - RNA, 19 nt, Artificial Sequence
  Description of Artificial Sequence: Synthetic oligonucleotide
uggaagacuuaagcuaagg

SEQ ID NO: 1588728 - RNA, 19 nt, Artificial Sequence
  Description of Artificial Sequence: Synthetic oligonucleotide
uccucauagucucuaugga

SEQ ID NO: 1588729 - RNA, 19 nt, Artificial Sequence
  Description of Artificial Sequence: Synthetic oligonucleotide
uguaaacucgccguccuga

SEQ ID NO: 1588730 - RNA, 19 nt, Artificial Sequence
  Description of Artificial Sequence: Synthetic oligonucleotide
ugcucacccaggaaaggag

SEQ ID NO: 1588731 - RNA, 19 nt, Artificial Sequence
  Description of Artificial Sequence: Synthetic oligonucleotide
gcuacguggguacagggcg

SEQ ID NO: 1588732 - RNA, 19 nt, Artificial Sequence
  Description of Artificial Sequence: Synthetic oligonucleotide
agcgcuugagugugcagac

SEQ ID NO: 1588733 - RNA, 19 nt, Artificial Sequence
  Description of Artificial Sequence: Synthetic oligonucleotide
ucggucuccaaacuagcgu

SEQ ID NO: 1588734 - RNA, 19 nt, Artificial Sequence
  Description of Artificial Sequence: Synthetic oligonucleotide
gauggaagacuuaagcuaa

SEQ ID NO: 1588735 - RNA, 19 nt, Artificial Sequence
  Description of Artificial Sequence: Synthetic oligonucleotide
ugggauguguccagcucgg

SEQ ID NO: 1588736 - RNA, 19 nt, Artificial Sequence
  Description of Artificial Sequence: Synthetic oligonucleotide
gaagacccaacugugcagc

SEQ ID NO: 1588737 - RNA, 19 nt, Artificial Sequence
  Description of Artificial Sequence: Synthetic oligonucleotide
gggucugcaaucuacuugc

SEQ ID NO: 1588738 - RNA, 19 nt, Artificial Sequence
  Description of Artificial Sequence: Synthetic oligonucleotide
ggaagacuuaagcuaaggc

SEQ ID NO: 1588739 - RNA, 19 nt, Artificial Sequence
  Description of Artificial Sequence: Synthetic oligonucleotide
cuuucgagacucacugacc

SEQ ID NO: 1588740 - RNA, 19 nt, Artificial Sequence
  Description of Artificial Sequence: Synthetic oligonucleotide
ucauggaagaagcgcuuga

SEQ ID NO: 1588741 - RNA, 19 nt, Artificial Sequence
  Description of Artificial Sequence: Synthetic oligonucleotide
aguaggcuccaccgugugc

SEQ ID NO: 1588742 - RNA, 19 nt, Artificial Sequence
  Description of Artificial Sequence: Synthetic oligonucleotide
ucgccguccugaaugggcg

SEQ ID NO: 1588743 - RNA, 19 nt, Artificial Sequence
  Description of Artificial Sequence: Synthetic oligonucleotide
aaggaguugucaaagcaaa

SEQ ID NO: 1588744 - RNA, 19 nt, Artificial Sequence
  Description of Artificial Sequence: Synthetic oligonucleotide
cuuuguuccuugaggcuag

SEQ ID NO: 1588745 - RNA, 19 nt, Artificial Sequence
  Description of Artificial Sequence: Synthetic oligonucleotide
acuagcguuggccggcgcg

SEQ ID NO: 1588746 - RNA, 19 nt, Artificial Sequence
  Description of Artificial Sequence: Synthetic oligonucleotide
aguaggcuuauccccagga

SEQ ID NO: 1588747 - RNA, 19 nt, Artificial Sequence
  Description of Artificial Sequence: Synthetic oligonucleotide
cuuauccccaggagcaaag

SEQ ID NO: 1588748 - RNA, 19 nt, Artificial Sequence
  Description of Artificial Sequence: Synthetic oligonucleotide
gugccuaggacagaugucc

SEQ ID NO: 1588749 - RNA, 19 nt, Artificial Sequence
  Description of Artificial Sequence: Synthetic oligonucleotide
ugaagguuccgaucacgug

SEQ ID NO: 1588750 - RNA, 19 nt, Artificial Sequence
  Description of Artificial Sequence: Synthetic oligonucleotide
cuugaagguuccgaucacg

SEQ ID NO: 1588751 - RNA, 19 nt, Artificial Sequence
  Description of Artificial Sequence: Synthetic oligonucleotide
ugagcuucgugggagugcc

SEQ ID NO: 1588752 - RNA, 19 nt, Artificial Sequence
  Description of Artificial Sequence: Synthetic oligonucleotide
cucggucuccaaacuagcg

SEQ ID NO: 1588753 - RNA, 19 nt, Artificial Sequence
  Description of Artificial Sequence: Synthetic oligonucleotide
cuccaaacuagcguuggcc

SEQ ID NO: 1588754 - RNA, 19 nt, Artificial Sequence
  Description of Artificial Sequence: Synthetic oligonucleotide
cuugaggcuaggucugccc

SEQ ID NO: 1588755 - RNA, 19 nt, Artificial Sequence
  Description of Artificial Sequence: Synthetic oligonucleotide
uaaaaguggcuguccuggc

SEQ ID NO: 1588756 - RNA, 19 nt, Artificial Sequence
  Description of Artificial Sequence: Synthetic oligonucleotide
aggacggcuaccaacagca

SEQ ID NO: 1588757 - RNA, 19 nt, Artificial Sequence
  Description of Artificial Sequence: Synthetic oligonucleotide
agugugcagaccugcagga

SEQ ID NO: 1588758 - RNA, 19 nt, Artificial Sequence
  Description of Artificial Sequence: Synthetic oligonucleotide
agccauauagccccacacu

SEQ ID NO: 1588759 - RNA, 19 nt, Artificial Sequence
  Description of Artificial Sequence: Synthetic oligonucleotide
acccuaucaaaguaggcuu

SEQ ID NO: 1588760 - RNA, 19 nt, Artificial Sequence
  Description of Artificial Sequence: Synthetic oligonucleotide
cucaguaggcuccaccgug

SEQ ID NO: 1588761 - RNA, 19 nt, Artificial Sequence
  Description of Artificial Sequence: Synthetic oligonucleotide
ugccucaaaggcucguagc

SEQ ID NO: 1588762 - RNA, 19 nt, Artificial Sequence
  Description of Artificial Sequence: Synthetic oligonucleotide
ucguacugcuggcacaagu

SEQ ID NO: 1588763 - RNA, 19 nt, Artificial Sequence
  Description of Artificial Sequence: Synthetic oligonucleotide
guaggcuuauccccaggag

SEQ ID NO: 1588764 - RNA, 19 nt, Artificial Sequence
  Description of Artificial Sequence: Synthetic oligonucleotide
gacggcuaccaacagcaac

SEQ ID NO: 1588765 - RNA, 19 nt, Artificial Sequence
  Description of Artificial Sequence: Synthetic oligonucleotide
gagccauauagccccacac

SEQ ID NO: 1588766 - RNA, 19 nt, Artificial Sequence
  Description of Artificial Sequence: Synthetic oligonucleotide
cauauagccccacacuaca

SEQ ID NO: 1588767 - RNA, 19 nt, Artificial Sequence
  Description of Artificial Sequence: Synthetic oligonucleotide
ucgagacucacugaccaac

SEQ ID NO: 1588768 - RNA, 19 nt, Artificial Sequence
  Description of Artificial Sequence: Synthetic oligonucleotide
cucuauggauuccuugaug

SEQ ID NO: 1588769 - RNA, 19 nt, Artificial Sequence
  Description of Artificial Sequence: Synthetic oligonucleotide
ugcccucccgccuuccugg

SEQ ID NO: 1588770 - RNA, 19 nt, Artificial Sequence
  Description of Artificial Sequence: Synthetic oligonucleotide
cuccguuccagccgggucc

SEQ ID NO: 1588771 - RNA, 19 nt, Artificial Sequence
  Description of Artificial Sequence: Synthetic oligonucleotide
cucgggaaagggcaaggag

SEQ ID NO: 1588772 - RNA, 19 nt, Artificial Sequence
  Description of Artificial Sequence: Synthetic oligonucleotide
uugagugugcagaccugca

SEQ ID NO: 1588773 - RNA, 19 nt, Artificial Sequence
  Description of Artificial Sequence: Synthetic oligonucleotide
caaacuagcguuggccggc

SEQ ID NO: 1588774 - RNA, 19 nt, Artificial Sequence
  Description of Artificial Sequence: Synthetic oligonucleotide
acuacagcacccaacacuu

SEQ ID NO: 1588775 - RNA, 19 nt, Artificial Sequence
  Description of Artificial Sequence: Synthetic oligonucleotide
uccuucccagacccuauca

SEQ ID NO: 1588776 - RNA, 19 nt, Artificial Sequence
  Description of Artificial Sequence: Synthetic oligonucleotide
aacuagcguuggccggcgc

SEQ ID NO: 1588777 - RNA, 19 nt, Artificial Sequence
  Description of Artificial Sequence: Synthetic oligonucleotide
agacccuaucaaaguaggc

SEQ ID NO: 1588778 - RNA, 19 nt, Artificial Sequence
  Description of Artificial Sequence: Synthetic oligonucleotide
aaacuagcguuggccggcg

SEQ ID NO: 1588779 - RNA, 19 nt, Artificial Sequence
  Description of Artificial Sequence: Synthetic oligonucleotide
guuccgaucacgugccuca

SEQ ID NO: 1588780 - RNA, 19 nt, Artificial Sequence
  Description of Artificial Sequence: Synthetic oligonucleotide
acucggucuccaaacuagc

SEQ ID NO: 1588781 - RNA, 19 nt, Artificial Sequence
  Description of Artificial Sequence: Synthetic oligonucleotide
ugccuaggacagauguccc

SEQ ID NO: 1588782 - RNA, 19 nt, Artificial Sequence
  Description of Artificial Sequence: Synthetic oligonucleotide
ggcucuuccuaucaaauaa

SEQ ID NO: 1588783 - RNA, 19 nt, Artificial Sequence
  Description of Artificial Sequence: Synthetic oligonucleotide
ccaaucaccugguacucgg

SEQ ID NO: 1588784 - RNA, 19 nt, Artificial Sequence
  Description of Artificial Sequence: Synthetic oligonucleotide
uuauugacuccagugccua

SEQ ID NO: 1588785 - RNA, 19 nt, Artificial Sequence
  Description of Artificial Sequence: Synthetic oligonucleotide
gagccuccccuuccaaagg

SEQ ID NO: 1588786 - RNA, 19 nt, Artificial Sequence
  Description of Artificial Sequence: Synthetic oligonucleotide
accagaaguugacccgcuc

SEQ ID NO: 1588787 - RNA, 19 nt, Artificial Sequence
  Description of Artificial Sequence: Synthetic oligonucleotide
gaugugucuccuucccaga

SEQ ID NO: 1588788 - RNA, 19 nt, Artificial Sequence
  Description of Artificial Sequence: Synthetic oligonucleotide
ccuuucgagacucacugac

SEQ ID NO: 1588789 - RNA, 19 nt, Artificial Sequence
  Description of Artificial Sequence: Synthetic oligonucleotide
aggcucguagcagagucag

SEQ ID NO: 1588790 - RNA, 19 nt, Artificial Sequence
  Description of Artificial Sequence: Synthetic oligonucleotide
cucgucuuggaaacuguca

SEQ ID NO: 1588791 - RNA, 19 nt, Artificial Sequence
  Description of Artificial Sequence: Synthetic oligonucleotide
uccucgucuuggaaacugu

SEQ ID NO: 1588792 - RNA, 19 nt, Artificial Sequence
  Description of Artificial Sequence: Synthetic oligonucleotide
cuacguggguacagggcgc

SEQ ID NO: 1588793 - RNA, 19 nt, Artificial Sequence
  Description of Artificial Sequence: Synthetic oligonucleotide
cugcaggacggcuaccaac

SEQ ID NO: 1588794 - RNA, 19 nt, Artificial Sequence
  Description of Artificial Sequence: Synthetic oligonucleotide
gcaaucuacuugcacuccc

SEQ ID NO: 1588795 - RNA, 19 nt, Artificial Sequence
  Description of Artificial Sequence: Synthetic oligonucleotide
ccagacccuaucaaaguag

SEQ ID NO: 1588796 - RNA, 19 nt, Artificial Sequence
  Description of Artificial Sequence: Synthetic oligonucleotide
gugccucaaaggcucguag

SEQ ID NO: 1588797 - RNA, 19 nt, Artificial Sequence
  Description of Artificial Sequence: Synthetic oligonucleotide
cacuaguuucucugagaug

SEQ ID NO: 1588798 - RNA, 19 nt, Artificial Sequence
  Description of Artificial Sequence: Synthetic oligonucleotide
gaugagcucaaagaacacu

SEQ ID NO: 1588799 - RNA, 19 nt, Artificial Sequence
  Description of Artificial Sequence: Synthetic oligonucleotide
uccugaaugggcggcggcc

SEQ ID NO: 1588800 - RNA, 19 nt, Artificial Sequence
  Description of Artificial Sequence: Synthetic oligonucleotide
ucagccuuucgagacucac

SEQ ID NO: 1588801 - RNA, 19 nt, Artificial Sequence
  Description of Artificial Sequence: Synthetic oligonucleotide
accaaucaccugguacucg

SEQ ID NO: 1588802 - RNA, 19 nt, Artificial Sequence
  Description of Artificial Sequence: Synthetic oligonucleotide
auguaaacucgccguccug

SEQ ID NO: 1588803 - RNA, 19 nt, Artificial Sequence
  Description of Artificial Sequence: Synthetic oligonucleotide
cuagcguuggccggcgcgg

SEQ ID NO: 1588804 - RNA, 19 nt, Artificial Sequence
  Description of Artificial Sequence: Synthetic oligonucleotide
uaaacucgccguccugaau

SEQ ID NO: 1588805 - RNA, 19 nt, Artificial Sequence
  Description of Artificial Sequence: Synthetic oligonucleotide
auauagccccacacuacag

SEQ ID NO: 1588806 - RNA, 19 nt, Artificial Sequence
  Description of Artificial Sequence: Synthetic oligonucleotide
cuccccucugggucaaggg

SEQ ID NO: 1588807 - RNA, 19 nt, Artificial Sequence
  Description of Artificial Sequence: Synthetic oligonucleotide
caagaacucugcagaugug

SEQ ID NO: 1588808 - RNA, 19 nt, Artificial Sequence
  Description of Artificial Sequence: Synthetic oligonucleotide
aaugggcggcggccccgcc

SEQ ID NO: 1588809 - RNA, 19 nt, Artificial Sequence
  Description of Artificial Sequence: Synthetic oligonucleotide
ccagaaguugacccgcucc

SEQ ID NO: 1588810 - RNA, 19 nt, Artificial Sequence
  Description of Artificial Sequence: Synthetic oligonucleotide
cucauagucucuauggauu

SEQ ID NO: 1588811 - RNA, 19 nt, Artificial Sequence
  Description of Artificial Sequence: Synthetic oligonucleotide
cuuaagcuaaggcacaauu

SEQ ID NO: 1588812 - RNA, 19 nt, Artificial Sequence
  Description of Artificial Sequence: Synthetic oligonucleotide
aggaguugucaaagcaaag

SEQ ID NO: 1588813 - RNA, 19 nt, Artificial Sequence
  Description of Artificial Sequence: Synthetic oligonucleotide
cagcugaccagaaguugac

SEQ ID NO: 1588814 - RNA, 19 nt, Artificial Sequence
  Description of Artificial Sequence: Synthetic oligonucleotide
ugaaugggcggcggccccg

SEQ ID NO: 1588815 - RNA, 19 nt, Artificial Sequence
  Description of Artificial Sequence: Synthetic oligonucleotide
ccaaacuagcguuggccgg

SEQ ID NO: 1588816 - RNA, 19 nt, Artificial Sequence
  Description of Artificial Sequence: Synthetic oligonucleotide
uggcaagaacucugcagau

SEQ ID NO: 1588817 - RNA, 19 nt, Artificial Sequence
  Description of Artificial Sequence: Synthetic oligonucleotide
cuucgugggagugcccucc

SEQ ID NO: 1588818 - RNA, 19 nt, Artificial Sequence
  Description of Artificial Sequence: Synthetic oligonucleotide
caccccaucagccuuucga

SEQ ID NO: 1588819 - RNA, 19 nt, Artificial Sequence
  Description of Artificial Sequence: Synthetic oligonucleotide
agucaccaggcacuauuaa

SEQ ID NO: 1588820 - RNA, 19 nt, Artificial Sequence
  Description of Artificial Sequence: Synthetic oligonucleotide
ucugccccaaguugauguc

SEQ ID NO: 1588821 - RNA, 19 nt, Artificial Sequence
  Description of Artificial Sequence: Synthetic oligonucleotide
ugagagccauauagcccca

SEQ ID NO: 1588822 - RNA, 19 nt, Artificial Sequence
  Description of Artificial Sequence: Synthetic oligonucleotide
uucugagcuucgugggagu

SEQ ID NO: 1588823 - RNA, 19 nt, Artificial Sequence
  Description of Artificial Sequence: Synthetic oligonucleotide
ucgugggagugcccucccg

SEQ ID NO: 1588824 - RNA, 19 nt, Artificial Sequence
  Description of Artificial Sequence: Synthetic oligonucleotide
cccaucagccuuucgagac

SEQ ID NO: 1588825 - RNA, 19 nt, Artificial Sequence
  Description of Artificial Sequence: Synthetic oligonucleotide
ccgaucacgugccucaaag

SEQ ID NO: 1588826 - RNA, 19 nt, Artificial Sequence
  Description of Artificial Sequence: Synthetic oligonucleotide
uuauccccaggagcaaagu

SEQ ID NO: 1588827 - RNA, 19 nt, Artificial Sequence
  Description of Artificial Sequence: Synthetic oligonucleotide
guacagggcgcuugucaug

SEQ ID NO: 1588828 - RNA, 19 nt, Artificial Sequence
  Description of Artificial Sequence: Synthetic oligonucleotide
uucgugggagugcccuccc

SEQ ID NO: 1588829 - RNA, 19 nt, Artificial Sequence
  Description of Artificial Sequence: Synthetic oligonucleotide
ccauauagccccacacuac

SEQ ID NO: 1588830 - RNA, 19 nt, Artificial Sequence
  Description of Artificial Sequence: Synthetic oligonucleotide
agaagcgcuugagugugca

SEQ ID NO: 1588831 - RNA, 19 nt, Artificial Sequence
  Description of Artificial Sequence: Synthetic oligonucleotide
aagucaccaggcacuauua

SEQ ID NO: 1588832 - RNA, 19 nt, Artificial Sequence
  Description of Artificial Sequence: Synthetic oligonucleotide
cuccucgucuuggaaacug

SEQ ID NO: 1588833 - RNA, 19 nt, Artificial Sequence
  Description of Artificial Sequence: Synthetic oligonucleotide
agcuucgugggagugcccu

SEQ ID NO: 1588834 - RNA, 19 nt, Artificial Sequence
  Description of Artificial Sequence: Synthetic oligonucleotide
agggcgcuugucauggaag

SEQ ID NO: 1588835 - RNA, 19 nt, Artificial Sequence
  Description of Artificial Sequence: Synthetic oligonucleotide
cuaucaaaguaggcuuauc

SEQ ID NO: 1588836 - RNA, 19 nt, Artificial Sequence
  Description of Artificial Sequence: Synthetic oligonucleotide
gcucguagcagagucagca

SEQ ID NO: 1588837 - RNA, 19 nt, Artificial Sequence
  Description of Artificial Sequence: Synthetic oligonucleotide
cugagcuucgugggagugc

SEQ ID NO: 1588838 - RNA, 19 nt, Artificial Sequence
  Description of Artificial Sequence: Synthetic oligonucleotide
cuacuugcacucccugcuc

SEQ ID NO: 1588839 - RNA, 19 nt, Artificial Sequence
  Description of Artificial Sequence: Synthetic oligonucleotide
ucccacucguacugcuggc

SEQ ID NO: 1588840 - RNA, 19 nt, Artificial Sequence
  Description of Artificial Sequence: Synthetic oligonucleotide
cugcuugaccccauccuga

SEQ ID NO: 1588841 - RNA, 19 nt, Artificial Sequence
  Description of Artificial Sequence: Synthetic oligonucleotide
cugccccaaguugaugucc

SEQ ID NO: 1588842 - RNA, 19 nt, Artificial Sequence
  Description of Artificial Sequence: Synthetic oligonucleotide
gcuacggccgcgccggccg

SEQ ID NO: 1588843 - RNA, 19 nt, Artificial Sequence
  Description of Artificial Sequence: Synthetic oligonucleotide
uggggcuacguggguacag

SEQ ID NO: 1588844 - RNA, 19 nt, Artificial Sequence
  Description of Artificial Sequence: Synthetic oligonucleotide
guaaacucgccguccugaa

SEQ ID NO: 1588845 - RNA, 19 nt, Artificial Sequence
  Description of Artificial Sequence: Synthetic oligonucleotide
agccuguaguccccggccu

SEQ ID NO: 1588846 - RNA, 19 nt, Artificial Sequence
  Description of Artificial Sequence: Synthetic oligonucleotide
ugaccccauccugaugaug

SEQ ID NO: 1588847 - RNA, 19 nt, Artificial Sequence
  Description of Artificial Sequence: Synthetic oligonucleotide
uugaggcuagcuggcuccc

SEQ ID NO: 1588848 - RNA, 19 nt, Artificial Sequence
  Description of Artificial Sequence: Synthetic oligonucleotide
gucaccaggcacuauuaau

SEQ ID NO: 1588849 - RNA, 19 nt, Artificial Sequence
  Description of Artificial Sequence: Synthetic oligonucleotide
cagggcuacggccgcgccg

SEQ ID NO: 1588850 - RNA, 19 nt, Artificial Sequence
  Description of Artificial Sequence: Synthetic oligonucleotide
ccagguugucuucuugaag

SEQ ID NO: 1588851 - RNA, 19 nt, Artificial Sequence
  Description of Artificial Sequence: Synthetic oligonucleotide
aguugacccgcuccagguu

SEQ ID NO: 1588852 - RNA, 19 nt, Artificial Sequence
  Description of Artificial Sequence: Synthetic oligonucleotide
agggcucuuccuaucaaau

SEQ ID NO: 1588853 - RNA, 19 nt, Artificial Sequence
  Description of Artificial Sequence: Synthetic oligonucleotide
guaguccccggccucagua

SEQ ID NO: 1588854 - RNA, 19 nt, Artificial Sequence
  Description of Artificial Sequence: Synthetic oligonucleotide
gcacaaguagccacagggc

SEQ ID NO: 1588855 - RNA, 19 nt, Artificial Sequence
  Description of Artificial Sequence: Synthetic oligonucleotide
guacucggucuccaaacua

SEQ ID NO: 1588856 - RNA, 19 nt, Artificial Sequence
  Description of Artificial Sequence: Synthetic oligonucleotide
uacguggguacagggcgcu

SEQ ID NO: 1588857 - RNA, 19 nt, Artificial Sequence
  Description of Artificial Sequence: Synthetic oligonucleotide
ggcaagaacucugcagaug

SEQ ID NO: 1588858 - RNA, 19 nt, Artificial Sequence
  Description of Artificial Sequence: Synthetic oligonucleotide
cagccggguccucauaguc

SEQ ID NO: 1588859 - RNA, 19 nt, Artificial Sequence
  Description of Artificial Sequence: Synthetic oligonucleotide
uccgaucacgugccucaaa

SEQ ID NO: 1588860 - RNA, 19 nt, Artificial Sequence
  Description of Artificial Sequence: Synthetic oligonucleotide
caaucuacuugcacucccu

SEQ ID NO: 1588861 - RNA, 19 nt, Artificial Sequence
  Description of Artificial Sequence: Synthetic oligonucleotide
cuacagcacccaacacuuc

SEQ ID NO: 1588862 - RNA, 19 nt, Artificial Sequence
  Description of Artificial Sequence: Synthetic oligonucleotide
ccaaguugaugucccugag

SEQ ID NO: 1588863 - RNA, 19 nt, Artificial Sequence
  Description of Artificial Sequence: Synthetic oligonucleotide
caccaaucaccugguacuc

SEQ ID NO: 1588864 - RNA, 19 nt, Artificial Sequence
  Description of Artificial Sequence: Synthetic oligonucleotide
gcgggaagcagaaauguaa

SEQ ID NO: 1588865 - RNA, 19 nt, Artificial Sequence
  Description of Artificial Sequence: Synthetic oligonucleotide
ccacacuacagcacccaac

SEQ ID NO: 1588866 - RNA, 19 nt, Artificial Sequence
  Description of Artificial Sequence: Synthetic oligonucleotide
ugaggcuagcuggcucccc

SEQ ID NO: 1588867 - RNA, 19 nt, Artificial Sequence
  Description of Artificial Sequence: Synthetic oligonucleotide
cagggcucuuccuaucaaa

SEQ ID NO: 1588868 - RNA, 19 nt, Artificial Sequence
  Description of Artificial Sequence: Synthetic oligonucleotide
ggggcuacguggguacagg

SEQ ID NO: 1588869 - RNA, 19 nt, Artificial Sequence
  Description of Artificial Sequence: Synthetic oligonucleotide
agccggguccucauagucu

SEQ ID NO: 1588870 - RNA, 19 nt, Artificial Sequence
  Description of Artificial Sequence: Synthetic oligonucleotide
gcaaagccuguaguccccg

SEQ ID NO: 1588871 - RNA, 19 nt, Artificial Sequence
  Description of Artificial Sequence: Synthetic oligonucleotide
cugcccgaccuuucuucug

SEQ ID NO: 1588872 - RNA, 19 nt, Artificial Sequence
  Description of Artificial Sequence: Synthetic oligonucleotide
uuuugacaucaagcaucuc

SEQ ID NO: 1588873 - RNA, 19 nt, Artificial Sequence
  Description of Artificial Sequence: Synthetic oligonucleotide
gaaagggcaaggagcaguu

SEQ ID NO: 1588874 - RNA, 19 nt, Artificial Sequence
  Description of Artificial Sequence: Synthetic oligonucleotide
acucgccguccugaauggg

SEQ ID NO: 1588875 - RNA, 19 nt, Artificial Sequence
  Description of Artificial Sequence: Synthetic oligonucleotide
cacuguugcugagccuccc

SEQ ID NO: 1588876 - RNA, 19 nt, Artificial Sequence
  Description of Artificial Sequence: Synthetic oligonucleotide
uccguuccagccggguccu

SEQ ID NO: 1588877 - RNA, 19 nt, Artificial Sequence
  Description of Artificial Sequence: Synthetic oligonucleotide
cuggcuccccucuggguca

SEQ ID NO: 1588878 - RNA, 19 nt, Artificial Sequence
  Description of Artificial Sequence: Synthetic oligonucleotide
gugcccucccgccuuccug

SEQ ID NO: 1588879 - RNA, 19 nt, Artificial Sequence
  Description of Artificial Sequence: Synthetic oligonucleotide
cagaccugcaggacggcua

SEQ ID NO: 1588880 - RNA, 19 nt, Artificial Sequence
  Description of Artificial Sequence: Synthetic oligonucleotide
gcgccggccgccauuaucc

SEQ ID NO: 1588881 - RNA, 19 nt, Artificial Sequence
  Description of Artificial Sequence: Synthetic oligonucleotide
gaaugggcggcggccccgc

SEQ ID NO: 1588882 - RNA, 19 nt, Artificial Sequence
  Description of Artificial Sequence: Synthetic oligonucleotide
ggaaagggcaaggagcagu

SEQ ID NO: 1588883 - RNA, 19 nt, Artificial Sequence
  Description of Artificial Sequence: Synthetic oligonucleotide
ggcgaccaccuccaucggc

SEQ ID NO: 1588884 - RNA, 19 nt, Artificial Sequence
  Description of Artificial Sequence: Synthetic oligonucleotide
gguacucggucuccaaacu

SEQ ID NO: 1588885 - RNA, 19 nt, Artificial Sequence
  Description of Artificial Sequence: Synthetic oligonucleotide
ccucgucuuggaaacuguc

SEQ ID NO: 1588886 - RNA, 19 nt, Artificial Sequence
  Description of Artificial Sequence: Synthetic oligonucleotide
agcgggaagcagaaaugua

SEQ ID NO: 1588887 - RNA, 19 nt, Artificial Sequence
  Description of Artificial Sequence: Synthetic oligonucleotide
cacgcccugagggcucucc

SEQ ID NO: 1588888 - RNA, 19 nt, Artificial Sequence
  Description of Artificial Sequence: Synthetic oligonucleotide
uuccgaucacgugccucaa

SEQ ID NO: 1588889 - RNA, 19 nt, Artificial Sequence
  Description of Artificial Sequence: Synthetic oligonucleotide
cuguaguccccggccucag

SEQ ID NO: 1588890 - RNA, 19 nt, Artificial Sequence
  Description of Artificial Sequence: Synthetic oligonucleotide
agguuccgaucacgugccu

SEQ ID NO: 1588891 - RNA, 19 nt, Artificial Sequence
  Description of Artificial Sequence: Synthetic oligonucleotide
gguuccgaucacgugccuc

SEQ ID NO: 1588892 - RNA, 19 nt, Artificial Sequence
  Description of Artificial Sequence: Synthetic oligonucleotide
gcuccccucugggucaagg

SEQ ID NO: 1588893 - RNA, 19 nt, Artificial Sequence
  Description of Artificial Sequence: Synthetic oligonucleotide
cgugggagugcccucccgc

SEQ ID NO: 1588894 - RNA, 19 nt, Artificial Sequence
  Description of Artificial Sequence: Synthetic oligonucleotide
cagcacccaacacuuccaa

SEQ ID NO: 1588895 - RNA, 19 nt, Artificial Sequence
  Description of Artificial Sequence: Synthetic oligonucleotide
cagcgggaagcagaaaugu

SEQ ID NO: 1588896 - RNA, 19 nt, Artificial Sequence
  Description of Artificial Sequence: Synthetic oligonucleotide
cagcaccaccaaucaccug

SEQ ID NO: 1588897 - RNA, 19 nt, Artificial Sequence
  Description of Artificial Sequence: Synthetic oligonucleotide
acagggcgcuugucaugga

SEQ ID NO: 1588898 - RNA, 19 nt, Artificial Sequence
  Description of Artificial Sequence: Synthetic oligonucleotide
cagccuuucgagacucacu

SEQ ID NO: 1588899 - RNA, 19 nt, Artificial Sequence
  Description of Artificial Sequence: Synthetic oligonucleotide
cagcacgcccugagggcuc

SEQ ID NO: 1588900 - RNA, 19 nt, Artificial Sequence
  Description of Artificial Sequence: Synthetic oligonucleotide
gaccugcaggacggcuacc

SEQ ID NO: 1588901 - RNA, 19 nt, Artificial Sequence
  Description of Artificial Sequence: Synthetic oligonucleotide
aggucugccccaaguugau

SEQ ID NO: 1588902 - RNA, 19 nt, Artificial Sequence
  Description of Artificial Sequence: Synthetic oligonucleotide
caaucaccugguacucggu

SEQ ID NO: 1588903 - RNA, 19 nt, Artificial Sequence
  Description of Artificial Sequence: Synthetic oligonucleotide
gcuccguuccagccggguc

SEQ ID NO: 1588904 - RNA, 19 nt, Artificial Sequence
  Description of Artificial Sequence: Synthetic oligonucleotide
gccuuucgagacucacuga

SEQ ID NO: 1588905 - RNA, 19 nt, Artificial Sequence
  Description of Artificial Sequence: Synthetic oligonucleotide
cucguagcagagucagcau

SEQ ID NO: 1588906 - RNA, 19 nt, Artificial Sequence
  Description of Artificial Sequence: Synthetic oligonucleotide
gagcuucgugggagugccc

SEQ ID NO: 1588907 - RNA, 19 nt, Artificial Sequence
  Description of Artificial Sequence: Synthetic oligonucleotide
cuaggacagaugucccuuu

SEQ ID NO: 1588908 - RNA, 19 nt, Artificial Sequence
  Description of Artificial Sequence: Synthetic oligonucleotide
gcccgaccuuucuucugag

SEQ ID NO: 1588909 - RNA, 19 nt, Artificial Sequence
  Description of Artificial Sequence: Synthetic oligonucleotide
gagugcccucccgccuucc

SEQ ID NO: 1588910 - RNA, 19 nt, Artificial Sequence
  Description of Artificial Sequence: Synthetic oligonucleotide
ccccaaguugaugucccug

SEQ ID NO: 1588911 - RNA, 19 nt, Artificial Sequence
  Description of Artificial Sequence: Synthetic oligonucleotide
ggcuugaggcuaggucugc

SEQ ID NO: 1588912 - RNA, 19 nt, Artificial Sequence
  Description of Artificial Sequence: Synthetic oligonucleotide
gccguccugaaugggcggc

SEQ ID NO: 1588913 - RNA, 19 nt, Artificial Sequence
  Description of Artificial Sequence: Synthetic oligonucleotide
ccaggcgaccaccuccauc

SEQ ID NO: 1588914 - RNA, 19 nt, Artificial Sequence
  Description of Artificial Sequence: Synthetic oligonucleotide
cccagacccuaucaaagua

SEQ ID NO: 1588915 - RNA, 19 nt, Artificial Sequence
  Description of Artificial Sequence: Synthetic oligonucleotide
gcacuguugcugagccucc

SEQ ID NO: 1588916 - RNA, 19 nt, Artificial Sequence
  Description of Artificial Sequence: Synthetic oligonucleotide
ccuucccagacccuaucaa

SEQ ID NO: 1588917 - RNA, 19 nt, Artificial Sequence
  Description of Artificial Sequence: Synthetic oligonucleotide
gcuuauccccaggagcaaa

SEQ ID NO: 1588918 - RNA, 19 nt, Artificial Sequence
  Description of Artificial Sequence: Synthetic oligonucleotide
ccugaugauggaagacuua

SEQ ID NO: 1588919 - RNA, 19 nt, Artificial Sequence
  Description of Artificial Sequence: Synthetic oligonucleotide
gcuucgugggagugcccuc

SEQ ID NO: 1588920 - RNA, 19 nt, Artificial Sequence
  Description of Artificial Sequence: Synthetic oligonucleotide
gcgaccaccuccaucggcu

SEQ ID NO: 1588921 - RNA, 19 nt, Artificial Sequence
  Description of Artificial Sequence: Synthetic oligonucleotide
gccuguaguccccggccuc

SEQ ID NO: 1588922 - RNA, 19 nt, Artificial Sequence
  Description of Artificial Sequence: Synthetic oligonucleotide
ggccggcgcggacugauaa

SEQ ID NO: 1588923 - RNA, 19 nt, Artificial Sequence
  Description of Artificial Sequence: Synthetic oligonucleotide
uggccggcgcggacugaua

SEQ ID NO: 1588924 - RNA, 19 nt, Artificial Sequence
  Description of Artificial Sequence: Synthetic oligonucleotide
gcaccccaucagccuuucg

SEQ ID NO: 1588925 - RNA, 19 nt, Artificial Sequence
  Description of Artificial Sequence: Synthetic oligonucleotide
gcuucagcccaaccuucua

SEQ ID NO: 1588926 - RNA, 19 nt, Artificial Sequence
  Description of Artificial Sequence: Synthetic oligonucleotide
ccccaucagccuuucgaga

SEQ ID NO: 1588927 - RNA, 19 nt, Artificial Sequence
  Description of Artificial Sequence: Synthetic oligonucleotide
gcgcuugagugugcagacc

SEQ ID NO: 1588928 - RNA, 19 nt, Artificial Sequence
  Description of Artificial Sequence: Synthetic oligonucleotide
ccguccugaaugggcggcg

SEQ ID NO: 1588929 - RNA, 19 nt, Artificial Sequence
  Description of Artificial Sequence: Synthetic oligonucleotide
ggucugcaaucuacuugca

SEQ ID NO: 1588930 - RNA, 19 nt, Artificial Sequence
  Description of Artificial Sequence: Synthetic oligonucleotide
ucccgccuuccuggcugcc

SEQ ID NO: 1588931 - RNA, 19 nt, Artificial Sequence
  Description of Artificial Sequence: Synthetic oligonucleotide
ggagugcccucccgccuuc

SEQ ID NO: 1588932 - RNA, 19 nt, Artificial Sequence
  Description of Artificial Sequence: Synthetic oligonucleotide
cguccugaaugggcggcgg

SEQ ID NO: 1588933 - RNA, 19 nt, Artificial Sequence
  Description of Artificial Sequence: Synthetic oligonucleotide
ccgccauuauccgggucac

SEQ ID NO: 1588934 - RNA, 19 nt, Artificial Sequence
  Description of Artificial Sequence: Synthetic oligonucleotide
gccagggcuacggccgcgc

SEQ ID NO: 1588935 - RNA, 19 nt, Artificial Sequence
  Description of Artificial Sequence: Synthetic oligonucleotide
gggcaucugagagccauau

SEQ ID NO: 1588936 - RNA, 19 nt, Artificial Sequence
  Description of Artificial Sequence: Synthetic oligonucleotide
ggcuuauccccaggagcaa

SEQ ID NO: 1588937 - RNA, 19 nt, Artificial Sequence
  Description of Artificial Sequence: Synthetic oligonucleotide
cgccguccugaaugggcgg

SEQ ID NO: 1588938 - RNA, 19 nt, Artificial Sequence
  Description of Artificial Sequence: Synthetic oligonucleotide
ccugagggcucuccaaggu

SEQ ID NO: 1588939 - RNA, 19 nt, Artificial Sequence
  Description of Artificial Sequence: Synthetic oligonucleotide
ccagggcuacggccgcgcc

SEQ ID NO: 1588940 - RNA, 19 nt, Artificial Sequence
  Description of Artificial Sequence: Synthetic oligonucleotide
cuggggcuacguggguaca

SEQ ID NO: 1588941 - RNA, 19 nt, Artificial Sequence
  Description of Artificial Sequence: Synthetic oligonucleotide
cguuggccggcgcggacug

SEQ ID NO: 1588942 - RNA, 19 nt, Artificial Sequence
  Description of Artificial Sequence: Synthetic oligonucleotide
ccggcgcggacugauaaaa

SEQ ID NO: 1588943 - RNA, 19 nt, Artificial Sequence
  Description of Artificial Sequence: Synthetic oligonucleotide
cccacacuacagcacccaa

SEQ ID NO: 1588944 - RNA, 19 nt, Artificial Sequence
  Description of Artificial Sequence: Synthetic oligonucleotide
cccacucguacugcuggca

SEQ ID NO: 1588945 - RNA, 19 nt, Artificial Sequence
  Description of Artificial Sequence: Synthetic oligonucleotide
gccggcgcggacugauaaa

SEQ ID NO: 1588946 - RNA, 19 nt, Artificial Sequence
  Description of Artificial Sequence: Synthetic oligonucleotide
ggguccucauagucucuau

SEQ ID NO: 1588947 - RNA, 19 nt, Artificial Sequence
  Description of Artificial Sequence: Synthetic oligonucleotide
cggucuccaaacuagcguu

SEQ ID NO: 1588948 - RNA, 19 nt, Artificial Sequence
  Description of Artificial Sequence: Synthetic oligonucleotide
ccugcccgaccuuucuucu

SEQ ID NO: 1588949 - RNA, 19 nt, Artificial Sequence
  Description of Artificial Sequence: Synthetic oligonucleotide
cgccggccgccauuauccg

SEQ ID NO: 1588950 - RNA, 19 nt, Artificial Sequence
  Description of Artificial Sequence: Synthetic oligonucleotide
cgaccaccuccaucggcuc

SEQ ID NO: 1588951 - RNA, 19 nt, Artificial Sequence
  Description of Artificial Sequence: Synthetic oligonucleotide
ggacggcuaccaacagcaa

SEQ ID NO: 1588952 - RNA, 19 nt, Artificial Sequence
  Description of Artificial Sequence: Synthetic oligonucleotide
gccccaaguugaugucccu

SEQ ID NO: 1588953 - RNA, 19 nt, Artificial Sequence
  Description of Artificial Sequence: Synthetic oligonucleotide
gugcaccccaucagccuuu

SEQ ID NO: 1588954 - RNA, 19 nt, Artificial Sequence
  Description of Artificial Sequence: Synthetic oligonucleotide
cgaccuuucuucugagcuu

SEQ ID NO: 1588955 - RNA, 19 nt, Artificial Sequence
  Description of Artificial Sequence: Synthetic oligonucleotide
gcguuggccggcgcggacu

SEQ ID NO: 1588956 - RNA, 19 nt, Artificial Sequence
  Description of Artificial Sequence: Synthetic oligonucleotide
gggcuacggccgcgccggc

SEQ ID NO: 1588957 - RNA, 19 nt, Artificial Sequence
  Description of Artificial Sequence: Synthetic oligonucleotide
ggcuccccucugggucaag

SEQ ID NO: 1588958 - RNA, 19 nt, Artificial Sequence
  Description of Artificial Sequence: Synthetic oligonucleotide
ccggccucaguaggcucca

SEQ ID NO: 1588959 - RNA, 19 nt, Artificial Sequence
  Description of Artificial Sequence: Synthetic oligonucleotide
gccgcgccggccgccauua

SEQ ID NO: 1588960 - RNA, 19 nt, Artificial Sequence
  Description of Artificial Sequence: Synthetic oligonucleotide
cgccucucccacucguacu

SEQ ID NO: 1588961 - RNA, 19 nt, Artificial Sequence
  Description of Artificial Sequence: Synthetic oligonucleotide
ccggguccucauagucucu

SEQ ID NO: 1588962 - RNA, 19 nt, Artificial Sequence
  Description of Artificial Sequence: Synthetic oligonucleotide
ccuccucgucuuggaaacu

SEQ ID NO: 1588963 - RNA, 19 nt, Artificial Sequence
  Description of Artificial Sequence: Synthetic oligonucleotide
ccaagucaccaggcacuau

SEQ ID NO: 1588964 - RNA, 19 nt, Artificial Sequence
  Description of Artificial Sequence: Synthetic oligonucleotide
gcacgcccugagggcucuc

SEQ ID NO: 1588965 - RNA, 19 nt, Artificial Sequence
  Description of Artificial Sequence: Synthetic oligonucleotide
cggccucaguaggcuccac

SEQ ID NO: 1588966 - RNA, 19 nt, Artificial Sequence
  Description of Artificial Sequence: Synthetic oligonucleotide
cccaggcgaccaccuccau

SEQ ID NO: 1588967 - RNA, 19 nt, Artificial Sequence
  Description of Artificial Sequence: Synthetic oligonucleotide
cggccgccauuauccgggu

SEQ ID NO: 1588968 - RNA, 19 nt, Artificial Sequence
  Description of Artificial Sequence: Synthetic oligonucleotide
ccgcgccggccgccauuau

SEQ ID NO: 1588969 - RNA, 19 nt, Artificial Sequence
  Description of Artificial Sequence: Synthetic oligonucleotide
aaagauugaaaccuuauac

SEQ ID NO: 1588970 - RNA, 19 nt, Artificial Sequence
  Description of Artificial Sequence: Synthetic oligonucleotide
aacaagaccaagcucagcc

SEQ ID NO: 1588971 - RNA, 19 nt, Artificial Sequence
  Description of Artificial Sequence: Synthetic oligonucleotide
uaaguuaauaguaaggucc

SEQ ID NO: 1588972 - RNA, 19 nt, Artificial Sequence
  Description of Artificial Sequence: Synthetic oligonucleotide
cuaguaaucauuuaguagg

SEQ ID NO: 1588973 - RNA, 19 nt, Artificial Sequence
  Description of Artificial Sequence: Synthetic oligonucleotide
gaccagauaaauuacaugg

SEQ ID NO: 1588974 - RNA, 19 nt, Artificial Sequence
  Description of Artificial Sequence: Synthetic oligonucleotide
acuauuucgauccaugggc

SEQ ID NO: 1588975 - RNA, 19 nt, Artificial Sequence
  Description of Artificial Sequence: Synthetic oligonucleotide
uuuaguagggaucaaaggc

SEQ ID NO: 1588976 - RNA, 19 nt, Artificial Sequence
  Description of Artificial Sequence: Synthetic oligonucleotide
uuuuaaguuaauaguaagg

SEQ ID NO: 1588977 - RNA, 19 nt, Artificial Sequence
  Description of Artificial Sequence: Synthetic oligonucleotide
uaaacuagaaaagaaaugc

SEQ ID NO: 1588978 - RNA, 19 nt, Artificial Sequence
  Description of Artificial Sequence: Synthetic oligonucleotide
aauaguaagguccagguaa

SEQ ID NO: 1588979 - RNA, 19 nt, Artificial Sequence
  Description of Artificial Sequence: Synthetic oligonucleotide
aaauuaaagauugaaaccu

SEQ ID NO: 1588980 - RNA, 19 nt, Artificial Sequence
  Description of Artificial Sequence: Synthetic oligonucleotide
uuuagugcuucaaagaccc

SEQ ID NO: 1588981 - RNA, 19 nt, Artificial Sequence
  Description of Artificial Sequence: Synthetic oligonucleotide
aaaccuuauacuuucaagu

SEQ ID NO: 1588982 - RNA, 19 nt, Artificial Sequence
  Description of Artificial Sequence: Synthetic oligonucleotide
aauuacauggcuaauccac

SEQ ID NO: 1588983 - RNA, 19 nt, Artificial Sequence
  Description of Artificial Sequence: Synthetic oligonucleotide
uaaauuacauggcuaaucc

SEQ ID NO: 1588984 - RNA, 19 nt, Artificial Sequence
  Description of Artificial Sequence: Synthetic oligonucleotide
auuaagaccagauaaauua

SEQ ID NO: 1588985 - RNA, 19 nt, Artificial Sequence
  Description of Artificial Sequence: Synthetic oligonucleotide
uuaaccauaaacccuaagu

SEQ ID NO: 1588986 - RNA, 19 nt, Artificial Sequence
  Description of Artificial Sequence: Synthetic oligonucleotide
auugaaaccuuauacuuuc

SEQ ID NO: 1588987 - RNA, 19 nt, Artificial Sequence
  Description of Artificial Sequence: Synthetic oligonucleotide
aagauugaaaccuuauacu

SEQ ID NO: 1588988 - RNA, 19 nt, Artificial Sequence
  Description of Artificial Sequence: Synthetic oligonucleotide
ucuaguaaucauuuaguag

SEQ ID NO: 1588989 - RNA, 19 nt, Artificial Sequence
  Description of Artificial Sequence: Synthetic oligonucleotide
uguaucuugagcuuucugc

SEQ ID NO: 1588990 - RNA, 19 nt, Artificial Sequence
  Description of Artificial Sequence: Synthetic oligonucleotide
aauaaccucagauggaaca

SEQ ID NO: 1588991 - RNA, 19 nt, Artificial Sequence
  Description of Artificial Sequence: Synthetic oligonucleotide
uuuaaguuaauaguaaggu

SEQ ID NO: 1588992 - RNA, 19 nt, Artificial Sequence
  Description of Artificial Sequence: Synthetic oligonucleotide
uauuguuccgcucucugcg

SEQ ID NO: 1588993 - RNA, 19 nt, Artificial Sequence
  Description of Artificial Sequence: Synthetic oligonucleotide
aaacuagaaaagaaaugcc

SEQ ID NO: 1588994 - RNA, 19 nt, Artificial Sequence
  Description of Artificial Sequence: Synthetic oligonucleotide
agauuuaggaaauaaauua

SEQ ID NO: 1588995 - RNA, 19 nt, Artificial Sequence
  Description of Artificial Sequence: Synthetic oligonucleotide
uuaguagggaucaaaggcc

SEQ ID NO: 1588996 - RNA, 19 nt, Artificial Sequence
  Description of Artificial Sequence: Synthetic oligonucleotide
aaugugucgugguagcuuc

SEQ ID NO: 1588997 - RNA, 19 nt, Artificial Sequence
  Description of Artificial Sequence: Synthetic oligonucleotide
aaccaaaagaauuaguauu

SEQ ID NO: 1588998 - RNA, 19 nt, Artificial Sequence
  Description of Artificial Sequence: Synthetic oligonucleotide
uugaaguguaucuugagcu

SEQ ID NO: 1588999 - RNA, 19 nt, Artificial Sequence
  Description of Artificial Sequence: Synthetic oligonucleotide
gacggcaugaaguugauac

SEQ ID NO: 1589000 - RNA, 19 nt, Artificial Sequence
  Description of Artificial Sequence: Synthetic oligonucleotide
uuugccaacacagaacagg

SEQ ID NO: 1589001 - RNA, 19 nt, Artificial Sequence
  Description of Artificial Sequence: Synthetic oligonucleotide
uaauuuuggcuuccaaccg

SEQ ID NO: 1589002 - RNA, 19 nt, Artificial Sequence
  Description of Artificial Sequence: Synthetic oligonucleotide
uuugucagcaacuuaauuu

SEQ ID NO: 1589003 - RNA, 19 nt, Artificial Sequence
  Description of Artificial Sequence: Synthetic oligonucleotide
uuaauaguaagguccaggu

SEQ ID NO: 1589004 - RNA, 19 nt, Artificial Sequence
  Description of Artificial Sequence: Synthetic oligonucleotide
ugagccuagaaaauaaccu

SEQ ID NO: 1589005 - RNA, 19 nt, Artificial Sequence
  Description of Artificial Sequence: Synthetic oligonucleotide
uuggcaguuauucucaaca

SEQ ID NO: 1589006 - RNA, 19 nt, Artificial Sequence
  Description of Artificial Sequence: Synthetic oligonucleotide
uguguugucagaauguguc

SEQ ID NO: 1589007 - RNA, 19 nt, Artificial Sequence
  Description of Artificial Sequence: Synthetic oligonucleotide
ucuuugacuauucuuuuga

SEQ ID NO: 1589008 - RNA, 19 nt, Artificial Sequence
  Description of Artificial Sequence: Synthetic oligonucleotide
cucgucacuauuucgaucc

SEQ ID NO: 1589009 - RNA, 19 nt, Artificial Sequence
  Description of Artificial Sequence: Synthetic oligonucleotide
uuucuaguaaucauuuagu

SEQ ID NO: 1589010 - RNA, 19 nt, Artificial Sequence
  Description of Artificial Sequence: Synthetic oligonucleotide
aaucauuuaguagggauca

SEQ ID NO: 1589011 - RNA, 19 nt, Artificial Sequence
  Description of Artificial Sequence: Synthetic oligonucleotide
uaguaaucauuuaguaggg

SEQ ID NO: 1589012 - RNA, 19 nt, Artificial Sequence
  Description of Artificial Sequence: Synthetic oligonucleotide
aacccuaaguuucuuuuag

SEQ ID NO: 1589013 - RNA, 19 nt, Artificial Sequence
  Description of Artificial Sequence: Synthetic oligonucleotide
aaaucagagcagugugacc

SEQ ID NO: 1589014 - RNA, 19 nt, Artificial Sequence
  Description of Artificial Sequence: Synthetic oligonucleotide
uaauccacuguucaguacu

SEQ ID NO: 1589015 - RNA, 19 nt, Artificial Sequence
  Description of Artificial Sequence: Synthetic oligonucleotide
aacaggcagaaaucagagc

SEQ ID NO: 1589016 - RNA, 19 nt, Artificial Sequence
  Description of Artificial Sequence: Synthetic oligonucleotide
uugagagacggcaugaagu

SEQ ID NO: 1589017 - RNA, 19 nt, Artificial Sequence
  Description of Artificial Sequence: Synthetic oligonucleotide
gauacucgucacuauuucg

SEQ ID NO: 1589018 - RNA, 19 nt, Artificial Sequence
  Description of Artificial Sequence: Synthetic oligonucleotide
agugcugacaggcugcacg

SEQ ID NO: 1589019 - RNA, 19 nt, Artificial Sequence
  Description of Artificial Sequence: Synthetic oligonucleotide
acacuuauuccguucacuc

SEQ ID NO: 1589020 - RNA, 19 nt, Artificial Sequence
  Description of Artificial Sequence: Synthetic oligonucleotide
gugugaaugacacuuauuc

SEQ ID NO: 1589021 - RNA, 19 nt, Artificial Sequence
  Description of Artificial Sequence: Synthetic oligonucleotide
uaaccauaaacccuaaguu

SEQ ID NO: 1589022 - RNA, 19 nt, Artificial Sequence
  Description of Artificial Sequence: Synthetic oligonucleotide
aguuauucucaacacagga

SEQ ID NO: 1589023 - RNA, 19 nt, Artificial Sequence
  Description of Artificial Sequence: Synthetic oligonucleotide
uuaaguuaauaguaagguc

SEQ ID NO: 1589024 - RNA, 19 nt, Artificial Sequence
  Description of Artificial Sequence: Synthetic oligonucleotide
cucagauggaacaagacca

SEQ ID NO: 1589025 - RNA, 19 nt, Artificial Sequence
  Description of Artificial Sequence: Synthetic oligonucleotide
uucaguacacucaauuccu

SEQ ID NO: 1589026 - RNA, 19 nt, Artificial Sequence
  Description of Artificial Sequence: Synthetic oligonucleotide
aaccauaaacccuaaguuu

SEQ ID NO: 1589027 - RNA, 19 nt, Artificial Sequence
  Description of Artificial Sequence: Synthetic oligonucleotide
aauuuuggcuuccaaccgu

SEQ ID NO: 1589028 - RNA, 19 nt, Artificial Sequence
  Description of Artificial Sequence: Synthetic oligonucleotide
cuauucuuuugagagacgg

SEQ ID NO: 1589029 - RNA, 19 nt, Artificial Sequence
  Description of Artificial Sequence: Synthetic oligonucleotide
accucucgaguucaggucc

SEQ ID NO: 1589030 - RNA, 19 nt, Artificial Sequence
  Description of Artificial Sequence: Synthetic oligonucleotide
accauaaacccuaaguuuc

SEQ ID NO: 1589031 - RNA, 19 nt, Artificial Sequence
  Description of Artificial Sequence: Synthetic oligonucleotide
guuaauaguaagguccagg

SEQ ID NO: 1589032 - RNA, 19 nt, Artificial Sequence
  Description of Artificial Sequence: Synthetic oligonucleotide
acuuauuccguucacuccu

SEQ ID NO: 1589033 - RNA, 19 nt, Artificial Sequence
  Description of Artificial Sequence: Synthetic oligonucleotide
uuugagagacggcaugaag

SEQ ID NO: 1589034 - RNA, 19 nt, Artificial Sequence
  Description of Artificial Sequence: Synthetic oligonucleotide
uuaaagauugaaaccuuau

SEQ ID NO: 1589035 - RNA, 19 nt, Artificial Sequence
  Description of Artificial Sequence: Synthetic oligonucleotide
aaauuacauggcuaaucca

SEQ ID NO: 1589036 - RNA, 19 nt, Artificial Sequence
  Description of Artificial Sequence: Synthetic oligonucleotide
cucgaguucagguccaugg

SEQ ID NO: 1589037 - RNA, 19 nt, Artificial Sequence
  Description of Artificial Sequence: Synthetic oligonucleotide
agauugaaaccuuauacuu

SEQ ID NO: 1589038 - RNA, 19 nt, Artificial Sequence
  Description of Artificial Sequence: Synthetic oligonucleotide
aguacacucaauuccuuug

SEQ ID NO: 1589039 - RNA, 19 nt, Artificial Sequence
  Description of Artificial Sequence: Synthetic oligonucleotide
agauggaacaagaccaagc

SEQ ID NO: 1589040 - RNA, 19 nt, Artificial Sequence
  Description of Artificial Sequence: Synthetic oligonucleotide
gaggcuacaccccaagugc

SEQ ID NO: 1589041 - RNA, 19 nt, Artificial Sequence
  Description of Artificial Sequence: Synthetic oligonucleotide
ucuuuugagagacggcaug

SEQ ID NO: 1589042 - RNA, 19 nt, Artificial Sequence
  Description of Artificial Sequence: Synthetic oligonucleotide
gacccauuaucauuaagac

SEQ ID NO: 1589043 - RNA, 19 nt, Artificial Sequence
  Description of Artificial Sequence: Synthetic oligonucleotide
ugcuuugcuugcuuggagg

SEQ ID NO: 1589044 - RNA, 19 nt, Artificial Sequence
  Description of Artificial Sequence: Synthetic oligonucleotide
uaaagauugaaaccuuaua

SEQ ID NO: 1589045 - RNA, 19 nt, Artificial Sequence
  Description of Artificial Sequence: Synthetic oligonucleotide
cuauuucgauccaugggcg

SEQ ID NO: 1589046 - RNA, 19 nt, Artificial Sequence
  Description of Artificial Sequence: Synthetic oligonucleotide
uuaucauuaagaccagaua

SEQ ID NO: 1589047 - RNA, 19 nt, Artificial Sequence
  Description of Artificial Sequence: Synthetic oligonucleotide
cugagccuagaaaauaacc

SEQ ID NO: 1589048 - RNA, 19 nt, Artificial Sequence
  Description of Artificial Sequence: Synthetic oligonucleotide
gacuauucuuuugagagac

SEQ ID NO: 1589049 - RNA, 19 nt, Artificial Sequence
  Description of Artificial Sequence: Synthetic oligonucleotide
auuccguucacuccuggag

SEQ ID NO: 1589050 - RNA, 19 nt, Artificial Sequence
  Description of Artificial Sequence: Synthetic oligonucleotide
uuuaaccauaaacccuaag

SEQ ID NO: 1589051 - RNA, 19 nt, Artificial Sequence
  Description of Artificial Sequence: Synthetic oligonucleotide
acgguuacgaaaccggcag

SEQ ID NO: 1589052 - RNA, 19 nt, Artificial Sequence
  Description of Artificial Sequence: Synthetic oligonucleotide
auucuuuugagagacggca

SEQ ID NO: 1589053 - RNA, 19 nt, Artificial Sequence
  Description of Artificial Sequence: Synthetic oligonucleotide
aacaagucuuucaguacac

SEQ ID NO: 1589054 - RNA, 19 nt, Artificial Sequence
  Description of Artificial Sequence: Synthetic oligonucleotide
accagauaaauuacauggc

SEQ ID NO: 1589055 - RNA, 19 nt, Artificial Sequence
  Description of Artificial Sequence: Synthetic oligonucleotide
agaggcuacaccccaagug

SEQ ID NO: 1589056 - RNA, 19 nt, Artificial Sequence
  Description of Artificial Sequence: Synthetic oligonucleotide
agaacuacugcccuguguu

SEQ ID NO: 1589057 - RNA, 19 nt, Artificial Sequence
  Description of Artificial Sequence: Synthetic oligonucleotide
uucuaguaaucauuuagua

SEQ ID NO: 1589058 - RNA, 19 nt, Artificial Sequence
  Description of Artificial Sequence: Synthetic oligonucleotide
gaacaggcagaaaucagag

SEQ ID NO: 1589059 - RNA, 19 nt, Artificial Sequence
  Description of Artificial Sequence: Synthetic oligonucleotide
gaaaucagagcagugugac

SEQ ID NO: 1589060 - RNA, 19 nt, Artificial Sequence
  Description of Artificial Sequence: Synthetic oligonucleotide
cacuauuucgauccauggg

SEQ ID NO: 1589061 - RNA, 19 nt, Artificial Sequence
  Description of Artificial Sequence: Synthetic oligonucleotide
gagccuagaaaauaaccuc

SEQ ID NO: 1589062 - RNA, 19 nt, Artificial Sequence
  Description of Artificial Sequence: Synthetic oligonucleotide
ugaaaccuuauacuuucaa

SEQ ID NO: 1589063 - RNA, 19 nt, Artificial Sequence
  Description of Artificial Sequence: Synthetic oligonucleotide
aaguuaauaguaaggucca

SEQ ID NO: 1589064 - RNA, 19 nt, Artificial Sequence
  Description of Artificial Sequence: Synthetic oligonucleotide
uuacauggcuaauccacug

SEQ ID NO: 1589065 - RNA, 19 nt, Artificial Sequence
  Description of Artificial Sequence: Synthetic oligonucleotide
auggcuaauccacuguuca

SEQ ID NO: 1589066 - RNA, 19 nt, Artificial Sequence
  Description of Artificial Sequence: Synthetic oligonucleotide
ucaguacugagccuagaaa

SEQ ID NO: 1589067 - RNA, 19 nt, Artificial Sequence
  Description of Artificial Sequence: Synthetic oligonucleotide
ucauuaagaccagauaaau

SEQ ID NO: 1589068 - RNA, 19 nt, Artificial Sequence
  Description of Artificial Sequence: Synthetic oligonucleotide
uacugagccuagaaaauaa

SEQ ID NO: 1589069 - RNA, 19 nt, Artificial Sequence
  Description of Artificial Sequence: Synthetic oligonucleotide
ugcucgagaaacaagucuu

SEQ ID NO: 1589070 - RNA, 19 nt, Artificial Sequence
  Description of Artificial Sequence: Synthetic oligonucleotide
uacgaaaccggcagccucc

SEQ ID NO: 1589071 - RNA, 19 nt, Artificial Sequence
  Description of Artificial Sequence: Synthetic oligonucleotide
uuugcuugcuuggaggcgc

SEQ ID NO: 1589072 - RNA, 19 nt, Artificial Sequence
  Description of Artificial Sequence: Synthetic oligonucleotide
uuccguucacuccuggagc

SEQ ID NO: 1589073 - RNA, 19 nt, Artificial Sequence
  Description of Artificial Sequence: Synthetic oligonucleotide
uauucucaacacaggaaaa

SEQ ID NO: 1589074 - RNA, 19 nt, Artificial Sequence
  Description of Artificial Sequence: Synthetic oligonucleotide
uccuuugccaacacagaac

SEQ ID NO: 1589075 - RNA, 19 nt, Artificial Sequence
  Description of Artificial Sequence: Synthetic oligonucleotide
uugucagaaugugucgugg

SEQ ID NO: 1589076 - RNA, 19 nt, Artificial Sequence
  Description of Artificial Sequence: Synthetic oligonucleotide
uuauuccguucacuccugg

SEQ ID NO: 1589077 - RNA, 19 nt, Artificial Sequence
  Description of Artificial Sequence: Synthetic oligonucleotide
cagguguucacaccucucg

SEQ ID NO: 1589078 - RNA, 19 nt, Artificial Sequence
  Description of Artificial Sequence: Synthetic oligonucleotide
ugagcugguucacucuuug

SEQ ID NO: 1589079 - RNA, 19 nt, Artificial Sequence
  Description of Artificial Sequence: Synthetic oligonucleotide
aggaaauaaauuaaagauu

SEQ ID NO: 1589080 - RNA, 19 nt, Artificial Sequence
  Description of Artificial Sequence: Synthetic oligonucleotide
uucaaagacccauuaucau

SEQ ID NO: 1589081 - RNA, 19 nt, Artificial Sequence
  Description of Artificial Sequence: Synthetic oligonucleotide
augacacuuauuccguuca

SEQ ID NO: 1589082 - RNA, 19 nt, Artificial Sequence
  Description of Artificial Sequence: Synthetic oligonucleotide
uucacauguaccugcgccu

SEQ ID NO: 1589083 - RNA, 19 nt, Artificial Sequence
  Description of Artificial Sequence: Synthetic oligonucleotide
ugacuauucuuuugagaga

SEQ ID NO: 1589084 - RNA, 19 nt, Artificial Sequence
  Description of Artificial Sequence: Synthetic oligonucleotide
uguucaguacugagccuag

SEQ ID NO: 1589085 - RNA, 19 nt, Artificial Sequence
  Description of Artificial Sequence: Synthetic oligonucleotide
cacuuauuccguucacucc

SEQ ID NO: 1589086 - RNA, 19 nt, Artificial Sequence
  Description of Artificial Sequence: Synthetic oligonucleotide
cuagaaaauaaccucagau

SEQ ID NO: 1589087 - RNA, 19 nt, Artificial Sequence
  Description of Artificial Sequence: Synthetic oligonucleotide
guguugucagaaugugucg

SEQ ID NO: 1589088 - RNA, 19 nt, Artificial Sequence
  Description of Artificial Sequence: Synthetic oligonucleotide
aaguguaucuugagcuuuc

SEQ ID NO: 1589089 - RNA, 19 nt, Artificial Sequence
  Description of Artificial Sequence: Synthetic oligonucleotide
uacauggcuaauccacugu

SEQ ID NO: 1589090 - RNA, 19 nt, Artificial Sequence
  Description of Artificial Sequence: Synthetic oligonucleotide
caaagacccauuaucauua

SEQ ID NO: 1589091 - RNA, 19 nt, Artificial Sequence
  Description of Artificial Sequence: Synthetic oligonucleotide
acaaacccugccuuuaaaa

SEQ ID NO: 1589092 - RNA, 19 nt, Artificial Sequence
  Description of Artificial Sequence: Synthetic oligonucleotide
uaauaguaagguccaggua

SEQ ID NO: 1589093 - RNA, 19 nt, Artificial Sequence
  Description of Artificial Sequence: Synthetic oligonucleotide
ugagagacggcaugaaguu

SEQ ID NO: 1589094 - RNA, 19 nt, Artificial Sequence
  Description of Artificial Sequence: Synthetic oligonucleotide
uguugucagaaugugucgu

SEQ ID NO: 1589095 - RNA, 19 nt, Artificial Sequence
  Description of Artificial Sequence: Synthetic oligonucleotide
caagcgugccucuucacac

SEQ ID NO: 1589096 - RNA, 19 nt, Artificial Sequence
  Description of Artificial Sequence: Synthetic oligonucleotide
uuucacggccauauuguuc

SEQ ID NO: 1589097 - RNA, 19 nt, Artificial Sequence
  Description of Artificial Sequence: Synthetic oligonucleotide
acucgucacuauuucgauc

SEQ ID NO: 1589098 - RNA, 19 nt, Artificial Sequence
  Description of Artificial Sequence: Synthetic oligonucleotide
ucauuuaguagggaucaaa

SEQ ID NO: 1589099 - RNA, 19 nt, Artificial Sequence
  Description of Artificial Sequence: Synthetic oligonucleotide
agaacaggcagaaaucaga

SEQ ID NO: 1589100 - RNA, 19 nt, Artificial Sequence
  Description of Artificial Sequence: Synthetic oligonucleotide
cauauuguuccgcucucug

SEQ ID NO: 1589101 - RNA, 19 nt, Artificial Sequence
  Description of Artificial Sequence: Synthetic oligonucleotide
ucgugguagcuucagugcu

SEQ ID NO: 1589102 - RNA, 19 nt, Artificial Sequence
  Description of Artificial Sequence: Synthetic oligonucleotide
cuggaaggagaacuacugc

SEQ ID NO: 1589103 - RNA, 19 nt, Artificial Sequence
  Description of Artificial Sequence: Synthetic oligonucleotide
uauuucgauccaugggcga

SEQ ID NO: 1589104 - RNA, 19 nt, Artificial Sequence
  Description of Artificial Sequence: Synthetic oligonucleotide
ugaaguguaucuugagcuu

SEQ ID NO: 1589105 - RNA, 19 nt, Artificial Sequence
  Description of Artificial Sequence: Synthetic oligonucleotide
accaaaagaauuaguauuu

SEQ ID NO: 1589106 - RNA, 19 nt, Artificial Sequence
  Description of Artificial Sequence: Synthetic oligonucleotide
acugagccuagaaaauaac

SEQ ID NO: 1589107 - RNA, 19 nt, Artificial Sequence
  Description of Artificial Sequence: Synthetic oligonucleotide
uuugggcgaguccuuugcc

SEQ ID NO: 1589108 - RNA, 19 nt, Artificial Sequence
  Description of Artificial Sequence: Synthetic oligonucleotide
cucaauuccuuugucagca

SEQ ID NO: 1589109 - RNA, 19 nt, Artificial Sequence
  Description of Artificial Sequence: Synthetic oligonucleotide
caugggcgaacucuuuugc

SEQ ID NO: 1589110 - RNA, 19 nt, Artificial Sequence
  Description of Artificial Sequence: Synthetic oligonucleotide
auacucgucacuauuucga

SEQ ID NO: 1589111 - RNA, 19 nt, Artificial Sequence
  Description of Artificial Sequence: Synthetic oligonucleotide
uugugugcgugcucgagaa

SEQ ID NO: 1589112 - RNA, 19 nt, Artificial Sequence
  Description of Artificial Sequence: Synthetic oligonucleotide
guaagguccagguaauuua

SEQ ID NO: 1589113 - RNA, 19 nt, Artificial Sequence
  Description of Artificial Sequence: Synthetic oligonucleotide
uggcuaauccacuguucag

SEQ ID NO: 1589114 - RNA, 19 nt, Artificial Sequence
  Description of Artificial Sequence: Synthetic oligonucleotide
uucuuuugagagacggcau

SEQ ID NO: 1589115 - RNA, 19 nt, Artificial Sequence
  Description of Artificial Sequence: Synthetic oligonucleotide
ccugcuguaagccacuggc

SEQ ID NO: 1589116 - RNA, 19 nt, Artificial Sequence
  Description of Artificial Sequence: Synthetic oligonucleotide
uaaccucagauggaacaag

SEQ ID NO: 1589117 - RNA, 19 nt, Artificial Sequence
  Description of Artificial Sequence: Synthetic oligonucleotide
ugcgugcucgagaaacaag

SEQ ID NO: 1589118 - RNA, 19 nt, Artificial Sequence
  Description of Artificial Sequence: Synthetic oligonucleotide
uugaaaccuuauacuuuca

SEQ ID NO: 1589119 - RNA, 19 nt, Artificial Sequence
  Description of Artificial Sequence: Synthetic oligonucleotide
uggcaguuauucucaacac

SEQ ID NO: 1589120 - RNA, 19 nt, Artificial Sequence
  Description of Artificial Sequence: Synthetic oligonucleotide
uuuuaaccauaaacccuaa

SEQ ID NO: 1589121 - RNA, 19 nt, Artificial Sequence
  Description of Artificial Sequence: Synthetic oligonucleotide
ugcucauuugggcgagucc

SEQ ID NO: 1589122 - RNA, 19 nt, Artificial Sequence
  Description of Artificial Sequence: Synthetic oligonucleotide
agagacggcaugaaguuga

SEQ ID NO: 1589123 - RNA, 19 nt, Artificial Sequence
  Description of Artificial Sequence: Synthetic oligonucleotide
uccguucacuccuggagca

SEQ ID NO: 1589124 - RNA, 19 nt, Artificial Sequence
  Description of Artificial Sequence: Synthetic oligonucleotide
ugcacguugucugcgaggu

SEQ ID NO: 1589125 - RNA, 19 nt, Artificial Sequence
  Description of Artificial Sequence: Synthetic oligonucleotide
ugucagaaugugucguggu

SEQ ID NO: 1589126 - RNA, 19 nt, Artificial Sequence
  Description of Artificial Sequence: Synthetic oligonucleotide
uggcaugugccugagugug

SEQ ID NO: 1589127 - RNA, 19 nt, Artificial Sequence
  Description of Artificial Sequence: Synthetic oligonucleotide
acaagaccaagcucagcca

SEQ ID NO: 1589128 - RNA, 19 nt, Artificial Sequence
  Description of Artificial Sequence: Synthetic oligonucleotide
cacguugucugcgagguug

SEQ ID NO: 1589129 - RNA, 19 nt, Artificial Sequence
  Description of Artificial Sequence: Synthetic oligonucleotide
ugugcgugcucgagaaaca

SEQ ID NO: 1589130 - RNA, 19 nt, Artificial Sequence
  Description of Artificial Sequence: Synthetic oligonucleotide
agccuagaaaauaaccuca

SEQ ID NO: 1589131 - RNA, 19 nt, Artificial Sequence
  Description of Artificial Sequence: Synthetic oligonucleotide
ucuugagcuuucugcuugc

SEQ ID NO: 1589132 - RNA, 19 nt, Artificial Sequence
  Description of Artificial Sequence: Synthetic oligonucleotide
uauuccguucacuccugga

SEQ ID NO: 1589133 - RNA, 19 nt, Artificial Sequence
  Description of Artificial Sequence: Synthetic oligonucleotide
auaaacccuaaguuucuuu

SEQ ID NO: 1589134 - RNA, 19 nt, Artificial Sequence
  Description of Artificial Sequence: Synthetic oligonucleotide
ccucagauggaacaagacc

SEQ ID NO: 1589135 - RNA, 19 nt, Artificial Sequence
  Description of Artificial Sequence: Synthetic oligonucleotide
guaccugcgccuccggccg

SEQ ID NO: 1589136 - RNA, 19 nt, Artificial Sequence
  Description of Artificial Sequence: Synthetic oligonucleotide
guaucuugagcuuucugcu

SEQ ID NO: 1589137 - RNA, 19 nt, Artificial Sequence
  Description of Artificial Sequence: Synthetic oligonucleotide
guccagguaauuuauuuua

SEQ ID NO: 1589138 - RNA, 19 nt, Artificial Sequence
  Description of Artificial Sequence: Synthetic oligonucleotide
auuacauggcuaauccacu

SEQ ID NO: 1589139 - RNA, 19 nt, Artificial Sequence
  Description of Artificial Sequence: Synthetic oligonucleotide
gguaauuuauuuuaaccau

SEQ ID NO: 1589140 - RNA, 19 nt, Artificial Sequence
  Description of Artificial Sequence: Synthetic oligonucleotide
aaagacccauuaucauuaa

SEQ ID NO: 1589141 - RNA, 19 nt, Artificial Sequence
  Description of Artificial Sequence: Synthetic oligonucleotide
caauuccuuugucagcaac

SEQ ID NO: 1589142 - RNA, 19 nt, Artificial Sequence
  Description of Artificial Sequence: Synthetic oligonucleotide
aauccacuguucaguacug

SEQ ID NO: 1589143 - RNA, 19 nt, Artificial Sequence
  Description of Artificial Sequence: Synthetic oligonucleotide
agcgacgguuacgaaaccg

SEQ ID NO: 1589144 - RNA, 19 nt, Artificial Sequence
  Description of Artificial Sequence: Synthetic oligonucleotide
ugcgacagcuugcucauuu

SEQ ID NO: 1589145 - RNA, 19 nt, Artificial Sequence
  Description of Artificial Sequence: Synthetic oligonucleotide
aggagcgacgguuacgaaa

SEQ ID NO: 1589146 - RNA, 19 nt, Artificial Sequence
  Description of Artificial Sequence: Synthetic oligonucleotide
uggagcaguggcuggcugc

SEQ ID NO: 1589147 - RNA, 19 nt, Artificial Sequence
  Description of Artificial Sequence: Synthetic oligonucleotide
ugagugugaaugacacuua

SEQ ID NO: 1589148 - RNA, 19 nt, Artificial Sequence
  Description of Artificial Sequence: Synthetic oligonucleotide
ugacacuuauuccguucac

SEQ ID NO: 1589149 - RNA, 19 nt, Artificial Sequence
  Description of Artificial Sequence: Synthetic oligonucleotide
agcuugcucauuugggcga

SEQ ID NO: 1589150 - RNA, 19 nt, Artificial Sequence
  Description of Artificial Sequence: Synthetic oligonucleotide
aguaagguccagguaauuu

SEQ ID NO: 1589151 - RNA, 19 nt, Artificial Sequence
  Description of Artificial Sequence: Synthetic oligonucleotide
cauggcuaauccacuguuc

SEQ ID NO: 1589152 - RNA, 19 nt, Artificial Sequence
  Description of Artificial Sequence: Synthetic oligonucleotide
cuuauuccguucacuccug

SEQ ID NO: 1589153 - RNA, 19 nt, Artificial Sequence
  Description of Artificial Sequence: Synthetic oligonucleotide
ucaaaggcccaagcgugcc

SEQ ID NO: 1589154 - RNA, 19 nt, Artificial Sequence
  Description of Artificial Sequence: Synthetic oligonucleotide
gucugcgagguugugugcg

SEQ ID NO: 1589155 - RNA, 19 nt, Artificial Sequence
  Description of Artificial Sequence: Synthetic oligonucleotide
aucagagcagugugaccag

SEQ ID NO: 1589156 - RNA, 19 nt, Artificial Sequence
  Description of Artificial Sequence: Synthetic oligonucleotide
uuggaggcgcagcuuugcc

SEQ ID NO: 1589157 - RNA, 19 nt, Artificial Sequence
  Description of Artificial Sequence: Synthetic oligonucleotide
ugggcgaacucuuuugcuu

SEQ ID NO: 1589158 - RNA, 19 nt, Artificial Sequence
  Description of Artificial Sequence: Synthetic oligonucleotide
aguuaauaguaagguccag

SEQ ID NO: 1589159 - RNA, 19 nt, Artificial Sequence
  Description of Artificial Sequence: Synthetic oligonucleotide
guaagccacuggcaugugc

SEQ ID NO: 1589160 - RNA, 19 nt, Artificial Sequence
  Description of Artificial Sequence: Synthetic oligonucleotide
cuuugccaacacagaacag

SEQ ID NO: 1589161 - RNA, 19 nt, Artificial Sequence
  Description of Artificial Sequence: Synthetic oligonucleotide
cuuugcuugcuuggaggcg

SEQ ID NO: 1589162 - RNA, 19 nt, Artificial Sequence
  Description of Artificial Sequence: Synthetic oligonucleotide
uuccaaccguucauucucu

SEQ ID NO: 1589163 - RNA, 19 nt, Artificial Sequence
  Description of Artificial Sequence: Synthetic oligonucleotide
acauggcuaauccacuguu

SEQ ID NO: 1589164 - RNA, 19 nt, Artificial Sequence
  Description of Artificial Sequence: Synthetic oligonucleotide
acggccauauuguuccgcu

SEQ ID NO: 1589165 - RNA, 19 nt, Artificial Sequence
  Description of Artificial Sequence: Synthetic oligonucleotide
acggcaugaaguugauaca

SEQ ID NO: 1589166 - RNA, 19 nt, Artificial Sequence
  Description of Artificial Sequence: Synthetic oligonucleotide
uuuucacggccauauuguu

SEQ ID NO: 1589167 - RNA, 19 nt, Artificial Sequence
  Description of Artificial Sequence: Synthetic oligonucleotide
acauguaccugcgccuccg

SEQ ID NO: 1589168 - RNA, 19 nt, Artificial Sequence
  Description of Artificial Sequence: Synthetic oligonucleotide
ugcuuggaggcgcagcuuu

SEQ ID NO: 1589169 - RNA, 19 nt, Artificial Sequence
  Description of Artificial Sequence: Synthetic oligonucleotide
uacucgucacuauuucgau

SEQ ID NO: 1589170 - RNA, 19 nt, Artificial Sequence
  Description of Artificial Sequence: Synthetic oligonucleotide
gguuacgaaaccggcagcc

SEQ ID NO: 1589171 - RNA, 19 nt, Artificial Sequence
  Description of Artificial Sequence: Synthetic oligonucleotide
cagauuuaggaaauaaauu

SEQ ID NO: 1589172 - RNA, 19 nt, Artificial Sequence
  Description of Artificial Sequence: Synthetic oligonucleotide
uaucuugagcuuucugcuu

SEQ ID NO: 1589173 - RNA, 19 nt, Artificial Sequence
  Description of Artificial Sequence: Synthetic oligonucleotide
acccuaaguuucuuuuagu

SEQ ID NO: 1589174 - RNA, 19 nt, Artificial Sequence
  Description of Artificial Sequence: Synthetic oligonucleotide
acuauucuuuugagagacg

SEQ ID NO: 1589175 - RNA, 19 nt, Artificial Sequence
  Description of Artificial Sequence: Synthetic oligonucleotide
gugugcgugcucgagaaac

SEQ ID NO: 1589176 - RNA, 19 nt, Artificial Sequence
  Description of Artificial Sequence: Synthetic oligonucleotide
ugcgagguugugugcgugc

SEQ ID NO: 1589177 - RNA, 19 nt, Artificial Sequence
  Description of Artificial Sequence: Synthetic oligonucleotide
gaaggagaacuacugcccu

SEQ ID NO: 1589178 - RNA, 19 nt, Artificial Sequence
  Description of Artificial Sequence: Synthetic oligonucleotide
aggagaacuacugcccugu

SEQ ID NO: 1589179 - RNA, 19 nt, Artificial Sequence
  Description of Artificial Sequence: Synthetic oligonucleotide
gagucgccgaggaggagcg

SEQ ID NO: 1589180 - RNA, 19 nt, Artificial Sequence
  Description of Artificial Sequence: Synthetic oligonucleotide
ugggcgaguccuuugccaa

SEQ ID NO: 1589181 - RNA, 19 nt, Artificial Sequence
  Description of Artificial Sequence: Synthetic oligonucleotide
ucaguacacucaauuccuu

SEQ ID NO: 1589182 - RNA, 19 nt, Artificial Sequence
  Description of Artificial Sequence: Synthetic oligonucleotide
accugcuguaagccacugg

SEQ ID NO: 1589183 - RNA, 19 nt, Artificial Sequence
  Description of Artificial Sequence: Synthetic oligonucleotide
ggagcgacgguuacgaaac

SEQ ID NO: 1589184 - RNA, 19 nt, Artificial Sequence
  Description of Artificial Sequence: Synthetic oligonucleotide
gcuuugcuugcuuggaggc

SEQ ID NO: 1589185 - RNA, 19 nt, Artificial Sequence
  Description of Artificial Sequence: Synthetic oligonucleotide
cugcacguugucugcgagg

SEQ ID NO: 1589186 - RNA, 19 nt, Artificial Sequence
  Description of Artificial Sequence: Synthetic oligonucleotide
aacaccccauuaaacuaga

SEQ ID NO: 1589187 - RNA, 19 nt, Artificial Sequence
  Description of Artificial Sequence: Synthetic oligonucleotide
acuguucaguacugagccu

SEQ ID NO: 1589188 - RNA, 19 nt, Artificial Sequence
  Description of Artificial Sequence: Synthetic oligonucleotide
uuagugcuucaaagaccca

SEQ ID NO: 1589189 - RNA, 19 nt, Artificial Sequence
  Description of Artificial Sequence: Synthetic oligonucleotide
cauuugggcgaguccuuug

SEQ ID NO: 1589190 - RNA, 19 nt, Artificial Sequence
  Description of Artificial Sequence: Synthetic oligonucleotide
gccuccacuccuccgagcg

SEQ ID NO: 1589191 - RNA, 19 nt, Artificial Sequence
  Description of Artificial Sequence: Synthetic oligonucleotide
caaccguucauucucuucu

SEQ ID NO: 1589192 - RNA, 19 nt, Artificial Sequence
  Description of Artificial Sequence: Synthetic oligonucleotide
auuucgauccaugggcgaa

SEQ ID NO: 1589193 - RNA, 19 nt, Artificial Sequence
  Description of Artificial Sequence: Synthetic oligonucleotide
ggcaguuauucucaacaca

SEQ ID NO: 1589194 - RNA, 19 nt, Artificial Sequence
  Description of Artificial Sequence: Synthetic oligonucleotide
uuucgauccaugggcgaac

SEQ ID NO: 1589195 - RNA, 19 nt, Artificial Sequence
  Description of Artificial Sequence: Synthetic oligonucleotide
cugguucacucuuugaagu

SEQ ID NO: 1589196 - RNA, 19 nt, Artificial Sequence
  Description of Artificial Sequence: Synthetic oligonucleotide
gagagacggcaugaaguug

SEQ ID NO: 1589197 - RNA, 19 nt, Artificial Sequence
  Description of Artificial Sequence: Synthetic oligonucleotide
gacgguuacgaaaccggca

SEQ ID NO: 1589198 - RNA, 19 nt, Artificial Sequence
  Description of Artificial Sequence: Synthetic oligonucleotide
gguccauggcgccuggaag

SEQ ID NO: 1589199 - RNA, 19 nt, Artificial Sequence
  Description of Artificial Sequence: Synthetic oligonucleotide
cucgagaaacaagucuuuc

SEQ ID NO: 1589200 - RNA, 19 nt, Artificial Sequence
  Description of Artificial Sequence: Synthetic oligonucleotide
ucacauguaccugcgccuc

SEQ ID NO: 1589201 - RNA, 19 nt, Artificial Sequence
  Description of Artificial Sequence: Synthetic oligonucleotide
cuccacuccuccgagcggc

SEQ ID NO: 1589202 - RNA, 19 nt, Artificial Sequence
  Description of Artificial Sequence: Synthetic oligonucleotide
ugcgcuggcgauacucguc

SEQ ID NO: 1589203 - RNA, 19 nt, Artificial Sequence
  Description of Artificial Sequence: Synthetic oligonucleotide
cuuggaggcgcagcuuugc

SEQ ID NO: 1589204 - RNA, 19 nt, Artificial Sequence
  Description of Artificial Sequence: Synthetic oligonucleotide
ugucugcgagguugugugc

SEQ ID NO: 1589205 - RNA, 19 nt, Artificial Sequence
  Description of Artificial Sequence: Synthetic oligonucleotide
ucugcgagguugugugcgu

SEQ ID NO: 1589206 - RNA, 19 nt, Artificial Sequence
  Description of Artificial Sequence: Synthetic oligonucleotide
cucagccacugaacuggcg

SEQ ID NO: 1589207 - RNA, 19 nt, Artificial Sequence
  Description of Artificial Sequence: Synthetic oligonucleotide
caccucucgaguucagguc

SEQ ID NO: 1589208 - RNA, 19 nt, Artificial Sequence
  Description of Artificial Sequence: Synthetic oligonucleotide
ucgucacuauuucgaucca

SEQ ID NO: 1589209 - RNA, 19 nt, Artificial Sequence
  Description of Artificial Sequence: Synthetic oligonucleotide
ucacggccauauuguuccg

SEQ ID NO: 1589210 - RNA, 19 nt, Artificial Sequence
  Description of Artificial Sequence: Synthetic oligonucleotide
cauggcgccuggaaggaga

SEQ ID NO: 1589211 - RNA, 19 nt, Artificial Sequence
  Description of Artificial Sequence: Synthetic oligonucleotide
gcgacgguuacgaaaccgg

SEQ ID NO: 1589212 - RNA, 19 nt, Artificial Sequence
  Description of Artificial Sequence: Synthetic oligonucleotide
guacacucaauuccuuugu

SEQ ID NO: 1589213 - RNA, 19 nt, Artificial Sequence
  Description of Artificial Sequence: Synthetic oligonucleotide
aggaggagcgacgguuacg

SEQ ID NO: 1589214 - RNA, 19 nt, Artificial Sequence
  Description of Artificial Sequence: Synthetic oligonucleotide
agggaccugcuguaagcca

SEQ ID NO: 1589215 - RNA, 19 nt, Artificial Sequence
  Description of Artificial Sequence: Synthetic oligonucleotide
ucacaccucucgaguucag

SEQ ID NO: 1589216 - RNA, 19 nt, Artificial Sequence
  Description of Artificial Sequence: Synthetic oligonucleotide
gugcucgagaaacaagucu

SEQ ID NO: 1589217 - RNA, 19 nt, Artificial Sequence
  Description of Artificial Sequence: Synthetic oligonucleotide
ugaccagcagaggcuacac

SEQ ID NO: 1589218 - RNA, 19 nt, Artificial Sequence
  Description of Artificial Sequence: Synthetic oligonucleotide
cacauguaccugcgccucc

SEQ ID NO: 1589219 - RNA, 19 nt, Artificial Sequence
  Description of Artificial Sequence: Synthetic oligonucleotide
gaggaggagcgacgguuac

SEQ ID NO: 1589220 - RNA, 19 nt, Artificial Sequence
  Description of Artificial Sequence: Synthetic oligonucleotide
uucgauccaugggcgaacu

SEQ ID NO: 1589221 - RNA, 19 nt, Artificial Sequence
  Description of Artificial Sequence: Synthetic oligonucleotide
caagcucagccacugaacu

SEQ ID NO: 1589222 - RNA, 19 nt, Artificial Sequence
  Description of Artificial Sequence: Synthetic oligonucleotide
cucucugcgcuggcgauac

SEQ ID NO: 1589223 - RNA, 19 nt, Artificial Sequence
  Description of Artificial Sequence: Synthetic oligonucleotide
gagaacuacugcccugugu

SEQ ID NO: 1589224 - RNA, 19 nt, Artificial Sequence
  Description of Artificial Sequence: Synthetic oligonucleotide
uccgcucucugcgcuggcg

SEQ ID NO: 1589225 - RNA, 19 nt, Artificial Sequence
  Description of Artificial Sequence: Synthetic oligonucleotide
agguccauggcgccuggaa

SEQ ID NO: 1589226 - RNA, 19 nt, Artificial Sequence
  Description of Artificial Sequence: Synthetic oligonucleotide
aguccuuugccaacacaga

SEQ ID NO: 1589227 - RNA, 19 nt, Artificial Sequence
  Description of Artificial Sequence: Synthetic oligonucleotide
gacacuuauuccguucacu

SEQ ID NO: 1589228 - RNA, 19 nt, Artificial Sequence
  Description of Artificial Sequence: Synthetic oligonucleotide
cccauuaaacuagaaaaga

SEQ ID NO: 1589229 - RNA, 19 nt, Artificial Sequence
  Description of Artificial Sequence: Synthetic oligonucleotide
cauguaccugcgccuccgg

SEQ ID NO: 1589230 - RNA, 19 nt, Artificial Sequence
  Description of Artificial Sequence: Synthetic oligonucleotide
gagugugaaugacacuuau

SEQ ID NO: 1589231 - RNA, 19 nt, Artificial Sequence
  Description of Artificial Sequence: Synthetic oligonucleotide
uugcucauuugggcgaguc

SEQ ID NO: 1589232 - RNA, 19 nt, Artificial Sequence
  Description of Artificial Sequence: Synthetic oligonucleotide
guuccgcucucugcgcugg

SEQ ID NO: 1589233 - RNA, 19 nt, Artificial Sequence
  Description of Artificial Sequence: Synthetic oligonucleotide
ccguucauucucuucuuug

SEQ ID NO: 1589234 - RNA, 19 nt, Artificial Sequence
  Description of Artificial Sequence: Synthetic oligonucleotide
cucugcgcuggcgauacuc

SEQ ID NO: 1589235 - RNA, 19 nt, Artificial Sequence
  Description of Artificial Sequence: Synthetic oligonucleotide
acgaaaccggcagccuccg

SEQ ID NO: 1589236 - RNA, 19 nt, Artificial Sequence
  Description of Artificial Sequence: Synthetic oligonucleotide
gcagaggcuacaccccaag

SEQ ID NO: 1589237 - RNA, 19 nt, Artificial Sequence
  Description of Artificial Sequence: Synthetic oligonucleotide
ugugugcgugcucgagaaa

SEQ ID NO: 1589238 - RNA, 19 nt, Artificial Sequence
  Description of Artificial Sequence: Synthetic oligonucleotide
ggaggagcgacgguuacga

SEQ ID NO: 1589239 - RNA, 19 nt, Artificial Sequence
  Description of Artificial Sequence: Synthetic oligonucleotide
caugaaguugauacauuuu

SEQ ID NO: 1589240 - RNA, 19 nt, Artificial Sequence
  Description of Artificial Sequence: Synthetic oligonucleotide
gagcgacgguuacgaaacc

SEQ ID NO: 1589241 - RNA, 19 nt, Artificial Sequence
  Description of Artificial Sequence: Synthetic oligonucleotide
ccaugggcgaacucuuuug

SEQ ID NO: 1589242 - RNA, 19 nt, Artificial Sequence
  Description of Artificial Sequence: Synthetic oligonucleotide
caccagcugagggaccugc

SEQ ID NO: 1589243 - RNA, 19 nt, Artificial Sequence
  Description of Artificial Sequence: Synthetic oligonucleotide
agcgugccucuucacacuu

SEQ ID NO: 1589244 - RNA, 19 nt, Artificial Sequence
  Description of Artificial Sequence: Synthetic oligonucleotide
cccgacccgacccaggccc

SEQ ID NO: 1589245 - RNA, 19 nt, Artificial Sequence
  Description of Artificial Sequence: Synthetic oligonucleotide
cacggccauauuguuccgc

SEQ ID NO: 1589246 - RNA, 19 nt, Artificial Sequence
  Description of Artificial Sequence: Synthetic oligonucleotide
cuguaagccacuggcaugu

SEQ ID NO: 1589247 - RNA, 19 nt, Artificial Sequence
  Description of Artificial Sequence: Synthetic oligonucleotide
ccccuuggcaguuauucuc

SEQ ID NO: 1589248 - RNA, 19 nt, Artificial Sequence
  Description of Artificial Sequence: Synthetic oligonucleotide
ccuguguugucagaaugug

SEQ ID NO: 1589249 - RNA, 19 nt, Artificial Sequence
  Description of Artificial Sequence: Synthetic oligonucleotide
ggcgaacucuuuugcuuug

SEQ ID NO: 1589250 - RNA, 19 nt, Artificial Sequence
  Description of Artificial Sequence: Synthetic oligonucleotide
ucgauccaugggcgaacuc

SEQ ID NO: 1589251 - RNA, 19 nt, Artificial Sequence
  Description of Artificial Sequence: Synthetic oligonucleotide
gcaugaaguugauacauuu

SEQ ID NO: 1589252 - RNA, 19 nt, Artificial Sequence
  Description of Artificial Sequence: Synthetic oligonucleotide
uggcgauacucgucacuau

SEQ ID NO: 1589253 - RNA, 19 nt, Artificial Sequence
  Description of Artificial Sequence: Synthetic oligonucleotide
ccuuauacuuucaaguuuu

SEQ ID NO: 1589254 - RNA, 19 nt, Artificial Sequence
  Description of Artificial Sequence: Synthetic oligonucleotide
gucgccgaggaggagcgac

SEQ ID NO: 1589255 - RNA, 19 nt, Artificial Sequence
  Description of Artificial Sequence: Synthetic oligonucleotide
gaaugugucgugguagcuu

SEQ ID NO: 1589256 - RNA, 19 nt, Artificial Sequence
  Description of Artificial Sequence: Synthetic oligonucleotide
uaccugcgccuccggccgg

SEQ ID NO: 1589257 - RNA, 19 nt, Artificial Sequence
  Description of Artificial Sequence: Synthetic oligonucleotide
gguugugugcgugcucgag

SEQ ID NO: 1589258 - RNA, 19 nt, Artificial Sequence
  Description of Artificial Sequence: Synthetic oligonucleotide
gcugcacguugucugcgag

SEQ ID NO: 1589259 - RNA, 19 nt, Artificial Sequence
  Description of Artificial Sequence: Synthetic oligonucleotide
aucauuuaguagggaucaa

SEQ ID NO: 1589260 - RNA, 19 nt, Artificial Sequence
  Description of Artificial Sequence: Synthetic oligonucleotide
uaguaagguccagguaauu

SEQ ID NO: 1589261 - RNA, 19 nt, Artificial Sequence
  Description of Artificial Sequence: Synthetic oligonucleotide
ccuagaaaauaaccucaga

SEQ ID NO: 1589262 - RNA, 19 nt, Artificial Sequence
  Description of Artificial Sequence: Synthetic oligonucleotide
ccgcgagucgccgaggagg

SEQ ID NO: 1589263 - RNA, 19 nt, Artificial Sequence
  Description of Artificial Sequence: Synthetic oligonucleotide
agguugugugcgugcucga

SEQ ID NO: 1589264 - RNA, 19 nt, Artificial Sequence
  Description of Artificial Sequence: Synthetic oligonucleotide
ggcuaauccacuguucagu

SEQ ID NO: 1589265 - RNA, 19 nt, Artificial Sequence
  Description of Artificial Sequence: Synthetic oligonucleotide
aacgcccggcuaaaauuuu

SEQ ID NO: 1589266 - RNA, 19 nt, Artificial Sequence
  Description of Artificial Sequence: Synthetic oligonucleotide
uggcggugcagguguucac

SEQ ID NO: 1589267 - RNA, 19 nt, Artificial Sequence
  Description of Artificial Sequence: Synthetic oligonucleotide
ugcuugcuuggaggcgcag

SEQ ID NO: 1589268 - RNA, 19 nt, Artificial Sequence
  Description of Artificial Sequence: Synthetic oligonucleotide
ggagaacuacugcccugug

SEQ ID NO: 1589269 - RNA, 19 nt, Artificial Sequence
  Description of Artificial Sequence: Synthetic oligonucleotide
cgacgguuacgaaaccggc

SEQ ID NO: 1589270 - RNA, 19 nt, Artificial Sequence
  Description of Artificial Sequence: Synthetic oligonucleotide
gaccaagcucagccacuga

SEQ ID NO: 1589271 - RNA, 19 nt, Artificial Sequence
  Description of Artificial Sequence: Synthetic oligonucleotide
cagcccgcgagucgccgag

SEQ ID NO: 1589272 - RNA, 19 nt, Artificial Sequence
  Description of Artificial Sequence: Synthetic oligonucleotide
cgauacucgucacuauuuc

SEQ ID NO: 1589273 - RNA, 19 nt, Artificial Sequence
  Description of Artificial Sequence: Synthetic oligonucleotide
uuccgcucucugcgcuggc

SEQ ID NO: 1589274 - RNA, 19 nt, Artificial Sequence
  Description of Artificial Sequence: Synthetic oligonucleotide
cugacaggcugcacguugu

SEQ ID NO: 1589275 - RNA, 19 nt, Artificial Sequence
  Description of Artificial Sequence: Synthetic oligonucleotide
caacgcccggcuaaaauuu

SEQ ID NO: 1589276 - RNA, 19 nt, Artificial Sequence
  Description of Artificial Sequence: Synthetic oligonucleotide
gguucacucuuugaagugu

SEQ ID NO: 1589277 - RNA, 19 nt, Artificial Sequence
  Description of Artificial Sequence: Synthetic oligonucleotide
acguugucugcgagguugu

SEQ ID NO: 1589278 - RNA, 19 nt, Artificial Sequence
  Description of Artificial Sequence: Synthetic oligonucleotide
guuacgaaaccggcagccu

SEQ ID NO: 1589279 - RNA, 19 nt, Artificial Sequence
  Description of Artificial Sequence: Synthetic oligonucleotide
gauccaugggcgaacucuu

SEQ ID NO: 1589280 - RNA, 19 nt, Artificial Sequence
  Description of Artificial Sequence: Synthetic oligonucleotide
gcgcuggcgauacucguca

SEQ ID NO: 1589281 - RNA, 19 nt, Artificial Sequence
  Description of Artificial Sequence: Synthetic oligonucleotide
ccaagcgugccucuucaca

SEQ ID NO: 1589282 - RNA, 19 nt, Artificial Sequence
  Description of Artificial Sequence: Synthetic oligonucleotide
ggcccgacccgacccaggc

SEQ ID NO: 1589283 - RNA, 19 nt, Artificial Sequence
  Description of Artificial Sequence: Synthetic oligonucleotide
cuggcaugugccugagugu

SEQ ID NO: 1589284 - RNA, 19 nt, Artificial Sequence
  Description of Artificial Sequence: Synthetic oligonucleotide
cugcgagguugugugcgug

SEQ ID NO: 1589285 - RNA, 19 nt, Artificial Sequence
  Description of Artificial Sequence: Synthetic oligonucleotide
gccacugaacuggcggugc

SEQ ID NO: 1589286 - RNA, 19 nt, Artificial Sequence
  Description of Artificial Sequence: Synthetic oligonucleotide
gcgugcucgagaaacaagu

SEQ ID NO: 1589287 - RNA, 19 nt, Artificial Sequence
  Description of Artificial Sequence: Synthetic oligonucleotide
gugcgugcucgagaaacaa

SEQ ID NO: 1589288 - RNA, 19 nt, Artificial Sequence
  Description of Artificial Sequence: Synthetic oligonucleotide
uccgagcggccccgcgcgc

SEQ ID NO: 1589289 - RNA, 19 nt, Artificial Sequence
  Description of Artificial Sequence: Synthetic oligonucleotide
cuacugcccuguguuguca

SEQ ID NO: 1589290 - RNA, 19 nt, Artificial Sequence
  Description of Artificial Sequence: Synthetic oligonucleotide
cgugcucgagaaacaaguc

SEQ ID NO: 1589291 - RNA, 19 nt, Artificial Sequence
  Description of Artificial Sequence: Synthetic oligonucleotide
gcgaacucuuuugcuuugc

SEQ ID NO: 1589292 - RNA, 19 nt, Artificial Sequence
  Description of Artificial Sequence: Synthetic oligonucleotide
cgagucgccgaggaggagc

SEQ ID NO: 1589293 - RNA, 19 nt, Artificial Sequence
  Description of Artificial Sequence: Synthetic oligonucleotide
gaggagcgacgguuacgaa

SEQ ID NO: 1589294 - RNA, 19 nt, Artificial Sequence
  Description of Artificial Sequence: Synthetic oligonucleotide
ggcgauacucgucacuauu

SEQ ID NO: 1589295 - RNA, 19 nt, Artificial Sequence
  Description of Artificial Sequence: Synthetic oligonucleotide
ccauaaacccuaaguuucu

SEQ ID NO: 1589296 - RNA, 19 nt, Artificial Sequence
  Description of Artificial Sequence: Synthetic oligonucleotide
ucucugcgcuggcgauacu

SEQ ID NO: 1589297 - RNA, 19 nt, Artificial Sequence
  Description of Artificial Sequence: Synthetic oligonucleotide
auggcgccuggaaggagaa

SEQ ID NO: 1589298 - RNA, 19 nt, Artificial Sequence
  Description of Artificial Sequence: Synthetic oligonucleotide
gcaugugccugagugugaa

SEQ ID NO: 1589299 - RNA, 19 nt, Artificial Sequence
  Description of Artificial Sequence: Synthetic oligonucleotide
gcccaagcgugccucuuca

SEQ ID NO: 1589300 - RNA, 19 nt, Artificial Sequence
  Description of Artificial Sequence: Synthetic oligonucleotide
gugcagguguucacaccuc

SEQ ID NO: 1589301 - RNA, 19 nt, Artificial Sequence
  Description of Artificial Sequence: Synthetic oligonucleotide
ggcuacaccccaagugcca

SEQ ID NO: 1589302 - RNA, 19 nt, Artificial Sequence
  Description of Artificial Sequence: Synthetic oligonucleotide
gggcgaguccuuugccaac

SEQ ID NO: 1589303 - RNA, 19 nt, Artificial Sequence
  Description of Artificial Sequence: Synthetic oligonucleotide
ggcugcacguugucugcga

SEQ ID NO: 1589304 - RNA, 19 nt, Artificial Sequence
  Description of Artificial Sequence: Synthetic oligonucleotide
ugcugacaggcugcacguu

SEQ ID NO: 1589305 - RNA, 19 nt, Artificial Sequence
  Description of Artificial Sequence: Synthetic oligonucleotide
ccuccgagcggccccgcgc

SEQ ID NO: 1589306 - RNA, 19 nt, Artificial Sequence
  Description of Artificial Sequence: Synthetic oligonucleotide
cuggcugcgacagcuugcu

SEQ ID NO: 1589307 - RNA, 19 nt, Artificial Sequence
  Description of Artificial Sequence: Synthetic oligonucleotide
cccgcagcccgcgagucgc

SEQ ID NO: 1589308 - RNA, 19 nt, Artificial Sequence
  Description of Artificial Sequence: Synthetic oligonucleotide
cauaaacccuaaguuucuu

SEQ ID NO: 1589309 - RNA, 19 nt, Artificial Sequence
  Description of Artificial Sequence: Synthetic oligonucleotide
cagaggcuacaccccaagu

SEQ ID NO: 1589310 - RNA, 19 nt, Artificial Sequence
  Description of Artificial Sequence: Synthetic oligonucleotide
cucauuugggcgaguccuu

SEQ ID NO: 1589311 - RNA, 19 nt, Artificial Sequence
  Description of Artificial Sequence: Synthetic oligonucleotide
gggcgaacucuuuugcuuu

SEQ ID NO: 1589312 - RNA, 19 nt, Artificial Sequence
  Description of Artificial Sequence: Synthetic oligonucleotide
cccuguguugucagaaugu

SEQ ID NO: 1589313 - RNA, 19 nt, Artificial Sequence
  Description of Artificial Sequence: Synthetic oligonucleotide
caaaggcccaagcgugccu

SEQ ID NO: 1589314 - RNA, 19 nt, Artificial Sequence
  Description of Artificial Sequence: Synthetic oligonucleotide
gcugcgacagcuugcucau

SEQ ID NO: 1589315 - RNA, 19 nt, Artificial Sequence
  Description of Artificial Sequence: Synthetic oligonucleotide
cgguuacgaaaccggcagc

SEQ ID NO: 1589316 - RNA, 19 nt, Artificial Sequence
  Description of Artificial Sequence: Synthetic oligonucleotide
cggugcagguguucacacc

SEQ ID NO: 1589317 - RNA, 19 nt, Artificial Sequence
  Description of Artificial Sequence: Synthetic oligonucleotide
ccaacgcccggcuaaaauu

SEQ ID NO: 1589318 - RNA, 19 nt, Artificial Sequence
  Description of Artificial Sequence: Synthetic oligonucleotide
aacuggcggugcagguguu

SEQ ID NO: 1589319 - RNA, 19 nt, Artificial Sequence
  Description of Artificial Sequence: Synthetic oligonucleotide
cugcgcuggcgauacucgu

SEQ ID NO: 1589320 - RNA, 19 nt, Artificial Sequence
  Description of Artificial Sequence: Synthetic oligonucleotide
gagacggcaugaaguugau

SEQ ID NO: 1589321 - RNA, 19 nt, Artificial Sequence
  Description of Artificial Sequence: Synthetic oligonucleotide
cccaagcgugccucuucac

SEQ ID NO: 1589322 - RNA, 19 nt, Artificial Sequence
  Description of Artificial Sequence: Synthetic oligonucleotide
ccucucgaguucaggucca

SEQ ID NO: 1589323 - RNA, 19 nt, Artificial Sequence
  Description of Artificial Sequence: Synthetic oligonucleotide
ggcaugugccugaguguga

SEQ ID NO: 1589324 - RNA, 19 nt, Artificial Sequence
  Description of Artificial Sequence: Synthetic oligonucleotide
gcgauacucgucacuauuu

SEQ ID NO: 1589325 - RNA, 19 nt, Artificial Sequence
  Description of Artificial Sequence: Synthetic oligonucleotide
ccguucacuccuggagcag

SEQ ID NO: 1589326 - RNA, 19 nt, Artificial Sequence
  Description of Artificial Sequence: Synthetic oligonucleotide
ggcaugaaguugauacauu

SEQ ID NO: 1589327 - RNA, 19 nt, Artificial Sequence
  Description of Artificial Sequence: Synthetic oligonucleotide
ccgacccgacccaggcccc

SEQ ID NO: 1589328 - RNA, 19 nt, Artificial Sequence
  Description of Artificial Sequence: Synthetic oligonucleotide
agucgccgaggaggagcga

SEQ ID NO: 1589329 - RNA, 19 nt, Artificial Sequence
  Description of Artificial Sequence: Synthetic oligonucleotide
cgccgaggaggagcgacgg

SEQ ID NO: 1589330 - RNA, 19 nt, Artificial Sequence
  Description of Artificial Sequence: Synthetic oligonucleotide
caugugccugagugugaau

SEQ ID NO: 1589331 - RNA, 19 nt, Artificial Sequence
  Description of Artificial Sequence: Synthetic oligonucleotide
gcccgcgagucgccgagga

SEQ ID NO: 1589332 - RNA, 19 nt, Artificial Sequence
  Description of Artificial Sequence: Synthetic oligonucleotide
cccgcgagucgccgaggag

SEQ ID NO: 1589333 - RNA, 19 nt, Artificial Sequence
  Description of Artificial Sequence: Synthetic oligonucleotide
gcagcccgcgagucgccga

SEQ ID NO: 1589334 - RNA, 19 nt, Artificial Sequence
  Description of Artificial Sequence: Synthetic oligonucleotide
cgcgagucgccgaggagga

SEQ ID NO: 1589335 - RNA, 19 nt, Artificial Sequence
  Description of Artificial Sequence: Synthetic oligonucleotide
ccauggcgccuggaaggag

SEQ ID NO: 1589336 - RNA, 19 nt, Artificial Sequence
  Description of Artificial Sequence: Synthetic oligonucleotide
cccaggcggccuccacucc

SEQ ID NO: 1589337 - RNA, 19 nt, Artificial Sequence
  Description of Artificial Sequence: Synthetic oligonucleotide
cgagguugugugcgugcuc

SEQ ID NO: 1589338 - RNA, 19 nt, Artificial Sequence
  Description of Artificial Sequence: Synthetic oligonucleotide
gagcggccccgcgcgccgc

SEQ ID NO: 1589339 - RNA, 19 nt, Artificial Sequence
  Description of Artificial Sequence: Synthetic oligonucleotide
gcucgagaaacaagucuuu

SEQ ID NO: 1589340 - RNA, 19 nt, Artificial Sequence
  Description of Artificial Sequence: Synthetic oligonucleotide
gcgagguugugugcgugcu

SEQ ID NO: 1589341 - RNA, 19 nt, Artificial Sequence
  Description of Artificial Sequence: Synthetic oligonucleotide
cgagcggccccgcgcgccg

SEQ ID NO: 1589342 - RNA, 19 nt, Artificial Sequence
  Description of Artificial Sequence: Synthetic oligonucleotide
cuugcucauuugggcgagu

SEQ ID NO: 1589343 - RNA, 19 nt, Artificial Sequence
  Description of Artificial Sequence: Synthetic oligonucleotide
ccauauuguuccgcucucu

SEQ ID NO: 1589344 - RNA, 19 nt, Artificial Sequence
  Description of Artificial Sequence: Synthetic oligonucleotide
gcgagucgccgaggaggag

SEQ ID NO: 1589345 - RNA, 19 nt, Artificial Sequence
  Description of Artificial Sequence: Synthetic oligonucleotide
gcggcccgacccgacccag

SEQ ID NO: 1589346 - RNA, 19 nt, Artificial Sequence
  Description of Artificial Sequence: Synthetic oligonucleotide
cggcaugaaguugauacau

SEQ ID NO: 1589347 - RNA, 19 nt, Artificial Sequence
  Description of Artificial Sequence: Synthetic oligonucleotide
cgaaaccggcagccuccgc

SEQ ID NO: 1589348 - RNA, 19 nt, Artificial Sequence
  Description of Artificial Sequence: Synthetic oligonucleotide
ccgcagcccgcgagucgcc

SEQ ID NO: 1589349 - RNA, 19 nt, Artificial Sequence
  Description of Artificial Sequence: Synthetic oligonucleotide
cguugucugcgagguugug

SEQ ID NO: 1589350 - RNA, 19 nt, Artificial Sequence
  Description of Artificial Sequence: Synthetic oligonucleotide
cacuggcaugugccugagu

SEQ ID NO: 1589351 - RNA, 19 nt, Artificial Sequence
  Description of Artificial Sequence: Synthetic oligonucleotide
ccaggcggccuccacuccu

SEQ ID NO: 1589352 - RNA, 19 nt, Artificial Sequence
  Description of Artificial Sequence: Synthetic oligonucleotide
cgcagcccgcgagucgccg

SEQ ID NO: 1589353 - RNA, 19 nt, Artificial Sequence
  Description of Artificial Sequence: Synthetic oligonucleotide
cgacccgacccaggccccg

SEQ ID NO: 1589354 - RNA, 19 nt, Artificial Sequence
  Description of Artificial Sequence: Synthetic oligonucleotide
cggccggcccgcccgcccc

SEQ ID NO: 1589355 - RNA, 19 nt, Artificial Sequence
  Description of Artificial Sequence: Synthetic oligonucleotide
cgucacuauuucgauccau

SEQ ID NO: 1589356 - RNA, 19 nt, Artificial Sequence
  Description of Artificial Sequence: Synthetic oligonucleotide
cgcgcgccgcggcccgacc

SEQ ID NO: 1589357 - RNA, 19 nt, Artificial Sequence
  Description of Artificial Sequence: Synthetic oligonucleotide
gcgccgcggcccgacccga

SEQ ID NO: 1589358 - RNA, 19 nt, Artificial Sequence
  Description of Artificial Sequence: Synthetic oligonucleotide
cccgcgcgccgcggcccga

SEQ ID NO: 1589359 - RNA, 19 nt, Artificial Sequence
  Description of Artificial Sequence: Synthetic oligonucleotide
aagacuaucacccaguagg

SEQ ID NO: 1589360 - RNA, 19 nt, Artificial Sequence
  Description of Artificial Sequence: Synthetic oligonucleotide
aaauccacaauuuagauca

SEQ ID NO: 1589361 - RNA, 19 nt, Artificial Sequence
  Description of Artificial Sequence: Synthetic oligonucleotide
auugacauaacccuuauac

SEQ ID NO: 1589362 - RNA, 19 nt, Artificial Sequence
  Description of Artificial Sequence: Synthetic oligonucleotide
auagaaaauacaucuaccc

SEQ ID NO: 1589363 - RNA, 19 nt, Artificial Sequence
  Description of Artificial Sequence: Synthetic oligonucleotide
aaauacaucuacccgaugg

SEQ ID NO: 1589364 - RNA, 19 nt, Artificial Sequence
  Description of Artificial Sequence: Synthetic oligonucleotide
aaaucuauauguugaaaac

SEQ ID NO: 1589365 - RNA, 19 nt, Artificial Sequence
  Description of Artificial Sequence: Synthetic oligonucleotide
uuuguuaauaaacacuuug

SEQ ID NO: 1589366 - RNA, 19 nt, Artificial Sequence
  Description of Artificial Sequence: Synthetic oligonucleotide
agaucauauagucugauuc

SEQ ID NO: 1589367 - RNA, 19 nt, Artificial Sequence
  Description of Artificial Sequence: Synthetic oligonucleotide
aauacaucuacccgauggc

SEQ ID NO: 1589368 - RNA, 19 nt, Artificial Sequence
  Description of Artificial Sequence: Synthetic oligonucleotide
aacuuuguuagauuuagug

SEQ ID NO: 1589369 - RNA, 19 nt, Artificial Sequence
  Description of Artificial Sequence: Synthetic oligonucleotide
ucugagaucauauagucug

SEQ ID NO: 1589370 - RNA, 19 nt, Artificial Sequence
  Description of Artificial Sequence: Synthetic oligonucleotide
uuacauagaaacauugugc

SEQ ID NO: 1589371 - RNA, 19 nt, Artificial Sequence
  Description of Artificial Sequence: Synthetic oligonucleotide
auauuuaucuucugaaccg

SEQ ID NO: 1589372 - RNA, 19 nt, Artificial Sequence
  Description of Artificial Sequence: Synthetic oligonucleotide
uuuagagcuagaaacaaga

SEQ ID NO: 1589373 - RNA, 19 nt, Artificial Sequence
  Description of Artificial Sequence: Synthetic oligonucleotide
ucagucaaaagauaccacg

SEQ ID NO: 1589374 - RNA, 19 nt, Artificial Sequence
  Description of Artificial Sequence: Synthetic oligonucleotide
agugcauguaaccaaaagg

SEQ ID NO: 1589375 - RNA, 19 nt, Artificial Sequence
  Description of Artificial Sequence: Synthetic oligonucleotide
uauagaaacuuacugauau

SEQ ID NO: 1589376 - RNA, 19 nt, Artificial Sequence
  Description of Artificial Sequence: Synthetic oligonucleotide
auugaaaaccuauauaaca

SEQ ID NO: 1589377 - RNA, 19 nt, Artificial Sequence
  Description of Artificial Sequence: Synthetic oligonucleotide
caaauuaagauacaguuuc

SEQ ID NO: 1589378 - RNA, 19 nt, Artificial Sequence
  Description of Artificial Sequence: Synthetic oligonucleotide
agaucguacauguauuugc

SEQ ID NO: 1589379 - RNA, 19 nt, Artificial Sequence
  Description of Artificial Sequence: Synthetic oligonucleotide
uauguugaaaacagcaaag

SEQ ID NO: 1589380 - RNA, 19 nt, Artificial Sequence
  Description of Artificial Sequence: Synthetic oligonucleotide
aauaauucagucaaaagau

SEQ ID NO: 1589381 - RNA, 19 nt, Artificial Sequence
  Description of Artificial Sequence: Synthetic oligonucleotide
agauuuagugcauguaacc

SEQ ID NO: 1589382 - RNA, 19 nt, Artificial Sequence
  Description of Artificial Sequence: Synthetic oligonucleotide
uucugaaccgcuaacgagg

SEQ ID NO: 1589383 - RNA, 19 nt, Artificial Sequence
  Description of Artificial Sequence: Synthetic oligonucleotide
aaguaaagaauaaauccac

SEQ ID NO: 1589384 - RNA, 19 nt, Artificial Sequence
  Description of Artificial Sequence: Synthetic oligonucleotide
aaaguaaagaauaaaucca

SEQ ID NO: 1589385 - RNA, 19 nt, Artificial Sequence
  Description of Artificial Sequence: Synthetic oligonucleotide
uuuaauaccuucccagaag

SEQ ID NO: 1589386 - RNA, 19 nt, Artificial Sequence
  Description of Artificial Sequence: Synthetic oligonucleotide
aauucagucaaaagauacc

SEQ ID NO: 1589387 - RNA, 19 nt, Artificial Sequence
  Description of Artificial Sequence: Synthetic oligonucleotide
auaacaaucaaacuuggau

SEQ ID NO: 1589388 - RNA, 19 nt, Artificial Sequence
  Description of Artificial Sequence: Synthetic oligonucleotide
auuucugauacauauagaa

SEQ ID NO: 1589389 - RNA, 19 nt, Artificial Sequence
  Description of Artificial Sequence: Synthetic oligonucleotide
aaauugagaaauuuauaaa

SEQ ID NO: 1589390 - RNA, 19 nt, Artificial Sequence
  Description of Artificial Sequence: Synthetic oligonucleotide
aaguaaacuugcuuagguc

SEQ ID NO: 1589391 - RNA, 19 nt, Artificial Sequence
  Description of Artificial Sequence: Synthetic oligonucleotide
aagucauuacgaucucucc

SEQ ID NO: 1589392 - RNA, 19 nt, Artificial Sequence
  Description of Artificial Sequence: Synthetic oligonucleotide
ucuaguagaucguacaugu

SEQ ID NO: 1589393 - RNA, 19 nt, Artificial Sequence
  Description of Artificial Sequence: Synthetic oligonucleotide
acuaucacccaguaggagg

SEQ ID NO: 1589394 - RNA, 19 nt, Artificial Sequence
  Description of Artificial Sequence: Synthetic oligonucleotide
acauauagaaacuuacuga

SEQ ID NO: 1589395 - RNA, 19 nt, Artificial Sequence
  Description of Artificial Sequence: Synthetic oligonucleotide
uuuuaacugagcaaagccu

SEQ ID NO: 1589396 - RNA, 19 nt, Artificial Sequence
  Description of Artificial Sequence: Synthetic oligonucleotide
uacauagaaacauugugcu

SEQ ID NO: 1589397 - RNA, 19 nt, Artificial Sequence
  Description of Artificial Sequence: Synthetic oligonucleotide
cuauugaaaaccuauauaa

SEQ ID NO: 1589398 - RNA, 19 nt, Artificial Sequence
  Description of Artificial Sequence: Synthetic oligonucleotide
cauuaugugcuuuaauacc

SEQ ID NO: 1589399 - RNA, 19 nt, Artificial Sequence
  Description of Artificial Sequence: Synthetic oligonucleotide
acaaaguaaagaauaaauc

SEQ ID NO: 1589400 - RNA, 19 nt, Artificial Sequence
  Description of Artificial Sequence: Synthetic oligonucleotide
cauguaaccaaaaggcacg

SEQ ID NO: 1589401 - RNA, 19 nt, Artificial Sequence
  Description of Artificial Sequence: Synthetic oligonucleotide
uuugagguuaccaguaucu

SEQ ID NO: 1589402 - RNA, 19 nt, Artificial Sequence
  Description of Artificial Sequence: Synthetic oligonucleotide
acauaaaacucuaugcucg

SEQ ID NO: 1589403 - RNA, 19 nt, Artificial Sequence
  Description of Artificial Sequence: Synthetic oligonucleotide
ugugauuaauauauuaaua

SEQ ID NO: 1589404 - RNA, 19 nt, Artificial Sequence
  Description of Artificial Sequence: Synthetic oligonucleotide
cuuuguuagauuuagugca

SEQ ID NO: 1589405 - RNA, 19 nt, Artificial Sequence
  Description of Artificial Sequence: Synthetic oligonucleotide
cauagaaaauacaucuacc

SEQ ID NO: 1589406 - RNA, 19 nt, Artificial Sequence
  Description of Artificial Sequence: Synthetic oligonucleotide
uguguuaucugucuucaca

SEQ ID NO: 1589407 - RNA, 19 nt, Artificial Sequence
  Description of Artificial Sequence: Synthetic oligonucleotide
uuagcaugaaacacuauaa

SEQ ID NO: 1589408 - RNA, 19 nt, Artificial Sequence
  Description of Artificial Sequence: Synthetic oligonucleotide
uggauaaagaaaagaauuc

SEQ ID NO: 1589409 - RNA, 19 nt, Artificial Sequence
  Description of Artificial Sequence: Synthetic oligonucleotide
uuaauaccuucccagaagu

SEQ ID NO: 1589410 - RNA, 19 nt, Artificial Sequence
  Description of Artificial Sequence: Synthetic oligonucleotide
gaaacauugugcuccagug

SEQ ID NO: 1589411 - RNA, 19 nt, Artificial Sequence
  Description of Artificial Sequence: Synthetic oligonucleotide
ucugauacauauagaaacu

SEQ ID NO: 1589412 - RNA, 19 nt, Artificial Sequence
  Description of Artificial Sequence: Synthetic oligonucleotide
uaugguauuucaaaugcuc

SEQ ID NO: 1589413 - RNA, 19 nt, Artificial Sequence
  Description of Artificial Sequence: Synthetic oligonucleotide
ucauauagucugauucugg

SEQ ID NO: 1589414 - RNA, 19 nt, Artificial Sequence
  Description of Artificial Sequence: Synthetic oligonucleotide
caaauugagaaauuuauaa

SEQ ID NO: 1589415 - RNA, 19 nt, Artificial Sequence
  Description of Artificial Sequence: Synthetic oligonucleotide
aaaccauuuacacaugguu

SEQ ID NO: 1589416 - RNA, 19 nt, Artificial Sequence
  Description of Artificial Sequence: Synthetic oligonucleotide
aaucuauauguugaaaaca

SEQ ID NO: 1589417 - RNA, 19 nt, Artificial Sequence
  Description of Artificial Sequence: Synthetic oligonucleotide
uauugaaaaccuauauaac

SEQ ID NO: 1589418 - RNA, 19 nt, Artificial Sequence
  Description of Artificial Sequence: Synthetic oligonucleotide
uauauguugaaaacagcaa

SEQ ID NO: 1589419 - RNA, 19 nt, Artificial Sequence
  Description of Artificial Sequence: Synthetic oligonucleotide
uuucucagauggcauaucc

SEQ ID NO: 1589420 - RNA, 19 nt, Artificial Sequence
  Description of Artificial Sequence: Synthetic oligonucleotide
ugguaaguacuccagauau

SEQ ID NO: 1589421 - RNA, 19 nt, Artificial Sequence
  Description of Artificial Sequence: Synthetic oligonucleotide
guaaguaaagucauggcug

SEQ ID NO: 1589422 - RNA, 19 nt, Artificial Sequence
  Description of Artificial Sequence: Synthetic oligonucleotide
agucauuugagguuaccag

SEQ ID NO: 1589423 - RNA, 19 nt, Artificial Sequence
  Description of Artificial Sequence: Synthetic oligonucleotide
uggauugggagcaaagaug

SEQ ID NO: 1589424 - RNA, 19 nt, Artificial Sequence
  Description of Artificial Sequence: Synthetic oligonucleotide
aaagucauggcugaaacuu

SEQ ID NO: 1589425 - RNA, 19 nt, Artificial Sequence
  Description of Artificial Sequence: Synthetic oligonucleotide
auauccaagacauaacaau

SEQ ID NO: 1589426 - RNA, 19 nt, Artificial Sequence
  Description of Artificial Sequence: Synthetic oligonucleotide
ugguuauugaccuauugaa

SEQ ID NO: 1589427 - RNA, 19 nt, Artificial Sequence
  Description of Artificial Sequence: Synthetic oligonucleotide
uuaacugagcaaagccugg

SEQ ID NO: 1589428 - RNA, 19 nt, Artificial Sequence
  Description of Artificial Sequence: Synthetic oligonucleotide
agguaaguaaagucauggc

SEQ ID NO: 1589429 - RNA, 19 nt, Artificial Sequence
  Description of Artificial Sequence: Synthetic oligonucleotide
ugacauaacccuuauacuu

SEQ ID NO: 1589430 - RNA, 19 nt, Artificial Sequence
  Description of Artificial Sequence: Synthetic oligonucleotide
uaaacacuuugauugcucc

SEQ ID NO: 1589431 - RNA, 19 nt, Artificial Sequence
  Description of Artificial Sequence: Synthetic oligonucleotide
aacgagguaaguaaaguca

SEQ ID NO: 1589432 - RNA, 19 nt, Artificial Sequence
  Description of Artificial Sequence: Synthetic oligonucleotide
cugacugaaguaaacuugc

SEQ ID NO: 1589433 - RNA, 19 nt, Artificial Sequence
  Description of Artificial Sequence: Synthetic oligonucleotide
aauucuuuacauagaaaca

SEQ ID NO: 1589434 - RNA, 19 nt, Artificial Sequence
  Description of Artificial Sequence: Synthetic oligonucleotide
aacaacugcauuaugugcu

SEQ ID NO: 1589435 - RNA, 19 nt, Artificial Sequence
  Description of Artificial Sequence: Synthetic oligonucleotide
acuauaauacuuuucucau

SEQ ID NO: 1589436 - RNA, 19 nt, Artificial Sequence
  Description of Artificial Sequence: Synthetic oligonucleotide
uaucuuauuuucuccaggu

SEQ ID NO: 1589437 - RNA, 19 nt, Artificial Sequence
  Description of Artificial Sequence: Synthetic oligonucleotide
uaguagaucguacauguau

SEQ ID NO: 1589438 - RNA, 19 nt, Artificial Sequence
  Description of Artificial Sequence: Synthetic oligonucleotide
aaugugccauaaccuagac

SEQ ID NO: 1589439 - RNA, 19 nt, Artificial Sequence
  Description of Artificial Sequence: Synthetic oligonucleotide
uagauuuagugcauguaac

SEQ ID NO: 1589440 - RNA, 19 nt, Artificial Sequence
  Description of Artificial Sequence: Synthetic oligonucleotide
auaaccuagacuguuuauc

SEQ ID NO: 1589441 - RNA, 19 nt, Artificial Sequence
  Description of Artificial Sequence: Synthetic oligonucleotide
auaauuccaaauuaagaua

SEQ ID NO: 1589442 - RNA, 19 nt, Artificial Sequence
  Description of Artificial Sequence: Synthetic oligonucleotide
guuauugaccuauugaaaa

SEQ ID NO: 1589443 - RNA, 19 nt, Artificial Sequence
  Description of Artificial Sequence: Synthetic oligonucleotide
cuucccagaagucauuacg

SEQ ID NO: 1589444 - RNA, 19 nt, Artificial Sequence
  Description of Artificial Sequence: Synthetic oligonucleotide
aaaaucuuguccccaaauu

SEQ ID NO: 1589445 - RNA, 19 nt, Artificial Sequence
  Description of Artificial Sequence: Synthetic oligonucleotide
uuugauugcuccagugaag

SEQ ID NO: 1589446 - RNA, 19 nt, Artificial Sequence
  Description of Artificial Sequence: Synthetic oligonucleotide
uccagguaaagguucaaug

SEQ ID NO: 1589447 - RNA, 19 nt, Artificial Sequence
  Description of Artificial Sequence: Synthetic oligonucleotide
uuacgaucucuccugacug

SEQ ID NO: 1589448 - RNA, 19 nt, Artificial Sequence
  Description of Artificial Sequence: Synthetic oligonucleotide
uuauugaccuauugaaaac

SEQ ID NO: 1589449 - RNA, 19 nt, Artificial Sequence
  Description of Artificial Sequence: Synthetic oligonucleotide
ugaccuauugaaaaccuau

SEQ ID NO: 1589450 - RNA, 19 nt, Artificial Sequence
  Description of Artificial Sequence: Synthetic oligonucleotide
ugcgcccucuaguagaucg

SEQ ID NO: 1589451 - RNA, 19 nt, Artificial Sequence
  Description of Artificial Sequence: Synthetic oligonucleotide
uaaauccacaauuuagauc

SEQ ID NO: 1589452 - RNA, 19 nt, Artificial Sequence
  Description of Artificial Sequence: Synthetic oligonucleotide
acaauaccaguagaugugc

SEQ ID NO: 1589453 - RNA, 19 nt, Artificial Sequence
  Description of Artificial Sequence: Synthetic oligonucleotide
agacuguuuauccauagaa

SEQ ID NO: 1589454 - RNA, 19 nt, Artificial Sequence
  Description of Artificial Sequence: Synthetic oligonucleotide
auaccaguagaugugcuac

SEQ ID NO: 1589455 - RNA, 19 nt, Artificial Sequence
  Description of Artificial Sequence: Synthetic oligonucleotide
agagcuagaaacaagacua

SEQ ID NO: 1589456 - RNA, 19 nt, Artificial Sequence
  Description of Artificial Sequence: Synthetic oligonucleotide
uuccaaauuaagauacagu

SEQ ID NO: 1589457 - RNA, 19 nt, Artificial Sequence
  Description of Artificial Sequence: Synthetic oligonucleotide
aguaucuuauuuucuccag

SEQ ID NO: 1589458 - RNA, 19 nt, Artificial Sequence
  Description of Artificial Sequence: Synthetic oligonucleotide
guaucuuauuuucuccagg

SEQ ID NO: 1589459 - RNA, 19 nt, Artificial Sequence
  Description of Artificial Sequence: Synthetic oligonucleotide
auggcagugaacaaaaucu

SEQ ID NO: 1589460 - RNA, 19 nt, Artificial Sequence
  Description of Artificial Sequence: Synthetic oligonucleotide
auuugagguuaccaguauc

SEQ ID NO: 1589461 - RNA, 19 nt, Artificial Sequence
  Description of Artificial Sequence: Synthetic oligonucleotide
uacaucuacccgauggcag

SEQ ID NO: 1589462 - RNA, 19 nt, Artificial Sequence
  Description of Artificial Sequence: Synthetic oligonucleotide
gaucguacauguauuugcg

SEQ ID NO: 1589463 - RNA, 19 nt, Artificial Sequence
  Description of Artificial Sequence: Synthetic oligonucleotide
agugaacaaaaucuauaug

SEQ ID NO: 1589464 - RNA, 19 nt, Artificial Sequence
  Description of Artificial Sequence: Synthetic oligonucleotide
uccacaauuuagaucacaa

SEQ ID NO: 1589465 - RNA, 19 nt, Artificial Sequence
  Description of Artificial Sequence: Synthetic oligonucleotide
ugcauguaaccaaaaggca

SEQ ID NO: 1589466 - RNA, 19 nt, Artificial Sequence
  Description of Artificial Sequence: Synthetic oligonucleotide
ucuucugaaccgcuaacga

SEQ ID NO: 1589467 - RNA, 19 nt, Artificial Sequence
  Description of Artificial Sequence: Synthetic oligonucleotide
aguaggaggccaaaagagc

SEQ ID NO: 1589468 - RNA, 19 nt, Artificial Sequence
  Description of Artificial Sequence: Synthetic oligonucleotide
auguugaaaacagcaaagg

SEQ ID NO: 1589469 - RNA, 19 nt, Artificial Sequence
  Description of Artificial Sequence: Synthetic oligonucleotide
aaagguucaaugccaguaa

SEQ ID NO: 1589470 - RNA, 19 nt, Artificial Sequence
  Description of Artificial Sequence: Synthetic oligonucleotide
ugauacauauagaaacuua

SEQ ID NO: 1589471 - RNA, 19 nt, Artificial Sequence
  Description of Artificial Sequence: Synthetic oligonucleotide
auaaauccacaauuuagau

SEQ ID NO: 1589472 - RNA, 19 nt, Artificial Sequence
  Description of Artificial Sequence: Synthetic oligonucleotide
ugguauuucaaaugcucug

SEQ ID NO: 1589473 - RNA, 19 nt, Artificial Sequence
  Description of Artificial Sequence: Synthetic oligonucleotide
cagguaaagguucaaugcc

SEQ ID NO: 1589474 - RNA, 19 nt, Artificial Sequence
  Description of Artificial Sequence: Synthetic oligonucleotide
auuacgaucucuccugacu

SEQ ID NO: 1589475 - RNA, 19 nt, Artificial Sequence
  Description of Artificial Sequence: Synthetic oligonucleotide
gauggcagugaacaaaauc

SEQ ID NO: 1589476 - RNA, 19 nt, Artificial Sequence
  Description of Artificial Sequence: Synthetic oligonucleotide
cugaaguaaacuugcuuag

SEQ ID NO: 1589477 - RNA, 19 nt, Artificial Sequence
  Description of Artificial Sequence: Synthetic oligonucleotide
cuaucacccaguaggaggc

SEQ ID NO: 1589478 - RNA, 19 nt, Artificial Sequence
  Description of Artificial Sequence: Synthetic oligonucleotide
uacauguauuugcguaugg

SEQ ID NO: 1589479 - RNA, 19 nt, Artificial Sequence
  Description of Artificial Sequence: Synthetic oligonucleotide
auucagucaaaagauacca

SEQ ID NO: 1589480 - RNA, 19 nt, Artificial Sequence
  Description of Artificial Sequence: Synthetic oligonucleotide
auauagucugauucuggag

SEQ ID NO: 1589481 - RNA, 19 nt, Artificial Sequence
  Description of Artificial Sequence: Synthetic oligonucleotide
agacaguagaacuucugug

SEQ ID NO: 1589482 - RNA, 19 nt, Artificial Sequence
  Description of Artificial Sequence: Synthetic oligonucleotide
ucucagauggcauauccaa

SEQ ID NO: 1589483 - RNA, 19 nt, Artificial Sequence
  Description of Artificial Sequence: Synthetic oligonucleotide
acacuauaauacuuuucuc

SEQ ID NO: 1589484 - RNA, 19 nt, Artificial Sequence
  Description of Artificial Sequence: Synthetic oligonucleotide
cauaaaacucuaugcucgg

SEQ ID NO: 1589485 - RNA, 19 nt, Artificial Sequence
  Description of Artificial Sequence: Synthetic oligonucleotide
ugaaguaaacuugcuuagg

SEQ ID NO: 1589486 - RNA, 19 nt, Artificial Sequence
  Description of Artificial Sequence: Synthetic oligonucleotide
uugacauaacccuuauacu

SEQ ID NO: 1589487 - RNA, 19 nt, Artificial Sequence
  Description of Artificial Sequence: Synthetic oligonucleotide
gucauuacgaucucuccug

SEQ ID NO: 1589488 - RNA, 19 nt, Artificial Sequence
  Description of Artificial Sequence: Synthetic oligonucleotide
auuaugugcuuuaauaccu

SEQ ID NO: 1589489 - RNA, 19 nt, Artificial Sequence
  Description of Artificial Sequence: Synthetic oligonucleotide
aacccuuauacuucaugga

SEQ ID NO: 1589490 - RNA, 19 nt, Artificial Sequence
  Description of Artificial Sequence: Synthetic oligonucleotide
cacaauaccaguagaugug

SEQ ID NO: 1589491 - RNA, 19 nt, Artificial Sequence
  Description of Artificial Sequence: Synthetic oligonucleotide
auaauacuuuucucauuuc

SEQ ID NO: 1589492 - RNA, 19 nt, Artificial Sequence
  Description of Artificial Sequence: Synthetic oligonucleotide
uuagagcuagaaacaagac

SEQ ID NO: 1589493 - RNA, 19 nt, Artificial Sequence
  Description of Artificial Sequence: Synthetic oligonucleotide
acauagaaacauugugcuc

SEQ ID NO: 1589494 - RNA, 19 nt, Artificial Sequence
  Description of Artificial Sequence: Synthetic oligonucleotide
ugcugcuauugacauaacc

SEQ ID NO: 1589495 - RNA, 19 nt, Artificial Sequence
  Description of Artificial Sequence: Synthetic oligonucleotide
cuuccaaccuuguugcgcc

SEQ ID NO: 1589496 - RNA, 19 nt, Artificial Sequence
  Description of Artificial Sequence: Synthetic oligonucleotide
ggauugggagcaaagaugg

SEQ ID NO: 1589497 - RNA, 19 nt, Artificial Sequence
  Description of Artificial Sequence: Synthetic oligonucleotide
aauaccaguagaugugcua

SEQ ID NO: 1589498 - RNA, 19 nt, Artificial Sequence
  Description of Artificial Sequence: Synthetic oligonucleotide
uuaucuucugaaccgcuaa

SEQ ID NO: 1589499 - RNA, 19 nt, Artificial Sequence
  Description of Artificial Sequence: Synthetic oligonucleotide
uauuuaucuucugaaccgc

SEQ ID NO: 1589500 - RNA, 19 nt, Artificial Sequence
  Description of Artificial Sequence: Synthetic oligonucleotide
accauuuacacaugguuau

SEQ ID NO: 1589501 - RNA, 19 nt, Artificial Sequence
  Description of Artificial Sequence: Synthetic oligonucleotide
ucauuugagguuaccagua

SEQ ID NO: 1589502 - RNA, 19 nt, Artificial Sequence
  Description of Artificial Sequence: Synthetic oligonucleotide
agaaaugugccauaaccua

SEQ ID NO: 1589503 - RNA, 19 nt, Artificial Sequence
  Description of Artificial Sequence: Synthetic oligonucleotide
uaacgagguaaguaaaguc

SEQ ID NO: 1589504 - RNA, 19 nt, Artificial Sequence
  Description of Artificial Sequence: Synthetic oligonucleotide
auaacccuuauacuucaug

SEQ ID NO: 1589505 - RNA, 19 nt, Artificial Sequence
  Description of Artificial Sequence: Synthetic oligonucleotide
guuagcaugaaacacuaua

SEQ ID NO: 1589506 - RNA, 19 nt, Artificial Sequence
  Description of Artificial Sequence: Synthetic oligonucleotide
gauuuagugcauguaacca

SEQ ID NO: 1589507 - RNA, 19 nt, Artificial Sequence
  Description of Artificial Sequence: Synthetic oligonucleotide
cuugcuuaggucaugguaa

SEQ ID NO: 1589508 - RNA, 19 nt, Artificial Sequence
  Description of Artificial Sequence: Synthetic oligonucleotide
ugaaccgcuaacgagguaa

SEQ ID NO: 1589509 - RNA, 19 nt, Artificial Sequence
  Description of Artificial Sequence: Synthetic oligonucleotide
uacuucauggacagugaca

SEQ ID NO: 1589510 - RNA, 19 nt, Artificial Sequence
  Description of Artificial Sequence: Synthetic oligonucleotide
uggcugauguaacaacugc

SEQ ID NO: 1589511 - RNA, 19 nt, Artificial Sequence
  Description of Artificial Sequence: Synthetic oligonucleotide
uaaagguucaaugccagua

SEQ ID NO: 1589512 - RNA, 19 nt, Artificial Sequence
  Description of Artificial Sequence: Synthetic oligonucleotide
cuucugaaccgcuaacgag

SEQ ID NO: 1589513 - RNA, 19 nt, Artificial Sequence
  Description of Artificial Sequence: Synthetic oligonucleotide
accuauugaaaaccuauau

SEQ ID NO: 1589514 - RNA, 19 nt, Artificial Sequence
  Description of Artificial Sequence: Synthetic oligonucleotide
gaagucggcagacaguaga

SEQ ID NO: 1589515 - RNA, 19 nt, Artificial Sequence
  Description of Artificial Sequence: Synthetic oligonucleotide
uuuguuagauuuagugcau

SEQ ID NO: 1589516 - RNA, 19 nt, Artificial Sequence
  Description of Artificial Sequence: Synthetic oligonucleotide
uacccgauggcagugaaca

SEQ ID NO: 1589517 - RNA, 19 nt, Artificial Sequence
  Description of Artificial Sequence: Synthetic oligonucleotide
uccuuaauguggcuuauuu

SEQ ID NO: 1589518 - RNA, 19 nt, Artificial Sequence
  Description of Artificial Sequence: Synthetic oligonucleotide
guaggaggccaaaagagcc

SEQ ID NO: 1589519 - RNA, 19 nt, Artificial Sequence
  Description of Artificial Sequence: Synthetic oligonucleotide
cuagacuguuuauccauag

SEQ ID NO: 1589520 - RNA, 19 nt, Artificial Sequence
  Description of Artificial Sequence: Synthetic oligonucleotide
auagaaacuuacugauaug

SEQ ID NO: 1589521 - RNA, 19 nt, Artificial Sequence
  Description of Artificial Sequence: Synthetic oligonucleotide
ggucucugagaucauauag

SEQ ID NO: 1589522 - RNA, 19 nt, Artificial Sequence
  Description of Artificial Sequence: Synthetic oligonucleotide
auaaaacucuaugcucggc

SEQ ID NO: 1589523 - RNA, 19 nt, Artificial Sequence
  Description of Artificial Sequence: Synthetic oligonucleotide
uuugcguaugguauuucaa

SEQ ID NO: 1589524 - RNA, 19 nt, Artificial Sequence
  Description of Artificial Sequence: Synthetic oligonucleotide
gcugcuauugacauaaccc

SEQ ID NO: 1589525 - RNA, 19 nt, Artificial Sequence
  Description of Artificial Sequence: Synthetic oligonucleotide
auuugcguaugguauuuca

SEQ ID NO: 1589526 - RNA, 19 nt, Artificial Sequence
  Description of Artificial Sequence: Synthetic oligonucleotide
agucauggcugaaacuugc

SEQ ID NO: 1589527 - RNA, 19 nt, Artificial Sequence
  Description of Artificial Sequence: Synthetic oligonucleotide
aucuucugaaccgcuaacg

SEQ ID NO: 1589528 - RNA, 19 nt, Artificial Sequence
  Description of Artificial Sequence: Synthetic oligonucleotide
aaccuagacuguuuaucca

SEQ ID NO: 1589529 - RNA, 19 nt, Artificial Sequence
  Description of Artificial Sequence: Synthetic oligonucleotide
uucagucaaaagauaccac

SEQ ID NO: 1589530 - RNA, 19 nt, Artificial Sequence
  Description of Artificial Sequence: Synthetic oligonucleotide
uguugcgcccucuaguaga

SEQ ID NO: 1589531 - RNA, 19 nt, Artificial Sequence
  Description of Artificial Sequence: Synthetic oligonucleotide
ucguacauguauuugcgua

SEQ ID NO: 1589532 - RNA, 19 nt, Artificial Sequence
  Description of Artificial Sequence: Synthetic oligonucleotide
uagcaugaaacacuauaau

SEQ ID NO: 1589533 - RNA, 19 nt, Artificial Sequence
  Description of Artificial Sequence: Synthetic oligonucleotide
agacucacuccuuaaugug

SEQ ID NO: 1589534 - RNA, 19 nt, Artificial Sequence
  Description of Artificial Sequence: Synthetic oligonucleotide
uugcguaugguauuucaaa

SEQ ID NO: 1589535 - RNA, 19 nt, Artificial Sequence
  Description of Artificial Sequence: Synthetic oligonucleotide
ucuagucccuuccuaauuu

SEQ ID NO: 1589536 - RNA, 19 nt, Artificial Sequence
  Description of Artificial Sequence: Synthetic oligonucleotide
gaaguaaacuugcuuaggu

SEQ ID NO: 1589537 - RNA, 19 nt, Artificial Sequence
  Description of Artificial Sequence: Synthetic oligonucleotide
gacaguagaacuucugugu

SEQ ID NO: 1589538 - RNA, 19 nt, Artificial Sequence
  Description of Artificial Sequence: Synthetic oligonucleotide
gaagucauuacgaucucuc

SEQ ID NO: 1589539 - RNA, 19 nt, Artificial Sequence
  Description of Artificial Sequence: Synthetic oligonucleotide
uucucagauggcauaucca

SEQ ID NO: 1589540 - RNA, 19 nt, Artificial Sequence
  Description of Artificial Sequence: Synthetic oligonucleotide
gaucauauagucugauucu

SEQ ID NO: 1589541 - RNA, 19 nt, Artificial Sequence
  Description of Artificial Sequence: Synthetic oligonucleotide
gacauaacccuuauacuuc

SEQ ID NO: 1589542 - RNA, 19 nt, Artificial Sequence
  Description of Artificial Sequence: Synthetic oligonucleotide
uuuucucuagucccuuccu

SEQ ID NO: 1589543 - RNA, 19 nt, Artificial Sequence
  Description of Artificial Sequence: Synthetic oligonucleotide
ugcguaugguauuucaaau

SEQ ID NO: 1589544 - RNA, 19 nt, Artificial Sequence
  Description of Artificial Sequence: Synthetic oligonucleotide
uguauuugcguaugguauu

SEQ ID NO: 1589545 - RNA, 19 nt, Artificial Sequence
  Description of Artificial Sequence: Synthetic oligonucleotide
aaacucuaugcucggcgga

SEQ ID NO: 1589546 - RNA, 19 nt, Artificial Sequence
  Description of Artificial Sequence: Synthetic oligonucleotide
ucuuccaaccuuguugcgc

SEQ ID NO: 1589547 - RNA, 19 nt, Artificial Sequence
  Description of Artificial Sequence: Synthetic oligonucleotide
cauauagaaacuuacugau

SEQ ID NO: 1589548 - RNA, 19 nt, Artificial Sequence
  Description of Artificial Sequence: Synthetic oligonucleotide
acauaacccuuauacuuca

SEQ ID NO: 1589549 - RNA, 19 nt, Artificial Sequence
  Description of Artificial Sequence: Synthetic oligonucleotide
cuacccaaacuucagcuuc

SEQ ID NO: 1589550 - RNA, 19 nt, Artificial Sequence
  Description of Artificial Sequence: Synthetic oligonucleotide
aagaagacucacuccuuaa

SEQ ID NO: 1589551 - RNA, 19 nt, Artificial Sequence
  Description of Artificial Sequence: Synthetic oligonucleotide
uaugcucggcggauguuag

SEQ ID NO: 1589552 - RNA, 19 nt, Artificial Sequence
  Description of Artificial Sequence: Synthetic oligonucleotide
ccagguaaagguucaaugc

SEQ ID NO: 1589553 - RNA, 19 nt, Artificial Sequence
  Description of Artificial Sequence: Synthetic oligonucleotide
auguaaccaaaaggcacgc

SEQ ID NO: 1589554 - RNA, 19 nt, Artificial Sequence
  Description of Artificial Sequence: Synthetic oligonucleotide
aucauauagucugauucug

SEQ ID NO: 1589555 - RNA, 19 nt, Artificial Sequence
  Description of Artificial Sequence: Synthetic oligonucleotide
ucugaaccgcuaacgaggu

SEQ ID NO: 1589556 - RNA, 19 nt, Artificial Sequence
  Description of Artificial Sequence: Synthetic oligonucleotide
uucuucacuuuucucuagu

SEQ ID NO: 1589557 - RNA, 19 nt, Artificial Sequence
  Description of Artificial Sequence: Synthetic oligonucleotide
caaagauggcugauguaac

SEQ ID NO: 1589558 - RNA, 19 nt, Artificial Sequence
  Description of Artificial Sequence: Synthetic oligonucleotide
uagacuguuuauccauaga

SEQ ID NO: 1589559 - RNA, 19 nt, Artificial Sequence
  Description of Artificial Sequence: Synthetic oligonucleotide
ucugauucuggagucauuu

SEQ ID NO: 1589560 - RNA, 19 nt, Artificial Sequence
  Description of Artificial Sequence: Synthetic oligonucleotide
uucucuagucccuuccuaa

SEQ ID NO: 1589561 - RNA, 19 nt, Artificial Sequence
  Description of Artificial Sequence: Synthetic oligonucleotide
caugguuauugaccuauug

SEQ ID NO: 1589562 - RNA, 19 nt, Artificial Sequence
  Description of Artificial Sequence: Synthetic oligonucleotide
acaaucaaacuuggauugg

SEQ ID NO: 1589563 - RNA, 19 nt, Artificial Sequence
  Description of Artificial Sequence: Synthetic oligonucleotide
acuugcuuaggucauggua

SEQ ID NO: 1589564 - RNA, 19 nt, Artificial Sequence
  Description of Artificial Sequence: Synthetic oligonucleotide
cuuccuaauuucucagaug

SEQ ID NO: 1589565 - RNA, 19 nt, Artificial Sequence
  Description of Artificial Sequence: Synthetic oligonucleotide
acuccagauauaaacauau

SEQ ID NO: 1589566 - RNA, 19 nt, Artificial Sequence
  Description of Artificial Sequence: Synthetic oligonucleotide
acgcacaugugauuaauau

SEQ ID NO: 1589567 - RNA, 19 nt, Artificial Sequence
  Description of Artificial Sequence: Synthetic oligonucleotide
ugagguuaccaguaucuua

SEQ ID NO: 1589568 - RNA, 19 nt, Artificial Sequence
  Description of Artificial Sequence: Synthetic oligonucleotide
aguagaacuucuguguuau

SEQ ID NO: 1589569 - RNA, 19 nt, Artificial Sequence
  Description of Artificial Sequence: Synthetic oligonucleotide
cguaugguauuucaaaugc

SEQ ID NO: 1589570 - RNA, 19 nt, Artificial Sequence
  Description of Artificial Sequence: Synthetic oligonucleotide
ucuuguccccaaauugaga

SEQ ID NO: 1589571 - RNA, 19 nt, Artificial Sequence
  Description of Artificial Sequence: Synthetic oligonucleotide
cucagauggcauauccaag

SEQ ID NO: 1589572 - RNA, 19 nt, Artificial Sequence
  Description of Artificial Sequence: Synthetic oligonucleotide
acugauaugcuuauuuaaa

SEQ ID NO: 1589573 - RNA, 19 nt, Artificial Sequence
  Description of Artificial Sequence: Synthetic oligonucleotide
uagaucguacauguauuug

SEQ ID NO: 1589574 - RNA, 19 nt, Artificial Sequence
  Description of Artificial Sequence: Synthetic oligonucleotide
gaaacuuacugauaugcuu

SEQ ID NO: 1589575 - RNA, 19 nt, Artificial Sequence
  Description of Artificial Sequence: Synthetic oligonucleotide
uacuccagauauaaacaua

SEQ ID NO: 1589576 - RNA, 19 nt, Artificial Sequence
  Description of Artificial Sequence: Synthetic oligonucleotide
aacugcauuaugugcuuua

SEQ ID NO: 1589577 - RNA, 19 nt, Artificial Sequence
  Description of Artificial Sequence: Synthetic oligonucleotide
agcuagaaacaagacuauc

SEQ ID NO: 1589578 - RNA, 19 nt, Artificial Sequence
  Description of Artificial Sequence: Synthetic oligonucleotide
accuagacuguuuauccau

SEQ ID NO: 1589579 - RNA, 19 nt, Artificial Sequence
  Description of Artificial Sequence: Synthetic oligonucleotide
gguaaguaaagucauggcu

SEQ ID NO: 1589580 - RNA, 19 nt, Artificial Sequence
  Description of Artificial Sequence: Synthetic oligonucleotide
agucaaaagauaccacguu

SEQ ID NO: 1589581 - RNA, 19 nt, Artificial Sequence
  Description of Artificial Sequence: Synthetic oligonucleotide
acaucuacccgauggcagu

SEQ ID NO: 1589582 - RNA, 19 nt, Artificial Sequence
  Description of Artificial Sequence: Synthetic oligonucleotide
agaagacucacuccuuaau

SEQ ID NO: 1589583 - RNA, 19 nt, Artificial Sequence
  Description of Artificial Sequence: Synthetic oligonucleotide
caugaaacacuauaauacu

SEQ ID NO: 1589584 - RNA, 19 nt, Artificial Sequence
  Description of Artificial Sequence: Synthetic oligonucleotide
cauguauuugcguauggua

SEQ ID NO: 1589585 - RNA, 19 nt, Artificial Sequence
  Description of Artificial Sequence: Synthetic oligonucleotide
cucauggauaaagaaaaga

SEQ ID NO: 1589586 - RNA, 19 nt, Artificial Sequence
  Description of Artificial Sequence: Synthetic oligonucleotide
uuaugugcuuuaauaccuu

SEQ ID NO: 1589587 - RNA, 19 nt, Artificial Sequence
  Description of Artificial Sequence: Synthetic oligonucleotide
uuguugcgcccucuaguag

SEQ ID NO: 1589588 - RNA, 19 nt, Artificial Sequence
  Description of Artificial Sequence: Synthetic oligonucleotide
acaguagaacuucuguguu

SEQ ID NO: 1589589 - RNA, 19 nt, Artificial Sequence
  Description of Artificial Sequence: Synthetic oligonucleotide
uggcagugaacaaaaucua

SEQ ID NO: 1589590 - RNA, 19 nt, Artificial Sequence
  Description of Artificial Sequence: Synthetic oligonucleotide
auugaccuauugaaaaccu

SEQ ID NO: 1589591 - RNA, 19 nt, Artificial Sequence
  Description of Artificial Sequence: Synthetic oligonucleotide
uaauaccuucccagaaguc

SEQ ID NO: 1589592 - RNA, 19 nt, Artificial Sequence
  Description of Artificial Sequence: Synthetic oligonucleotide
uugaccuauugaaaaccua

SEQ ID NO: 1589593 - RNA, 19 nt, Artificial Sequence
  Description of Artificial Sequence: Synthetic oligonucleotide
agaaacuuacugauaugcu

SEQ ID NO: 1589594 - RNA, 19 nt, Artificial Sequence
  Description of Artificial Sequence: Synthetic oligonucleotide
uuguuagauuuagugcaug

SEQ ID NO: 1589595 - RNA, 19 nt, Artificial Sequence
  Description of Artificial Sequence: Synthetic oligonucleotide
uuucucuagucccuuccua

SEQ ID NO: 1589596 - RNA, 19 nt, Artificial Sequence
  Description of Artificial Sequence: Synthetic oligonucleotide
caagacuaucacccaguag

SEQ ID NO: 1589597 - RNA, 19 nt, Artificial Sequence
  Description of Artificial Sequence: Synthetic oligonucleotide
ucggcagacaguagaacuu

SEQ ID NO: 1589598 - RNA, 19 nt, Artificial Sequence
  Description of Artificial Sequence: Synthetic oligonucleotide
gcggauguuagcaugaaac

SEQ ID NO: 1589599 - RNA, 19 nt, Artificial Sequence
  Description of Artificial Sequence: Synthetic oligonucleotide
ugaagucggcagacaguag

SEQ ID NO: 1589600 - RNA, 19 nt, Artificial Sequence
  Description of Artificial Sequence: Synthetic oligonucleotide
ucggcggauguuagcauga

SEQ ID NO: 1589601 - RNA, 19 nt, Artificial Sequence
  Description of Artificial Sequence: Synthetic oligonucleotide
uaccaguagaugugcuacc

SEQ ID NO: 1589602 - RNA, 19 nt, Artificial Sequence
  Description of Artificial Sequence: Synthetic oligonucleotide
uucuuccaaccuuguugcg

SEQ ID NO: 1589603 - RNA, 19 nt, Artificial Sequence
  Description of Artificial Sequence: Synthetic oligonucleotide
cuggugcucauggauaaag

SEQ ID NO: 1589604 - RNA, 19 nt, Artificial Sequence
  Description of Artificial Sequence: Synthetic oligonucleotide
cuuuacauagaaacauugu

SEQ ID NO: 1589605 - RNA, 19 nt, Artificial Sequence
  Description of Artificial Sequence: Synthetic oligonucleotide
uaaacuugcuuaggucaug

SEQ ID NO: 1589606 - RNA, 19 nt, Artificial Sequence
  Description of Artificial Sequence: Synthetic oligonucleotide
cauaacaaucaaacuugga

SEQ ID NO: 1589607 - RNA, 19 nt, Artificial Sequence
  Description of Artificial Sequence: Synthetic oligonucleotide
uugaucuggcugcugcuau

SEQ ID NO: 1589608 - RNA, 19 nt, Artificial Sequence
  Description of Artificial Sequence: Synthetic oligonucleotide
gcuuugaucuggcugcugc

SEQ ID NO: 1589609 - RNA, 19 nt, Artificial Sequence
  Description of Artificial Sequence: Synthetic oligonucleotide
cuuacugauaugcuuauuu

SEQ ID NO: 1589610 - RNA, 19 nt, Artificial Sequence
  Description of Artificial Sequence: Synthetic oligonucleotide
ggauguuagcaugaaacac

SEQ ID NO: 1589611 - RNA, 19 nt, Artificial Sequence
  Description of Artificial Sequence: Synthetic oligonucleotide
aucguacauguauuugcgu

SEQ ID NO: 1589612 - RNA, 19 nt, Artificial Sequence
  Description of Artificial Sequence: Synthetic oligonucleotide
agguaaagguucaaugcca

SEQ ID NO: 1589613 - RNA, 19 nt, Artificial Sequence
  Description of Artificial Sequence: Synthetic oligonucleotide
augguaaguacuccagaua

SEQ ID NO: 1589614 - RNA, 19 nt, Artificial Sequence
  Description of Artificial Sequence: Synthetic oligonucleotide
cauugugcuccaguguggc

SEQ ID NO: 1589615 - RNA, 19 nt, Artificial Sequence
  Description of Artificial Sequence: Synthetic oligonucleotide
gucauuugagguuaccagu

SEQ ID NO: 1589616 - RNA, 19 nt, Artificial Sequence
  Description of Artificial Sequence: Synthetic oligonucleotide
uacgaucucuccugacuga

SEQ ID NO: 1589617 - RNA, 19 nt, Artificial Sequence
  Description of Artificial Sequence: Synthetic oligonucleotide
cucugugucauagaaaaua

SEQ ID NO: 1589618 - RNA, 19 nt, Artificial Sequence
  Description of Artificial Sequence: Synthetic oligonucleotide
uauugacauaacccuuaua

SEQ ID NO: 1589619 - RNA, 19 nt, Artificial Sequence
  Description of Artificial Sequence: Synthetic oligonucleotide
gaugugcuacccaaacuuc

SEQ ID NO: 1589620 - RNA, 19 nt, Artificial Sequence
  Description of Artificial Sequence: Synthetic oligonucleotide
gacuaucacccaguaggag

SEQ ID NO: 1589621 - RNA, 19 nt, Artificial Sequence
  Description of Artificial Sequence: Synthetic oligonucleotide
auacaucuacccgauggca

SEQ ID NO: 1589622 - RNA, 19 nt, Artificial Sequence
  Description of Artificial Sequence: Synthetic oligonucleotide
aacuugcuuugaucuggcu

SEQ ID NO: 1589623 - RNA, 19 nt, Artificial Sequence
  Description of Artificial Sequence: Synthetic oligonucleotide
guacauguauuugcguaug

SEQ ID NO: 1589624 - RNA, 19 nt, Artificial Sequence
  Description of Artificial Sequence: Synthetic oligonucleotide
gcguaugguauuucaaaug

SEQ ID NO: 1589625 - RNA, 19 nt, Artificial Sequence
  Description of Artificial Sequence: Synthetic oligonucleotide
gagguuaccaguaucuuau

SEQ ID NO: 1589626 - RNA, 19 nt, Artificial Sequence
  Description of Artificial Sequence: Synthetic oligonucleotide
aguagaucguacauguauu

SEQ ID NO: 1589627 - RNA, 19 nt, Artificial Sequence
  Description of Artificial Sequence: Synthetic oligonucleotide
ugagaucauauagucugau

SEQ ID NO: 1589628 - RNA, 19 nt, Artificial Sequence
  Description of Artificial Sequence: Synthetic oligonucleotide
cuagucccuuccuaauuuc

SEQ ID NO: 1589629 - RNA, 19 nt, Artificial Sequence
  Description of Artificial Sequence: Synthetic oligonucleotide
agucggcagacaguagaac

SEQ ID NO: 1589630 - RNA, 19 nt, Artificial Sequence
  Description of Artificial Sequence: Synthetic oligonucleotide
uccagugaagucggcagac

SEQ ID NO: 1589631 - RNA, 19 nt, Artificial Sequence
  Description of Artificial Sequence: Synthetic oligonucleotide
gauggcugauguaacaacu

SEQ ID NO: 1589632 - RNA, 19 nt, Artificial Sequence
  Description of Artificial Sequence: Synthetic oligonucleotide
augugccauaaccuagacu

SEQ ID NO: 1589633 - RNA, 19 nt, Artificial Sequence
  Description of Artificial Sequence: Synthetic oligonucleotide
cucggcggauguuagcaug

SEQ ID NO: 1589634 - RNA, 19 nt, Artificial Sequence
  Description of Artificial Sequence: Synthetic oligonucleotide
cauuacgaucucuccugac

SEQ ID NO: 1589635 - RNA, 19 nt, Artificial Sequence
  Description of Artificial Sequence: Synthetic oligonucleotide
acaagacuaucacccagua

SEQ ID NO: 1589636 - RNA, 19 nt, Artificial Sequence
  Description of Artificial Sequence: Synthetic oligonucleotide
ucuacccgauggcagugaa

SEQ ID NO: 1589637 - RNA, 19 nt, Artificial Sequence
  Description of Artificial Sequence: Synthetic oligonucleotide
accuuguugcgcccucuag

SEQ ID NO: 1589638 - RNA, 19 nt, Artificial Sequence
  Description of Artificial Sequence: Synthetic oligonucleotide
ggauaaagaaaagaauucu

SEQ ID NO: 1589639 - RNA, 19 nt, Artificial Sequence
  Description of Artificial Sequence: Synthetic oligonucleotide
auggcugauguaacaacug

SEQ ID NO: 1589640 - RNA, 19 nt, Artificial Sequence
  Description of Artificial Sequence: Synthetic oligonucleotide
acaacugcauuaugugcuu

SEQ ID NO: 1589641 - RNA, 19 nt, Artificial Sequence
  Description of Artificial Sequence: Synthetic oligonucleotide
gcuaacgagguaaguaaag

SEQ ID NO: 1589642 - RNA, 19 nt, Artificial Sequence
  Description of Artificial Sequence: Synthetic oligonucleotide
uguuagcaugaaacacuau

SEQ ID NO: 1589643 - RNA, 19 nt, Artificial Sequence
  Description of Artificial Sequence: Synthetic oligonucleotide
caguagaugugcuacccaa

SEQ ID NO: 1589644 - RNA, 19 nt, Artificial Sequence
  Description of Artificial Sequence: Synthetic oligonucleotide
gaaccgcuaacgagguaag

SEQ ID NO: 1589645 - RNA, 19 nt, Artificial Sequence
  Description of Artificial Sequence: Synthetic oligonucleotide
accugugcauguuuauaau

SEQ ID NO: 1589646 - RNA, 19 nt, Artificial Sequence
  Description of Artificial Sequence: Synthetic oligonucleotide
cuuguugcgcccucuagua

SEQ ID NO: 1589647 - RNA, 19 nt, Artificial Sequence
  Description of Artificial Sequence: Synthetic oligonucleotide
aaggcacgcacaugugauu

SEQ ID NO: 1589648 - RNA, 19 nt, Artificial Sequence
  Description of Artificial Sequence: Synthetic oligonucleotide
cuucacaauaccaguagau

SEQ ID NO: 1589649 - RNA, 19 nt, Artificial Sequence
  Description of Artificial Sequence: Synthetic oligonucleotide
cagucaaaagauaccacgu

SEQ ID NO: 1589650 - RNA, 19 nt, Artificial Sequence
  Description of Artificial Sequence: Synthetic oligonucleotide
cugauaugcuuauuuaaau

SEQ ID NO: 1589651 - RNA, 19 nt, Artificial Sequence
  Description of Artificial Sequence: Synthetic oligonucleotide
gccacugaaauaauuuaac

SEQ ID NO: 1589652 - RNA, 19 nt, Artificial Sequence
  Description of Artificial Sequence: Synthetic oligonucleotide
accgcuaacgagguaagua

SEQ ID NO: 1589653 - RNA, 19 nt, Artificial Sequence
  Description of Artificial Sequence: Synthetic oligonucleotide
aagucggcagacaguagaa

SEQ ID NO: 1589654 - RNA, 19 nt, Artificial Sequence
  Description of Artificial Sequence: Synthetic oligonucleotide
auauagaaacuuacugaua

SEQ ID NO: 1589655 - RNA, 19 nt, Artificial Sequence
  Description of Artificial Sequence: Synthetic oligonucleotide
gugaagucggcagacagua

SEQ ID NO: 1589656 - RNA, 19 nt, Artificial Sequence
  Description of Artificial Sequence: Synthetic oligonucleotide
acaaaacauaaaacucuau

SEQ ID NO: 1589657 - RNA, 19 nt, Artificial Sequence
  Description of Artificial Sequence: Synthetic oligonucleotide
cugagaucauauagucuga

SEQ ID NO: 1589658 - RNA, 19 nt, Artificial Sequence
  Description of Artificial Sequence: Synthetic oligonucleotide
agacuaucacccaguagga

SEQ ID NO: 1589659 - RNA, 19 nt, Artificial Sequence
  Description of Artificial Sequence: Synthetic oligonucleotide
ucacccaguaggaggccaa

SEQ ID NO: 1589660 - RNA, 19 nt, Artificial Sequence
  Description of Artificial Sequence: Synthetic oligonucleotide
ucacuccuuaauguggcuu

SEQ ID NO: 1589661 - RNA, 19 nt, Artificial Sequence
  Description of Artificial Sequence: Synthetic oligonucleotide
ggccaaaagagccacugaa

SEQ ID NO: 1589662 - RNA, 19 nt, Artificial Sequence
  Description of Artificial Sequence: Synthetic oligonucleotide
aggccaaaagagccacuga

SEQ ID NO: 1589663 - RNA, 19 nt, Artificial Sequence
  Description of Artificial Sequence: Synthetic oligonucleotide
agaaaccugugcauguuua

SEQ ID NO: 1589664 - RNA, 19 nt, Artificial Sequence
  Description of Artificial Sequence: Synthetic oligonucleotide
uauuugcguaugguauuuc

SEQ ID NO: 1589665 - RNA, 19 nt, Artificial Sequence
  Description of Artificial Sequence: Synthetic oligonucleotide
uggagucauuugagguuac

SEQ ID NO: 1589666 - RNA, 19 nt, Artificial Sequence
  Description of Artificial Sequence: Synthetic oligonucleotide
gucauagaaaauacaucua

SEQ ID NO: 1589667 - RNA, 19 nt, Artificial Sequence
  Description of Artificial Sequence: Synthetic oligonucleotide
cagacaguagaacuucugu

SEQ ID NO: 1589668 - RNA, 19 nt, Artificial Sequence
  Description of Artificial Sequence: Synthetic oligonucleotide
aaccuuguugcgcccucua

SEQ ID NO: 1589669 - RNA, 19 nt, Artificial Sequence
  Description of Artificial Sequence: Synthetic oligonucleotide
aaguaaagucauggcugaa

SEQ ID NO: 1589670 - RNA, 19 nt, Artificial Sequence
  Description of Artificial Sequence: Synthetic oligonucleotide
cuaacgagguaaguaaagu

SEQ ID NO: 1589671 - RNA, 19 nt, Artificial Sequence
  Description of Artificial Sequence: Synthetic oligonucleotide
gaccuauugaaaaccuaua

SEQ ID NO: 1589672 - RNA, 19 nt, Artificial Sequence
  Description of Artificial Sequence: Synthetic oligonucleotide
cuguguuaucugucuucac

SEQ ID NO: 1589673 - RNA, 19 nt, Artificial Sequence
  Description of Artificial Sequence: Synthetic oligonucleotide
gucucugagaucauauagu

SEQ ID NO: 1589674 - RNA, 19 nt, Artificial Sequence
  Description of Artificial Sequence: Synthetic oligonucleotide
ccuauugaaaaccuauaua

SEQ ID NO: 1589675 - RNA, 19 nt, Artificial Sequence
  Description of Artificial Sequence: Synthetic oligonucleotide
gaaaccugugcauguuuau

SEQ ID NO: 1589676 - RNA, 19 nt, Artificial Sequence
  Description of Artificial Sequence: Synthetic oligonucleotide
cuacccgauggcagugaac

SEQ ID NO: 1589677 - RNA, 19 nt, Artificial Sequence
  Description of Artificial Sequence: Synthetic oligonucleotide
gguauuucaaaugcucugu

SEQ ID NO: 1589678 - RNA, 19 nt, Artificial Sequence
  Description of Artificial Sequence: Synthetic oligonucleotide
guagaucguacauguauuu

SEQ ID NO: 1589679 - RNA, 19 nt, Artificial Sequence
  Description of Artificial Sequence: Synthetic oligonucleotide
uuccaaccuuguugcgccc

SEQ ID NO: 1589680 - RNA, 19 nt, Artificial Sequence
  Description of Artificial Sequence: Synthetic oligonucleotide
aaccgcuaacgagguaagu

SEQ ID NO: 1589681 - RNA, 19 nt, Artificial Sequence
  Description of Artificial Sequence: Synthetic oligonucleotide
ugaucuggcugcugcuauu

SEQ ID NO: 1589682 - RNA, 19 nt, Artificial Sequence
  Description of Artificial Sequence: Synthetic oligonucleotide
cagaagucauuacgaucuc

SEQ ID NO: 1589683 - RNA, 19 nt, Artificial Sequence
  Description of Artificial Sequence: Synthetic oligonucleotide
uccaaccuuguugcgcccu

SEQ ID NO: 1589684 - RNA, 19 nt, Artificial Sequence
  Description of Artificial Sequence: Synthetic oligonucleotide
cccuuauacuucauggaca

SEQ ID NO: 1589685 - RNA, 19 nt, Artificial Sequence
  Description of Artificial Sequence: Synthetic oligonucleotide
ccaaauugagaaauuuaua

SEQ ID NO: 1589686 - RNA, 19 nt, Artificial Sequence
  Description of Artificial Sequence: Synthetic oligonucleotide
cccaaauugagaaauuuau

SEQ ID NO: 1589687 - RNA, 19 nt, Artificial Sequence
  Description of Artificial Sequence: Synthetic oligonucleotide
cucuccugacugaaguaaa

SEQ ID NO: 1589688 - RNA, 19 nt, Artificial Sequence
  Description of Artificial Sequence: Synthetic oligonucleotide
caucuacccgauggcagug

SEQ ID NO: 1589689 - RNA, 19 nt, Artificial Sequence
  Description of Artificial Sequence: Synthetic oligonucleotide
aggcacgcacaugugauua

SEQ ID NO: 1589690 - RNA, 19 nt, Artificial Sequence
  Description of Artificial Sequence: Synthetic oligonucleotide
guaugguauuucaaaugcu

SEQ ID NO: 1589691 - RNA, 19 nt, Artificial Sequence
  Description of Artificial Sequence: Synthetic oligonucleotide
acucuaugcucggcggaug

SEQ ID NO: 1589692 - RNA, 19 nt, Artificial Sequence
  Description of Artificial Sequence: Synthetic oligonucleotide
cuucuagaaaugugccaua

SEQ ID NO: 1589693 - RNA, 19 nt, Artificial Sequence
  Description of Artificial Sequence: Synthetic oligonucleotide
guaaagguucaaugccagu

SEQ ID NO: 1589694 - RNA, 19 nt, Artificial Sequence
  Description of Artificial Sequence: Synthetic oligonucleotide
gugcauguuuauaauuaua

SEQ ID NO: 1589695 - RNA, 19 nt, Artificial Sequence
  Description of Artificial Sequence: Synthetic oligonucleotide
acgaucucuccugacugaa

SEQ ID NO: 1589696 - RNA, 19 nt, Artificial Sequence
  Description of Artificial Sequence: Synthetic oligonucleotide
guagaacuucuguguuauc

SEQ ID NO: 1589697 - RNA, 19 nt, Artificial Sequence
  Description of Artificial Sequence: Synthetic oligonucleotide
guaaacuugcuuaggucau

SEQ ID NO: 1589698 - RNA, 19 nt, Artificial Sequence
  Description of Artificial Sequence: Synthetic oligonucleotide
gcagacaguagaacuucug

SEQ ID NO: 1589699 - RNA, 19 nt, Artificial Sequence
  Description of Artificial Sequence: Synthetic oligonucleotide
cuccagugaagucggcaga

SEQ ID NO: 1589700 - RNA, 19 nt, Artificial Sequence
  Description of Artificial Sequence: Synthetic oligonucleotide
cuaguagaucguacaugua

SEQ ID NO: 1589701 - RNA, 19 nt, Artificial Sequence
  Description of Artificial Sequence: Synthetic oligonucleotide
cauaaccuagacuguuuau

SEQ ID NO: 1589702 - RNA, 19 nt, Artificial Sequence
  Description of Artificial Sequence: Synthetic oligonucleotide
acacaugguuauugaccua

SEQ ID NO: 1589703 - RNA, 19 nt, Artificial Sequence
  Description of Artificial Sequence: Synthetic oligonucleotide
ggagucauuugagguuacc

SEQ ID NO: 1589704 - RNA, 19 nt, Artificial Sequence
  Description of Artificial Sequence: Synthetic oligonucleotide
cuaugcucggcggauguua

SEQ ID NO: 1589705 - RNA, 19 nt, Artificial Sequence
  Description of Artificial Sequence: Synthetic oligonucleotide
cccucuaguagaucguaca

SEQ ID NO: 1589706 - RNA, 19 nt, Artificial Sequence
  Description of Artificial Sequence: Synthetic oligonucleotide
cacgcacaugugauuaaua

SEQ ID NO: 1589707 - RNA, 19 nt, Artificial Sequence
  Description of Artificial Sequence: Synthetic oligonucleotide
caauaccaguagaugugcu

SEQ ID NO: 1589708 - RNA, 19 nt, Artificial Sequence
  Description of Artificial Sequence: Synthetic oligonucleotide
cugauacauauagaaacuu

SEQ ID NO: 1589709 - RNA, 19 nt, Artificial Sequence
  Description of Artificial Sequence: Synthetic oligonucleotide
cuauugacauaacccuuau

SEQ ID NO: 1589710 - RNA, 19 nt, Artificial Sequence
  Description of Artificial Sequence: Synthetic oligonucleotide
ccgcuaacgagguaaguaa

SEQ ID NO: 1589711 - RNA, 19 nt, Artificial Sequence
  Description of Artificial Sequence: Synthetic oligonucleotide
ucuaugcucggcggauguu

SEQ ID NO: 1589712 - RNA, 19 nt, Artificial Sequence
  Description of Artificial Sequence: Synthetic oligonucleotide
guauuugcguaugguauuu

SEQ ID NO: 1589713 - RNA, 19 nt, Artificial Sequence
  Description of Artificial Sequence: Synthetic oligonucleotide
gcugauguaacaacugcau

SEQ ID NO: 1589714 - RNA, 19 nt, Artificial Sequence
  Description of Artificial Sequence: Synthetic oligonucleotide
acccgauggcagugaacaa

SEQ ID NO: 1589715 - RNA, 19 nt, Artificial Sequence
  Description of Artificial Sequence: Synthetic oligonucleotide
cauuugagguuaccaguau

SEQ ID NO: 1589716 - RNA, 19 nt, Artificial Sequence
  Description of Artificial Sequence: Synthetic oligonucleotide
gagcuagaaacaagacuau

SEQ ID NO: 1589717 - RNA, 19 nt, Artificial Sequence
  Description of Artificial Sequence: Synthetic oligonucleotide
cucuaugcucggcggaugu

SEQ ID NO: 1589718 - RNA, 19 nt, Artificial Sequence
  Description of Artificial Sequence: Synthetic oligonucleotide
ccauaaccuagacuguuua

SEQ ID NO: 1589719 - RNA, 19 nt, Artificial Sequence
  Description of Artificial Sequence: Synthetic oligonucleotide
gguaaguacuccagauaua

SEQ ID NO: 1589720 - RNA, 19 nt, Artificial Sequence
  Description of Artificial Sequence: Synthetic oligonucleotide
gccuggugcucauggauaa

SEQ ID NO: 1589721 - RNA, 19 nt, Artificial Sequence
  Description of Artificial Sequence: Synthetic oligonucleotide
acccaguaggaggccaaaa

SEQ ID NO: 1589722 - RNA, 19 nt, Artificial Sequence
  Description of Artificial Sequence: Synthetic oligonucleotide
cucuagucccuuccuaauu

SEQ ID NO: 1589723 - RNA, 19 nt, Artificial Sequence
  Description of Artificial Sequence: Synthetic oligonucleotide
ccuuccuaauuucucagau

SEQ ID NO: 1589724 - RNA, 19 nt, Artificial Sequence
  Description of Artificial Sequence: Synthetic oligonucleotide
ggcagugaacaaaaucuau

SEQ ID NO: 1589725 - RNA, 19 nt, Artificial Sequence
  Description of Artificial Sequence: Synthetic oligonucleotide
cugcauuaugugcuuuaau

SEQ ID NO: 1589726 - RNA, 19 nt, Artificial Sequence
  Description of Artificial Sequence: Synthetic oligonucleotide
ggcggauguuagcaugaaa

SEQ ID NO: 1589727 - RNA, 19 nt, Artificial Sequence
  Description of Artificial Sequence: Synthetic oligonucleotide
ccuagacuguuuauccaua

SEQ ID NO: 1589728 - RNA, 19 nt, Artificial Sequence
  Description of Artificial Sequence: Synthetic oligonucleotide
cucacuccuuaauguggcu

SEQ ID NO: 1589729 - RNA, 19 nt, Artificial Sequence
  Description of Artificial Sequence: Synthetic oligonucleotide
auggcauauccaagacaua

SEQ ID NO: 1589730 - RNA, 19 nt, Artificial Sequence
  Description of Artificial Sequence: Synthetic oligonucleotide
cgaucucuccugacugaag

SEQ ID NO: 1589731 - RNA, 19 nt, Artificial Sequence
  Description of Artificial Sequence: Synthetic oligonucleotide
cauaacccuuauacuucau

SEQ ID NO: 1589732 - RNA, 19 nt, Artificial Sequence
  Description of Artificial Sequence: Synthetic oligonucleotide
cccuuccuaauuucucaga

SEQ ID NO: 1589733 - RNA, 19 nt, Artificial Sequence
  Description of Artificial Sequence: Synthetic oligonucleotide
cgcacaugugauuaauaua

SEQ ID NO: 1589734 - RNA, 19 nt, Artificial Sequence
  Description of Artificial Sequence: Synthetic oligonucleotide
ggcacgcacaugugauuaa

SEQ ID NO: 1589735 - RNA, 19 nt, Artificial Sequence
  Description of Artificial Sequence: Synthetic oligonucleotide
ggcugaaacuugcuuugau

SEQ ID NO: 1589736 - RNA, 19 nt, Artificial Sequence
  Description of Artificial Sequence: Synthetic oligonucleotide
gcuacccaaacuucagcuu

SEQ ID NO: 1589737 - RNA, 19 nt, Artificial Sequence
  Description of Artificial Sequence: Synthetic oligonucleotide
ccuuaauguggcuuauuuu

SEQ ID NO: 1589738 - RNA, 19 nt, Artificial Sequence
  Description of Artificial Sequence: Synthetic oligonucleotide
gcccucuaguagaucguac

SEQ ID NO: 1589739 - RNA, 19 nt, Artificial Sequence
  Description of Artificial Sequence: Synthetic oligonucleotide
ccuuguugcgcccucuagu

SEQ ID NO: 1589740 - RNA, 19 nt, Artificial Sequence
  Description of Artificial Sequence: Synthetic oligonucleotide
ccaaccuuguugcgcccuc

SEQ ID NO: 1589741 - RNA, 19 nt, Artificial Sequence
  Description of Artificial Sequence: Synthetic oligonucleotide
cccgauggcagugaacaaa

SEQ ID NO: 1589742 - RNA, 19 nt, Artificial Sequence
  Description of Artificial Sequence: Synthetic oligonucleotide
guugcgcccucuaguagau

SEQ ID NO: 1589743 - RNA, 19 nt, Artificial Sequence
  Description of Artificial Sequence: Synthetic oligonucleotide
uugcgcccucuaguagauc

SEQ ID NO: 1589744 - RNA, 19 nt, Artificial Sequence
  Description of Artificial Sequence: Synthetic oligonucleotide
cgcuaacgagguaaguaaa

SEQ ID NO: 1589745 - RNA, 19 nt, Artificial Sequence
  Description of Artificial Sequence: Synthetic oligonucleotide
cugaaccgcuaacgaggua

SEQ ID NO: 1589746 - RNA, 19 nt, Artificial Sequence
  Description of Artificial Sequence: Synthetic oligonucleotide
guccccaaauugagaaauu

SEQ ID NO: 1589747 - RNA, 19 nt, Artificial Sequence
  Description of Artificial Sequence: Synthetic oligonucleotide
cacuuuucucuagucccuu

SEQ ID NO: 1589748 - RNA, 19 nt, Artificial Sequence
  Description of Artificial Sequence: Synthetic oligonucleotide
gcacgcacaugugauuaau

SEQ ID NO: 1589749 - RNA, 19 nt, Artificial Sequence
  Description of Artificial Sequence: Synthetic oligonucleotide
gucugauucuggagucauu

SEQ ID NO: 1589750 - RNA, 19 nt, Artificial Sequence
  Description of Artificial Sequence: Synthetic oligonucleotide
gcucggcggauguuagcau

SEQ ID NO: 1589751 - RNA, 19 nt, Artificial Sequence
  Description of Artificial Sequence: Synthetic oligonucleotide
ccauuuacacaugguuauu

SEQ ID NO: 1589752 - RNA, 19 nt, Artificial Sequence
  Description of Artificial Sequence: Synthetic oligonucleotide
ccuggugcucauggauaaa

SEQ ID NO: 1589753 - RNA, 19 nt, Artificial Sequence
  Description of Artificial Sequence: Synthetic oligonucleotide
gcgcccucuaguagaucgu

SEQ ID NO: 1589754 - RNA, 19 nt, Artificial Sequence
  Description of Artificial Sequence: Synthetic oligonucleotide
cgcccucuaguagaucgua

SEQ ID NO: 1589755 - RNA, 19 nt, Artificial Sequence
  Description of Artificial Sequence: Synthetic oligonucleotide
aauauuuagucucaccucc

SEQ ID NO: 1589756 - RNA, 19 nt, Artificial Sequence
  Description of Artificial Sequence: Synthetic oligonucleotide
aacucuuuuaaacacuagc

SEQ ID NO: 1589757 - RNA, 19 nt, Artificial Sequence
  Description of Artificial Sequence: Synthetic oligonucleotide
auuacuuuaaguuaacuga

SEQ ID NO: 1589758 - RNA, 19 nt, Artificial Sequence
  Description of Artificial Sequence: Synthetic oligonucleotide
aaacuuucuaugcaaacuc

SEQ ID NO: 1589759 - RNA, 19 nt, Artificial Sequence
  Description of Artificial Sequence: Synthetic oligonucleotide
auuucuuacacacagauau

SEQ ID NO: 1589760 - RNA, 19 nt, Artificial Sequence
  Description of Artificial Sequence: Synthetic oligonucleotide
aauaccauuuggcaacagc

SEQ ID NO: 1589761 - RNA, 19 nt, Artificial Sequence
  Description of Artificial Sequence: Synthetic oligonucleotide
aauuaguggguacugacag

SEQ ID NO: 1589762 - RNA, 19 nt, Artificial Sequence
  Description of Artificial Sequence: Synthetic oligonucleotide
acagccaucacucuguuac

SEQ ID NO: 1589763 - RNA, 19 nt, Artificial Sequence
  Description of Artificial Sequence: Synthetic oligonucleotide
uuuguuuuggcuuaauggc

SEQ ID NO: 1589764 - RNA, 19 nt, Artificial Sequence
  Description of Artificial Sequence: Synthetic oligonucleotide
agaucacuuauuuacaaac

SEQ ID NO: 1589765 - RNA, 19 nt, Artificial Sequence
  Description of Artificial Sequence: Synthetic oligonucleotide
uuaaugggacugaagaugg

SEQ ID NO: 1589766 - RNA, 19 nt, Artificial Sequence
  Description of Artificial Sequence: Synthetic oligonucleotide
uggcuugugacuuuaaugg

SEQ ID NO: 1589767 - RNA, 19 nt, Artificial Sequence
  Description of Artificial Sequence: Synthetic oligonucleotide
uaauacuaauuccauagag

SEQ ID NO: 1589768 - RNA, 19 nt, Artificial Sequence
  Description of Artificial Sequence: Synthetic oligonucleotide
aauuccauagaguaaacaa

SEQ ID NO: 1589769 - RNA, 19 nt, Artificial Sequence
  Description of Artificial Sequence: Synthetic oligonucleotide
aaguuucuagaccaucugc

SEQ ID NO: 1589770 - RNA, 19 nt, Artificial Sequence
  Description of Artificial Sequence: Synthetic oligonucleotide
uuuuaagaacuacaguuag

SEQ ID NO: 1589771 - RNA, 19 nt, Artificial Sequence
  Description of Artificial Sequence: Synthetic oligonucleotide
uuuaaguuaacugagguaa

SEQ ID NO: 1589772 - RNA, 19 nt, Artificial Sequence
  Description of Artificial Sequence: Synthetic oligonucleotide
aacacuuggaucuguaaag

SEQ ID NO: 1589773 - RNA, 19 nt, Artificial Sequence
  Description of Artificial Sequence: Synthetic oligonucleotide
uuuauagauuuauuggucc

SEQ ID NO: 1589774 - RNA, 19 nt, Artificial Sequence
  Description of Artificial Sequence: Synthetic oligonucleotide
augggagucugucagaugc

SEQ ID NO: 1589775 - RNA, 19 nt, Artificial Sequence
  Description of Artificial Sequence: Synthetic oligonucleotide
aguuuuaagaacuacaguu

SEQ ID NO: 1589776 - RNA, 19 nt, Artificial Sequence
  Description of Artificial Sequence: Synthetic oligonucleotide
gaguaaggcaauuaguggg

SEQ ID NO: 1589777 - RNA, 19 nt, Artificial Sequence
  Description of Artificial Sequence: Synthetic oligonucleotide
gaguuagaaaguuugcugg

SEQ ID NO: 1589778 - RNA, 19 nt, Artificial Sequence
  Description of Artificial Sequence: Synthetic oligonucleotide
aagaacuacaguuagguuu

SEQ ID NO: 1589779 - RNA, 19 nt, Artificial Sequence
  Description of Artificial Sequence: Synthetic oligonucleotide
uuauuggucucuuuaaaag

SEQ ID NO: 1589780 - RNA, 19 nt, Artificial Sequence
  Description of Artificial Sequence: Synthetic oligonucleotide
uuaacugagguaaagaauu

SEQ ID NO: 1589781 - RNA, 19 nt, Artificial Sequence
  Description of Artificial Sequence: Synthetic oligonucleotide
aaaguggacaagaacuucc

SEQ ID NO: 1589782 - RNA, 19 nt, Artificial Sequence
  Description of Artificial Sequence: Synthetic oligonucleotide
uuacuuuaaguuaacugag

SEQ ID NO: 1589783 - RNA, 19 nt, Artificial Sequence
  Description of Artificial Sequence: Synthetic oligonucleotide
uaucaagcaauacaaauuc

SEQ ID NO: 1589784 - RNA, 19 nt, Artificial Sequence
  Description of Artificial Sequence: Synthetic oligonucleotide
ucaaauaccauuuggcaac

SEQ ID NO: 1589785 - RNA, 19 nt, Artificial Sequence
  Description of Artificial Sequence: Synthetic oligonucleotide
uuugguaguuucaugagac

SEQ ID NO: 1589786 - RNA, 19 nt, Artificial Sequence
  Description of Artificial Sequence: Synthetic oligonucleotide
uuuaucaagcaauacaaau

SEQ ID NO: 1589787 - RNA, 19 nt, Artificial Sequence
  Description of Artificial Sequence: Synthetic oligonucleotide
aaugggacugaagauggcc

SEQ ID NO: 1589788 - RNA, 19 nt, Artificial Sequence
  Description of Artificial Sequence: Synthetic oligonucleotide
uuuaaugggacugaagaug

SEQ ID NO: 1589789 - RNA, 19 nt, Artificial Sequence
  Description of Artificial Sequence: Synthetic oligonucleotide
aaaagguagacauucguuu

SEQ ID NO: 1589790 - RNA, 19 nt, Artificial Sequence
  Description of Artificial Sequence: Synthetic oligonucleotide
aacagauaaaaugagaguu

SEQ ID NO: 1589791 - RNA, 19 nt, Artificial Sequence
  Description of Artificial Sequence: Synthetic oligonucleotide
ugacugguaaagaugcugg

SEQ ID NO: 1589792 - RNA, 19 nt, Artificial Sequence
  Description of Artificial Sequence: Synthetic oligonucleotide
uuaagaacuacaguuaggu

SEQ ID NO: 1589793 - RNA, 19 nt, Artificial Sequence
  Description of Artificial Sequence: Synthetic oligonucleotide
uuaauggcagcauggagag

SEQ ID NO: 1589794 - RNA, 19 nt, Artificial Sequence
  Description of Artificial Sequence: Synthetic oligonucleotide
uucguuuaccucaaaaugu

SEQ ID NO: 1589795 - RNA, 19 nt, Artificial Sequence
  Description of Artificial Sequence: Synthetic oligonucleotide
uuucaugggagucugucag

SEQ ID NO: 1589796 - RNA, 19 nt, Artificial Sequence
  Description of Artificial Sequence: Synthetic oligonucleotide
uguuacaccaauccguccc

SEQ ID NO: 1589797 - RNA, 19 nt, Artificial Sequence
  Description of Artificial Sequence: Synthetic oligonucleotide
uuuuauaaucucugguucc

SEQ ID NO: 1589798 - RNA, 19 nt, Artificial Sequence
  Description of Artificial Sequence: Synthetic oligonucleotide
uuucaugagacaaacacuu

SEQ ID NO: 1589799 - RNA, 19 nt, Artificial Sequence
  Description of Artificial Sequence: Synthetic oligonucleotide
uuuacaagcuaauaguuua

SEQ ID NO: 1589800 - RNA, 19 nt, Artificial Sequence
  Description of Artificial Sequence: Synthetic oligonucleotide
agauuuauugguccauuac

SEQ ID NO: 1589801 - RNA, 19 nt, Artificial Sequence
  Description of Artificial Sequence: Synthetic oligonucleotide
aacacgcauucucucaagc

SEQ ID NO: 1589802 - RNA, 19 nt, Artificial Sequence
  Description of Artificial Sequence: Synthetic oligonucleotide
aguuagaaaguuugcuggc

SEQ ID NO: 1589803 - RNA, 19 nt, Artificial Sequence
  Description of Artificial Sequence: Synthetic oligonucleotide
uuaaacacuagcugaggag

SEQ ID NO: 1589804 - RNA, 19 nt, Artificial Sequence
  Description of Artificial Sequence: Synthetic oligonucleotide
cauuacuuuaaguuaacug

SEQ ID NO: 1589805 - RNA, 19 nt, Artificial Sequence
  Description of Artificial Sequence: Synthetic oligonucleotide
ugaggaguaaggcaauuag

SEQ ID NO: 1589806 - RNA, 19 nt, Artificial Sequence
  Description of Artificial Sequence: Synthetic oligonucleotide
aaaguuugcuggcaguuug

SEQ ID NO: 1589807 - RNA, 19 nt, Artificial Sequence
  Description of Artificial Sequence: Synthetic oligonucleotide
agagacaucuuauuggucu

SEQ ID NO: 1589808 - RNA, 19 nt, Artificial Sequence
  Description of Artificial Sequence: Synthetic oligonucleotide
uuaaguuucuagaccaucu

SEQ ID NO: 1589809 - RNA, 19 nt, Artificial Sequence
  Description of Artificial Sequence: Synthetic oligonucleotide
uuuaaacacuagcugagga

SEQ ID NO: 1589810 - RNA, 19 nt, Artificial Sequence
  Description of Artificial Sequence: Synthetic oligonucleotide
agucucaccucccaaaagg

SEQ ID NO: 1589811 - RNA, 19 nt, Artificial Sequence
  Description of Artificial Sequence: Synthetic oligonucleotide
acagauaugagagagacau

SEQ ID NO: 1589812 - RNA, 19 nt, Artificial Sequence
  Description of Artificial Sequence: Synthetic oligonucleotide
aaaacuuucuaugcaaacu

SEQ ID NO: 1589813 - RNA, 19 nt, Artificial Sequence
  Description of Artificial Sequence: Synthetic oligonucleotide
uggacaagaacuuccagca

SEQ ID NO: 1589814 - RNA, 19 nt, Artificial Sequence
  Description of Artificial Sequence: Synthetic oligonucleotide
ucuuacacacagauauacg

SEQ ID NO: 1589815 - RNA, 19 nt, Artificial Sequence
  Description of Artificial Sequence: Synthetic oligonucleotide
agaguuagaaaguuugcug

SEQ ID NO: 1589816 - RNA, 19 nt, Artificial Sequence
  Description of Artificial Sequence: Synthetic oligonucleotide
aauacuaauuccauagagu

SEQ ID NO: 1589817 - RNA, 19 nt, Artificial Sequence
  Description of Artificial Sequence: Synthetic oligonucleotide
agauauguugguuuucaag

SEQ ID NO: 1589818 - RNA, 19 nt, Artificial Sequence
  Description of Artificial Sequence: Synthetic oligonucleotide
ucacuuucuuaucaacacg

SEQ ID NO: 1589819 - RNA, 19 nt, Artificial Sequence
  Description of Artificial Sequence: Synthetic oligonucleotide
agcaauauuuagucucacc

SEQ ID NO: 1589820 - RNA, 19 nt, Artificial Sequence
  Description of Artificial Sequence: Synthetic oligonucleotide
ucucccuuugaacagauaa

SEQ ID NO: 1589821 - RNA, 19 nt, Artificial Sequence
  Description of Artificial Sequence: Synthetic oligonucleotide
agcacuuaugcucacaacu

SEQ ID NO: 1589822 - RNA, 19 nt, Artificial Sequence
  Description of Artificial Sequence: Synthetic oligonucleotide
agaaaucacuuucuuauca

SEQ ID NO: 1589823 - RNA, 19 nt, Artificial Sequence
  Description of Artificial Sequence: Synthetic oligonucleotide
agcuaauaguuuaucaagc

SEQ ID NO: 1589824 - RNA, 19 nt, Artificial Sequence
  Description of Artificial Sequence: Synthetic oligonucleotide
uucaaauaccauuuggcaa

SEQ ID NO: 1589825 - RNA, 19 nt, Artificial Sequence
  Description of Artificial Sequence: Synthetic oligonucleotide
gauauguugguuuucaagu

SEQ ID NO: 1589826 - RNA, 19 nt, Artificial Sequence
  Description of Artificial Sequence: Synthetic oligonucleotide
aaacacuuggaucuguaaa

SEQ ID NO: 1589827 - RNA, 19 nt, Artificial Sequence
  Description of Artificial Sequence: Synthetic oligonucleotide
ugacauuauuucaaauacc

SEQ ID NO: 1589828 - RNA, 19 nt, Artificial Sequence
  Description of Artificial Sequence: Synthetic oligonucleotide
uucucucaagcacuuaugc

SEQ ID NO: 1589829 - RNA, 19 nt, Artificial Sequence
  Description of Artificial Sequence: Synthetic oligonucleotide
acuuuaaguuaacugaggu

SEQ ID NO: 1589830 - RNA, 19 nt, Artificial Sequence
  Description of Artificial Sequence: Synthetic oligonucleotide
gaagauggccuauauuaag

SEQ ID NO: 1589831 - RNA, 19 nt, Artificial Sequence
  Description of Artificial Sequence: Synthetic oligonucleotide
gaaauacagagacucugag

SEQ ID NO: 1589832 - RNA, 19 nt, Artificial Sequence
  Description of Artificial Sequence: Synthetic oligonucleotide
cuuaauggcagcauggaga

SEQ ID NO: 1589833 - RNA, 19 nt, Artificial Sequence
  Description of Artificial Sequence: Synthetic oligonucleotide
agcaauacaaauucuucgu

SEQ ID NO: 1589834 - RNA, 19 nt, Artificial Sequence
  Description of Artificial Sequence: Synthetic oligonucleotide
uuuaccucaaaauguaaua

SEQ ID NO: 1589835 - RNA, 19 nt, Artificial Sequence
  Description of Artificial Sequence: Synthetic oligonucleotide
uauuggucucuuuaaaagu

SEQ ID NO: 1589836 - RNA, 19 nt, Artificial Sequence
  Description of Artificial Sequence: Synthetic oligonucleotide
auaaucucccuuugaacag

SEQ ID NO: 1589837 - RNA, 19 nt, Artificial Sequence
  Description of Artificial Sequence: Synthetic oligonucleotide
uuauagauuuauuggucca

SEQ ID NO: 1589838 - RNA, 19 nt, Artificial Sequence
  Description of Artificial Sequence: Synthetic oligonucleotide
guaaacaacaaacagaauu

SEQ ID NO: 1589839 - RNA, 19 nt, Artificial Sequence
  Description of Artificial Sequence: Synthetic oligonucleotide
cuuacacacagauauacga

SEQ ID NO: 1589840 - RNA, 19 nt, Artificial Sequence
  Description of Artificial Sequence: Synthetic oligonucleotide
cucucaagcacuuaugcuc

SEQ ID NO: 1589841 - RNA, 19 nt, Artificial Sequence
  Description of Artificial Sequence: Synthetic oligonucleotide
gguacugacaguuuuaaga

SEQ ID NO: 1589842 - RNA, 19 nt, Artificial Sequence
  Description of Artificial Sequence: Synthetic oligonucleotide
uggcuuaauggcagcaugg

SEQ ID NO: 1589843 - RNA, 19 nt, Artificial Sequence
  Description of Artificial Sequence: Synthetic oligonucleotide
ugagacaaacacuuggauc

SEQ ID NO: 1589844 - RNA, 19 nt, Artificial Sequence
  Description of Artificial Sequence: Synthetic oligonucleotide
acuaauuccauagaguaaa

SEQ ID NO: 1589845 - RNA, 19 nt, Artificial Sequence
  Description of Artificial Sequence: Synthetic oligonucleotide
uucuagaccaucugcuucc

SEQ ID NO: 1589846 - RNA, 19 nt, Artificial Sequence
  Description of Artificial Sequence: Synthetic oligonucleotide
cacucuguuacaccaaucc

SEQ ID NO: 1589847 - RNA, 19 nt, Artificial Sequence
  Description of Artificial Sequence: Synthetic oligonucleotide
acaagcuaauaguuuauca

SEQ ID NO: 1589848 - RNA, 19 nt, Artificial Sequence
  Description of Artificial Sequence: Synthetic oligonucleotide
ucuucguuuaccucaaaau

SEQ ID NO: 1589849 - RNA, 19 nt, Artificial Sequence
  Description of Artificial Sequence: Synthetic oligonucleotide
ugagaguuagaaaguuugc

SEQ ID NO: 1589850 - RNA, 19 nt, Artificial Sequence
  Description of Artificial Sequence: Synthetic oligonucleotide
uaugagagagacaucuuau

SEQ ID NO: 1589851 - RNA, 19 nt, Artificial Sequence
  Description of Artificial Sequence: Synthetic oligonucleotide
ucucaagcacuuaugcuca

SEQ ID NO: 1589852 - RNA, 19 nt, Artificial Sequence
  Description of Artificial Sequence: Synthetic oligonucleotide
uaaacacuagcugaggagu

SEQ ID NO: 1589853 - RNA, 19 nt, Artificial Sequence
  Description of Artificial Sequence: Synthetic oligonucleotide
aguuuaucaagcaauacaa

SEQ ID NO: 1589854 - RNA, 19 nt, Artificial Sequence
  Description of Artificial Sequence: Synthetic oligonucleotide
ucuaugcaaacucuuuuaa

SEQ ID NO: 1589855 - RNA, 19 nt, Artificial Sequence
  Description of Artificial Sequence: Synthetic oligonucleotide
uaaguuucuagaccaucug

SEQ ID NO: 1589856 - RNA, 19 nt, Artificial Sequence
  Description of Artificial Sequence: Synthetic oligonucleotide
uguuauaaucucccuuuga

SEQ ID NO: 1589857 - RNA, 19 nt, Artificial Sequence
  Description of Artificial Sequence: Synthetic oligonucleotide
acucuguuacaccaauccg

SEQ ID NO: 1589858 - RNA, 19 nt, Artificial Sequence
  Description of Artificial Sequence: Synthetic oligonucleotide
aauuuacaagcuaauaguu

SEQ ID NO: 1589859 - RNA, 19 nt, Artificial Sequence
  Description of Artificial Sequence: Synthetic oligonucleotide
aaagguagacauucguuuu

SEQ ID NO: 1589860 - RNA, 19 nt, Artificial Sequence
  Description of Artificial Sequence: Synthetic oligonucleotide
cuugugacuuuaaugggac

SEQ ID NO: 1589861 - RNA, 19 nt, Artificial Sequence
  Description of Artificial Sequence: Synthetic oligonucleotide
ucuguuacaccaauccguc

SEQ ID NO: 1589862 - RNA, 19 nt, Artificial Sequence
  Description of Artificial Sequence: Synthetic oligonucleotide
uuaccucaaaauguaauac

SEQ ID NO: 1589863 - RNA, 19 nt, Artificial Sequence
  Description of Artificial Sequence: Synthetic oligonucleotide
auggccuauauuaaguuuc

SEQ ID NO: 1589864 - RNA, 19 nt, Artificial Sequence
  Description of Artificial Sequence: Synthetic oligonucleotide
augagaguuagaaaguuug

SEQ ID NO: 1589865 - RNA, 19 nt, Artificial Sequence
  Description of Artificial Sequence: Synthetic oligonucleotide
aggaguaaggcaauuagug

SEQ ID NO: 1589866 - RNA, 19 nt, Artificial Sequence
  Description of Artificial Sequence: Synthetic oligonucleotide
aagcacuuaugcucacaac

SEQ ID NO: 1589867 - RNA, 19 nt, Artificial Sequence
  Description of Artificial Sequence: Synthetic oligonucleotide
uauugguccauuacuuuaa

SEQ ID NO: 1589868 - RNA, 19 nt, Artificial Sequence
  Description of Artificial Sequence: Synthetic oligonucleotide
uuucuagauauguugguuu

SEQ ID NO: 1589869 - RNA, 19 nt, Artificial Sequence
  Description of Artificial Sequence: Synthetic oligonucleotide
gauuuauugguccauuacu

SEQ ID NO: 1589870 - RNA, 19 nt, Artificial Sequence
  Description of Artificial Sequence: Synthetic oligonucleotide
ugaagauggccuauauuaa

SEQ ID NO: 1589871 - RNA, 19 nt, Artificial Sequence
  Description of Artificial Sequence: Synthetic oligonucleotide
uugucaccgaagcugcggg

SEQ ID NO: 1589872 - RNA, 19 nt, Artificial Sequence
  Description of Artificial Sequence: Synthetic oligonucleotide
ggaguaaggcaauuagugg

SEQ ID NO: 1589873 - RNA, 19 nt, Artificial Sequence
  Description of Artificial Sequence: Synthetic oligonucleotide
uagcugaggaguaaggcaa

SEQ ID NO: 1589874 - RNA, 19 nt, Artificial Sequence
  Description of Artificial Sequence: Synthetic oligonucleotide
uuucuaugcaaacucuuuu

SEQ ID NO: 1589875 - RNA, 19 nt, Artificial Sequence
  Description of Artificial Sequence: Synthetic oligonucleotide
aauaguuuaucaagcaaua

SEQ ID NO: 1589876 - RNA, 19 nt, Artificial Sequence
  Description of Artificial Sequence: Synthetic oligonucleotide
uuuagucucaccucccaaa

SEQ ID NO: 1589877 - RNA, 19 nt, Artificial Sequence
  Description of Artificial Sequence: Synthetic oligonucleotide
acugacaguuuuaagaacu

SEQ ID NO: 1589878 - RNA, 19 nt, Artificial Sequence
  Description of Artificial Sequence: Synthetic oligonucleotide
aaguuaacugagguaaaga

SEQ ID NO: 1589879 - RNA, 19 nt, Artificial Sequence
  Description of Artificial Sequence: Synthetic oligonucleotide
uauuuagucucaccuccca

SEQ ID NO: 1589880 - RNA, 19 nt, Artificial Sequence
  Description of Artificial Sequence: Synthetic oligonucleotide
ucagaucacuuauuuacaa

SEQ ID NO: 1589881 - RNA, 19 nt, Artificial Sequence
  Description of Artificial Sequence: Synthetic oligonucleotide
cuuaugcucacaacuuuug

SEQ ID NO: 1589882 - RNA, 19 nt, Artificial Sequence
  Description of Artificial Sequence: Synthetic oligonucleotide
gccuauauuaaguuucuag

SEQ ID NO: 1589883 - RNA, 19 nt, Artificial Sequence
  Description of Artificial Sequence: Synthetic oligonucleotide
cuccauacauuccugacuc

SEQ ID NO: 1589884 - RNA, 19 nt, Artificial Sequence
  Description of Artificial Sequence: Synthetic oligonucleotide
ccucagaucacuuauuuac

SEQ ID NO: 1589885 - RNA, 19 nt, Artificial Sequence
  Description of Artificial Sequence: Synthetic oligonucleotide
aagauggccuauauuaagu

SEQ ID NO: 1589886 - RNA, 19 nt, Artificial Sequence
  Description of Artificial Sequence: Synthetic oligonucleotide
acauuccugacucaggcau

SEQ ID NO: 1589887 - RNA, 19 nt, Artificial Sequence
  Description of Artificial Sequence: Synthetic oligonucleotide
uuaugcucacaacuuuugu

SEQ ID NO: 1589888 - RNA, 19 nt, Artificial Sequence
  Description of Artificial Sequence: Synthetic oligonucleotide
auaugagagagacaucuua

SEQ ID NO: 1589889 - RNA, 19 nt, Artificial Sequence
  Description of Artificial Sequence: Synthetic oligonucleotide
agugcugacugguaaagau

SEQ ID NO: 1589890 - RNA, 19 nt, Artificial Sequence
  Description of Artificial Sequence: Synthetic oligonucleotide
ccugacucaggcaugaagg

SEQ ID NO: 1589891 - RNA, 19 nt, Artificial Sequence
  Description of Artificial Sequence: Synthetic oligonucleotide
ugcuuccacauguaaaacu

SEQ ID NO: 1589892 - RNA, 19 nt, Artificial Sequence
  Description of Artificial Sequence: Synthetic oligonucleotide
uccacauguaaaacuuucu

SEQ ID NO: 1589893 - RNA, 19 nt, Artificial Sequence
  Description of Artificial Sequence: Synthetic oligonucleotide
accaauccgucccuguuuc

SEQ ID NO: 1589894 - RNA, 19 nt, Artificial Sequence
  Description of Artificial Sequence: Synthetic oligonucleotide
aaggcaauuaguggguacu

SEQ ID NO: 1589895 - RNA, 19 nt, Artificial Sequence
  Description of Artificial Sequence: Synthetic oligonucleotide
ucguuuaccucaaaaugua

SEQ ID NO: 1589896 - RNA, 19 nt, Artificial Sequence
  Description of Artificial Sequence: Synthetic oligonucleotide
uacuaauuccauagaguaa

SEQ ID NO: 1589897 - RNA, 19 nt, Artificial Sequence
  Description of Artificial Sequence: Synthetic oligonucleotide
uucuucguuuaccucaaaa

SEQ ID NO: 1589898 - RNA, 19 nt, Artificial Sequence
  Description of Artificial Sequence: Synthetic oligonucleotide
uuagucucaccucccaaaa

SEQ ID NO: 1589899 - RNA, 19 nt, Artificial Sequence
  Description of Artificial Sequence: Synthetic oligonucleotide
caagcuaauaguuuaucaa

SEQ ID NO: 1589900 - RNA, 19 nt, Artificial Sequence
  Description of Artificial Sequence: Synthetic oligonucleotide
uucuaugcaaacucuuuua

SEQ ID NO: 1589901 - RNA, 19 nt, Artificial Sequence
  Description of Artificial Sequence: Synthetic oligonucleotide
uucaugagacaaacacuug

SEQ ID NO: 1589902 - RNA, 19 nt, Artificial Sequence
  Description of Artificial Sequence: Synthetic oligonucleotide
uuaaguuaacugagguaaa

SEQ ID NO: 1589903 - RNA, 19 nt, Artificial Sequence
  Description of Artificial Sequence: Synthetic oligonucleotide
guaguuucaugagacaaac

SEQ ID NO: 1589904 - RNA, 19 nt, Artificial Sequence
  Description of Artificial Sequence: Synthetic oligonucleotide
ucaacacgcauucucucaa

SEQ ID NO: 1589905 - RNA, 19 nt, Artificial Sequence
  Description of Artificial Sequence: Synthetic oligonucleotide
uaauuccauagaguaaaca

SEQ ID NO: 1589906 - RNA, 19 nt, Artificial Sequence
  Description of Artificial Sequence: Synthetic oligonucleotide
gcugguuugugcuaguuug

SEQ ID NO: 1589907 - RNA, 19 nt, Artificial Sequence
  Description of Artificial Sequence: Synthetic oligonucleotide
ucucucaagcacuuaugcu

SEQ ID NO: 1589908 - RNA, 19 nt, Artificial Sequence
  Description of Artificial Sequence: Synthetic oligonucleotide
ucccuuugaacagauaaaa

SEQ ID NO: 1589909 - RNA, 19 nt, Artificial Sequence
  Description of Artificial Sequence: Synthetic oligonucleotide
uuacaagcuaauaguuuau

SEQ ID NO: 1589910 - RNA, 19 nt, Artificial Sequence
  Description of Artificial Sequence: Synthetic oligonucleotide
uccauagaguaaacaacaa

SEQ ID NO: 1589911 - RNA, 19 nt, Artificial Sequence
  Description of Artificial Sequence: Synthetic oligonucleotide
ugguaguuucaugagacaa

SEQ ID NO: 1589912 - RNA, 19 nt, Artificial Sequence
  Description of Artificial Sequence: Synthetic oligonucleotide
uugguuuucaagugcuaaa

SEQ ID NO: 1589913 - RNA, 19 nt, Artificial Sequence
  Description of Artificial Sequence: Synthetic oligonucleotide
acagugggacaccauaccu

SEQ ID NO: 1589914 - RNA, 19 nt, Artificial Sequence
  Description of Artificial Sequence: Synthetic oligonucleotide
uauuaaguuucuagaccau

SEQ ID NO: 1589915 - RNA, 19 nt, Artificial Sequence
  Description of Artificial Sequence: Synthetic oligonucleotide
uuaguggguacugacaguu

SEQ ID NO: 1589916 - RNA, 19 nt, Artificial Sequence
  Description of Artificial Sequence: Synthetic oligonucleotide
ugcggcaugucgcgcaggg

SEQ ID NO: 1589917 - RNA, 19 nt, Artificial Sequence
  Description of Artificial Sequence: Synthetic oligonucleotide
acaccauaccucagaagcc

SEQ ID NO: 1589918 - RNA, 19 nt, Artificial Sequence
  Description of Artificial Sequence: Synthetic oligonucleotide
guaauacuaauuccauaga

SEQ ID NO: 1589919 - RNA, 19 nt, Artificial Sequence
  Description of Artificial Sequence: Synthetic oligonucleotide
uuuucuagauauguugguu

SEQ ID NO: 1589920 - RNA, 19 nt, Artificial Sequence
  Description of Artificial Sequence: Synthetic oligonucleotide
uucuagauauguugguuuu

SEQ ID NO: 1589921 - RNA, 19 nt, Artificial Sequence
  Description of Artificial Sequence: Synthetic oligonucleotide
ccuauauuaaguuucuaga

SEQ ID NO: 1589922 - RNA, 19 nt, Artificial Sequence
  Description of Artificial Sequence: Synthetic oligonucleotide
uaaggcaauuaguggguac

SEQ ID NO: 1589923 - RNA, 19 nt, Artificial Sequence
  Description of Artificial Sequence: Synthetic oligonucleotide
uagaaaguuugcuggcagu

SEQ ID NO: 1589924 - RNA, 19 nt, Artificial Sequence
  Description of Artificial Sequence: Synthetic oligonucleotide
agaaauacagagacucuga

SEQ ID NO: 1589925 - RNA, 19 nt, Artificial Sequence
  Description of Artificial Sequence: Synthetic oligonucleotide
aguggggccccguggaagg

SEQ ID NO: 1589926 - RNA, 19 nt, Artificial Sequence
  Description of Artificial Sequence: Synthetic oligonucleotide
uguuucaugggagucuguc

SEQ ID NO: 1589927 - RNA, 19 nt, Artificial Sequence
  Description of Artificial Sequence: Synthetic oligonucleotide
accauuuggcaacagcaau

SEQ ID NO: 1589928 - RNA, 19 nt, Artificial Sequence
  Description of Artificial Sequence: Synthetic oligonucleotide
augagacaaacacuuggau

SEQ ID NO: 1589929 - RNA, 19 nt, Artificial Sequence
  Description of Artificial Sequence: Synthetic oligonucleotide
aaugagaguuagaaaguuu

SEQ ID NO: 1589930 - RNA, 19 nt, Artificial Sequence
  Description of Artificial Sequence: Synthetic oligonucleotide
gcaauauuuagucucaccu

SEQ ID NO: 1589931 - RNA, 19 nt, Artificial Sequence
  Description of Artificial Sequence: Synthetic oligonucleotide
uggccuauauuaaguuucu

SEQ ID NO: 1589932 - RNA, 19 nt, Artificial Sequence
  Description of Artificial Sequence: Synthetic oligonucleotide
guaaagaugcugguuugug

SEQ ID NO: 1589933 - RNA, 19 nt, Artificial Sequence
  Description of Artificial Sequence: Synthetic oligonucleotide
gacuuuaaugggacugaag

SEQ ID NO: 1589934 - RNA, 19 nt, Artificial Sequence
  Description of Artificial Sequence: Synthetic oligonucleotide
uuucuuacacacagauaua

SEQ ID NO: 1589935 - RNA, 19 nt, Artificial Sequence
  Description of Artificial Sequence: Synthetic oligonucleotide
uugguaguuucaugagaca

SEQ ID NO: 1589936 - RNA, 19 nt, Artificial Sequence
  Description of Artificial Sequence: Synthetic oligonucleotide
uuguuccuggaugaaggcc

SEQ ID NO: 1589937 - RNA, 19 nt, Artificial Sequence
  Description of Artificial Sequence: Synthetic oligonucleotide
cuugucaccgaagcugcgg

SEQ ID NO: 1589938 - RNA, 19 nt, Artificial Sequence
  Description of Artificial Sequence: Synthetic oligonucleotide
cacagugggacaccauacc

SEQ ID NO: 1589939 - RNA, 19 nt, Artificial Sequence
  Description of Artificial Sequence: Synthetic oligonucleotide
ugacaguuuuaagaacuac

SEQ ID NO: 1589940 - RNA, 19 nt, Artificial Sequence
  Description of Artificial Sequence: Synthetic oligonucleotide
agaacuacaguuagguuuu

SEQ ID NO: 1589941 - RNA, 19 nt, Artificial Sequence
  Description of Artificial Sequence: Synthetic oligonucleotide
caauuaguggguacugaca

SEQ ID NO: 1589942 - RNA, 19 nt, Artificial Sequence
  Description of Artificial Sequence: Synthetic oligonucleotide
aguggguacugacaguuuu

SEQ ID NO: 1589943 - RNA, 19 nt, Artificial Sequence
  Description of Artificial Sequence: Synthetic oligonucleotide
cucuccauacauuccugac

SEQ ID NO: 1589944 - RNA, 19 nt, Artificial Sequence
  Description of Artificial Sequence: Synthetic oligonucleotide
cuagauauguugguuuuca

SEQ ID NO: 1589945 - RNA, 19 nt, Artificial Sequence
  Description of Artificial Sequence: Synthetic oligonucleotide
auuaguggguacugacagu

SEQ ID NO: 1589946 - RNA, 19 nt, Artificial Sequence
  Description of Artificial Sequence: Synthetic oligonucleotide
uugguccauuacuuuaagu

SEQ ID NO: 1589947 - RNA, 19 nt, Artificial Sequence
  Description of Artificial Sequence: Synthetic oligonucleotide
aauucuucguuuaccucaa

SEQ ID NO: 1589948 - RNA, 19 nt, Artificial Sequence
  Description of Artificial Sequence: Synthetic oligonucleotide
ucacaacuuuuguuuuggc

SEQ ID NO: 1589949 - RNA, 19 nt, Artificial Sequence
  Description of Artificial Sequence: Synthetic oligonucleotide
uaacugagguaaagaauuu

SEQ ID NO: 1589950 - RNA, 19 nt, Artificial Sequence
  Description of Artificial Sequence: Synthetic oligonucleotide
agauggccuauauuaaguu

SEQ ID NO: 1589951 - RNA, 19 nt, Artificial Sequence
  Description of Artificial Sequence: Synthetic oligonucleotide
auuuacaagcuaauaguuu

SEQ ID NO: 1589952 - RNA, 19 nt, Artificial Sequence
  Description of Artificial Sequence: Synthetic oligonucleotide
uacaagcuaauaguuuauc

SEQ ID NO: 1589953 - RNA, 19 nt, Artificial Sequence
  Description of Artificial Sequence: Synthetic oligonucleotide
cucagaucacuuauuuaca

SEQ ID NO: 1589954 - RNA, 19 nt, Artificial Sequence
  Description of Artificial Sequence: Synthetic oligonucleotide
uaaugggacugaagauggc

SEQ ID NO: 1589955 - RNA, 19 nt, Artificial Sequence
  Description of Artificial Sequence: Synthetic oligonucleotide
uaagaacuacaguuagguu

SEQ ID NO: 1589956 - RNA, 19 nt, Artificial Sequence
  Description of Artificial Sequence: Synthetic oligonucleotide
aaguggacaagaacuucca

SEQ ID NO: 1589957 - RNA, 19 nt, Artificial Sequence
  Description of Artificial Sequence: Synthetic oligonucleotide
ggcuugugacuuuaauggg

SEQ ID NO: 1589958 - RNA, 19 nt, Artificial Sequence
  Description of Artificial Sequence: Synthetic oligonucleotide
uuuaacagucuguggcuuu

SEQ ID NO: 1589959 - RNA, 19 nt, Artificial Sequence
  Description of Artificial Sequence: Synthetic oligonucleotide
uaaucucccuuugaacaga

SEQ ID NO: 1589960 - RNA, 19 nt, Artificial Sequence
  Description of Artificial Sequence: Synthetic oligonucleotide
agcuagcacagugggacac

SEQ ID NO: 1589961 - RNA, 19 nt, Artificial Sequence
  Description of Artificial Sequence: Synthetic oligonucleotide
gcaauuaguggguacugac

SEQ ID NO: 1589962 - RNA, 19 nt, Artificial Sequence
  Description of Artificial Sequence: Synthetic oligonucleotide
augagagagacaucuuauu

SEQ ID NO: 1589963 - RNA, 19 nt, Artificial Sequence
  Description of Artificial Sequence: Synthetic oligonucleotide
auuuagucucaccucccaa

SEQ ID NO: 1589964 - RNA, 19 nt, Artificial Sequence
  Description of Artificial Sequence: Synthetic oligonucleotide
guuucaugggagucuguca

SEQ ID NO: 1589965 - RNA, 19 nt, Artificial Sequence
  Description of Artificial Sequence: Synthetic oligonucleotide
ggcaguuuguuucauggga

SEQ ID NO: 1589966 - RNA, 19 nt, Artificial Sequence
  Description of Artificial Sequence: Synthetic oligonucleotide
uuuuaacagucuguggcuu

SEQ ID NO: 1589967 - RNA, 19 nt, Artificial Sequence
  Description of Artificial Sequence: Synthetic oligonucleotide
guuuuggcuuaauggcagc

SEQ ID NO: 1589968 - RNA, 19 nt, Artificial Sequence
  Description of Artificial Sequence: Synthetic oligonucleotide
cucuguuacaccaauccgu

SEQ ID NO: 1589969 - RNA, 19 nt, Artificial Sequence
  Description of Artificial Sequence: Synthetic oligonucleotide
ucuagauauguugguuuuc

SEQ ID NO: 1589970 - RNA, 19 nt, Artificial Sequence
  Description of Artificial Sequence: Synthetic oligonucleotide
acugaagauggccuauauu

SEQ ID NO: 1589971 - RNA, 19 nt, Artificial Sequence
  Description of Artificial Sequence: Synthetic oligonucleotide
acacuuggaucuguaaaga

SEQ ID NO: 1589972 - RNA, 19 nt, Artificial Sequence
  Description of Artificial Sequence: Synthetic oligonucleotide
gcuggagccggccagcggg

SEQ ID NO: 1589973 - RNA, 19 nt, Artificial Sequence
  Description of Artificial Sequence: Synthetic oligonucleotide
aacccucagcaccggcuag

SEQ ID NO: 1589974 - RNA, 19 nt, Artificial Sequence
  Description of Artificial Sequence: Synthetic oligonucleotide
auacagagacucugaggga

SEQ ID NO: 1589975 - RNA, 19 nt, Artificial Sequence
  Description of Artificial Sequence: Synthetic oligonucleotide
aacacuagcugaggaguaa

SEQ ID NO: 1589976 - RNA, 19 nt, Artificial Sequence
  Description of Artificial Sequence: Synthetic oligonucleotide
agaaaguuugcuggcaguu

SEQ ID NO: 1589977 - RNA, 19 nt, Artificial Sequence
  Description of Artificial Sequence: Synthetic oligonucleotide
caaaguggacaagaacuuc

SEQ ID NO: 1589978 - RNA, 19 nt, Artificial Sequence
  Description of Artificial Sequence: Synthetic oligonucleotide
ucaugggagucugucagau

SEQ ID NO: 1589979 - RNA, 19 nt, Artificial Sequence
  Description of Artificial Sequence: Synthetic oligonucleotide
cuguuacaccaauccgucc

SEQ ID NO: 1589980 - RNA, 19 nt, Artificial Sequence
  Description of Artificial Sequence: Synthetic oligonucleotide
uuuggcuuaauggcagcau

SEQ ID NO: 1589981 - RNA, 19 nt, Artificial Sequence
  Description of Artificial Sequence: Synthetic oligonucleotide
uacaccaauccgucccugu

SEQ ID NO: 1589982 - RNA, 19 nt, Artificial Sequence
  Description of Artificial Sequence: Synthetic oligonucleotide
uggguacugacaguuuuaa

SEQ ID NO: 1589983 - RNA, 19 nt, Artificial Sequence
  Description of Artificial Sequence: Synthetic oligonucleotide
caucaguagguccgggcug

SEQ ID NO: 1589984 - RNA, 19 nt, Artificial Sequence
  Description of Artificial Sequence: Synthetic oligonucleotide
ugcucacaacuuuuguuuu

SEQ ID NO: 1589985 - RNA, 19 nt, Artificial Sequence
  Description of Artificial Sequence: Synthetic oligonucleotide
aggcauacagaaauacaga

SEQ ID NO: 1589986 - RNA, 19 nt, Artificial Sequence
  Description of Artificial Sequence: Synthetic oligonucleotide
agaauuucuuacacacaga

SEQ ID NO: 1589987 - RNA, 19 nt, Artificial Sequence
  Description of Artificial Sequence: Synthetic oligonucleotide
uugugacuuuaaugggacu

SEQ ID NO: 1589988 - RNA, 19 nt, Artificial Sequence
  Description of Artificial Sequence: Synthetic oligonucleotide
acagaaauacagagacucu

SEQ ID NO: 1589989 - RNA, 19 nt, Artificial Sequence
  Description of Artificial Sequence: Synthetic oligonucleotide
ugggagucugucagaugca

SEQ ID NO: 1589990 - RNA, 19 nt, Artificial Sequence
  Description of Artificial Sequence: Synthetic oligonucleotide
ugcugguuugugcuaguuu

SEQ ID NO: 1589991 - RNA, 19 nt, Artificial Sequence
  Description of Artificial Sequence: Synthetic oligonucleotide
gcaguuuguuucaugggag

SEQ ID NO: 1589992 - RNA, 19 nt, Artificial Sequence
  Description of Artificial Sequence: Synthetic oligonucleotide
ugucgcgcagggagugggg

SEQ ID NO: 1589993 - RNA, 19 nt, Artificial Sequence
  Description of Artificial Sequence: Synthetic oligonucleotide
gucucaccucccaaaaggc

SEQ ID NO: 1589994 - RNA, 19 nt, Artificial Sequence
  Description of Artificial Sequence: Synthetic oligonucleotide
caagcacuuaugcucacaa

SEQ ID NO: 1589995 - RNA, 19 nt, Artificial Sequence
  Description of Artificial Sequence: Synthetic oligonucleotide
caacacgcauucucucaag

SEQ ID NO: 1589996 - RNA, 19 nt, Artificial Sequence
  Description of Artificial Sequence: Synthetic oligonucleotide
uccauacauuccugacuca

SEQ ID NO: 1589997 - RNA, 19 nt, Artificial Sequence
  Description of Artificial Sequence: Synthetic oligonucleotide
aaguuugcuggcaguuugu

SEQ ID NO: 1589998 - RNA, 19 nt, Artificial Sequence
  Description of Artificial Sequence: Synthetic oligonucleotide
ugacuuuaaugggacugaa

SEQ ID NO: 1589999 - RNA, 19 nt, Artificial Sequence
  Description of Artificial Sequence: Synthetic oligonucleotide
uuauaaucucugguuccau

SEQ ID NO: 1590000 - RNA, 19 nt, Artificial Sequence
  Description of Artificial Sequence: Synthetic oligonucleotide
guuuaucaagcaauacaaa

SEQ ID NO: 1590001 - RNA, 19 nt, Artificial Sequence
  Description of Artificial Sequence: Synthetic oligonucleotide
ucuuaucaacacgcauucu

SEQ ID NO: 1590002 - RNA, 19 nt, Artificial Sequence
  Description of Artificial Sequence: Synthetic oligonucleotide
cugacucaggcaugaagga

SEQ ID NO: 1590003 - RNA, 19 nt, Artificial Sequence
  Description of Artificial Sequence: Synthetic oligonucleotide
aaacacuagcugaggagua

SEQ ID NO: 1590004 - RNA, 19 nt, Artificial Sequence
  Description of Artificial Sequence: Synthetic oligonucleotide
caauacaaauucuucguuu

SEQ ID NO: 1590005 - RNA, 19 nt, Artificial Sequence
  Description of Artificial Sequence: Synthetic oligonucleotide
gucaccgaagcugcgggcc

SEQ ID NO: 1590006 - RNA, 19 nt, Artificial Sequence
  Description of Artificial Sequence: Synthetic oligonucleotide
caccuuccuucugugaccc

SEQ ID NO: 1590007 - RNA, 19 nt, Artificial Sequence
  Description of Artificial Sequence: Synthetic oligonucleotide
cugccucuccauacauucc

SEQ ID NO: 1590008 - RNA, 19 nt, Artificial Sequence
  Description of Artificial Sequence: Synthetic oligonucleotide
gauggccuauauuaaguuu

SEQ ID NO: 1590009 - RNA, 19 nt, Artificial Sequence
  Description of Artificial Sequence: Synthetic oligonucleotide
gugacuuuaaugggacuga

SEQ ID NO: 1590010 - RNA, 19 nt, Artificial Sequence
  Description of Artificial Sequence: Synthetic oligonucleotide
accggcuagguggacagug

SEQ ID NO: 1590011 - RNA, 19 nt, Artificial Sequence
  Description of Artificial Sequence: Synthetic oligonucleotide
gcugucgccucccauggcc

SEQ ID NO: 1590012 - RNA, 19 nt, Artificial Sequence
  Description of Artificial Sequence: Synthetic oligonucleotide
accucagaucacuuauuua

SEQ ID NO: 1590013 - RNA, 19 nt, Artificial Sequence
  Description of Artificial Sequence: Synthetic oligonucleotide
uggacagugcugacuggua

SEQ ID NO: 1590014 - RNA, 19 nt, Artificial Sequence
  Description of Artificial Sequence: Synthetic oligonucleotide
augucgcgcagggaguggg

SEQ ID NO: 1590015 - RNA, 19 nt, Artificial Sequence
  Description of Artificial Sequence: Synthetic oligonucleotide
cugguaaagaugcugguuu

SEQ ID NO: 1590016 - RNA, 19 nt, Artificial Sequence
  Description of Artificial Sequence: Synthetic oligonucleotide
cucccuuugaacagauaaa

SEQ ID NO: 1590017 - RNA, 19 nt, Artificial Sequence
  Description of Artificial Sequence: Synthetic oligonucleotide
aggcaauuaguggguacug

SEQ ID NO: 1590018 - RNA, 19 nt, Artificial Sequence
  Description of Artificial Sequence: Synthetic oligonucleotide
gcucacaacuuuuguuuug

SEQ ID NO: 1590019 - RNA, 19 nt, Artificial Sequence
  Description of Artificial Sequence: Synthetic oligonucleotide
agcugcgggccaucaguag

SEQ ID NO: 1590020 - RNA, 19 nt, Artificial Sequence
  Description of Artificial Sequence: Synthetic oligonucleotide
gcaugaaggaaacaggcau

SEQ ID NO: 1590021 - RNA, 19 nt, Artificial Sequence
  Description of Artificial Sequence: Synthetic oligonucleotide
ucuagaccaucugcuucca

SEQ ID NO: 1590022 - RNA, 19 nt, Artificial Sequence
  Description of Artificial Sequence: Synthetic oligonucleotide
cagcgggugcggcaugucg

SEQ ID NO: 1590023 - RNA, 19 nt, Artificial Sequence
  Description of Artificial Sequence: Synthetic oligonucleotide
caugggagucugucagaug

SEQ ID NO: 1590024 - RNA, 19 nt, Artificial Sequence
  Description of Artificial Sequence: Synthetic oligonucleotide
ccauacauuccugacucag

SEQ ID NO: 1590025 - RNA, 19 nt, Artificial Sequence
  Description of Artificial Sequence: Synthetic oligonucleotide
cacuuggaucuguaaagaa

SEQ ID NO: 1590026 - RNA, 19 nt, Artificial Sequence
  Description of Artificial Sequence: Synthetic oligonucleotide
guuuguuucaugggagucu

SEQ ID NO: 1590027 - RNA, 19 nt, Artificial Sequence
  Description of Artificial Sequence: Synthetic oligonucleotide
ugucagaugcaggcugccu

SEQ ID NO: 1590028 - RNA, 19 nt, Artificial Sequence
  Description of Artificial Sequence: Synthetic oligonucleotide
cuuucuaugcaaacucuuu

SEQ ID NO: 1590029 - RNA, 19 nt, Artificial Sequence
  Description of Artificial Sequence: Synthetic oligonucleotide
gcuugugacuuuaauggga

SEQ ID NO: 1590030 - RNA, 19 nt, Artificial Sequence
  Description of Artificial Sequence: Synthetic oligonucleotide
ugggcgugcugucgccucc

SEQ ID NO: 1590031 - RNA, 19 nt, Artificial Sequence
  Description of Artificial Sequence: Synthetic oligonucleotide
ugguuugugcuaguuuguu

SEQ ID NO: 1590032 - RNA, 19 nt, Artificial Sequence
  Description of Artificial Sequence: Synthetic oligonucleotide
ucgcgcagggaguggggcc

SEQ ID NO: 1590033 - RNA, 19 nt, Artificial Sequence
  Description of Artificial Sequence: Synthetic oligonucleotide
ggagucugucagaugcagg

SEQ ID NO: 1590034 - RNA, 19 nt, Artificial Sequence
  Description of Artificial Sequence: Synthetic oligonucleotide
gcuagguggacagugcuga

SEQ ID NO: 1590035 - RNA, 19 nt, Artificial Sequence
  Description of Artificial Sequence: Synthetic oligonucleotide
gcagcauggagagagagcu

SEQ ID NO: 1590036 - RNA, 19 nt, Artificial Sequence
  Description of Artificial Sequence: Synthetic oligonucleotide
gguaguuucaugagacaaa

SEQ ID NO: 1590037 - RNA, 19 nt, Artificial Sequence
  Description of Artificial Sequence: Synthetic oligonucleotide
ccauaccucagaagccugc

SEQ ID NO: 1590038 - RNA, 19 nt, Artificial Sequence
  Description of Artificial Sequence: Synthetic oligonucleotide
gguggacagugcugacugg

SEQ ID NO: 1590039 - RNA, 19 nt, Artificial Sequence
  Description of Artificial Sequence: Synthetic oligonucleotide
acuugucaccgaagcugcg

SEQ ID NO: 1590040 - RNA, 19 nt, Artificial Sequence
  Description of Artificial Sequence: Synthetic oligonucleotide
gggagucugucagaugcag

SEQ ID NO: 1590041 - RNA, 19 nt, Artificial Sequence
  Description of Artificial Sequence: Synthetic oligonucleotide
cagcaauauuuagucucac

SEQ ID NO: 1590042 - RNA, 19 nt, Artificial Sequence
  Description of Artificial Sequence: Synthetic oligonucleotide
ugcugucgccucccauggc

SEQ ID NO: 1590043 - RNA, 19 nt, Artificial Sequence
  Description of Artificial Sequence: Synthetic oligonucleotide
accauaccucagaagccug

SEQ ID NO: 1590044 - RNA, 19 nt, Artificial Sequence
  Description of Artificial Sequence: Synthetic oligonucleotide
uccgucccuguuucuugac

SEQ ID NO: 1590045 - RNA, 19 nt, Artificial Sequence
  Description of Artificial Sequence: Synthetic oligonucleotide
cugucagaugcaggcugcc

SEQ ID NO: 1590046 - RNA, 19 nt, Artificial Sequence
  Description of Artificial Sequence: Synthetic oligonucleotide
caugucgcgcagggagugg

SEQ ID NO: 1590047 - RNA, 19 nt, Artificial Sequence
  Description of Artificial Sequence: Synthetic oligonucleotide
cuagcacagugggacacca

SEQ ID NO: 1590048 - RNA, 19 nt, Artificial Sequence
  Description of Artificial Sequence: Synthetic oligonucleotide
ggacagugcugacugguaa

SEQ ID NO: 1590049 - RNA, 19 nt, Artificial Sequence
  Description of Artificial Sequence: Synthetic oligonucleotide
aagcugcgggccaucagua

SEQ ID NO: 1590050 - RNA, 19 nt, Artificial Sequence
  Description of Artificial Sequence: Synthetic oligonucleotide
uccgggcugggcgugcugu

SEQ ID NO: 1590051 - RNA, 19 nt, Artificial Sequence
  Description of Artificial Sequence: Synthetic oligonucleotide
ccagcugacacagccauca

SEQ ID NO: 1590052 - RNA, 19 nt, Artificial Sequence
  Description of Artificial Sequence: Synthetic oligonucleotide
ccggccauggcgcgcagcg

SEQ ID NO: 1590053 - RNA, 19 nt, Artificial Sequence
  Description of Artificial Sequence: Synthetic oligonucleotide
aggcugccucuccauacau

SEQ ID NO: 1590054 - RNA, 19 nt, Artificial Sequence
  Description of Artificial Sequence: Synthetic oligonucleotide
gcgggugcggcaugucgcg

SEQ ID NO: 1590055 - RNA, 19 nt, Artificial Sequence
  Description of Artificial Sequence: Synthetic oligonucleotide
ccauuuggcaacagcaaua

SEQ ID NO: 1590056 - RNA, 19 nt, Artificial Sequence
  Description of Artificial Sequence: Synthetic oligonucleotide
gauaugagagagacaucuu

SEQ ID NO: 1590057 - RNA, 19 nt, Artificial Sequence
  Description of Artificial Sequence: Synthetic oligonucleotide
gucgcgcagggaguggggc

SEQ ID NO: 1590058 - RNA, 19 nt, Artificial Sequence
  Description of Artificial Sequence: Synthetic oligonucleotide
ggcaauuaguggguacuga

SEQ ID NO: 1590059 - RNA, 19 nt, Artificial Sequence
  Description of Artificial Sequence: Synthetic oligonucleotide
cugguuugugcuaguuugu

SEQ ID NO: 1590060 - RNA, 19 nt, Artificial Sequence
  Description of Artificial Sequence: Synthetic oligonucleotide
caccauaccucagaagccu

SEQ ID NO: 1590061 - RNA, 19 nt, Artificial Sequence
  Description of Artificial Sequence: Synthetic oligonucleotide
cugggcgugcugucgccuc

SEQ ID NO: 1590062 - RNA, 19 nt, Artificial Sequence
  Description of Artificial Sequence: Synthetic oligonucleotide
gcaauacaaauucuucguu

SEQ ID NO: 1590063 - RNA, 19 nt, Artificial Sequence
  Description of Artificial Sequence: Synthetic oligonucleotide
ggcuagguggacagugcug

SEQ ID NO: 1590064 - RNA, 19 nt, Artificial Sequence
  Description of Artificial Sequence: Synthetic oligonucleotide
cagccaucacucuguuaca

SEQ ID NO: 1590065 - RNA, 19 nt, Artificial Sequence
  Description of Artificial Sequence: Synthetic oligonucleotide
guggacagugcugacuggu

SEQ ID NO: 1590066 - RNA, 19 nt, Artificial Sequence
  Description of Artificial Sequence: Synthetic oligonucleotide
accgaagcugcgggccauc

SEQ ID NO: 1590067 - RNA, 19 nt, Artificial Sequence
  Description of Artificial Sequence: Synthetic oligonucleotide
cacuuaugcucacaacuuu

SEQ ID NO: 1590068 - RNA, 19 nt, Artificial Sequence
  Description of Artificial Sequence: Synthetic oligonucleotide
ccggcuagguggacagugc

SEQ ID NO: 1590069 - RNA, 19 nt, Artificial Sequence
  Description of Artificial Sequence: Synthetic oligonucleotide
agguccgggcugggcgugc

SEQ ID NO: 1590070 - RNA, 19 nt, Artificial Sequence
  Description of Artificial Sequence: Synthetic oligonucleotide
gcaugucgcgcagggagug

SEQ ID NO: 1590071 - RNA, 19 nt, Artificial Sequence
  Description of Artificial Sequence: Synthetic oligonucleotide
cauaccucagaagccugcu

SEQ ID NO: 1590072 - RNA, 19 nt, Artificial Sequence
  Description of Artificial Sequence: Synthetic oligonucleotide
ugcgggccaucaguagguc

SEQ ID NO: 1590073 - RNA, 19 nt, Artificial Sequence
  Description of Artificial Sequence: Synthetic oligonucleotide
uggagccggccagcgggug

SEQ ID NO: 1590074 - RNA, 19 nt, Artificial Sequence
  Description of Artificial Sequence: Synthetic oligonucleotide
gcauggagagagagcuagc

SEQ ID NO: 1590075 - RNA, 19 nt, Artificial Sequence
  Description of Artificial Sequence: Synthetic oligonucleotide
gcgcgcagcgcucgggacc

SEQ ID NO: 1590076 - RNA, 19 nt, Artificial Sequence
  Description of Artificial Sequence: Synthetic oligonucleotide
ccaaaguggacaagaacuu

SEQ ID NO: 1590077 - RNA, 19 nt, Artificial Sequence
  Description of Artificial Sequence: Synthetic oligonucleotide
gggugcggcaugucgcgca

SEQ ID NO: 1590078 - RNA, 19 nt, Artificial Sequence
  Description of Artificial Sequence: Synthetic oligonucleotide
ccaucaguagguccgggcu

SEQ ID NO: 1590079 - RNA, 19 nt, Artificial Sequence
  Description of Artificial Sequence: Synthetic oligonucleotide
gcacuuaugcucacaacuu

SEQ ID NO: 1590080 - RNA, 19 nt, Artificial Sequence
  Description of Artificial Sequence: Synthetic oligonucleotide
cguuuaccucaaaauguaa

SEQ ID NO: 1590081 - RNA, 19 nt, Artificial Sequence
  Description of Artificial Sequence: Synthetic oligonucleotide
caccaauccgucccuguuu

SEQ ID NO: 1590082 - RNA, 19 nt, Artificial Sequence
  Description of Artificial Sequence: Synthetic oligonucleotide
caauccgucccuguuucuu

SEQ ID NO: 1590083 - RNA, 19 nt, Artificial Sequence
  Description of Artificial Sequence: Synthetic oligonucleotide
gucccuguuucuugacauu

SEQ ID NO: 1590084 - RNA, 19 nt, Artificial Sequence
  Description of Artificial Sequence: Synthetic oligonucleotide
cccaacccucagcaccggc

SEQ ID NO: 1590085 - RNA, 19 nt, Artificial Sequence
  Description of Artificial Sequence: Synthetic oligonucleotide
ggcgcgcagcgcucgggac

SEQ ID NO: 1590086 - RNA, 19 nt, Artificial Sequence
  Description of Artificial Sequence: Synthetic oligonucleotide
ggccuauauuaaguuucua

SEQ ID NO: 1590087 - RNA, 19 nt, Artificial Sequence
  Description of Artificial Sequence: Synthetic oligonucleotide
cgcgcagggaguggggccc

SEQ ID NO: 1590088 - RNA, 19 nt, Artificial Sequence
  Description of Artificial Sequence: Synthetic oligonucleotide
cgcgcagcgcucgggaccc

SEQ ID NO: 1590089 - RNA, 19 nt, Artificial Sequence
  Description of Artificial Sequence: Synthetic oligonucleotide
ggcgugcugucgccuccca

SEQ ID NO: 1590090 - RNA, 19 nt, Artificial Sequence
  Description of Artificial Sequence: Synthetic oligonucleotide
cccuguuucuugacauuau

SEQ ID NO: 1590091 - RNA, 19 nt, Artificial Sequence
  Description of Artificial Sequence: Synthetic oligonucleotide
cagcaccggcuagguggac

SEQ ID NO: 1590092 - RNA, 19 nt, Artificial Sequence
  Description of Artificial Sequence: Synthetic oligonucleotide
ccccaccucagaucacuua

SEQ ID NO: 1590093 - RNA, 19 nt, Artificial Sequence
  Description of Artificial Sequence: Synthetic oligonucleotide
gccauggcgcgcagcgcuc

SEQ ID NO: 1590094 - RNA, 19 nt, Artificial Sequence
  Description of Artificial Sequence: Synthetic oligonucleotide
ccgccccggccauggcgcg

SEQ ID NO: 1590095 - RNA, 19 nt, Artificial Sequence
  Description of Artificial Sequence: Synthetic oligonucleotide
ccgaagcugcgggccauca

SEQ ID NO: 1590096 - RNA, 19 nt, Artificial Sequence
  Description of Artificial Sequence: Synthetic oligonucleotide
gcgcagggaguggggcccc

SEQ ID NO: 1590097 - RNA, 19 nt, Artificial Sequence
  Description of Artificial Sequence: Synthetic oligonucleotide
gcggcaugucgcgcaggga

SEQ ID NO: 1590098 - RNA, 19 nt, Artificial Sequence
  Description of Artificial Sequence: Synthetic oligonucleotide
ccaauccgucccuguuucu

SEQ ID NO: 1590099 - RNA, 19 nt, Artificial Sequence
  Description of Artificial Sequence: Synthetic oligonucleotide
caccgaagcugcgggccau

SEQ ID NO: 1590100 - RNA, 19 nt, Artificial Sequence
  Description of Artificial Sequence: Synthetic oligonucleotide
cgggugcggcaugucgcgc

SEQ ID NO: 1590101 - RNA, 19 nt, Artificial Sequence
  Description of Artificial Sequence: Synthetic oligonucleotide
gcgugcugucgccucccau

SEQ ID NO: 1590102 - RNA, 19 nt, Artificial Sequence
  Description of Artificial Sequence: Synthetic oligonucleotide
gcagcgcucgggacccgcu

SEQ ID NO: 1590103 - RNA, 19 nt, Artificial Sequence
  Description of Artificial Sequence: Synthetic oligonucleotide
caccggcuagguggacagu

SEQ ID NO: 1590104 - RNA, 19 nt, Artificial Sequence
  Description of Artificial Sequence: Synthetic oligonucleotide
gcgcagcgcucgggacccg

SEQ ID NO: 1590105 - RNA, 19 nt, Artificial Sequence
  Description of Artificial Sequence: Synthetic oligonucleotide
gggccccgccccggccaug

SEQ ID NO: 1590106 - RNA, 19 nt, Artificial Sequence
  Description of Artificial Sequence: Synthetic oligonucleotide
aacaccaacccuuauaugc

SEQ ID NO: 1590107 - RNA, 19 nt, Artificial Sequence
  Description of Artificial Sequence: Synthetic oligonucleotide
aaauguaagcucccgaucc

SEQ ID NO: 1590108 - RNA, 19 nt, Artificial Sequence
  Description of Artificial Sequence: Synthetic oligonucleotide
uuacaaaccacuaagugag

SEQ ID NO: 1590109 - RNA, 19 nt, Artificial Sequence
  Description of Artificial Sequence: Synthetic oligonucleotide
uguguuggaaauuugaucc

SEQ ID NO: 1590110 - RNA, 19 nt, Artificial Sequence
  Description of Artificial Sequence: Synthetic oligonucleotide
aaucuuacuucuucuaccc

SEQ ID NO: 1590111 - RNA, 19 nt, Artificial Sequence
  Description of Artificial Sequence: Synthetic oligonucleotide
ucaucuaaugaauuuaacg

SEQ ID NO: 1590112 - RNA, 19 nt, Artificial Sequence
  Description of Artificial Sequence: Synthetic oligonucleotide
aaacuuaaguaaaagagac

SEQ ID NO: 1590113 - RNA, 19 nt, Artificial Sequence
  Description of Artificial Sequence: Synthetic oligonucleotide
aauauuggcagcucuuccc

SEQ ID NO: 1590114 - RNA, 19 nt, Artificial Sequence
  Description of Artificial Sequence: Synthetic oligonucleotide
aucauugagaauaagaucg

SEQ ID NO: 1590115 - RNA, 19 nt, Artificial Sequence
  Description of Artificial Sequence: Synthetic oligonucleotide
uauuguauguauaaugugc

SEQ ID NO: 1590116 - RNA, 19 nt, Artificial Sequence
  Description of Artificial Sequence: Synthetic oligonucleotide
aguauuagaaagccuaggc

SEQ ID NO: 1590117 - RNA, 19 nt, Artificial Sequence
  Description of Artificial Sequence: Synthetic oligonucleotide
caucuaaugaauuuaacgc

SEQ ID NO: 1590118 - RNA, 19 nt, Artificial Sequence
  Description of Artificial Sequence: Synthetic oligonucleotide
uccuaugccauauaaauag

SEQ ID NO: 1590119 - RNA, 19 nt, Artificial Sequence
  Description of Artificial Sequence: Synthetic oligonucleotide
aaaagauccacugaagauc

SEQ ID NO: 1590120 - RNA, 19 nt, Artificial Sequence
  Description of Artificial Sequence: Synthetic oligonucleotide
uauuagaaagccuaggcug

SEQ ID NO: 1590121 - RNA, 19 nt, Artificial Sequence
  Description of Artificial Sequence: Synthetic oligonucleotide
ugaacuuugucacuaaagc

SEQ ID NO: 1590122 - RNA, 19 nt, Artificial Sequence
  Description of Artificial Sequence: Synthetic oligonucleotide
aauagauuuguacauggcu

SEQ ID NO: 1590123 - RNA, 19 nt, Artificial Sequence
  Description of Artificial Sequence: Synthetic oligonucleotide
cuaagugaguauuagaaag

SEQ ID NO: 1590124 - RNA, 19 nt, Artificial Sequence
  Description of Artificial Sequence: Synthetic oligonucleotide
uuuacaaaccacuaaguga

SEQ ID NO: 1590125 - RNA, 19 nt, Artificial Sequence
  Description of Artificial Sequence: Synthetic oligonucleotide
uccgcuaagaaauugagca

SEQ ID NO: 1590126 - RNA, 19 nt, Artificial Sequence
  Description of Artificial Sequence: Synthetic oligonucleotide
ucuaaugaauuuaacgcag

SEQ ID NO: 1590127 - RNA, 19 nt, Artificial Sequence
  Description of Artificial Sequence: Synthetic oligonucleotide
aaugacuaguucguggucc

SEQ ID NO: 1590128 - RNA, 19 nt, Artificial Sequence
  Description of Artificial Sequence: Synthetic oligonucleotide
acugauaucaccaucauug

SEQ ID NO: 1590129 - RNA, 19 nt, Artificial Sequence
  Description of Artificial Sequence: Synthetic oligonucleotide
aaagaugaaauucuccgcu

SEQ ID NO: 1590130 - RNA, 19 nt, Artificial Sequence
  Description of Artificial Sequence: Synthetic oligonucleotide
uaagaaauugagcagcuca

SEQ ID NO: 1590131 - RNA, 19 nt, Artificial Sequence
  Description of Artificial Sequence: Synthetic oligonucleotide
auagcuuacacauucggag

SEQ ID NO: 1590132 - RNA, 19 nt, Artificial Sequence
  Description of Artificial Sequence: Synthetic oligonucleotide
uguauaaugugccugugug

SEQ ID NO: 1590133 - RNA, 19 nt, Artificial Sequence
  Description of Artificial Sequence: Synthetic oligonucleotide
uccacgaaugacuaguucg

SEQ ID NO: 1590134 - RNA, 19 nt, Artificial Sequence
  Description of Artificial Sequence: Synthetic oligonucleotide
aagcaugacaaccauagca

SEQ ID NO: 1590135 - RNA, 19 nt, Artificial Sequence
  Description of Artificial Sequence: Synthetic oligonucleotide
gaacuuucuaaagagaucc

SEQ ID NO: 1590136 - RNA, 19 nt, Artificial Sequence
  Description of Artificial Sequence: Synthetic oligonucleotide
ucccauaaaacuaacagaa

SEQ ID NO: 1590137 - RNA, 19 nt, Artificial Sequence
  Description of Artificial Sequence: Synthetic oligonucleotide
ugguaugccacuauugagg

SEQ ID NO: 1590138 - RNA, 19 nt, Artificial Sequence
  Description of Artificial Sequence: Synthetic oligonucleotide
uguuggauugaagacaugg

SEQ ID NO: 1590139 - RNA, 19 nt, Artificial Sequence
  Description of Artificial Sequence: Synthetic oligonucleotide
uaugcugagacucugugga

SEQ ID NO: 1590140 - RNA, 19 nt, Artificial Sequence
  Description of Artificial Sequence: Synthetic oligonucleotide
augucaaacugauaucacc

SEQ ID NO: 1590141 - RNA, 19 nt, Artificial Sequence
  Description of Artificial Sequence: Synthetic oligonucleotide
auuguauguauaaugugcc

SEQ ID NO: 1590142 - RNA, 19 nt, Artificial Sequence
  Description of Artificial Sequence: Synthetic oligonucleotide
ugucaaacugauaucacca

SEQ ID NO: 1590143 - RNA, 19 nt, Artificial Sequence
  Description of Artificial Sequence: Synthetic oligonucleotide
auuccaauagauuuguaca

SEQ ID NO: 1590144 - RNA, 19 nt, Artificial Sequence
  Description of Artificial Sequence: Synthetic oligonucleotide
aagagaacagauugcucac

SEQ ID NO: 1590145 - RNA, 19 nt, Artificial Sequence
  Description of Artificial Sequence: Synthetic oligonucleotide
aauaagcaccaaaugcucc

SEQ ID NO: 1590146 - RNA, 19 nt, Artificial Sequence
  Description of Artificial Sequence: Synthetic oligonucleotide
acaagggguaaauauuggc

SEQ ID NO: 1590147 - RNA, 19 nt, Artificial Sequence
  Description of Artificial Sequence: Synthetic oligonucleotide
uguagcagcacccauugca

SEQ ID NO: 1590148 - RNA, 19 nt, Artificial Sequence
  Description of Artificial Sequence: Synthetic oligonucleotide
aggcaaaugccauugcacc

SEQ ID NO: 1590149 - RNA, 19 nt, Artificial Sequence
  Description of Artificial Sequence: Synthetic oligonucleotide
ugugagucaacaccaaccc

SEQ ID NO: 1590150 - RNA, 19 nt, Artificial Sequence
  Description of Artificial Sequence: Synthetic oligonucleotide
ucccaagaaaauaagcacc

SEQ ID NO: 1590151 - RNA, 19 nt, Artificial Sequence
  Description of Artificial Sequence: Synthetic oligonucleotide
aaccacaccugugaaaccc

SEQ ID NO: 1590152 - RNA, 19 nt, Artificial Sequence
  Description of Artificial Sequence: Synthetic oligonucleotide
aaaggaaccucucauccca

SEQ ID NO: 1590153 - RNA, 19 nt, Artificial Sequence
  Description of Artificial Sequence: Synthetic oligonucleotide
uugagaauaagaucggagu

SEQ ID NO: 1590154 - RNA, 19 nt, Artificial Sequence
  Description of Artificial Sequence: Synthetic oligonucleotide
aaauucuccgcuaagaaau

SEQ ID NO: 1590155 - RNA, 19 nt, Artificial Sequence
  Description of Artificial Sequence: Synthetic oligonucleotide
ugugaaaggaacuuucuaa

SEQ ID NO: 1590156 - RNA, 19 nt, Artificial Sequence
  Description of Artificial Sequence: Synthetic oligonucleotide
uauauagcuuacacauucg

SEQ ID NO: 1590157 - RNA, 19 nt, Artificial Sequence
  Description of Artificial Sequence: Synthetic oligonucleotide
uacacauucggagacaugc

SEQ ID NO: 1590158 - RNA, 19 nt, Artificial Sequence
  Description of Artificial Sequence: Synthetic oligonucleotide
cuuaaagagaacagauugc

SEQ ID NO: 1590159 - RNA, 19 nt, Artificial Sequence
  Description of Artificial Sequence: Synthetic oligonucleotide
aaaugcuccuacuacaaau

SEQ ID NO: 1590160 - RNA, 19 nt, Artificial Sequence
  Description of Artificial Sequence: Synthetic oligonucleotide
uuucuaaagagauccggcc

SEQ ID NO: 1590161 - RNA, 19 nt, Artificial Sequence
  Description of Artificial Sequence: Synthetic oligonucleotide
cuuggugugagucaacacc

SEQ ID NO: 1590162 - RNA, 19 nt, Artificial Sequence
  Description of Artificial Sequence: Synthetic oligonucleotide
aaauaagcaccaaaugcuc

SEQ ID NO: 1590163 - RNA, 19 nt, Artificial Sequence
  Description of Artificial Sequence: Synthetic oligonucleotide
auauagcuuacacauucgg

SEQ ID NO: 1590164 - RNA, 19 nt, Artificial Sequence
  Description of Artificial Sequence: Synthetic oligonucleotide
aagaucccaaggaagauuc

SEQ ID NO: 1590165 - RNA, 19 nt, Artificial Sequence
  Description of Artificial Sequence: Synthetic oligonucleotide
aucuaaugaauuuaacgca

SEQ ID NO: 1590166 - RNA, 19 nt, Artificial Sequence
  Description of Artificial Sequence: Synthetic oligonucleotide
auuauuguauguauaaugu

SEQ ID NO: 1590167 - RNA, 19 nt, Artificial Sequence
  Description of Artificial Sequence: Synthetic oligonucleotide
ugugaaaccccaagcuucg

SEQ ID NO: 1590168 - RNA, 19 nt, Artificial Sequence
  Description of Artificial Sequence: Synthetic oligonucleotide
aggguacuuauauucuucc

SEQ ID NO: 1590169 - RNA, 19 nt, Artificial Sequence
  Description of Artificial Sequence: Synthetic oligonucleotide
uuaacgcagguucagaauc

SEQ ID NO: 1590170 - RNA, 19 nt, Artificial Sequence
  Description of Artificial Sequence: Synthetic oligonucleotide
gacaucaagaagaacagac

SEQ ID NO: 1590171 - RNA, 19 nt, Artificial Sequence
  Description of Artificial Sequence: Synthetic oligonucleotide
ucaacaccaacccuuauau

SEQ ID NO: 1590172 - RNA, 19 nt, Artificial Sequence
  Description of Artificial Sequence: Synthetic oligonucleotide
ucauugagaauaagaucgg

SEQ ID NO: 1590173 - RNA, 19 nt, Artificial Sequence
  Description of Artificial Sequence: Synthetic oligonucleotide
aagagauccggccaauaug

SEQ ID NO: 1590174 - RNA, 19 nt, Artificial Sequence
  Description of Artificial Sequence: Synthetic oligonucleotide
uuugccgugcguaaguggc

SEQ ID NO: 1590175 - RNA, 19 nt, Artificial Sequence
  Description of Artificial Sequence: Synthetic oligonucleotide
ucacgaauggccaaggcaa

SEQ ID NO: 1590176 - RNA, 19 nt, Artificial Sequence
  Description of Artificial Sequence: Synthetic oligonucleotide
aguaaaagagacaaggggu

SEQ ID NO: 1590177 - RNA, 19 nt, Artificial Sequence
  Description of Artificial Sequence: Synthetic oligonucleotide
ugaguauuagaaagccuag

SEQ ID NO: 1590178 - RNA, 19 nt, Artificial Sequence
  Description of Artificial Sequence: Synthetic oligonucleotide
uggauugaagacaugguuc

SEQ ID NO: 1590179 - RNA, 19 nt, Artificial Sequence
  Description of Artificial Sequence: Synthetic oligonucleotide
uucggagacaugcacuagg

SEQ ID NO: 1590180 - RNA, 19 nt, Artificial Sequence
  Description of Artificial Sequence: Synthetic oligonucleotide
uauagcuuacacauucgga

SEQ ID NO: 1590181 - RNA, 19 nt, Artificial Sequence
  Description of Artificial Sequence: Synthetic oligonucleotide
uguauguauaaugugccug

SEQ ID NO: 1590182 - RNA, 19 nt, Artificial Sequence
  Description of Artificial Sequence: Synthetic oligonucleotide
caauauguagugcagccag

SEQ ID NO: 1590183 - RNA, 19 nt, Artificial Sequence
  Description of Artificial Sequence: Synthetic oligonucleotide
ugaauuuaacgcagguuca

SEQ ID NO: 1590184 - RNA, 19 nt, Artificial Sequence
  Description of Artificial Sequence: Synthetic oligonucleotide
aguguucacaguagaaucc

SEQ ID NO: 1590185 - RNA, 19 nt, Artificial Sequence
  Description of Artificial Sequence: Synthetic oligonucleotide
caaucuuacuucuucuacc

SEQ ID NO: 1590186 - RNA, 19 nt, Artificial Sequence
  Description of Artificial Sequence: Synthetic oligonucleotide
cuaaugaauuuaacgcagg

SEQ ID NO: 1590187 - RNA, 19 nt, Artificial Sequence
  Description of Artificial Sequence: Synthetic oligonucleotide
ucaaacaacugcuucguuc

SEQ ID NO: 1590188 - RNA, 19 nt, Artificial Sequence
  Description of Artificial Sequence: Synthetic oligonucleotide
ucggccaaaaggaagguac

SEQ ID NO: 1590189 - RNA, 19 nt, Artificial Sequence
  Description of Artificial Sequence: Synthetic oligonucleotide
auaugucaaacugauauca

SEQ ID NO: 1590190 - RNA, 19 nt, Artificial Sequence
  Description of Artificial Sequence: Synthetic oligonucleotide
uucuaaagagauccggcca

SEQ ID NO: 1590191 - RNA, 19 nt, Artificial Sequence
  Description of Artificial Sequence: Synthetic oligonucleotide
ucauccaucggaagaacca

SEQ ID NO: 1590192 - RNA, 19 nt, Artificial Sequence
  Description of Artificial Sequence: Synthetic oligonucleotide
agcuuacacauucggagac

SEQ ID NO: 1590193 - RNA, 19 nt, Artificial Sequence
  Description of Artificial Sequence: Synthetic oligonucleotide
caaacuuaaguaaaagaga

SEQ ID NO: 1590194 - RNA, 19 nt, Artificial Sequence
  Description of Artificial Sequence: Synthetic oligonucleotide
acgaaugacuaguucgugg

SEQ ID NO: 1590195 - RNA, 19 nt, Artificial Sequence
  Description of Artificial Sequence: Synthetic oligonucleotide
ucuucuacccaaacuuaag

SEQ ID NO: 1590196 - RNA, 19 nt, Artificial Sequence
  Description of Artificial Sequence: Synthetic oligonucleotide
aguagaauccccauauguc

SEQ ID NO: 1590197 - RNA, 19 nt, Artificial Sequence
  Description of Artificial Sequence: Synthetic oligonucleotide
uuguagguaguacacauuu

SEQ ID NO: 1590198 - RNA, 19 nt, Artificial Sequence
  Description of Artificial Sequence: Synthetic oligonucleotide
ugagucaacaccaacccuu

SEQ ID NO: 1590199 - RNA, 19 nt, Artificial Sequence
  Description of Artificial Sequence: Synthetic oligonucleotide
aaagagauccggccaauau

SEQ ID NO: 1590200 - RNA, 19 nt, Artificial Sequence
  Description of Artificial Sequence: Synthetic oligonucleotide
uauugaggaggacagcacu

SEQ ID NO: 1590201 - RNA, 19 nt, Artificial Sequence
  Description of Artificial Sequence: Synthetic oligonucleotide
auaagaucggaguucauuu

SEQ ID NO: 1590202 - RNA, 19 nt, Artificial Sequence
  Description of Artificial Sequence: Synthetic oligonucleotide
aauauguagugcagccagc

SEQ ID NO: 1590203 - RNA, 19 nt, Artificial Sequence
  Description of Artificial Sequence: Synthetic oligonucleotide
ugucuugugucaucuaaug

SEQ ID NO: 1590204 - RNA, 19 nt, Artificial Sequence
  Description of Artificial Sequence: Synthetic oligonucleotide
ugucaucuaaugaauuuaa

SEQ ID NO: 1590205 - RNA, 19 nt, Artificial Sequence
  Description of Artificial Sequence: Synthetic oligonucleotide
ugcccauaaaucuccuugg

SEQ ID NO: 1590206 - RNA, 19 nt, Artificial Sequence
  Description of Artificial Sequence: Synthetic oligonucleotide
auugagaauaagaucggag

SEQ ID NO: 1590207 - RNA, 19 nt, Artificial Sequence
  Description of Artificial Sequence: Synthetic oligonucleotide
uugguaugccacuauugag

SEQ ID NO: 1590208 - RNA, 19 nt, Artificial Sequence
  Description of Artificial Sequence: Synthetic oligonucleotide
augacuaguucgugguccc

SEQ ID NO: 1590209 - RNA, 19 nt, Artificial Sequence
  Description of Artificial Sequence: Synthetic oligonucleotide
ucuccgcuaagaaauugag

SEQ ID NO: 1590210 - RNA, 19 nt, Artificial Sequence
  Description of Artificial Sequence: Synthetic oligonucleotide
aaugcuccuacuacaaaug

SEQ ID NO: 1590211 - RNA, 19 nt, Artificial Sequence
  Description of Artificial Sequence: Synthetic oligonucleotide
acugcaaccacaccuguga

SEQ ID NO: 1590212 - RNA, 19 nt, Artificial Sequence
  Description of Artificial Sequence: Synthetic oligonucleotide
aauaagaucggaguucauu

SEQ ID NO: 1590213 - RNA, 19 nt, Artificial Sequence
  Description of Artificial Sequence: Synthetic oligonucleotide
uuggauugaagacaugguu

SEQ ID NO: 1590214 - RNA, 19 nt, Artificial Sequence
  Description of Artificial Sequence: Synthetic oligonucleotide
ucucaucccauaaaacuaa

SEQ ID NO: 1590215 - RNA, 19 nt, Artificial Sequence
  Description of Artificial Sequence: Synthetic oligonucleotide
uguuccacgaaugacuagu

SEQ ID NO: 1590216 - RNA, 19 nt, Artificial Sequence
  Description of Artificial Sequence: Synthetic oligonucleotide
aauguaagcucccgaucca

SEQ ID NO: 1590217 - RNA, 19 nt, Artificial Sequence
  Description of Artificial Sequence: Synthetic oligonucleotide
gguucagaaucauccaucg

SEQ ID NO: 1590218 - RNA, 19 nt, Artificial Sequence
  Description of Artificial Sequence: Synthetic oligonucleotide
agcaugacaaccauagcag

SEQ ID NO: 1590219 - RNA, 19 nt, Artificial Sequence
  Description of Artificial Sequence: Synthetic oligonucleotide
ucagaauuguugcccauaa

SEQ ID NO: 1590220 - RNA, 19 nt, Artificial Sequence
  Description of Artificial Sequence: Synthetic oligonucleotide
gaauuguugcccauaaauc

SEQ ID NO: 1590221 - RNA, 19 nt, Artificial Sequence
  Description of Artificial Sequence: Synthetic oligonucleotide
uccaucggaagaaccaggc

SEQ ID NO: 1590222 - RNA, 19 nt, Artificial Sequence
  Description of Artificial Sequence: Synthetic oligonucleotide
acuuguagguaguacacau

SEQ ID NO: 1590223 - RNA, 19 nt, Artificial Sequence
  Description of Artificial Sequence: Synthetic oligonucleotide
guaagcucccgauccaagg

SEQ ID NO: 1590224 - RNA, 19 nt, Artificial Sequence
  Description of Artificial Sequence: Synthetic oligonucleotide
gaguauuagaaagccuagg

SEQ ID NO: 1590225 - RNA, 19 nt, Artificial Sequence
  Description of Artificial Sequence: Synthetic oligonucleotide
gaaagccuaggcuggacug

SEQ ID NO: 1590226 - RNA, 19 nt, Artificial Sequence
  Description of Artificial Sequence: Synthetic oligonucleotide
cacuaagugaguauuagaa

SEQ ID NO: 1590227 - RNA, 19 nt, Artificial Sequence
  Description of Artificial Sequence: Synthetic oligonucleotide
uacaggguacuuauauucu

SEQ ID NO: 1590228 - RNA, 19 nt, Artificial Sequence
  Description of Artificial Sequence: Synthetic oligonucleotide
uuggaaauuugauccaauc

SEQ ID NO: 1590229 - RNA, 19 nt, Artificial Sequence
  Description of Artificial Sequence: Synthetic oligonucleotide
acuauugaggaggacagca

SEQ ID NO: 1590230 - RNA, 19 nt, Artificial Sequence
  Description of Artificial Sequence: Synthetic oligonucleotide
aaugaauuuaacgcagguu

SEQ ID NO: 1590231 - RNA, 19 nt, Artificial Sequence
  Description of Artificial Sequence: Synthetic oligonucleotide
aaugccauugcaccacgaa

SEQ ID NO: 1590232 - RNA, 19 nt, Artificial Sequence
  Description of Artificial Sequence: Synthetic oligonucleotide
aauagcauuuauauagcuu

SEQ ID NO: 1590233 - RNA, 19 nt, Artificial Sequence
  Description of Artificial Sequence: Synthetic oligonucleotide
cugugaaaccccaagcuuc

SEQ ID NO: 1590234 - RNA, 19 nt, Artificial Sequence
  Description of Artificial Sequence: Synthetic oligonucleotide
aaugugccugugugaugcc

SEQ ID NO: 1590235 - RNA, 19 nt, Artificial Sequence
  Description of Artificial Sequence: Synthetic oligonucleotide
uucuccgcuaagaaauuga

SEQ ID NO: 1590236 - RNA, 19 nt, Artificial Sequence
  Description of Artificial Sequence: Synthetic oligonucleotide
auuuaacgcagguucagaa

SEQ ID NO: 1590237 - RNA, 19 nt, Artificial Sequence
  Description of Artificial Sequence: Synthetic oligonucleotide
cuaugcugagacucugugg

SEQ ID NO: 1590238 - RNA, 19 nt, Artificial Sequence
  Description of Artificial Sequence: Synthetic oligonucleotide
gaauuuaacgcagguucag

SEQ ID NO: 1590239 - RNA, 19 nt, Artificial Sequence
  Description of Artificial Sequence: Synthetic oligonucleotide
accaaauacccacacagua

SEQ ID NO: 1590240 - RNA, 19 nt, Artificial Sequence
  Description of Artificial Sequence: Synthetic oligonucleotide
ucaucccauaaaacuaaca

SEQ ID NO: 1590241 - RNA, 19 nt, Artificial Sequence
  Description of Artificial Sequence: Synthetic oligonucleotide
caguguucacaguagaauc

SEQ ID NO: 1590242 - RNA, 19 nt, Artificial Sequence
  Description of Artificial Sequence: Synthetic oligonucleotide
cauaugucaaacugauauc

SEQ ID NO: 1590243 - RNA, 19 nt, Artificial Sequence
  Description of Artificial Sequence: Synthetic oligonucleotide
uucuucuacccaaacuuaa

SEQ ID NO: 1590244 - RNA, 19 nt, Artificial Sequence
  Description of Artificial Sequence: Synthetic oligonucleotide
uucuuccuaugccauauaa

SEQ ID NO: 1590245 - RNA, 19 nt, Artificial Sequence
  Description of Artificial Sequence: Synthetic oligonucleotide
uguaagcucccgauccaag

SEQ ID NO: 1590246 - RNA, 19 nt, Artificial Sequence
  Description of Artificial Sequence: Synthetic oligonucleotide
uucuacccaaacuuaagua

SEQ ID NO: 1590247 - RNA, 19 nt, Artificial Sequence
  Description of Artificial Sequence: Synthetic oligonucleotide
ucuuccuaugccauauaaa

SEQ ID NO: 1590248 - RNA, 19 nt, Artificial Sequence
  Description of Artificial Sequence: Synthetic oligonucleotide
cacuaggacuuguagguag

SEQ ID NO: 1590249 - RNA, 19 nt, Artificial Sequence
  Description of Artificial Sequence: Synthetic oligonucleotide
caagggguaaauauuggca

SEQ ID NO: 1590250 - RNA, 19 nt, Artificial Sequence
  Description of Artificial Sequence: Synthetic oligonucleotide
uuuauauagcuuacacauu

SEQ ID NO: 1590251 - RNA, 19 nt, Artificial Sequence
  Description of Artificial Sequence: Synthetic oligonucleotide
gagaauaagaucggaguuc

SEQ ID NO: 1590252 - RNA, 19 nt, Artificial Sequence
  Description of Artificial Sequence: Synthetic oligonucleotide
uuuaacgcagguucagaau

SEQ ID NO: 1590253 - RNA, 19 nt, Artificial Sequence
  Description of Artificial Sequence: Synthetic oligonucleotide
gaaccaggcguguuccacg

SEQ ID NO: 1590254 - RNA, 19 nt, Artificial Sequence
  Description of Artificial Sequence: Synthetic oligonucleotide
agacaagggguaaauauug

SEQ ID NO: 1590255 - RNA, 19 nt, Artificial Sequence
  Description of Artificial Sequence: Synthetic oligonucleotide
aauuuaacgcagguucaga

SEQ ID NO: 1590256 - RNA, 19 nt, Artificial Sequence
  Description of Artificial Sequence: Synthetic oligonucleotide
gaacagaccugucuccagc

SEQ ID NO: 1590257 - RNA, 19 nt, Artificial Sequence
  Description of Artificial Sequence: Synthetic oligonucleotide
uaaauauuggcagcucuuc

SEQ ID NO: 1590258 - RNA, 19 nt, Artificial Sequence
  Description of Artificial Sequence: Synthetic oligonucleotide
auuugccgugcguaagugg

SEQ ID NO: 1590259 - RNA, 19 nt, Artificial Sequence
  Description of Artificial Sequence: Synthetic oligonucleotide
uagcuuacacauucggaga

SEQ ID NO: 1590260 - RNA, 19 nt, Artificial Sequence
  Description of Artificial Sequence: Synthetic oligonucleotide
uccccauaugucaaacuga

SEQ ID NO: 1590261 - RNA, 19 nt, Artificial Sequence
  Description of Artificial Sequence: Synthetic oligonucleotide
caugcacuaggacuuguag

SEQ ID NO: 1590262 - RNA, 19 nt, Artificial Sequence
  Description of Artificial Sequence: Synthetic oligonucleotide
gacaagggguaaauauugg

SEQ ID NO: 1590263 - RNA, 19 nt, Artificial Sequence
  Description of Artificial Sequence: Synthetic oligonucleotide
aacuuucuaaagagauccg

SEQ ID NO: 1590264 - RNA, 19 nt, Artificial Sequence
  Description of Artificial Sequence: Synthetic oligonucleotide
auauuggcagcucuuccca

SEQ ID NO: 1590265 - RNA, 19 nt, Artificial Sequence
  Description of Artificial Sequence: Synthetic oligonucleotide
gugaacuuugucacuaaag

SEQ ID NO: 1590266 - RNA, 19 nt, Artificial Sequence
  Description of Artificial Sequence: Synthetic oligonucleotide
aucauccaucggaagaacc

SEQ ID NO: 1590267 - RNA, 19 nt, Artificial Sequence
  Description of Artificial Sequence: Synthetic oligonucleotide
ugaacaucauuugccgugc

SEQ ID NO: 1590268 - RNA, 19 nt, Artificial Sequence
  Description of Artificial Sequence: Synthetic oligonucleotide
uuguauguauaaugugccu

SEQ ID NO: 1590269 - RNA, 19 nt, Artificial Sequence
  Description of Artificial Sequence: Synthetic oligonucleotide
aacuuaaguaaaagagaca

SEQ ID NO: 1590270 - RNA, 19 nt, Artificial Sequence
  Description of Artificial Sequence: Synthetic oligonucleotide
agagauccggccaauaugu

SEQ ID NO: 1590271 - RNA, 19 nt, Artificial Sequence
  Description of Artificial Sequence: Synthetic oligonucleotide
uaacgcagguucagaauca

SEQ ID NO: 1590272 - RNA, 19 nt, Artificial Sequence
  Description of Artificial Sequence: Synthetic oligonucleotide
cuccuacuacaaauguugg

SEQ ID NO: 1590273 - RNA, 19 nt, Artificial Sequence
  Description of Artificial Sequence: Synthetic oligonucleotide
gugugagucaacaccaacc

SEQ ID NO: 1590274 - RNA, 19 nt, Artificial Sequence
  Description of Artificial Sequence: Synthetic oligonucleotide
gaacuuugucacuaaagcu

SEQ ID NO: 1590275 - RNA, 19 nt, Artificial Sequence
  Description of Artificial Sequence: Synthetic oligonucleotide
uauucuuccuaugccauau

SEQ ID NO: 1590276 - RNA, 19 nt, Artificial Sequence
  Description of Artificial Sequence: Synthetic oligonucleotide
gaagaaccaggcguguucc

SEQ ID NO: 1590277 - RNA, 19 nt, Artificial Sequence
  Description of Artificial Sequence: Synthetic oligonucleotide
aaaccacuaagugaguauu

SEQ ID NO: 1590278 - RNA, 19 nt, Artificial Sequence
  Description of Artificial Sequence: Synthetic oligonucleotide
uuccuaugccauauaaaua

SEQ ID NO: 1590279 - RNA, 19 nt, Artificial Sequence
  Description of Artificial Sequence: Synthetic oligonucleotide
ucggagacaugcacuagga

SEQ ID NO: 1590280 - RNA, 19 nt, Artificial Sequence
  Description of Artificial Sequence: Synthetic oligonucleotide
agauugcucacaaccugcc

SEQ ID NO: 1590281 - RNA, 19 nt, Artificial Sequence
  Description of Artificial Sequence: Synthetic oligonucleotide
caucauugaggacacuuuc

SEQ ID NO: 1590282 - RNA, 19 nt, Artificial Sequence
  Description of Artificial Sequence: Synthetic oligonucleotide
ucguucuaugcugagacuc

SEQ ID NO: 1590283 - RNA, 19 nt, Artificial Sequence
  Description of Artificial Sequence: Synthetic oligonucleotide
aagaacagaccugucucca

SEQ ID NO: 1590284 - RNA, 19 nt, Artificial Sequence
  Description of Artificial Sequence: Synthetic oligonucleotide
uguagguaguacacauuuc

SEQ ID NO: 1590285 - RNA, 19 nt, Artificial Sequence
  Description of Artificial Sequence: Synthetic oligonucleotide
accacgaaggccagcaaac

SEQ ID NO: 1590286 - RNA, 19 nt, Artificial Sequence
  Description of Artificial Sequence: Synthetic oligonucleotide
ucacaugugcaaaguuuac

SEQ ID NO: 1590287 - RNA, 19 nt, Artificial Sequence
  Description of Artificial Sequence: Synthetic oligonucleotide
uguugcagagucaguguuc

SEQ ID NO: 1590288 - RNA, 19 nt, Artificial Sequence
  Description of Artificial Sequence: Synthetic oligonucleotide
cacuauggcaacagcauca

SEQ ID NO: 1590289 - RNA, 19 nt, Artificial Sequence
  Description of Artificial Sequence: Synthetic oligonucleotide
caaauguaagcucccgauc

SEQ ID NO: 1590290 - RNA, 19 nt, Artificial Sequence
  Description of Artificial Sequence: Synthetic oligonucleotide
aguucgugguccccaaaug

SEQ ID NO: 1590291 - RNA, 19 nt, Artificial Sequence
  Description of Artificial Sequence: Synthetic oligonucleotide
aguuuacaaaccacuaagu

SEQ ID NO: 1590292 - RNA, 19 nt, Artificial Sequence
  Description of Artificial Sequence: Synthetic oligonucleotide
guauuagaaagccuaggcu

SEQ ID NO: 1590293 - RNA, 19 nt, Artificial Sequence
  Description of Artificial Sequence: Synthetic oligonucleotide
cuccgcuaagaaauugagc

SEQ ID NO: 1590294 - RNA, 19 nt, Artificial Sequence
  Description of Artificial Sequence: Synthetic oligonucleotide
agaacagaccugucuccag

SEQ ID NO: 1590295 - RNA, 19 nt, Artificial Sequence
  Description of Artificial Sequence: Synthetic oligonucleotide
cacauucggagacaugcac

SEQ ID NO: 1590296 - RNA, 19 nt, Artificial Sequence
  Description of Artificial Sequence: Synthetic oligonucleotide
gccaauauguagugcagcc

SEQ ID NO: 1590297 - RNA, 19 nt, Artificial Sequence
  Description of Artificial Sequence: Synthetic oligonucleotide
gucacgaauggccaaggca

SEQ ID NO: 1590298 - RNA, 19 nt, Artificial Sequence
  Description of Artificial Sequence: Synthetic oligonucleotide
uauguauaaugugccugug

SEQ ID NO: 1590299 - RNA, 19 nt, Artificial Sequence
  Description of Artificial Sequence: Synthetic oligonucleotide
uguuggaaauuugauccaa

SEQ ID NO: 1590300 - RNA, 19 nt, Artificial Sequence
  Description of Artificial Sequence: Synthetic oligonucleotide
uccaaucuuacuucuucua

SEQ ID NO: 1590301 - RNA, 19 nt, Artificial Sequence
  Description of Artificial Sequence: Synthetic oligonucleotide
uucgugguccccaaaugua

SEQ ID NO: 1590302 - RNA, 19 nt, Artificial Sequence
  Description of Artificial Sequence: Synthetic oligonucleotide
caggguacuuauauucuuc

SEQ ID NO: 1590303 - RNA, 19 nt, Artificial Sequence
  Description of Artificial Sequence: Synthetic oligonucleotide
uaguucgugguccccaaau

SEQ ID NO: 1590304 - RNA, 19 nt, Artificial Sequence
  Description of Artificial Sequence: Synthetic oligonucleotide
gcaaaagauccacugaaga

SEQ ID NO: 1590305 - RNA, 19 nt, Artificial Sequence
  Description of Artificial Sequence: Synthetic oligonucleotide
guauaaugugccuguguga

SEQ ID NO: 1590306 - RNA, 19 nt, Artificial Sequence
  Description of Artificial Sequence: Synthetic oligonucleotide
ugucacgaauggccaaggc

SEQ ID NO: 1590307 - RNA, 19 nt, Artificial Sequence
  Description of Artificial Sequence: Synthetic oligonucleotide
agugucacgaauggccaag

SEQ ID NO: 1590308 - RNA, 19 nt, Artificial Sequence
  Description of Artificial Sequence: Synthetic oligonucleotide
cacccaaauguucuuggug

SEQ ID NO: 1590309 - RNA, 19 nt, Artificial Sequence
  Description of Artificial Sequence: Synthetic oligonucleotide
aaccaggcguguuccacga

SEQ ID NO: 1590310 - RNA, 19 nt, Artificial Sequence
  Description of Artificial Sequence: Synthetic oligonucleotide
acaaccugccuuguacagg

SEQ ID NO: 1590311 - RNA, 19 nt, Artificial Sequence
  Description of Artificial Sequence: Synthetic oligonucleotide
caaaugccauugcaccacg

SEQ ID NO: 1590312 - RNA, 19 nt, Artificial Sequence
  Description of Artificial Sequence: Synthetic oligonucleotide
aaucagaaguguggugcug

SEQ ID NO: 1590313 - RNA, 19 nt, Artificial Sequence
  Description of Artificial Sequence: Synthetic oligonucleotide
uagguaguacacauuucuu

SEQ ID NO: 1590314 - RNA, 19 nt, Artificial Sequence
  Description of Artificial Sequence: Synthetic oligonucleotide
guauguauaaugugccugu

SEQ ID NO: 1590315 - RNA, 19 nt, Artificial Sequence
  Description of Artificial Sequence: Synthetic oligonucleotide
agacucuguggacaaauua

SEQ ID NO: 1590316 - RNA, 19 nt, Artificial Sequence
  Description of Artificial Sequence: Synthetic oligonucleotide
ugagacucuguggacaaau

SEQ ID NO: 1590317 - RNA, 19 nt, Artificial Sequence
  Description of Artificial Sequence: Synthetic oligonucleotide
auaaugugccugugugaug

SEQ ID NO: 1590318 - RNA, 19 nt, Artificial Sequence
  Description of Artificial Sequence: Synthetic oligonucleotide
uaagaucggaguucauuuu

SEQ ID NO: 1590319 - RNA, 19 nt, Artificial Sequence
  Description of Artificial Sequence: Synthetic oligonucleotide
gaacacccaaauguucuug

SEQ ID NO: 1590320 - RNA, 19 nt, Artificial Sequence
  Description of Artificial Sequence: Synthetic oligonucleotide
ucacaguagaauccccaua

SEQ ID NO: 1590321 - RNA, 19 nt, Artificial Sequence
  Description of Artificial Sequence: Synthetic oligonucleotide
cucucaucccauaaaacua

SEQ ID NO: 1590322 - RNA, 19 nt, Artificial Sequence
  Description of Artificial Sequence: Synthetic oligonucleotide
ugaggacacuuucaccgaa

SEQ ID NO: 1590323 - RNA, 19 nt, Artificial Sequence
  Description of Artificial Sequence: Synthetic oligonucleotide
ggaaauuugauccaaucuu

SEQ ID NO: 1590324 - RNA, 19 nt, Artificial Sequence
  Description of Artificial Sequence: Synthetic oligonucleotide
cuggacugugucuuguguc

SEQ ID NO: 1590325 - RNA, 19 nt, Artificial Sequence
  Description of Artificial Sequence: Synthetic oligonucleotide
agcgucagccccauguagg

SEQ ID NO: 1590326 - RNA, 19 nt, Artificial Sequence
  Description of Artificial Sequence: Synthetic oligonucleotide
auggccaaggcaaaugcca

SEQ ID NO: 1590327 - RNA, 19 nt, Artificial Sequence
  Description of Artificial Sequence: Synthetic oligonucleotide
guacuuauauucuuccuau

SEQ ID NO: 1590328 - RNA, 19 nt, Artificial Sequence
  Description of Artificial Sequence: Synthetic oligonucleotide
cauccaucggaagaaccag

SEQ ID NO: 1590329 - RNA, 19 nt, Artificial Sequence
  Description of Artificial Sequence: Synthetic oligonucleotide
guacauggcugugacauca

SEQ ID NO: 1590330 - RNA, 19 nt, Artificial Sequence
  Description of Artificial Sequence: Synthetic oligonucleotide
ggagacaugcacuaggacu

SEQ ID NO: 1590331 - RNA, 19 nt, Artificial Sequence
  Description of Artificial Sequence: Synthetic oligonucleotide
uuccacgaaugacuaguuc

SEQ ID NO: 1590332 - RNA, 19 nt, Artificial Sequence
  Description of Artificial Sequence: Synthetic oligonucleotide
agcaccaaaugcuccuacu

SEQ ID NO: 1590333 - RNA, 19 nt, Artificial Sequence
  Description of Artificial Sequence: Synthetic oligonucleotide
gucuugugucaucuaauga

SEQ ID NO: 1590334 - RNA, 19 nt, Artificial Sequence
  Description of Artificial Sequence: Synthetic oligonucleotide
aucauuugccgugcguaag

SEQ ID NO: 1590335 - RNA, 19 nt, Artificial Sequence
  Description of Artificial Sequence: Synthetic oligonucleotide
gaauccccauaugucaaac

SEQ ID NO: 1590336 - RNA, 19 nt, Artificial Sequence
  Description of Artificial Sequence: Synthetic oligonucleotide
gguaugccacuauugagga

SEQ ID NO: 1590337 - RNA, 19 nt, Artificial Sequence
  Description of Artificial Sequence: Synthetic oligonucleotide
aucggaagaaccaggcgug

SEQ ID NO: 1590338 - RNA, 19 nt, Artificial Sequence
  Description of Artificial Sequence: Synthetic oligonucleotide
caagcaugacaaccauagc

SEQ ID NO: 1590339 - RNA, 19 nt, Artificial Sequence
  Description of Artificial Sequence: Synthetic oligonucleotide
acaggguacuuauauucuu

SEQ ID NO: 1590340 - RNA, 19 nt, Artificial Sequence
  Description of Artificial Sequence: Synthetic oligonucleotide
uaggacuuguagguaguac

SEQ ID NO: 1590341 - RNA, 19 nt, Artificial Sequence
  Description of Artificial Sequence: Synthetic oligonucleotide
uuagaaagccuaggcugga

SEQ ID NO: 1590342 - RNA, 19 nt, Artificial Sequence
  Description of Artificial Sequence: Synthetic oligonucleotide
caaaagauccacugaagau

SEQ ID NO: 1590343 - RNA, 19 nt, Artificial Sequence
  Description of Artificial Sequence: Synthetic oligonucleotide
agugaguauuagaaagccu

SEQ ID NO: 1590344 - RNA, 19 nt, Artificial Sequence
  Description of Artificial Sequence: Synthetic oligonucleotide
acaucauuugccgugcgua

SEQ ID NO: 1590345 - RNA, 19 nt, Artificial Sequence
  Description of Artificial Sequence: Synthetic oligonucleotide
uucguucuaugcugagacu

SEQ ID NO: 1590346 - RNA, 19 nt, Artificial Sequence
  Description of Artificial Sequence: Synthetic oligonucleotide
aagaaccaggcguguucca

SEQ ID NO: 1590347 - RNA, 19 nt, Artificial Sequence
  Description of Artificial Sequence: Synthetic oligonucleotide
caucggaagaaccaggcgu

SEQ ID NO: 1590348 - RNA, 19 nt, Artificial Sequence
  Description of Artificial Sequence: Synthetic oligonucleotide
acucccgcaacuuggugaa

SEQ ID NO: 1590349 - RNA, 19 nt, Artificial Sequence
  Description of Artificial Sequence: Synthetic oligonucleotide
gaggacacuuucaccgaag

SEQ ID NO: 1590350 - RNA, 19 nt, Artificial Sequence
  Description of Artificial Sequence: Synthetic oligonucleotide
ugauccaaucuuacuucuu

SEQ ID NO: 1590351 - RNA, 19 nt, Artificial Sequence
  Description of Artificial Sequence: Synthetic oligonucleotide
ccauaugucaaacugauau

SEQ ID NO: 1590352 - RNA, 19 nt, Artificial Sequence
  Description of Artificial Sequence: Synthetic oligonucleotide
acauucggagacaugcacu

SEQ ID NO: 1590353 - RNA, 19 nt, Artificial Sequence
  Description of Artificial Sequence: Synthetic oligonucleotide
agaucccaaggaagauucc

SEQ ID NO: 1590354 - RNA, 19 nt, Artificial Sequence
  Description of Artificial Sequence: Synthetic oligonucleotide
agauuuguacauggcugug

SEQ ID NO: 1590355 - RNA, 19 nt, Artificial Sequence
  Description of Artificial Sequence: Synthetic oligonucleotide
auccaucggaagaaccagg

SEQ ID NO: 1590356 - RNA, 19 nt, Artificial Sequence
  Description of Artificial Sequence: Synthetic oligonucleotide
gucaacaccaacccuuaua

SEQ ID NO: 1590357 - RNA, 19 nt, Artificial Sequence
  Description of Artificial Sequence: Synthetic oligonucleotide
auauucuuccuaugccaua

SEQ ID NO: 1590358 - RNA, 19 nt, Artificial Sequence
  Description of Artificial Sequence: Synthetic oligonucleotide
ggauugaagacaugguucu

SEQ ID NO: 1590359 - RNA, 19 nt, Artificial Sequence
  Description of Artificial Sequence: Synthetic oligonucleotide
cauucggagacaugcacua

SEQ ID NO: 1590360 - RNA, 19 nt, Artificial Sequence
  Description of Artificial Sequence: Synthetic oligonucleotide
uaaguggcagugucacgaa

SEQ ID NO: 1590361 - RNA, 19 nt, Artificial Sequence
  Description of Artificial Sequence: Synthetic oligonucleotide
caguagaauccccauaugu

SEQ ID NO: 1590362 - RNA, 19 nt, Artificial Sequence
  Description of Artificial Sequence: Synthetic oligonucleotide
acaucaucauguguuggaa

SEQ ID NO: 1590363 - RNA, 19 nt, Artificial Sequence
  Description of Artificial Sequence: Synthetic oligonucleotide
aaccccaagcuucggccaa

SEQ ID NO: 1590364 - RNA, 19 nt, Artificial Sequence
  Description of Artificial Sequence: Synthetic oligonucleotide
ugccgugcguaaguggcag

SEQ ID NO: 1590365 - RNA, 19 nt, Artificial Sequence
  Description of Artificial Sequence: Synthetic oligonucleotide
guaugccacuauugaggag

SEQ ID NO: 1590366 - RNA, 19 nt, Artificial Sequence
  Description of Artificial Sequence: Synthetic oligonucleotide
cacaguagaauccccauau

SEQ ID NO: 1590367 - RNA, 19 nt, Artificial Sequence
  Description of Artificial Sequence: Synthetic oligonucleotide
cuaagaaauugagcagcuc

SEQ ID NO: 1590368 - RNA, 19 nt, Artificial Sequence
  Description of Artificial Sequence: Synthetic oligonucleotide
agaccugucuccagcaacu

SEQ ID NO: 1590369 - RNA, 19 nt, Artificial Sequence
  Description of Artificial Sequence: Synthetic oligonucleotide
cuugugucaucuaaugaau

SEQ ID NO: 1590370 - RNA, 19 nt, Artificial Sequence
  Description of Artificial Sequence: Synthetic oligonucleotide
gaacucccgcaacuuggug

SEQ ID NO: 1590371 - RNA, 19 nt, Artificial Sequence
  Description of Artificial Sequence: Synthetic oligonucleotide
gccagcaaacaucaucaug

SEQ ID NO: 1590372 - RNA, 19 nt, Artificial Sequence
  Description of Artificial Sequence: Synthetic oligonucleotide
caaccacaccugugaaacc

SEQ ID NO: 1590373 - RNA, 19 nt, Artificial Sequence
  Description of Artificial Sequence: Synthetic oligonucleotide
gcccauaaaucuccuuggg

SEQ ID NO: 1590374 - RNA, 19 nt, Artificial Sequence
  Description of Artificial Sequence: Synthetic oligonucleotide
gagacaugcacuaggacuu

SEQ ID NO: 1590375 - RNA, 19 nt, Artificial Sequence
  Description of Artificial Sequence: Synthetic oligonucleotide
guucuaugcugagacucug

SEQ ID NO: 1590376 - RNA, 19 nt, Artificial Sequence
  Description of Artificial Sequence: Synthetic oligonucleotide
agcugguugguaugccacu

SEQ ID NO: 1590377 - RNA, 19 nt, Artificial Sequence
  Description of Artificial Sequence: Synthetic oligonucleotide
aauucuccgcuaagaaauu

SEQ ID NO: 1590378 - RNA, 19 nt, Artificial Sequence
  Description of Artificial Sequence: Synthetic oligonucleotide
uugccgugcguaaguggca

SEQ ID NO: 1590379 - RNA, 19 nt, Artificial Sequence
  Description of Artificial Sequence: Synthetic oligonucleotide
guucgugguccccaaaugu

SEQ ID NO: 1590380 - RNA, 19 nt, Artificial Sequence
  Description of Artificial Sequence: Synthetic oligonucleotide
cauguguuggaaauuugau

SEQ ID NO: 1590381 - RNA, 19 nt, Artificial Sequence
  Description of Artificial Sequence: Synthetic oligonucleotide
aggcguguuccacgaauga

SEQ ID NO: 1590382 - RNA, 19 nt, Artificial Sequence
  Description of Artificial Sequence: Synthetic oligonucleotide
gacuaguucguggucccca

SEQ ID NO: 1590383 - RNA, 19 nt, Artificial Sequence
  Description of Artificial Sequence: Synthetic oligonucleotide
aacgcagguucagaaucau

SEQ ID NO: 1590384 - RNA, 19 nt, Artificial Sequence
  Description of Artificial Sequence: Synthetic oligonucleotide
cauugagaauaagaucgga

SEQ ID NO: 1590385 - RNA, 19 nt, Artificial Sequence
  Description of Artificial Sequence: Synthetic oligonucleotide
ccuguagcagcacccauug

SEQ ID NO: 1590386 - RNA, 19 nt, Artificial Sequence
  Description of Artificial Sequence: Synthetic oligonucleotide
uacauggcugugacaucaa

SEQ ID NO: 1590387 - RNA, 19 nt, Artificial Sequence
  Description of Artificial Sequence: Synthetic oligonucleotide
uggugaacuuugucacuaa

SEQ ID NO: 1590388 - RNA, 19 nt, Artificial Sequence
  Description of Artificial Sequence: Synthetic oligonucleotide
caucaucauguguuggaaa

SEQ ID NO: 1590389 - RNA, 19 nt, Artificial Sequence
  Description of Artificial Sequence: Synthetic oligonucleotide
uaaagagauccggccaaua

SEQ ID NO: 1590390 - RNA, 19 nt, Artificial Sequence
  Description of Artificial Sequence: Synthetic oligonucleotide
cauuugccgugcguaagug

SEQ ID NO: 1590391 - RNA, 19 nt, Artificial Sequence
  Description of Artificial Sequence: Synthetic oligonucleotide
aaaugccauugcaccacga

SEQ ID NO: 1590392 - RNA, 19 nt, Artificial Sequence
  Description of Artificial Sequence: Synthetic oligonucleotide
auucggagacaugcacuag

SEQ ID NO: 1590393 - RNA, 19 nt, Artificial Sequence
  Description of Artificial Sequence: Synthetic oligonucleotide
cgcuaagaaauugagcagc

SEQ ID NO: 1590394 - RNA, 19 nt, Artificial Sequence
  Description of Artificial Sequence: Synthetic oligonucleotide
cccauaaaacuaacagaac

SEQ ID NO: 1590395 - RNA, 19 nt, Artificial Sequence
  Description of Artificial Sequence: Synthetic oligonucleotide
gugucacgaauggccaagg

SEQ ID NO: 1590396 - RNA, 19 nt, Artificial Sequence
  Description of Artificial Sequence: Synthetic oligonucleotide
cagcgucagccccauguag

SEQ ID NO: 1590397 - RNA, 19 nt, Artificial Sequence
  Description of Artificial Sequence: Synthetic oligonucleotide
uagaaagccuaggcuggac

SEQ ID NO: 1590398 - RNA, 19 nt, Artificial Sequence
  Description of Artificial Sequence: Synthetic oligonucleotide
caucauuugccgugcguaa

SEQ ID NO: 1590399 - RNA, 19 nt, Artificial Sequence
  Description of Artificial Sequence: Synthetic oligonucleotide
auugaggaggacagcacua

SEQ ID NO: 1590400 - RNA, 19 nt, Artificial Sequence
  Description of Artificial Sequence: Synthetic oligonucleotide
cugugaaaggaacuuucua

SEQ ID NO: 1590401 - RNA, 19 nt, Artificial Sequence
  Description of Artificial Sequence: Synthetic oligonucleotide
gagacaagggguaaauauu

SEQ ID NO: 1590402 - RNA, 19 nt, Artificial Sequence
  Description of Artificial Sequence: Synthetic oligonucleotide
cauagcaguggugccacca

SEQ ID NO: 1590403 - RNA, 19 nt, Artificial Sequence
  Description of Artificial Sequence: Synthetic oligonucleotide
cacgaaugacuaguucgug

SEQ ID NO: 1590404 - RNA, 19 nt, Artificial Sequence
  Description of Artificial Sequence: Synthetic oligonucleotide
gcaaaugccauugcaccac

SEQ ID NO: 1590405 - RNA, 19 nt, Artificial Sequence
  Description of Artificial Sequence: Synthetic oligonucleotide
cacuauugaggaggacagc

SEQ ID NO: 1590406 - RNA, 19 nt, Artificial Sequence
  Description of Artificial Sequence: Synthetic oligonucleotide
caacaaaggaaccucucau

SEQ ID NO: 1590407 - RNA, 19 nt, Artificial Sequence
  Description of Artificial Sequence: Synthetic oligonucleotide
uccggccaauauguagugc

SEQ ID NO: 1590408 - RNA, 19 nt, Artificial Sequence
  Description of Artificial Sequence: Synthetic oligonucleotide
caaaccacuaagugaguau

SEQ ID NO: 1590409 - RNA, 19 nt, Artificial Sequence
  Description of Artificial Sequence: Synthetic oligonucleotide
ccgcuaagaaauugagcag

SEQ ID NO: 1590410 - RNA, 19 nt, Artificial Sequence
  Description of Artificial Sequence: Synthetic oligonucleotide
guauggcuguugucuccag

SEQ ID NO: 1590411 - RNA, 19 nt, Artificial Sequence
  Description of Artificial Sequence: Synthetic oligonucleotide
ugacuaguucguggucccc

SEQ ID NO: 1590412 - RNA, 19 nt, Artificial Sequence
  Description of Artificial Sequence: Synthetic oligonucleotide
guuggauugaagacauggu

SEQ ID NO: 1590413 - RNA, 19 nt, Artificial Sequence
  Description of Artificial Sequence: Synthetic oligonucleotide
ccaucggaagaaccaggcg

SEQ ID NO: 1590414 - RNA, 19 nt, Artificial Sequence
  Description of Artificial Sequence: Synthetic oligonucleotide
ggccaauauguagugcagc

SEQ ID NO: 1590415 - RNA, 19 nt, Artificial Sequence
  Description of Artificial Sequence: Synthetic oligonucleotide
ccaacaaaggaaccucuca

SEQ ID NO: 1590416 - RNA, 19 nt, Artificial Sequence
  Description of Artificial Sequence: Synthetic oligonucleotide
agacaugcacuaggacuug

SEQ ID NO: 1590417 - RNA, 19 nt, Artificial Sequence
  Description of Artificial Sequence: Synthetic oligonucleotide
gguccccaaauguaagcuc

SEQ ID NO: 1590418 - RNA, 19 nt, Artificial Sequence
  Description of Artificial Sequence: Synthetic oligonucleotide
auguaagcucccgauccaa

SEQ ID NO: 1590419 - RNA, 19 nt, Artificial Sequence
  Description of Artificial Sequence: Synthetic oligonucleotide
guaaauauuggcagcucuu

SEQ ID NO: 1590420 - RNA, 19 nt, Artificial Sequence
  Description of Artificial Sequence: Synthetic oligonucleotide
uucggccaaaaggaaggua

SEQ ID NO: 1590421 - RNA, 19 nt, Artificial Sequence
  Description of Artificial Sequence: Synthetic oligonucleotide
ucggaagaaccaggcgugu

SEQ ID NO: 1590422 - RNA, 19 nt, Artificial Sequence
  Description of Artificial Sequence: Synthetic oligonucleotide
gaagaucccaaggaagauu

SEQ ID NO: 1590423 - RNA, 19 nt, Artificial Sequence
  Description of Artificial Sequence: Synthetic oligonucleotide
agucaacaccaacccuuau

SEQ ID NO: 1590424 - RNA, 19 nt, Artificial Sequence
  Description of Artificial Sequence: Synthetic oligonucleotide
gugaaaccccaagcuucgg

SEQ ID NO: 1590425 - RNA, 19 nt, Artificial Sequence
  Description of Artificial Sequence: Synthetic oligonucleotide
ccggccaauauguagugca

SEQ ID NO: 1590426 - RNA, 19 nt, Artificial Sequence
  Description of Artificial Sequence: Synthetic oligonucleotide
caaucagaaguguggugcu

SEQ ID NO: 1590427 - RNA, 19 nt, Artificial Sequence
  Description of Artificial Sequence: Synthetic oligonucleotide
gagucaacaccaacccuua

SEQ ID NO: 1590428 - RNA, 19 nt, Artificial Sequence
  Description of Artificial Sequence: Synthetic oligonucleotide
cugcuucguucuaugcuga

SEQ ID NO: 1590429 - RNA, 19 nt, Artificial Sequence
  Description of Artificial Sequence: Synthetic oligonucleotide
cgauccaaggcaucuucag

SEQ ID NO: 1590430 - RNA, 19 nt, Artificial Sequence
  Description of Artificial Sequence: Synthetic oligonucleotide
caccacgaaggccagcaaa

SEQ ID NO: 1590431 - RNA, 19 nt, Artificial Sequence
  Description of Artificial Sequence: Synthetic oligonucleotide
acgaauggccaaggcaaau

SEQ ID NO: 1590432 - RNA, 19 nt, Artificial Sequence
  Description of Artificial Sequence: Synthetic oligonucleotide
gguauggcuguugucucca

SEQ ID NO: 1590433 - RNA, 19 nt, Artificial Sequence
  Description of Artificial Sequence: Synthetic oligonucleotide
gugagucaacaccaacccu

SEQ ID NO: 1590434 - RNA, 19 nt, Artificial Sequence
  Description of Artificial Sequence: Synthetic oligonucleotide
cuuacacauucggagacau

SEQ ID NO: 1590435 - RNA, 19 nt, Artificial Sequence
  Description of Artificial Sequence: Synthetic oligonucleotide
gcugagacucuguggacaa

SEQ ID NO: 1590436 - RNA, 19 nt, Artificial Sequence
  Description of Artificial Sequence: Synthetic oligonucleotide
ggcguguuccacgaaugac

SEQ ID NO: 1590437 - RNA, 19 nt, Artificial Sequence
  Description of Artificial Sequence: Synthetic oligonucleotide
caccaaauacccacacagu

SEQ ID NO: 1590438 - RNA, 19 nt, Artificial Sequence
  Description of Artificial Sequence: Synthetic oligonucleotide
ccacuaagugaguauuaga

SEQ ID NO: 1590439 - RNA, 19 nt, Artificial Sequence
  Description of Artificial Sequence: Synthetic oligonucleotide
cagaauuguugcccauaaa

SEQ ID NO: 1590440 - RNA, 19 nt, Artificial Sequence
  Description of Artificial Sequence: Synthetic oligonucleotide
cgugguccccaaauguaag

SEQ ID NO: 1590441 - RNA, 19 nt, Artificial Sequence
  Description of Artificial Sequence: Synthetic oligonucleotide
augccacuauugaggagga

SEQ ID NO: 1590442 - RNA, 19 nt, Artificial Sequence
  Description of Artificial Sequence: Synthetic oligonucleotide
acaugcacuaggacuugua

SEQ ID NO: 1590443 - RNA, 19 nt, Artificial Sequence
  Description of Artificial Sequence: Synthetic oligonucleotide
ccaaauguaagcucccgau

SEQ ID NO: 1590444 - RNA, 19 nt, Artificial Sequence
  Description of Artificial Sequence: Synthetic oligonucleotide
cacaccugugaaaccccaa

SEQ ID NO: 1590445 - RNA, 19 nt, Artificial Sequence
  Description of Artificial Sequence: Synthetic oligonucleotide
ggguacuuauauucuuccu

SEQ ID NO: 1590446 - RNA, 19 nt, Artificial Sequence
  Description of Artificial Sequence: Synthetic oligonucleotide
ccuuguacaggguacuuau

SEQ ID NO: 1590447 - RNA, 19 nt, Artificial Sequence
  Description of Artificial Sequence: Synthetic oligonucleotide
cagugucacgaauggccaa

SEQ ID NO: 1590448 - RNA, 19 nt, Artificial Sequence
  Description of Artificial Sequence: Synthetic oligonucleotide
ccccaaauguaagcucccg

SEQ ID NO: 1590449 - RNA, 19 nt, Artificial Sequence
  Description of Artificial Sequence: Synthetic oligonucleotide
cccaaggaagauuccaaua

SEQ ID NO: 1590450 - RNA, 19 nt, Artificial Sequence
  Description of Artificial Sequence: Synthetic oligonucleotide
ugccacuauugaggaggac

SEQ ID NO: 1590451 - RNA, 19 nt, Artificial Sequence
  Description of Artificial Sequence: Synthetic oligonucleotide
gcguguuccacgaaugacu

SEQ ID NO: 1590452 - RNA, 19 nt, Artificial Sequence
  Description of Artificial Sequence: Synthetic oligonucleotide
gcgucagccccauguagga

SEQ ID NO: 1590453 - RNA, 19 nt, Artificial Sequence
  Description of Artificial Sequence: Synthetic oligonucleotide
ccaauauguagugcagcca

SEQ ID NO: 1590454 - RNA, 19 nt, Artificial Sequence
  Description of Artificial Sequence: Synthetic oligonucleotide
gcuuacacauucggagaca

SEQ ID NO: 1590455 - RNA, 19 nt, Artificial Sequence
  Description of Artificial Sequence: Synthetic oligonucleotide
cgaaugacuaguucguggu

SEQ ID NO: 1590456 - RNA, 19 nt, Artificial Sequence
  Description of Artificial Sequence: Synthetic oligonucleotide
cuaggacuuguagguagua

SEQ ID NO: 1590457 - RNA, 19 nt, Artificial Sequence
  Description of Artificial Sequence: Synthetic oligonucleotide
cggccaauauguagugcag

SEQ ID NO: 1590458 - RNA, 19 nt, Artificial Sequence
  Description of Artificial Sequence: Synthetic oligonucleotide
gagauccggccaauaugua

SEQ ID NO: 1590459 - RNA, 19 nt, Artificial Sequence
  Description of Artificial Sequence: Synthetic oligonucleotide
ccacgaaugacuaguucgu

SEQ ID NO: 1590460 - RNA, 19 nt, Artificial Sequence
  Description of Artificial Sequence: Synthetic oligonucleotide
ccgugcguaaguggcagug

SEQ ID NO: 1590461 - RNA, 19 nt, Artificial Sequence
  Description of Artificial Sequence: Synthetic oligonucleotide
ccccauaugucaaacugau

SEQ ID NO: 1590462 - RNA, 19 nt, Artificial Sequence
  Description of Artificial Sequence: Synthetic oligonucleotide
cguguuccacgaaugacua

SEQ ID NO: 1590463 - RNA, 19 nt, Artificial Sequence
  Description of Artificial Sequence: Synthetic oligonucleotide
cucccgauccaaggcaucu

SEQ ID NO: 1590464 - RNA, 19 nt, Artificial Sequence
  Description of Artificial Sequence: Synthetic oligonucleotide
cuaaagagauccggccaau

SEQ ID NO: 1590465 - RNA, 19 nt, Artificial Sequence
  Description of Artificial Sequence: Synthetic oligonucleotide
cccaagcuucggccaaaag

SEQ ID NO: 1590466 - RNA, 19 nt, Artificial Sequence
  Description of Artificial Sequence: Synthetic oligonucleotide
cugguugguaugccacuau

SEQ ID NO: 1590467 - RNA, 19 nt, Artificial Sequence
  Description of Artificial Sequence: Synthetic oligonucleotide
guuccacgaaugacuaguu

SEQ ID NO: 1590468 - RNA, 19 nt, Artificial Sequence
  Description of Artificial Sequence: Synthetic oligonucleotide
ccacaccugugaaacccca

SEQ ID NO: 1590469 - RNA, 19 nt, Artificial Sequence
  Description of Artificial Sequence: Synthetic oligonucleotide
gcaguggugccaccaccaa

SEQ ID NO: 1590470 - RNA, 19 nt, Artificial Sequence
  Description of Artificial Sequence: Synthetic oligonucleotide
ccugugaaaccccaagcuu

SEQ ID NO: 1590471 - RNA, 19 nt, Artificial Sequence
  Description of Artificial Sequence: Synthetic oligonucleotide
gccuuguacaggguacuua

SEQ ID NO: 1590472 - RNA, 19 nt, Artificial Sequence
  Description of Artificial Sequence: Synthetic oligonucleotide
cucccgcaacuuggugaac

SEQ ID NO: 1590473 - RNA, 19 nt, Artificial Sequence
  Description of Artificial Sequence: Synthetic oligonucleotide
gcucacaaccugccuugua

SEQ ID NO: 1590474 - RNA, 19 nt, Artificial Sequence
  Description of Artificial Sequence: Synthetic oligonucleotide
cguucuaugcugagacucu

SEQ ID NO: 1590475 - RNA, 19 nt, Artificial Sequence
  Description of Artificial Sequence: Synthetic oligonucleotide
cuauggcaacagcaucauu

SEQ ID NO: 1590476 - RNA, 19 nt, Artificial Sequence
  Description of Artificial Sequence: Synthetic oligonucleotide
caucaaagguauggcuguu

SEQ ID NO: 1590477 - RNA, 19 nt, Artificial Sequence
  Description of Artificial Sequence: Synthetic oligonucleotide
ccaggcguguuccacgaau

SEQ ID NO: 1590478 - RNA, 19 nt, Artificial Sequence
  Description of Artificial Sequence: Synthetic oligonucleotide
cggccaaaaggaagguacu

SEQ ID NO: 1590479 - RNA, 19 nt, Artificial Sequence
  Description of Artificial Sequence: Synthetic oligonucleotide
gccgugcguaaguggcagu

SEQ ID NO: 1590480 - RNA, 19 nt, Artificial Sequence
  Description of Artificial Sequence: Synthetic oligonucleotide
cccgcaacuuggugaacuu

SEQ ID NO: 1590481 - RNA, 19 nt, Artificial Sequence
  Description of Artificial Sequence: Synthetic oligonucleotide
cgugcguaaguggcagugu

SEQ ID NO: 1590482 - RNA, 19 nt, Artificial Sequence
  Description of Artificial Sequence: Synthetic oligonucleotide
cgucagccccauguaggaa

SEQ ID NO: 1590483 - RNA, 19 nt, Artificial Sequence
  Description of Artificial Sequence: Synthetic oligonucleotide
cggaagaaccaggcguguu

SEQ ID NO: 1590484 - RNA, 19 nt, Artificial Sequence
  Description of Artificial Sequence: Synthetic oligonucleotide
auuauuaugacacacuggc

SEQ ID NO: 1590485 - RNA, 19 nt, Artificial Sequence
  Description of Artificial Sequence: Synthetic oligonucleotide
aauaauucuacggugaccc

SEQ ID NO: 1590486 - RNA, 19 nt, Artificial Sequence
  Description of Artificial Sequence: Synthetic oligonucleotide
aacacaauccuucucacac

SEQ ID NO: 1590487 - RNA, 19 nt, Artificial Sequence
  Description of Artificial Sequence: Synthetic oligonucleotide
auaaauaggaagcugcgcc

SEQ ID NO: 1590488 - RNA, 19 nt, Artificial Sequence
  Description of Artificial Sequence: Synthetic oligonucleotide
aaagaaugcaacuggcugc

SEQ ID NO: 1590489 - RNA, 19 nt, Artificial Sequence
  Description of Artificial Sequence: Synthetic oligonucleotide
  modified_base (17)..(17): a, c, u, g, unknown or other
augauugugauauaggngg

SEQ ID NO: 1590490 - RNA, 19 nt, Artificial Sequence
  Description of Artificial Sequence: Synthetic oligonucleotide
aauauaugaauaucgaagu

SEQ ID NO: 1590491 - RNA, 19 nt, Artificial Sequence
  Description of Artificial Sequence: Synthetic oligonucleotide
uaaaccagcacuuaugagg

SEQ ID NO: 1590492 - RNA, 19 nt, Artificial Sequence
  Description of Artificial Sequence: Synthetic oligonucleotide
uucuagaacauaaauaaag

SEQ ID NO: 1590493 - RNA, 19 nt, Artificial Sequence
  Description of Artificial Sequence: Synthetic oligonucleotide
ucuagaacauaaauaaagg

SEQ ID NO: 1590494 - RNA, 19 nt, Artificial Sequence
  Description of Artificial Sequence: Synthetic oligonucleotide
ugauucauuaagaacacag

SEQ ID NO: 1590495 - RNA, 19 nt, Artificial Sequence
  Description of Artificial Sequence: Synthetic oligonucleotide
aaaacuuaucuuuggguac

SEQ ID NO: 1590496 - RNA, 19 nt, Artificial Sequence
  Description of Artificial Sequence: Synthetic oligonucleotide
auauuaacgaguaauaaac

SEQ ID NO: 1590497 - RNA, 19 nt, Artificial Sequence
  Description of Artificial Sequence: Synthetic oligonucleotide
uagaacauaaauaaaggac

SEQ ID NO: 1590498 - RNA, 19 nt, Artificial Sequence
  Description of Artificial Sequence: Synthetic oligonucleotide
aaauagaagauggggaacc

SEQ ID NO: 1590499 - RNA, 19 nt, Artificial Sequence
  Description of Artificial Sequence: Synthetic oligonucleotide
aaaauaauucuacggugac

SEQ ID NO: 1590500 - RNA, 19 nt, Artificial Sequence
  Description of Artificial Sequence: Synthetic oligonucleotide
aaugcauuuugucaaauga

SEQ ID NO: 1590501 - RNA, 19 nt, Artificial Sequence
  Description of Artificial Sequence: Synthetic oligonucleotide
aauaaugaacuccaacuug

SEQ ID NO: 1590502 - RNA, 19 nt, Artificial Sequence
  Description of Artificial Sequence: Synthetic oligonucleotide
aaauaaugaauucuagacu

SEQ ID NO: 1590503 - RNA, 19 nt, Artificial Sequence
  Description of Artificial Sequence: Synthetic oligonucleotide
aauauuaacgaguaauaaa

SEQ ID NO: 1590504 - RNA, 19 nt, Artificial Sequence
  Description of Artificial Sequence: Synthetic oligonucleotide
uuaacgaguaauaaaccag

SEQ ID NO: 1590505 - RNA, 19 nt, Artificial Sequence
  Description of Artificial Sequence: Synthetic oligonucleotide
auaaaaugauuacaacagc

SEQ ID NO: 1590506 - RNA, 19 nt, Artificial Sequence
  Description of Artificial Sequence: Synthetic oligonucleotide
uccaaaagaaugcaacugg

SEQ ID NO: 1590507 - RNA, 19 nt, Artificial Sequence
  Description of Artificial Sequence: Synthetic oligonucleotide
uaaaaugaaaugaugacuu

SEQ ID NO: 1590508 - RNA, 19 nt, Artificial Sequence
  Description of Artificial Sequence: Synthetic oligonucleotide
aauaucgaagucaagagca

SEQ ID NO: 1590509 - RNA, 19 nt, Artificial Sequence
  Description of Artificial Sequence: Synthetic oligonucleotide
uuugaucggauucugagca

SEQ ID NO: 1590510 - RNA, 19 nt, Artificial Sequence
  Description of Artificial Sequence: Synthetic oligonucleotide
aauaaauaggaagcugcgc

SEQ ID NO: 1590511 - RNA, 19 nt, Artificial Sequence
  Description of Artificial Sequence: Synthetic oligonucleotide
aauauuuauggagcaagac

SEQ ID NO: 1590512 - RNA, 19 nt, Artificial Sequence
  Description of Artificial Sequence: Synthetic oligonucleotide
aguuuaaaauaauucuacg

SEQ ID NO: 1590513 - RNA, 19 nt, Artificial Sequence
  Description of Artificial Sequence: Synthetic oligonucleotide
uacaguaauauuaacgagu

SEQ ID NO: 1590514 - RNA, 19 nt, Artificial Sequence
  Description of Artificial Sequence: Synthetic oligonucleotide
aagaaauuugucugggaag

SEQ ID NO: 1590515 - RNA, 19 nt, Artificial Sequence
  Description of Artificial Sequence: Synthetic oligonucleotide
uggggaaccaccaagcccg

SEQ ID NO: 1590516 - RNA, 19 nt, Artificial Sequence
  Description of Artificial Sequence: Synthetic oligonucleotide
aaaugauuacaacagcaca

SEQ ID NO: 1590517 - RNA, 19 nt, Artificial Sequence
  Description of Artificial Sequence: Synthetic oligonucleotide
ugaauaucgaagucaagag

SEQ ID NO: 1590518 - RNA, 19 nt, Artificial Sequence
  Description of Artificial Sequence: Synthetic oligonucleotide
uuaaauaaugaacuccaac

SEQ ID NO: 1590519 - RNA, 19 nt, Artificial Sequence
  Description of Artificial Sequence: Synthetic oligonucleotide
aaaccagcacuuaugaggc

SEQ ID NO: 1590520 - RNA, 19 nt, Artificial Sequence
  Description of Artificial Sequence: Synthetic oligonucleotide
ucuuguuugaacauacugu

SEQ ID NO: 1590521 - RNA, 19 nt, Artificial Sequence
  Description of Artificial Sequence: Synthetic oligonucleotide
aguaaacaaagccugguag

SEQ ID NO: 1590522 - RNA, 19 nt, Artificial Sequence
  Description of Artificial Sequence: Synthetic oligonucleotide
uaaaauaacucuuucccgu

SEQ ID NO: 1590523 - RNA, 19 nt, Artificial Sequence
  Description of Artificial Sequence: Synthetic oligonucleotide
uuaaccauucauuucgcag

SEQ ID NO: 1590524 - RNA, 19 nt, Artificial Sequence
  Description of Artificial Sequence: Synthetic oligonucleotide
gaaaugaugacuucuagaa

SEQ ID NO: 1590525 - RNA, 19 nt, Artificial Sequence
  Description of Artificial Sequence: Synthetic oligonucleotide
uauaugaauaucgaaguca

SEQ ID NO: 1590526 - RNA, 19 nt, Artificial Sequence
  Description of Artificial Sequence: Synthetic oligonucleotide
aacuagauuagcuuauagu

SEQ ID NO: 1590527 - RNA, 19 nt, Artificial Sequence
  Description of Artificial Sequence: Synthetic oligonucleotide
aaacuuaucuuuggguacc

SEQ ID NO: 1590528 - RNA, 19 nt, Artificial Sequence
  Description of Artificial Sequence: Synthetic oligonucleotide
acuagauuagcuuauaguu

SEQ ID NO: 1590529 - RNA, 19 nt, Artificial Sequence
  Description of Artificial Sequence: Synthetic oligonucleotide
aacccuaugaagaaaguuc

SEQ ID NO: 1590530 - RNA, 19 nt, Artificial Sequence
  Description of Artificial Sequence: Synthetic oligonucleotide
aaauaauucuacggugacc

SEQ ID NO: 1590531 - RNA, 19 nt, Artificial Sequence
  Description of Artificial Sequence: Synthetic oligonucleotide
aagucaagagcacuucuuc

SEQ ID NO: 1590532 - RNA, 19 nt, Artificial Sequence
  Description of Artificial Sequence: Synthetic oligonucleotide
aagccugguaguuauggac

SEQ ID NO: 1590533 - RNA, 19 nt, Artificial Sequence
  Description of Artificial Sequence: Synthetic oligonucleotide
uucaauauaugaauaucga

SEQ ID NO: 1590534 - RNA, 19 nt, Artificial Sequence
  Description of Artificial Sequence: Synthetic oligonucleotide
auuaacgaguaauaaacca

SEQ ID NO: 1590535 - RNA, 19 nt, Artificial Sequence
  Description of Artificial Sequence: Synthetic oligonucleotide
uuagcuuauaguuucuucu

SEQ ID NO: 1590536 - RNA, 19 nt, Artificial Sequence
  Description of Artificial Sequence: Synthetic oligonucleotide
uugggaagaccuuagaaug

SEQ ID NO: 1590537 - RNA, 19 nt, Artificial Sequence
  Description of Artificial Sequence: Synthetic oligonucleotide
agaaaguucuuguuugaac

SEQ ID NO: 1590538 - RNA, 19 nt, Artificial Sequence
  Description of Artificial Sequence: Synthetic oligonucleotide
aauacuucauucguugcuc

SEQ ID NO: 1590539 - RNA, 19 nt, Artificial Sequence
  Description of Artificial Sequence: Synthetic oligonucleotide
auauuuauggagcaagaca

SEQ ID NO: 1590540 - RNA, 19 nt, Artificial Sequence
  Description of Artificial Sequence: Synthetic oligonucleotide
uauuaacgaguaauaaacc

SEQ ID NO: 1590541 - RNA, 19 nt, Artificial Sequence
  Description of Artificial Sequence: Synthetic oligonucleotide
cacauagacauagaaaugg

SEQ ID NO: 1590542 - RNA, 19 nt, Artificial Sequence
  Description of Artificial Sequence: Synthetic oligonucleotide
uucuuguuugaacauacug

SEQ ID NO: 1590543 - RNA, 19 nt, Artificial Sequence
  Description of Artificial Sequence: Synthetic oligonucleotide
uaagaaauuugucugggaa

SEQ ID NO: 1590544 - RNA, 19 nt, Artificial Sequence
  Description of Artificial Sequence: Synthetic oligonucleotide
  modified_base (18)..(18): a, c, u, g, unknown or other
aaugauugugauauaggng

SEQ ID NO: 1590545 - RNA, 19 nt, Artificial Sequence
  Description of Artificial Sequence: Synthetic oligonucleotide
aguaauauuaacgaguaau

SEQ ID NO: 1590546 - RNA, 19 nt, Artificial Sequence
  Description of Artificial Sequence: Synthetic oligonucleotide
ucuuugaucggauucugag

SEQ ID NO: 1590547 - RNA, 19 nt, Artificial Sequence
  Description of Artificial Sequence: Synthetic oligonucleotide
aacacaucgaaacaguaua

SEQ ID NO: 1590548 - RNA, 19 nt, Artificial Sequence
  Description of Artificial Sequence: Synthetic oligonucleotide
aauuauuaugacacacugg

SEQ ID NO: 1590549 - RNA, 19 nt, Artificial Sequence
  Description of Artificial Sequence: Synthetic oligonucleotide
aguauaguaaauuuccaaa

SEQ ID NO: 1590550 - RNA, 19 nt, Artificial Sequence
  Description of Artificial Sequence: Synthetic oligonucleotide
ugaaguaaacaaagccugg

SEQ ID NO: 1590551 - RNA, 19 nt, Artificial Sequence
  Description of Artificial Sequence: Synthetic oligonucleotide
ucuuuacacauagacauag

SEQ ID NO: 1590552 - RNA, 19 nt, Artificial Sequence
  Description of Artificial Sequence: Synthetic oligonucleotide
uccaacacaauccuucuca

SEQ ID NO: 1590553 - RNA, 19 nt, Artificial Sequence
  Description of Artificial Sequence: Synthetic oligonucleotide
aagguaauacuucauucgu

SEQ ID NO: 1590554 - RNA, 19 nt, Artificial Sequence
  Description of Artificial Sequence: Synthetic oligonucleotide
uaaccauucauuucgcagc

SEQ ID NO: 1590555 - RNA, 19 nt, Artificial Sequence
  Description of Artificial Sequence: Synthetic oligonucleotide
uuugguuacagcacggacu

SEQ ID NO: 1590556 - RNA, 19 nt, Artificial Sequence
  Description of Artificial Sequence: Synthetic oligonucleotide
gauaagaaauuugucuggg

SEQ ID NO: 1590557 - RNA, 19 nt, Artificial Sequence
  Description of Artificial Sequence: Synthetic oligonucleotide
auauaugaauaucgaaguc

SEQ ID NO: 1590558 - RNA, 19 nt, Artificial Sequence
  Description of Artificial Sequence: Synthetic oligonucleotide
auaaugaacuccaacuugg

SEQ ID NO: 1590559 - RNA, 19 nt, Artificial Sequence
  Description of Artificial Sequence: Synthetic oligonucleotide
ugcauuuugucaaaugagu

SEQ ID NO: 1590560 - RNA, 19 nt, Artificial Sequence
  Description of Artificial Sequence: Synthetic oligonucleotide
gaauaucgaagucaagagc

SEQ ID NO: 1590561 - RNA, 19 nt, Artificial Sequence
  Description of Artificial Sequence: Synthetic oligonucleotide
uagauuagcuuauaguuuc

SEQ ID NO: 1590562 - RNA, 19 nt, Artificial Sequence
  Description of Artificial Sequence: Synthetic oligonucleotide
ugaauucuagacuuaaaau

SEQ ID NO: 1590563 - RNA, 19 nt, Artificial Sequence
  Description of Artificial Sequence: Synthetic oligonucleotide
uuaagaacacaguacagua

SEQ ID NO: 1590564 - RNA, 19 nt, Artificial Sequence
  Description of Artificial Sequence: Synthetic oligonucleotide
cuuccuuacacuacagggg

SEQ ID NO: 1590565 - RNA, 19 nt, Artificial Sequence
  Description of Artificial Sequence: Synthetic oligonucleotide
aauucuacggugacccacc

SEQ ID NO: 1590566 - RNA, 19 nt, Artificial Sequence
  Description of Artificial Sequence: Synthetic oligonucleotide
agcauuaaucauugcauag

SEQ ID NO: 1590567 - RNA, 19 nt, Artificial Sequence
  Description of Artificial Sequence: Synthetic oligonucleotide
auggacuagacacuaauga

SEQ ID NO: 1590568 - RNA, 19 nt, Artificial Sequence
  Description of Artificial Sequence: Synthetic oligonucleotide
ucaauauaugaauaucgaa

SEQ ID NO: 1590569 - RNA, 19 nt, Artificial Sequence
  Description of Artificial Sequence: Synthetic oligonucleotide
uaauacuucauucguugcu

SEQ ID NO: 1590570 - RNA, 19 nt, Artificial Sequence
  Description of Artificial Sequence: Synthetic oligonucleotide
uucgcagcauuaaucauug

SEQ ID NO: 1590571 - RNA, 19 nt, Artificial Sequence
  Description of Artificial Sequence: Synthetic oligonucleotide
gacuagacacuaaugauug

SEQ ID NO: 1590572 - RNA, 19 nt, Artificial Sequence
  Description of Artificial Sequence: Synthetic oligonucleotide
aucgaaacaguauaguaaa

SEQ ID NO: 1590573 - RNA, 19 nt, Artificial Sequence
  Description of Artificial Sequence: Synthetic oligonucleotide
aacaaagccugguaguuau

SEQ ID NO: 1590574 - RNA, 19 nt, Artificial Sequence
  Description of Artificial Sequence: Synthetic oligonucleotide
uuuauggagcaagacauga

SEQ ID NO: 1590575 - RNA, 19 nt, Artificial Sequence
  Description of Artificial Sequence: Synthetic oligonucleotide
cacguagauaaucauaaug

SEQ ID NO: 1590576 - RNA, 19 nt, Artificial Sequence
  Description of Artificial Sequence: Synthetic oligonucleotide
uuucauuggccauggaaug

SEQ ID NO: 1590577 - RNA, 19 nt, Artificial Sequence
  Description of Artificial Sequence: Synthetic oligonucleotide
uagacacuaaugauuguga

SEQ ID NO: 1590578 - RNA, 19 nt, Artificial Sequence
  Description of Artificial Sequence: Synthetic oligonucleotide
auacuucauucguugcucc

SEQ ID NO: 1590579 - RNA, 19 nt, Artificial Sequence
  Description of Artificial Sequence: Synthetic oligonucleotide
acguagauaaucauaauga

SEQ ID NO: 1590580 - RNA, 19 nt, Artificial Sequence
  Description of Artificial Sequence: Synthetic oligonucleotide
ugcgccuuugguuacagca

SEQ ID NO: 1590581 - RNA, 19 nt, Artificial Sequence
  Description of Artificial Sequence: Synthetic oligonucleotide
aaaggggcuaaauuauuau

SEQ ID NO: 1590582 - RNA, 19 nt, Artificial Sequence
  Description of Artificial Sequence: Synthetic oligonucleotide
agucaaaggggcuaaauua

SEQ ID NO: 1590583 - RNA, 19 nt, Artificial Sequence
  Description of Artificial Sequence: Synthetic oligonucleotide
aguucuuguuugaacauac

SEQ ID NO: 1590584 - RNA, 19 nt, Artificial Sequence
  Description of Artificial Sequence: Synthetic oligonucleotide
ucauuucgcagcauuaauc

SEQ ID NO: 1590585 - RNA, 19 nt, Artificial Sequence
  Description of Artificial Sequence: Synthetic oligonucleotide
aaugcaacuggcugccucu

SEQ ID NO: 1590586 - RNA, 19 nt, Artificial Sequence
  Description of Artificial Sequence: Synthetic oligonucleotide
cuagaacauaaauaaagga

SEQ ID NO: 1590587 - RNA, 19 nt, Artificial Sequence
  Description of Artificial Sequence: Synthetic oligonucleotide
uuaugaggcgccuaucugu

SEQ ID NO: 1590588 - RNA, 19 nt, Artificial Sequence
  Description of Artificial Sequence: Synthetic oligonucleotide
caauccuucucacacuucc

SEQ ID NO: 1590589 - RNA, 19 nt, Artificial Sequence
  Description of Artificial Sequence: Synthetic oligonucleotide
uuguuugaacauacuguag

SEQ ID NO: 1590590 - RNA, 19 nt, Artificial Sequence
  Description of Artificial Sequence: Synthetic oligonucleotide
uuggguaccucugacauga

SEQ ID NO: 1590591 - RNA, 19 nt, Artificial Sequence
  Description of Artificial Sequence: Synthetic oligonucleotide
ucauucguugcucccaucu

SEQ ID NO: 1590592 - RNA, 19 nt, Artificial Sequence
  Description of Artificial Sequence: Synthetic oligonucleotide
aaauaacucuuucccguga

SEQ ID NO: 1590593 - RNA, 19 nt, Artificial Sequence
  Description of Artificial Sequence: Synthetic oligonucleotide
uauuaaccauucauuucgc

SEQ ID NO: 1590594 - RNA, 19 nt, Artificial Sequence
  Description of Artificial Sequence: Synthetic oligonucleotide
agaaauuugucugggaaga

SEQ ID NO: 1590595 - RNA, 19 nt, Artificial Sequence
  Description of Artificial Sequence: Synthetic oligonucleotide
guacaguaauauuaacgag

SEQ ID NO: 1590596 - RNA, 19 nt, Artificial Sequence
  Description of Artificial Sequence: Synthetic oligonucleotide
  modified_base (16)..(16): a, c, u, g, unknown or other
ugauugugauauaggnggu

SEQ ID NO: 1590597 - RNA, 19 nt, Artificial Sequence
  Description of Artificial Sequence: Synthetic oligonucleotide
cuuugaucggauucugagc

SEQ ID NO: 1590598 - RNA, 19 nt, Artificial Sequence
  Description of Artificial Sequence: Synthetic oligonucleotide
acagcacggacucuuuugg

SEQ ID NO: 1590599 - RNA, 19 nt, Artificial Sequence
  Description of Artificial Sequence: Synthetic oligonucleotide
uuuugcaugaugacuugaa

SEQ ID NO: 1590600 - RNA, 19 nt, Artificial Sequence
  Description of Artificial Sequence: Synthetic oligonucleotide
uaaauaggaagcugcgccu

SEQ ID NO: 1590601 - RNA, 19 nt, Artificial Sequence
  Description of Artificial Sequence: Synthetic oligonucleotide
  modified_base (12)..(12): a, c, u, g, unknown or other
ugugauauaggngguaaaa

SEQ ID NO: 1590602 - RNA, 19 nt, Artificial Sequence
  Description of Artificial Sequence: Synthetic oligonucleotide
auauaggucaggaaaauaa

SEQ ID NO: 1590603 - RNA, 19 nt, Artificial Sequence
  Description of Artificial Sequence: Synthetic oligonucleotide
aaauauuuauggagcaaga

SEQ ID NO: 1590604 - RNA, 19 nt, Artificial Sequence
  Description of Artificial Sequence: Synthetic oligonucleotide
cauuuugucaaaugaguca

SEQ ID NO: 1590605 - RNA, 19 nt, Artificial Sequence
  Description of Artificial Sequence: Synthetic oligonucleotide
aaccauucauuucgcagca

SEQ ID NO: 1590606 - RNA, 19 nt, Artificial Sequence
  Description of Artificial Sequence: Synthetic oligonucleotide
aacacuaacaaaaguuuaa

SEQ ID NO: 1590607 - RNA, 19 nt, Artificial Sequence
  Description of Artificial Sequence: Synthetic oligonucleotide
cuuuugguggaaaggcugc

SEQ ID NO: 1590608 - RNA, 19 nt, Artificial Sequence
  Description of Artificial Sequence: Synthetic oligonucleotide
ugcauaggagguaaauuaa

SEQ ID NO: 1590609 - RNA, 19 nt, Artificial Sequence
  Description of Artificial Sequence: Synthetic oligonucleotide
uaaucacuuuuauaauaca

SEQ ID NO: 1590610 - RNA, 19 nt, Artificial Sequence
  Description of Artificial Sequence: Synthetic oligonucleotide
uaacacaucgaaacaguau

SEQ ID NO: 1590611 - RNA, 19 nt, Artificial Sequence
  Description of Artificial Sequence: Synthetic oligonucleotide
acuuaugaggcgccuaucu

SEQ ID NO: 1590612 - RNA, 19 nt, Artificial Sequence
  Description of Artificial Sequence: Synthetic oligonucleotide
uuucgcagcauuaaucauu

SEQ ID NO: 1590613 - RNA, 19 nt, Artificial Sequence
  Description of Artificial Sequence: Synthetic oligonucleotide
gcacuuaacacaucgaaac

SEQ ID NO: 1590614 - RNA, 19 nt, Artificial Sequence
  Description of Artificial Sequence: Synthetic oligonucleotide
uuaacacaucgaaacagua

SEQ ID NO: 1590615 - RNA, 19 nt, Artificial Sequence
  Description of Artificial Sequence: Synthetic oligonucleotide
aaguaaacaaagccuggua

SEQ ID NO: 1590616 - RNA, 19 nt, Artificial Sequence
  Description of Artificial Sequence: Synthetic oligonucleotide
ucacguagacuucucauua

SEQ ID NO: 1590617 - RNA, 19 nt, Artificial Sequence
  Description of Artificial Sequence: Synthetic oligonucleotide
acguagacuucucauuauc

SEQ ID NO: 1590618 - RNA, 19 nt, Artificial Sequence
  Description of Artificial Sequence: Synthetic oligonucleotide
ggagguaaauuaaauaaug

SEQ ID NO: 1590619 - RNA, 19 nt, Artificial Sequence
  Description of Artificial Sequence: Synthetic oligonucleotide
agguuggcagcucacguag

SEQ ID NO: 1590620 - RNA, 19 nt, Artificial Sequence
  Description of Artificial Sequence: Synthetic oligonucleotide
ugccucucaaacccuauga

SEQ ID NO: 1590621 - RNA, 19 nt, Artificial Sequence
  Description of Artificial Sequence: Synthetic oligonucleotide
cauucaugauucauuaaga

SEQ ID NO: 1590622 - RNA, 19 nt, Artificial Sequence
  Description of Artificial Sequence: Synthetic oligonucleotide
cuuguuugaacauacugua

SEQ ID NO: 1590623 - RNA, 19 nt, Artificial Sequence
  Description of Artificial Sequence: Synthetic oligonucleotide
uggacuagacacuaaugau

SEQ ID NO: 1590624 - RNA, 19 nt, Artificial Sequence
  Description of Artificial Sequence: Synthetic oligonucleotide
uuugguccgcuucauuuac

SEQ ID NO: 1590625 - RNA, 19 nt, Artificial Sequence
  Description of Artificial Sequence: Synthetic oligonucleotide
agaccaaagguaauacuuc

SEQ ID NO: 1590626 - RNA, 19 nt, Artificial Sequence
  Description of Artificial Sequence: Synthetic oligonucleotide
  modified_base (14)..(14): a, c, u, g, unknown or other
auugugauauaggngguaa

SEQ ID NO: 1590627 - RNA, 19 nt, Artificial Sequence
  Description of Artificial Sequence: Synthetic oligonucleotide
uaaugaauucuagacuuaa

SEQ ID NO: 1590628 - RNA, 19 nt, Artificial Sequence
  Description of Artificial Sequence: Synthetic oligonucleotide
acaucgaaacaguauagua

SEQ ID NO: 1590629 - RNA, 19 nt, Artificial Sequence
  Description of Artificial Sequence: Synthetic oligonucleotide
caucgaaacaguauaguaa

SEQ ID NO: 1590630 - RNA, 19 nt, Artificial Sequence
  Description of Artificial Sequence: Synthetic oligonucleotide
augaguuucaauauaugaa

SEQ ID NO: 1590631 - RNA, 19 nt, Artificial Sequence
  Description of Artificial Sequence: Synthetic oligonucleotide
uaguuauggacuagacacu

SEQ ID NO: 1590632 - RNA, 19 nt, Artificial Sequence
  Description of Artificial Sequence: Synthetic oligonucleotide
acucuuucccgugagaacu

SEQ ID NO: 1590633 - RNA, 19 nt, Artificial Sequence
  Description of Artificial Sequence: Synthetic oligonucleotide
uucauuucgcagcauuaau

SEQ ID NO: 1590634 - RNA, 19 nt, Artificial Sequence
  Description of Artificial Sequence: Synthetic oligonucleotide
augaugacuugaagcagcc

SEQ ID NO: 1590635 - RNA, 19 nt, Artificial Sequence
  Description of Artificial Sequence: Synthetic oligonucleotide
uucucacacuuccuuacac

SEQ ID NO: 1590636 - RNA, 19 nt, Artificial Sequence
  Description of Artificial Sequence: Synthetic oligonucleotide
gaagcugcgccuuugguua

SEQ ID NO: 1590637 - RNA, 19 nt, Artificial Sequence
  Description of Artificial Sequence: Synthetic oligonucleotide
aagaccuuagaaugucuuu

SEQ ID NO: 1590638 - RNA, 19 nt, Artificial Sequence
  Description of Artificial Sequence: Synthetic oligonucleotide
agucaagagcacuucuuca

SEQ ID NO: 1590639 - RNA, 19 nt, Artificial Sequence
  Description of Artificial Sequence: Synthetic oligonucleotide
auuauccuccccgaucuuc

SEQ ID NO: 1590640 - RNA, 19 nt, Artificial Sequence
  Description of Artificial Sequence: Synthetic oligonucleotide
aauagaagauggggaacca

SEQ ID NO: 1590641 - RNA, 19 nt, Artificial Sequence
  Description of Artificial Sequence: Synthetic oligonucleotide
caacuagauuagcuuauag

SEQ ID NO: 1590642 - RNA, 19 nt, Artificial Sequence
  Description of Artificial Sequence: Synthetic oligonucleotide
augcauuuugucaaaugag

SEQ ID NO: 1590643 - RNA, 19 nt, Artificial Sequence
  Description of Artificial Sequence: Synthetic oligonucleotide
ugccauucaugauucauua

SEQ ID NO: 1590644 - RNA, 19 nt, Artificial Sequence
  Description of Artificial Sequence: Synthetic oligonucleotide
aauauaggucaggaaaaua

SEQ ID NO: 1590645 - RNA, 19 nt, Artificial Sequence
  Description of Artificial Sequence: Synthetic oligonucleotide
ucucacacuuccuuacacu

SEQ ID NO: 1590646 - RNA, 19 nt, Artificial Sequence
  Description of Artificial Sequence: Synthetic oligonucleotide
uagcuuauaguuucuucuc

SEQ ID NO: 1590647 - RNA, 19 nt, Artificial Sequence
  Description of Artificial Sequence: Synthetic oligonucleotide
ugacaugaguuucaauaua

SEQ ID NO: 1590648 - RNA, 19 nt, Artificial Sequence
  Description of Artificial Sequence: Synthetic oligonucleotide
ugggaagaccuuagaaugu

SEQ ID NO: 1590649 - RNA, 19 nt, Artificial Sequence
  Description of Artificial Sequence: Synthetic oligonucleotide
aggggcuaaauuauuauga

SEQ ID NO: 1590650 - RNA, 19 nt, Artificial Sequence
  Description of Artificial Sequence: Synthetic oligonucleotide
auuaaccauucauuucgca

SEQ ID NO: 1590651 - RNA, 19 nt, Artificial Sequence
  Description of Artificial Sequence: Synthetic oligonucleotide
aggaaaauaaugaauucua

SEQ ID NO: 1590652 - RNA, 19 nt, Artificial Sequence
  Description of Artificial Sequence: Synthetic oligonucleotide
uaauucuacggugacccac

SEQ ID NO: 1590653 - RNA, 19 nt, Artificial Sequence
  Description of Artificial Sequence: Synthetic oligonucleotide
uuauggagcaagacaugaa

SEQ ID NO: 1590654 - RNA, 19 nt, Artificial Sequence
  Description of Artificial Sequence: Synthetic oligonucleotide
aaaugagucaaaggggcua

SEQ ID NO: 1590655 - RNA, 19 nt, Artificial Sequence
  Description of Artificial Sequence: Synthetic oligonucleotide
caaaauuugguccgcuuca

SEQ ID NO: 1590656 - RNA, 19 nt, Artificial Sequence
  Description of Artificial Sequence: Synthetic oligonucleotide
uucucauuauccuccccga

SEQ ID NO: 1590657 - RNA, 19 nt, Artificial Sequence
  Description of Artificial Sequence: Synthetic oligonucleotide
gcauuaaucauugcauagg

SEQ ID NO: 1590658 - RNA, 19 nt, Artificial Sequence
  Description of Artificial Sequence: Synthetic oligonucleotide
uccgcuucauuuaccaguc

SEQ ID NO: 1590659 - RNA, 19 nt, Artificial Sequence
  Description of Artificial Sequence: Synthetic oligonucleotide
cuuugguuacagcacggac

SEQ ID NO: 1590660 - RNA, 19 nt, Artificial Sequence
  Description of Artificial Sequence: Synthetic oligonucleotide
auuugucugggaagagacc

SEQ ID NO: 1590661 - RNA, 19 nt, Artificial Sequence
  Description of Artificial Sequence: Synthetic oligonucleotide
cuuaugaggcgccuaucug

SEQ ID NO: 1590662 - RNA, 19 nt, Artificial Sequence
  Description of Artificial Sequence: Synthetic oligonucleotide
aggcacuuaacacaucgaa

SEQ ID NO: 1590663 - RNA, 19 nt, Artificial Sequence
  Description of Artificial Sequence: Synthetic oligonucleotide
ugguaguuauggacuagac

SEQ ID NO: 1590664 - RNA, 19 nt, Artificial Sequence
  Description of Artificial Sequence: Synthetic oligonucleotide
aaugagucaaaggggcuaa

SEQ ID NO: 1590665 - RNA, 19 nt, Artificial Sequence
  Description of Artificial Sequence: Synthetic oligonucleotide
auuaugacacacuggcauu

SEQ ID NO: 1590666 - RNA, 19 nt, Artificial Sequence
  Description of Artificial Sequence: Synthetic oligonucleotide
uuugccauucaugauucau

SEQ ID NO: 1590667 - RNA, 19 nt, Artificial Sequence
  Description of Artificial Sequence: Synthetic oligonucleotide
cucauuauccuccccgauc

SEQ ID NO: 1590668 - RNA, 19 nt, Artificial Sequence
  Description of Artificial Sequence: Synthetic oligonucleotide
acaguaauauuaacgagua

SEQ ID NO: 1590669 - RNA, 19 nt, Artificial Sequence
  Description of Artificial Sequence: Synthetic oligonucleotide
uggcaacuagauuagcuua

SEQ ID NO: 1590670 - RNA, 19 nt, Artificial Sequence
  Description of Artificial Sequence: Synthetic oligonucleotide
ugguccgcuucauuuacca

SEQ ID NO: 1590671 - RNA, 19 nt, Artificial Sequence
  Description of Artificial Sequence: Synthetic oligonucleotide
uugccauucaugauucauu

SEQ ID NO: 1590672 - RNA, 19 nt, Artificial Sequence
  Description of Artificial Sequence: Synthetic oligonucleotide
uaugaggcgccuaucugua

SEQ ID NO: 1590673 - RNA, 19 nt, Artificial Sequence
  Description of Artificial Sequence: Synthetic oligonucleotide
agacacuaaugauugugau

SEQ ID NO: 1590674 - RNA, 19 nt, Artificial Sequence
  Description of Artificial Sequence: Synthetic oligonucleotide
guaaacaaagccugguagu

SEQ ID NO: 1590675 - RNA, 19 nt, Artificial Sequence
  Description of Artificial Sequence: Synthetic oligonucleotide
aaccagcacuuaugaggcg

SEQ ID NO: 1590676 - RNA, 19 nt, Artificial Sequence
  Description of Artificial Sequence: Synthetic oligonucleotide
  modified_base (13)..(13): a, c, u, g, unknown or other
uugugauauaggngguaaa

SEQ ID NO: 1590677 - RNA, 19 nt, Artificial Sequence
  Description of Artificial Sequence: Synthetic oligonucleotide
gaaugcaacuggcugccuc

SEQ ID NO: 1590678 - RNA, 19 nt, Artificial Sequence
  Description of Artificial Sequence: Synthetic oligonucleotide
uuuggguaccucugacaug

SEQ ID NO: 1590679 - RNA, 19 nt, Artificial Sequence
  Description of Artificial Sequence: Synthetic oligonucleotide
uaucgaagucaagagcacu

SEQ ID NO: 1590680 - RNA, 19 nt, Artificial Sequence
  Description of Artificial Sequence: Synthetic oligonucleotide
aaaauuugguccgcuucau

SEQ ID NO: 1590681 - RNA, 19 nt, Artificial Sequence
  Description of Artificial Sequence: Synthetic oligonucleotide
uuacaacagcacacguaga

SEQ ID NO: 1590682 - RNA, 19 nt, Artificial Sequence
  Description of Artificial Sequence: Synthetic oligonucleotide
ucauuggccauggaauggu

SEQ ID NO: 1590683 - RNA, 19 nt, Artificial Sequence
  Description of Artificial Sequence: Synthetic oligonucleotide
ugaucggauucugagcacu

SEQ ID NO: 1590684 - RNA, 19 nt, Artificial Sequence
  Description of Artificial Sequence: Synthetic oligonucleotide
aaucauugcauaggaggua

SEQ ID NO: 1590685 - RNA, 19 nt, Artificial Sequence
  Description of Artificial Sequence: Synthetic oligonucleotide
  modified_base (15)..(15): a, c, u, g, unknown or other
ucuggacccgggaanacuu

SEQ ID NO: 1590686 - RNA, 19 nt, Artificial Sequence
  Description of Artificial Sequence: Synthetic oligonucleotide
gcacggacucuuuuggugg

SEQ ID NO: 1590687 - RNA, 19 nt, Artificial Sequence
  Description of Artificial Sequence: Synthetic oligonucleotide
cuuugggaagaccuuagaa

SEQ ID NO: 1590688 - RNA, 19 nt, Artificial Sequence
  Description of Artificial Sequence: Synthetic oligonucleotide
gguaguuauggacuagaca

SEQ ID NO: 1590689 - RNA, 19 nt, Artificial Sequence
  Description of Artificial Sequence: Synthetic oligonucleotide
aauaggaagcugcgccuuu

SEQ ID NO: 1590690 - RNA, 19 nt, Artificial Sequence
  Description of Artificial Sequence: Synthetic oligonucleotide
agcuuauuaaccauucauu

SEQ ID NO: 1590691 - RNA, 19 nt, Artificial Sequence
  Description of Artificial Sequence: Synthetic oligonucleotide
auaacucuuucccgugaga

SEQ ID NO: 1590692 - RNA, 19 nt, Artificial Sequence
  Description of Artificial Sequence: Synthetic oligonucleotide
auuugguccgcuucauuua

SEQ ID NO: 1590693 - RNA, 19 nt, Artificial Sequence
  Description of Artificial Sequence: Synthetic oligonucleotide
aagcugcgccuuugguuac

SEQ ID NO: 1590694 - RNA, 19 nt, Artificial Sequence
  Description of Artificial Sequence: Synthetic oligonucleotide
auucguugcucccaucuuu

SEQ ID NO: 1590695 - RNA, 19 nt, Artificial Sequence
  Description of Artificial Sequence: Synthetic oligonucleotide
  modified_base (16)..(16): a, c, u, g, unknown or other
uucuggacccgggaanacu

SEQ ID NO: 1590696 - RNA, 19 nt, Artificial Sequence
  Description of Artificial Sequence: Synthetic oligonucleotide
gauuacaacagcacacgua

SEQ ID NO: 1590697 - RNA, 19 nt, Artificial Sequence
  Description of Artificial Sequence: Synthetic oligonucleotide
cuuaucuuuggguaccucu

SEQ ID NO: 1590698 - RNA, 19 nt, Artificial Sequence
  Description of Artificial Sequence: Synthetic oligonucleotide
ucgaaacaguauaguaaau

SEQ ID NO: 1590699 - RNA, 19 nt, Artificial Sequence
  Description of Artificial Sequence: Synthetic oligonucleotide
ugaggcgccuaucuguaua

SEQ ID NO: 1590700 - RNA, 19 nt, Artificial Sequence
  Description of Artificial Sequence: Synthetic oligonucleotide
aaguucuuguuugaacaua

SEQ ID NO: 1590701 - RNA, 19 nt, Artificial Sequence
  Description of Artificial Sequence: Synthetic oligonucleotide
cuuaacacaucgaaacagu

SEQ ID NO: 1590702 - RNA, 19 nt, Artificial Sequence
  Description of Artificial Sequence: Synthetic oligonucleotide
agcauuuaauaaaaugauu

SEQ ID NO: 1590703 - RNA, 19 nt, Artificial Sequence
  Description of Artificial Sequence: Synthetic oligonucleotide
aguuauggacuagacacua

SEQ ID NO: 1590704 - RNA, 19 nt, Artificial Sequence
  Description of Artificial Sequence: Synthetic oligonucleotide
gaccuuagaaugucuuuaa

SEQ ID NO: 1590705 - RNA, 19 nt, Artificial Sequence
  Description of Artificial Sequence: Synthetic oligonucleotide
uucguugcucccaucuuuu

SEQ ID NO: 1590706 - RNA, 19 nt, Artificial Sequence
  Description of Artificial Sequence: Synthetic oligonucleotide
auuucgcagcauuaaucau

SEQ ID NO: 1590707 - RNA, 19 nt, Artificial Sequence
  Description of Artificial Sequence: Synthetic oligonucleotide
cacuacaggggugagugug

SEQ ID NO: 1590708 - RNA, 19 nt, Artificial Sequence
  Description of Artificial Sequence: Synthetic oligonucleotide
auucauuucgcagcauuaa

SEQ ID NO: 1590709 - RNA, 19 nt, Artificial Sequence
  Description of Artificial Sequence: Synthetic oligonucleotide
agaccuuagaaugucuuua

SEQ ID NO: 1590710 - RNA, 19 nt, Artificial Sequence
  Description of Artificial Sequence: Synthetic oligonucleotide
ugaguguguuaagaccagc

SEQ ID NO: 1590711 - RNA, 19 nt, Artificial Sequence
  Description of Artificial Sequence: Synthetic oligonucleotide
auuuauggagcaagacaug

SEQ ID NO: 1590712 - RNA, 19 nt, Artificial Sequence
  Description of Artificial Sequence: Synthetic oligonucleotide
uccuuacacuacaggggug

SEQ ID NO: 1590713 - RNA, 19 nt, Artificial Sequence
  Description of Artificial Sequence: Synthetic oligonucleotide
acaugaguuucaauauaug

SEQ ID NO: 1590714 - RNA, 19 nt, Artificial Sequence
  Description of Artificial Sequence: Synthetic oligonucleotide
ggggcuaaauuauuaugac

SEQ ID NO: 1590715 - RNA, 19 nt, Artificial Sequence
  Description of Artificial Sequence: Synthetic oligonucleotide
ucucauuauccuccccgau

SEQ ID NO: 1590716 - RNA, 19 nt, Artificial Sequence
  Description of Artificial Sequence: Synthetic oligonucleotide
auaauucuacggugaccca

SEQ ID NO: 1590717 - RNA, 19 nt, Artificial Sequence
  Description of Artificial Sequence: Synthetic oligonucleotide
cacuuaacacaucgaaaca

SEQ ID NO: 1590718 - RNA, 19 nt, Artificial Sequence
  Description of Artificial Sequence: Synthetic oligonucleotide
uugguccgcuucauuuacc

SEQ ID NO: 1590719 - RNA, 19 nt, Artificial Sequence
  Description of Artificial Sequence: Synthetic oligonucleotide
gaaguaaacaaagccuggu

SEQ ID NO: 1590720 - RNA, 19 nt, Artificial Sequence
  Description of Artificial Sequence: Synthetic oligonucleotide
caaaggggcuaaauuauua

SEQ ID NO: 1590721 - RNA, 19 nt, Artificial Sequence
  Description of Artificial Sequence: Synthetic oligonucleotide
aacuuaucuuuggguaccu

SEQ ID NO: 1590722 - RNA, 19 nt, Artificial Sequence
  Description of Artificial Sequence: Synthetic oligonucleotide
aauccuucucacacuuccu

SEQ ID NO: 1590723 - RNA, 19 nt, Artificial Sequence
  Description of Artificial Sequence: Synthetic oligonucleotide
gcuaaauuauuaugacaca

SEQ ID NO: 1590724 - RNA, 19 nt, Artificial Sequence
  Description of Artificial Sequence: Synthetic oligonucleotide
accuuagaaugucuuuaaa

SEQ ID NO: 1590725 - RNA, 19 nt, Artificial Sequence
  Description of Artificial Sequence: Synthetic oligonucleotide
ugucugggaagagaccuuc

SEQ ID NO: 1590726 - RNA, 19 nt, Artificial Sequence
  Description of Artificial Sequence: Synthetic oligonucleotide
cuagauuagcuuauaguuu

SEQ ID NO: 1590727 - RNA, 19 nt, Artificial Sequence
  Description of Artificial Sequence: Synthetic oligonucleotide
auccuucucacacuuccuu

SEQ ID NO: 1590728 - RNA, 19 nt, Artificial Sequence
  Description of Artificial Sequence: Synthetic oligonucleotide
agcucacguagacuucuca

SEQ ID NO: 1590729 - RNA, 19 nt, Artificial Sequence
  Description of Artificial Sequence: Synthetic oligonucleotide
caauaauauaagaaaucuu

SEQ ID NO: 1590730 - RNA, 19 nt, Artificial Sequence
  Description of Artificial Sequence: Synthetic oligonucleotide
ucgaagucaagagcacuuc

SEQ ID NO: 1590731 - RNA, 19 nt, Artificial Sequence
  Description of Artificial Sequence: Synthetic oligonucleotide
acacguagauaaucauaau

SEQ ID NO: 1590732 - RNA, 19 nt, Artificial Sequence
  Description of Artificial Sequence: Synthetic oligonucleotide
uuacagcacggacucuuuu

SEQ ID NO: 1590733 - RNA, 19 nt, Artificial Sequence
  Description of Artificial Sequence: Synthetic oligonucleotide
cuuuggguaccucugacau

SEQ ID NO: 1590734 - RNA, 19 nt, Artificial Sequence
  Description of Artificial Sequence: Synthetic oligonucleotide
gagucaaaggggcuaaauu

SEQ ID NO: 1590735 - RNA, 19 nt, Artificial Sequence
  Description of Artificial Sequence: Synthetic oligonucleotide
guccgcuucauuuaccagu

SEQ ID NO: 1590736 - RNA, 19 nt, Artificial Sequence
  Description of Artificial Sequence: Synthetic oligonucleotide
uuacacuacaggggugagu

SEQ ID NO: 1590737 - RNA, 19 nt, Artificial Sequence
  Description of Artificial Sequence: Synthetic oligonucleotide
gcuuauuaaccauucauuu

SEQ ID NO: 1590738 - RNA, 19 nt, Artificial Sequence
  Description of Artificial Sequence: Synthetic oligonucleotide
agaaaucuuuacacauaga

SEQ ID NO: 1590739 - RNA, 19 nt, Artificial Sequence
  Description of Artificial Sequence: Synthetic oligonucleotide
ucguugcucccaucuuuug

SEQ ID NO: 1590740 - RNA, 19 nt, Artificial Sequence
  Description of Artificial Sequence: Synthetic oligonucleotide
  modified_base (13)..(13): a, c, u, g, unknown or other
uggacccgggaanacuuuu

SEQ ID NO: 1590741 - RNA, 19 nt, Artificial Sequence
  Description of Artificial Sequence: Synthetic oligonucleotide
cagcauuaaucauugcaua

SEQ ID NO: 1590742 - RNA, 19 nt, Artificial Sequence
  Description of Artificial Sequence: Synthetic oligonucleotide
aucgaagucaagagcacuu

SEQ ID NO: 1590743 - RNA, 19 nt, Artificial Sequence
  Description of Artificial Sequence: Synthetic oligonucleotide
ccuucucacacuuccuuac

SEQ ID NO: 1590744 - RNA, 19 nt, Artificial Sequence
  Description of Artificial Sequence: Synthetic oligonucleotide
ggacaguugacuuuggguu

SEQ ID NO: 1590745 - RNA, 19 nt, Artificial Sequence
  Description of Artificial Sequence: Synthetic oligonucleotide
  modified_base (15)..(15): a, c, u, g, unknown or other
gauugugauauaggnggua

SEQ ID NO: 1590746 - RNA, 19 nt, Artificial Sequence
  Description of Artificial Sequence: Synthetic oligonucleotide
gucaagagcacuucuucau

SEQ ID NO: 1590747 - RNA, 19 nt, Artificial Sequence
  Description of Artificial Sequence: Synthetic oligonucleotide
caacacaauccuucucaca

SEQ ID NO: 1590748 - RNA, 19 nt, Artificial Sequence
  Description of Artificial Sequence: Synthetic oligonucleotide
ggaaccaccaagcccgaga

SEQ ID NO: 1590749 - RNA, 19 nt, Artificial Sequence
  Description of Artificial Sequence: Synthetic oligonucleotide
cuuacacuacaggggugag

SEQ ID NO: 1590750 - RNA, 19 nt, Artificial Sequence
  Description of Artificial Sequence: Synthetic oligonucleotide
auucuacggugacccaccu

SEQ ID NO: 1590751 - RNA, 19 nt, Artificial Sequence
  Description of Artificial Sequence: Synthetic oligonucleotide
ugaugacuugaagcagcca

SEQ ID NO: 1590752 - RNA, 19 nt, Artificial Sequence
  Description of Artificial Sequence: Synthetic oligonucleotide
acaauccuucucacacuuc

SEQ ID NO: 1590753 - RNA, 19 nt, Artificial Sequence
  Description of Artificial Sequence: Synthetic oligonucleotide
agauuagcuuauaguuucu

SEQ ID NO: 1590754 - RNA, 19 nt, Artificial Sequence
  Description of Artificial Sequence: Synthetic oligonucleotide
gaggcgccuaucuguauaa

SEQ ID NO: 1590755 - RNA, 19 nt, Artificial Sequence
  Description of Artificial Sequence: Synthetic oligonucleotide
aagcccgagauaagaaauu

SEQ ID NO: 1590756 - RNA, 19 nt, Artificial Sequence
  Description of Artificial Sequence: Synthetic oligonucleotide
ggaauugagccuuguacgu

SEQ ID NO: 1590757 - RNA, 19 nt, Artificial Sequence
  Description of Artificial Sequence: Synthetic oligonucleotide
cgaguaauaaaccagcacu

SEQ ID NO: 1590758 - RNA, 19 nt, Artificial Sequence
  Description of Artificial Sequence: Synthetic oligonucleotide
ccgagauaagaaauuuguc

SEQ ID NO: 1590759 - RNA, 19 nt, Artificial Sequence
  Description of Artificial Sequence: Synthetic oligonucleotide
gaaccaccaagcccgagau

SEQ ID NO: 1590760 - RNA, 19 nt, Artificial Sequence
  Description of Artificial Sequence: Synthetic oligonucleotide
gcaugaugacuugaagcag

SEQ ID NO: 1590761 - RNA, 19 nt, Artificial Sequence
  Description of Artificial Sequence: Synthetic oligonucleotide
cugguaguuauggacuaga

SEQ ID NO: 1590762 - RNA, 19 nt, Artificial Sequence
  Description of Artificial Sequence: Synthetic oligonucleotide
caagcccgagauaagaaau

SEQ ID NO: 1590763 - RNA, 19 nt, Artificial Sequence
  Description of Artificial Sequence: Synthetic oligonucleotide
ucccuuugggaagaccuua

SEQ ID NO: 1590764 - RNA, 19 nt, Artificial Sequence
  Description of Artificial Sequence: Synthetic oligonucleotide
cuacggugacccaccuuug

SEQ ID NO: 1590765 - RNA, 19 nt, Artificial Sequence
  Description of Artificial Sequence: Synthetic oligonucleotide
accaaagguaauacuucau

SEQ ID NO: 1590766 - RNA, 19 nt, Artificial Sequence
  Description of Artificial Sequence: Synthetic oligonucleotide
agcccgagauaagaaauuu

SEQ ID NO: 1590767 - RNA, 19 nt, Artificial Sequence
  Description of Artificial Sequence: Synthetic oligonucleotide
acuacaggggugagugugu

SEQ ID NO: 1590768 - RNA, 19 nt, Artificial Sequence
  Description of Artificial Sequence: Synthetic oligonucleotide
ucuuucccgugagaacuuc

SEQ ID NO: 1590769 - RNA, 19 nt, Artificial Sequence
  Description of Artificial Sequence: Synthetic oligonucleotide
uucauucguugcucccauc

SEQ ID NO: 1590770 - RNA, 19 nt, Artificial Sequence
  Description of Artificial Sequence: Synthetic oligonucleotide
cccgagauaagaaauuugu

SEQ ID NO: 1590771 - RNA, 19 nt, Artificial Sequence
  Description of Artificial Sequence: Synthetic oligonucleotide
uggguaccucugacaugag

SEQ ID NO: 1590772 - RNA, 19 nt, Artificial Sequence
  Description of Artificial Sequence: Synthetic oligonucleotide
acacuacaggggugagugu

SEQ ID NO: 1590773 - RNA, 19 nt, Artificial Sequence
  Description of Artificial Sequence: Synthetic oligonucleotide
augcaacuggcugccucuc

SEQ ID NO: 1590774 - RNA, 19 nt, Artificial Sequence
  Description of Artificial Sequence: Synthetic oligonucleotide
gguccgcuucauuuaccag

SEQ ID NO: 1590775 - RNA, 19 nt, Artificial Sequence
  Description of Artificial Sequence: Synthetic oligonucleotide
cgcagcauuaaucauugca

SEQ ID NO: 1590776 - RNA, 19 nt, Artificial Sequence
  Description of Artificial Sequence: Synthetic oligonucleotide
ucgcagcauuaaucauugc

SEQ ID NO: 1590777 - RNA, 19 nt, Artificial Sequence
  Description of Artificial Sequence: Synthetic oligonucleotide
gggaagaccuuagaauguc

SEQ ID NO: 1590778 - RNA, 19 nt, Artificial Sequence
  Description of Artificial Sequence: Synthetic oligonucleotide
accaagcccgagauaagaa

SEQ ID NO: 1590779 - RNA, 19 nt, Artificial Sequence
  Description of Artificial Sequence: Synthetic oligonucleotide
uucuacggugacccaccuu

SEQ ID NO: 1590780 - RNA, 19 nt, Artificial Sequence
  Description of Artificial Sequence: Synthetic oligonucleotide
aguugacuuuggguuuuga

SEQ ID NO: 1590781 - RNA, 19 nt, Artificial Sequence
  Description of Artificial Sequence: Synthetic oligonucleotide
ggcacuuaacacaucgaaa

SEQ ID NO: 1590782 - RNA, 19 nt, Artificial Sequence
  Description of Artificial Sequence: Synthetic oligonucleotide
caaggaauugagccuugua

SEQ ID NO: 1590783 - RNA, 19 nt, Artificial Sequence
  Description of Artificial Sequence: Synthetic oligonucleotide
cucaaacccuaugaagaaa

SEQ ID NO: 1590784 - RNA, 19 nt, Artificial Sequence
  Description of Artificial Sequence: Synthetic oligonucleotide
caccaagcccgagauaaga

SEQ ID NO: 1590785 - RNA, 19 nt, Artificial Sequence
  Description of Artificial Sequence: Synthetic oligonucleotide
gcucccaucuuuugcacaa

SEQ ID NO: 1590786 - RNA, 19 nt, Artificial Sequence
  Description of Artificial Sequence: Synthetic oligonucleotide
agcaagacaugaacuuuua

SEQ ID NO: 1590787 - RNA, 19 nt, Artificial Sequence
  Description of Artificial Sequence: Synthetic oligonucleotide
caguaauauuaacgaguaa

SEQ ID NO: 1590788 - RNA, 19 nt, Artificial Sequence
  Description of Artificial Sequence: Synthetic oligonucleotide
  modified_base (17)..(17): a, c, u, g, unknown or other
cuucuggacccgggaanac

SEQ ID NO: 1590789 - RNA, 19 nt, Artificial Sequence
  Description of Artificial Sequence: Synthetic oligonucleotide
ggcgccuaucuguauaaaa

SEQ ID NO: 1590790 - RNA, 19 nt, Artificial Sequence
  Description of Artificial Sequence: Synthetic oligonucleotide
guuauggacuagacacuaa

SEQ ID NO: 1590791 - RNA, 19 nt, Artificial Sequence
  Description of Artificial Sequence: Synthetic oligonucleotide
cccuuugggaagaccuuag

SEQ ID NO: 1590792 - RNA, 19 nt, Artificial Sequence
  Description of Artificial Sequence: Synthetic oligonucleotide
cguugcucccaucuuuugc

SEQ ID NO: 1590793 - RNA, 19 nt, Artificial Sequence
  Description of Artificial Sequence: Synthetic oligonucleotide
cacaucgaaacaguauagu

SEQ ID NO: 1590794 - RNA, 19 nt, Artificial Sequence
  Description of Artificial Sequence: Synthetic oligonucleotide
cucacguagacuucucauu

SEQ ID NO: 1590795 - RNA, 19 nt, Artificial Sequence
  Description of Artificial Sequence: Synthetic oligonucleotide
cgccuuugguuacagcacg

SEQ ID NO: 1590796 - RNA, 19 nt, Artificial Sequence
  Description of Artificial Sequence: Synthetic oligonucleotide
cuuugccauucaugauuca

SEQ ID NO: 1590797 - RNA, 19 nt, Artificial Sequence
  Description of Artificial Sequence: Synthetic oligonucleotide
gccuuugguuacagcacgg

SEQ ID NO: 1590798 - RNA, 19 nt, Artificial Sequence
  Description of Artificial Sequence: Synthetic oligonucleotide
cacggacucuuuuggugga

SEQ ID NO: 1590799 - RNA, 19 nt, Artificial Sequence
  Description of Artificial Sequence: Synthetic oligonucleotide
gccagguuggcagcucacg

SEQ ID NO: 1590800 - RNA, 19 nt, Artificial Sequence
  Description of Artificial Sequence: Synthetic oligonucleotide
ggacuagacacuaaugauu

SEQ ID NO: 1590801 - RNA, 19 nt, Artificial Sequence
  Description of Artificial Sequence: Synthetic oligonucleotide
cagguuggcagcucacgua

SEQ ID NO: 1590802 - RNA, 19 nt, Artificial Sequence
  Description of Artificial Sequence: Synthetic oligonucleotide
gcccgagauaagaaauuug

SEQ ID NO: 1590803 - RNA, 19 nt, Artificial Sequence
  Description of Artificial Sequence: Synthetic oligonucleotide
augaggcgccuaucuguau

SEQ ID NO: 1590804 - RNA, 19 nt, Artificial Sequence
  Description of Artificial Sequence: Synthetic oligonucleotide
gaauugagccuuguacguu

SEQ ID NO: 1590805 - RNA, 19 nt, Artificial Sequence
  Description of Artificial Sequence: Synthetic oligonucleotide
cacuuaugaggcgccuauc

SEQ ID NO: 1590806 - RNA, 19 nt, Artificial Sequence
  Description of Artificial Sequence: Synthetic oligonucleotide
agcacuuaugaggcgccua

SEQ ID NO: 1590807 - RNA, 19 nt, Artificial Sequence
  Description of Artificial Sequence: Synthetic oligonucleotide
ccuuacacuacagggguga

SEQ ID NO: 1590808 - RNA, 19 nt, Artificial Sequence
  Description of Artificial Sequence: Synthetic oligonucleotide
gccucucaaacccuaugaa

SEQ ID NO: 1590809 - RNA, 19 nt, Artificial Sequence
  Description of Artificial Sequence: Synthetic oligonucleotide
agagaccuucaaguucuuu

SEQ ID NO: 1590810 - RNA, 19 nt, Artificial Sequence
  Description of Artificial Sequence: Synthetic oligonucleotide
aucggauucugagcacuuu

SEQ ID NO: 1590811 - RNA, 19 nt, Artificial Sequence
  Description of Artificial Sequence: Synthetic oligonucleotide
cagcucacguagacuucuc

SEQ ID NO: 1590812 - RNA, 19 nt, Artificial Sequence
  Description of Artificial Sequence: Synthetic oligonucleotide
acccaccuuugccauucau

SEQ ID NO: 1590813 - RNA, 19 nt, Artificial Sequence
  Description of Artificial Sequence: Synthetic oligonucleotide
cugccagguuggcagcuca

SEQ ID NO: 1590814 - RNA, 19 nt, Artificial Sequence
  Description of Artificial Sequence: Synthetic oligonucleotide
auugagccuuguacguuuu

SEQ ID NO: 1590815 - RNA, 19 nt, Artificial Sequence
  Description of Artificial Sequence: Synthetic oligonucleotide
gcacacguagauaaucaua

SEQ ID NO: 1590816 - RNA, 19 nt, Artificial Sequence
  Description of Artificial Sequence: Synthetic oligonucleotide
ugguuacagcacggacucu

SEQ ID NO: 1590817 - RNA, 19 nt, Artificial Sequence
  Description of Artificial Sequence: Synthetic oligonucleotide
guguuaagaccagcuuaaa

SEQ ID NO: 1590818 - RNA, 19 nt, Artificial Sequence
  Description of Artificial Sequence: Synthetic oligonucleotide
cuucauucguugcucccau

SEQ ID NO: 1590819 - RNA, 19 nt, Artificial Sequence
  Description of Artificial Sequence: Synthetic oligonucleotide
ccugguaguuauggacuag

SEQ ID NO: 1590820 - RNA, 19 nt, Artificial Sequence
  Description of Artificial Sequence: Synthetic oligonucleotide
cacguagacuucucauuau

SEQ ID NO: 1590821 - RNA, 19 nt, Artificial Sequence
  Description of Artificial Sequence: Synthetic oligonucleotide
gcucacguagacuucucau

SEQ ID NO: 1590822 - RNA, 19 nt, Artificial Sequence
  Description of Artificial Sequence: Synthetic oligonucleotide
accauucauuucgcagcau

SEQ ID NO: 1590823 - RNA, 19 nt, Artificial Sequence
  Description of Artificial Sequence: Synthetic oligonucleotide
ccaccaagcccgagauaag

SEQ ID NO: 1590824 - RNA, 19 nt, Artificial Sequence
  Description of Artificial Sequence: Synthetic oligonucleotide
ggcaacuagauuagcuuau

SEQ ID NO: 1590825 - RNA, 19 nt, Artificial Sequence
  Description of Artificial Sequence: Synthetic oligonucleotide
gcacuuaugaggcgccuau

SEQ ID NO: 1590826 - RNA, 19 nt, Artificial Sequence
  Description of Artificial Sequence: Synthetic oligonucleotide
gaucggauucugagcacuu

SEQ ID NO: 1590827 - RNA, 19 nt, Artificial Sequence
  Description of Artificial Sequence: Synthetic oligonucleotide
agcugcgccuuugguuaca

SEQ ID NO: 1590828 - RNA, 19 nt, Artificial Sequence
  Description of Artificial Sequence: Synthetic oligonucleotide
cagcaaggaauugagccuu

SEQ ID NO: 1590829 - RNA, 19 nt, Artificial Sequence
  Description of Artificial Sequence: Synthetic oligonucleotide
acggacucuuuugguggaa

SEQ ID NO: 1590830 - RNA, 19 nt, Artificial Sequence
  Description of Artificial Sequence: Synthetic oligonucleotide
ggaagaccuuagaaugucu

SEQ ID NO: 1590831 - RNA, 19 nt, Artificial Sequence
  Description of Artificial Sequence: Synthetic oligonucleotide
gcaacuagauuagcuuaua

SEQ ID NO: 1590832 - RNA, 19 nt, Artificial Sequence
  Description of Artificial Sequence: Synthetic oligonucleotide
  modified_base (14)..(14): a, c, u, g, unknown or other
cuggacccgggaanacuuu

SEQ ID NO: 1590833 - RNA, 19 nt, Artificial Sequence
  Description of Artificial Sequence: Synthetic oligonucleotide
cagcacggacucuuuuggu

SEQ ID NO: 1590834 - RNA, 19 nt, Artificial Sequence
  Description of Artificial Sequence: Synthetic oligonucleotide
gcagcucacguagacuucu

SEQ ID NO: 1590835 - RNA, 19 nt, Artificial Sequence
  Description of Artificial Sequence: Synthetic oligonucleotide
aggcgccuaucuguauaaa

SEQ ID NO: 1590836 - RNA, 19 nt, Artificial Sequence
  Description of Artificial Sequence: Synthetic oligonucleotide
gggaaccaccaagcccgag

SEQ ID NO: 1590837 - RNA, 19 nt, Artificial Sequence
  Description of Artificial Sequence: Synthetic oligonucleotide
gguuggcagcucacguaga

SEQ ID NO: 1590838 - RNA, 19 nt, Artificial Sequence
  Description of Artificial Sequence: Synthetic oligonucleotide
ccaacuuggcaacuagauu

SEQ ID NO: 1590839 - RNA, 19 nt, Artificial Sequence
  Description of Artificial Sequence: Synthetic oligonucleotide
cgaagucaagagcacuucu

SEQ ID NO: 1590840 - RNA, 19 nt, Artificial Sequence
  Description of Artificial Sequence: Synthetic oligonucleotide
cuacaggggugaguguguu

SEQ ID NO: 1590841 - RNA, 19 nt, Artificial Sequence
  Description of Artificial Sequence: Synthetic oligonucleotide
cagcacuuaugaggcgccu

SEQ ID NO: 1590842 - RNA, 19 nt, Artificial Sequence
  Description of Artificial Sequence: Synthetic oligonucleotide
ggggaaccaccaagcccga

SEQ ID NO: 1590843 - RNA, 19 nt, Artificial Sequence
  Description of Artificial Sequence: Synthetic oligonucleotide
ucuacagacguuaaggugg

SEQ ID NO: 1590844 - RNA, 19 nt, Artificial Sequence
  Description of Artificial Sequence: Synthetic oligonucleotide
gacuauagcaccuagacac

SEQ ID NO: 1590845 - RNA, 19 nt, Artificial Sequence
  Description of Artificial Sequence: Synthetic oligonucleotide
agacaguccauccauaagg

SEQ ID NO: 1590846 - RNA, 19 nt, Artificial Sequence
  Description of Artificial Sequence: Synthetic oligonucleotide
uucaauagaaugccaggcg

SEQ ID NO: 1590847 - RNA, 19 nt, Artificial Sequence
  Description of Artificial Sequence: Synthetic oligonucleotide
agggauaccaugcucagac

SEQ ID NO: 1590848 - RNA, 19 nt, Artificial Sequence
  Description of Artificial Sequence: Synthetic oligonucleotide
ugaaguagacccuucuugg

SEQ ID NO: 1590849 - RNA, 19 nt, Artificial Sequence
  Description of Artificial Sequence: Synthetic oligonucleotide
uguaguggcgagcaaagag

SEQ ID NO: 1590850 - RNA, 19 nt, Artificial Sequence
  Description of Artificial Sequence: Synthetic oligonucleotide
ucaauagaaugccaggcgc

SEQ ID NO: 1590851 - RNA, 19 nt, Artificial Sequence
  Description of Artificial Sequence: Synthetic oligonucleotide
aaaccucacaaaguugucc

SEQ ID NO: 1590852 - RNA, 19 nt, Artificial Sequence
  Description of Artificial Sequence: Synthetic oligonucleotide
ucugaguuuggguucacgg

SEQ ID NO: 1590853 - RNA, 19 nt, Artificial Sequence
  Description of Artificial Sequence: Synthetic oligonucleotide
uaaccuguaggucugggag

SEQ ID NO: 1590854 - RNA, 19 nt, Artificial Sequence
  Description of Artificial Sequence: Synthetic oligonucleotide
aaguagacccuucuugguc

SEQ ID NO: 1590855 - RNA, 19 nt, Artificial Sequence
  Description of Artificial Sequence: Synthetic oligonucleotide
uuucacuuggaagaguggg

SEQ ID NO: 1590856 - RNA, 19 nt, Artificial Sequence
  Description of Artificial Sequence: Synthetic oligonucleotide
uuagauggacucauguccc

SEQ ID NO: 1590857 - RNA, 19 nt, Artificial Sequence
  Description of Artificial Sequence: Synthetic oligonucleotide
aguacagaguccaugcugc

SEQ ID NO: 1590858 - RNA, 19 nt, Artificial Sequence
  Description of Artificial Sequence: Synthetic oligonucleotide
cuggcuucggccuucaagg

SEQ ID NO: 1590859 - RNA, 19 nt, Artificial Sequence
  Description of Artificial Sequence: Synthetic oligonucleotide
auagcaccuagacacaaag

SEQ ID NO: 1590860 - RNA, 19 nt, Artificial Sequence
  Description of Artificial Sequence: Synthetic oligonucleotide
auccauaaggcucaagucu

SEQ ID NO: 1590861 - RNA, 19 nt, Artificial Sequence
  Description of Artificial Sequence: Synthetic oligonucleotide
auugggaaaucuuuagaug

SEQ ID NO: 1590862 - RNA, 19 nt, Artificial Sequence
  Description of Artificial Sequence: Synthetic oligonucleotide
acaucaaugggauuccucu

SEQ ID NO: 1590863 - RNA, 19 nt, Artificial Sequence
  Description of Artificial Sequence: Synthetic oligonucleotide
acaagauggauugaucacg

SEQ ID NO: 1590864 - RNA, 19 nt, Artificial Sequence
  Description of Artificial Sequence: Synthetic oligonucleotide
uccaggagaguacagaguc

SEQ ID NO: 1590865 - RNA, 19 nt, Artificial Sequence
  Description of Artificial Sequence: Synthetic oligonucleotide
caccuugugguauucaggg

SEQ ID NO: 1590866 - RNA, 19 nt, Artificial Sequence
  Description of Artificial Sequence: Synthetic oligonucleotide
guuacgagcccacagugag

SEQ ID NO: 1590867 - RNA, 19 nt, Artificial Sequence
  Description of Artificial Sequence: Synthetic oligonucleotide
ugugucggggcgcaggagg

SEQ ID NO: 1590868 - RNA, 19 nt, Artificial Sequence
  Description of Artificial Sequence: Synthetic oligonucleotide
accaugcucagacuuugcc

SEQ ID NO: 1590869 - RNA, 19 nt, Artificial Sequence
  Description of Artificial Sequence: Synthetic oligonucleotide
uggaaccuucaauagaaug

SEQ ID NO: 1590870 - RNA, 19 nt, Artificial Sequence
  Description of Artificial Sequence: Synthetic oligonucleotide
gugacuauagcaccuagac

SEQ ID NO: 1590871 - RNA, 19 nt, Artificial Sequence
  Description of Artificial Sequence: Synthetic oligonucleotide
gaaccuucaauagaaugcc

SEQ ID NO: 1590872 - RNA, 19 nt, Artificial Sequence
  Description of Artificial Sequence: Synthetic oligonucleotide
ucacuuugagccuugacua

SEQ ID NO: 1590873 - RNA, 19 nt, Artificial Sequence
  Description of Artificial Sequence: Synthetic oligonucleotide
ugguugaacaccaggccag

SEQ ID NO: 1590874 - RNA, 19 nt, Artificial Sequence
  Description of Artificial Sequence: Synthetic oligonucleotide
uggacgaaggggcagaguc

SEQ ID NO: 1590875 - RNA, 19 nt, Artificial Sequence
  Description of Artificial Sequence: Synthetic oligonucleotide
caugcucagacuuugccug

SEQ ID NO: 1590876 - RNA, 19 nt, Artificial Sequence
  Description of Artificial Sequence: Synthetic oligonucleotide
caagauggauugaucacgc

SEQ ID NO: 1590877 - RNA, 19 nt, Artificial Sequence
  Description of Artificial Sequence: Synthetic oligonucleotide
gaauggagaccccuggagc

SEQ ID NO: 1590878 - RNA, 19 nt, Artificial Sequence
  Description of Artificial Sequence: Synthetic oligonucleotide
aucacgcaucaucuggugc

SEQ ID NO: 1590879 - RNA, 19 nt, Artificial Sequence
  Description of Artificial Sequence: Synthetic oligonucleotide
ugguccagaauggagaccc

SEQ ID NO: 1590880 - RNA, 19 nt, Artificial Sequence
  Description of Artificial Sequence: Synthetic oligonucleotide
agcacgcuccuucuguugc

SEQ ID NO: 1590881 - RNA, 19 nt, Artificial Sequence
  Description of Artificial Sequence: Synthetic oligonucleotide
agcaccuagacacaaaguu

SEQ ID NO: 1590882 - RNA, 19 nt, Artificial Sequence
  Description of Artificial Sequence: Synthetic oligonucleotide
aucuacagacguuaaggug

SEQ ID NO: 1590883 - RNA, 19 nt, Artificial Sequence
  Description of Artificial Sequence: Synthetic oligonucleotide
gggucuaugaccaagucag

SEQ ID NO: 1590884 - RNA, 19 nt, Artificial Sequence
  Description of Artificial Sequence: Synthetic oligonucleotide
guaguggcgagcaaagagg

SEQ ID NO: 1590885 - RNA, 19 nt, Artificial Sequence
  Description of Artificial Sequence: Synthetic oligonucleotide
gacaagauggauugaucac

SEQ ID NO: 1590886 - RNA, 19 nt, Artificial Sequence
  Description of Artificial Sequence: Synthetic oligonucleotide
aaagucugugucggggcgc

SEQ ID NO: 1590887 - RNA, 19 nt, Artificial Sequence
  Description of Artificial Sequence: Synthetic oligonucleotide
agacacaaaguugugaagu

SEQ ID NO: 1590888 - RNA, 19 nt, Artificial Sequence
  Description of Artificial Sequence: Synthetic oligonucleotide
accauggaaccuucaauag

SEQ ID NO: 1590889 - RNA, 19 nt, Artificial Sequence
  Description of Artificial Sequence: Synthetic oligonucleotide
acaaaguugugaaguagac

SEQ ID NO: 1590890 - RNA, 19 nt, Artificial Sequence
  Description of Artificial Sequence: Synthetic oligonucleotide
uuugccugcuccacggcag

SEQ ID NO: 1590891 - RNA, 19 nt, Artificial Sequence
  Description of Artificial Sequence: Synthetic oligonucleotide
aguagacccuucuugguca

SEQ ID NO: 1590892 - RNA, 19 nt, Artificial Sequence
  Description of Artificial Sequence: Synthetic oligonucleotide
ugggcugggugcuugagcc

SEQ ID NO: 1590893 - RNA, 19 nt, Artificial Sequence
  Description of Artificial Sequence: Synthetic oligonucleotide
ugggucuaugaccaaguca

SEQ ID NO: 1590894 - RNA, 19 nt, Artificial Sequence
  Description of Artificial Sequence: Synthetic oligonucleotide
ugacuauagcaccuagaca

SEQ ID NO: 1590895 - RNA, 19 nt, Artificial Sequence
  Description of Artificial Sequence: Synthetic oligonucleotide
caaaguuguccccagccag

SEQ ID NO: 1590896 - RNA, 19 nt, Artificial Sequence
  Description of Artificial Sequence: Synthetic oligonucleotide
cuggugagugcucucauag

SEQ ID NO: 1590897 - RNA, 19 nt, Artificial Sequence
  Description of Artificial Sequence: Synthetic oligonucleotide
ggaaccuucaauagaaugc

SEQ ID NO: 1590898 - RNA, 19 nt, Artificial Sequence
  Description of Artificial Sequence: Synthetic oligonucleotide
acggcagugacuauagcac

SEQ ID NO: 1590899 - RNA, 19 nt, Artificial Sequence
  Description of Artificial Sequence: Synthetic oligonucleotide
agauggauugaucacgcau

SEQ ID NO: 1590900 - RNA, 19 nt, Artificial Sequence
  Description of Artificial Sequence: Synthetic oligonucleotide
aaucuuuagauggacucau

SEQ ID NO: 1590901 - RNA, 19 nt, Artificial Sequence
  Description of Artificial Sequence: Synthetic oligonucleotide
caggagggcaucaaagagc

SEQ ID NO: 1590902 - RNA, 19 nt, Artificial Sequence
  Description of Artificial Sequence: Synthetic oligonucleotide
cuagacacaaaguugugaa

SEQ ID NO: 1590903 - RNA, 19 nt, Artificial Sequence
  Description of Artificial Sequence: Synthetic oligonucleotide
uccacggcagugacuauag

SEQ ID NO: 1590904 - RNA, 19 nt, Artificial Sequence
  Description of Artificial Sequence: Synthetic oligonucleotide
cuucuuggucacauagucc

SEQ ID NO: 1590905 - RNA, 19 nt, Artificial Sequence
  Description of Artificial Sequence: Synthetic oligonucleotide
uuccucuuggggcucagug

SEQ ID NO: 1590906 - RNA, 19 nt, Artificial Sequence
  Description of Artificial Sequence: Synthetic oligonucleotide
uccauaaggcucaagucuu

SEQ ID NO: 1590907 - RNA, 19 nt, Artificial Sequence
  Description of Artificial Sequence: Synthetic oligonucleotide
uggacagaccggcggaagg

SEQ ID NO: 1590908 - RNA, 19 nt, Artificial Sequence
  Description of Artificial Sequence: Synthetic oligonucleotide
uaguggcgagcaaagagga

SEQ ID NO: 1590909 - RNA, 19 nt, Artificial Sequence
  Description of Artificial Sequence: Synthetic oligonucleotide
uccagcacacaccuggccu

SEQ ID NO: 1590910 - RNA, 19 nt, Artificial Sequence
  Description of Artificial Sequence: Synthetic oligonucleotide
gaagggguccacaucaaug

SEQ ID NO: 1590911 - RNA, 19 nt, Artificial Sequence
  Description of Artificial Sequence: Synthetic oligonucleotide
cuuugagccuugacuagcc

SEQ ID NO: 1590912 - RNA, 19 nt, Artificial Sequence
  Description of Artificial Sequence: Synthetic oligonucleotide
uagucccuguaguaguggg

SEQ ID NO: 1590913 - RNA, 19 nt, Artificial Sequence
  Description of Artificial Sequence: Synthetic oligonucleotide
ugacagcucaugguggacg

SEQ ID NO: 1590914 - RNA, 19 nt, Artificial Sequence
  Description of Artificial Sequence: Synthetic oligonucleotide
cuugugguauucaggguac

SEQ ID NO: 1590915 - RNA, 19 nt, Artificial Sequence
  Description of Artificial Sequence: Synthetic oligonucleotide
gauggguagccuguguucc

SEQ ID NO: 1590916 - RNA, 19 nt, Artificial Sequence
  Description of Artificial Sequence: Synthetic oligonucleotide
ugaucacgcaucaucuggu

SEQ ID NO: 1590917 - RNA, 19 nt, Artificial Sequence
  Description of Artificial Sequence: Synthetic oligonucleotide
uuggcaguuaaguagccuu

SEQ ID NO: 1590918 - RNA, 19 nt, Artificial Sequence
  Description of Artificial Sequence: Synthetic oligonucleotide
caaaguugugaaguagacc

SEQ ID NO: 1590919 - RNA, 19 nt, Artificial Sequence
  Description of Artificial Sequence: Synthetic oligonucleotide
cagggucauggacagaccg

SEQ ID NO: 1590920 - RNA, 19 nt, Artificial Sequence
  Description of Artificial Sequence: Synthetic oligonucleotide
caggguacagcaucuuggg

SEQ ID NO: 1590921 - RNA, 19 nt, Artificial Sequence
  Description of Artificial Sequence: Synthetic oligonucleotide
uccuuaaccuguaggucug

SEQ ID NO: 1590922 - RNA, 19 nt, Artificial Sequence
  Description of Artificial Sequence: Synthetic oligonucleotide
aggaccacguuacgagccc

SEQ ID NO: 1590923 - RNA, 19 nt, Artificial Sequence
  Description of Artificial Sequence: Synthetic oligonucleotide
accucacaaaguugucccc

SEQ ID NO: 1590924 - RNA, 19 nt, Artificial Sequence
  Description of Artificial Sequence: Synthetic oligonucleotide
uggcgagcaaagaggacag

SEQ ID NO: 1590925 - RNA, 19 nt, Artificial Sequence
  Description of Artificial Sequence: Synthetic oligonucleotide
auugaucacgcaucaucug

SEQ ID NO: 1590926 - RNA, 19 nt, Artificial Sequence
  Description of Artificial Sequence: Synthetic oligonucleotide
gauggacucaugucccacc

SEQ ID NO: 1590927 - RNA, 19 nt, Artificial Sequence
  Description of Artificial Sequence: Synthetic oligonucleotide
gacaguccauccauaaggc

SEQ ID NO: 1590928 - RNA, 19 nt, Artificial Sequence
  Description of Artificial Sequence: Synthetic oligonucleotide
accgggcuaugauaagccc

SEQ ID NO: 1590929 - RNA, 19 nt, Artificial Sequence
  Description of Artificial Sequence: Synthetic oligonucleotide
ugggagacucauccacugg

SEQ ID NO: 1590930 - RNA, 19 nt, Artificial Sequence
  Description of Artificial Sequence: Synthetic oligonucleotide
uuggcucaaggucaccaug

SEQ ID NO: 1590931 - RNA, 19 nt, Artificial Sequence
  Description of Artificial Sequence: Synthetic oligonucleotide
aguccuuaaccuguagguc

SEQ ID NO: 1590932 - RNA, 19 nt, Artificial Sequence
  Description of Artificial Sequence: Synthetic oligonucleotide
auggauugaucacgcauca

SEQ ID NO: 1590933 - RNA, 19 nt, Artificial Sequence
  Description of Artificial Sequence: Synthetic oligonucleotide
aaccuguaggucugggaga

SEQ ID NO: 1590934 - RNA, 19 nt, Artificial Sequence
  Description of Artificial Sequence: Synthetic oligonucleotide
accuucaauagaaugccag

SEQ ID NO: 1590935 - RNA, 19 nt, Artificial Sequence
  Description of Artificial Sequence: Synthetic oligonucleotide
uguuguaguggcgagcaaa

SEQ ID NO: 1590936 - RNA, 19 nt, Artificial Sequence
  Description of Artificial Sequence: Synthetic oligonucleotide
ggacaagauggauugauca

SEQ ID NO: 1590937 - RNA, 19 nt, Artificial Sequence
  Description of Artificial Sequence: Synthetic oligonucleotide
ucugggagacucauccacu

SEQ ID NO: 1590938 - RNA, 19 nt, Artificial Sequence
  Description of Artificial Sequence: Synthetic oligonucleotide
uguugcggagaccucugca

SEQ ID NO: 1590939 - RNA, 19 nt, Artificial Sequence
  Description of Artificial Sequence: Synthetic oligonucleotide
guuguaguggcgagcaaag

SEQ ID NO: 1590940 - RNA, 19 nt, Artificial Sequence
  Description of Artificial Sequence: Synthetic oligonucleotide
agacguuaaggugguuucc

SEQ ID NO: 1590941 - RNA, 19 nt, Artificial Sequence
  Description of Artificial Sequence: Synthetic oligonucleotide
ggauugaucacgcaucauc

SEQ ID NO: 1590942 - RNA, 19 nt, Artificial Sequence
  Description of Artificial Sequence: Synthetic oligonucleotide
ucagggcaucuacagacgu

SEQ ID NO: 1590943 - RNA, 19 nt, Artificial Sequence
  Description of Artificial Sequence: Synthetic oligonucleotide
ggugaagggguccacauca

SEQ ID NO: 1590944 - RNA, 19 nt, Artificial Sequence
  Description of Artificial Sequence: Synthetic oligonucleotide
uguugcuuccaggagagua

SEQ ID NO: 1590945 - RNA, 19 nt, Artificial Sequence
  Description of Artificial Sequence: Synthetic oligonucleotide
auacaggcccuccugguga

SEQ ID NO: 1590946 - RNA, 19 nt, Artificial Sequence
  Description of Artificial Sequence: Synthetic oligonucleotide
auggguagccuguguuccc

SEQ ID NO: 1590947 - RNA, 19 nt, Artificial Sequence
  Description of Artificial Sequence: Synthetic oligonucleotide
acguuacgagcccacagug

SEQ ID NO: 1590948 - RNA, 19 nt, Artificial Sequence
  Description of Artificial Sequence: Synthetic oligonucleotide
ugugaaguagacccuucuu

SEQ ID NO: 1590949 - RNA, 19 nt, Artificial Sequence
  Description of Artificial Sequence: Synthetic oligonucleotide
ggacucaugucccaccggg

SEQ ID NO: 1590950 - RNA, 19 nt, Artificial Sequence
  Description of Artificial Sequence: Synthetic oligonucleotide
caggaccacguuacgagcc

SEQ ID NO: 1590951 - RNA, 19 nt, Artificial Sequence
  Description of Artificial Sequence: Synthetic oligonucleotide
gguacagcaucuugggcag

SEQ ID NO: 1590952 - RNA, 19 nt, Artificial Sequence
  Description of Artificial Sequence: Synthetic oligonucleotide
auagaaugccaggcgcccc

SEQ ID NO: 1590953 - RNA, 19 nt, Artificial Sequence
  Description of Artificial Sequence: Synthetic oligonucleotide
acucaugucccaccgggcu

SEQ ID NO: 1590954 - RNA, 19 nt, Artificial Sequence
  Description of Artificial Sequence: Synthetic oligonucleotide
ugggaggacaagauggauu

SEQ ID NO: 1590955 - RNA, 19 nt, Artificial Sequence
  Description of Artificial Sequence: Synthetic oligonucleotide
guaguagugggcgauguca

SEQ ID NO: 1590956 - RNA, 19 nt, Artificial Sequence
  Description of Artificial Sequence: Synthetic oligonucleotide
ucaagggugcccguggcca

SEQ ID NO: 1590957 - RNA, 19 nt, Artificial Sequence
  Description of Artificial Sequence: Synthetic oligonucleotide
ugauaagccccuccucuuc

SEQ ID NO: 1590958 - RNA, 19 nt, Artificial Sequence
  Description of Artificial Sequence: Synthetic oligonucleotide
guugcggagaccucugcac

SEQ ID NO: 1590959 - RNA, 19 nt, Artificial Sequence
  Description of Artificial Sequence: Synthetic oligonucleotide
aagauggauugaucacgca

SEQ ID NO: 1590960 - RNA, 19 nt, Artificial Sequence
  Description of Artificial Sequence: Synthetic oligonucleotide
cagacguuaaggugguuuc

SEQ ID NO: 1590961 - RNA, 19 nt, Artificial Sequence
  Description of Artificial Sequence: Synthetic oligonucleotide
gaucacgcaucaucuggug

SEQ ID NO: 1590962 - RNA, 19 nt, Artificial Sequence
  Description of Artificial Sequence: Synthetic oligonucleotide
gauugaucacgcaucaucu

SEQ ID NO: 1590963 - RNA, 19 nt, Artificial Sequence
  Description of Artificial Sequence: Synthetic oligonucleotide
cacggcagugacuauagca

SEQ ID NO: 1590964 - RNA, 19 nt, Artificial Sequence
  Description of Artificial Sequence: Synthetic oligonucleotide
caccgggcuaugauaagcc

SEQ ID NO: 1590965 - RNA, 19 nt, Artificial Sequence
  Description of Artificial Sequence: Synthetic oligonucleotide
aggagggcaucaaagagca

SEQ ID NO: 1590966 - RNA, 19 nt, Artificial Sequence
  Description of Artificial Sequence: Synthetic oligonucleotide
gucugggagacucauccac

SEQ ID NO: 1590967 - RNA, 19 nt, Artificial Sequence
  Description of Artificial Sequence: Synthetic oligonucleotide
guuaaguagccuuucacuu

SEQ ID NO: 1590968 - RNA, 19 nt, Artificial Sequence
  Description of Artificial Sequence: Synthetic oligonucleotide
ugggccagacaguccaucc

SEQ ID NO: 1590969 - RNA, 19 nt, Artificial Sequence
  Description of Artificial Sequence: Synthetic oligonucleotide
ucccaccgggcuaugauaa

SEQ ID NO: 1590970 - RNA, 19 nt, Artificial Sequence
  Description of Artificial Sequence: Synthetic oligonucleotide
gaaggggcagagucucucc

SEQ ID NO: 1590971 - RNA, 19 nt, Artificial Sequence
  Description of Artificial Sequence: Synthetic oligonucleotide
ucugugucggggcgcagga

SEQ ID NO: 1590972 - RNA, 19 nt, Artificial Sequence
  Description of Artificial Sequence: Synthetic oligonucleotide
agauggacucaugucccac

SEQ ID NO: 1590973 - RNA, 19 nt, Artificial Sequence
  Description of Artificial Sequence: Synthetic oligonucleotide
gacacaaaguugugaagua

SEQ ID NO: 1590974 - RNA, 19 nt, Artificial Sequence
  Description of Artificial Sequence: Synthetic oligonucleotide
ccuuucacuuggaagagug

SEQ ID NO: 1590975 - RNA, 19 nt, Artificial Sequence
  Description of Artificial Sequence: Synthetic oligonucleotide
cacuuugagccuugacuag

SEQ ID NO: 1590976 - RNA, 19 nt, Artificial Sequence
  Description of Artificial Sequence: Synthetic oligonucleotide
gcucucauaggugaagggg

SEQ ID NO: 1590977 - RNA, 19 nt, Artificial Sequence
  Description of Artificial Sequence: Synthetic oligonucleotide
uguuguccuuggcaguuaa

SEQ ID NO: 1590978 - RNA, 19 nt, Artificial Sequence
  Description of Artificial Sequence: Synthetic oligonucleotide
auagucccuguaguagugg

SEQ ID NO: 1590979 - RNA, 19 nt, Artificial Sequence
  Description of Artificial Sequence: Synthetic oligonucleotide
uccgcagccaguccuuaac

SEQ ID NO: 1590980 - RNA, 19 nt, Artificial Sequence
  Description of Artificial Sequence: Synthetic oligonucleotide
uugcggagaccucugcacu

SEQ ID NO: 1590981 - RNA, 19 nt, Artificial Sequence
  Description of Artificial Sequence: Synthetic oligonucleotide
uagcaccuagacacaaagu

SEQ ID NO: 1590982 - RNA, 19 nt, Artificial Sequence
  Description of Artificial Sequence: Synthetic oligonucleotide
aggcucaagucuucaucuc

SEQ ID NO: 1590983 - RNA, 19 nt, Artificial Sequence
  Description of Artificial Sequence: Synthetic oligonucleotide
auaccaugcucagacuuug

SEQ ID NO: 1590984 - RNA, 19 nt, Artificial Sequence
  Description of Artificial Sequence: Synthetic oligonucleotide
uguaguagugggcgauguc

SEQ ID NO: 1590985 - RNA, 19 nt, Artificial Sequence
  Description of Artificial Sequence: Synthetic oligonucleotide
agucccuguaguagugggc

SEQ ID NO: 1590986 - RNA, 19 nt, Artificial Sequence
  Description of Artificial Sequence: Synthetic oligonucleotide
cuaugauaagccccuccuc

SEQ ID NO: 1590987 - RNA, 19 nt, Artificial Sequence
  Description of Artificial Sequence: Synthetic oligonucleotide
ugguuugucaagggugccc

SEQ ID NO: 1590988 - RNA, 19 nt, Artificial Sequence
  Description of Artificial Sequence: Synthetic oligonucleotide
guugcuuccaggagaguac

SEQ ID NO: 1590989 - RNA, 19 nt, Artificial Sequence
  Description of Artificial Sequence: Synthetic oligonucleotide
caccauggaaccuucaaua

SEQ ID NO: 1590990 - RNA, 19 nt, Artificial Sequence
  Description of Artificial Sequence: Synthetic oligonucleotide
cuuaaccuguaggucuggg

SEQ ID NO: 1590991 - RNA, 19 nt, Artificial Sequence
  Description of Artificial Sequence: Synthetic oligonucleotide
gggagacucauccacuggc

SEQ ID NO: 1590992 - RNA, 19 nt, Artificial Sequence
  Description of Artificial Sequence: Synthetic oligonucleotide
acguuaaggugguuuccug

SEQ ID NO: 1590993 - RNA, 19 nt, Artificial Sequence
  Description of Artificial Sequence: Synthetic oligonucleotide
gcauggaucaccuggaugu

SEQ ID NO: 1590994 - RNA, 19 nt, Artificial Sequence
  Description of Artificial Sequence: Synthetic oligonucleotide
guccuuaaccuguaggucu

SEQ ID NO: 1590995 - RNA, 19 nt, Artificial Sequence
  Description of Artificial Sequence: Synthetic oligonucleotide
ugaagggguccacaucaau

SEQ ID NO: 1590996 - RNA, 19 nt, Artificial Sequence
  Description of Artificial Sequence: Synthetic oligonucleotide
uagauggacucauguccca

SEQ ID NO: 1590997 - RNA, 19 nt, Artificial Sequence
  Description of Artificial Sequence: Synthetic oligonucleotide
uuacgagcccacagugaga

SEQ ID NO: 1590998 - RNA, 19 nt, Artificial Sequence
  Description of Artificial Sequence: Synthetic oligonucleotide
agcccagcgcccacaaucc

SEQ ID NO: 1590999 - RNA, 19 nt, Artificial Sequence
  Description of Artificial Sequence: Synthetic oligonucleotide
ggcucaagucuucaucucc

SEQ ID NO: 1591000 - RNA, 19 nt, Artificial Sequence
  Description of Artificial Sequence: Synthetic oligonucleotide
gccuugacuagccugagga

SEQ ID NO: 1591001 - RNA, 19 nt, Artificial Sequence
  Description of Artificial Sequence: Synthetic oligonucleotide
gccaggaccacguuacgag

SEQ ID NO: 1591002 - RNA, 19 nt, Artificial Sequence
  Description of Artificial Sequence: Synthetic oligonucleotide
caccuagacacaaaguugu

SEQ ID NO: 1591003 - RNA, 19 nt, Artificial Sequence
  Description of Artificial Sequence: Synthetic oligonucleotide
uagugggcgaugucaccag

SEQ ID NO: 1591004 - RNA, 19 nt, Artificial Sequence
  Description of Artificial Sequence: Synthetic oligonucleotide
auaaggcucaagucuucau

SEQ ID NO: 1591005 - RNA, 19 nt, Artificial Sequence
  Description of Artificial Sequence: Synthetic oligonucleotide
gucuaugaccaagucagca

SEQ ID NO: 1591006 - RNA, 19 nt, Artificial Sequence
  Description of Artificial Sequence: Synthetic oligonucleotide
ggcauacaggcccuccugg

SEQ ID NO: 1591007 - RNA, 19 nt, Artificial Sequence
  Description of Artificial Sequence: Synthetic oligonucleotide
aaguugugaaguagacccu

SEQ ID NO: 1591008 - RNA, 19 nt, Artificial Sequence
  Description of Artificial Sequence: Synthetic oligonucleotide
acagacguuaaggugguuu

SEQ ID NO: 1591009 - RNA, 19 nt, Artificial Sequence
  Description of Artificial Sequence: Synthetic oligonucleotide
gacgaaggggcagagucuc

SEQ ID NO: 1591010 - RNA, 19 nt, Artificial Sequence
  Description of Artificial Sequence: Synthetic oligonucleotide
agcaccgggucugaguuug

SEQ ID NO: 1591011 - RNA, 19 nt, Artificial Sequence
  Description of Artificial Sequence: Synthetic oligonucleotide
caauccagcaccgggucug

SEQ ID NO: 1591012 - RNA, 19 nt, Artificial Sequence
  Description of Artificial Sequence: Synthetic oligonucleotide
uaccaugcucagacuuugc

SEQ ID NO: 1591013 - RNA, 19 nt, Artificial Sequence
  Description of Artificial Sequence: Synthetic oligonucleotide
uggcaguuaaguagccuuu

SEQ ID NO: 1591014 - RNA, 19 nt, Artificial Sequence
  Description of Artificial Sequence: Synthetic oligonucleotide
uccgccccaggacaaggug

SEQ ID NO: 1591015 - RNA, 19 nt, Artificial Sequence
  Description of Artificial Sequence: Synthetic oligonucleotide
gcgcccacaauccagcacc

SEQ ID NO: 1591016 - RNA, 19 nt, Artificial Sequence
  Description of Artificial Sequence: Synthetic oligonucleotide
agugacuauagcaccuaga

SEQ ID NO: 1591017 - RNA, 19 nt, Artificial Sequence
  Description of Artificial Sequence: Synthetic oligonucleotide
agggucauggacagaccgg

SEQ ID NO: 1591018 - RNA, 19 nt, Artificial Sequence
  Description of Artificial Sequence: Synthetic oligonucleotide
aggauggguagccuguguu

SEQ ID NO: 1591019 - RNA, 19 nt, Artificial Sequence
  Description of Artificial Sequence: Synthetic oligonucleotide
ggaaagguuggggugggag

SEQ ID NO: 1591020 - RNA, 19 nt, Artificial Sequence
  Description of Artificial Sequence: Synthetic oligonucleotide
ggcaucuacagacguuaag

SEQ ID NO: 1591021 - RNA, 19 nt, Artificial Sequence
  Description of Artificial Sequence: Synthetic oligonucleotide
cccacaauccagcaccggg

SEQ ID NO: 1591022 - RNA, 19 nt, Artificial Sequence
  Description of Artificial Sequence: Synthetic oligonucleotide
aaccuucaauagaaugcca

SEQ ID NO: 1591023 - RNA, 19 nt, Artificial Sequence
  Description of Artificial Sequence: Synthetic oligonucleotide
uuuuccgcagccaguccuu

SEQ ID NO: 1591024 - RNA, 19 nt, Artificial Sequence
  Description of Artificial Sequence: Synthetic oligonucleotide
gaaguagacccuucuuggu

SEQ ID NO: 1591025 - RNA, 19 nt, Artificial Sequence
  Description of Artificial Sequence: Synthetic oligonucleotide
cccauugggaaaucuuuag

SEQ ID NO: 1591026 - RNA, 19 nt, Artificial Sequence
  Description of Artificial Sequence: Synthetic oligonucleotide
caggagaguacagagucca

SEQ ID NO: 1591027 - RNA, 19 nt, Artificial Sequence
  Description of Artificial Sequence: Synthetic oligonucleotide
gugagugcucucauaggug

SEQ ID NO: 1591028 - RNA, 19 nt, Artificial Sequence
  Description of Artificial Sequence: Synthetic oligonucleotide
uuggguucacggugccugc

SEQ ID NO: 1591029 - RNA, 19 nt, Artificial Sequence
  Description of Artificial Sequence: Synthetic oligonucleotide
agggcaucuacagacguua

SEQ ID NO: 1591030 - RNA, 19 nt, Artificial Sequence
  Description of Artificial Sequence: Synthetic oligonucleotide
caucaaagagcagggccac

SEQ ID NO: 1591031 - RNA, 19 nt, Artificial Sequence
  Description of Artificial Sequence: Synthetic oligonucleotide
caguccuuaaccuguaggu

SEQ ID NO: 1591032 - RNA, 19 nt, Artificial Sequence
  Description of Artificial Sequence: Synthetic oligonucleotide
agaccggcggaaggcaugg

SEQ ID NO: 1591033 - RNA, 19 nt, Artificial Sequence
  Description of Artificial Sequence: Synthetic oligonucleotide
aguugugaaguagacccuu

SEQ ID NO: 1591034 - RNA, 19 nt, Artificial Sequence
  Description of Artificial Sequence: Synthetic oligonucleotide
ggagaguacagaguccaug

SEQ ID NO: 1591035 - RNA, 19 nt, Artificial Sequence
  Description of Artificial Sequence: Synthetic oligonucleotide
cguuaaggugguuuccugg

SEQ ID NO: 1591036 - RNA, 19 nt, Artificial Sequence
  Description of Artificial Sequence: Synthetic oligonucleotide
aggugguuuccuggucucc

SEQ ID NO: 1591037 - RNA, 19 nt, Artificial Sequence
  Description of Artificial Sequence: Synthetic oligonucleotide
cagcaucggcugcagacag

SEQ ID NO: 1591038 - RNA, 19 nt, Artificial Sequence
  Description of Artificial Sequence: Synthetic oligonucleotide
agccuuucacuuggaagag

SEQ ID NO: 1591039 - RNA, 19 nt, Artificial Sequence
  Description of Artificial Sequence: Synthetic oligonucleotide
caucuacagacguuaaggu

SEQ ID NO: 1591040 - RNA, 19 nt, Artificial Sequence
  Description of Artificial Sequence: Synthetic oligonucleotide
agacucauccacuggccuu

SEQ ID NO: 1591041 - RNA, 19 nt, Artificial Sequence
  Description of Artificial Sequence: Synthetic oligonucleotide
gcaccuagacacaaaguug

SEQ ID NO: 1591042 - RNA, 19 nt, Artificial Sequence
  Description of Artificial Sequence: Synthetic oligonucleotide
auaggugaagggguccaca

SEQ ID NO: 1591043 - RNA, 19 nt, Artificial Sequence
  Description of Artificial Sequence: Synthetic oligonucleotide
caaggccccacccuggaca

SEQ ID NO: 1591044 - RNA, 19 nt, Artificial Sequence
  Description of Artificial Sequence: Synthetic oligonucleotide
acagcaucggcugcagaca

SEQ ID NO: 1591045 - RNA, 19 nt, Artificial Sequence
  Description of Artificial Sequence: Synthetic oligonucleotide
ugcuugagccucagggaua

SEQ ID NO: 1591046 - RNA, 19 nt, Artificial Sequence
  Description of Artificial Sequence: Synthetic oligonucleotide
acuauagcaccuagacaca

SEQ ID NO: 1591047 - RNA, 19 nt, Artificial Sequence
  Description of Artificial Sequence: Synthetic oligonucleotide
gucaccauggaaccuucaa

SEQ ID NO: 1591048 - RNA, 19 nt, Artificial Sequence
  Description of Artificial Sequence: Synthetic oligonucleotide
ugaggauggguagccugug

SEQ ID NO: 1591049 - RNA, 19 nt, Artificial Sequence
  Description of Artificial Sequence: Synthetic oligonucleotide
ggcuaugauaagccccucc

SEQ ID NO: 1591050 - RNA, 19 nt, Artificial Sequence
  Description of Artificial Sequence: Synthetic oligonucleotide
gcugaucugggucuaugac

SEQ ID NO: 1591051 - RNA, 19 nt, Artificial Sequence
  Description of Artificial Sequence: Synthetic oligonucleotide
ugccuagccgggcugguuu

SEQ ID NO: 1591052 - RNA, 19 nt, Artificial Sequence
  Description of Artificial Sequence: Synthetic oligonucleotide
guagccuguguuccccaug

SEQ ID NO: 1591053 - RNA, 19 nt, Artificial Sequence
  Description of Artificial Sequence: Synthetic oligonucleotide
ggcauggaucaccuggaug

SEQ ID NO: 1591054 - RNA, 19 nt, Artificial Sequence
  Description of Artificial Sequence: Synthetic oligonucleotide
ugacuagccugaggauggg

SEQ ID NO: 1591055 - RNA, 19 nt, Artificial Sequence
  Description of Artificial Sequence: Synthetic oligonucleotide
uuguaguggcgagcaaaga

SEQ ID NO: 1591056 - RNA, 19 nt, Artificial Sequence
  Description of Artificial Sequence: Synthetic oligonucleotide
ggugcuugagccucaggga

SEQ ID NO: 1591057 - RNA, 19 nt, Artificial Sequence
  Description of Artificial Sequence: Synthetic oligonucleotide
ccuccaaagucugugucgg

SEQ ID NO: 1591058 - RNA, 19 nt, Artificial Sequence
  Description of Artificial Sequence: Synthetic oligonucleotide
accgggucugaguuugggu

SEQ ID NO: 1591059 - RNA, 19 nt, Artificial Sequence
  Description of Artificial Sequence: Synthetic oligonucleotide
ucaucuccugcuggggaga

SEQ ID NO: 1591060 - RNA, 19 nt, Artificial Sequence
  Description of Artificial Sequence: Synthetic oligonucleotide
aguggcgagcaaagaggac

SEQ ID NO: 1591061 - RNA, 19 nt, Artificial Sequence
  Description of Artificial Sequence: Synthetic oligonucleotide
gucugaguuuggguucacg

SEQ ID NO: 1591062 - RNA, 19 nt, Artificial Sequence
  Description of Artificial Sequence: Synthetic oligonucleotide
acggugccugcccgaaggg

SEQ ID NO: 1591063 - RNA, 19 nt, Artificial Sequence
  Description of Artificial Sequence: Synthetic oligonucleotide
gacucaugucccaccgggc

SEQ ID NO: 1591064 - RNA, 19 nt, Artificial Sequence
  Description of Artificial Sequence: Synthetic oligonucleotide
cagaguccaugcugccucc

SEQ ID NO: 1591065 - RNA, 19 nt, Artificial Sequence
  Description of Artificial Sequence: Synthetic oligonucleotide
cuuugccugcuccacggca

SEQ ID NO: 1591066 - RNA, 19 nt, Artificial Sequence
  Description of Artificial Sequence: Synthetic oligonucleotide
acuagccugaggaugggua

SEQ ID NO: 1591067 - RNA, 19 nt, Artificial Sequence
  Description of Artificial Sequence: Synthetic oligonucleotide
ggagguuccgccccaggac

SEQ ID NO: 1591068 - RNA, 19 nt, Artificial Sequence
  Description of Artificial Sequence: Synthetic oligonucleotide
guuccgccccaggacaagg

SEQ ID NO: 1591069 - RNA, 19 nt, Artificial Sequence
  Description of Artificial Sequence: Synthetic oligonucleotide
augguggacgaaggggcag

SEQ ID NO: 1591070 - RNA, 19 nt, Artificial Sequence
  Description of Artificial Sequence: Synthetic oligonucleotide
cauaaggcucaagucuuca

SEQ ID NO: 1591071 - RNA, 19 nt, Artificial Sequence
  Description of Artificial Sequence: Synthetic oligonucleotide
ggcgaugucaccagcugug

SEQ ID NO: 1591072 - RNA, 19 nt, Artificial Sequence
  Description of Artificial Sequence: Synthetic oligonucleotide
gcaccuugugguauucagg

SEQ ID NO: 1591073 - RNA, 19 nt, Artificial Sequence
  Description of Artificial Sequence: Synthetic oligonucleotide
ggauggguagccuguguuc

SEQ ID NO: 1591074 - RNA, 19 nt, Artificial Sequence
  Description of Artificial Sequence: Synthetic oligonucleotide
ggacaaaccucacaaaguu

SEQ ID NO: 1591075 - RNA, 19 nt, Artificial Sequence
  Description of Artificial Sequence: Synthetic oligonucleotide
cugggucuaugaccaaguc

SEQ ID NO: 1591076 - RNA, 19 nt, Artificial Sequence
  Description of Artificial Sequence: Synthetic oligonucleotide
guagacccuucuuggucac

SEQ ID NO: 1591077 - RNA, 19 nt, Artificial Sequence
  Description of Artificial Sequence: Synthetic oligonucleotide
auggacagaccggcggaag

SEQ ID NO: 1591078 - RNA, 19 nt, Artificial Sequence
  Description of Artificial Sequence: Synthetic oligonucleotide
gacguuaaggugguuuccu

SEQ ID NO: 1591079 - RNA, 19 nt, Artificial Sequence
  Description of Artificial Sequence: Synthetic oligonucleotide
aucuuuagauggacucaug

SEQ ID NO: 1591080 - RNA, 19 nt, Artificial Sequence
  Description of Artificial Sequence: Synthetic oligonucleotide
uuccgccccaggacaaggu

SEQ ID NO: 1591081 - RNA, 19 nt, Artificial Sequence
  Description of Artificial Sequence: Synthetic oligonucleotide
ggcuucggccuucaaggcc

SEQ ID NO: 1591082 - RNA, 19 nt, Artificial Sequence
  Description of Artificial Sequence: Synthetic oligonucleotide
ucccuguaguagugggcga

SEQ ID NO: 1591083 - RNA, 19 nt, Artificial Sequence
  Description of Artificial Sequence: Synthetic oligonucleotide
gcuaugauaagccccuccu

SEQ ID NO: 1591084 - RNA, 19 nt, Artificial Sequence
  Description of Artificial Sequence: Synthetic oligonucleotide
ucacggugccugcccgaag

SEQ ID NO: 1591085 - RNA, 19 nt, Artificial Sequence
  Description of Artificial Sequence: Synthetic oligonucleotide
acgcaucaucuggugcacc

SEQ ID NO: 1591086 - RNA, 19 nt, Artificial Sequence
  Description of Artificial Sequence: Synthetic oligonucleotide
guuccccaugccucugggc

SEQ ID NO: 1591087 - RNA, 19 nt, Artificial Sequence
  Description of Artificial Sequence: Synthetic oligonucleotide
uggcugaucugggucuaug

SEQ ID NO: 1591088 - RNA, 19 nt, Artificial Sequence
  Description of Artificial Sequence: Synthetic oligonucleotide
ugguggacgaaggggcaga

SEQ ID NO: 1591089 - RNA, 19 nt, Artificial Sequence
  Description of Artificial Sequence: Synthetic oligonucleotide
ugcggagaccucugcacuu

SEQ ID NO: 1591090 - RNA, 19 nt, Artificial Sequence
  Description of Artificial Sequence: Synthetic oligonucleotide
ggagacucauccacuggcc

SEQ ID NO: 1591091 - RNA, 19 nt, Artificial Sequence
  Description of Artificial Sequence: Synthetic oligonucleotide
accggcggaaggcauggau

SEQ ID NO: 1591092 - RNA, 19 nt, Artificial Sequence
  Description of Artificial Sequence: Synthetic oligonucleotide
cuguggcucugcuguugcg

SEQ ID NO: 1591093 - RNA, 19 nt, Artificial Sequence
  Description of Artificial Sequence: Synthetic oligonucleotide
uugccugcuccacggcagu

SEQ ID NO: 1591094 - RNA, 19 nt, Artificial Sequence
  Description of Artificial Sequence: Synthetic oligonucleotide
uugugguauucaggguaca

SEQ ID NO: 1591095 - RNA, 19 nt, Artificial Sequence
  Description of Artificial Sequence: Synthetic oligonucleotide
gugucggggcgcaggaggg

SEQ ID NO: 1591096 - RNA, 19 nt, Artificial Sequence
  Description of Artificial Sequence: Synthetic oligonucleotide
cagaauggagaccccugga

SEQ ID NO: 1591097 - RNA, 19 nt, Artificial Sequence
  Description of Artificial Sequence: Synthetic oligonucleotide
cuguugcggagaccucugc

SEQ ID NO: 1591098 - RNA, 19 nt, Artificial Sequence
  Description of Artificial Sequence: Synthetic oligonucleotide
ggggacagcacgcuccuuc

SEQ ID NO: 1591099 - RNA, 19 nt, Artificial Sequence
  Description of Artificial Sequence: Synthetic oligonucleotide
acagcacgcuccuucuguu

SEQ ID NO: 1591100 - RNA, 19 nt, Artificial Sequence
  Description of Artificial Sequence: Synthetic oligonucleotide
gacagaccggcggaaggca

SEQ ID NO: 1591101 - RNA, 19 nt, Artificial Sequence
  Description of Artificial Sequence: Synthetic oligonucleotide
cuauagcaccuagacacaa

SEQ ID NO: 1591102 - RNA, 19 nt, Artificial Sequence
  Description of Artificial Sequence: Synthetic oligonucleotide
aggucaccauggaaccuuc

SEQ ID NO: 1591103 - RNA, 19 nt, Artificial Sequence
  Description of Artificial Sequence: Synthetic oligonucleotide
cugguccagaauggagacc

SEQ ID NO: 1591104 - RNA, 19 nt, Artificial Sequence
  Description of Artificial Sequence: Synthetic oligonucleotide
cauaggugaagggguccac

SEQ ID NO: 1591105 - RNA, 19 nt, Artificial Sequence
  Description of Artificial Sequence: Synthetic oligonucleotide
accuagacacaaaguugug

SEQ ID NO: 1591106 - RNA, 19 nt, Artificial Sequence
  Description of Artificial Sequence: Synthetic oligonucleotide
cagcacgcuccuucuguug

SEQ ID NO: 1591107 - RNA, 19 nt, Artificial Sequence
  Description of Artificial Sequence: Synthetic oligonucleotide
agccgggcugguuugucaa

SEQ ID NO: 1591108 - RNA, 19 nt, Artificial Sequence
  Description of Artificial Sequence: Synthetic oligonucleotide
ggcuggucggcuguugucc

SEQ ID NO: 1591109 - RNA, 19 nt, Artificial Sequence
  Description of Artificial Sequence: Synthetic oligonucleotide
ccagcgcccacaauccagc

SEQ ID NO: 1591110 - RNA, 19 nt, Artificial Sequence
  Description of Artificial Sequence: Synthetic oligonucleotide
uucacggugccugcccgaa

SEQ ID NO: 1591111 - RNA, 19 nt, Artificial Sequence
  Description of Artificial Sequence: Synthetic oligonucleotide
gcgagcaaagaggacagca

SEQ ID NO: 1591112 - RNA, 19 nt, Artificial Sequence
  Description of Artificial Sequence: Synthetic oligonucleotide
uggguucacggugccugcc

SEQ ID NO: 1591113 - RNA, 19 nt, Artificial Sequence
  Description of Artificial Sequence: Synthetic oligonucleotide
ggacagaccggcggaaggc

SEQ ID NO: 1591114 - RNA, 19 nt, Artificial Sequence
  Description of Artificial Sequence: Synthetic oligonucleotide
gauuccucuuggggcucag

SEQ ID NO: 1591115 - RNA, 19 nt, Artificial Sequence
  Description of Artificial Sequence: Synthetic oligonucleotide
cucuccugggaugccuagc

SEQ ID NO: 1591116 - RNA, 19 nt, Artificial Sequence
  Description of Artificial Sequence: Synthetic oligonucleotide
caccgggucugaguuuggg

SEQ ID NO: 1591117 - RNA, 19 nt, Artificial Sequence
  Description of Artificial Sequence: Synthetic oligonucleotide
gcuugagccucagggauac

SEQ ID NO: 1591118 - RNA, 19 nt, Artificial Sequence
  Description of Artificial Sequence: Synthetic oligonucleotide
ggcagagucucuccuggga

SEQ ID NO: 1591119 - RNA, 19 nt, Artificial Sequence
  Description of Artificial Sequence: Synthetic oligonucleotide
ccacguuacgagcccacag

SEQ ID NO: 1591120 - RNA, 19 nt, Artificial Sequence
  Description of Artificial Sequence: Synthetic oligonucleotide
uggugcaccuugugguauu

SEQ ID NO: 1591121 - RNA, 19 nt, Artificial Sequence
  Description of Artificial Sequence: Synthetic oligonucleotide
uggauugaucacgcaucau

SEQ ID NO: 1591122 - RNA, 19 nt, Artificial Sequence
  Description of Artificial Sequence: Synthetic oligonucleotide
cacguuacgagcccacagu

SEQ ID NO: 1591123 - RNA, 19 nt, Artificial Sequence
  Description of Artificial Sequence: Synthetic oligonucleotide
acucauccacuggccuugg

SEQ ID NO: 1591124 - RNA, 19 nt, Artificial Sequence
  Description of Artificial Sequence: Synthetic oligonucleotide
cuggccuauggcuacugcu

SEQ ID NO: 1591125 - RNA, 19 nt, Artificial Sequence
  Description of Artificial Sequence: Synthetic oligonucleotide
gaagagugggcugggugcu

SEQ ID NO: 1591126 - RNA, 19 nt, Artificial Sequence
  Description of Artificial Sequence: Synthetic oligonucleotide
ccauugggaaaucuuuaga

SEQ ID NO: 1591127 - RNA, 19 nt, Artificial Sequence
  Description of Artificial Sequence: Synthetic oligonucleotide
ggauaccaugcucagacuu

SEQ ID NO: 1591128 - RNA, 19 nt, Artificial Sequence
  Description of Artificial Sequence: Synthetic oligonucleotide
ccgccccaggacaaggugg

SEQ ID NO: 1591129 - RNA, 19 nt, Artificial Sequence
  Description of Artificial Sequence: Synthetic oligonucleotide
uuccgcagccaguccuuaa

SEQ ID NO: 1591130 - RNA, 19 nt, Artificial Sequence
  Description of Artificial Sequence: Synthetic oligonucleotide
ggucauggacagaccggcg

SEQ ID NO: 1591131 - RNA, 19 nt, Artificial Sequence
  Description of Artificial Sequence: Synthetic oligonucleotide
caggcccuccuggugagug

SEQ ID NO: 1591132 - RNA, 19 nt, Artificial Sequence
  Description of Artificial Sequence: Synthetic oligonucleotide
cugacagcucaugguggac

SEQ ID NO: 1591133 - RNA, 19 nt, Artificial Sequence
  Description of Artificial Sequence: Synthetic oligonucleotide
ccauggaaccuucaauaga

SEQ ID NO: 1591134 - RNA, 19 nt, Artificial Sequence
  Description of Artificial Sequence: Synthetic oligonucleotide
gcuuccaggagaguacaga

SEQ ID NO: 1591135 - RNA, 19 nt, Artificial Sequence
  Description of Artificial Sequence: Synthetic oligonucleotide
aucaaagagcagggccaca

SEQ ID NO: 1591136 - RNA, 19 nt, Artificial Sequence
  Description of Artificial Sequence: Synthetic oligonucleotide
ccuuggcaguuaaguagcc

SEQ ID NO: 1591137 - RNA, 19 nt, Artificial Sequence
  Description of Artificial Sequence: Synthetic oligonucleotide
auggaaccuucaauagaau

SEQ ID NO: 1591138 - RNA, 19 nt, Artificial Sequence
  Description of Artificial Sequence: Synthetic oligonucleotide
acgagcccacagugagaag

SEQ ID NO: 1591139 - RNA, 19 nt, Artificial Sequence
  Description of Artificial Sequence: Synthetic oligonucleotide
accacguuacgagcccaca

SEQ ID NO: 1591140 - RNA, 19 nt, Artificial Sequence
  Description of Artificial Sequence: Synthetic oligonucleotide
cccagcgcccacaauccag

SEQ ID NO: 1591141 - RNA, 19 nt, Artificial Sequence
  Description of Artificial Sequence: Synthetic oligonucleotide
ccaccgggcuaugauaagc

SEQ ID NO: 1591142 - RNA, 19 nt, Artificial Sequence
  Description of Artificial Sequence: Synthetic oligonucleotide
cugggaugccuagccgggc

SEQ ID NO: 1591143 - RNA, 19 nt, Artificial Sequence
  Description of Artificial Sequence: Synthetic oligonucleotide
guucacggugccugcccga

SEQ ID NO: 1591144 - RNA, 19 nt, Artificial Sequence
  Description of Artificial Sequence: Synthetic oligonucleotide
uagacccuucuuggucaca

SEQ ID NO: 1591145 - RNA, 19 nt, Artificial Sequence
  Description of Artificial Sequence: Synthetic oligonucleotide
ggucuaugaccaagucagc

SEQ ID NO: 1591146 - RNA, 19 nt, Artificial Sequence
  Description of Artificial Sequence: Synthetic oligonucleotide
gucccaccgggcuaugaua

SEQ ID NO: 1591147 - RNA, 19 nt, Artificial Sequence
  Description of Artificial Sequence: Synthetic oligonucleotide
cuccuggugagugcucuca

SEQ ID NO: 1591148 - RNA, 19 nt, Artificial Sequence
  Description of Artificial Sequence: Synthetic oligonucleotide
ccggcggaaggcauggauc

SEQ ID NO: 1591149 - RNA, 19 nt, Artificial Sequence
  Description of Artificial Sequence: Synthetic oligonucleotide
cucaugucccaccgggcua

SEQ ID NO: 1591150 - RNA, 19 nt, Artificial Sequence
  Description of Artificial Sequence: Synthetic oligonucleotide
gccaguccuuaaccuguag

SEQ ID NO: 1591151 - RNA, 19 nt, Artificial Sequence
  Description of Artificial Sequence: Synthetic oligonucleotide
ccgcagccaguccuuaacc

SEQ ID NO: 1591152 - RNA, 19 nt, Artificial Sequence
  Description of Artificial Sequence: Synthetic oligonucleotide
gguggacgaaggggcagag

SEQ ID NO: 1591153 - RNA, 19 nt, Artificial Sequence
  Description of Artificial Sequence: Synthetic oligonucleotide
ccgggcugguuugucaagg

SEQ ID NO: 1591154 - RNA, 19 nt, Artificial Sequence
  Description of Artificial Sequence: Synthetic oligonucleotide
cuuggcucaaggucaccau

SEQ ID NO: 1591155 - RNA, 19 nt, Artificial Sequence
  Description of Artificial Sequence: Synthetic oligonucleotide
cuagccgggcugguuuguc

SEQ ID NO: 1591156 - RNA, 19 nt, Artificial Sequence
  Description of Artificial Sequence: Synthetic oligonucleotide
cuuggcaguuaaguagccu

SEQ ID NO: 1591157 - RNA, 19 nt, Artificial Sequence
  Description of Artificial Sequence: Synthetic oligonucleotide
ugccugcccgaagggcugc

SEQ ID NO: 1591158 - RNA, 19 nt, Artificial Sequence
  Description of Artificial Sequence: Synthetic oligonucleotide
ucggggcgcaggagggcau

SEQ ID NO: 1591159 - RNA, 19 nt, Artificial Sequence
  Description of Artificial Sequence: Synthetic oligonucleotide
gucggggcgcaggagggca

SEQ ID NO: 1591160 - RNA, 19 nt, Artificial Sequence
  Description of Artificial Sequence: Synthetic oligonucleotide
guaggucugggagacucau

SEQ ID NO: 1591161 - RNA, 19 nt, Artificial Sequence
  Description of Artificial Sequence: Synthetic oligonucleotide
cuugagccucagggauacc

SEQ ID NO: 1591162 - RNA, 19 nt, Artificial Sequence
  Description of Artificial Sequence: Synthetic oligonucleotide
ccuggccuauggcuacugc

SEQ ID NO: 1591163 - RNA, 19 nt, Artificial Sequence
  Description of Artificial Sequence: Synthetic oligonucleotide
cugugucggggcgcaggag

SEQ ID NO: 1591164 - RNA, 19 nt, Artificial Sequence
  Description of Artificial Sequence: Synthetic oligonucleotide
ccuuaaccuguaggucugg

SEQ ID NO: 1591165 - RNA, 19 nt, Artificial Sequence
  Description of Artificial Sequence: Synthetic oligonucleotide
aggagaguacagaguccau

SEQ ID NO: 1591166 - RNA, 19 nt, Artificial Sequence
  Description of Artificial Sequence: Synthetic oligonucleotide
cuccacggcagugacuaua

SEQ ID NO: 1591167 - RNA, 19 nt, Artificial Sequence
  Description of Artificial Sequence: Synthetic oligonucleotide
gccuagccgggcugguuug

SEQ ID NO: 1591168 - RNA, 19 nt, Artificial Sequence
  Description of Artificial Sequence: Synthetic oligonucleotide
aggaaagguugggguggga

SEQ ID NO: 1591169 - RNA, 19 nt, Artificial Sequence
  Description of Artificial Sequence: Synthetic oligonucleotide
ccuguaguagugggcgaug

SEQ ID NO: 1591170 - RNA, 19 nt, Artificial Sequence
  Description of Artificial Sequence: Synthetic oligonucleotide
ggccuauggcuacugcucu

SEQ ID NO: 1591171 - RNA, 19 nt, Artificial Sequence
  Description of Artificial Sequence: Synthetic oligonucleotide
cagggauaccaugcucaga

SEQ ID NO: 1591172 - RNA, 19 nt, Artificial Sequence
  Description of Artificial Sequence: Synthetic oligonucleotide
gguuccgccccaggacaag

SEQ ID NO: 1591173 - RNA, 19 nt, Artificial Sequence
  Description of Artificial Sequence: Synthetic oligonucleotide
gccuauggcuacugcucuc

SEQ ID NO: 1591174 - RNA, 19 nt, Artificial Sequence
  Description of Artificial Sequence: Synthetic oligonucleotide
gccgggcugguuugucaag

SEQ ID NO: 1591175 - RNA, 19 nt, Artificial Sequence
  Description of Artificial Sequence: Synthetic oligonucleotide
gacuagccugaggaugggu

SEQ ID NO: 1591176 - RNA, 19 nt, Artificial Sequence
  Description of Artificial Sequence: Synthetic oligonucleotide
ggcgcaggagggcaucaaa

SEQ ID NO: 1591177 - RNA, 19 nt, Artificial Sequence
  Description of Artificial Sequence: Synthetic oligonucleotide
ggugcaccuugugguauuc

SEQ ID NO: 1591178 - RNA, 19 nt, Artificial Sequence
  Description of Artificial Sequence: Synthetic oligonucleotide
gugcaccuugugguauuca

SEQ ID NO: 1591179 - RNA, 19 nt, Artificial Sequence
  Description of Artificial Sequence: Synthetic oligonucleotide
ggugguuuccuggucuccu

SEQ ID NO: 1591180 - RNA, 19 nt, Artificial Sequence
  Description of Artificial Sequence: Synthetic oligonucleotide
ccccauugggaaaucuuua

SEQ ID NO: 1591181 - RNA, 19 nt, Artificial Sequence
  Description of Artificial Sequence: Synthetic oligonucleotide
ggaggacaagauggauuga

SEQ ID NO: 1591182 - RNA, 19 nt, Artificial Sequence
  Description of Artificial Sequence: Synthetic oligonucleotide
cguuacgagcccacaguga

SEQ ID NO: 1591183 - RNA, 19 nt, Artificial Sequence
  Description of Artificial Sequence: Synthetic oligonucleotide
cccaccgggcuaugauaag

SEQ ID NO: 1591184 - RNA, 19 nt, Artificial Sequence
  Description of Artificial Sequence: Synthetic oligonucleotide
gggcuggucggcuguuguc

SEQ ID NO: 1591185 - RNA, 19 nt, Artificial Sequence
  Description of Artificial Sequence: Synthetic oligonucleotide
gucucuccugggaugccua

SEQ ID NO: 1591186 - RNA, 19 nt, Artificial Sequence
  Description of Artificial Sequence: Synthetic oligonucleotide
uacagacguuaaggugguu

SEQ ID NO: 1591187 - RNA, 19 nt, Artificial Sequence
  Description of Artificial Sequence: Synthetic oligonucleotide
cgcccacaauccagcaccg

SEQ ID NO: 1591188 - RNA, 19 nt, Artificial Sequence
  Description of Artificial Sequence: Synthetic oligonucleotide
gggcgaugucaccagcugu

SEQ ID NO: 1591189 - RNA, 19 nt, Artificial Sequence
  Description of Artificial Sequence: Synthetic oligonucleotide
ggcgagcaaagaggacagc

SEQ ID NO: 1591190 - RNA, 19 nt, Artificial Sequence
  Description of Artificial Sequence: Synthetic oligonucleotide
gggcugguuugucaagggu

SEQ ID NO: 1591191 - RNA, 19 nt, Artificial Sequence
  Description of Artificial Sequence: Synthetic oligonucleotide
uucggccuucaaggccuuc

SEQ ID NO: 1591192 - RNA, 19 nt, Artificial Sequence
  Description of Artificial Sequence: Synthetic oligonucleotide
gaugccuagccgggcuggu

SEQ ID NO: 1591193 - RNA, 19 nt, Artificial Sequence
  Description of Artificial Sequence: Synthetic oligonucleotide
agccaguccuuaaccugua

SEQ ID NO: 1591194 - RNA, 19 nt, Artificial Sequence
  Description of Artificial Sequence: Synthetic oligonucleotide
gggauaccaugcucagacu

SEQ ID NO: 1591195 - RNA, 19 nt, Artificial Sequence
  Description of Artificial Sequence: Synthetic oligonucleotide
caugucccaccgggcuaug

SEQ ID NO: 1591196 - RNA, 19 nt, Artificial Sequence
  Description of Artificial Sequence: Synthetic oligonucleotide
gcccguggccaggaccacg

SEQ ID NO: 1591197 - RNA, 19 nt, Artificial Sequence
  Description of Artificial Sequence: Synthetic oligonucleotide
ggaucaccuggauguugua

SEQ ID NO: 1591198 - RNA, 19 nt, Artificial Sequence
  Description of Artificial Sequence: Synthetic oligonucleotide
cagggcaucuacagacguu

SEQ ID NO: 1591199 - RNA, 19 nt, Artificial Sequence
  Description of Artificial Sequence: Synthetic oligonucleotide
acaggcccuccuggugagu

SEQ ID NO: 1591200 - RNA, 19 nt, Artificial Sequence
  Description of Artificial Sequence: Synthetic oligonucleotide
augccuagccgggcugguu

SEQ ID NO: 1591201 - RNA, 19 nt, Artificial Sequence
  Description of Artificial Sequence: Synthetic oligonucleotide
ggauuccucuuggggcuca

SEQ ID NO: 1591202 - RNA, 19 nt, Artificial Sequence
  Description of Artificial Sequence: Synthetic oligonucleotide
ccgggucugaguuuggguu

SEQ ID NO: 1591203 - RNA, 19 nt, Artificial Sequence
  Description of Artificial Sequence: Synthetic oligonucleotide
cuggugcaccuugugguau

SEQ ID NO: 1591204 - RNA, 19 nt, Artificial Sequence
  Description of Artificial Sequence: Synthetic oligonucleotide
ccuggugagugcucucaua

SEQ ID NO: 1591205 - RNA, 19 nt, Artificial Sequence
  Description of Artificial Sequence: Synthetic oligonucleotide
gguagccuguguuccccau

SEQ ID NO: 1591206 - RNA, 19 nt, Artificial Sequence
  Description of Artificial Sequence: Synthetic oligonucleotide
gcaccgggucugaguuugg

SEQ ID NO: 1591207 - RNA, 19 nt, Artificial Sequence
  Description of Artificial Sequence: Synthetic oligonucleotide
ggucugaguuuggguucac

SEQ ID NO: 1591208 - RNA, 19 nt, Artificial Sequence
  Description of Artificial Sequence: Synthetic oligonucleotide
gggcaucuacagacguuaa

SEQ ID NO: 1591209 - RNA, 19 nt, Artificial Sequence
  Description of Artificial Sequence: Synthetic oligonucleotide
guggacgaaggggcagagu

SEQ ID NO: 1591210 - RNA, 19 nt, Artificial Sequence
  Description of Artificial Sequence: Synthetic oligonucleotide
gaccggcggaaggcaugga

SEQ ID NO: 1591211 - RNA, 19 nt, Artificial Sequence
  Description of Artificial Sequence: Synthetic oligonucleotide
ccuugacuagccugaggau

SEQ ID NO: 1591212 - RNA, 19 nt, Artificial Sequence
  Description of Artificial Sequence: Synthetic oligonucleotide
gccagacaguccauccaua

SEQ ID NO: 1591213 - RNA, 19 nt, Artificial Sequence
  Description of Artificial Sequence: Synthetic oligonucleotide
cguggccaggaccacguua

SEQ ID NO: 1591214 - RNA, 19 nt, Artificial Sequence
  Description of Artificial Sequence: Synthetic oligonucleotide
gccuuucacuuggaagagu

SEQ ID NO: 1591215 - RNA, 19 nt, Artificial Sequence
  Description of Artificial Sequence: Synthetic oligonucleotide
cccguggccaggaccacgu

SEQ ID NO: 1591216 - RNA, 19 nt, Artificial Sequence
  Description of Artificial Sequence: Synthetic oligonucleotide
cagcacacaccuggccuau

SEQ ID NO: 1591217 - RNA, 19 nt, Artificial Sequence
  Description of Artificial Sequence: Synthetic oligonucleotide
gggugcccguggccaggac

SEQ ID NO: 1591218 - RNA, 19 nt, Artificial Sequence
  Description of Artificial Sequence: Synthetic oligonucleotide
gccugcccgaagggcugcc

SEQ ID NO: 1591219 - RNA, 19 nt, Artificial Sequence
  Description of Artificial Sequence: Synthetic oligonucleotide
ccccacccuggacaaaccu

SEQ ID NO: 1591220 - RNA, 19 nt, Artificial Sequence
  Description of Artificial Sequence: Synthetic oligonucleotide
cuucggccuucaaggccuu

SEQ ID NO: 1591221 - RNA, 19 nt, Artificial Sequence
  Description of Artificial Sequence: Synthetic oligonucleotide
cuguugcuuccaggagagu

SEQ ID NO: 1591222 - RNA, 19 nt, Artificial Sequence
  Description of Artificial Sequence: Synthetic oligonucleotide
caccuggccuauggcuacu

SEQ ID NO: 1591223 - RNA, 19 nt, Artificial Sequence
  Description of Artificial Sequence: Synthetic oligonucleotide
cccuguaguagugggcgau

SEQ ID NO: 1591224 - RNA, 19 nt, Artificial Sequence
  Description of Artificial Sequence: Synthetic oligonucleotide
ccuagccgggcugguuugu

SEQ ID NO: 1591225 - RNA, 19 nt, Artificial Sequence
  Description of Artificial Sequence: Synthetic oligonucleotide
ccguggccaggaccacguu

SEQ ID NO: 1591226 - RNA, 19 nt, Artificial Sequence
  Description of Artificial Sequence: Synthetic oligonucleotide
uaaaacacaacucuuaaca

SEQ ID NO: 1591227 - RNA, 19 nt, Artificial Sequence
  Description of Artificial Sequence: Synthetic oligonucleotide
uuauccaggacucacaggg

SEQ ID NO: 1591228 - RNA, 19 nt, Artificial Sequence
  Description of Artificial Sequence: Synthetic oligonucleotide
caacucuuaacauagaacg

SEQ ID NO: 1591229 - RNA, 19 nt, Artificial Sequence
  Description of Artificial Sequence: Synthetic oligonucleotide
aagcauuaaaccuucacag

SEQ ID NO: 1591230 - RNA, 19 nt, Artificial Sequence
  Description of Artificial Sequence: Synthetic oligonucleotide
agaacuuagaugcagcuac

SEQ ID NO: 1591231 - RNA, 19 nt, Artificial Sequence
  Description of Artificial Sequence: Synthetic oligonucleotide
uauuagggagcccugaucc

SEQ ID NO: 1591232 - RNA, 19 nt, Artificial Sequence
  Description of Artificial Sequence: Synthetic oligonucleotide
aauauauucugcauaacug

SEQ ID NO: 1591233 - RNA, 19 nt, Artificial Sequence
  Description of Artificial Sequence: Synthetic oligonucleotide
uauguaucaauacuguugu

SEQ ID NO: 1591234 - RNA, 19 nt, Artificial Sequence
  Description of Artificial Sequence: Synthetic oligonucleotide
uuuauguauggaaaggaac

SEQ ID NO: 1591235 - RNA, 19 nt, Artificial Sequence
  Description of Artificial Sequence: Synthetic oligonucleotide
ugucuuuaaaucuuuagaa

SEQ ID NO: 1591236 - RNA, 19 nt, Artificial Sequence
  Description of Artificial Sequence: Synthetic oligonucleotide
augguguucacuuaugaag

SEQ ID NO: 1591237 - RNA, 19 nt, Artificial Sequence
  Description of Artificial Sequence: Synthetic oligonucleotide
aaugcaaagccauccaaca

SEQ ID NO: 1591238 - RNA, 19 nt, Artificial Sequence
  Description of Artificial Sequence: Synthetic oligonucleotide
ucaggaguaaugauuguag

SEQ ID NO: 1591239 - RNA, 19 nt, Artificial Sequence
  Description of Artificial Sequence: Synthetic oligonucleotide
ugauauaaggcuugggccc

SEQ ID NO: 1591240 - RNA, 19 nt, Artificial Sequence
  Description of Artificial Sequence: Synthetic oligonucleotide
cuugguacacaauaaacug

SEQ ID NO: 1591241 - RNA, 19 nt, Artificial Sequence
  Description of Artificial Sequence: Synthetic oligonucleotide
acaaauuggaggugggugg

SEQ ID NO: 1591242 - RNA, 19 nt, Artificial Sequence
  Description of Artificial Sequence: Synthetic oligonucleotide
auauauucugcauaacuga

SEQ ID NO: 1591243 - RNA, 19 nt, Artificial Sequence
  Description of Artificial Sequence: Synthetic oligonucleotide
cugauauaaggcuugggcc

SEQ ID NO: 1591244 - RNA, 19 nt, Artificial Sequence
  Description of Artificial Sequence: Synthetic oligonucleotide
acaacggucuucugaaccc

SEQ ID NO: 1591245 - RNA, 19 nt, Artificial Sequence
  Description of Artificial Sequence: Synthetic oligonucleotide
uugucgagaagcaauauau

SEQ ID NO: 1591246 - RNA, 19 nt, Artificial Sequence
  Description of Artificial Sequence: Synthetic oligonucleotide
uaugacgaugacaucagga

SEQ ID NO: 1591247 - RNA, 19 nt, Artificial Sequence
  Description of Artificial Sequence: Synthetic oligonucleotide
aacucuuaacauagaacgc

SEQ ID NO: 1591248 - RNA, 19 nt, Artificial Sequence
  Description of Artificial Sequence: Synthetic oligonucleotide
uguaucaauacuguuguac

SEQ ID NO: 1591249 - RNA, 19 nt, Artificial Sequence
  Description of Artificial Sequence: Synthetic oligonucleotide
aagucugugcuucugagaa

SEQ ID NO: 1591250 - RNA, 19 nt, Artificial Sequence
  Description of Artificial Sequence: Synthetic oligonucleotide
acagucaacccuaacaugg

SEQ ID NO: 1591251 - RNA, 19 nt, Artificial Sequence
  Description of Artificial Sequence: Synthetic oligonucleotide
uaaugauuguagaggggcg

SEQ ID NO: 1591252 - RNA, 19 nt, Artificial Sequence
  Description of Artificial Sequence: Synthetic oligonucleotide
aaaauggugcaguaauaga

SEQ ID NO: 1591253 - RNA, 19 nt, Artificial Sequence
  Description of Artificial Sequence: Synthetic oligonucleotide
ucuuauccaggacucacag

SEQ ID NO: 1591254 - RNA, 19 nt, Artificial Sequence
  Description of Artificial Sequence: Synthetic oligonucleotide
aaugauuguagaggggcgg

SEQ ID NO: 1591255 - RNA, 19 nt, Artificial Sequence
  Description of Artificial Sequence: Synthetic oligonucleotide
aguaauagaaguaacugga

SEQ ID NO: 1591256 - RNA, 19 nt, Artificial Sequence
  Description of Artificial Sequence: Synthetic oligonucleotide
uggaucgucaucaauucca

SEQ ID NO: 1591257 - RNA, 19 nt, Artificial Sequence
  Description of Artificial Sequence: Synthetic oligonucleotide
aguucucuuauccaggacu

SEQ ID NO: 1591258 - RNA, 19 nt, Artificial Sequence
  Description of Artificial Sequence: Synthetic oligonucleotide
acuuaugaagcauggaggu

SEQ ID NO: 1591259 - RNA, 19 nt, Artificial Sequence
  Description of Artificial Sequence: Synthetic oligonucleotide
uucauuacccucagcagca

SEQ ID NO: 1591260 - RNA, 19 nt, Artificial Sequence
  Description of Artificial Sequence: Synthetic oligonucleotide
guaaugauuguagaggggc

SEQ ID NO: 1591261 - RNA, 19 nt, Artificial Sequence
  Description of Artificial Sequence: Synthetic oligonucleotide
aagaagccuccauggaucg

SEQ ID NO: 1591262 - RNA, 19 nt, Artificial Sequence
  Description of Artificial Sequence: Synthetic oligonucleotide
ugaggaaaggcugauauaa

SEQ ID NO: 1591263 - RNA, 19 nt, Artificial Sequence
  Description of Artificial Sequence: Synthetic oligonucleotide
ucggguaagcauuaaaccu

SEQ ID NO: 1591264 - RNA, 19 nt, Artificial Sequence
  Description of Artificial Sequence: Synthetic oligonucleotide
ggagauucaaugcaggaag

SEQ ID NO: 1591265 - RNA, 19 nt, Artificial Sequence
  Description of Artificial Sequence: Synthetic oligonucleotide
cuucugaacccacacagcc

SEQ ID NO: 1591266 - RNA, 19 nt, Artificial Sequence
  Description of Artificial Sequence: Synthetic oligonucleotide
ucacuguaaccccacaccc

SEQ ID NO: 1591267 - RNA, 19 nt, Artificial Sequence
  Description of Artificial Sequence: Synthetic oligonucleotide
aguaccagaaaguccagcu

SEQ ID NO: 1591268 - RNA, 19 nt, Artificial Sequence
  Description of Artificial Sequence: Synthetic oligonucleotide
agcaauauauucugcauaa

SEQ ID NO: 1591269 - RNA, 19 nt, Artificial Sequence
  Description of Artificial Sequence: Synthetic oligonucleotide
aaacacaacucuuaacaua

SEQ ID NO: 1591270 - RNA, 19 nt, Artificial Sequence
  Description of Artificial Sequence: Synthetic oligonucleotide
caccuaauuggucuggugg

SEQ ID NO: 1591271 - RNA, 19 nt, Artificial Sequence
  Description of Artificial Sequence: Synthetic oligonucleotide
uguugcauucacuguaacc

SEQ ID NO: 1591272 - RNA, 19 nt, Artificial Sequence
  Description of Artificial Sequence: Synthetic oligonucleotide
auccaggacucacaggggc

SEQ ID NO: 1591273 - RNA, 19 nt, Artificial Sequence
  Description of Artificial Sequence: Synthetic oligonucleotide
aacaaccuauaagugguuc

SEQ ID NO: 1591274 - RNA, 19 nt, Artificial Sequence
  Description of Artificial Sequence: Synthetic oligonucleotide
aaaucaccagacaacgguc

SEQ ID NO: 1591275 - RNA, 19 nt, Artificial Sequence
  Description of Artificial Sequence: Synthetic oligonucleotide
accuaauuggucugguggg

SEQ ID NO: 1591276 - RNA, 19 nt, Artificial Sequence
  Description of Artificial Sequence: Synthetic oligonucleotide
gacaacggucuucugaacc

SEQ ID NO: 1591277 - RNA, 19 nt, Artificial Sequence
  Description of Artificial Sequence: Synthetic oligonucleotide
aauuccaguuuuccgugug

SEQ ID NO: 1591278 - RNA, 19 nt, Artificial Sequence
  Description of Artificial Sequence: Synthetic oligonucleotide
agaucucucuuuucacacc

SEQ ID NO: 1591279 - RNA, 19 nt, Artificial Sequence
  Description of Artificial Sequence: Synthetic oligonucleotide
ucaauuccaguuuuccgug

SEQ ID NO: 1591280 - RNA, 19 nt, Artificial Sequence
  Description of Artificial Sequence: Synthetic oligonucleotide
uacaaauuggaggugggug

SEQ ID NO: 1591281 - RNA, 19 nt, Artificial Sequence
  Description of Artificial Sequence: Synthetic oligonucleotide
agucggguaagcauuaaac

SEQ ID NO: 1591282 - RNA, 19 nt, Artificial Sequence
  Description of Artificial Sequence: Synthetic oligonucleotide
caucaauuccaguuuuccg

SEQ ID NO: 1591283 - RNA, 19 nt, Artificial Sequence
  Description of Artificial Sequence: Synthetic oligonucleotide
cuuaugacgaugacaucag

SEQ ID NO: 1591284 - RNA, 19 nt, Artificial Sequence
  Description of Artificial Sequence: Synthetic oligonucleotide
accuauaagugguucaugu

SEQ ID NO: 1591285 - RNA, 19 nt, Artificial Sequence
  Description of Artificial Sequence: Synthetic oligonucleotide
ucuguucaacaccaggaga

SEQ ID NO: 1591286 - RNA, 19 nt, Artificial Sequence
  Description of Artificial Sequence: Synthetic oligonucleotide
ugggaaaucaccagacaac

SEQ ID NO: 1591287 - RNA, 19 nt, Artificial Sequence
  Description of Artificial Sequence: Synthetic oligonucleotide
aacgccugaacaguaauga

SEQ ID NO: 1591288 - RNA, 19 nt, Artificial Sequence
  Description of Artificial Sequence: Synthetic oligonucleotide
aacccuaacaugguguuca

SEQ ID NO: 1591289 - RNA, 19 nt, Artificial Sequence
  Description of Artificial Sequence: Synthetic oligonucleotide
aggacuucugaucuuguug

SEQ ID NO: 1591290 - RNA, 19 nt, Artificial Sequence
  Description of Artificial Sequence: Synthetic oligonucleotide
cucuugguacacaauaaac

SEQ ID NO: 1591291 - RNA, 19 nt, Artificial Sequence
  Description of Artificial Sequence: Synthetic oligonucleotide
ucaucaauuccaguuuucc

SEQ ID NO: 1591292 - RNA, 19 nt, Artificial Sequence
  Description of Artificial Sequence: Synthetic oligonucleotide
ucucucuuuucacaccugc

SEQ ID NO: 1591293 - RNA, 19 nt, Artificial Sequence
  Description of Artificial Sequence: Synthetic oligonucleotide
aucgucaucaauuccaguu

SEQ ID NO: 1591294 - RNA, 19 nt, Artificial Sequence
  Description of Artificial Sequence: Synthetic oligonucleotide
gucggguaagcauuaaacc

SEQ ID NO: 1591295 - RNA, 19 nt, Artificial Sequence
  Description of Artificial Sequence: Synthetic oligonucleotide
guaucaauacuguuguaca

SEQ ID NO: 1591296 - RNA, 19 nt, Artificial Sequence
  Description of Artificial Sequence: Synthetic oligonucleotide
acagcuuauugcacaaugc

SEQ ID NO: 1591297 - RNA, 19 nt, Artificial Sequence
  Description of Artificial Sequence: Synthetic oligonucleotide
aaagucugugcuucugaga

SEQ ID NO: 1591298 - RNA, 19 nt, Artificial Sequence
  Description of Artificial Sequence: Synthetic oligonucleotide
cauuccaauguaaucagca

SEQ ID NO: 1591299 - RNA, 19 nt, Artificial Sequence
  Description of Artificial Sequence: Synthetic oligonucleotide
ugucuauaacaucaccuuc

SEQ ID NO: 1591300 - RNA, 19 nt, Artificial Sequence
  Description of Artificial Sequence: Synthetic oligonucleotide
ucauguuggucuccguugc

SEQ ID NO: 1591301 - RNA, 19 nt, Artificial Sequence
  Description of Artificial Sequence: Synthetic oligonucleotide
uuaugacgaugacaucagg

SEQ ID NO: 1591302 - RNA, 19 nt, Artificial Sequence
  Description of Artificial Sequence: Synthetic oligonucleotide
ugcauaacugauugucacc

SEQ ID NO: 1591303 - RNA, 19 nt, Artificial Sequence
  Description of Artificial Sequence: Synthetic oligonucleotide
gaagaguaccagaaagucc

SEQ ID NO: 1591304 - RNA, 19 nt, Artificial Sequence
  Description of Artificial Sequence: Synthetic oligonucleotide
auacuguuguacaaauugg

SEQ ID NO: 1591305 - RNA, 19 nt, Artificial Sequence
  Description of Artificial Sequence: Synthetic oligonucleotide
guaaucagcaccucucuca

SEQ ID NO: 1591306 - RNA, 19 nt, Artificial Sequence
  Description of Artificial Sequence: Synthetic oligonucleotide
ucuuaacauagaacgccug

SEQ ID NO: 1591307 - RNA, 19 nt, Artificial Sequence
  Description of Artificial Sequence: Synthetic oligonucleotide
agaaaguccagcugagagu

SEQ ID NO: 1591308 - RNA, 19 nt, Artificial Sequence
  Description of Artificial Sequence: Synthetic oligonucleotide
aggggaguacaccuaauug

SEQ ID NO: 1591309 - RNA, 19 nt, Artificial Sequence
  Description of Artificial Sequence: Synthetic oligonucleotide
ugaguguagcccuauguau

SEQ ID NO: 1591310 - RNA, 19 nt, Artificial Sequence
  Description of Artificial Sequence: Synthetic oligonucleotide
aguaacuggaccaggaaga

SEQ ID NO: 1591311 - RNA, 19 nt, Artificial Sequence
  Description of Artificial Sequence: Synthetic oligonucleotide
guaagcauuaaaccuucac

SEQ ID NO: 1591312 - RNA, 19 nt, Artificial Sequence
  Description of Artificial Sequence: Synthetic oligonucleotide
uggggaagaagccuccaug

SEQ ID NO: 1591313 - RNA, 19 nt, Artificial Sequence
  Description of Artificial Sequence: Synthetic oligonucleotide
ugagagucggguaagcauu

SEQ ID NO: 1591314 - RNA, 19 nt, Artificial Sequence
  Description of Artificial Sequence: Synthetic oligonucleotide
uccaacaggacuucugauc

SEQ ID NO: 1591315 - RNA, 19 nt, Artificial Sequence
  Description of Artificial Sequence: Synthetic oligonucleotide
acaaccuauaagugguuca

SEQ ID NO: 1591316 - RNA, 19 nt, Artificial Sequence
  Description of Artificial Sequence: Synthetic oligonucleotide
uaacaugguguucacuuau

SEQ ID NO: 1591317 - RNA, 19 nt, Artificial Sequence
  Description of Artificial Sequence: Synthetic oligonucleotide
agagugccauucuggaaac

SEQ ID NO: 1591318 - RNA, 19 nt, Artificial Sequence
  Description of Artificial Sequence: Synthetic oligonucleotide
aguacaccuaauuggucug

SEQ ID NO: 1591319 - RNA, 19 nt, Artificial Sequence
  Description of Artificial Sequence: Synthetic oligonucleotide
cugcauaacugauugucac

SEQ ID NO: 1591320 - RNA, 19 nt, Artificial Sequence
  Description of Artificial Sequence: Synthetic oligonucleotide
aaccaacccacccuaaguu

SEQ ID NO: 1591321 - RNA, 19 nt, Artificial Sequence
  Description of Artificial Sequence: Synthetic oligonucleotide
agcccuauguaucaauacu

SEQ ID NO: 1591322 - RNA, 19 nt, Artificial Sequence
  Description of Artificial Sequence: Synthetic oligonucleotide
gaugaggaaaggcugauau

SEQ ID NO: 1591323 - RNA, 19 nt, Artificial Sequence
  Description of Artificial Sequence: Synthetic oligonucleotide
ggacuucugaucuuguugc

SEQ ID NO: 1591324 - RNA, 19 nt, Artificial Sequence
  Description of Artificial Sequence: Synthetic oligonucleotide
cauggaucgucaucaauuc

SEQ ID NO: 1591325 - RNA, 19 nt, Artificial Sequence
  Description of Artificial Sequence: Synthetic oligonucleotide
uuaacauagaacgccugaa

SEQ ID NO: 1591326 - RNA, 19 nt, Artificial Sequence
  Description of Artificial Sequence: Synthetic oligonucleotide
aagaggguugagguagccg

SEQ ID NO: 1591327 - RNA, 19 nt, Artificial Sequence
  Description of Artificial Sequence: Synthetic oligonucleotide
cucauguucuguugcauuc

SEQ ID NO: 1591328 - RNA, 19 nt, Artificial Sequence
  Description of Artificial Sequence: Synthetic oligonucleotide
caguaaggggcaugcaucc

SEQ ID NO: 1591329 - RNA, 19 nt, Artificial Sequence
  Description of Artificial Sequence: Synthetic oligonucleotide
gauauaaggcuugggcccc

SEQ ID NO: 1591330 - RNA, 19 nt, Artificial Sequence
  Description of Artificial Sequence: Synthetic oligonucleotide
gggaaaucaccagacaacg

SEQ ID NO: 1591331 - RNA, 19 nt, Artificial Sequence
  Description of Artificial Sequence: Synthetic oligonucleotide
ucuguugcauucacuguaa

SEQ ID NO: 1591332 - RNA, 19 nt, Artificial Sequence
  Description of Artificial Sequence: Synthetic oligonucleotide
auggugcaguaauagaagu

SEQ ID NO: 1591333 - RNA, 19 nt, Artificial Sequence
  Description of Artificial Sequence: Synthetic oligonucleotide
aguaaugauuguagagggg

SEQ ID NO: 1591334 - RNA, 19 nt, Artificial Sequence
  Description of Artificial Sequence: Synthetic oligonucleotide
acaaccaacccacccuaag

SEQ ID NO: 1591335 - RNA, 19 nt, Artificial Sequence
  Description of Artificial Sequence: Synthetic oligonucleotide
ggggaagaagccuccaugg

SEQ ID NO: 1591336 - RNA, 19 nt, Artificial Sequence
  Description of Artificial Sequence: Synthetic oligonucleotide
acaugguguucacuuauga

SEQ ID NO: 1591337 - RNA, 19 nt, Artificial Sequence
  Description of Artificial Sequence: Synthetic oligonucleotide
cuuaacauagaacgccuga

SEQ ID NO: 1591338 - RNA, 19 nt, Artificial Sequence
  Description of Artificial Sequence: Synthetic oligonucleotide
gcaguaauagaaguaacug

SEQ ID NO: 1591339 - RNA, 19 nt, Artificial Sequence
  Description of Artificial Sequence: Synthetic oligonucleotide
aucaacucuugguacacaa

SEQ ID NO: 1591340 - RNA, 19 nt, Artificial Sequence
  Description of Artificial Sequence: Synthetic oligonucleotide
aaacaguguugucgagaag

SEQ ID NO: 1591341 - RNA, 19 nt, Artificial Sequence
  Description of Artificial Sequence: Synthetic oligonucleotide
gucuauaacaucaccuuca

SEQ ID NO: 1591342 - RNA, 19 nt, Artificial Sequence
  Description of Artificial Sequence: Synthetic oligonucleotide
ggugggacuggucauguag

SEQ ID NO: 1591343 - RNA, 19 nt, Artificial Sequence
  Description of Artificial Sequence: Synthetic oligonucleotide
ucuuuucacaccugcuuau

SEQ ID NO: 1591344 - RNA, 19 nt, Artificial Sequence
  Description of Artificial Sequence: Synthetic oligonucleotide
cagagcucuguucaacacc

SEQ ID NO: 1591345 - RNA, 19 nt, Artificial Sequence
  Description of Artificial Sequence: Synthetic oligonucleotide
uuggcaacggaagcuagca

SEQ ID NO: 1591346 - RNA, 19 nt, Artificial Sequence
  Description of Artificial Sequence: Synthetic oligonucleotide
gagaccccuuuauguaugg

SEQ ID NO: 1591347 - RNA, 19 nt, Artificial Sequence
  Description of Artificial Sequence: Synthetic oligonucleotide
acucuugguacacaauaaa

SEQ ID NO: 1591348 - RNA, 19 nt, Artificial Sequence
  Description of Artificial Sequence: Synthetic oligonucleotide
caguccagaacugaccacc

SEQ ID NO: 1591349 - RNA, 19 nt, Artificial Sequence
  Description of Artificial Sequence: Synthetic oligonucleotide
cuuggcaacggaagcuagc

SEQ ID NO: 1591350 - RNA, 19 nt, Artificial Sequence
  Description of Artificial Sequence: Synthetic oligonucleotide
gugggaaaucaccagacaa

SEQ ID NO: 1591351 - RNA, 19 nt, Artificial Sequence
  Description of Artificial Sequence: Synthetic oligonucleotide
aguguugucgagaagcaau

SEQ ID NO: 1591352 - RNA, 19 nt, Artificial Sequence
  Description of Artificial Sequence: Synthetic oligonucleotide
agucaacccuaacauggug

SEQ ID NO: 1591353 - RNA, 19 nt, Artificial Sequence
  Description of Artificial Sequence: Synthetic oligonucleotide
aucaauacuguuguacaaa

SEQ ID NO: 1591354 - RNA, 19 nt, Artificial Sequence
  Description of Artificial Sequence: Synthetic oligonucleotide
ugggcauuccaauguaauc

SEQ ID NO: 1591355 - RNA, 19 nt, Artificial Sequence
  Description of Artificial Sequence: Synthetic oligonucleotide
cuaauuggucuggugggcc

SEQ ID NO: 1591356 - RNA, 19 nt, Artificial Sequence
  Description of Artificial Sequence: Synthetic oligonucleotide
ugcacaaugcaaagccauc

SEQ ID NO: 1591357 - RNA, 19 nt, Artificial Sequence
  Description of Artificial Sequence: Synthetic oligonucleotide
uagcccuauguaucaauac

SEQ ID NO: 1591358 - RNA, 19 nt, Artificial Sequence
  Description of Artificial Sequence: Synthetic oligonucleotide
gcuuaugacgaugacauca

SEQ ID NO: 1591359 - RNA, 19 nt, Artificial Sequence
  Description of Artificial Sequence: Synthetic oligonucleotide
ugauuguagaggggcgggg

SEQ ID NO: 1591360 - RNA, 19 nt, Artificial Sequence
  Description of Artificial Sequence: Synthetic oligonucleotide
aacucuugguacacaauaa

SEQ ID NO: 1591361 - RNA, 19 nt, Artificial Sequence
  Description of Artificial Sequence: Synthetic oligonucleotide
cugcuuaugacgaugacau

SEQ ID NO: 1591362 - RNA, 19 nt, Artificial Sequence
  Description of Artificial Sequence: Synthetic oligonucleotide
ggcauuccaauguaaucag

SEQ ID NO: 1591363 - RNA, 19 nt, Artificial Sequence
  Description of Artificial Sequence: Synthetic oligonucleotide
uggugcaguaauagaagua

SEQ ID NO: 1591364 - RNA, 19 nt, Artificial Sequence
  Description of Artificial Sequence: Synthetic oligonucleotide
ucaacccuaacaugguguu

SEQ ID NO: 1591365 - RNA, 19 nt, Artificial Sequence
  Description of Artificial Sequence: Synthetic oligonucleotide
aacggaagcuagcaucaua

SEQ ID NO: 1591366 - RNA, 19 nt, Artificial Sequence
  Description of Artificial Sequence: Synthetic oligonucleotide
aaccuauaagugguucaug

SEQ ID NO: 1591367 - RNA, 19 nt, Artificial Sequence
  Description of Artificial Sequence: Synthetic oligonucleotide
ccugacaucaauccauggc

SEQ ID NO: 1591368 - RNA, 19 nt, Artificial Sequence
  Description of Artificial Sequence: Synthetic oligonucleotide
ugucgagaagcaauauauu

SEQ ID NO: 1591369 - RNA, 19 nt, Artificial Sequence
  Description of Artificial Sequence: Synthetic oligonucleotide
uccugccacaaccaaccca

SEQ ID NO: 1591370 - RNA, 19 nt, Artificial Sequence
  Description of Artificial Sequence: Synthetic oligonucleotide
ugcuaccagaagaggguug

SEQ ID NO: 1591371 - RNA, 19 nt, Artificial Sequence
  Description of Artificial Sequence: Synthetic oligonucleotide
gaccccuuuauguauggaa

SEQ ID NO: 1591372 - RNA, 19 nt, Artificial Sequence
  Description of Artificial Sequence: Synthetic oligonucleotide
uggagguugugaucaacuc

SEQ ID NO: 1591373 - RNA, 19 nt, Artificial Sequence
  Description of Artificial Sequence: Synthetic oligonucleotide
gugaucaacucuugguaca

SEQ ID NO: 1591374 - RNA, 19 nt, Artificial Sequence
  Description of Artificial Sequence: Synthetic oligonucleotide
aacaugguguucacuuaug

SEQ ID NO: 1591375 - RNA, 19 nt, Artificial Sequence
  Description of Artificial Sequence: Synthetic oligonucleotide
caguuuuccguguguggcc

SEQ ID NO: 1591376 - RNA, 19 nt, Artificial Sequence
  Description of Artificial Sequence: Synthetic oligonucleotide
caugugggaaaucaccaga

SEQ ID NO: 1591377 - RNA, 19 nt, Artificial Sequence
  Description of Artificial Sequence: Synthetic oligonucleotide
ucaacucuugguacacaau

SEQ ID NO: 1591378 - RNA, 19 nt, Artificial Sequence
  Description of Artificial Sequence: Synthetic oligonucleotide
uguagcccuauguaucaau

SEQ ID NO: 1591379 - RNA, 19 nt, Artificial Sequence
  Description of Artificial Sequence: Synthetic oligonucleotide
guaacuggaccaggaagag

SEQ ID NO: 1591380 - RNA, 19 nt, Artificial Sequence
  Description of Artificial Sequence: Synthetic oligonucleotide
gacgaugacaucaggaccu

SEQ ID NO: 1591381 - RNA, 19 nt, Artificial Sequence
  Description of Artificial Sequence: Synthetic oligonucleotide
gaccuguaugggcaucucc

SEQ ID NO: 1591382 - RNA, 19 nt, Artificial Sequence
  Description of Artificial Sequence: Synthetic oligonucleotide
uucacuuaugaagcaugga

SEQ ID NO: 1591383 - RNA, 19 nt, Artificial Sequence
  Description of Artificial Sequence: Synthetic oligonucleotide
cauccugggcauuccaaug

SEQ ID NO: 1591384 - RNA, 19 nt, Artificial Sequence
  Description of Artificial Sequence: Synthetic oligonucleotide
caaauuggagguggguggc

SEQ ID NO: 1591385 - RNA, 19 nt, Artificial Sequence
  Description of Artificial Sequence: Synthetic oligonucleotide
aagccauccaacaggacuu

SEQ ID NO: 1591386 - RNA, 19 nt, Artificial Sequence
  Description of Artificial Sequence: Synthetic oligonucleotide
gguugagguagccgggugg

SEQ ID NO: 1591387 - RNA, 19 nt, Artificial Sequence
  Description of Artificial Sequence: Synthetic oligonucleotide
ugguuauuagggagcccug

SEQ ID NO: 1591388 - RNA, 19 nt, Artificial Sequence
  Description of Artificial Sequence: Synthetic oligonucleotide
aacggucuucugaacccac

SEQ ID NO: 1591389 - RNA, 19 nt, Artificial Sequence
  Description of Artificial Sequence: Synthetic oligonucleotide
accaggagauucaaugcag

SEQ ID NO: 1591390 - RNA, 19 nt, Artificial Sequence
  Description of Artificial Sequence: Synthetic oligonucleotide
acuuagaugcagcuacaua

SEQ ID NO: 1591391 - RNA, 19 nt, Artificial Sequence
  Description of Artificial Sequence: Synthetic oligonucleotide
gaagccuccauggaucguc

SEQ ID NO: 1591392 - RNA, 19 nt, Artificial Sequence
  Description of Artificial Sequence: Synthetic oligonucleotide
acugaccacccugacauca

SEQ ID NO: 1591393 - RNA, 19 nt, Artificial Sequence
  Description of Artificial Sequence: Synthetic oligonucleotide
acgccugaacaguaaugag

SEQ ID NO: 1591394 - RNA, 19 nt, Artificial Sequence
  Description of Artificial Sequence: Synthetic oligonucleotide
cauccaacaggacuucuga

SEQ ID NO: 1591395 - RNA, 19 nt, Artificial Sequence
  Description of Artificial Sequence: Synthetic oligonucleotide
caacucuugguacacaaua

SEQ ID NO: 1591396 - RNA, 19 nt, Artificial Sequence
  Description of Artificial Sequence: Synthetic oligonucleotide
gaacgccugaacaguaaug

SEQ ID NO: 1591397 - RNA, 19 nt, Artificial Sequence
  Description of Artificial Sequence: Synthetic oligonucleotide
gagguagccggguggugag

SEQ ID NO: 1591398 - RNA, 19 nt, Artificial Sequence
  Description of Artificial Sequence: Synthetic oligonucleotide
acggaagcuagcaucauaa

SEQ ID NO: 1591399 - RNA, 19 nt, Artificial Sequence
  Description of Artificial Sequence: Synthetic oligonucleotide
auuagggagcccugaucca

SEQ ID NO: 1591400 - RNA, 19 nt, Artificial Sequence
  Description of Artificial Sequence: Synthetic oligonucleotide
uuaaaccuucacagcuuau

SEQ ID NO: 1591401 - RNA, 19 nt, Artificial Sequence
  Description of Artificial Sequence: Synthetic oligonucleotide
acaccuaauuggucuggug

SEQ ID NO: 1591402 - RNA, 19 nt, Artificial Sequence
  Description of Artificial Sequence: Synthetic oligonucleotide
acugguuauuagggagccc

SEQ ID NO: 1591403 - RNA, 19 nt, Artificial Sequence
  Description of Artificial Sequence: Synthetic oligonucleotide
cacugguuauuagggagcc

SEQ ID NO: 1591404 - RNA, 19 nt, Artificial Sequence
  Description of Artificial Sequence: Synthetic oligonucleotide
accuguaugggcaucucca

SEQ ID NO: 1591405 - RNA, 19 nt, Artificial Sequence
  Description of Artificial Sequence: Synthetic oligonucleotide
uccauggaucgucaucaau

SEQ ID NO: 1591406 - RNA, 19 nt, Artificial Sequence
  Description of Artificial Sequence: Synthetic oligonucleotide
ggugcaguaauagaaguaa

SEQ ID NO: 1591407 - RNA, 19 nt, Artificial Sequence
  Description of Artificial Sequence: Synthetic oligonucleotide
caugagaccccuuuaugua

SEQ ID NO: 1591408 - RNA, 19 nt, Artificial Sequence
  Description of Artificial Sequence: Synthetic oligonucleotide
gggcauuccaauguaauca

SEQ ID NO: 1591409 - RNA, 19 nt, Artificial Sequence
  Description of Artificial Sequence: Synthetic oligonucleotide
agcccugauccagaacccc

SEQ ID NO: 1591410 - RNA, 19 nt, Artificial Sequence
  Description of Artificial Sequence: Synthetic oligonucleotide
cccacugguuauuagggag

SEQ ID NO: 1591411 - RNA, 19 nt, Artificial Sequence
  Description of Artificial Sequence: Synthetic oligonucleotide
guacaccuaauuggucugg

SEQ ID NO: 1591412 - RNA, 19 nt, Artificial Sequence
  Description of Artificial Sequence: Synthetic oligonucleotide
gaugacaucaggaccugua

SEQ ID NO: 1591413 - RNA, 19 nt, Artificial Sequence
  Description of Artificial Sequence: Synthetic oligonucleotide
ugucaggaguaaugauugu

SEQ ID NO: 1591414 - RNA, 19 nt, Artificial Sequence
  Description of Artificial Sequence: Synthetic oligonucleotide
acccuaacaugguguucac

SEQ ID NO: 1591415 - RNA, 19 nt, Artificial Sequence
  Description of Artificial Sequence: Synthetic oligonucleotide
ucugaucuuguugcaguuc

SEQ ID NO: 1591416 - RNA, 19 nt, Artificial Sequence
  Description of Artificial Sequence: Synthetic oligonucleotide
caugguguucacuuaugaa

SEQ ID NO: 1591417 - RNA, 19 nt, Artificial Sequence
  Description of Artificial Sequence: Synthetic oligonucleotide
cauuacccucagcagcaag

SEQ ID NO: 1591418 - RNA, 19 nt, Artificial Sequence
  Description of Artificial Sequence: Synthetic oligonucleotide
uuccguguguggccaacac

SEQ ID NO: 1591419 - RNA, 19 nt, Artificial Sequence
  Description of Artificial Sequence: Synthetic oligonucleotide
auaggcacugcuaccagaa

SEQ ID NO: 1591420 - RNA, 19 nt, Artificial Sequence
  Description of Artificial Sequence: Synthetic oligonucleotide
uucugaucuuguugcaguu

SEQ ID NO: 1591421 - RNA, 19 nt, Artificial Sequence
  Description of Artificial Sequence: Synthetic oligonucleotide
gaggguugagguagccggg

SEQ ID NO: 1591422 - RNA, 19 nt, Artificial Sequence
  Description of Artificial Sequence: Synthetic oligonucleotide
aguuuuccguguguggcca

SEQ ID NO: 1591423 - RNA, 19 nt, Artificial Sequence
  Description of Artificial Sequence: Synthetic oligonucleotide
caccaggagauucaaugca

SEQ ID NO: 1591424 - RNA, 19 nt, Artificial Sequence
  Description of Artificial Sequence: Synthetic oligonucleotide
caggagauucaaugcagga

SEQ ID NO: 1591425 - RNA, 19 nt, Artificial Sequence
  Description of Artificial Sequence: Synthetic oligonucleotide
acaccugcuuaugacgaug

SEQ ID NO: 1591426 - RNA, 19 nt, Artificial Sequence
  Description of Artificial Sequence: Synthetic oligonucleotide
ggggcaugcauccugggca

SEQ ID NO: 1591427 - RNA, 19 nt, Artificial Sequence
  Description of Artificial Sequence: Synthetic oligonucleotide
guuggucuccguugcccag

SEQ ID NO: 1591428 - RNA, 19 nt, Artificial Sequence
  Description of Artificial Sequence: Synthetic oligonucleotide
gaagaggguugagguagcc

SEQ ID NO: 1591429 - RNA, 19 nt, Artificial Sequence
  Description of Artificial Sequence: Synthetic oligonucleotide
accaacccacccuaaguuu

SEQ ID NO: 1591430 - RNA, 19 nt, Artificial Sequence
  Description of Artificial Sequence: Synthetic oligonucleotide
cucuuuucacaccugcuua

SEQ ID NO: 1591431 - RNA, 19 nt, Artificial Sequence
  Description of Artificial Sequence: Synthetic oligonucleotide
uacaccuaauuggucuggu

SEQ ID NO: 1591432 - RNA, 19 nt, Artificial Sequence
  Description of Artificial Sequence: Synthetic oligonucleotide
uguggccaacacacaugug

SEQ ID NO: 1591433 - RNA, 19 nt, Artificial Sequence
  Description of Artificial Sequence: Synthetic oligonucleotide
cucuuaacauagaacgccu

SEQ ID NO: 1591434 - RNA, 19 nt, Artificial Sequence
  Description of Artificial Sequence: Synthetic oligonucleotide
uguugucgagaagcaauau

SEQ ID NO: 1591435 - RNA, 19 nt, Artificial Sequence
  Description of Artificial Sequence: Synthetic oligonucleotide
cuguaaccccacacccucc

SEQ ID NO: 1591436 - RNA, 19 nt, Artificial Sequence
  Description of Artificial Sequence: Synthetic oligonucleotide
auccaacaggacuucugau

SEQ ID NO: 1591437 - RNA, 19 nt, Artificial Sequence
  Description of Artificial Sequence: Synthetic oligonucleotide
accugucacacuugucuau

SEQ ID NO: 1591438 - RNA, 19 nt, Artificial Sequence
  Description of Artificial Sequence: Synthetic oligonucleotide
auagccauugguggccaca

SEQ ID NO: 1591439 - RNA, 19 nt, Artificial Sequence
  Description of Artificial Sequence: Synthetic oligonucleotide
uagccgugugucaggagua

SEQ ID NO: 1591440 - RNA, 19 nt, Artificial Sequence
  Description of Artificial Sequence: Synthetic oligonucleotide
ggaucgucaucaauuccag

SEQ ID NO: 1591441 - RNA, 19 nt, Artificial Sequence
  Description of Artificial Sequence: Synthetic oligonucleotide
caucaauccauggcaccug

SEQ ID NO: 1591442 - RNA, 19 nt, Artificial Sequence
  Description of Artificial Sequence: Synthetic oligonucleotide
gagucggguaagcauuaaa

SEQ ID NO: 1591443 - RNA, 19 nt, Artificial Sequence
  Description of Artificial Sequence: Synthetic oligonucleotide
uuuccguguguggccaaca

SEQ ID NO: 1591444 - RNA, 19 nt, Artificial Sequence
  Description of Artificial Sequence: Synthetic oligonucleotide
uuuuccguguguggccaac

SEQ ID NO: 1591445 - RNA, 19 nt, Artificial Sequence
  Description of Artificial Sequence: Synthetic oligonucleotide
cauggagguugugaucaac

SEQ ID NO: 1591446 - RNA, 19 nt, Artificial Sequence
  Description of Artificial Sequence: Synthetic oligonucleotide
cugguuauuagggagcccu

SEQ ID NO: 1591447 - RNA, 19 nt, Artificial Sequence
  Description of Artificial Sequence: Synthetic oligonucleotide
gucaggaguaaugauugua

SEQ ID NO: 1591448 - RNA, 19 nt, Artificial Sequence
  Description of Artificial Sequence: Synthetic oligonucleotide
ugcuuaugacgaugacauc

SEQ ID NO: 1591449 - RNA, 19 nt, Artificial Sequence
  Description of Artificial Sequence: Synthetic oligonucleotide
auaaggcuugggccccuca

SEQ ID NO: 1591450 - RNA, 19 nt, Artificial Sequence
  Description of Artificial Sequence: Synthetic oligonucleotide
cauagaacgccugaacagu

SEQ ID NO: 1591451 - RNA, 19 nt, Artificial Sequence
  Description of Artificial Sequence: Synthetic oligonucleotide
caguucucuuauccaggac

SEQ ID NO: 1591452 - RNA, 19 nt, Artificial Sequence
  Description of Artificial Sequence: Synthetic oligonucleotide
uggucuccguugcccagac

SEQ ID NO: 1591453 - RNA, 19 nt, Artificial Sequence
  Description of Artificial Sequence: Synthetic oligonucleotide
gucaucaauuccaguuuuc

SEQ ID NO: 1591454 - RNA, 19 nt, Artificial Sequence
  Description of Artificial Sequence: Synthetic oligonucleotide
caccugcuuaugacgauga

SEQ ID NO: 1591455 - RNA, 19 nt, Artificial Sequence
  Description of Artificial Sequence: Synthetic oligonucleotide
gucaacccuaacauggugu

SEQ ID NO: 1591456 - RNA, 19 nt, Artificial Sequence
  Description of Artificial Sequence: Synthetic oligonucleotide
guuauuagggagcccugau

SEQ ID NO: 1591457 - RNA, 19 nt, Artificial Sequence
  Description of Artificial Sequence: Synthetic oligonucleotide
cagacugccaggggaguac

SEQ ID NO: 1591458 - RNA, 19 nt, Artificial Sequence
  Description of Artificial Sequence: Synthetic oligonucleotide
aggcagacuuggcaacgga

SEQ ID NO: 1591459 - RNA, 19 nt, Artificial Sequence
  Description of Artificial Sequence: Synthetic oligonucleotide
gcaguaaggggcaugcauc

SEQ ID NO: 1591460 - RNA, 19 nt, Artificial Sequence
  Description of Artificial Sequence: Synthetic oligonucleotide
agccauccaacaggacuuc

SEQ ID NO: 1591461 - RNA, 19 nt, Artificial Sequence
  Description of Artificial Sequence: Synthetic oligonucleotide
gcaacggaagcuagcauca

SEQ ID NO: 1591462 - RNA, 19 nt, Artificial Sequence
  Description of Artificial Sequence: Synthetic oligonucleotide
ccuuuauguauggaaagga

SEQ ID NO: 1591463 - RNA, 19 nt, Artificial Sequence
  Description of Artificial Sequence: Synthetic oligonucleotide
aguaaggggcaugcauccu

SEQ ID NO: 1591464 - RNA, 19 nt, Artificial Sequence
  Description of Artificial Sequence: Synthetic oligonucleotide
ccgugugucaggaguaaug

SEQ ID NO: 1591465 - RNA, 19 nt, Artificial Sequence
  Description of Artificial Sequence: Synthetic oligonucleotide
aguaaugaguguagcccua

SEQ ID NO: 1591466 - RNA, 19 nt, Artificial Sequence
  Description of Artificial Sequence: Synthetic oligonucleotide
guagcccuauguaucaaua

SEQ ID NO: 1591467 - RNA, 19 nt, Artificial Sequence
  Description of Artificial Sequence: Synthetic oligonucleotide
cauuaaaccuucacagcuu

SEQ ID NO: 1591468 - RNA, 19 nt, Artificial Sequence
  Description of Artificial Sequence: Synthetic oligonucleotide
agcuacauaggcacugcua

SEQ ID NO: 1591469 - RNA, 19 nt, Artificial Sequence
  Description of Artificial Sequence: Synthetic oligonucleotide
uuguugcaguucucuuauc

SEQ ID NO: 1591470 - RNA, 19 nt, Artificial Sequence
  Description of Artificial Sequence: Synthetic oligonucleotide
ccuaauuggucuggugggc

SEQ ID NO: 1591471 - RNA, 19 nt, Artificial Sequence
  Description of Artificial Sequence: Synthetic oligonucleotide
ggcugauauaaggcuuggg

SEQ ID NO: 1591472 - RNA, 19 nt, Artificial Sequence
  Description of Artificial Sequence: Synthetic oligonucleotide
acgaugacaucaggaccug

SEQ ID NO: 1591473 - RNA, 19 nt, Artificial Sequence
  Description of Artificial Sequence: Synthetic oligonucleotide
gggcggggcaugaagagug

SEQ ID NO: 1591474 - RNA, 19 nt, Artificial Sequence
  Description of Artificial Sequence: Synthetic oligonucleotide
gacuggucauguagccgug

SEQ ID NO: 1591475 - RNA, 19 nt, Artificial Sequence
  Description of Artificial Sequence: Synthetic oligonucleotide
caaccaacccacccuaagu

SEQ ID NO: 1591476 - RNA, 19 nt, Artificial Sequence
  Description of Artificial Sequence: Synthetic oligonucleotide
gguuauuagggagcccuga

SEQ ID NO: 1591477 - RNA, 19 nt, Artificial Sequence
  Description of Artificial Sequence: Synthetic oligonucleotide
agagcaccugucacacuug

SEQ ID NO: 1591478 - RNA, 19 nt, Artificial Sequence
  Description of Artificial Sequence: Synthetic oligonucleotide
guguugucgagaagcaaua

SEQ ID NO: 1591479 - RNA, 19 nt, Artificial Sequence
  Description of Artificial Sequence: Synthetic oligonucleotide
ucauuacccucagcagcaa

SEQ ID NO: 1591480 - RNA, 19 nt, Artificial Sequence
  Description of Artificial Sequence: Synthetic oligonucleotide
ucacagcuuauugcacaau

SEQ ID NO: 1591481 - RNA, 19 nt, Artificial Sequence
  Description of Artificial Sequence: Synthetic oligonucleotide
gccccucauguucuguugc

SEQ ID NO: 1591482 - RNA, 19 nt, Artificial Sequence
  Description of Artificial Sequence: Synthetic oligonucleotide
aacccacccuaaguuuaaa

SEQ ID NO: 1591483 - RNA, 19 nt, Artificial Sequence
  Description of Artificial Sequence: Synthetic oligonucleotide
ccauuccaggucuuugauc

SEQ ID NO: 1591484 - RNA, 19 nt, Artificial Sequence
  Description of Artificial Sequence: Synthetic oligonucleotide
uugggccccucauguucug

SEQ ID NO: 1591485 - RNA, 19 nt, Artificial Sequence
  Description of Artificial Sequence: Synthetic oligonucleotide
cccugacaucaauccaugg

SEQ ID NO: 1591486 - RNA, 19 nt, Artificial Sequence
  Description of Artificial Sequence: Synthetic oligonucleotide
gagagucggguaagcauua

SEQ ID NO: 1591487 - RNA, 19 nt, Artificial Sequence
  Description of Artificial Sequence: Synthetic oligonucleotide
caacccuaacaugguguuc

SEQ ID NO: 1591488 - RNA, 19 nt, Artificial Sequence
  Description of Artificial Sequence: Synthetic oligonucleotide
uauaaggcuugggccccuc

SEQ ID NO: 1591489 - RNA, 19 nt, Artificial Sequence
  Description of Artificial Sequence: Synthetic oligonucleotide
caacccacccuaaguuuaa

SEQ ID NO: 1591490 - RNA, 19 nt, Artificial Sequence
  Description of Artificial Sequence: Synthetic oligonucleotide
ggcucaguccagaacugac

SEQ ID NO: 1591491 - RNA, 19 nt, Artificial Sequence
  Description of Artificial Sequence: Synthetic oligonucleotide
acacaacucuuaacauaga

SEQ ID NO: 1591492 - RNA, 19 nt, Artificial Sequence
  Description of Artificial Sequence: Synthetic oligonucleotide
auauaaggcuugggccccu

SEQ ID NO: 1591493 - RNA, 19 nt, Artificial Sequence
  Description of Artificial Sequence: Synthetic oligonucleotide
ugcccacagucaacccuaa

SEQ ID NO: 1591494 - RNA, 19 nt, Artificial Sequence
  Description of Artificial Sequence: Synthetic oligonucleotide
ccaugagaccccuuuaugu

SEQ ID NO: 1591495 - RNA, 19 nt, Artificial Sequence
  Description of Artificial Sequence: Synthetic oligonucleotide
caccugucacacuugucua

SEQ ID NO: 1591496 - RNA, 19 nt, Artificial Sequence
  Description of Artificial Sequence: Synthetic oligonucleotide
caccuucauuacccucagc

SEQ ID NO: 1591497 - RNA, 19 nt, Artificial Sequence
  Description of Artificial Sequence: Synthetic oligonucleotide
aggcuaugcugcagagcuc

SEQ ID NO: 1591498 - RNA, 19 nt, Artificial Sequence
  Description of Artificial Sequence: Synthetic oligonucleotide
ggcaguaaggggcaugcau

SEQ ID NO: 1591499 - RNA, 19 nt, Artificial Sequence
  Description of Artificial Sequence: Synthetic oligonucleotide
ggaguacaccuaauugguc

SEQ ID NO: 1591500 - RNA, 19 nt, Artificial Sequence
  Description of Artificial Sequence: Synthetic oligonucleotide
ccauggaucgucaucaauu

SEQ ID NO: 1591501 - RNA, 19 nt, Artificial Sequence
  Description of Artificial Sequence: Synthetic oligonucleotide
cuguaugggcaucuccacu

SEQ ID NO: 1591502 - RNA, 19 nt, Artificial Sequence
  Description of Artificial Sequence: Synthetic oligonucleotide
acggucuucugaacccaca

SEQ ID NO: 1591503 - RNA, 19 nt, Artificial Sequence
  Description of Artificial Sequence: Synthetic oligonucleotide
caacggucuucugaaccca

SEQ ID NO: 1591504 - RNA, 19 nt, Artificial Sequence
  Description of Artificial Sequence: Synthetic oligonucleotide
caaccuauaagugguucau

SEQ ID NO: 1591505 - RNA, 19 nt, Artificial Sequence
  Description of Artificial Sequence: Synthetic oligonucleotide
uggcaguaaggggcaugca

SEQ ID NO: 1591506 - RNA, 19 nt, Artificial Sequence
  Description of Artificial Sequence: Synthetic oligonucleotide
cagucaacccuaacauggu

SEQ ID NO: 1591507 - RNA, 19 nt, Artificial Sequence
  Description of Artificial Sequence: Synthetic oligonucleotide
agcaccucucucauccauu

SEQ ID NO: 1591508 - RNA, 19 nt, Artificial Sequence
  Description of Artificial Sequence: Synthetic oligonucleotide
gacugccaggggaguacac

SEQ ID NO: 1591509 - RNA, 19 nt, Artificial Sequence
  Description of Artificial Sequence: Synthetic oligonucleotide
agagucggguaagcauuaa

SEQ ID NO: 1591510 - RNA, 19 nt, Artificial Sequence
  Description of Artificial Sequence: Synthetic oligonucleotide
gguagccggguggugagga

SEQ ID NO: 1591511 - RNA, 19 nt, Artificial Sequence
  Description of Artificial Sequence: Synthetic oligonucleotide
ccaacccacccuaaguuua

SEQ ID NO: 1591512 - RNA, 19 nt, Artificial Sequence
  Description of Artificial Sequence: Synthetic oligonucleotide
guaaugaguguagcccuau

SEQ ID NO: 1591513 - RNA, 19 nt, Artificial Sequence
  Description of Artificial Sequence: Synthetic oligonucleotide
ccacagucaacccuaacau

SEQ ID NO: 1591514 - RNA, 19 nt, Artificial Sequence
  Description of Artificial Sequence: Synthetic oligonucleotide
augcagcuacauaggcacu

SEQ ID NO: 1591515 - RNA, 19 nt, Artificial Sequence
  Description of Artificial Sequence: Synthetic oligonucleotide
gguacacaauaaacuggaa

SEQ ID NO: 1591516 - RNA, 19 nt, Artificial Sequence
  Description of Artificial Sequence: Synthetic oligonucleotide
ugggccccucauguucugu

SEQ ID NO: 1591517 - RNA, 19 nt, Artificial Sequence
  Description of Artificial Sequence: Synthetic oligonucleotide
cgugugucaggaguaauga

SEQ ID NO: 1591518 - RNA, 19 nt, Artificial Sequence
  Description of Artificial Sequence: Synthetic oligonucleotide
guuuuccguguguggccaa

SEQ ID NO: 1591519 - RNA, 19 nt, Artificial Sequence
  Description of Artificial Sequence: Synthetic oligonucleotide
gggauuggggaagaagccu

SEQ ID NO: 1591520 - RNA, 19 nt, Artificial Sequence
  Description of Artificial Sequence: Synthetic oligonucleotide
gugccauucuggaaacagu

SEQ ID NO: 1591521 - RNA, 19 nt, Artificial Sequence
  Description of Artificial Sequence: Synthetic oligonucleotide
agccgugugucaggaguaa

SEQ ID NO: 1591522 - RNA, 19 nt, Artificial Sequence
  Description of Artificial Sequence: Synthetic oligonucleotide
ggcaccugagagcaccugu

SEQ ID NO: 1591523 - RNA, 19 nt, Artificial Sequence
  Description of Artificial Sequence: Synthetic oligonucleotide
cuuaugaagcauggagguu

SEQ ID NO: 1591524 - RNA, 19 nt, Artificial Sequence
  Description of Artificial Sequence: Synthetic oligonucleotide
caggggaguacaccuaauu

SEQ ID NO: 1591525 - RNA, 19 nt, Artificial Sequence
  Description of Artificial Sequence: Synthetic oligonucleotide
guguagcccuauguaucaa

SEQ ID NO: 1591526 - RNA, 19 nt, Artificial Sequence
  Description of Artificial Sequence: Synthetic oligonucleotide
cgccugaacaguaaugagu

SEQ ID NO: 1591527 - RNA, 19 nt, Artificial Sequence
  Description of Artificial Sequence: Synthetic oligonucleotide
gcggggcaugaagagugcc

SEQ ID NO: 1591528 - RNA, 19 nt, Artificial Sequence
  Description of Artificial Sequence: Synthetic oligonucleotide
cguugcccagacugccagg

SEQ ID NO: 1591529 - RNA, 19 nt, Artificial Sequence
  Description of Artificial Sequence: Synthetic oligonucleotide
ccacaaccaacccacccua

SEQ ID NO: 1591530 - RNA, 19 nt, Artificial Sequence
  Description of Artificial Sequence: Synthetic oligonucleotide
ggggcaugaagagugccau

SEQ ID NO: 1591531 - RNA, 19 nt, Artificial Sequence
  Description of Artificial Sequence: Synthetic oligonucleotide
cggguaagcauuaaaccuu

SEQ ID NO: 1591532 - RNA, 19 nt, Artificial Sequence
  Description of Artificial Sequence: Synthetic oligonucleotide
cggaagcuagcaucauaaa

SEQ ID NO: 1591533 - RNA, 19 nt, Artificial Sequence
  Description of Artificial Sequence: Synthetic oligonucleotide
cgucaucaauuccaguuuu

SEQ ID NO: 1591534 - RNA, 19 nt, Artificial Sequence
  Description of Artificial Sequence: Synthetic oligonucleotide
ccaggggaguacaccuaau

SEQ ID NO: 1591535 - RNA, 19 nt, Artificial Sequence
  Description of Artificial Sequence: Synthetic oligonucleotide
cccuaacaugguguucacu

SEQ ID NO: 1591536 - RNA, 19 nt, Artificial Sequence
  Description of Artificial Sequence: Synthetic oligonucleotide
aaauuuguuacuuagaaau

SEQ ID NO: 1591537 - RNA, 19 nt, Artificial Sequence
  Description of Artificial Sequence: Synthetic oligonucleotide
uauguaucuaauaacacag

SEQ ID NO: 1591538 - RNA, 19 nt, Artificial Sequence
  Description of Artificial Sequence: Synthetic oligonucleotide
uaucuaauaacacagaguc

SEQ ID NO: 1591539 - RNA, 19 nt, Artificial Sequence
  Description of Artificial Sequence: Synthetic oligonucleotide
uauaagauacaaaggaggg

SEQ ID NO: 1591540 - RNA, 19 nt, Artificial Sequence
  Description of Artificial Sequence: Synthetic oligonucleotide
uucaaauugauuuauuugc

SEQ ID NO: 1591541 - RNA, 19 nt, Artificial Sequence
  Description of Artificial Sequence: Synthetic oligonucleotide
uucuauaagauacaaagga

SEQ ID NO: 1591542 - RNA, 19 nt, Artificial Sequence
  Description of Artificial Sequence: Synthetic oligonucleotide
acaaaaucagcauacaaag

SEQ ID NO: 1591543 - RNA, 19 nt, Artificial Sequence
  Description of Artificial Sequence: Synthetic oligonucleotide
auaccauugacacaaaauc

SEQ ID NO: 1591544 - RNA, 19 nt, Artificial Sequence
  Description of Artificial Sequence: Synthetic oligonucleotide
aucaauugcacauuguagg

SEQ ID NO: 1591545 - RNA, 19 nt, Artificial Sequence
  Description of Artificial Sequence: Synthetic oligonucleotide
uucaaaacugucuaaagug

SEQ ID NO: 1591546 - RNA, 19 nt, Artificial Sequence
  Description of Artificial Sequence: Synthetic oligonucleotide
aaaggaaacacugacuuuc

SEQ ID NO: 1591547 - RNA, 19 nt, Artificial Sequence
  Description of Artificial Sequence: Synthetic oligonucleotide
ugcucaaaggucaugauag

SEQ ID NO: 1591548 - RNA, 19 nt, Artificial Sequence
  Description of Artificial Sequence: Synthetic oligonucleotide
uguaucuaauaacacagag

SEQ ID NO: 1591549 - RNA, 19 nt, Artificial Sequence
  Description of Artificial Sequence: Synthetic oligonucleotide
ucuauaagauacaaaggag

SEQ ID NO: 1591550 - RNA, 19 nt, Artificial Sequence
  Description of Artificial Sequence: Synthetic oligonucleotide
acaacugugcauuucuucc

SEQ ID NO: 1591551 - RNA, 19 nt, Artificial Sequence
  Description of Artificial Sequence: Synthetic oligonucleotide
aauucaaugccucugcaca

SEQ ID NO: 1591552 - RNA, 19 nt, Artificial Sequence
  Description of Artificial Sequence: Synthetic oligonucleotide
ugaaguguagucuagacuc

SEQ ID NO: 1591553 - RNA, 19 nt, Artificial Sequence
  Description of Artificial Sequence: Synthetic oligonucleotide
uauagcaauaugaaaauau

SEQ ID NO: 1591554 - RNA, 19 nt, Artificial Sequence
  Description of Artificial Sequence: Synthetic oligonucleotide
aaaacaaucuggcaacuca

SEQ ID NO: 1591555 - RNA, 19 nt, Artificial Sequence
  Description of Artificial Sequence: Synthetic oligonucleotide
uauacaaaaugccaacuca

SEQ ID NO: 1591556 - RNA, 19 nt, Artificial Sequence
  Description of Artificial Sequence: Synthetic oligonucleotide
aguuaauucaugcuuccac

SEQ ID NO: 1591557 - RNA, 19 nt, Artificial Sequence
  Description of Artificial Sequence: Synthetic oligonucleotide
uguuacuuagaaauaauuc

SEQ ID NO: 1591558 - RNA, 19 nt, Artificial Sequence
  Description of Artificial Sequence: Synthetic oligonucleotide
aauggcaccagauaauggu

SEQ ID NO: 1591559 - RNA, 19 nt, Artificial Sequence
  Description of Artificial Sequence: Synthetic oligonucleotide
uacaauuucuaauaugaca

SEQ ID NO: 1591560 - RNA, 19 nt, Artificial Sequence
  Description of Artificial Sequence: Synthetic oligonucleotide
uagcaauaugaaaauauag

SEQ ID NO: 1591561 - RNA, 19 nt, Artificial Sequence
  Description of Artificial Sequence: Synthetic oligonucleotide
aaugccaacucaaacagag

SEQ ID NO: 1591562 - RNA, 19 nt, Artificial Sequence
  Description of Artificial Sequence: Synthetic oligonucleotide
auuuuggauguccuguugc

SEQ ID NO: 1591563 - RNA, 19 nt, Artificial Sequence
  Description of Artificial Sequence: Synthetic oligonucleotide
uuugaguccaccuuugaug

SEQ ID NO: 1591564 - RNA, 19 nt, Artificial Sequence
  Description of Artificial Sequence: Synthetic oligonucleotide
ucuaauaugacaucuguuu

SEQ ID NO: 1591565 - RNA, 19 nt, Artificial Sequence
  Description of Artificial Sequence: Synthetic oligonucleotide
uauagaauucugaaaacaa

SEQ ID NO: 1591566 - RNA, 19 nt, Artificial Sequence
  Description of Artificial Sequence: Synthetic oligonucleotide
uucuguaggagacacucgg

SEQ ID NO: 1591567 - RNA, 19 nt, Artificial Sequence
  Description of Artificial Sequence: Synthetic oligonucleotide
aaagacucuacaacugugc

SEQ ID NO: 1591568 - RNA, 19 nt, Artificial Sequence
  Description of Artificial Sequence: Synthetic oligonucleotide
uugagauccaccuuggcug

SEQ ID NO: 1591569 - RNA, 19 nt, Artificial Sequence
  Description of Artificial Sequence: Synthetic oligonucleotide
aaacagagugaauggcacc

SEQ ID NO: 1591570 - RNA, 19 nt, Artificial Sequence
  Description of Artificial Sequence: Synthetic oligonucleotide
auuccagucagucugaaga

SEQ ID NO: 1591571 - RNA, 19 nt, Artificial Sequence
  Description of Artificial Sequence: Synthetic oligonucleotide
uguagucuagacuccaagg

SEQ ID NO: 1591572 - RNA, 19 nt, Artificial Sequence
  Description of Artificial Sequence: Synthetic oligonucleotide
caaggaguaaucuuuguag

SEQ ID NO: 1591573 - RNA, 19 nt, Artificial Sequence
  Description of Artificial Sequence: Synthetic oligonucleotide
aauggucauacuucaguag

SEQ ID NO: 1591574 - RNA, 19 nt, Artificial Sequence
  Description of Artificial Sequence: Synthetic oligonucleotide
aauugauuuauuugcacuu

SEQ ID NO: 1591575 - RNA, 19 nt, Artificial Sequence
  Description of Artificial Sequence: Synthetic oligonucleotide
auauguaucuaauaacaca

SEQ ID NO: 1591576 - RNA, 19 nt, Artificial Sequence
  Description of Artificial Sequence: Synthetic oligonucleotide
uaugaaaauauagaauucu

SEQ ID NO: 1591577 - RNA, 19 nt, Artificial Sequence
  Description of Artificial Sequence: Synthetic oligonucleotide
aaaucaauugcacauugua

SEQ ID NO: 1591578 - RNA, 19 nt, Artificial Sequence
  Description of Artificial Sequence: Synthetic oligonucleotide
accacaaugguacuguauc

SEQ ID NO: 1591579 - RNA, 19 nt, Artificial Sequence
  Description of Artificial Sequence: Synthetic oligonucleotide
aauugcacauuguagguaa

SEQ ID NO: 1591580 - RNA, 19 nt, Artificial Sequence
  Description of Artificial Sequence: Synthetic oligonucleotide
uaacaaaucaauugcacau

SEQ ID NO: 1591581 - RNA, 19 nt, Artificial Sequence
  Description of Artificial Sequence: Synthetic oligonucleotide
aacucaaauauguaucuaa

SEQ ID NO: 1591582 - RNA, 19 nt, Artificial Sequence
  Description of Artificial Sequence: Synthetic oligonucleotide
cuucuauaagauacaaagg

SEQ ID NO: 1591583 - RNA, 19 nt, Artificial Sequence
  Description of Artificial Sequence: Synthetic oligonucleotide
gaugauaccauugacacaa

SEQ ID NO: 1591584 - RNA, 19 nt, Artificial Sequence
  Description of Artificial Sequence: Synthetic oligonucleotide
aaugguacuguaucccaag

SEQ ID NO: 1591585 - RNA, 19 nt, Artificial Sequence
  Description of Artificial Sequence: Synthetic oligonucleotide
auagcaagaguccauguug

SEQ ID NO: 1591586 - RNA, 19 nt, Artificial Sequence
  Description of Artificial Sequence: Synthetic oligonucleotide
uuaucuacauucacuacac

SEQ ID NO: 1591587 - RNA, 19 nt, Artificial Sequence
  Description of Artificial Sequence: Synthetic oligonucleotide
ugccaacucaaacagagug

SEQ ID NO: 1591588 - RNA, 19 nt, Artificial Sequence
  Description of Artificial Sequence: Synthetic oligonucleotide
ucauccugcacaaauguga

SEQ ID NO: 1591589 - RNA, 19 nt, Artificial Sequence
  Description of Artificial Sequence: Synthetic oligonucleotide
uuucuaauaugacaucugu

SEQ ID NO: 1591590 - RNA, 19 nt, Artificial Sequence
  Description of Artificial Sequence: Synthetic oligonucleotide
auaacaaaucaauugcaca

SEQ ID NO: 1591591 - RNA, 19 nt, Artificial Sequence
  Description of Artificial Sequence: Synthetic oligonucleotide
ugcaaggcguccuucaugg

SEQ ID NO: 1591592 - RNA, 19 nt, Artificial Sequence
  Description of Artificial Sequence: Synthetic oligonucleotide
ucuaauuuugaguccaccu

SEQ ID NO: 1591593 - RNA, 19 nt, Artificial Sequence
  Description of Artificial Sequence: Synthetic oligonucleotide
ucaaaacugucuaaagugu

SEQ ID NO: 1591594 - RNA, 19 nt, Artificial Sequence
  Description of Artificial Sequence: Synthetic oligonucleotide
aaucaauugcacauuguag

SEQ ID NO: 1591595 - RNA, 19 nt, Artificial Sequence
  Description of Artificial Sequence: Synthetic oligonucleotide
uguccuguugcucaaaggu

SEQ ID NO: 1591596 - RNA, 19 nt, Artificial Sequence
  Description of Artificial Sequence: Synthetic oligonucleotide
uuuggugucacaugguaca

SEQ ID NO: 1591597 - RNA, 19 nt, Artificial Sequence
  Description of Artificial Sequence: Synthetic oligonucleotide
uaccauugacacaaaauca

SEQ ID NO: 1591598 - RNA, 19 nt, Artificial Sequence
  Description of Artificial Sequence: Synthetic oligonucleotide
guuaauucaugcuuccacc

SEQ ID NO: 1591599 - RNA, 19 nt, Artificial Sequence
  Description of Artificial Sequence: Synthetic oligonucleotide
uauauuugguaacuuguuc

SEQ ID NO: 1591600 - RNA, 19 nt, Artificial Sequence
  Description of Artificial Sequence: Synthetic oligonucleotide
uauagagauggucuccaag

SEQ ID NO: 1591601 - RNA, 19 nt, Artificial Sequence
  Description of Artificial Sequence: Synthetic oligonucleotide
acuuguucuaauuuugagu

SEQ ID NO: 1591602 - RNA, 19 nt, Artificial Sequence
  Description of Artificial Sequence: Synthetic oligonucleotide
uggcuuuauacaaaaugcc

SEQ ID NO: 1591603 - RNA, 19 nt, Artificial Sequence
  Description of Artificial Sequence: Synthetic oligonucleotide
acaauuucuaauaugacau

SEQ ID NO: 1591604 - RNA, 19 nt, Artificial Sequence
  Description of Artificial Sequence: Synthetic oligonucleotide
auaauggucauacuucagu

SEQ ID NO: 1591605 - RNA, 19 nt, Artificial Sequence
  Description of Artificial Sequence: Synthetic oligonucleotide
ugaugaaccccacagcaga

SEQ ID NO: 1591606 - RNA, 19 nt, Artificial Sequence
  Description of Artificial Sequence: Synthetic oligonucleotide
uuguaguuguuucuugcag

SEQ ID NO: 1591607 - RNA, 19 nt, Artificial Sequence
  Description of Artificial Sequence: Synthetic oligonucleotide
ucacaugguacaaagggaa

SEQ ID NO: 1591608 - RNA, 19 nt, Artificial Sequence
  Description of Artificial Sequence: Synthetic oligonucleotide
gauuucggcaugcauuucc

SEQ ID NO: 1591609 - RNA, 19 nt, Artificial Sequence
  Description of Artificial Sequence: Synthetic oligonucleotide
aaaugugagugcugcuuuc

SEQ ID NO: 1591610 - RNA, 19 nt, Artificial Sequence
  Description of Artificial Sequence: Synthetic oligonucleotide
gaucauauuuucauccugc

SEQ ID NO: 1591611 - RNA, 19 nt, Artificial Sequence
  Description of Artificial Sequence: Synthetic oligonucleotide
ugaucauauuuucauccug

SEQ ID NO: 1591612 - RNA, 19 nt, Artificial Sequence
  Description of Artificial Sequence: Synthetic oligonucleotide
ucuuauauauuugguaacu

SEQ ID NO: 1591613 - RNA, 19 nt, Artificial Sequence
  Description of Artificial Sequence: Synthetic oligonucleotide
acucagaaccgacucuugc

SEQ ID NO: 1591614 - RNA, 19 nt, Artificial Sequence
  Description of Artificial Sequence: Synthetic oligonucleotide
auaugaaaauauagaauuc

SEQ ID NO: 1591615 - RNA, 19 nt, Artificial Sequence
  Description of Artificial Sequence: Synthetic oligonucleotide
aauagaaacaggaacuguu

SEQ ID NO: 1591616 - RNA, 19 nt, Artificial Sequence
  Description of Artificial Sequence: Synthetic oligonucleotide
agauauagagauggucucc

SEQ ID NO: 1591617 - RNA, 19 nt, Artificial Sequence
  Description of Artificial Sequence: Synthetic oligonucleotide
aaaucagcauacaaaguca

SEQ ID NO: 1591618 - RNA, 19 nt, Artificial Sequence
  Description of Artificial Sequence: Synthetic oligonucleotide
cagauaauggucauacuuc

SEQ ID NO: 1591619 - RNA, 19 nt, Artificial Sequence
  Description of Artificial Sequence: Synthetic oligonucleotide
agauaauggucauacuuca

SEQ ID NO: 1591620 - RNA, 19 nt, Artificial Sequence
  Description of Artificial Sequence: Synthetic oligonucleotide
cucggcauaacagauuucg

SEQ ID NO: 1591621 - RNA, 19 nt, Artificial Sequence
  Description of Artificial Sequence: Synthetic oligonucleotide
ugaaccccacagcagaugc

SEQ ID NO: 1591622 - RNA, 19 nt, Artificial Sequence
  Description of Artificial Sequence: Synthetic oligonucleotide
cauacaaagucauggaaca

SEQ ID NO: 1591623 - RNA, 19 nt, Artificial Sequence
  Description of Artificial Sequence: Synthetic oligonucleotide
agugucauuuauuuaaaua

SEQ ID NO: 1591624 - RNA, 19 nt, Artificial Sequence
  Description of Artificial Sequence: Synthetic oligonucleotide
auucaaugccucugcacac

SEQ ID NO: 1591625 - RNA, 19 nt, Artificial Sequence
  Description of Artificial Sequence: Synthetic oligonucleotide
acaaagggaaagcugcuug

SEQ ID NO: 1591626 - RNA, 19 nt, Artificial Sequence
  Description of Artificial Sequence: Synthetic oligonucleotide
uucuuauauauuugguaac

SEQ ID NO: 1591627 - RNA, 19 nt, Artificial Sequence
  Description of Artificial Sequence: Synthetic oligonucleotide
ucaauugcacauuguaggu

SEQ ID NO: 1591628 - RNA, 19 nt, Artificial Sequence
  Description of Artificial Sequence: Synthetic oligonucleotide
uuuguuacuuagaaauaau

SEQ ID NO: 1591629 - RNA, 19 nt, Artificial Sequence
  Description of Artificial Sequence: Synthetic oligonucleotide
caaauugauuuauuugcac

SEQ ID NO: 1591630 - RNA, 19 nt, Artificial Sequence
  Description of Artificial Sequence: Synthetic oligonucleotide
cauucacuacacaucacag

SEQ ID NO: 1591631 - RNA, 19 nt, Artificial Sequence
  Description of Artificial Sequence: Synthetic oligonucleotide
uugacacaaaaucagcaua

SEQ ID NO: 1591632 - RNA, 19 nt, Artificial Sequence
  Description of Artificial Sequence: Synthetic oligonucleotide
ucauacuucaguagcuuuc

SEQ ID NO: 1591633 - RNA, 19 nt, Artificial Sequence
  Description of Artificial Sequence: Synthetic oligonucleotide
ucagaaccgacucuugccu

SEQ ID NO: 1591634 - RNA, 19 nt, Artificial Sequence
  Description of Artificial Sequence: Synthetic oligonucleotide
uuguuacuuagaaauaauu

SEQ ID NO: 1591635 - RNA, 19 nt, Artificial Sequence
  Description of Artificial Sequence: Synthetic oligonucleotide
uuucuguaggagacacucg

SEQ ID NO: 1591636 - RNA, 19 nt, Artificial Sequence
  Description of Artificial Sequence: Synthetic oligonucleotide
gguacaaagggaaagcugc

SEQ ID NO: 1591637 - RNA, 19 nt, Artificial Sequence
  Description of Artificial Sequence: Synthetic oligonucleotide
ugucaauuuccccuuggcu

SEQ ID NO: 1591638 - RNA, 19 nt, Artificial Sequence
  Description of Artificial Sequence: Synthetic oligonucleotide
uguacauuccagucagucu

SEQ ID NO: 1591639 - RNA, 19 nt, Artificial Sequence
  Description of Artificial Sequence: Synthetic oligonucleotide
auuguagguaaccugguua

SEQ ID NO: 1591640 - RNA, 19 nt, Artificial Sequence
  Description of Artificial Sequence: Synthetic oligonucleotide
guuugggaggauuccaucc

SEQ ID NO: 1591641 - RNA, 19 nt, Artificial Sequence
  Description of Artificial Sequence: Synthetic oligonucleotide
ugaauggcaccagauaaug

SEQ ID NO: 1591642 - RNA, 19 nt, Artificial Sequence
  Description of Artificial Sequence: Synthetic oligonucleotide
cugcuuguugccauguccg

SEQ ID NO: 1591643 - RNA, 19 nt, Artificial Sequence
  Description of Artificial Sequence: Synthetic oligonucleotide
cagaccacucuugagaucc

SEQ ID NO: 1591644 - RNA, 19 nt, Artificial Sequence
  Description of Artificial Sequence: Synthetic oligonucleotide
ucugaaguguagucuagac

SEQ ID NO: 1591645 - RNA, 19 nt, Artificial Sequence
  Description of Artificial Sequence: Synthetic oligonucleotide
uguugcucaaaggucauga

SEQ ID NO: 1591646 - RNA, 19 nt, Artificial Sequence
  Description of Artificial Sequence: Synthetic oligonucleotide
gaugaaguugaucauauuu

SEQ ID NO: 1591647 - RNA, 19 nt, Artificial Sequence
  Description of Artificial Sequence: Synthetic oligonucleotide
auuuguuacuuagaaauaa

SEQ ID NO: 1591648 - RNA, 19 nt, Artificial Sequence
  Description of Artificial Sequence: Synthetic oligonucleotide
uaauucaaugccucugcac

SEQ ID NO: 1591649 - RNA, 19 nt, Artificial Sequence
  Description of Artificial Sequence: Synthetic oligonucleotide
caugauagccugcaacacc

SEQ ID NO: 1591650 - RNA, 19 nt, Artificial Sequence
  Description of Artificial Sequence: Synthetic oligonucleotide
uugaucauauuuucauccu

SEQ ID NO: 1591651 - RNA, 19 nt, Artificial Sequence
  Description of Artificial Sequence: Synthetic oligonucleotide
ugguacuguaucccaaggc

SEQ ID NO: 1591652 - RNA, 19 nt, Artificial Sequence
  Description of Artificial Sequence: Synthetic oligonucleotide
guccgagggagauauagag

SEQ ID NO: 1591653 - RNA, 19 nt, Artificial Sequence
  Description of Artificial Sequence: Synthetic oligonucleotide
guagguaaccugguuauag

SEQ ID NO: 1591654 - RNA, 19 nt, Artificial Sequence
  Description of Artificial Sequence: Synthetic oligonucleotide
uaauggucauacuucagua

SEQ ID NO: 1591655 - RNA, 19 nt, Artificial Sequence
  Description of Artificial Sequence: Synthetic oligonucleotide
gagauauagagauggucuc

SEQ ID NO: 1591656 - RNA, 19 nt, Artificial Sequence
  Description of Artificial Sequence: Synthetic oligonucleotide
cacuacacaucacagauga

SEQ ID NO: 1591657 - RNA, 19 nt, Artificial Sequence
  Description of Artificial Sequence: Synthetic oligonucleotide
cuacauucacuacacauca

SEQ ID NO: 1591658 - RNA, 19 nt, Artificial Sequence
  Description of Artificial Sequence: Synthetic oligonucleotide
gagacacucggcauaacag

SEQ ID NO: 1591659 - RNA, 19 nt, Artificial Sequence
  Description of Artificial Sequence: Synthetic oligonucleotide
agaaccgacucuugccucg

SEQ ID NO: 1591660 - RNA, 19 nt, Artificial Sequence
  Description of Artificial Sequence: Synthetic oligonucleotide
uacuucaguagcuuucacu

SEQ ID NO: 1591661 - RNA, 19 nt, Artificial Sequence
  Description of Artificial Sequence: Synthetic oligonucleotide
uccaccuuugaugaaguug

SEQ ID NO: 1591662 - RNA, 19 nt, Artificial Sequence
  Description of Artificial Sequence: Synthetic oligonucleotide
auaacacagagucuucuau

SEQ ID NO: 1591663 - RNA, 19 nt, Artificial Sequence
  Description of Artificial Sequence: Synthetic oligonucleotide
aacugucuaaaguguaaaa

SEQ ID NO: 1591664 - RNA, 19 nt, Artificial Sequence
  Description of Artificial Sequence: Synthetic oligonucleotide
gucaugauagccugcaaca

SEQ ID NO: 1591665 - RNA, 19 nt, Artificial Sequence
  Description of Artificial Sequence: Synthetic oligonucleotide
uugaauucugaaguguagu

SEQ ID NO: 1591666 - RNA, 19 nt, Artificial Sequence
  Description of Artificial Sequence: Synthetic oligonucleotide
agucauggaacacauuaau

SEQ ID NO: 1591667 - RNA, 19 nt, Artificial Sequence
  Description of Artificial Sequence: Synthetic oligonucleotide
ucggcauaacagauuucgg

SEQ ID NO: 1591668 - RNA, 19 nt, Artificial Sequence
  Description of Artificial Sequence: Synthetic oligonucleotide
guagucuagacuccaagga

SEQ ID NO: 1591669 - RNA, 19 nt, Artificial Sequence
  Description of Artificial Sequence: Synthetic oligonucleotide
uuguagguaaccugguuau

SEQ ID NO: 1591670 - RNA, 19 nt, Artificial Sequence
  Description of Artificial Sequence: Synthetic oligonucleotide
cuuucuuauauauuuggua

SEQ ID NO: 1591671 - RNA, 19 nt, Artificial Sequence
  Description of Artificial Sequence: Synthetic oligonucleotide
uauuugguaacuuguucua

SEQ ID NO: 1591672 - RNA, 19 nt, Artificial Sequence
  Description of Artificial Sequence: Synthetic oligonucleotide
aacagauuucggcaugcau

SEQ ID NO: 1591673 - RNA, 19 nt, Artificial Sequence
  Description of Artificial Sequence: Synthetic oligonucleotide
uuuuggauguccuguugcu

SEQ ID NO: 1591674 - RNA, 19 nt, Artificial Sequence
  Description of Artificial Sequence: Synthetic oligonucleotide
auucacuacacaucacaga

SEQ ID NO: 1591675 - RNA, 19 nt, Artificial Sequence
  Description of Artificial Sequence: Synthetic oligonucleotide
agaaaggagacuugagaaa

SEQ ID NO: 1591676 - RNA, 19 nt, Artificial Sequence
  Description of Artificial Sequence: Synthetic oligonucleotide
acaugguacaaagggaaag

SEQ ID NO: 1591677 - RNA, 19 nt, Artificial Sequence
  Description of Artificial Sequence: Synthetic oligonucleotide
cauccugcacaaaugugag

SEQ ID NO: 1591678 - RNA, 19 nt, Artificial Sequence
  Description of Artificial Sequence: Synthetic oligonucleotide
ugguuauagcaauaugaaa

SEQ ID NO: 1591679 - RNA, 19 nt, Artificial Sequence
  Description of Artificial Sequence: Synthetic oligonucleotide
gaaagacucuacaacugug

SEQ ID NO: 1591680 - RNA, 19 nt, Artificial Sequence
  Description of Artificial Sequence: Synthetic oligonucleotide
uuggcagguuugcaaggcg

SEQ ID NO: 1591681 - RNA, 19 nt, Artificial Sequence
  Description of Artificial Sequence: Synthetic oligonucleotide
aaaacugucuaaaguguaa

SEQ ID NO: 1591682 - RNA, 19 nt, Artificial Sequence
  Description of Artificial Sequence: Synthetic oligonucleotide
aagugucauuuauuuaaau

SEQ ID NO: 1591683 - RNA, 19 nt, Artificial Sequence
  Description of Artificial Sequence: Synthetic oligonucleotide
augguacuguaucccaagg

SEQ ID NO: 1591684 - RNA, 19 nt, Artificial Sequence
  Description of Artificial Sequence: Synthetic oligonucleotide
cuuuaucuacauucacuac

SEQ ID NO: 1591685 - RNA, 19 nt, Artificial Sequence
  Description of Artificial Sequence: Synthetic oligonucleotide
uggcaacucaaauauguau

SEQ ID NO: 1591686 - RNA, 19 nt, Artificial Sequence
  Description of Artificial Sequence: Synthetic oligonucleotide
uucuaauaugacaucuguu

SEQ ID NO: 1591687 - RNA, 19 nt, Artificial Sequence
  Description of Artificial Sequence: Synthetic oligonucleotide
ucuguaggagacacucggc

SEQ ID NO: 1591688 - RNA, 19 nt, Artificial Sequence
  Description of Artificial Sequence: Synthetic oligonucleotide
auaauucaaugccucugca

SEQ ID NO: 1591689 - RNA, 19 nt, Artificial Sequence
  Description of Artificial Sequence: Synthetic oligonucleotide
cuccaagcugucuggaugc

SEQ ID NO: 1591690 - RNA, 19 nt, Artificial Sequence
  Description of Artificial Sequence: Synthetic oligonucleotide
uggcaccagauaaugguca

SEQ ID NO: 1591691 - RNA, 19 nt, Artificial Sequence
  Description of Artificial Sequence: Synthetic oligonucleotide
gauauagagauggucucca

SEQ ID NO: 1591692 - RNA, 19 nt, Artificial Sequence
  Description of Artificial Sequence: Synthetic oligonucleotide
agacacucggcauaacaga

SEQ ID NO: 1591693 - RNA, 19 nt, Artificial Sequence
  Description of Artificial Sequence: Synthetic oligonucleotide
ugguaacuuguucuaauuu

SEQ ID NO: 1591694 - RNA, 19 nt, Artificial Sequence
  Description of Artificial Sequence: Synthetic oligonucleotide
uggucauacuucaguagcu

SEQ ID NO: 1591695 - RNA, 19 nt, Artificial Sequence
  Description of Artificial Sequence: Synthetic oligonucleotide
gaucuccauagcaagaguc

SEQ ID NO: 1591696 - RNA, 19 nt, Artificial Sequence
  Description of Artificial Sequence: Synthetic oligonucleotide
ugugagugcugcuuucugu

SEQ ID NO: 1591697 - RNA, 19 nt, Artificial Sequence
  Description of Artificial Sequence: Synthetic oligonucleotide
aaacugucuaaaguguaaa

SEQ ID NO: 1591698 - RNA, 19 nt, Artificial Sequence
  Description of Artificial Sequence: Synthetic oligonucleotide
caccagauaauggucauac

SEQ ID NO: 1591699 - RNA, 19 nt, Artificial Sequence
  Description of Artificial Sequence: Synthetic oligonucleotide
cacaaugguacuguauccc

SEQ ID NO: 1591700 - RNA, 19 nt, Artificial Sequence
  Description of Artificial Sequence: Synthetic oligonucleotide
aaggcguccuucauggcag

SEQ ID NO: 1591701 - RNA, 19 nt, Artificial Sequence
  Description of Artificial Sequence: Synthetic oligonucleotide
gaauggcaccagauaaugg

SEQ ID NO: 1591702 - RNA, 19 nt, Artificial Sequence
  Description of Artificial Sequence: Synthetic oligonucleotide
ucacuacacaucacagaug

SEQ ID NO: 1591703 - RNA, 19 nt, Artificial Sequence
  Description of Artificial Sequence: Synthetic oligonucleotide
ugcacauuguagguaaccu

SEQ ID NO: 1591704 - RNA, 19 nt, Artificial Sequence
  Description of Artificial Sequence: Synthetic oligonucleotide
cucaaacagagugaauggc

SEQ ID NO: 1591705 - RNA, 19 nt, Artificial Sequence
  Description of Artificial Sequence: Synthetic oligonucleotide
ugcacaaaugugagugcug

SEQ ID NO: 1591706 - RNA, 19 nt, Artificial Sequence
  Description of Artificial Sequence: Synthetic oligonucleotide
acaaucuggcaacucaaau

SEQ ID NO: 1591707 - RNA, 19 nt, Artificial Sequence
  Description of Artificial Sequence: Synthetic oligonucleotide
cauaacagauuucggcaug

SEQ ID NO: 1591708 - RNA, 19 nt, Artificial Sequence
  Description of Artificial Sequence: Synthetic oligonucleotide
gaguccaccuuugaugaag

SEQ ID NO: 1591709 - RNA, 19 nt, Artificial Sequence
  Description of Artificial Sequence: Synthetic oligonucleotide
ugauaccauugacacaaaa

SEQ ID NO: 1591710 - RNA, 19 nt, Artificial Sequence
  Description of Artificial Sequence: Synthetic oligonucleotide
auguccgagggagauauag

SEQ ID NO: 1591711 - RNA, 19 nt, Artificial Sequence
  Description of Artificial Sequence: Synthetic oligonucleotide
uccgagggagauauagaga

SEQ ID NO: 1591712 - RNA, 19 nt, Artificial Sequence
  Description of Artificial Sequence: Synthetic oligonucleotide
auaagauacaaaggaggga

SEQ ID NO: 1591713 - RNA, 19 nt, Artificial Sequence
  Description of Artificial Sequence: Synthetic oligonucleotide
cugaucuccauagcaagag

SEQ ID NO: 1591714 - RNA, 19 nt, Artificial Sequence
  Description of Artificial Sequence: Synthetic oligonucleotide
aaugugagugcugcuuucu

SEQ ID NO: 1591715 - RNA, 19 nt, Artificial Sequence
  Description of Artificial Sequence: Synthetic oligonucleotide
uaacacagagucuucuaua

SEQ ID NO: 1591716 - RNA, 19 nt, Artificial Sequence
  Description of Artificial Sequence: Synthetic oligonucleotide
ggccgaagcaauuccaagg

SEQ ID NO: 1591717 - RNA, 19 nt, Artificial Sequence
  Description of Artificial Sequence: Synthetic oligonucleotide
agauguccucaucugcguc

SEQ ID NO: 1591718 - RNA, 19 nt, Artificial Sequence
  Description of Artificial Sequence: Synthetic oligonucleotide
cuaauaacacagagucuuc

SEQ ID NO: 1591719 - RNA, 19 nt, Artificial Sequence
  Description of Artificial Sequence: Synthetic oligonucleotide
guguagucuagacuccaag

SEQ ID NO: 1591720 - RNA, 19 nt, Artificial Sequence
  Description of Artificial Sequence: Synthetic oligonucleotide
caauuucuaauaugacauc

SEQ ID NO: 1591721 - RNA, 19 nt, Artificial Sequence
  Description of Artificial Sequence: Synthetic oligonucleotide
aguagcuuucacuuucuua

SEQ ID NO: 1591722 - RNA, 19 nt, Artificial Sequence
  Description of Artificial Sequence: Synthetic oligonucleotide
cacaucacagaugauacca

SEQ ID NO: 1591723 - RNA, 19 nt, Artificial Sequence
  Description of Artificial Sequence: Synthetic oligonucleotide
cucuugagauccaccuugg

SEQ ID NO: 1591724 - RNA, 19 nt, Artificial Sequence
  Description of Artificial Sequence: Synthetic oligonucleotide
auagaauucugaaaacaau

SEQ ID NO: 1591725 - RNA, 19 nt, Artificial Sequence
  Description of Artificial Sequence: Synthetic oligonucleotide
ugagugcugcuuucuguag

SEQ ID NO: 1591726 - RNA, 19 nt, Artificial Sequence
  Description of Artificial Sequence: Synthetic oligonucleotide
aaacaaucuggcaacucaa

SEQ ID NO: 1591727 - RNA, 19 nt, Artificial Sequence
  Description of Artificial Sequence: Synthetic oligonucleotide
uaucccaaggcgugguaca

SEQ ID NO: 1591728 - RNA, 19 nt, Artificial Sequence
  Description of Artificial Sequence: Synthetic oligonucleotide
uguaggagacacucggcau

SEQ ID NO: 1591729 - RNA, 19 nt, Artificial Sequence
  Description of Artificial Sequence: Synthetic oligonucleotide
ugaucuccauagcaagagu

SEQ ID NO: 1591730 - RNA, 19 nt, Artificial Sequence
  Description of Artificial Sequence: Synthetic oligonucleotide
uguccgagggagauauaga

SEQ ID NO: 1591731 - RNA, 19 nt, Artificial Sequence
  Description of Artificial Sequence: Synthetic oligonucleotide
gaguccauguuguuuggga

SEQ ID NO: 1591732 - RNA, 19 nt, Artificial Sequence
  Description of Artificial Sequence: Synthetic oligonucleotide
ugagauccaccuuggcuga

SEQ ID NO: 1591733 - RNA, 19 nt, Artificial Sequence
  Description of Artificial Sequence: Synthetic oligonucleotide
uuauagcaauaugaaaaua

SEQ ID NO: 1591734 - RNA, 19 nt, Artificial Sequence
  Description of Artificial Sequence: Synthetic oligonucleotide
uugguaacuuguucuaauu

SEQ ID NO: 1591735 - RNA, 19 nt, Artificial Sequence
  Description of Artificial Sequence: Synthetic oligonucleotide
gaaguguagucuagacucc

SEQ ID NO: 1591736 - RNA, 19 nt, Artificial Sequence
  Description of Artificial Sequence: Synthetic oligonucleotide
uagacuccaaggaguaauc

SEQ ID NO: 1591737 - RNA, 19 nt, Artificial Sequence
  Description of Artificial Sequence: Synthetic oligonucleotide
agucuagacuccaaggagu

SEQ ID NO: 1591738 - RNA, 19 nt, Artificial Sequence
  Description of Artificial Sequence: Synthetic oligonucleotide
acagauuucggcaugcauu

SEQ ID NO: 1591739 - RNA, 19 nt, Artificial Sequence
  Description of Artificial Sequence: Synthetic oligonucleotide
aaguguagucuagacucca

SEQ ID NO: 1591740 - RNA, 19 nt, Artificial Sequence
  Description of Artificial Sequence: Synthetic oligonucleotide
ucaugauagccugcaacac

SEQ ID NO: 1591741 - RNA, 19 nt, Artificial Sequence
  Description of Artificial Sequence: Synthetic oligonucleotide
uguuugggaggauuccauc

SEQ ID NO: 1591742 - RNA, 19 nt, Artificial Sequence
  Description of Artificial Sequence: Synthetic oligonucleotide
accuuggcugaugaacccc

SEQ ID NO: 1591743 - RNA, 19 nt, Artificial Sequence
  Description of Artificial Sequence: Synthetic oligonucleotide
agauacaaaggagggaaaa

SEQ ID NO: 1591744 - RNA, 19 nt, Artificial Sequence
  Description of Artificial Sequence: Synthetic oligonucleotide
ggucaugauagccugcaac

SEQ ID NO: 1591745 - RNA, 19 nt, Artificial Sequence
  Description of Artificial Sequence: Synthetic oligonucleotide
gcugcuugaauucugaagu

SEQ ID NO: 1591746 - RNA, 19 nt, Artificial Sequence
  Description of Artificial Sequence: Synthetic oligonucleotide
gauaccauugacacaaaau

SEQ ID NO: 1591747 - RNA, 19 nt, Artificial Sequence
  Description of Artificial Sequence: Synthetic oligonucleotide
aaaggagacuugagaaaga

SEQ ID NO: 1591748 - RNA, 19 nt, Artificial Sequence
  Description of Artificial Sequence: Synthetic oligonucleotide
aaccugguuauagcaauau

SEQ ID NO: 1591749 - RNA, 19 nt, Artificial Sequence
  Description of Artificial Sequence: Synthetic oligonucleotide
accacucuugagauccacc

SEQ ID NO: 1591750 - RNA, 19 nt, Artificial Sequence
  Description of Artificial Sequence: Synthetic oligonucleotide
aagucauggaacacauuaa

SEQ ID NO: 1591751 - RNA, 19 nt, Artificial Sequence
  Description of Artificial Sequence: Synthetic oligonucleotide
gaaaugccauuuuggaugu

SEQ ID NO: 1591752 - RNA, 19 nt, Artificial Sequence
  Description of Artificial Sequence: Synthetic oligonucleotide
aaccgacucuugccucggc

SEQ ID NO: 1591753 - RNA, 19 nt, Artificial Sequence
  Description of Artificial Sequence: Synthetic oligonucleotide
cuguacauuccagucaguc

SEQ ID NO: 1591754 - RNA, 19 nt, Artificial Sequence
  Description of Artificial Sequence: Synthetic oligonucleotide
auggcaccagauaaugguc

SEQ ID NO: 1591755 - RNA, 19 nt, Artificial Sequence
  Description of Artificial Sequence: Synthetic oligonucleotide
gaaaacaaucuggcaacuc

SEQ ID NO: 1591756 - RNA, 19 nt, Artificial Sequence
  Description of Artificial Sequence: Synthetic oligonucleotide
gaauucugaaguguagucu

SEQ ID NO: 1591757 - RNA, 19 nt, Artificial Sequence
  Description of Artificial Sequence: Synthetic oligonucleotide
aaggcgugguacaugcucu

SEQ ID NO: 1591758 - RNA, 19 nt, Artificial Sequence
  Description of Artificial Sequence: Synthetic oligonucleotide
aucaagugucauuuauuua

SEQ ID NO: 1591759 - RNA, 19 nt, Artificial Sequence
  Description of Artificial Sequence: Synthetic oligonucleotide
agcagaugcuccaagcugu

SEQ ID NO: 1591760 - RNA, 19 nt, Artificial Sequence
  Description of Artificial Sequence: Synthetic oligonucleotide
agcggcagcgcacccacag

SEQ ID NO: 1591761 - RNA, 19 nt, Artificial Sequence
  Description of Artificial Sequence: Synthetic oligonucleotide
ugccauuuuggauguccug

SEQ ID NO: 1591762 - RNA, 19 nt, Artificial Sequence
  Description of Artificial Sequence: Synthetic oligonucleotide
cagcagaugcuccaagcug

SEQ ID NO: 1591763 - RNA, 19 nt, Artificial Sequence
  Description of Artificial Sequence: Synthetic oligonucleotide
gucaauuuccccuuggcuu

SEQ ID NO: 1591764 - RNA, 19 nt, Artificial Sequence
  Description of Artificial Sequence: Synthetic oligonucleotide
ggcaacucaaauauguauc

SEQ ID NO: 1591765 - RNA, 19 nt, Artificial Sequence
  Description of Artificial Sequence: Synthetic oligonucleotide
cccguuuggugucacaugg

SEQ ID NO: 1591766 - RNA, 19 nt, Artificial Sequence
  Description of Artificial Sequence: Synthetic oligonucleotide
gccgaagcaauuccaaggc

SEQ ID NO: 1591767 - RNA, 19 nt, Artificial Sequence
  Description of Artificial Sequence: Synthetic oligonucleotide
aguuccacucggcugccca

SEQ ID NO: 1591768 - RNA, 19 nt, Artificial Sequence
  Description of Artificial Sequence: Synthetic oligonucleotide
aaaugccaacucaaacaga

SEQ ID NO: 1591769 - RNA, 19 nt, Artificial Sequence
  Description of Artificial Sequence: Synthetic oligonucleotide
guuuggugucacaugguac

SEQ ID NO: 1591770 - RNA, 19 nt, Artificial Sequence
  Description of Artificial Sequence: Synthetic oligonucleotide
caaaacugucuaaagugua

SEQ ID NO: 1591771 - RNA, 19 nt, Artificial Sequence
  Description of Artificial Sequence: Synthetic oligonucleotide
aaagggaaagcugcuuguu

SEQ ID NO: 1591772 - RNA, 19 nt, Artificial Sequence
  Description of Artificial Sequence: Synthetic oligonucleotide
gcugcuuguugccaugucc

SEQ ID NO: 1591773 - RNA, 19 nt, Artificial Sequence
  Description of Artificial Sequence: Synthetic oligonucleotide
aacaaucuggcaacucaaa

SEQ ID NO: 1591774 - RNA, 19 nt, Artificial Sequence
  Description of Artificial Sequence: Synthetic oligonucleotide
agucuucuauaagauacaa

SEQ ID NO: 1591775 - RNA, 19 nt, Artificial Sequence
  Description of Artificial Sequence: Synthetic oligonucleotide
gauccaccuuggcugauga

SEQ ID NO: 1591776 - RNA, 19 nt, Artificial Sequence
  Description of Artificial Sequence: Synthetic oligonucleotide
uaaccugguuauagcaaua

SEQ ID NO: 1591777 - RNA, 19 nt, Artificial Sequence
  Description of Artificial Sequence: Synthetic oligonucleotide
ucuugccucggcucggggu

SEQ ID NO: 1591778 - RNA, 19 nt, Artificial Sequence
  Description of Artificial Sequence: Synthetic oligonucleotide
ggcuuuauacaaaaugcca

SEQ ID NO: 1591779 - RNA, 19 nt, Artificial Sequence
  Description of Artificial Sequence: Synthetic oligonucleotide
augugagugcugcuuucug

SEQ ID NO: 1591780 - RNA, 19 nt, Artificial Sequence
  Description of Artificial Sequence: Synthetic oligonucleotide
uuuggauguccuguugcuc

SEQ ID NO: 1591781 - RNA, 19 nt, Artificial Sequence
  Description of Artificial Sequence: Synthetic oligonucleotide
agucagucugaagauggcu

SEQ ID NO: 1591782 - RNA, 19 nt, Artificial Sequence
  Description of Artificial Sequence: Synthetic oligonucleotide
agaguccauguuguuuggg

SEQ ID NO: 1591783 - RNA, 19 nt, Artificial Sequence
  Description of Artificial Sequence: Synthetic oligonucleotide
cauacuucaguagcuuuca

SEQ ID NO: 1591784 - RNA, 19 nt, Artificial Sequence
  Description of Artificial Sequence: Synthetic oligonucleotide
caaggcguccuucauggca

SEQ ID NO: 1591785 - RNA, 19 nt, Artificial Sequence
  Description of Artificial Sequence: Synthetic oligonucleotide
cagggaacucagaaccgac

SEQ ID NO: 1591786 - RNA, 19 nt, Artificial Sequence
  Description of Artificial Sequence: Synthetic oligonucleotide
uagccugcaacaccacaau

SEQ ID NO: 1591787 - RNA, 19 nt, Artificial Sequence
  Description of Artificial Sequence: Synthetic oligonucleotide
gcacauuguagguaaccug

SEQ ID NO: 1591788 - RNA, 19 nt, Artificial Sequence
  Description of Artificial Sequence: Synthetic oligonucleotide
caccuuggcugaugaaccc

SEQ ID NO: 1591789 - RNA, 19 nt, Artificial Sequence
  Description of Artificial Sequence: Synthetic oligonucleotide
agacuugagaaagacucua

SEQ ID NO: 1591790 - RNA, 19 nt, Artificial Sequence
  Description of Artificial Sequence: Synthetic oligonucleotide
uuccacucggcugcccacg

SEQ ID NO: 1591791 - RNA, 19 nt, Artificial Sequence
  Description of Artificial Sequence: Synthetic oligonucleotide
acugaucuccauagcaaga

SEQ ID NO: 1591792 - RNA, 19 nt, Artificial Sequence
  Description of Artificial Sequence: Synthetic oligonucleotide
aacucagaaccgacucuug

SEQ ID NO: 1591793 - RNA, 19 nt, Artificial Sequence
  Description of Artificial Sequence: Synthetic oligonucleotide
auguaucuaauaacacaga

SEQ ID NO: 1591794 - RNA, 19 nt, Artificial Sequence
  Description of Artificial Sequence: Synthetic oligonucleotide
aggauuccauccuguacau

SEQ ID NO: 1591795 - RNA, 19 nt, Artificial Sequence
  Description of Artificial Sequence: Synthetic oligonucleotide
ggaggauuccauccuguac

SEQ ID NO: 1591796 - RNA, 19 nt, Artificial Sequence
  Description of Artificial Sequence: Synthetic oligonucleotide
gcuccaagcugucuggaug

SEQ ID NO: 1591797 - RNA, 19 nt, Artificial Sequence
  Description of Artificial Sequence: Synthetic oligonucleotide
auauagagauggucuccaa

SEQ ID NO: 1591798 - RNA, 19 nt, Artificial Sequence
  Description of Artificial Sequence: Synthetic oligonucleotide
accagauaauggucauacu

SEQ ID NO: 1591799 - RNA, 19 nt, Artificial Sequence
  Description of Artificial Sequence: Synthetic oligonucleotide
ucggcaugcauuuccucuu

SEQ ID NO: 1591800 - RNA, 19 nt, Artificial Sequence
  Description of Artificial Sequence: Synthetic oligonucleotide
uaggagacacucggcauaa

SEQ ID NO: 1591801 - RNA, 19 nt, Artificial Sequence
  Description of Artificial Sequence: Synthetic oligonucleotide
guaggagacacucggcaua

SEQ ID NO: 1591802 - RNA, 19 nt, Artificial Sequence
  Description of Artificial Sequence: Synthetic oligonucleotide
cccaaggcgugguacaugc

SEQ ID NO: 1591803 - RNA, 19 nt, Artificial Sequence
  Description of Artificial Sequence: Synthetic oligonucleotide
ugauagccugcaacaccac

SEQ ID NO: 1591804 - RNA, 19 nt, Artificial Sequence
  Description of Artificial Sequence: Synthetic oligonucleotide
uggcccauggccgaagcaa

SEQ ID NO: 1591805 - RNA, 19 nt, Artificial Sequence
  Description of Artificial Sequence: Synthetic oligonucleotide
aggcgugguacaugcucuc

SEQ ID NO: 1591806 - RNA, 19 nt, Artificial Sequence
  Description of Artificial Sequence: Synthetic oligonucleotide
cggcauaacagauuucggc

SEQ ID NO: 1591807 - RNA, 19 nt, Artificial Sequence
  Description of Artificial Sequence: Synthetic oligonucleotide
cuaauuuugaguccaccuu

SEQ ID NO: 1591808 - RNA, 19 nt, Artificial Sequence
  Description of Artificial Sequence: Synthetic oligonucleotide
agacuccaaggaguaaucu

SEQ ID NO: 1591809 - RNA, 19 nt, Artificial Sequence
  Description of Artificial Sequence: Synthetic oligonucleotide
gaaccgacucuugccucgg

SEQ ID NO: 1591810 - RNA, 19 nt, Artificial Sequence
  Description of Artificial Sequence: Synthetic oligonucleotide
guaucccaaggcgugguac

SEQ ID NO: 1591811 - RNA, 19 nt, Artificial Sequence
  Description of Artificial Sequence: Synthetic oligonucleotide
cauggccgaagcaauucca

SEQ ID NO: 1591812 - RNA, 19 nt, Artificial Sequence
  Description of Artificial Sequence: Synthetic oligonucleotide
accgacucuugccucggcu

SEQ ID NO: 1591813 - RNA, 19 nt, Artificial Sequence
  Description of Artificial Sequence: Synthetic oligonucleotide
uguaucccaaggcguggua

SEQ ID NO: 1591814 - RNA, 19 nt, Artificial Sequence
  Description of Artificial Sequence: Synthetic oligonucleotide
uuucggcaugcauuuccuc

SEQ ID NO: 1591815 - RNA, 19 nt, Artificial Sequence
  Description of Artificial Sequence: Synthetic oligonucleotide
caggacugaucuccauagc

SEQ ID NO: 1591816 - RNA, 19 nt, Artificial Sequence
  Description of Artificial Sequence: Synthetic oligonucleotide
uggauguccuguugcucaa

SEQ ID NO: 1591817 - RNA, 19 nt, Artificial Sequence
  Description of Artificial Sequence: Synthetic oligonucleotide
gucauggaacacauuaaua

SEQ ID NO: 1591818 - RNA, 19 nt, Artificial Sequence
  Description of Artificial Sequence: Synthetic oligonucleotide
cugaaguguagucuagacu

SEQ ID NO: 1591819 - RNA, 19 nt, Artificial Sequence
  Description of Artificial Sequence: Synthetic oligonucleotide
gacucuugccucggcucgg

SEQ ID NO: 1591820 - RNA, 19 nt, Artificial Sequence
  Description of Artificial Sequence: Synthetic oligonucleotide
guaguuguuucuugcaguu

SEQ ID NO: 1591821 - RNA, 19 nt, Artificial Sequence
  Description of Artificial Sequence: Synthetic oligonucleotide
agauuucggcaugcauuuc

SEQ ID NO: 1591822 - RNA, 19 nt, Artificial Sequence
  Description of Artificial Sequence: Synthetic oligonucleotide
ugcccguuuggugucacau

SEQ ID NO: 1591823 - RNA, 19 nt, Artificial Sequence
  Description of Artificial Sequence: Synthetic oligonucleotide
caaugguacuguaucccaa

SEQ ID NO: 1591824 - RNA, 19 nt, Artificial Sequence
  Description of Artificial Sequence: Synthetic oligonucleotide
augaaccccacagcagaug

SEQ ID NO: 1591825 - RNA, 19 nt, Artificial Sequence
  Description of Artificial Sequence: Synthetic oligonucleotide
cagaaccgacucuugccuc

SEQ ID NO: 1591826 - RNA, 19 nt, Artificial Sequence
  Description of Artificial Sequence: Synthetic oligonucleotide
uggaugcccguuugguguc

SEQ ID NO: 1591827 - RNA, 19 nt, Artificial Sequence
  Description of Artificial Sequence: Synthetic oligonucleotide
ucuagacuccaaggaguaa

SEQ ID NO: 1591828 - RNA, 19 nt, Artificial Sequence
  Description of Artificial Sequence: Synthetic oligonucleotide
agcgcacccacagggaacu

SEQ ID NO: 1591829 - RNA, 19 nt, Artificial Sequence
  Description of Artificial Sequence: Synthetic oligonucleotide
uuggugucacaugguacaa

SEQ ID NO: 1591830 - RNA, 19 nt, Artificial Sequence
  Description of Artificial Sequence: Synthetic oligonucleotide
agaugaagggcugcuugaa

SEQ ID NO: 1591831 - RNA, 19 nt, Artificial Sequence
  Description of Artificial Sequence: Synthetic oligonucleotide
caaaucaauugcacauugu

SEQ ID NO: 1591832 - RNA, 19 nt, Artificial Sequence
  Description of Artificial Sequence: Synthetic oligonucleotide
uugccauguccgagggaga

SEQ ID NO: 1591833 - RNA, 19 nt, Artificial Sequence
  Description of Artificial Sequence: Synthetic oligonucleotide
gacuccaaggaguaaucuu

SEQ ID NO: 1591834 - RNA, 19 nt, Artificial Sequence
  Description of Artificial Sequence: Synthetic oligonucleotide
cugcguccaguuccacucg

SEQ ID NO: 1591835 - RNA, 19 nt, Artificial Sequence
  Description of Artificial Sequence: Synthetic oligonucleotide
ugccauguccgagggagau

SEQ ID NO: 1591836 - RNA, 19 nt, Artificial Sequence
  Description of Artificial Sequence: Synthetic oligonucleotide
uguagguaaccugguuaua

SEQ ID NO: 1591837 - RNA, 19 nt, Artificial Sequence
  Description of Artificial Sequence: Synthetic oligonucleotide
caaagggaaagcugcuugu

SEQ ID NO: 1591838 - RNA, 19 nt, Artificial Sequence
  Description of Artificial Sequence: Synthetic oligonucleotide
cagauuucggcaugcauuu

SEQ ID NO: 1591839 - RNA, 19 nt, Artificial Sequence
  Description of Artificial Sequence: Synthetic oligonucleotide
ugaguccaccuuugaugaa

SEQ ID NO: 1591840 - RNA, 19 nt, Artificial Sequence
  Description of Artificial Sequence: Synthetic oligonucleotide
cagagugaauggcaccaga

SEQ ID NO: 1591841 - RNA, 19 nt, Artificial Sequence
  Description of Artificial Sequence: Synthetic oligonucleotide
cagagucuucuauaagaua

SEQ ID NO: 1591842 - RNA, 19 nt, Artificial Sequence
  Description of Artificial Sequence: Synthetic oligonucleotide
gacacucggcauaacagau

SEQ ID NO: 1591843 - RNA, 19 nt, Artificial Sequence
  Description of Artificial Sequence: Synthetic oligonucleotide
gaacucagaaccgacucuu

SEQ ID NO: 1591844 - RNA, 19 nt, Artificial Sequence
  Description of Artificial Sequence: Synthetic oligonucleotide
cuagacuccaaggaguaau

SEQ ID NO: 1591845 - RNA, 19 nt, Artificial Sequence
  Description of Artificial Sequence: Synthetic oligonucleotide
gguaaccugguuauagcaa

SEQ ID NO: 1591846 - RNA, 19 nt, Artificial Sequence
  Description of Artificial Sequence: Synthetic oligonucleotide
cagcgcacccacagggaac

SEQ ID NO: 1591847 - RNA, 19 nt, Artificial Sequence
  Description of Artificial Sequence: Synthetic oligonucleotide
ccgagaaaggagacuugag

SEQ ID NO: 1591848 - RNA, 19 nt, Artificial Sequence
  Description of Artificial Sequence: Synthetic oligonucleotide
guuccacucggcugcccac

SEQ ID NO: 1591849 - RNA, 19 nt, Artificial Sequence
  Description of Artificial Sequence: Synthetic oligonucleotide
uaguuguuucuugcaguuu

SEQ ID NO: 1591850 - RNA, 19 nt, Artificial Sequence
  Description of Artificial Sequence: Synthetic oligonucleotide
acucuacaacugugcauuu

SEQ ID NO: 1591851 - RNA, 19 nt, Artificial Sequence
  Description of Artificial Sequence: Synthetic oligonucleotide
guacuguaucccaaggcgu

SEQ ID NO: 1591852 - RNA, 19 nt, Artificial Sequence
  Description of Artificial Sequence: Synthetic oligonucleotide
cuuggccaggacugaucuc

SEQ ID NO: 1591853 - RNA, 19 nt, Artificial Sequence
  Description of Artificial Sequence: Synthetic oligonucleotide
ccauggccgaagcaauucc

SEQ ID NO: 1591854 - RNA, 19 nt, Artificial Sequence
  Description of Artificial Sequence: Synthetic oligonucleotide
cauagcaagaguccauguu

SEQ ID NO: 1591855 - RNA, 19 nt, Artificial Sequence
  Description of Artificial Sequence: Synthetic oligonucleotide
acucggcauaacagauuuc

SEQ ID NO: 1591856 - RNA, 19 nt, Artificial Sequence
  Description of Artificial Sequence: Synthetic oligonucleotide
aguguagucuagacuccaa

SEQ ID NO: 1591857 - RNA, 19 nt, Artificial Sequence
  Description of Artificial Sequence: Synthetic oligonucleotide
auggccgaagcaauuccaa

SEQ ID NO: 1591858 - RNA, 19 nt, Artificial Sequence
  Description of Artificial Sequence: Synthetic oligonucleotide
cacucggcauaacagauuu

SEQ ID NO: 1591859 - RNA, 19 nt, Artificial Sequence
  Description of Artificial Sequence: Synthetic oligonucleotide
caauugcacauuguaggua

SEQ ID NO: 1591860 - RNA, 19 nt, Artificial Sequence
  Description of Artificial Sequence: Synthetic oligonucleotide
acaccacaaugguacugua

SEQ ID NO: 1591861 - RNA, 19 nt, Artificial Sequence
  Description of Artificial Sequence: Synthetic oligonucleotide
agguuugcaaggcguccuu

SEQ ID NO: 1591862 - RNA, 19 nt, Artificial Sequence
  Description of Artificial Sequence: Synthetic oligonucleotide
caaaugugagugcugcuuu

SEQ ID NO: 1591863 - RNA, 19 nt, Artificial Sequence
  Description of Artificial Sequence: Synthetic oligonucleotide
gucauacuucaguagcuuu

SEQ ID NO: 1591864 - RNA, 19 nt, Artificial Sequence
  Description of Artificial Sequence: Synthetic oligonucleotide
gcuugaauucugaagugua

SEQ ID NO: 1591865 - RNA, 19 nt, Artificial Sequence
  Description of Artificial Sequence: Synthetic oligonucleotide
ccgagggagauauagagau

SEQ ID NO: 1591866 - RNA, 19 nt, Artificial Sequence
  Description of Artificial Sequence: Synthetic oligonucleotide
gcagguuugcaaggcgucc

SEQ ID NO: 1591867 - RNA, 19 nt, Artificial Sequence
  Description of Artificial Sequence: Synthetic oligonucleotide
aggagacacucggcauaac

SEQ ID NO: 1591868 - RNA, 19 nt, Artificial Sequence
  Description of Artificial Sequence: Synthetic oligonucleotide
augccaacucaaacagagu

SEQ ID NO: 1591869 - RNA, 19 nt, Artificial Sequence
  Description of Artificial Sequence: Synthetic oligonucleotide
ggaacucagaaccgacucu

SEQ ID NO: 1591870 - RNA, 19 nt, Artificial Sequence
  Description of Artificial Sequence: Synthetic oligonucleotide
gaugcccguuuggugucac

SEQ ID NO: 1591871 - RNA, 19 nt, Artificial Sequence
  Description of Artificial Sequence: Synthetic oligonucleotide
gcauaacagauuucggcau

SEQ ID NO: 1591872 - RNA, 19 nt, Artificial Sequence
  Description of Artificial Sequence: Synthetic oligonucleotide
ccaaggaguaaucuuugua

SEQ ID NO: 1591873 - RNA, 19 nt, Artificial Sequence
  Description of Artificial Sequence: Synthetic oligonucleotide
cugcacaaaugugagugcu

SEQ ID NO: 1591874 - RNA, 19 nt, Artificial Sequence
  Description of Artificial Sequence: Synthetic oligonucleotide
gaugaaccccacagcagau

SEQ ID NO: 1591875 - RNA, 19 nt, Artificial Sequence
  Description of Artificial Sequence: Synthetic oligonucleotide
cgacucuugccucggcucg

SEQ ID NO: 1591876 - RNA, 19 nt, Artificial Sequence
  Description of Artificial Sequence: Synthetic oligonucleotide
aucccaaggcgugguacau

SEQ ID NO: 1591877 - RNA, 19 nt, Artificial Sequence
  Description of Artificial Sequence: Synthetic oligonucleotide
ccgacucuugccucggcuc

SEQ ID NO: 1591878 - RNA, 19 nt, Artificial Sequence
  Description of Artificial Sequence: Synthetic oligonucleotide
acacucggcauaacagauu

SEQ ID NO: 1591879 - RNA, 19 nt, Artificial Sequence
  Description of Artificial Sequence: Synthetic oligonucleotide
cuccuuggcccauggccga

SEQ ID NO: 1591880 - RNA, 19 nt, Artificial Sequence
  Description of Artificial Sequence: Synthetic oligonucleotide
gcccguuuggugucacaug

SEQ ID NO: 1591881 - RNA, 19 nt, Artificial Sequence
  Description of Artificial Sequence: Synthetic oligonucleotide
cacgagcgccauguucccc

SEQ ID NO: 1591882 - RNA, 19 nt, Artificial Sequence
  Description of Artificial Sequence: Synthetic oligonucleotide
cacaaaugugagugcugcu

SEQ ID NO: 1591883 - RNA, 19 nt, Artificial Sequence
  Description of Artificial Sequence: Synthetic oligonucleotide
ggcaugcauuuccucuuca

SEQ ID NO: 1591884 - RNA, 19 nt, Artificial Sequence
  Description of Artificial Sequence: Synthetic oligonucleotide
augcccguuuggugucaca

SEQ ID NO: 1591885 - RNA, 19 nt, Artificial Sequence
  Description of Artificial Sequence: Synthetic oligonucleotide
cauguuguuugggaggauu

SEQ ID NO: 1591886 - RNA, 19 nt, Artificial Sequence
  Description of Artificial Sequence: Synthetic oligonucleotide
acuacacaucacagaugau

SEQ ID NO: 1591887 - RNA, 19 nt, Artificial Sequence
  Description of Artificial Sequence: Synthetic oligonucleotide
aggcguccuucauggcaga

SEQ ID NO: 1591888 - RNA, 19 nt, Artificial Sequence
  Description of Artificial Sequence: Synthetic oligonucleotide
ggcgugguacaugcucucc

SEQ ID NO: 1591889 - RNA, 19 nt, Artificial Sequence
  Description of Artificial Sequence: Synthetic oligonucleotide
ggaacacauuaauaauauu

SEQ ID NO: 1591890 - RNA, 19 nt, Artificial Sequence
  Description of Artificial Sequence: Synthetic oligonucleotide
caccacaaugguacuguau

SEQ ID NO: 1591891 - RNA, 19 nt, Artificial Sequence
  Description of Artificial Sequence: Synthetic oligonucleotide
gguuugcaaggcguccuuc

SEQ ID NO: 1591892 - RNA, 19 nt, Artificial Sequence
  Description of Artificial Sequence: Synthetic oligonucleotide
gccaggacugaucuccaua

SEQ ID NO: 1591893 - RNA, 19 nt, Artificial Sequence
  Description of Artificial Sequence: Synthetic oligonucleotide
cuugccucggcucgggguu

SEQ ID NO: 1591894 - RNA, 19 nt, Artificial Sequence
  Description of Artificial Sequence: Synthetic oligonucleotide
gcagcgcacccacagggaa

SEQ ID NO: 1591895 - RNA, 19 nt, Artificial Sequence
  Description of Artificial Sequence: Synthetic oligonucleotide
gagcgccauguuccccuca

SEQ ID NO: 1591896 - RNA, 19 nt, Artificial Sequence
  Description of Artificial Sequence: Synthetic oligonucleotide
cccgagaaaggagacuuga

SEQ ID NO: 1591897 - RNA, 19 nt, Artificial Sequence
  Description of Artificial Sequence: Synthetic oligonucleotide
augauaccauugacacaaa

SEQ ID NO: 1591898 - RNA, 19 nt, Artificial Sequence
  Description of Artificial Sequence: Synthetic oligonucleotide
cgaagcaauuccaaggcau

SEQ ID NO: 1591899 - RNA, 19 nt, Artificial Sequence
  Description of Artificial Sequence: Synthetic oligonucleotide
ccacgagcgccauguuccc

SEQ ID NO: 1591900 - RNA, 19 nt, Artificial Sequence
  Description of Artificial Sequence: Synthetic oligonucleotide
caaugccucugcacacucu

SEQ ID NO: 1591901 - RNA, 19 nt, Artificial Sequence
  Description of Artificial Sequence: Synthetic oligonucleotide
ccgaagcaauuccaaggca

SEQ ID NO: 1591902 - RNA, 19 nt, Artificial Sequence
  Description of Artificial Sequence: Synthetic oligonucleotide
ugccucggcucgggguuca

SEQ ID NO: 1591903 - RNA, 19 nt, Artificial Sequence
  Description of Artificial Sequence: Synthetic oligonucleotide
cacacucuuccagaccacu

SEQ ID NO: 1591904 - RNA, 19 nt, Artificial Sequence
  Description of Artificial Sequence: Synthetic oligonucleotide
caacucaaacagagugaau

SEQ ID NO: 1591905 - RNA, 19 nt, Artificial Sequence
  Description of Artificial Sequence: Synthetic oligonucleotide
caucugcguccaguuccac

SEQ ID NO: 1591906 - RNA, 19 nt, Artificial Sequence
  Description of Artificial Sequence: Synthetic oligonucleotide
caguuccacucggcugccc

SEQ ID NO: 1591907 - RNA, 19 nt, Artificial Sequence
  Description of Artificial Sequence: Synthetic oligonucleotide
agcugucuggaugcccguu

SEQ ID NO: 1591908 - RNA, 19 nt, Artificial Sequence
  Description of Artificial Sequence: Synthetic oligonucleotide
uugccucggcucgggguuc

SEQ ID NO: 1591909 - RNA, 19 nt, Artificial Sequence
  Description of Artificial Sequence: Synthetic oligonucleotide
gggccuuuauggccuuguc

SEQ ID NO: 1591910 - RNA, 19 nt, Artificial Sequence
  Description of Artificial Sequence: Synthetic oligonucleotide
gcaacaccacaaugguacu

SEQ ID NO: 1591911 - RNA, 19 nt, Artificial Sequence
  Description of Artificial Sequence: Synthetic oligonucleotide
caaagucauggaacacauu

SEQ ID NO: 1591912 - RNA, 19 nt, Artificial Sequence
  Description of Artificial Sequence: Synthetic oligonucleotide
cguuuggugucacauggua

SEQ ID NO: 1591913 - RNA, 19 nt, Artificial Sequence
  Description of Artificial Sequence: Synthetic oligonucleotide
ccccgagaaaggagacuug

SEQ ID NO: 1591914 - RNA, 19 nt, Artificial Sequence
  Description of Artificial Sequence: Synthetic oligonucleotide
cuguaucccaaggcguggu

SEQ ID NO: 1591915 - RNA, 19 nt, Artificial Sequence
  Description of Artificial Sequence: Synthetic oligonucleotide
gcgccauguuccccucagc

SEQ ID NO: 1591916 - RNA, 19 nt, Artificial Sequence
  Description of Artificial Sequence: Synthetic oligonucleotide
ccauguccgagggagauau

SEQ ID NO: 1591917 - RNA, 19 nt, Artificial Sequence
  Description of Artificial Sequence: Synthetic oligonucleotide
cauguccgagggagauaua

SEQ ID NO: 1591918 - RNA, 19 nt, Artificial Sequence
  Description of Artificial Sequence: Synthetic oligonucleotide
ccauuuuggauguccuguu

SEQ ID NO: 1591919 - RNA, 19 nt, Artificial Sequence
  Description of Artificial Sequence: Synthetic oligonucleotide
ggcucgggguucagcccag

SEQ ID NO: 1591920 - RNA, 19 nt, Artificial Sequence
  Description of Artificial Sequence: Synthetic oligonucleotide
guccaccuuugaugaaguu

SEQ ID NO: 1591921 - RNA, 19 nt, Artificial Sequence
  Description of Artificial Sequence: Synthetic oligonucleotide
ggauguccuguugcucaaa

SEQ ID NO: 1591922 - RNA, 19 nt, Artificial Sequence
  Description of Artificial Sequence: Synthetic oligonucleotide
ggaugcccguuugguguca

SEQ ID NO: 1591923 - RNA, 19 nt, Artificial Sequence
  Description of Artificial Sequence: Synthetic oligonucleotide
cggcucgggguucagccca

SEQ ID NO: 1591924 - RNA, 19 nt, Artificial Sequence
  Description of Artificial Sequence: Synthetic oligonucleotide
ggcccauggccgaagcaau

SEQ ID NO: 1591925 - RNA, 19 nt, Artificial Sequence
  Description of Artificial Sequence: Synthetic oligonucleotide
ccguuuggugucacauggu

SEQ ID NO: 1591926 - RNA, 19 nt, Artificial Sequence
  Description of Artificial Sequence: Synthetic oligonucleotide
caccuuggccaggacugau

SEQ ID NO: 1591927 - RNA, 19 nt, Artificial Sequence
  Description of Artificial Sequence: Synthetic oligonucleotide
gccauguccgagggagaua

SEQ ID NO: 1591928 - RNA, 19 nt, Artificial Sequence
  Description of Artificial Sequence: Synthetic oligonucleotide
ccuguacauuccagucagu

SEQ ID NO: 1591929 - RNA, 19 nt, Artificial Sequence
  Description of Artificial Sequence: Synthetic oligonucleotide
ggauuccauccuguacauu

SEQ ID NO: 1591930 - RNA, 19 nt, Artificial Sequence
  Description of Artificial Sequence: Synthetic oligonucleotide
ccaaggcgugguacaugcu

SEQ ID NO: 1591931 - RNA, 19 nt, Artificial Sequence
  Description of Artificial Sequence: Synthetic oligonucleotide
gccucggcucgggguucag

SEQ ID NO: 1591932 - RNA, 19 nt, Artificial Sequence
  Description of Artificial Sequence: Synthetic oligonucleotide
gcgcacccacagggaacuc

SEQ ID NO: 1591933 - RNA, 19 nt, Artificial Sequence
  Description of Artificial Sequence: Synthetic oligonucleotide
uuaugaugcagccacaagg

SEQ ID NO: 1591934 - RNA, 19 nt, Artificial Sequence
  Description of Artificial Sequence: Synthetic oligonucleotide
acaauuaauccaucaaugc

SEQ ID NO: 1591935 - RNA, 19 nt, Artificial Sequence
  Description of Artificial Sequence: Synthetic oligonucleotide
uuagagaaagccuuuacug

SEQ ID NO: 1591936 - RNA, 19 nt, Artificial Sequence
  Description of Artificial Sequence: Synthetic oligonucleotide
gaagcgaauagcuagccgg

SEQ ID NO: 1591937 - RNA, 19 nt, Artificial Sequence
  Description of Artificial Sequence: Synthetic oligonucleotide
aagggacauagcuugagac

SEQ ID NO: 1591938 - RNA, 19 nt, Artificial Sequence
  Description of Artificial Sequence: Synthetic oligonucleotide
auagaaauggucaucgccc

SEQ ID NO: 1591939 - RNA, 19 nt, Artificial Sequence
  Description of Artificial Sequence: Synthetic oligonucleotide
uaugaugcagccacaaggc

SEQ ID NO: 1591940 - RNA, 19 nt, Artificial Sequence
  Description of Artificial Sequence: Synthetic oligonucleotide
uguagcucgaggaaggagc

SEQ ID NO: 1591941 - RNA, 19 nt, Artificial Sequence
  Description of Artificial Sequence: Synthetic oligonucleotide
acgaacacccucuacauag

SEQ ID NO: 1591942 - RNA, 19 nt, Artificial Sequence
  Description of Artificial Sequence: Synthetic oligonucleotide
ucacgcuugacccugacca

SEQ ID NO: 1591943 - RNA, 19 nt, Artificial Sequence
  Description of Artificial Sequence: Synthetic oligonucleotide
cuagugauaaccgugacug

SEQ ID NO: 1591944 - RNA, 19 nt, Artificial Sequence
  Description of Artificial Sequence: Synthetic oligonucleotide
uguuugugacaauuaaucc

SEQ ID NO: 1591945 - RNA, 19 nt, Artificial Sequence
  Description of Artificial Sequence: Synthetic oligonucleotide
aaccgugacuggcuuaugc

SEQ ID NO: 1591946 - RNA, 19 nt, Artificial Sequence
  Description of Artificial Sequence: Synthetic oligonucleotide
accucgacaaacccaaagc

SEQ ID NO: 1591947 - RNA, 19 nt, Artificial Sequence
  Description of Artificial Sequence: Synthetic oligonucleotide
gaauuuauggcccaggacu

SEQ ID NO: 1591948 - RNA, 19 nt, Artificial Sequence
  Description of Artificial Sequence: Synthetic oligonucleotide
agucaagggacauagcuug

SEQ ID NO: 1591949 - RNA, 19 nt, Artificial Sequence
  Description of Artificial Sequence: Synthetic oligonucleotide
gacaauuaauccaucaaug

SEQ ID NO: 1591950 - RNA, 19 nt, Artificial Sequence
  Description of Artificial Sequence: Synthetic oligonucleotide
cauagaaauggucaucgcc

SEQ ID NO: 1591951 - RNA, 19 nt, Artificial Sequence
  Description of Artificial Sequence: Synthetic oligonucleotide
agugauaaccgugacuggc

SEQ ID NO: 1591952 - RNA, 19 nt, Artificial Sequence
  Description of Artificial Sequence: Synthetic oligonucleotide
uacugucuagugauaaccg

SEQ ID NO: 1591953 - RNA, 19 nt, Artificial Sequence
  Description of Artificial Sequence: Synthetic oligonucleotide
auuagagaaagccuuuacu

SEQ ID NO: 1591954 - RNA, 19 nt, Artificial Sequence
  Description of Artificial Sequence: Synthetic oligonucleotide
agcauagaaauggucaucg

SEQ ID NO: 1591955 - RNA, 19 nt, Artificial Sequence
  Description of Artificial Sequence: Synthetic oligonucleotide
aauccaucaaugcccagcu

SEQ ID NO: 1591956 - RNA, 19 nt, Artificial Sequence
  Description of Artificial Sequence: Synthetic oligonucleotide
aauuuauggcccaggacuc

SEQ ID NO: 1591957 - RNA, 19 nt, Artificial Sequence
  Description of Artificial Sequence: Synthetic oligonucleotide
aauccguaccuguuaauga

SEQ ID NO: 1591958 - RNA, 19 nt, Artificial Sequence
  Description of Artificial Sequence: Synthetic oligonucleotide
uuacugucuagugauaacc

SEQ ID NO: 1591959 - RNA, 19 nt, Artificial Sequence
  Description of Artificial Sequence: Synthetic oligonucleotide
ugugacaauuaauccauca

SEQ ID NO: 1591960 - RNA, 19 nt, Artificial Sequence
  Description of Artificial Sequence: Synthetic oligonucleotide
cagguuuauucccagaggc

SEQ ID NO: 1591961 - RNA, 19 nt, Artificial Sequence
  Description of Artificial Sequence: Synthetic oligonucleotide
acgugaagcgaauagcuag

SEQ ID NO: 1591962 - RNA, 19 nt, Artificial Sequence
  Description of Artificial Sequence: Synthetic oligonucleotide
acgcagagcaccuuggagg

SEQ ID NO: 1591963 - RNA, 19 nt, Artificial Sequence
  Description of Artificial Sequence: Synthetic oligonucleotide
ucugggucgacagaucucg

SEQ ID NO: 1591964 - RNA, 19 nt, Artificial Sequence
  Description of Artificial Sequence: Synthetic oligonucleotide
auccguaccuguuaaugac

SEQ ID NO: 1591965 - RNA, 19 nt, Artificial Sequence
  Description of Artificial Sequence: Synthetic oligonucleotide
ucuagcagccucugcaggg

SEQ ID NO: 1591966 - RNA, 19 nt, Artificial Sequence
  Description of Artificial Sequence: Synthetic oligonucleotide
ugaaauguagcucgaggaa

SEQ ID NO: 1591967 - RNA, 19 nt, Artificial Sequence
  Description of Artificial Sequence: Synthetic oligonucleotide
ugucuagugauaaccguga

SEQ ID NO: 1591968 - RNA, 19 nt, Artificial Sequence
  Description of Artificial Sequence: Synthetic oligonucleotide
ugaagcgaauagcuagccg

SEQ ID NO: 1591969 - RNA, 19 nt, Artificial Sequence
  Description of Artificial Sequence: Synthetic oligonucleotide
cauagcuugagacagaucu

SEQ ID NO: 1591970 - RNA, 19 nt, Artificial Sequence
  Description of Artificial Sequence: Synthetic oligonucleotide
accuccgaugaucugcucc

SEQ ID NO: 1591971 - RNA, 19 nt, Artificial Sequence
  Description of Artificial Sequence: Synthetic oligonucleotide
uagaagugccuccagcuca

SEQ ID NO: 1591972 - RNA, 19 nt, Artificial Sequence
  Description of Artificial Sequence: Synthetic oligonucleotide
uccgaagucuuauucuucc

SEQ ID NO: 1591973 - RNA, 19 nt, Artificial Sequence
  Description of Artificial Sequence: Synthetic oligonucleotide
aauggucaucgcccguggc

SEQ ID NO: 1591974 - RNA, 19 nt, Artificial Sequence
  Description of Artificial Sequence: Synthetic oligonucleotide
agugagcuuguucugcuuc

SEQ ID NO: 1591975 - RNA, 19 nt, Artificial Sequence
  Description of Artificial Sequence: Synthetic oligonucleotide
acugcucacaccaccaacc

SEQ ID NO: 1591976 - RNA, 19 nt, Artificial Sequence
  Description of Artificial Sequence: Synthetic oligonucleotide
uggcugucagguaagaggu

SEQ ID NO: 1591977 - RNA, 19 nt, Artificial Sequence
  Description of Artificial Sequence: Synthetic oligonucleotide
aagccuuuacugucuagug

SEQ ID NO: 1591978 - RNA, 19 nt, Artificial Sequence
  Description of Artificial Sequence: Synthetic oligonucleotide
ucucagaacgcagagcacc

SEQ ID NO: 1591979 - RNA, 19 nt, Artificial Sequence
  Description of Artificial Sequence: Synthetic oligonucleotide
uaauccaucaaugcccagc

SEQ ID NO: 1591980 - RNA, 19 nt, Artificial Sequence
  Description of Artificial Sequence: Synthetic oligonucleotide
uauucagcauagaaauggu

SEQ ID NO: 1591981 - RNA, 19 nt, Artificial Sequence
  Description of Artificial Sequence: Synthetic oligonucleotide
uucucaucugucuccacgc

SEQ ID NO: 1591982 - RNA, 19 nt, Artificial Sequence
  Description of Artificial Sequence: Synthetic oligonucleotide
uguagaggccaucuacagc

SEQ ID NO: 1591983 - RNA, 19 nt, Artificial Sequence
  Description of Artificial Sequence: Synthetic oligonucleotide
uuuauucccagaggcagcc

SEQ ID NO: 1591984 - RNA, 19 nt, Artificial Sequence
  Description of Artificial Sequence: Synthetic oligonucleotide
cuuccuaccucgacaaacc

SEQ ID NO: 1591985 - RNA, 19 nt, Artificial Sequence
  Description of Artificial Sequence: Synthetic oligonucleotide
uaccucgacaaacccaaag

SEQ ID NO: 1591986 - RNA, 19 nt, Artificial Sequence
  Description of Artificial Sequence: Synthetic oligonucleotide
gaauccguaccuguuaaug

SEQ ID NO: 1591987 - RNA, 19 nt, Artificial Sequence
  Description of Artificial Sequence: Synthetic oligonucleotide
gaagucuuauucuucccca

SEQ ID NO: 1591988 - RNA, 19 nt, Artificial Sequence
  Description of Artificial Sequence: Synthetic oligonucleotide
accuguuaaugacagcuug

SEQ ID NO: 1591989 - RNA, 19 nt, Artificial Sequence
  Description of Artificial Sequence: Synthetic oligonucleotide
cucuuuuagaagugccucc

SEQ ID NO: 1591990 - RNA, 19 nt, Artificial Sequence
  Description of Artificial Sequence: Synthetic oligonucleotide
uuuacugucuagugauaac

SEQ ID NO: 1591991 - RNA, 19 nt, Artificial Sequence
  Description of Artificial Sequence: Synthetic oligonucleotide
cugaaauguagcucgagga

SEQ ID NO: 1591992 - RNA, 19 nt, Artificial Sequence
  Description of Artificial Sequence: Synthetic oligonucleotide
cugucuagugauaaccgug

SEQ ID NO: 1591993 - RNA, 19 nt, Artificial Sequence
  Description of Artificial Sequence: Synthetic oligonucleotide
uucaaagcgucccucuccu

SEQ ID NO: 1591994 - RNA, 19 nt, Artificial Sequence
  Description of Artificial Sequence: Synthetic oligonucleotide
guagaggccaucuacagcu

SEQ ID NO: 1591995 - RNA, 19 nt, Artificial Sequence
  Description of Artificial Sequence: Synthetic oligonucleotide
ucucucgccacacuggcaa

SEQ ID NO: 1591996 - RNA, 19 nt, Artificial Sequence
  Description of Artificial Sequence: Synthetic oligonucleotide
agcucgaggaaggagcccc

SEQ ID NO: 1591997 - RNA, 19 nt, Artificial Sequence
  Description of Artificial Sequence: Synthetic oligonucleotide
auaaugggaauccugccuu

SEQ ID NO: 1591998 - RNA, 19 nt, Artificial Sequence
  Description of Artificial Sequence: Synthetic oligonucleotide
ugucuccacgccaugcucc

SEQ ID NO: 1591999 - RNA, 19 nt, Artificial Sequence
  Description of Artificial Sequence: Synthetic oligonucleotide
aaaaccccgcucuuuuaga

SEQ ID NO: 1592000 - RNA, 19 nt, Artificial Sequence
  Description of Artificial Sequence: Synthetic oligonucleotide
cagauauucagcauagaaa

SEQ ID NO: 1592001 - RNA, 19 nt, Artificial Sequence
  Description of Artificial Sequence: Synthetic oligonucleotide
aauagcuagccggugggcu

SEQ ID NO: 1592002 - RNA, 19 nt, Artificial Sequence
  Description of Artificial Sequence: Synthetic oligonucleotide
uugaauccguaccuguuaa

SEQ ID NO: 1592003 - RNA, 19 nt, Artificial Sequence
  Description of Artificial Sequence: Synthetic oligonucleotide
aaccccgauaaugggaauc

SEQ ID NO: 1592004 - RNA, 19 nt, Artificial Sequence
  Description of Artificial Sequence: Synthetic oligonucleotide
agggacgugaagcgaauag

SEQ ID NO: 1592005 - RNA, 19 nt, Artificial Sequence
  Description of Artificial Sequence: Synthetic oligonucleotide
uggcuuaugcaguccagcc

SEQ ID NO: 1592006 - RNA, 19 nt, Artificial Sequence
  Description of Artificial Sequence: Synthetic oligonucleotide
caaagcgucccucuccugc

SEQ ID NO: 1592007 - RNA, 19 nt, Artificial Sequence
  Description of Artificial Sequence: Synthetic oligonucleotide
accccgauaaugggaaucc

SEQ ID NO: 1592008 - RNA, 19 nt, Artificial Sequence
  Description of Artificial Sequence: Synthetic oligonucleotide
gauucugggucuagcagcc

SEQ ID NO: 1592009 - RNA, 19 nt, Artificial Sequence
  Description of Artificial Sequence: Synthetic oligonucleotide
ucuccagcgcaucuugccc

SEQ ID NO: 1592010 - RNA, 19 nt, Artificial Sequence
  Description of Artificial Sequence: Synthetic oligonucleotide
gauaaugggaauccugccu

SEQ ID NO: 1592011 - RNA, 19 nt, Artificial Sequence
  Description of Artificial Sequence: Synthetic oligonucleotide
aaccccgcucuuuuagaag

SEQ ID NO: 1592012 - RNA, 19 nt, Artificial Sequence
  Description of Artificial Sequence: Synthetic oligonucleotide
cuugacccugaccacgacg

SEQ ID NO: 1592013 - RNA, 19 nt, Artificial Sequence
  Description of Artificial Sequence: Synthetic oligonucleotide
agggacauagcuugagaca

SEQ ID NO: 1592014 - RNA, 19 nt, Artificial Sequence
  Description of Artificial Sequence: Synthetic oligonucleotide
gaaauggucaucgcccgug

SEQ ID NO: 1592015 - RNA, 19 nt, Artificial Sequence
  Description of Artificial Sequence: Synthetic oligonucleotide
acugucuagugauaaccgu

SEQ ID NO: 1592016 - RNA, 19 nt, Artificial Sequence
  Description of Artificial Sequence: Synthetic oligonucleotide
uccguaccuguuaaugaca

SEQ ID NO: 1592017 - RNA, 19 nt, Artificial Sequence
  Description of Artificial Sequence: Synthetic oligonucleotide
uuucccuguaggcuccuca

SEQ ID NO: 1592018 - RNA, 19 nt, Artificial Sequence
  Description of Artificial Sequence: Synthetic oligonucleotide
uccuaccucgacaaaccca

SEQ ID NO: 1592019 - RNA, 19 nt, Artificial Sequence
  Description of Artificial Sequence: Synthetic oligonucleotide
cugcgcucccuucaaagcg

SEQ ID NO: 1592020 - RNA, 19 nt, Artificial Sequence
  Description of Artificial Sequence: Synthetic oligonucleotide
aaaccccgcucuuuuagaa

SEQ ID NO: 1592021 - RNA, 19 nt, Artificial Sequence
  Description of Artificial Sequence: Synthetic oligonucleotide
uagugauaaccgugacugg

SEQ ID NO: 1592022 - RNA, 19 nt, Artificial Sequence
  Description of Artificial Sequence: Synthetic oligonucleotide
ugggaauccugccuugagu

SEQ ID NO: 1592023 - RNA, 19 nt, Artificial Sequence
  Description of Artificial Sequence: Synthetic oligonucleotide
gccaucuacagcuuccccg

SEQ ID NO: 1592024 - RNA, 19 nt, Artificial Sequence
  Description of Artificial Sequence: Synthetic oligonucleotide
gggaauccugccuugagug

SEQ ID NO: 1592025 - RNA, 19 nt, Artificial Sequence
  Description of Artificial Sequence: Synthetic oligonucleotide
gggacauagcuugagacag

SEQ ID NO: 1592026 - RNA, 19 nt, Artificial Sequence
  Description of Artificial Sequence: Synthetic oligonucleotide
gucgacagaucucggagug

SEQ ID NO: 1592027 - RNA, 19 nt, Artificial Sequence
  Description of Artificial Sequence: Synthetic oligonucleotide
auucagcauagaaaugguc

SEQ ID NO: 1592028 - RNA, 19 nt, Artificial Sequence
  Description of Artificial Sequence: Synthetic oligonucleotide
aaucccuaccggauuucgg

SEQ ID NO: 1592029 - RNA, 19 nt, Artificial Sequence
  Description of Artificial Sequence: Synthetic oligonucleotide
gacagaucuuccucuuaug

SEQ ID NO: 1592030 - RNA, 19 nt, Artificial Sequence
  Description of Artificial Sequence: Synthetic oligonucleotide
uuccuaccucgacaaaccc

SEQ ID NO: 1592031 - RNA, 19 nt, Artificial Sequence
  Description of Artificial Sequence: Synthetic oligonucleotide
uucccuguaggcuccucag

SEQ ID NO: 1592032 - RNA, 19 nt, Artificial Sequence
  Description of Artificial Sequence: Synthetic oligonucleotide
uguugaauccguaccuguu

SEQ ID NO: 1592033 - RNA, 19 nt, Artificial Sequence
  Description of Artificial Sequence: Synthetic oligonucleotide
ggaaccgucaccuccgaug

SEQ ID NO: 1592034 - RNA, 19 nt, Artificial Sequence
  Description of Artificial Sequence: Synthetic oligonucleotide
ccgauaaugggaauccugc

SEQ ID NO: 1592035 - RNA, 19 nt, Artificial Sequence
  Description of Artificial Sequence: Synthetic oligonucleotide
ucggaauuuauggcccagg

SEQ ID NO: 1592036 - RNA, 19 nt, Artificial Sequence
  Description of Artificial Sequence: Synthetic oligonucleotide
gaaagccuuuacugucuag

SEQ ID NO: 1592037 - RNA, 19 nt, Artificial Sequence
  Description of Artificial Sequence: Synthetic oligonucleotide
gccggcaucagauauucag

SEQ ID NO: 1592038 - RNA, 19 nt, Artificial Sequence
  Description of Artificial Sequence: Synthetic oligonucleotide
agccuuuacugucuaguga

SEQ ID NO: 1592039 - RNA, 19 nt, Artificial Sequence
  Description of Artificial Sequence: Synthetic oligonucleotide
gugacaauuaauccaucaa

SEQ ID NO: 1592040 - RNA, 19 nt, Artificial Sequence
  Description of Artificial Sequence: Synthetic oligonucleotide
aacacccucuacauagucu

SEQ ID NO: 1592041 - RNA, 19 nt, Artificial Sequence
  Description of Artificial Sequence: Synthetic oligonucleotide
uuucggaauuuauggccca

SEQ ID NO: 1592042 - RNA, 19 nt, Artificial Sequence
  Description of Artificial Sequence: Synthetic oligonucleotide
agcccguggcuguugaauc

SEQ ID NO: 1592043 - RNA, 19 nt, Artificial Sequence
  Description of Artificial Sequence: Synthetic oligonucleotide
acacuuccuaccucgacaa

SEQ ID NO: 1592044 - RNA, 19 nt, Artificial Sequence
  Description of Artificial Sequence: Synthetic oligonucleotide
aaaucccgcagcaaucccu

SEQ ID NO: 1592045 - RNA, 19 nt, Artificial Sequence
  Description of Artificial Sequence: Synthetic oligonucleotide
gucaccuccgaugaucugc

SEQ ID NO: 1592046 - RNA, 19 nt, Artificial Sequence
  Description of Artificial Sequence: Synthetic oligonucleotide
uuccccagguuuauuccca

SEQ ID NO: 1592047 - RNA, 19 nt, Artificial Sequence
  Description of Artificial Sequence: Synthetic oligonucleotide
acaccaccaaccccgauaa

SEQ ID NO: 1592048 - RNA, 19 nt, Artificial Sequence
  Description of Artificial Sequence: Synthetic oligonucleotide
auggucaucgcccguggcu

SEQ ID NO: 1592049 - RNA, 19 nt, Artificial Sequence
  Description of Artificial Sequence: Synthetic oligonucleotide
acacgaacacccucuacau

SEQ ID NO: 1592050 - RNA, 19 nt, Artificial Sequence
  Description of Artificial Sequence: Synthetic oligonucleotide
ucucggaguggcuucccgc

SEQ ID NO: 1592051 - RNA, 19 nt, Artificial Sequence
  Description of Artificial Sequence: Synthetic oligonucleotide
accgugacuggcuuaugca

SEQ ID NO: 1592052 - RNA, 19 nt, Artificial Sequence
  Description of Artificial Sequence: Synthetic oligonucleotide
accgucaccuccgaugauc

SEQ ID NO: 1592053 - RNA, 19 nt, Artificial Sequence
  Description of Artificial Sequence: Synthetic oligonucleotide
aaugggaauccugccuuga

SEQ ID NO: 1592054 - RNA, 19 nt, Artificial Sequence
  Description of Artificial Sequence: Synthetic oligonucleotide
augggaauccugccuugag

SEQ ID NO: 1592055 - RNA, 19 nt, Artificial Sequence
  Description of Artificial Sequence: Synthetic oligonucleotide
uuaauccaucaaugcccag

SEQ ID NO: 1592056 - RNA, 19 nt, Artificial Sequence
  Description of Artificial Sequence: Synthetic oligonucleotide
cuagccggugggcugauuc

SEQ ID NO: 1592057 - RNA, 19 nt, Artificial Sequence
  Description of Artificial Sequence: Synthetic oligonucleotide
ggaggcggaacacucuggg

SEQ ID NO: 1592058 - RNA, 19 nt, Artificial Sequence
  Description of Artificial Sequence: Synthetic oligonucleotide
ugauaaccgugacuggcuu

SEQ ID NO: 1592059 - RNA, 19 nt, Artificial Sequence
  Description of Artificial Sequence: Synthetic oligonucleotide
ccucgacaaacccaaagcc

SEQ ID NO: 1592060 - RNA, 19 nt, Artificial Sequence
  Description of Artificial Sequence: Synthetic oligonucleotide
ugcgcucccuucaaagcgu

SEQ ID NO: 1592061 - RNA, 19 nt, Artificial Sequence
  Description of Artificial Sequence: Synthetic oligonucleotide
cuguguuccaccacugaga

SEQ ID NO: 1592062 - RNA, 19 nt, Artificial Sequence
  Description of Artificial Sequence: Synthetic oligonucleotide
gcgaauagcuagccggugg

SEQ ID NO: 1592063 - RNA, 19 nt, Artificial Sequence
  Description of Artificial Sequence: Synthetic oligonucleotide
auaaccgugacuggcuuau

SEQ ID NO: 1592064 - RNA, 19 nt, Artificial Sequence
  Description of Artificial Sequence: Synthetic oligonucleotide
ggaauuuauggcccaggac

SEQ ID NO: 1592065 - RNA, 19 nt, Artificial Sequence
  Description of Artificial Sequence: Synthetic oligonucleotide
aagcgaauagcuagccggu

SEQ ID NO: 1592066 - RNA, 19 nt, Artificial Sequence
  Description of Artificial Sequence: Synthetic oligonucleotide
ugggucgacagaucucgga

SEQ ID NO: 1592067 - RNA, 19 nt, Artificial Sequence
  Description of Artificial Sequence: Synthetic oligonucleotide
gggucgacagaucucggag

SEQ ID NO: 1592068 - RNA, 19 nt, Artificial Sequence
  Description of Artificial Sequence: Synthetic oligonucleotide
uucggaauuuauggcccag

SEQ ID NO: 1592069 - RNA, 19 nt, Artificial Sequence
  Description of Artificial Sequence: Synthetic oligonucleotide
uugagugaggguguacauc

SEQ ID NO: 1592070 - RNA, 19 nt, Artificial Sequence
  Description of Artificial Sequence: Synthetic oligonucleotide
guaagaggugaagagaagu

SEQ ID NO: 1592071 - RNA, 19 nt, Artificial Sequence
  Description of Artificial Sequence: Synthetic oligonucleotide
gacuggacacauucaccac

SEQ ID NO: 1592072 - RNA, 19 nt, Artificial Sequence
  Description of Artificial Sequence: Synthetic oligonucleotide
guugaauccguaccuguua

SEQ ID NO: 1592073 - RNA, 19 nt, Artificial Sequence
  Description of Artificial Sequence: Synthetic oligonucleotide
gugcuugucaaaucccgca

SEQ ID NO: 1592074 - RNA, 19 nt, Artificial Sequence
  Description of Artificial Sequence: Synthetic oligonucleotide
guagcucgaggaaggagcc

SEQ ID NO: 1592075 - RNA, 19 nt, Artificial Sequence
  Description of Artificial Sequence: Synthetic oligonucleotide
caccaaccccgauaauggg

SEQ ID NO: 1592076 - RNA, 19 nt, Artificial Sequence
  Description of Artificial Sequence: Synthetic oligonucleotide
caaaucccgcagcaauccc

SEQ ID NO: 1592077 - RNA, 19 nt, Artificial Sequence
  Description of Artificial Sequence: Synthetic oligonucleotide
agcaaucccuaccggauuu

SEQ ID NO: 1592078 - RNA, 19 nt, Artificial Sequence
  Description of Artificial Sequence: Synthetic oligonucleotide
ucgggcgacucacuguggu

SEQ ID NO: 1592079 - RNA, 19 nt, Artificial Sequence
  Description of Artificial Sequence: Synthetic oligonucleotide
ucgacagaucucggagugg

SEQ ID NO: 1592080 - RNA, 19 nt, Artificial Sequence
  Description of Artificial Sequence: Synthetic oligonucleotide
caaucccuaccggauuucg

SEQ ID NO: 1592081 - RNA, 19 nt, Artificial Sequence
  Description of Artificial Sequence: Synthetic oligonucleotide
cuuuacugucuagugauaa

SEQ ID NO: 1592082 - RNA, 19 nt, Artificial Sequence
  Description of Artificial Sequence: Synthetic oligonucleotide
uccgggaggcggaacacuc

SEQ ID NO: 1592083 - RNA, 19 nt, Artificial Sequence
  Description of Artificial Sequence: Synthetic oligonucleotide
uaccuguuaaugacagcuu

SEQ ID NO: 1592084 - RNA, 19 nt, Artificial Sequence
  Description of Artificial Sequence: Synthetic oligonucleotide
acgcuugacccugaccacg

SEQ ID NO: 1592085 - RNA, 19 nt, Artificial Sequence
  Description of Artificial Sequence: Synthetic oligonucleotide
gaauagcuagccggugggc

SEQ ID NO: 1592086 - RNA, 19 nt, Artificial Sequence
  Description of Artificial Sequence: Synthetic oligonucleotide
gagggccguguacagcugc

SEQ ID NO: 1592087 - RNA, 19 nt, Artificial Sequence
  Description of Artificial Sequence: Synthetic oligonucleotide
uccccagguuuauucccag

SEQ ID NO: 1592088 - RNA, 19 nt, Artificial Sequence
  Description of Artificial Sequence: Synthetic oligonucleotide
auguagcucgaggaaggag

SEQ ID NO: 1592089 - RNA, 19 nt, Artificial Sequence
  Description of Artificial Sequence: Synthetic oligonucleotide
gugaagcgaauagcuagcc

SEQ ID NO: 1592090 - RNA, 19 nt, Artificial Sequence
  Description of Artificial Sequence: Synthetic oligonucleotide
uuccagcaugucagagucc

SEQ ID NO: 1592091 - RNA, 19 nt, Artificial Sequence
  Description of Artificial Sequence: Synthetic oligonucleotide
ugaauccguaccuguuaau

SEQ ID NO: 1592092 - RNA, 19 nt, Artificial Sequence
  Description of Artificial Sequence: Synthetic oligonucleotide
gcaucagauauucagcaua

SEQ ID NO: 1592093 - RNA, 19 nt, Artificial Sequence
  Description of Artificial Sequence: Synthetic oligonucleotide
cugaccacgacggguggcc

SEQ ID NO: 1592094 - RNA, 19 nt, Artificial Sequence
  Description of Artificial Sequence: Synthetic oligonucleotide
ccuguguuccaccacugag

SEQ ID NO: 1592095 - RNA, 19 nt, Artificial Sequence
  Description of Artificial Sequence: Synthetic oligonucleotide
cacugcucacaccaccaac

SEQ ID NO: 1592096 - RNA, 19 nt, Artificial Sequence
  Description of Artificial Sequence: Synthetic oligonucleotide
cucacgcuugacccugacc

SEQ ID NO: 1592097 - RNA, 19 nt, Artificial Sequence
  Description of Artificial Sequence: Synthetic oligonucleotide
gucuuauucuuccccaggu

SEQ ID NO: 1592098 - RNA, 19 nt, Artificial Sequence
  Description of Artificial Sequence: Synthetic oligonucleotide
gucaaaucccgcagcaauc

SEQ ID NO: 1592099 - RNA, 19 nt, Artificial Sequence
  Description of Artificial Sequence: Synthetic oligonucleotide
gaacgcagagcaccuugga

SEQ ID NO: 1592100 - RNA, 19 nt, Artificial Sequence
  Description of Artificial Sequence: Synthetic oligonucleotide
cccgcagcaaucccuaccg

SEQ ID NO: 1592101 - RNA, 19 nt, Artificial Sequence
  Description of Artificial Sequence: Synthetic oligonucleotide
ucccuaccggauuucggaa

SEQ ID NO: 1592102 - RNA, 19 nt, Artificial Sequence
  Description of Artificial Sequence: Synthetic oligonucleotide
cgaagucuuauucuucccc

SEQ ID NO: 1592103 - RNA, 19 nt, Artificial Sequence
  Description of Artificial Sequence: Synthetic oligonucleotide
auuuauggcccaggacucu

SEQ ID NO: 1592104 - RNA, 19 nt, Artificial Sequence
  Description of Artificial Sequence: Synthetic oligonucleotide
uccgaugaucugcuccaau

SEQ ID NO: 1592105 - RNA, 19 nt, Artificial Sequence
  Description of Artificial Sequence: Synthetic oligonucleotide
ccggcaucagauauucagc

SEQ ID NO: 1592106 - RNA, 19 nt, Artificial Sequence
  Description of Artificial Sequence: Synthetic oligonucleotide
ucaaagcgucccucuccug

SEQ ID NO: 1592107 - RNA, 19 nt, Artificial Sequence
  Description of Artificial Sequence: Synthetic oligonucleotide
ccgugcuugucaaaucccg

SEQ ID NO: 1592108 - RNA, 19 nt, Artificial Sequence
  Description of Artificial Sequence: Synthetic oligonucleotide
accaaccccgauaauggga

SEQ ID NO: 1592109 - RNA, 19 nt, Artificial Sequence
  Description of Artificial Sequence: Synthetic oligonucleotide
ggugggcacguucuggaug

SEQ ID NO: 1592110 - RNA, 19 nt, Artificial Sequence
  Description of Artificial Sequence: Synthetic oligonucleotide
aaucccgcagcaaucccua

SEQ ID NO: 1592111 - RNA, 19 nt, Artificial Sequence
  Description of Artificial Sequence: Synthetic oligonucleotide
acacauucaccaccaggua

SEQ ID NO: 1592112 - RNA, 19 nt, Artificial Sequence
  Description of Artificial Sequence: Synthetic oligonucleotide
ccguaccuguuaaugacag

SEQ ID NO: 1592113 - RNA, 19 nt, Artificial Sequence
  Description of Artificial Sequence: Synthetic oligonucleotide
agcaugucagaguccugaa

SEQ ID NO: 1592114 - RNA, 19 nt, Artificial Sequence
  Description of Artificial Sequence: Synthetic oligonucleotide
cccaaagcccaguuuguag

SEQ ID NO: 1592115 - RNA, 19 nt, Artificial Sequence
  Description of Artificial Sequence: Synthetic oligonucleotide
auccugccuugagugaggg

SEQ ID NO: 1592116 - RNA, 19 nt, Artificial Sequence
  Description of Artificial Sequence: Synthetic oligonucleotide
acccucuacauagucugca

SEQ ID NO: 1592117 - RNA, 19 nt, Artificial Sequence
  Description of Artificial Sequence: Synthetic oligonucleotide
gggacgugaagcgaauagc

SEQ ID NO: 1592118 - RNA, 19 nt, Artificial Sequence
  Description of Artificial Sequence: Synthetic oligonucleotide
uugucaaaucccgcagcaa

SEQ ID NO: 1592119 - RNA, 19 nt, Artificial Sequence
  Description of Artificial Sequence: Synthetic oligonucleotide
ugacuggcuuaugcagucc

SEQ ID NO: 1592120 - RNA, 19 nt, Artificial Sequence
  Description of Artificial Sequence: Synthetic oligonucleotide
acucacugugguguuugug

SEQ ID NO: 1592121 - RNA, 19 nt, Artificial Sequence
  Description of Artificial Sequence: Synthetic oligonucleotide
uagccggugggcugauucu

SEQ ID NO: 1592122 - RNA, 19 nt, Artificial Sequence
  Description of Artificial Sequence: Synthetic oligonucleotide
cacccucuacauagucugc

SEQ ID NO: 1592123 - RNA, 19 nt, Artificial Sequence
  Description of Artificial Sequence: Synthetic oligonucleotide
guagccuguguuccaccac

SEQ ID NO: 1592124 - RNA, 19 nt, Artificial Sequence
  Description of Artificial Sequence: Synthetic oligonucleotide
gaccacgacggguggcccc

SEQ ID NO: 1592125 - RNA, 19 nt, Artificial Sequence
  Description of Artificial Sequence: Synthetic oligonucleotide
cccgauaaugggaauccug

SEQ ID NO: 1592126 - RNA, 19 nt, Artificial Sequence
  Description of Artificial Sequence: Synthetic oligonucleotide
agcuuccccgugcuuguca

SEQ ID NO: 1592127 - RNA, 19 nt, Artificial Sequence
  Description of Artificial Sequence: Synthetic oligonucleotide
ccucuacauagucugcagc

SEQ ID NO: 1592128 - RNA, 19 nt, Artificial Sequence
  Description of Artificial Sequence: Synthetic oligonucleotide
ggcacguucuggauggggc

SEQ ID NO: 1592129 - RNA, 19 nt, Artificial Sequence
  Description of Artificial Sequence: Synthetic oligonucleotide
uggcccguagccuguguuc

SEQ ID NO: 1592130 - RNA, 19 nt, Artificial Sequence
  Description of Artificial Sequence: Synthetic oligonucleotide
cgugaagcgaauagcuagc

SEQ ID NO: 1592131 - RNA, 19 nt, Artificial Sequence
  Description of Artificial Sequence: Synthetic oligonucleotide
cgaauagcuagccgguggg

SEQ ID NO: 1592132 - RNA, 19 nt, Artificial Sequence
  Description of Artificial Sequence: Synthetic oligonucleotide
ccuaccucgacaaacccaa

SEQ ID NO: 1592133 - RNA, 19 nt, Artificial Sequence
  Description of Artificial Sequence: Synthetic oligonucleotide
cacgcuugacccugaccac

SEQ ID NO: 1592134 - RNA, 19 nt, Artificial Sequence
  Description of Artificial Sequence: Synthetic oligonucleotide
cagcauagaaauggucauc

SEQ ID NO: 1592135 - RNA, 19 nt, Artificial Sequence
  Description of Artificial Sequence: Synthetic oligonucleotide
cugggucgacagaucucgg

SEQ ID NO: 1592136 - RNA, 19 nt, Artificial Sequence
  Description of Artificial Sequence: Synthetic oligonucleotide
ccgugacuggcuuaugcag

SEQ ID NO: 1592137 - RNA, 19 nt, Artificial Sequence
  Description of Artificial Sequence: Synthetic oligonucleotide
gacauagcuugagacagau

SEQ ID NO: 1592138 - RNA, 19 nt, Artificial Sequence
  Description of Artificial Sequence: Synthetic oligonucleotide
gcccaggacacgaacaccc

SEQ ID NO: 1592139 - RNA, 19 nt, Artificial Sequence
  Description of Artificial Sequence: Synthetic oligonucleotide
aucccgcagcaaucccuac

SEQ ID NO: 1592140 - RNA, 19 nt, Artificial Sequence
  Description of Artificial Sequence: Synthetic oligonucleotide
acccugaccacgacgggug

SEQ ID NO: 1592141 - RNA, 19 nt, Artificial Sequence
  Description of Artificial Sequence: Synthetic oligonucleotide
cacaccaccaaccccgaua

SEQ ID NO: 1592142 - RNA, 19 nt, Artificial Sequence
  Description of Artificial Sequence: Synthetic oligonucleotide
agcgaauagcuagccggug

SEQ ID NO: 1592143 - RNA, 19 nt, Artificial Sequence
  Description of Artificial Sequence: Synthetic oligonucleotide
uggucugggucgacagauc

SEQ ID NO: 1592144 - RNA, 19 nt, Artificial Sequence
  Description of Artificial Sequence: Synthetic oligonucleotide
ggcuuaugcaguccagcca

SEQ ID NO: 1592145 - RNA, 19 nt, Artificial Sequence
  Description of Artificial Sequence: Synthetic oligonucleotide
gacgugaagcgaauagcua

SEQ ID NO: 1592146 - RNA, 19 nt, Artificial Sequence
  Description of Artificial Sequence: Synthetic oligonucleotide
cccuguaggcuccucagac

SEQ ID NO: 1592147 - RNA, 19 nt, Artificial Sequence
  Description of Artificial Sequence: Synthetic oligonucleotide
caggacacgaacacccucu

SEQ ID NO: 1592148 - RNA, 19 nt, Artificial Sequence
  Description of Artificial Sequence: Synthetic oligonucleotide
uagcuagccggugggcuga

SEQ ID NO: 1592149 - RNA, 19 nt, Artificial Sequence
  Description of Artificial Sequence: Synthetic oligonucleotide
accuuggaggccagucggg

SEQ ID NO: 1592150 - RNA, 19 nt, Artificial Sequence
  Description of Artificial Sequence: Synthetic oligonucleotide
gcucucucgccacacuggc

SEQ ID NO: 1592151 - RNA, 19 nt, Artificial Sequence
  Description of Artificial Sequence: Synthetic oligonucleotide
gaagugccuccagcucacg

SEQ ID NO: 1592152 - RNA, 19 nt, Artificial Sequence
  Description of Artificial Sequence: Synthetic oligonucleotide
gccuuuacugucuagugau

SEQ ID NO: 1592153 - RNA, 19 nt, Artificial Sequence
  Description of Artificial Sequence: Synthetic oligonucleotide
uaccggauuucggaauuua

SEQ ID NO: 1592154 - RNA, 19 nt, Artificial Sequence
  Description of Artificial Sequence: Synthetic oligonucleotide
auagcuugagacagaucuu

SEQ ID NO: 1592155 - RNA, 19 nt, Artificial Sequence
  Description of Artificial Sequence: Synthetic oligonucleotide
ccgcucuuuuagaagugcc

SEQ ID NO: 1592156 - RNA, 19 nt, Artificial Sequence
  Description of Artificial Sequence: Synthetic oligonucleotide
cacaaggcuugcuugaguu

SEQ ID NO: 1592157 - RNA, 19 nt, Artificial Sequence
  Description of Artificial Sequence: Synthetic oligonucleotide
gagagcccguggcuguuga

SEQ ID NO: 1592158 - RNA, 19 nt, Artificial Sequence
  Description of Artificial Sequence: Synthetic oligonucleotide
ccgaagucuuauucuuccc

SEQ ID NO: 1592159 - RNA, 19 nt, Artificial Sequence
  Description of Artificial Sequence: Synthetic oligonucleotide
ucuggcccguagccugugu

SEQ ID NO: 1592160 - RNA, 19 nt, Artificial Sequence
  Description of Artificial Sequence: Synthetic oligonucleotide
aucgcccguggcugucagg

SEQ ID NO: 1592161 - RNA, 19 nt, Artificial Sequence
  Description of Artificial Sequence: Synthetic oligonucleotide
gaucucggaguggcuuccc

SEQ ID NO: 1592162 - RNA, 19 nt, Artificial Sequence
  Description of Artificial Sequence: Synthetic oligonucleotide
aggacacgaacacccucua

SEQ ID NO: 1592163 - RNA, 19 nt, Artificial Sequence
  Description of Artificial Sequence: Synthetic oligonucleotide
uagcucgaggaaggagccc

SEQ ID NO: 1592164 - RNA, 19 nt, Artificial Sequence
  Description of Artificial Sequence: Synthetic oligonucleotide
cucagaacgcagagcaccu

SEQ ID NO: 1592165 - RNA, 19 nt, Artificial Sequence
  Description of Artificial Sequence: Synthetic oligonucleotide
caucuacagcuuccccgug

SEQ ID NO: 1592166 - RNA, 19 nt, Artificial Sequence
  Description of Artificial Sequence: Synthetic oligonucleotide
gugauaaccgugacuggcu

SEQ ID NO: 1592167 - RNA, 19 nt, Artificial Sequence
  Description of Artificial Sequence: Synthetic oligonucleotide
cccgugcuugucaaauccc

SEQ ID NO: 1592168 - RNA, 19 nt, Artificial Sequence
  Description of Artificial Sequence: Synthetic oligonucleotide
ggacgugaagcgaauagcu

SEQ ID NO: 1592169 - RNA, 19 nt, Artificial Sequence
  Description of Artificial Sequence: Synthetic oligonucleotide
gggcaucuggcaggaaccg

SEQ ID NO: 1592170 - RNA, 19 nt, Artificial Sequence
  Description of Artificial Sequence: Synthetic oligonucleotide
ccaaccccgauaaugggaa

SEQ ID NO: 1592171 - RNA, 19 nt, Artificial Sequence
  Description of Artificial Sequence: Synthetic oligonucleotide
aggccagucgggcgacuca

SEQ ID NO: 1592172 - RNA, 19 nt, Artificial Sequence
  Description of Artificial Sequence: Synthetic oligonucleotide
ucaucgcccguggcuguca

SEQ ID NO: 1592173 - RNA, 19 nt, Artificial Sequence
  Description of Artificial Sequence: Synthetic oligonucleotide
ggucugggucgacagaucu

SEQ ID NO: 1592174 - RNA, 19 nt, Artificial Sequence
  Description of Artificial Sequence: Synthetic oligonucleotide
uaaccgugacuggcuuaug

SEQ ID NO: 1592175 - RNA, 19 nt, Artificial Sequence
  Description of Artificial Sequence: Synthetic oligonucleotide
gcccguggcuguugaaucc

SEQ ID NO: 1592176 - RNA, 19 nt, Artificial Sequence
  Description of Artificial Sequence: Synthetic oligonucleotide
cgacagaucucggaguggc

SEQ ID NO: 1592177 - RNA, 19 nt, Artificial Sequence
  Description of Artificial Sequence: Synthetic oligonucleotide
caucgcccguggcugucag

SEQ ID NO: 1592178 - RNA, 19 nt, Artificial Sequence
  Description of Artificial Sequence: Synthetic oligonucleotide
uccugccuugagugagggu

SEQ ID NO: 1592179 - RNA, 19 nt, Artificial Sequence
  Description of Artificial Sequence: Synthetic oligonucleotide
gucaagggacauagcuuga

SEQ ID NO: 1592180 - RNA, 19 nt, Artificial Sequence
  Description of Artificial Sequence: Synthetic oligonucleotide
ucagaacgcagagcaccuu

SEQ ID NO: 1592181 - RNA, 19 nt, Artificial Sequence
  Description of Artificial Sequence: Synthetic oligonucleotide
ggacacgaacacccucuac

SEQ ID NO: 1592182 - RNA, 19 nt, Artificial Sequence
  Description of Artificial Sequence: Synthetic oligonucleotide
gcacguucuggauggggca

SEQ ID NO: 1592183 - RNA, 19 nt, Artificial Sequence
  Description of Artificial Sequence: Synthetic oligonucleotide
accacgacggguggcccca

SEQ ID NO: 1592184 - RNA, 19 nt, Artificial Sequence
  Description of Artificial Sequence: Synthetic oligonucleotide
gaggcggaacacucugggu

SEQ ID NO: 1592185 - RNA, 19 nt, Artificial Sequence
  Description of Artificial Sequence: Synthetic oligonucleotide
ggccaucuacagcuucccc

SEQ ID NO: 1592186 - RNA, 19 nt, Artificial Sequence
  Description of Artificial Sequence: Synthetic oligonucleotide
ugggcugauucugggucua

SEQ ID NO: 1592187 - RNA, 19 nt, Artificial Sequence
  Description of Artificial Sequence: Synthetic oligonucleotide
acccaaagcccaguuugua

SEQ ID NO: 1592188 - RNA, 19 nt, Artificial Sequence
  Description of Artificial Sequence: Synthetic oligonucleotide
ccagucgggcgacucacug

SEQ ID NO: 1592189 - RNA, 19 nt, Artificial Sequence
  Description of Artificial Sequence: Synthetic oligonucleotide
ggcuucugcgcucccuuca

SEQ ID NO: 1592190 - RNA, 19 nt, Artificial Sequence
  Description of Artificial Sequence: Synthetic oligonucleotide
cugggucuagcagccucug

SEQ ID NO: 1592191 - RNA, 19 nt, Artificial Sequence
  Description of Artificial Sequence: Synthetic oligonucleotide
gaggccagucgggcgacuc

SEQ ID NO: 1592192 - RNA, 19 nt, Artificial Sequence
  Description of Artificial Sequence: Synthetic oligonucleotide
gacccugaccacgacgggu

SEQ ID NO: 1592193 - RNA, 19 nt, Artificial Sequence
  Description of Artificial Sequence: Synthetic oligonucleotide
gucugggucgacagaucuc

SEQ ID NO: 1592194 - RNA, 19 nt, Artificial Sequence
  Description of Artificial Sequence: Synthetic oligonucleotide
cacgacggguggccccagg

SEQ ID NO: 1592195 - RNA, 19 nt, Artificial Sequence
  Description of Artificial Sequence: Synthetic oligonucleotide
ccggugggcugauucuggg

SEQ ID NO: 1592196 - RNA, 19 nt, Artificial Sequence
  Description of Artificial Sequence: Synthetic oligonucleotide
gucgggcgacucacugugg

SEQ ID NO: 1592197 - RNA, 19 nt, Artificial Sequence
  Description of Artificial Sequence: Synthetic oligonucleotide
cccguggcuguugaauccg

SEQ ID NO: 1592198 - RNA, 19 nt, Artificial Sequence
  Description of Artificial Sequence: Synthetic oligonucleotide
ggucgacagaucucggagu

SEQ ID NO: 1592199 - RNA, 19 nt, Artificial Sequence
  Description of Artificial Sequence: Synthetic oligonucleotide
cacgaacacccucuacaua

SEQ ID NO: 1592200 - RNA, 19 nt, Artificial Sequence
  Description of Artificial Sequence: Synthetic oligonucleotide
ccaggacacgaacacccuc

SEQ ID NO: 1592201 - RNA, 19 nt, Artificial Sequence
  Description of Artificial Sequence: Synthetic oligonucleotide
gggccggcaucagauauuc

SEQ ID NO: 1592202 - RNA, 19 nt, Artificial Sequence
  Description of Artificial Sequence: Synthetic oligonucleotide
cguguacagcugcaccagg

SEQ ID NO: 1592203 - RNA, 19 nt, Artificial Sequence
  Description of Artificial Sequence: Synthetic oligonucleotide
agagcccguggcuguugaa

SEQ ID NO: 1592204 - RNA, 19 nt, Artificial Sequence
  Description of Artificial Sequence: Synthetic oligonucleotide
gacucacugugguguuugu

SEQ ID NO: 1592205 - RNA, 19 nt, Artificial Sequence
  Description of Artificial Sequence: Synthetic oligonucleotide
gccggugggcugauucugg

SEQ ID NO: 1592206 - RNA, 19 nt, Artificial Sequence
  Description of Artificial Sequence: Synthetic oligonucleotide
ugccuugagugagggugua

SEQ ID NO: 1592207 - RNA, 19 nt, Artificial Sequence
  Description of Artificial Sequence: Synthetic oligonucleotide
ggcaucagauauucagcau

SEQ ID NO: 1592208 - RNA, 19 nt, Artificial Sequence
  Description of Artificial Sequence: Synthetic oligonucleotide
cggaauuuauggcccagga

SEQ ID NO: 1592209 - RNA, 19 nt, Artificial Sequence
  Description of Artificial Sequence: Synthetic oligonucleotide
cuaccucgacaaacccaaa

SEQ ID NO: 1592210 - RNA, 19 nt, Artificial Sequence
  Description of Artificial Sequence: Synthetic oligonucleotide
gcuucccgcucaguccucc

SEQ ID NO: 1592211 - RNA, 19 nt, Artificial Sequence
  Description of Artificial Sequence: Synthetic oligonucleotide
gggcgacucacuguggugu

SEQ ID NO: 1592212 - RNA, 19 nt, Artificial Sequence
  Description of Artificial Sequence: Synthetic oligonucleotide
cgacucacugugguguuug

SEQ ID NO: 1592213 - RNA, 19 nt, Artificial Sequence
  Description of Artificial Sequence: Synthetic oligonucleotide
gcagcaaucccuaccggau

SEQ ID NO: 1592214 - RNA, 19 nt, Artificial Sequence
  Description of Artificial Sequence: Synthetic oligonucleotide
ggguguacaucucccggau

SEQ ID NO: 1592215 - RNA, 19 nt, Artificial Sequence
  Description of Artificial Sequence: Synthetic oligonucleotide
gucaucgcccguggcuguc

SEQ ID NO: 1592216 - RNA, 19 nt, Artificial Sequence
  Description of Artificial Sequence: Synthetic oligonucleotide
caccuccgaugaucugcuc

SEQ ID NO: 1592217 - RNA, 19 nt, Artificial Sequence
  Description of Artificial Sequence: Synthetic oligonucleotide
agggccggcaucagauauu

SEQ ID NO: 1592218 - RNA, 19 nt, Artificial Sequence
  Description of Artificial Sequence: Synthetic oligonucleotide
cagucgggcgacucacugu

SEQ ID NO: 1592219 - RNA, 19 nt, Artificial Sequence
  Description of Artificial Sequence: Synthetic oligonucleotide
gcaaucccuaccggauuuc

SEQ ID NO: 1592220 - RNA, 19 nt, Artificial Sequence
  Description of Artificial Sequence: Synthetic oligonucleotide
cccugaccacgacgggugg

SEQ ID NO: 1592221 - RNA, 19 nt, Artificial Sequence
  Description of Artificial Sequence: Synthetic oligonucleotide
cucgccacacuggcaaugu

SEQ ID NO: 1592222 - RNA, 19 nt, Artificial Sequence
  Description of Artificial Sequence: Synthetic oligonucleotide
ccuuuacugucuagugaua

SEQ ID NO: 1592223 - RNA, 19 nt, Artificial Sequence
  Description of Artificial Sequence: Synthetic oligonucleotide
gcucacgcuugacccugac

SEQ ID NO: 1592224 - RNA, 19 nt, Artificial Sequence
  Description of Artificial Sequence: Synthetic oligonucleotide
cauccuccgaagucuuauu

SEQ ID NO: 1592225 - RNA, 19 nt, Artificial Sequence
  Description of Artificial Sequence: Synthetic oligonucleotide
gggcugauucugggucuag

SEQ ID NO: 1592226 - RNA, 19 nt, Artificial Sequence
  Description of Artificial Sequence: Synthetic oligonucleotide
gcauccuccgaagucuuau

SEQ ID NO: 1592227 - RNA, 19 nt, Artificial Sequence
  Description of Artificial Sequence: Synthetic oligonucleotide
cagcaaucccuaccggauu

SEQ ID NO: 1592228 - RNA, 19 nt, Artificial Sequence
  Description of Artificial Sequence: Synthetic oligonucleotide
cgcucuuuuagaagugccu

SEQ ID NO: 1592229 - RNA, 19 nt, Artificial Sequence
  Description of Artificial Sequence: Synthetic oligonucleotide
cagggacgugaagcgaaua

SEQ ID NO: 1592230 - RNA, 19 nt, Artificial Sequence
  Description of Artificial Sequence: Synthetic oligonucleotide
gcccgcuuucucaucuguc

SEQ ID NO: 1592231 - RNA, 19 nt, Artificial Sequence
  Description of Artificial Sequence: Synthetic oligonucleotide
cacguucuggauggggcau

SEQ ID NO: 1592232 - RNA, 19 nt, Artificial Sequence
  Description of Artificial Sequence: Synthetic oligonucleotide
cuccgaugaucugcuccaa

SEQ ID NO: 1592233 - RNA, 19 nt, Artificial Sequence
  Description of Artificial Sequence: Synthetic oligonucleotide
cagcuuccccgugcuuguc

SEQ ID NO: 1592234 - RNA, 19 nt, Artificial Sequence
  Description of Artificial Sequence: Synthetic oligonucleotide
cgggcgacucacuguggug

SEQ ID NO: 1592235 - RNA, 19 nt, Artificial Sequence
  Description of Artificial Sequence: Synthetic oligonucleotide
cccgcucaguccucccauc

SEQ ID NO: 1592236 - RNA, 19 nt, Artificial Sequence
  Description of Artificial Sequence: Synthetic oligonucleotide
ggcccgcuuucucaucugu

SEQ ID NO: 1592237 - RNA, 19 nt, Artificial Sequence
  Description of Artificial Sequence: Synthetic oligonucleotide
ccgucaccuccgaugaucu

SEQ ID NO: 1592238 - RNA, 19 nt, Artificial Sequence
  Description of Artificial Sequence: Synthetic oligonucleotide
cuggcccguagccuguguu

SEQ ID NO: 1592239 - RNA, 19 nt, Artificial Sequence
  Description of Artificial Sequence: Synthetic oligonucleotide
cgcucaguccucccaucuc

SEQ ID NO: 1592240 - RNA, 19 nt, Artificial Sequence
  Description of Artificial Sequence: Synthetic oligonucleotide
ccuaccggauuucggaauu

SEQ ID NO: 1592241 - RNA, 19 nt, Artificial Sequence
  Description of Artificial Sequence: Synthetic oligonucleotide
ggucaucgcccguggcugu

SEQ ID NO: 1592242 - RNA, 19 nt, Artificial Sequence
  Description of Artificial Sequence: Synthetic oligonucleotide
caaccccgauaaugggaau

SEQ ID NO: 1592243 - RNA, 19 nt, Artificial Sequence
  Description of Artificial Sequence: Synthetic oligonucleotide
cuaccggauuucggaauuu

SEQ ID NO: 1592244 - RNA, 19 nt, Artificial Sequence
  Description of Artificial Sequence: Synthetic oligonucleotide
ccacugcucacaccaccaa

SEQ ID NO: 1592245 - RNA, 19 nt, Artificial Sequence
  Description of Artificial Sequence: Synthetic oligonucleotide
cucucgccacacuggcaau

SEQ ID NO: 1592246 - RNA, 19 nt, Artificial Sequence
  Description of Artificial Sequence: Synthetic oligonucleotide
cgucaccuccgaugaucug

SEQ ID NO: 1592247 - RNA, 19 nt, Artificial Sequence
  Description of Artificial Sequence: Synthetic oligonucleotide
agcuagccggugggcugau

SEQ ID NO: 1592248 - RNA, 19 nt, Artificial Sequence
  Description of Artificial Sequence: Synthetic oligonucleotide
cuccgggaggcggaacacu

SEQ ID NO: 1592249 - RNA, 19 nt, Artificial Sequence
  Description of Artificial Sequence: Synthetic oligonucleotide
gcgcucccuucaaagcguc

SEQ ID NO: 1592250 - RNA, 19 nt, Artificial Sequence
  Description of Artificial Sequence: Synthetic oligonucleotide
cccaaggaugauggcugca

SEQ ID NO: 1592251 - RNA, 19 nt, Artificial Sequence
  Description of Artificial Sequence: Synthetic oligonucleotide
cccuaccggauuucggaau

SEQ ID NO: 1592252 - RNA, 19 nt, Artificial Sequence
  Description of Artificial Sequence: Synthetic oligonucleotide
ccgcucaguccucccaucu

SEQ ID NO: 1592253 - RNA, 19 nt, Artificial Sequence
  Description of Artificial Sequence: Synthetic oligonucleotide
cggauggucugggucgaca

SEQ ID NO: 1592254 - RNA, 19 nt, Artificial Sequence
  Description of Artificial Sequence: Synthetic oligonucleotide
aggccccugccuggaucuu

SEQ ID NO: 1592255 - RNA, 19 nt, Artificial Sequence
  Description of Artificial Sequence: Synthetic oligonucleotide
cccggauggucugggucga

SEQ ID NO: 1592256 - RNA, 19 nt, Artificial Sequence
  Description of Artificial Sequence: Synthetic oligonucleotide
ggcuucccgcucaguccuc

SEQ ID NO: 1592257 - RNA, 19 nt, Artificial Sequence
  Description of Artificial Sequence: Synthetic oligonucleotide
cugagagcccguggcuguu

SEQ ID NO: 1592258 - RNA, 19 nt, Artificial Sequence
  Description of Artificial Sequence: Synthetic oligonucleotide
ccggauggucugggucgac

SEQ ID NO: 1592259 - RNA, 19 nt, Artificial Sequence
  Description of Artificial Sequence: Synthetic oligonucleotide
ccguggcugucagguaaga

SEQ ID NO: 1592260 - RNA, 19 nt, Artificial Sequence
  Description of Artificial Sequence: Synthetic oligonucleotide
ccguggcuguugaauccgu

SEQ ID NO: 1592261 - RNA, 19 nt, Artificial Sequence
  Description of Artificial Sequence: Synthetic oligonucleotide
ccacgacggguggccccag

SEQ ID NO: 1592262 - RNA, 19 nt, Artificial Sequence
  Description of Artificial Sequence: Synthetic oligonucleotide
ccccgauaaugggaauccu

SEQ ID NO: 1592263 - RNA, 19 nt, Artificial Sequence
  Description of Artificial Sequence: Synthetic oligonucleotide
gcgacucacugugguguuu

SEQ ID NO: 1592264 - RNA, 19 nt, Artificial Sequence
  Description of Artificial Sequence: Synthetic oligonucleotide
ccagcgcaucuugcccacu

SEQ ID NO: 1592265 - RNA, 19 nt, Artificial Sequence
  Description of Artificial Sequence: Synthetic oligonucleotide
gcuagccggugggcugauu

SEQ ID NO: 1592266 - RNA, 19 nt, Artificial Sequence
  Description of Artificial Sequence: Synthetic oligonucleotide
uuaacaagcgacuacuccg

SEQ ID NO: 1592267 - RNA, 19 nt, Artificial Sequence
  Description of Artificial Sequence: Synthetic oligonucleotide
ucuagugaagugcaaauug

SEQ ID NO: 1592268 - RNA, 19 nt, Artificial Sequence
  Description of Artificial Sequence: Synthetic oligonucleotide
cuauucacaaacuuuucgg

SEQ ID NO: 1592269 - RNA, 19 nt, Artificial Sequence
  Description of Artificial Sequence: Synthetic oligonucleotide
uauucacaaacuuuucggg

SEQ ID NO: 1592270 - RNA, 19 nt, Artificial Sequence
  Description of Artificial Sequence: Synthetic oligonucleotide
acaauguccguguagccgc

SEQ ID NO: 1592271 - RNA, 19 nt, Artificial Sequence
  Description of Artificial Sequence: Synthetic oligonucleotide
aacaguuucaggauauggg

SEQ ID NO: 1592272 - RNA, 19 nt, Artificial Sequence
  Description of Artificial Sequence: Synthetic oligonucleotide
uuugcgguaucccagggcc

SEQ ID NO: 1592273 - RNA, 19 nt, Artificial Sequence
  Description of Artificial Sequence: Synthetic oligonucleotide
aggauccucaaguucaggc

SEQ ID NO: 1592274 - RNA, 19 nt, Artificial Sequence
  Description of Artificial Sequence: Synthetic oligonucleotide
aacuuuucggguccagugg

SEQ ID NO: 1592275 - RNA, 19 nt, Artificial Sequence
  Description of Artificial Sequence: Synthetic oligonucleotide
aaacuuuucggguccagug

SEQ ID NO: 1592276 - RNA, 19 nt, Artificial Sequence
  Description of Artificial Sequence: Synthetic oligonucleotide
gauuuauugguuccuguug

SEQ ID NO: 1592277 - RNA, 19 nt, Artificial Sequence
  Description of Artificial Sequence: Synthetic oligonucleotide
cuagugaagugcaaauugg

SEQ ID NO: 1592278 - RNA, 19 nt, Artificial Sequence
  Description of Artificial Sequence: Synthetic oligonucleotide
auaaaucugcuuccagggc

SEQ ID NO: 1592279 - RNA, 19 nt, Artificial Sequence
  Description of Artificial Sequence: Synthetic oligonucleotide
ugggguauagccagagucg

SEQ ID NO: 1592280 - RNA, 19 nt, Artificial Sequence
  Description of Artificial Sequence: Synthetic oligonucleotide
uccugcucgagcaacaacc

SEQ ID NO: 1592281 - RNA, 19 nt, Artificial Sequence
  Description of Artificial Sequence: Synthetic oligonucleotide
agagccgagaccucauucc

SEQ ID NO: 1592282 - RNA, 19 nt, Artificial Sequence
  Description of Artificial Sequence: Synthetic oligonucleotide
acuuuucggguccaguggc

SEQ ID NO: 1592283 - RNA, 19 nt, Artificial Sequence
  Description of Artificial Sequence: Synthetic oligonucleotide
uuugggaugagguucucug

SEQ ID NO: 1592284 - RNA, 19 nt, Artificial Sequence
  Description of Artificial Sequence: Synthetic oligonucleotide
ucgauuucuccaaaggcug

SEQ ID NO: 1592285 - RNA, 19 nt, Artificial Sequence
  Description of Artificial Sequence: Synthetic oligonucleotide
ucaccuguugcacuuugcg

SEQ ID NO: 1592286 - RNA, 19 nt, Artificial Sequence
  Description of Artificial Sequence: Synthetic oligonucleotide
ucgagcaacaaccucacaa

SEQ ID NO: 1592287 - RNA, 19 nt, Artificial Sequence
  Description of Artificial Sequence: Synthetic oligonucleotide
aagugcaaauuggugaccg

SEQ ID NO: 1592288 - RNA, 19 nt, Artificial Sequence
  Description of Artificial Sequence: Synthetic oligonucleotide
aacuuaacaagcgacuacu

SEQ ID NO: 1592289 - RNA, 19 nt, Artificial Sequence
  Description of Artificial Sequence: Synthetic oligonucleotide
uuguugaucagguugucac

SEQ ID NO: 1592290 - RNA, 19 nt, Artificial Sequence
  Description of Artificial Sequence: Synthetic oligonucleotide
cuuaacaagcgacuacucc

SEQ ID NO: 1592291 - RNA, 19 nt, Artificial Sequence
  Description of Artificial Sequence: Synthetic oligonucleotide
aguggcucuagugaagugc

SEQ ID NO: 1592292 - RNA, 19 nt, Artificial Sequence
  Description of Artificial Sequence: Synthetic oligonucleotide
uggagauucgucucugggg

SEQ ID NO: 1592293 - RNA, 19 nt, Artificial Sequence
  Description of Artificial Sequence: Synthetic oligonucleotide
ucaucugguuuguugauca

SEQ ID NO: 1592294 - RNA, 19 nt, Artificial Sequence
  Description of Artificial Sequence: Synthetic oligonucleotide
aaaucugcuuccagggccc

SEQ ID NO: 1592295 - RNA, 19 nt, Artificial Sequence
  Description of Artificial Sequence: Synthetic oligonucleotide
acaguuucaggauaugggu

SEQ ID NO: 1592296 - RNA, 19 nt, Artificial Sequence
  Description of Artificial Sequence: Synthetic oligonucleotide
ucuccaaaggcugaggccc

SEQ ID NO: 1592297 - RNA, 19 nt, Artificial Sequence
  Description of Artificial Sequence: Synthetic oligonucleotide
ugggagacugguuuguucc

SEQ ID NO: 1592298 - RNA, 19 nt, Artificial Sequence
  Description of Artificial Sequence: Synthetic oligonucleotide
ugacacucgaguuuucccc

SEQ ID NO: 1592299 - RNA, 19 nt, Artificial Sequence
  Description of Artificial Sequence: Synthetic oligonucleotide
uggagaacuccaaacuacc

SEQ ID NO: 1592300 - RNA, 19 nt, Artificial Sequence
  Description of Artificial Sequence: Synthetic oligonucleotide
ucuagcaggaagcgaacug

SEQ ID NO: 1592301 - RNA, 19 nt, Artificial Sequence
  Description of Artificial Sequence: Synthetic oligonucleotide
ucuaucuuccucugccggg

SEQ ID NO: 1592302 - RNA, 19 nt, Artificial Sequence
  Description of Artificial Sequence: Synthetic oligonucleotide
ucacaaacuuuucgggucc

SEQ ID NO: 1592303 - RNA, 19 nt, Artificial Sequence
  Description of Artificial Sequence: Synthetic oligonucleotide
uucacaaacuuuucggguc

SEQ ID NO: 1592304 - RNA, 19 nt, Artificial Sequence
  Description of Artificial Sequence: Synthetic oligonucleotide
uauugguuccuguugggga

SEQ ID NO: 1592305 - RNA, 19 nt, Artificial Sequence
  Description of Artificial Sequence: Synthetic oligonucleotide
uucacucggggucugcagg

SEQ ID NO: 1592306 - RNA, 19 nt, Artificial Sequence
  Description of Artificial Sequence: Synthetic oligonucleotide
cucauucccacguugccgg

SEQ ID NO: 1592307 - RNA, 19 nt, Artificial Sequence
  Description of Artificial Sequence: Synthetic oligonucleotide
auucacaaacuuuucgggu

SEQ ID NO: 1592308 - RNA, 19 nt, Artificial Sequence
  Description of Artificial Sequence: Synthetic oligonucleotide
uucacgucaccgcagcugc

SEQ ID NO: 1592309 - RNA, 19 nt, Artificial Sequence
  Description of Artificial Sequence: Synthetic oligonucleotide
uuauugguuccuguugggg

SEQ ID NO: 1592310 - RNA, 19 nt, Artificial Sequence
  Description of Artificial Sequence: Synthetic oligonucleotide
cuuuacaugguucccucgc

SEQ ID NO: 1592311 - RNA, 19 nt, Artificial Sequence
  Description of Artificial Sequence: Synthetic oligonucleotide
caaauuggugaccggacgc

SEQ ID NO: 1592312 - RNA, 19 nt, Artificial Sequence
  Description of Artificial Sequence: Synthetic oligonucleotide
agcguguucacgucaccgc

SEQ ID NO: 1592313 - RNA, 19 nt, Artificial Sequence
  Description of Artificial Sequence: Synthetic oligonucleotide
uacaugguucccucgcacg

SEQ ID NO: 1592314 - RNA, 19 nt, Artificial Sequence
  Description of Artificial Sequence: Synthetic oligonucleotide
uagugaagugcaaauuggu

SEQ ID NO: 1592315 - RNA, 19 nt, Artificial Sequence
  Description of Artificial Sequence: Synthetic oligonucleotide
guuguugagugcuucaaga

SEQ ID NO: 1592316 - RNA, 19 nt, Artificial Sequence
  Description of Artificial Sequence: Synthetic oligonucleotide
ugucuuggggagaacagaa

SEQ ID NO: 1592317 - RNA, 19 nt, Artificial Sequence
  Description of Artificial Sequence: Synthetic oligonucleotide
uuuacaugguucccucgca

SEQ ID NO: 1592318 - RNA, 19 nt, Artificial Sequence
  Description of Artificial Sequence: Synthetic oligonucleotide
cuggagaacuccaaacuac

SEQ ID NO: 1592319 - RNA, 19 nt, Artificial Sequence
  Description of Artificial Sequence: Synthetic oligonucleotide
aagcgaacugucucgauuu

SEQ ID NO: 1592320 - RNA, 19 nt, Artificial Sequence
  Description of Artificial Sequence: Synthetic oligonucleotide
gagugcuucaagaaacugc

SEQ ID NO: 1592321 - RNA, 19 nt, Artificial Sequence
  Description of Artificial Sequence: Synthetic oligonucleotide
agauucgucucuggggucc

SEQ ID NO: 1592322 - RNA, 19 nt, Artificial Sequence
  Description of Artificial Sequence: Synthetic oligonucleotide
aacaagcgacuacuccgac

SEQ ID NO: 1592323 - RNA, 19 nt, Artificial Sequence
  Description of Artificial Sequence: Synthetic oligonucleotide
acaugguucccucgcacgg

SEQ ID NO: 1592324 - RNA, 19 nt, Artificial Sequence
  Description of Artificial Sequence: Synthetic oligonucleotide
cacguugccgguuugugag

SEQ ID NO: 1592325 - RNA, 19 nt, Artificial Sequence
  Description of Artificial Sequence: Synthetic oligonucleotide
gguccauugggguauagcc

SEQ ID NO: 1592326 - RNA, 19 nt, Artificial Sequence
  Description of Artificial Sequence: Synthetic oligonucleotide
ugcacuuugcgguauccca

SEQ ID NO: 1592327 - RNA, 19 nt, Artificial Sequence
  Description of Artificial Sequence: Synthetic oligonucleotide
uguugaucagguugucacc

SEQ ID NO: 1592328 - RNA, 19 nt, Artificial Sequence
  Description of Artificial Sequence: Synthetic oligonucleotide
aguggggugacacucgagu

SEQ ID NO: 1592329 - RNA, 19 nt, Artificial Sequence
  Description of Artificial Sequence: Synthetic oligonucleotide
aaacucaggagccucuauu

SEQ ID NO: 1592330 - RNA, 19 nt, Artificial Sequence
  Description of Artificial Sequence: Synthetic oligonucleotide
aggggaacagacugaggac

SEQ ID NO: 1592331 - RNA, 19 nt, Artificial Sequence
  Description of Artificial Sequence: Synthetic oligonucleotide
ugcaaauuggugaccggac

SEQ ID NO: 1592332 - RNA, 19 nt, Artificial Sequence
  Description of Artificial Sequence: Synthetic oligonucleotide
caggaagcgaacugucucg

SEQ ID NO: 1592333 - RNA, 19 nt, Artificial Sequence
  Description of Artificial Sequence: Synthetic oligonucleotide
ugaccggacgcucagcacu

SEQ ID NO: 1592334 - RNA, 19 nt, Artificial Sequence
  Description of Artificial Sequence: Synthetic oligonucleotide
aguugugggagacugguuu

SEQ ID NO: 1592335 - RNA, 19 nt, Artificial Sequence
  Description of Artificial Sequence: Synthetic oligonucleotide
gcaggcacagauuuauugg

SEQ ID NO: 1592336 - RNA, 19 nt, Artificial Sequence
  Description of Artificial Sequence: Synthetic oligonucleotide
acuccgacuggagaacucc

SEQ ID NO: 1592337 - RNA, 19 nt, Artificial Sequence
  Description of Artificial Sequence: Synthetic oligonucleotide
uuugugaggguuguugagu

SEQ ID NO: 1592338 - RNA, 19 nt, Artificial Sequence
  Description of Artificial Sequence: Synthetic oligonucleotide
aaaggcugaggcccagaug

SEQ ID NO: 1592339 - RNA, 19 nt, Artificial Sequence
  Description of Artificial Sequence: Synthetic oligonucleotide
ggagaacagaaauaaauaa

SEQ ID NO: 1592340 - RNA, 19 nt, Artificial Sequence
  Description of Artificial Sequence: Synthetic oligonucleotide
ugggucuccccaaacucag

SEQ ID NO: 1592341 - RNA, 19 nt, Artificial Sequence
  Description of Artificial Sequence: Synthetic oligonucleotide
aaauuggugaccggacgcu

SEQ ID NO: 1592342 - RNA, 19 nt, Artificial Sequence
  Description of Artificial Sequence: Synthetic oligonucleotide
guuugugaggguuguugag

SEQ ID NO: 1592343 - RNA, 19 nt, Artificial Sequence
  Description of Artificial Sequence: Synthetic oligonucleotide
cucuaucuuccucugccgg

SEQ ID NO: 1592344 - RNA, 19 nt, Artificial Sequence
  Description of Artificial Sequence: Synthetic oligonucleotide
uaucccagggccacggcga

SEQ ID NO: 1592345 - RNA, 19 nt, Artificial Sequence
  Description of Artificial Sequence: Synthetic oligonucleotide
agugcaaauuggugaccgg

SEQ ID NO: 1592346 - RNA, 19 nt, Artificial Sequence
  Description of Artificial Sequence: Synthetic oligonucleotide
ucugcaagcugagugggcu

SEQ ID NO: 1592347 - RNA, 19 nt, Artificial Sequence
  Description of Artificial Sequence: Synthetic oligonucleotide
caacuuaacaagcgacuac

SEQ ID NO: 1592348 - RNA, 19 nt, Artificial Sequence
  Description of Artificial Sequence: Synthetic oligonucleotide
uagaguagugguguucccc

SEQ ID NO: 1592349 - RNA, 19 nt, Artificial Sequence
  Description of Artificial Sequence: Synthetic oligonucleotide
guagugagggugcacuggc

SEQ ID NO: 1592350 - RNA, 19 nt, Artificial Sequence
  Description of Artificial Sequence: Synthetic oligonucleotide
guaucccagggccacggcg

SEQ ID NO: 1592351 - RNA, 19 nt, Artificial Sequence
  Description of Artificial Sequence: Synthetic oligonucleotide
caccuguugcacuuugcgg

SEQ ID NO: 1592352 - RNA, 19 nt, Artificial Sequence
  Description of Artificial Sequence: Synthetic oligonucleotide
ugguuuguucccugagugc

SEQ ID NO: 1592353 - RNA, 19 nt, Artificial Sequence
  Description of Artificial Sequence: Synthetic oligonucleotide
gacuacuccgacuggagaa

SEQ ID NO: 1592354 - RNA, 19 nt, Artificial Sequence
  Description of Artificial Sequence: Synthetic oligonucleotide
ugucuggagauucgucucu

SEQ ID NO: 1592355 - RNA, 19 nt, Artificial Sequence
  Description of Artificial Sequence: Synthetic oligonucleotide
gacagggaauccagggugg

SEQ ID NO: 1592356 - RNA, 19 nt, Artificial Sequence
  Description of Artificial Sequence: Synthetic oligonucleotide
accccagucuagcaggaag

SEQ ID NO: 1592357 - RNA, 19 nt, Artificial Sequence
  Description of Artificial Sequence: Synthetic oligonucleotide
gaugaggggagugaagcca

SEQ ID NO: 1592358 - RNA, 19 nt, Artificial Sequence
  Description of Artificial Sequence: Synthetic oligonucleotide
ugcccuguagugagggugc

SEQ ID NO: 1592359 - RNA, 19 nt, Artificial Sequence
  Description of Artificial Sequence: Synthetic oligonucleotide
gcaaauuggugaccggacg

SEQ ID NO: 1592360 - RNA, 19 nt, Artificial Sequence
  Description of Artificial Sequence: Synthetic oligonucleotide
caguuucaggauauggguc

SEQ ID NO: 1592361 - RNA, 19 nt, Artificial Sequence
  Description of Artificial Sequence: Synthetic oligonucleotide
ucacaauguccguguagcc

SEQ ID NO: 1592362 - RNA, 19 nt, Artificial Sequence
  Description of Artificial Sequence: Synthetic oligonucleotide
cacuuugcgguaucccagg

SEQ ID NO: 1592363 - RNA, 19 nt, Artificial Sequence
  Description of Artificial Sequence: Synthetic oligonucleotide
augguucccucgcacggcg

SEQ ID NO: 1592364 - RNA, 19 nt, Artificial Sequence
  Description of Artificial Sequence: Synthetic oligonucleotide
ugccucaagccaguugugg

SEQ ID NO: 1592365 - RNA, 19 nt, Artificial Sequence
  Description of Artificial Sequence: Synthetic oligonucleotide
ggugaggucagcuccccgg

SEQ ID NO: 1592366 - RNA, 19 nt, Artificial Sequence
  Description of Artificial Sequence: Synthetic oligonucleotide
guugugggagacugguuug

SEQ ID NO: 1592367 - RNA, 19 nt, Artificial Sequence
  Description of Artificial Sequence: Synthetic oligonucleotide
uggacagacagggaaucca

SEQ ID NO: 1592368 - RNA, 19 nt, Artificial Sequence
  Description of Artificial Sequence: Synthetic oligonucleotide
gguauagccagagucggcc

SEQ ID NO: 1592369 - RNA, 19 nt, Artificial Sequence
  Description of Artificial Sequence: Synthetic oligonucleotide
ugagggugcacuggcaucu

SEQ ID NO: 1592370 - RNA, 19 nt, Artificial Sequence
  Description of Artificial Sequence: Synthetic oligonucleotide
gugacacucgaguuuuccc

SEQ ID NO: 1592371 - RNA, 19 nt, Artificial Sequence
  Description of Artificial Sequence: Synthetic oligonucleotide
acuuugcgguaucccaggg

SEQ ID NO: 1592372 - RNA, 19 nt, Artificial Sequence
  Description of Artificial Sequence: Synthetic oligonucleotide
aauguccguguagccgccc

SEQ ID NO: 1592373 - RNA, 19 nt, Artificial Sequence
  Description of Artificial Sequence: Synthetic oligonucleotide
acucggggucugcaggccc

SEQ ID NO: 1592374 - RNA, 19 nt, Artificial Sequence
  Description of Artificial Sequence: Synthetic oligonucleotide
accacagugucagagcugu

SEQ ID NO: 1592375 - RNA, 19 nt, Artificial Sequence
  Description of Artificial Sequence: Synthetic oligonucleotide
agcaacaaccucacaaugu

SEQ ID NO: 1592376 - RNA, 19 nt, Artificial Sequence
  Description of Artificial Sequence: Synthetic oligonucleotide
cucuauucacaaacuuuuc

SEQ ID NO: 1592377 - RNA, 19 nt, Artificial Sequence
  Description of Artificial Sequence: Synthetic oligonucleotide
uauagccagagucggccuc

SEQ ID NO: 1592378 - RNA, 19 nt, Artificial Sequence
  Description of Artificial Sequence: Synthetic oligonucleotide
cucgauuucuccaaaggcu

SEQ ID NO: 1592379 - RNA, 19 nt, Artificial Sequence
  Description of Artificial Sequence: Synthetic oligonucleotide
acgcucaucugguuuguug

SEQ ID NO: 1592380 - RNA, 19 nt, Artificial Sequence
  Description of Artificial Sequence: Synthetic oligonucleotide
cagucuagcaggaagcgaa

SEQ ID NO: 1592381 - RNA, 19 nt, Artificial Sequence
  Description of Artificial Sequence: Synthetic oligonucleotide
ugaggggagugaagccacg

SEQ ID NO: 1592382 - RNA, 19 nt, Artificial Sequence
  Description of Artificial Sequence: Synthetic oligonucleotide
cuuugcgguaucccagggc

SEQ ID NO: 1592383 - RNA, 19 nt, Artificial Sequence
  Description of Artificial Sequence: Synthetic oligonucleotide
uuccuguuggggagggccc

SEQ ID NO: 1592384 - RNA, 19 nt, Artificial Sequence
  Description of Artificial Sequence: Synthetic oligonucleotide
augaggggagugaagccac

SEQ ID NO: 1592385 - RNA, 19 nt, Artificial Sequence
  Description of Artificial Sequence: Synthetic oligonucleotide
cacggcgagguccauuggg

SEQ ID NO: 1592386 - RNA, 19 nt, Artificial Sequence
  Description of Artificial Sequence: Synthetic oligonucleotide
gagacugguuuguucccug

SEQ ID NO: 1592387 - RNA, 19 nt, Artificial Sequence
  Description of Artificial Sequence: Synthetic oligonucleotide
ugccuggguucccaacagg

SEQ ID NO: 1592388 - RNA, 19 nt, Artificial Sequence
  Description of Artificial Sequence: Synthetic oligonucleotide
cacuuuacaugguucccuc

SEQ ID NO: 1592389 - RNA, 19 nt, Artificial Sequence
  Description of Artificial Sequence: Synthetic oligonucleotide
acaagcgacuacuccgacu

SEQ ID NO: 1592390 - RNA, 19 nt, Artificial Sequence
  Description of Artificial Sequence: Synthetic oligonucleotide
guuggcucagcuccccuug

SEQ ID NO: 1592391 - RNA, 19 nt, Artificial Sequence
  Description of Artificial Sequence: Synthetic oligonucleotide
gaagugcaaauuggugacc

SEQ ID NO: 1592392 - RNA, 19 nt, Artificial Sequence
  Description of Artificial Sequence: Synthetic oligonucleotide
agcgaacugucucgauuuc

SEQ ID NO: 1592393 - RNA, 19 nt, Artificial Sequence
  Description of Artificial Sequence: Synthetic oligonucleotide
gccaguaaggccuccacac

SEQ ID NO: 1592394 - RNA, 19 nt, Artificial Sequence
  Description of Artificial Sequence: Synthetic oligonucleotide
gaccucauucccacguugc

SEQ ID NO: 1592395 - RNA, 19 nt, Artificial Sequence
  Description of Artificial Sequence: Synthetic oligonucleotide
uggggugacacucgaguuu

SEQ ID NO: 1592396 - RNA, 19 nt, Artificial Sequence
  Description of Artificial Sequence: Synthetic oligonucleotide
cugucuggagauucgucuc

SEQ ID NO: 1592397 - RNA, 19 nt, Artificial Sequence
  Description of Artificial Sequence: Synthetic oligonucleotide
uucccaacaggcugucuuc

SEQ ID NO: 1592398 - RNA, 19 nt, Artificial Sequence
  Description of Artificial Sequence: Synthetic oligonucleotide
uggggagaacagaaauaaa

SEQ ID NO: 1592399 - RNA, 19 nt, Artificial Sequence
  Description of Artificial Sequence: Synthetic oligonucleotide
uucaagaaacugcccugua

SEQ ID NO: 1592400 - RNA, 19 nt, Artificial Sequence
  Description of Artificial Sequence: Synthetic oligonucleotide
cauugggguauagccagag

SEQ ID NO: 1592401 - RNA, 19 nt, Artificial Sequence
  Description of Artificial Sequence: Synthetic oligonucleotide
cuucacucggggucugcag

SEQ ID NO: 1592402 - RNA, 19 nt, Artificial Sequence
  Description of Artificial Sequence: Synthetic oligonucleotide
guguucacgucaccgcagc

SEQ ID NO: 1592403 - RNA, 19 nt, Artificial Sequence
  Description of Artificial Sequence: Synthetic oligonucleotide
ugaucagguugucacccuu

SEQ ID NO: 1592404 - RNA, 19 nt, Artificial Sequence
  Description of Artificial Sequence: Synthetic oligonucleotide
gccucaagccaguuguggg

SEQ ID NO: 1592405 - RNA, 19 nt, Artificial Sequence
  Description of Artificial Sequence: Synthetic oligonucleotide
gcugaggcccagaugaggg

SEQ ID NO: 1592406 - RNA, 19 nt, Artificial Sequence
  Description of Artificial Sequence: Synthetic oligonucleotide
uggugaggucagcuccccg

SEQ ID NO: 1592407 - RNA, 19 nt, Artificial Sequence
  Description of Artificial Sequence: Synthetic oligonucleotide
cagcguguucacgucaccg

SEQ ID NO: 1592408 - RNA, 19 nt, Artificial Sequence
  Description of Artificial Sequence: Synthetic oligonucleotide
guucacgucaccgcagcug

SEQ ID NO: 1592409 - RNA, 19 nt, Artificial Sequence
  Description of Artificial Sequence: Synthetic oligonucleotide
ugccgguuugugaggguug

SEQ ID NO: 1592410 - RNA, 19 nt, Artificial Sequence
  Description of Artificial Sequence: Synthetic oligonucleotide
uuucggguccaguggcucu

SEQ ID NO: 1592411 - RNA, 19 nt, Artificial Sequence
  Description of Artificial Sequence: Synthetic oligonucleotide
guagaguagugguguuccc

SEQ ID NO: 1592412 - RNA, 19 nt, Artificial Sequence
  Description of Artificial Sequence: Synthetic oligonucleotide
auugggguauagccagagu

SEQ ID NO: 1592413 - RNA, 19 nt, Artificial Sequence
  Description of Artificial Sequence: Synthetic oligonucleotide
agacugaggaccacagugu

SEQ ID NO: 1592414 - RNA, 19 nt, Artificial Sequence
  Description of Artificial Sequence: Synthetic oligonucleotide
ggauccucaaguucaggca

SEQ ID NO: 1592415 - RNA, 19 nt, Artificial Sequence
  Description of Artificial Sequence: Synthetic oligonucleotide
uugcacuuugcgguauccc

SEQ ID NO: 1592416 - RNA, 19 nt, Artificial Sequence
  Description of Artificial Sequence: Synthetic oligonucleotide
uccgacuggagaacuccaa

SEQ ID NO: 1592417 - RNA, 19 nt, Artificial Sequence
  Description of Artificial Sequence: Synthetic oligonucleotide
cuuggggagaacagaaaua

SEQ ID NO: 1592418 - RNA, 19 nt, Artificial Sequence
  Description of Artificial Sequence: Synthetic oligonucleotide
agccucuauucacaaacuu

SEQ ID NO: 1592419 - RNA, 19 nt, Artificial Sequence
  Description of Artificial Sequence: Synthetic oligonucleotide
gguuugugaggguuguuga

SEQ ID NO: 1592420 - RNA, 19 nt, Artificial Sequence
  Description of Artificial Sequence: Synthetic oligonucleotide
uagugagggugcacuggca

SEQ ID NO: 1592421 - RNA, 19 nt, Artificial Sequence
  Description of Artificial Sequence: Synthetic oligonucleotide
acggcgagguccauugggg

SEQ ID NO: 1592422 - RNA, 19 nt, Artificial Sequence
  Description of Artificial Sequence: Synthetic oligonucleotide
cuguagugagggugcacug

SEQ ID NO: 1592423 - RNA, 19 nt, Artificial Sequence
  Description of Artificial Sequence: Synthetic oligonucleotide
caaccucacaauguccgug

SEQ ID NO: 1592424 - RNA, 19 nt, Artificial Sequence
  Description of Artificial Sequence: Synthetic oligonucleotide
acguugccgguuugugagg

SEQ ID NO: 1592425 - RNA, 19 nt, Artificial Sequence
  Description of Artificial Sequence: Synthetic oligonucleotide
uuuucggguccaguggcuc

SEQ ID NO: 1592426 - RNA, 19 nt, Artificial Sequence
  Description of Artificial Sequence: Synthetic oligonucleotide
aaacugcccuguagugagg

SEQ ID NO: 1592427 - RNA, 19 nt, Artificial Sequence
  Description of Artificial Sequence: Synthetic oligonucleotide
guugcacuuugcgguaucc

SEQ ID NO: 1592428 - RNA, 19 nt, Artificial Sequence
  Description of Artificial Sequence: Synthetic oligonucleotide
aggggagugaagccacgcu

SEQ ID NO: 1592429 - RNA, 19 nt, Artificial Sequence
  Description of Artificial Sequence: Synthetic oligonucleotide
agacugguuuguucccuga

SEQ ID NO: 1592430 - RNA, 19 nt, Artificial Sequence
  Description of Artificial Sequence: Synthetic oligonucleotide
guguagccgcccaugcugg

SEQ ID NO: 1592431 - RNA, 19 nt, Artificial Sequence
  Description of Artificial Sequence: Synthetic oligonucleotide
ucacccuuccgcagauggu

SEQ ID NO: 1592432 - RNA, 19 nt, Artificial Sequence
  Description of Artificial Sequence: Synthetic oligonucleotide
cagagccgagaccucauuc

SEQ ID NO: 1592433 - RNA, 19 nt, Artificial Sequence
  Description of Artificial Sequence: Synthetic oligonucleotide
acgucaccgcagcugcagg

SEQ ID NO: 1592434 - RNA, 19 nt, Artificial Sequence
  Description of Artificial Sequence: Synthetic oligonucleotide
ggagauucgucucuggggu

SEQ ID NO: 1592435 - RNA, 19 nt, Artificial Sequence
  Description of Artificial Sequence: Synthetic oligonucleotide
gugcaaauuggugaccgga

SEQ ID NO: 1592436 - RNA, 19 nt, Artificial Sequence
  Description of Artificial Sequence: Synthetic oligonucleotide
gcagcaacuuaacaagcga

SEQ ID NO: 1592437 - RNA, 19 nt, Artificial Sequence
  Description of Artificial Sequence: Synthetic oligonucleotide
cugcccuguagugagggug

SEQ ID NO: 1592438 - RNA, 19 nt, Artificial Sequence
  Description of Artificial Sequence: Synthetic oligonucleotide
gaucagguugucacccuuc

SEQ ID NO: 1592439 - RNA, 19 nt, Artificial Sequence
  Description of Artificial Sequence: Synthetic oligonucleotide
acaaacuuuucggguccag

SEQ ID NO: 1592440 - RNA, 19 nt, Artificial Sequence
  Description of Artificial Sequence: Synthetic oligonucleotide
ugguuccuguuggggaggg

SEQ ID NO: 1592441 - RNA, 19 nt, Artificial Sequence
  Description of Artificial Sequence: Synthetic oligonucleotide
cauagguguugauguccac

SEQ ID NO: 1592442 - RNA, 19 nt, Artificial Sequence
  Description of Artificial Sequence: Synthetic oligonucleotide
gagucggccucugugguga

SEQ ID NO: 1592443 - RNA, 19 nt, Artificial Sequence
  Description of Artificial Sequence: Synthetic oligonucleotide
uugugggagacugguuugu

SEQ ID NO: 1592444 - RNA, 19 nt, Artificial Sequence
  Description of Artificial Sequence: Synthetic oligonucleotide
ugcgguaucccagggccac

SEQ ID NO: 1592445 - RNA, 19 nt, Artificial Sequence
  Description of Artificial Sequence: Synthetic oligonucleotide
gaagcgaacugucucgauu

SEQ ID NO: 1592446 - RNA, 19 nt, Artificial Sequence
  Description of Artificial Sequence: Synthetic oligonucleotide
uugcgguaucccagggcca

SEQ ID NO: 1592447 - RNA, 19 nt, Artificial Sequence
  Description of Artificial Sequence: Synthetic oligonucleotide
gugccuggguucccaacag

SEQ ID NO: 1592448 - RNA, 19 nt, Artificial Sequence
  Description of Artificial Sequence: Synthetic oligonucleotide
gggagaacagaaauaaaua

SEQ ID NO: 1592449 - RNA, 19 nt, Artificial Sequence
  Description of Artificial Sequence: Synthetic oligonucleotide
gaggggagugaagccacgc

SEQ ID NO: 1592450 - RNA, 19 nt, Artificial Sequence
  Description of Artificial Sequence: Synthetic oligonucleotide
auucccacguugccgguuu

SEQ ID NO: 1592451 - RNA, 19 nt, Artificial Sequence
  Description of Artificial Sequence: Synthetic oligonucleotide
gugggagacugguuuguuc

SEQ ID NO: 1592452 - RNA, 19 nt, Artificial Sequence
  Description of Artificial Sequence: Synthetic oligonucleotide
guggcucuagugaagugca

SEQ ID NO: 1592453 - RNA, 19 nt, Artificial Sequence
  Description of Artificial Sequence: Synthetic oligonucleotide
caugguucccucgcacggc

SEQ ID NO: 1592454 - RNA, 19 nt, Artificial Sequence
  Description of Artificial Sequence: Synthetic oligonucleotide
gagauucgucucugggguc

SEQ ID NO: 1592455 - RNA, 19 nt, Artificial Sequence
  Description of Artificial Sequence: Synthetic oligonucleotide
ucccaacaggcugucuuca

SEQ ID NO: 1592456 - RNA, 19 nt, Artificial Sequence
  Description of Artificial Sequence: Synthetic oligonucleotide
cacccuuccgcagaugguc

SEQ ID NO: 1592457 - RNA, 19 nt, Artificial Sequence
  Description of Artificial Sequence: Synthetic oligonucleotide
cucggggucugcaggcccc

SEQ ID NO: 1592458 - RNA, 19 nt, Artificial Sequence
  Description of Artificial Sequence: Synthetic oligonucleotide
guccauugggguauagcca

SEQ ID NO: 1592459 - RNA, 19 nt, Artificial Sequence
  Description of Artificial Sequence: Synthetic oligonucleotide
auagccagagucggccucu

SEQ ID NO: 1592460 - RNA, 19 nt, Artificial Sequence
  Description of Artificial Sequence: Synthetic oligonucleotide
ccugucuuggggagaacag

SEQ ID NO: 1592461 - RNA, 19 nt, Artificial Sequence
  Description of Artificial Sequence: Synthetic oligonucleotide
aaacccugucuuggggaga

SEQ ID NO: 1592462 - RNA, 19 nt, Artificial Sequence
  Description of Artificial Sequence: Synthetic oligonucleotide
cacuuucccucuccuuggc

SEQ ID NO: 1592463 - RNA, 19 nt, Artificial Sequence
  Description of Artificial Sequence: Synthetic oligonucleotide
ccagucauagguguugaug

SEQ ID NO: 1592464 - RNA, 19 nt, Artificial Sequence
  Description of Artificial Sequence: Synthetic oligonucleotide
gacgcucagcacucuaucu

SEQ ID NO: 1592465 - RNA, 19 nt, Artificial Sequence
  Description of Artificial Sequence: Synthetic oligonucleotide
gacugcugguuugggauga

SEQ ID NO: 1592466 - RNA, 19 nt, Artificial Sequence
  Description of Artificial Sequence: Synthetic oligonucleotide
cguagaguagugguguucc

SEQ ID NO: 1592467 - RNA, 19 nt, Artificial Sequence
  Description of Artificial Sequence: Synthetic oligonucleotide
agggcacuuucccucuccu

SEQ ID NO: 1592468 - RNA, 19 nt, Artificial Sequence
  Description of Artificial Sequence: Synthetic oligonucleotide
ugaggguuguugagugcuu

SEQ ID NO: 1592469 - RNA, 19 nt, Artificial Sequence
  Description of Artificial Sequence: Synthetic oligonucleotide
ggggagugaagccacgcuc

SEQ ID NO: 1592470 - RNA, 19 nt, Artificial Sequence
  Description of Artificial Sequence: Synthetic oligonucleotide
cacgucaccgcagcugcag

SEQ ID NO: 1592471 - RNA, 19 nt, Artificial Sequence
  Description of Artificial Sequence: Synthetic oligonucleotide
ucgcacggcguagaguagu

SEQ ID NO: 1592472 - RNA, 19 nt, Artificial Sequence
  Description of Artificial Sequence: Synthetic oligonucleotide
ccccagaguacucuggaac

SEQ ID NO: 1592473 - RNA, 19 nt, Artificial Sequence
  Description of Artificial Sequence: Synthetic oligonucleotide
gccacggcgagguccauug

SEQ ID NO: 1592474 - RNA, 19 nt, Artificial Sequence
  Description of Artificial Sequence: Synthetic oligonucleotide
ggugaccggacgcucagca

SEQ ID NO: 1592475 - RNA, 19 nt, Artificial Sequence
  Description of Artificial Sequence: Synthetic oligonucleotide
ucccucgcacggcguagag

SEQ ID NO: 1592476 - RNA, 19 nt, Artificial Sequence
  Description of Artificial Sequence: Synthetic oligonucleotide
gaagccacgcucaucuggu

SEQ ID NO: 1592477 - RNA, 19 nt, Artificial Sequence
  Description of Artificial Sequence: Synthetic oligonucleotide
ggggagaacagaaauaaau

SEQ ID NO: 1592478 - RNA, 19 nt, Artificial Sequence
  Description of Artificial Sequence: Synthetic oligonucleotide
gaggcccagaugaggggag

SEQ ID NO: 1592479 - RNA, 19 nt, Artificial Sequence
  Description of Artificial Sequence: Synthetic oligonucleotide
gaauccaggguggcuggca

SEQ ID NO: 1592480 - RNA, 19 nt, Artificial Sequence
  Description of Artificial Sequence: Synthetic oligonucleotide
agccacgcucaucugguuu

SEQ ID NO: 1592481 - RNA, 19 nt, Artificial Sequence
  Description of Artificial Sequence: Synthetic oligonucleotide
cccauuccagucauaggug

SEQ ID NO: 1592482 - RNA, 19 nt, Artificial Sequence
  Description of Artificial Sequence: Synthetic oligonucleotide
acggcguagaguaguggug

SEQ ID NO: 1592483 - RNA, 19 nt, Artificial Sequence
  Description of Artificial Sequence: Synthetic oligonucleotide
gcugucuggagauucgucu

SEQ ID NO: 1592484 - RNA, 19 nt, Artificial Sequence
  Description of Artificial Sequence: Synthetic oligonucleotide
cugcugguuugggaugagg

SEQ ID NO: 1592485 - RNA, 19 nt, Artificial Sequence
  Description of Artificial Sequence: Synthetic oligonucleotide
ccucugccgggacagacag

SEQ ID NO: 1592486 - RNA, 19 nt, Artificial Sequence
  Description of Artificial Sequence: Synthetic oligonucleotide
uugccgguuugugaggguu

SEQ ID NO: 1592487 - RNA, 19 nt, Artificial Sequence
  Description of Artificial Sequence: Synthetic oligonucleotide
acgcugcaagccugggucu

SEQ ID NO: 1592488 - RNA, 19 nt, Artificial Sequence
  Description of Artificial Sequence: Synthetic oligonucleotide
cugcaagcugagugggcuc

SEQ ID NO: 1592489 - RNA, 19 nt, Artificial Sequence
  Description of Artificial Sequence: Synthetic oligonucleotide
cugucuuggggagaacaga

SEQ ID NO: 1592490 - RNA, 19 nt, Artificial Sequence
  Description of Artificial Sequence: Synthetic oligonucleotide
caguggcucuagugaagug

SEQ ID NO: 1592491 - RNA, 19 nt, Artificial Sequence
  Description of Artificial Sequence: Synthetic oligonucleotide
ggucuuucaguuggcucag

SEQ ID NO: 1592492 - RNA, 19 nt, Artificial Sequence
  Description of Artificial Sequence: Synthetic oligonucleotide
cugcucgagcaacaaccuc

SEQ ID NO: 1592493 - RNA, 19 nt, Artificial Sequence
  Description of Artificial Sequence: Synthetic oligonucleotide
caguggggugacacucgag

SEQ ID NO: 1592494 - RNA, 19 nt, Artificial Sequence
  Description of Artificial Sequence: Synthetic oligonucleotide
cacggcguagaguaguggu

SEQ ID NO: 1592495 - RNA, 19 nt, Artificial Sequence
  Description of Artificial Sequence: Synthetic oligonucleotide
uggcucuagugaagugcaa

SEQ ID NO: 1592496 - RNA, 19 nt, Artificial Sequence
  Description of Artificial Sequence: Synthetic oligonucleotide
cucgcacggcguagaguag

SEQ ID NO: 1592497 - RNA, 19 nt, Artificial Sequence
  Description of Artificial Sequence: Synthetic oligonucleotide
cuccccgggccaguaaggc

SEQ ID NO: 1592498 - RNA, 19 nt, Artificial Sequence
  Description of Artificial Sequence: Synthetic oligonucleotide
uucccacguugccgguuug

SEQ ID NO: 1592499 - RNA, 19 nt, Artificial Sequence
  Description of Artificial Sequence: Synthetic oligonucleotide
cccagaguacucuggaaca

SEQ ID NO: 1592500 - RNA, 19 nt, Artificial Sequence
  Description of Artificial Sequence: Synthetic oligonucleotide
guccugcucgagcaacaac

SEQ ID NO: 1592501 - RNA, 19 nt, Artificial Sequence
  Description of Artificial Sequence: Synthetic oligonucleotide
cacguccugcucgagcaac

SEQ ID NO: 1592502 - RNA, 19 nt, Artificial Sequence
  Description of Artificial Sequence: Synthetic oligonucleotide
ggagaacuccaaacuacca

SEQ ID NO: 1592503 - RNA, 19 nt, Artificial Sequence
  Description of Artificial Sequence: Synthetic oligonucleotide
gggagugaagccacgcuca

SEQ ID NO: 1592504 - RNA, 19 nt, Artificial Sequence
  Description of Artificial Sequence: Synthetic oligonucleotide
gcaacuuaacaagcgacua

SEQ ID NO: 1592505 - RNA, 19 nt, Artificial Sequence
  Description of Artificial Sequence: Synthetic oligonucleotide
aagccacgcucaucugguu

SEQ ID NO: 1592506 - RNA, 19 nt, Artificial Sequence
  Description of Artificial Sequence: Synthetic oligonucleotide
guucccucgcacggcguag

SEQ ID NO: 1592507 - RNA, 19 nt, Artificial Sequence
  Description of Artificial Sequence: Synthetic oligonucleotide
ggacgcucagcacucuauc

SEQ ID NO: 1592508 - RNA, 19 nt, Artificial Sequence
  Description of Artificial Sequence: Synthetic oligonucleotide
ccagaguacucuggaacag

SEQ ID NO: 1592509 - RNA, 19 nt, Artificial Sequence
  Description of Artificial Sequence: Synthetic oligonucleotide
cuccgacuggagaacucca

SEQ ID NO: 1592510 - RNA, 19 nt, Artificial Sequence
  Description of Artificial Sequence: Synthetic oligonucleotide
gagugaagccacgcucauc

SEQ ID NO: 1592511 - RNA, 19 nt, Artificial Sequence
  Description of Artificial Sequence: Synthetic oligonucleotide
guauagccagagucggccu

SEQ ID NO: 1592512 - RNA, 19 nt, Artificial Sequence
  Description of Artificial Sequence: Synthetic oligonucleotide
uucccucgcacggcguaga

SEQ ID NO: 1592513 - RNA, 19 nt, Artificial Sequence
  Description of Artificial Sequence: Synthetic oligonucleotide
ccucgcacggcguagagua

SEQ ID NO: 1592514 - RNA, 19 nt, Artificial Sequence
  Description of Artificial Sequence: Synthetic oligonucleotide
gaccggacgcucagcacuc

SEQ ID NO: 1592515 - RNA, 19 nt, Artificial Sequence
  Description of Artificial Sequence: Synthetic oligonucleotide
uucggguccaguggcucua

SEQ ID NO: 1592516 - RNA, 19 nt, Artificial Sequence
  Description of Artificial Sequence: Synthetic oligonucleotide
ucccacguugccgguuugu

SEQ ID NO: 1592517 - RNA, 19 nt, Artificial Sequence
  Description of Artificial Sequence: Synthetic oligonucleotide
gcguguucacgucaccgca

SEQ ID NO: 1592518 - RNA, 19 nt, Artificial Sequence
  Description of Artificial Sequence: Synthetic oligonucleotide
gagguccauugggguauag

SEQ ID NO: 1592519 - RNA, 19 nt, Artificial Sequence
  Description of Artificial Sequence: Synthetic oligonucleotide
ucggguccaguggcucuag

SEQ ID NO: 1592520 - RNA, 19 nt, Artificial Sequence
  Description of Artificial Sequence: Synthetic oligonucleotide
gagccucuauucacaaacu

SEQ ID NO: 1592521 - RNA, 19 nt, Artificial Sequence
  Description of Artificial Sequence: Synthetic oligonucleotide
ggcucuagugaagugcaaa

SEQ ID NO: 1592522 - RNA, 19 nt, Artificial Sequence
  Description of Artificial Sequence: Synthetic oligonucleotide
gcgacuacuccgacuggag

SEQ ID NO: 1592523 - RNA, 19 nt, Artificial Sequence
  Description of Artificial Sequence: Synthetic oligonucleotide
ggccaguaaggccuccaca

SEQ ID NO: 1592524 - RNA, 19 nt, Artificial Sequence
  Description of Artificial Sequence: Synthetic oligonucleotide
cacucggggucugcaggcc

SEQ ID NO: 1592525 - RNA, 19 nt, Artificial Sequence
  Description of Artificial Sequence: Synthetic oligonucleotide
auucgucucugggguccuc

SEQ ID NO: 1592526 - RNA, 19 nt, Artificial Sequence
  Description of Artificial Sequence: Synthetic oligonucleotide
uggugaccggacgcucagc

SEQ ID NO: 1592527 - RNA, 19 nt, Artificial Sequence
  Description of Artificial Sequence: Synthetic oligonucleotide
ggggagggcccucugccac

SEQ ID NO: 1592528 - RNA, 19 nt, Artificial Sequence
  Description of Artificial Sequence: Synthetic oligonucleotide
cuugggcugcaagcuggug

SEQ ID NO: 1592529 - RNA, 19 nt, Artificial Sequence
  Description of Artificial Sequence: Synthetic oligonucleotide
guggcuggcagagccgaga

SEQ ID NO: 1592530 - RNA, 19 nt, Artificial Sequence
  Description of Artificial Sequence: Synthetic oligonucleotide
cccuacgcugcaagccugg

SEQ ID NO: 1592531 - RNA, 19 nt, Artificial Sequence
  Description of Artificial Sequence: Synthetic oligonucleotide
cuuuucggguccaguggcu

SEQ ID NO: 1592532 - RNA, 19 nt, Artificial Sequence
  Description of Artificial Sequence: Synthetic oligonucleotide
guagccgcccaugcuggca

SEQ ID NO: 1592533 - RNA, 19 nt, Artificial Sequence
  Description of Artificial Sequence: Synthetic oligonucleotide
ggggucagcaccccagucu

SEQ ID NO: 1592534 - RNA, 19 nt, Artificial Sequence
  Description of Artificial Sequence: Synthetic oligonucleotide
cugucucgauuucuccaaa

SEQ ID NO: 1592535 - RNA, 19 nt, Artificial Sequence
  Description of Artificial Sequence: Synthetic oligonucleotide
agccgcccaugcuggcaag

SEQ ID NO: 1592536 - RNA, 19 nt, Artificial Sequence
  Description of Artificial Sequence: Synthetic oligonucleotide
cacaaacuuuucgggucca

SEQ ID NO: 1592537 - RNA, 19 nt, Artificial Sequence
  Description of Artificial Sequence: Synthetic oligonucleotide
cgguuugugaggguuguug

SEQ ID NO: 1592538 - RNA, 19 nt, Artificial Sequence
  Description of Artificial Sequence: Synthetic oligonucleotide
cugccgggacagacagcag

SEQ ID NO: 1592539 - RNA, 19 nt, Artificial Sequence
  Description of Artificial Sequence: Synthetic oligonucleotide
guuugggaugagguucucu

SEQ ID NO: 1592540 - RNA, 19 nt, Artificial Sequence
  Description of Artificial Sequence: Synthetic oligonucleotide
acguccugcucgagcaaca

SEQ ID NO: 1592541 - RNA, 19 nt, Artificial Sequence
  Description of Artificial Sequence: Synthetic oligonucleotide
ggccucuguggugagguca

SEQ ID NO: 1592542 - RNA, 19 nt, Artificial Sequence
  Description of Artificial Sequence: Synthetic oligonucleotide
ccucccaguggggugacac

SEQ ID NO: 1592543 - RNA, 19 nt, Artificial Sequence
  Description of Artificial Sequence: Synthetic oligonucleotide
gucuuucaguuggcucagc

SEQ ID NO: 1592544 - RNA, 19 nt, Artificial Sequence
  Description of Artificial Sequence: Synthetic oligonucleotide
ggggugcaggggaacagac

SEQ ID NO: 1592545 - RNA, 19 nt, Artificial Sequence
  Description of Artificial Sequence: Synthetic oligonucleotide
gcacggcguagaguagugg

SEQ ID NO: 1592546 - RNA, 19 nt, Artificial Sequence
  Description of Artificial Sequence: Synthetic oligonucleotide
guggggugacacucgaguu

SEQ ID NO: 1592547 - RNA, 19 nt, Artificial Sequence
  Description of Artificial Sequence: Synthetic oligonucleotide
ggcgagguccauuggggua

SEQ ID NO: 1592548 - RNA, 19 nt, Artificial Sequence
  Description of Artificial Sequence: Synthetic oligonucleotide
cucuagugaagugcaaauu

SEQ ID NO: 1592549 - RNA, 19 nt, Artificial Sequence
  Description of Artificial Sequence: Synthetic oligonucleotide
ucggggucugcaggcccca

SEQ ID NO: 1592550 - RNA, 19 nt, Artificial Sequence
  Description of Artificial Sequence: Synthetic oligonucleotide
cccaacaggcugucuucac

SEQ ID NO: 1592551 - RNA, 19 nt, Artificial Sequence
  Description of Artificial Sequence: Synthetic oligonucleotide
cagaguacucuggaacagu

SEQ ID NO: 1592552 - RNA, 19 nt, Artificial Sequence
  Description of Artificial Sequence: Synthetic oligonucleotide
gggucuccccaaacucagg

SEQ ID NO: 1592553 - RNA, 19 nt, Artificial Sequence
  Description of Artificial Sequence: Synthetic oligonucleotide
gaguacucuggaacaguuu

SEQ ID NO: 1592554 - RNA, 19 nt, Artificial Sequence
  Description of Artificial Sequence: Synthetic oligonucleotide
acccugucuuggggagaac

SEQ ID NO: 1592555 - RNA, 19 nt, Artificial Sequence
  Description of Artificial Sequence: Synthetic oligonucleotide
ccaguaaggccuccacaca

SEQ ID NO: 1592556 - RNA, 19 nt, Artificial Sequence
  Description of Artificial Sequence: Synthetic oligonucleotide
gccgggacagacagcagca

SEQ ID NO: 1592557 - RNA, 19 nt, Artificial Sequence
  Description of Artificial Sequence: Synthetic oligonucleotide
ggguuguugagugcuucaa

SEQ ID NO: 1592558 - RNA, 19 nt, Artificial Sequence
  Description of Artificial Sequence: Synthetic oligonucleotide
cucgagcaacaaccucaca

SEQ ID NO: 1592559 - RNA, 19 nt, Artificial Sequence
  Description of Artificial Sequence: Synthetic oligonucleotide
gcguagaguagugguguuc

SEQ ID NO: 1592560 - RNA, 19 nt, Artificial Sequence
  Description of Artificial Sequence: Synthetic oligonucleotide
gggguccucaggauccuca

SEQ ID NO: 1592561 - RNA, 19 nt, Artificial Sequence
  Description of Artificial Sequence: Synthetic oligonucleotide
ccacguugccgguuuguga

SEQ ID NO: 1592562 - RNA, 19 nt, Artificial Sequence
  Description of Artificial Sequence: Synthetic oligonucleotide
ccagcguguucacgucacc

SEQ ID NO: 1592563 - RNA, 19 nt, Artificial Sequence
  Description of Artificial Sequence: Synthetic oligonucleotide
cuacuccgacuggagaacu

SEQ ID NO: 1592564 - RNA, 19 nt, Artificial Sequence
  Description of Artificial Sequence: Synthetic oligonucleotide
ccuacgcugcaagccuggg

SEQ ID NO: 1592565 - RNA, 19 nt, Artificial Sequence
  Description of Artificial Sequence: Synthetic oligonucleotide
guugccgguuugugagggu

SEQ ID NO: 1592566 - RNA, 19 nt, Artificial Sequence
  Description of Artificial Sequence: Synthetic oligonucleotide
gguucccucgcacggcgua

SEQ ID NO: 1592567 - RNA, 19 nt, Artificial Sequence
  Description of Artificial Sequence: Synthetic oligonucleotide
cccacguugccgguuugug

SEQ ID NO: 1592568 - RNA, 19 nt, Artificial Sequence
  Description of Artificial Sequence: Synthetic oligonucleotide
ccccuacgcugcaagccug

SEQ ID NO: 1592569 - RNA, 19 nt, Artificial Sequence
  Description of Artificial Sequence: Synthetic oligonucleotide
ccuguugcacuuugcggua

SEQ ID NO: 1592570 - RNA, 19 nt, Artificial Sequence
  Description of Artificial Sequence: Synthetic oligonucleotide
ccgcagauggucuuucagu

SEQ ID NO: 1592571 - RNA, 19 nt, Artificial Sequence
  Description of Artificial Sequence: Synthetic oligonucleotide
cgagcaacaaccucacaau

SEQ ID NO: 1592572 - RNA, 19 nt, Artificial Sequence
  Description of Artificial Sequence: Synthetic oligonucleotide
gcccagaugaggggaguga

SEQ ID NO: 1592573 - RNA, 19 nt, Artificial Sequence
  Description of Artificial Sequence: Synthetic oligonucleotide
ccaacaggcugucuucacu

SEQ ID NO: 1592574 - RNA, 19 nt, Artificial Sequence
  Description of Artificial Sequence: Synthetic oligonucleotide
ggcugucuucacucggggu

SEQ ID NO: 1592575 - RNA, 19 nt, Artificial Sequence
  Description of Artificial Sequence: Synthetic oligonucleotide
cgguaucccagggccacgg

SEQ ID NO: 1592576 - RNA, 19 nt, Artificial Sequence
  Description of Artificial Sequence: Synthetic oligonucleotide
cgcacggcguagaguagug

SEQ ID NO: 1592577 - RNA, 19 nt, Artificial Sequence
  Description of Artificial Sequence: Synthetic oligonucleotide
ccugcucgagcaacaaccu

SEQ ID NO: 1592578 - RNA, 19 nt, Artificial Sequence
  Description of Artificial Sequence: Synthetic oligonucleotide
accggacgcucagcacucu

SEQ ID NO: 1592579 - RNA, 19 nt, Artificial Sequence
  Description of Artificial Sequence: Synthetic oligonucleotide
gcgguaucccagggccacg

SEQ ID NO: 1592580 - RNA, 19 nt, Artificial Sequence
  Description of Artificial Sequence: Synthetic oligonucleotide
ccagucuagcaggaagcga

SEQ ID NO: 1592581 - RNA, 19 nt, Artificial Sequence
  Description of Artificial Sequence: Synthetic oligonucleotide
ggggugacacucgaguuuu

SEQ ID NO: 1592582 - RNA, 19 nt, Artificial Sequence
  Description of Artificial Sequence: Synthetic oligonucleotide
ggagugaagccacgcucau

SEQ ID NO: 1592583 - RNA, 19 nt, Artificial Sequence
  Description of Artificial Sequence: Synthetic oligonucleotide
gagggcccucugccaccac

SEQ ID NO: 1592584 - RNA, 19 nt, Artificial Sequence
  Description of Artificial Sequence: Synthetic oligonucleotide
gcgaacugucucgauuucu

SEQ ID NO: 1592585 - RNA, 19 nt, Artificial Sequence
  Description of Artificial Sequence: Synthetic oligonucleotide
cgacuacuccgacuggaga

SEQ ID NO: 1592586 - RNA, 19 nt, Artificial Sequence
  Description of Artificial Sequence: Synthetic oligonucleotide
ggagggcccucugccacca

SEQ ID NO: 1592587 - RNA, 19 nt, Artificial Sequence
  Description of Artificial Sequence: Synthetic oligonucleotide
ggaagcgaacugucucgau

SEQ ID NO: 1592588 - RNA, 19 nt, Artificial Sequence
  Description of Artificial Sequence: Synthetic oligonucleotide
cccagaugaggggagugaa

SEQ ID NO: 1592589 - RNA, 19 nt, Artificial Sequence
  Description of Artificial Sequence: Synthetic oligonucleotide
gguuugggaugagguucuc

SEQ ID NO: 1592590 - RNA, 19 nt, Artificial Sequence
  Description of Artificial Sequence: Synthetic oligonucleotide
cgcagauggucuuucaguu

SEQ ID NO: 1592591 - RNA, 19 nt, Artificial Sequence
  Description of Artificial Sequence: Synthetic oligonucleotide
cccuguagugagggugcac

SEQ ID NO: 1592592 - RNA, 19 nt, Artificial Sequence
  Description of Artificial Sequence: Synthetic oligonucleotide
ccccagcguguucacguca

SEQ ID NO: 1592593 - RNA, 19 nt, Artificial Sequence
  Description of Artificial Sequence: Synthetic oligonucleotide
cuguugcacuuugcgguau

SEQ ID NO: 1592594 - RNA, 19 nt, Artificial Sequence
  Description of Artificial Sequence: Synthetic oligonucleotide
ggcguagaguagugguguu

SEQ ID NO: 1592595 - RNA, 19 nt, Artificial Sequence
  Description of Artificial Sequence: Synthetic oligonucleotide
gccgguuugugaggguugu

SEQ ID NO: 1592596 - RNA, 19 nt, Artificial Sequence
  Description of Artificial Sequence: Synthetic oligonucleotide
cuguuggggagggcccucu

SEQ ID NO: 1592597 - RNA, 19 nt, Artificial Sequence
  Description of Artificial Sequence: Synthetic oligonucleotide
cauucccacguugccgguu

SEQ ID NO: 1592598 - RNA, 19 nt, Artificial Sequence
  Description of Artificial Sequence: Synthetic oligonucleotide
gcagagccgagaccucauu

SEQ ID NO: 1592599 - RNA, 19 nt, Artificial Sequence
  Description of Artificial Sequence: Synthetic oligonucleotide
cggcguagaguaguggugu

SEQ ID NO: 1592600 - RNA, 19 nt, Artificial Sequence
  Description of Artificial Sequence: Synthetic oligonucleotide
gguucccaacaggcugucu

SEQ ID NO: 1592601 - RNA, 19 nt, Artificial Sequence
  Description of Artificial Sequence: Synthetic oligonucleotide
ccacguccugcucgagcaa

SEQ ID NO: 1592602 - RNA, 19 nt, Artificial Sequence
  Description of Artificial Sequence: Synthetic oligonucleotide
ccggacgcucagcacucua

SEQ ID NO: 1592603 - RNA, 19 nt, Artificial Sequence
  Description of Artificial Sequence: Synthetic oligonucleotide
cggacgcucagcacucuau

SEQ ID NO: 1592604 - RNA, 19 nt, Artificial Sequence
  Description of Artificial Sequence: Synthetic oligonucleotide
ccgggacagacagcagcaa

SEQ ID NO: 1592605 - RNA, 19 nt, Artificial Sequence
  Description of Artificial Sequence: Synthetic oligonucleotide
cacgcucaucugguuuguu

SEQ ID NO: 1592606 - RNA, 19 nt, Artificial Sequence
  Description of Artificial Sequence: Synthetic oligonucleotide
cguccugcucgagcaacaa

SEQ ID NO: 1592607 - RNA, 19 nt, Artificial Sequence
  Description of Artificial Sequence: Synthetic oligonucleotide
cggcgagguccauuggggu

SEQ ID NO: 1592608 - RNA, 19 nt, Artificial Sequence
  Description of Artificial Sequence: Synthetic oligonucleotide
ccccucccaguggggugac

SEQ ID NO: 1592609 - RNA, 19 nt, Artificial Sequence
  Description of Artificial Sequence: Synthetic oligonucleotide
cccuuccgcagauggucuu

SEQ ID NO: 1592610 - RNA, 19 nt, Artificial Sequence
  Description of Artificial Sequence: Synthetic oligonucleotide
cccucgcacggcguagagu

SEQ ID NO: 1592611 - RNA, 19 nt, Artificial Sequence
  Description of Artificial Sequence: Synthetic oligonucleotide
ggccacggcgagguccauu

SEQ ID NO: 1592612 - RNA, 19 nt, Artificial Sequence
  Description of Artificial Sequence: Synthetic oligonucleotide
cgagguccauugggguaua

SEQ ID NO: 1592613 - RNA, 19 nt, Artificial Sequence
  Description of Artificial Sequence: Synthetic oligonucleotide
cccucccaguggggugaca

SEQ ID NO: 1592614 - RNA, 19 nt, Artificial Sequence
  Description of Artificial Sequence: Synthetic oligonucleotide
cggguccaguggcucuagu

SEQ ID NO: 1592615 - RNA, 19 nt, Artificial Sequence
  Description of Artificial Sequence: Synthetic oligonucleotide
ccgguuugugaggguuguu

SEQ ID NO: 1592616 - RNA, 19 nt, Artificial Sequence
  Description of Artificial Sequence: Synthetic oligonucleotide
gggccacggcgagguccau

SEQ ID NO: 1592617 - RNA, 19 nt, Artificial Sequence
  Description of Artificial Sequence: Synthetic oligonucleotide
aagaugacgacauucaagg

SEQ ID NO: 1592618 - RNA, 19 nt, Artificial Sequence
  Description of Artificial Sequence: Synthetic oligonucleotide
uuuaaauaaggugaucucg

SEQ ID NO: 1592619 - RNA, 19 nt, Artificial Sequence
  Description of Artificial Sequence: Synthetic oligonucleotide
gaugacgacauucaaggcg

SEQ ID NO: 1592620 - RNA, 19 nt, Artificial Sequence
  Description of Artificial Sequence: Synthetic oligonucleotide
aauaaggugaucucgucca

SEQ ID NO: 1592621 - RNA, 19 nt, Artificial Sequence
  Description of Artificial Sequence: Synthetic oligonucleotide
auuacagcaggacucuacc

SEQ ID NO: 1592622 - RNA, 19 nt, Artificial Sequence
  Description of Artificial Sequence: Synthetic oligonucleotide
ugcugagucagccacagag

SEQ ID NO: 1592623 - RNA, 19 nt, Artificial Sequence
  Description of Artificial Sequence: Synthetic oligonucleotide
uuaaauaaggugaucucgu

SEQ ID NO: 1592624 - RNA, 19 nt, Artificial Sequence
  Description of Artificial Sequence: Synthetic oligonucleotide
cugaaagcaccuuagacag

SEQ ID NO: 1592625 - RNA, 19 nt, Artificial Sequence
  Description of Artificial Sequence: Synthetic oligonucleotide
aacgagucugcagacaggc

SEQ ID NO: 1592626 - RNA, 19 nt, Artificial Sequence
  Description of Artificial Sequence: Synthetic oligonucleotide
gauguugcagggcugaaag

SEQ ID NO: 1592627 - RNA, 19 nt, Artificial Sequence
  Description of Artificial Sequence: Synthetic oligonucleotide
aacagcgucugcuugagcu

SEQ ID NO: 1592628 - RNA, 19 nt, Artificial Sequence
  Description of Artificial Sequence: Synthetic oligonucleotide
uuggggacaggucugaacc

SEQ ID NO: 1592629 - RNA, 19 nt, Artificial Sequence
  Description of Artificial Sequence: Synthetic oligonucleotide
acaacuugcaggcaacggg

SEQ ID NO: 1592630 - RNA, 19 nt, Artificial Sequence
  Description of Artificial Sequence: Synthetic oligonucleotide
ugcucacuaguccagagcc

SEQ ID NO: 1592631 - RNA, 19 nt, Artificial Sequence
  Description of Artificial Sequence: Synthetic oligonucleotide
ucaaaguagagcagcaacu

SEQ ID NO: 1592632 - RNA, 19 nt, Artificial Sequence
  Description of Artificial Sequence: Synthetic oligonucleotide
ucuccagugaacaugugac

SEQ ID NO: 1592633 - RNA, 19 nt, Artificial Sequence
  Description of Artificial Sequence: Synthetic oligonucleotide
acacacgacaacuugcagg

SEQ ID NO: 1592634 - RNA, 19 nt, Artificial Sequence
  Description of Artificial Sequence: Synthetic oligonucleotide
uuagacagccucagggagg

SEQ ID NO: 1592635 - RNA, 19 nt, Artificial Sequence
  Description of Artificial Sequence: Synthetic oligonucleotide
ugugacacacgacaacuug

SEQ ID NO: 1592636 - RNA, 19 nt, Artificial Sequence
  Description of Artificial Sequence: Synthetic oligonucleotide
gaagccggggcucacgucg

SEQ ID NO: 1592637 - RNA, 19 nt, Artificial Sequence
  Description of Artificial Sequence: Synthetic oligonucleotide
uucaccuucaccaggccug

SEQ ID NO: 1592638 - RNA, 19 nt, Artificial Sequence
  Description of Artificial Sequence: Synthetic oligonucleotide
auugagguggugcagauua

SEQ ID NO: 1592639 - RNA, 19 nt, Artificial Sequence
  Description of Artificial Sequence: Synthetic oligonucleotide
cagagaugaacacuggccc

SEQ ID NO: 1592640 - RNA, 19 nt, Artificial Sequence
  Description of Artificial Sequence: Synthetic oligonucleotide
aacgacagagacugcagcu

SEQ ID NO: 1592641 - RNA, 19 nt, Artificial Sequence
  Description of Artificial Sequence: Synthetic oligonucleotide
cagcaugucagcaagagca

SEQ ID NO: 1592642 - RNA, 19 nt, Artificial Sequence
  Description of Artificial Sequence: Synthetic oligonucleotide
cauaggauggugugaacag

SEQ ID NO: 1592643 - RNA, 19 nt, Artificial Sequence
  Description of Artificial Sequence: Synthetic oligonucleotide
ugcagauuacagcaggacu

SEQ ID NO: 1592644 - RNA, 19 nt, Artificial Sequence
  Description of Artificial Sequence: Synthetic oligonucleotide
uccaggugcaccaugggga

SEQ ID NO: 1592645 - RNA, 19 nt, Artificial Sequence
  Description of Artificial Sequence: Synthetic oligonucleotide
gaccagaacacagaggcag

SEQ ID NO: 1592646 - RNA, 19 nt, Artificial Sequence
  Description of Artificial Sequence: Synthetic oligonucleotide
aagagcaggcauguacacc

SEQ ID NO: 1592647 - RNA, 19 nt, Artificial Sequence
  Description of Artificial Sequence: Synthetic oligonucleotide
augguagagcccgacaacc

SEQ ID NO: 1592648 - RNA, 19 nt, Artificial Sequence
  Description of Artificial Sequence: Synthetic oligonucleotide
aacugcgcaccuucuugcc

SEQ ID NO: 1592649 - RNA, 19 nt, Artificial Sequence
  Description of Artificial Sequence: Synthetic oligonucleotide
agguggugcagauuacagc

SEQ ID NO: 1592650 - RNA, 19 nt, Artificial Sequence
  Description of Artificial Sequence: Synthetic oligonucleotide
augacgacauucaaggcgg

SEQ ID NO: 1592651 - RNA, 19 nt, Artificial Sequence
  Description of Artificial Sequence: Synthetic oligonucleotide
aaagccacggggcacugca

SEQ ID NO: 1592652 - RNA, 19 nt, Artificial Sequence
  Description of Artificial Sequence: Synthetic oligonucleotide
ucugccuuacggagcaacg

SEQ ID NO: 1592653 - RNA, 19 nt, Artificial Sequence
  Description of Artificial Sequence: Synthetic oligonucleotide
uuaaggcuggcccugguaa

SEQ ID NO: 1592654 - RNA, 19 nt, Artificial Sequence
  Description of Artificial Sequence: Synthetic oligonucleotide
acgacauucaaggcgggcc

SEQ ID NO: 1592655 - RNA, 19 nt, Artificial Sequence
  Description of Artificial Sequence: Synthetic oligonucleotide
agaacacagaggcaggcug

SEQ ID NO: 1592656 - RNA, 19 nt, Artificial Sequence
  Description of Artificial Sequence: Synthetic oligonucleotide
gugacagcgggccacaugc

SEQ ID NO: 1592657 - RNA, 19 nt, Artificial Sequence
  Description of Artificial Sequence: Synthetic oligonucleotide
ugagcgcagauguugcagg

SEQ ID NO: 1592658 - RNA, 19 nt, Artificial Sequence
  Description of Artificial Sequence: Synthetic oligonucleotide
accaauagcagccugccaa

SEQ ID NO: 1592659 - RNA, 19 nt, Artificial Sequence
  Description of Artificial Sequence: Synthetic oligonucleotide
agaugacgacauucaaggc

SEQ ID NO: 1592660 - RNA, 19 nt, Artificial Sequence
  Description of Artificial Sequence: Synthetic oligonucleotide
cugagguuaaggcuggccc

SEQ ID NO: 1592661 - RNA, 19 nt, Artificial Sequence
  Description of Artificial Sequence: Synthetic oligonucleotide
caugcucgaugguagagcc

SEQ ID NO: 1592662 - RNA, 19 nt, Artificial Sequence
  Description of Artificial Sequence: Synthetic oligonucleotide
uaauggggcacguugcucu

SEQ ID NO: 1592663 - RNA, 19 nt, Artificial Sequence
  Description of Artificial Sequence: Synthetic oligonucleotide
acaaccaauagcagccugc

SEQ ID NO: 1592664 - RNA, 19 nt, Artificial Sequence
  Description of Artificial Sequence: Synthetic oligonucleotide
gaucuccugaccaauuucc

SEQ ID NO: 1592665 - RNA, 19 nt, Artificial Sequence
  Description of Artificial Sequence: Synthetic oligonucleotide
gugaacaugugacacacga

SEQ ID NO: 1592666 - RNA, 19 nt, Artificial Sequence
  Description of Artificial Sequence: Synthetic oligonucleotide
gaacgcagguggcagagcc

SEQ ID NO: 1592667 - RNA, 19 nt, Artificial Sequence
  Description of Artificial Sequence: Synthetic oligonucleotide
ugcuuuuaaauaaggugau

SEQ ID NO: 1592668 - RNA, 19 nt, Artificial Sequence
  Description of Artificial Sequence: Synthetic oligonucleotide
ugccuuacggagcaacgag

SEQ ID NO: 1592669 - RNA, 19 nt, Artificial Sequence
  Description of Artificial Sequence: Synthetic oligonucleotide
uuacggagcaacgagucug

SEQ ID NO: 1592670 - RNA, 19 nt, Artificial Sequence
  Description of Artificial Sequence: Synthetic oligonucleotide
ggugaucucguccaggugc

SEQ ID NO: 1592671 - RNA, 19 nt, Artificial Sequence
  Description of Artificial Sequence: Synthetic oligonucleotide
auaggauggugugaacagc

SEQ ID NO: 1592672 - RNA, 19 nt, Artificial Sequence
  Description of Artificial Sequence: Synthetic oligonucleotide
uucaaggcgggccucucag

SEQ ID NO: 1592673 - RNA, 19 nt, Artificial Sequence
  Description of Artificial Sequence: Synthetic oligonucleotide
aggcauguacaccaccuuc

SEQ ID NO: 1592674 - RNA, 19 nt, Artificial Sequence
  Description of Artificial Sequence: Synthetic oligonucleotide
uaggccaaugcucacuagu

SEQ ID NO: 1592675 - RNA, 19 nt, Artificial Sequence
  Description of Artificial Sequence: Synthetic oligonucleotide
uggccuugcacucacugcu

SEQ ID NO: 1592676 - RNA, 19 nt, Artificial Sequence
  Description of Artificial Sequence: Synthetic oligonucleotide
acaugcucgaugguagagc

SEQ ID NO: 1592677 - RNA, 19 nt, Artificial Sequence
  Description of Artificial Sequence: Synthetic oligonucleotide
uuccccaucaugcccaggu

SEQ ID NO: 1592678 - RNA, 19 nt, Artificial Sequence
  Description of Artificial Sequence: Synthetic oligonucleotide
ucagcaugucagcaagagc

SEQ ID NO: 1592679 - RNA, 19 nt, Artificial Sequence
  Description of Artificial Sequence: Synthetic oligonucleotide
uaaauaaggugaucucguc

SEQ ID NO: 1592680 - RNA, 19 nt, Artificial Sequence
  Description of Artificial Sequence: Synthetic oligonucleotide
ugaacaugugacacacgac

SEQ ID NO: 1592681 - RNA, 19 nt, Artificial Sequence
  Description of Artificial Sequence: Synthetic oligonucleotide
aacuugcaggcaacgggcc

SEQ ID NO: 1592682 - RNA, 19 nt, Artificial Sequence
  Description of Artificial Sequence: Synthetic oligonucleotide
cauggggacaucucggaug

SEQ ID NO: 1592683 - RNA, 19 nt, Artificial Sequence
  Description of Artificial Sequence: Synthetic oligonucleotide
auguugcagggcugaaagc

SEQ ID NO: 1592684 - RNA, 19 nt, Artificial Sequence
  Description of Artificial Sequence: Synthetic oligonucleotide
gcugaaagcaccuuagaca

SEQ ID NO: 1592685 - RNA, 19 nt, Artificial Sequence
  Description of Artificial Sequence: Synthetic oligonucleotide
ucugaaccccaacugcgca

SEQ ID NO: 1592686 - RNA, 19 nt, Artificial Sequence
  Description of Artificial Sequence: Synthetic oligonucleotide
cacucugcuuuuaaauaag

SEQ ID NO: 1592687 - RNA, 19 nt, Artificial Sequence
  Description of Artificial Sequence: Synthetic oligonucleotide
aauagcagccugccaaguu

SEQ ID NO: 1592688 - RNA, 19 nt, Artificial Sequence
  Description of Artificial Sequence: Synthetic oligonucleotide
cuguacucggcucagcgug

SEQ ID NO: 1592689 - RNA, 19 nt, Artificial Sequence
  Description of Artificial Sequence: Synthetic oligonucleotide
ugagguuaaggcuggcccu

SEQ ID NO: 1592690 - RNA, 19 nt, Artificial Sequence
  Description of Artificial Sequence: Synthetic oligonucleotide
gagcccgacaaccaauagc

SEQ ID NO: 1592691 - RNA, 19 nt, Artificial Sequence
  Description of Artificial Sequence: Synthetic oligonucleotide
gaaacuccggaggagugcc

SEQ ID NO: 1592692 - RNA, 19 nt, Artificial Sequence
  Description of Artificial Sequence: Synthetic oligonucleotide
cacaccauaggauggugug

SEQ ID NO: 1592693 - RNA, 19 nt, Artificial Sequence
  Description of Artificial Sequence: Synthetic oligonucleotide
cugaccaauuuccuucacc

SEQ ID NO: 1592694 - RNA, 19 nt, Artificial Sequence
  Description of Artificial Sequence: Synthetic oligonucleotide
agcccgacaaccaauagca

SEQ ID NO: 1592695 - RNA, 19 nt, Artificial Sequence
  Description of Artificial Sequence: Synthetic oligonucleotide
gagccugucagcaugccug

SEQ ID NO: 1592696 - RNA, 19 nt, Artificial Sequence
  Description of Artificial Sequence: Synthetic oligonucleotide
gaugguagagcccgacaac

SEQ ID NO: 1592697 - RNA, 19 nt, Artificial Sequence
  Description of Artificial Sequence: Synthetic oligonucleotide
ccgacaaccaauagcagcc

SEQ ID NO: 1592698 - RNA, 19 nt, Artificial Sequence
  Description of Artificial Sequence: Synthetic oligonucleotide
auggggacaucucggauga

SEQ ID NO: 1592699 - RNA, 19 nt, Artificial Sequence
  Description of Artificial Sequence: Synthetic oligonucleotide
uuacagcaggacucuacca

SEQ ID NO: 1592700 - RNA, 19 nt, Artificial Sequence
  Description of Artificial Sequence: Synthetic oligonucleotide
gacacuguaggccaaugcu

SEQ ID NO: 1592701 - RNA, 19 nt, Artificial Sequence
  Description of Artificial Sequence: Synthetic oligonucleotide
gaggacagcacccucacgu

SEQ ID NO: 1592702 - RNA, 19 nt, Artificial Sequence
  Description of Artificial Sequence: Synthetic oligonucleotide
ggagcaacgagucugcaga

SEQ ID NO: 1592703 - RNA, 19 nt, Artificial Sequence
  Description of Artificial Sequence: Synthetic oligonucleotide
ucucaccaccacagguucg

SEQ ID NO: 1592704 - RNA, 19 nt, Artificial Sequence
  Description of Artificial Sequence: Synthetic oligonucleotide
acacuguaggccaaugcuc

SEQ ID NO: 1592705 - RNA, 19 nt, Artificial Sequence
  Description of Artificial Sequence: Synthetic oligonucleotide
gugaugagggauucuccag

SEQ ID NO: 1592706 - RNA, 19 nt, Artificial Sequence
  Description of Artificial Sequence: Synthetic oligonucleotide
uacggagcaacgagucugc

SEQ ID NO: 1592707 - RNA, 19 nt, Artificial Sequence
  Description of Artificial Sequence: Synthetic oligonucleotide
cucucagccuggaaacucc

SEQ ID NO: 1592708 - RNA, 19 nt, Artificial Sequence
  Description of Artificial Sequence: Synthetic oligonucleotide
auaaggugaucucguccag

SEQ ID NO: 1592709 - RNA, 19 nt, Artificial Sequence
  Description of Artificial Sequence: Synthetic oligonucleotide
gagcgcagauguugcaggg

SEQ ID NO: 1592710 - RNA, 19 nt, Artificial Sequence
  Description of Artificial Sequence: Synthetic oligonucleotide
aaugucguccucugccuua

SEQ ID NO: 1592711 - RNA, 19 nt, Artificial Sequence
  Description of Artificial Sequence: Synthetic oligonucleotide
gcaacgagucugcagacag

SEQ ID NO: 1592712 - RNA, 19 nt, Artificial Sequence
  Description of Artificial Sequence: Synthetic oligonucleotide
cagugaacaugugacacac

SEQ ID NO: 1592713 - RNA, 19 nt, Artificial Sequence
  Description of Artificial Sequence: Synthetic oligonucleotide
gucguccucugccuuacgg

SEQ ID NO: 1592714 - RNA, 19 nt, Artificial Sequence
  Description of Artificial Sequence: Synthetic oligonucleotide
gagguggugcagauuacag

SEQ ID NO: 1592715 - RNA, 19 nt, Artificial Sequence
  Description of Artificial Sequence: Synthetic oligonucleotide
gagucagccacagagcaga

SEQ ID NO: 1592716 - RNA, 19 nt, Artificial Sequence
  Description of Artificial Sequence: Synthetic oligonucleotide
caacugcgcaccuucuugc

SEQ ID NO: 1592717 - RNA, 19 nt, Artificial Sequence
  Description of Artificial Sequence: Synthetic oligonucleotide
agggauucuccagugaaca

SEQ ID NO: 1592718 - RNA, 19 nt, Artificial Sequence
  Description of Artificial Sequence: Synthetic oligonucleotide
aauggggcacguugcucug

SEQ ID NO: 1592719 - RNA, 19 nt, Artificial Sequence
  Description of Artificial Sequence: Synthetic oligonucleotide
agccacugagguuaaggcu

SEQ ID NO: 1592720 - RNA, 19 nt, Artificial Sequence
  Description of Artificial Sequence: Synthetic oligonucleotide
caacgacagagacugcagc

SEQ ID NO: 1592721 - RNA, 19 nt, Artificial Sequence
  Description of Artificial Sequence: Synthetic oligonucleotide
gacacacgacaacuugcag

SEQ ID NO: 1592722 - RNA, 19 nt, Artificial Sequence
  Description of Artificial Sequence: Synthetic oligonucleotide
caugaguuggccggagagg

SEQ ID NO: 1592723 - RNA, 19 nt, Artificial Sequence
  Description of Artificial Sequence: Synthetic oligonucleotide
augaguuggccggagagga

SEQ ID NO: 1592724 - RNA, 19 nt, Artificial Sequence
  Description of Artificial Sequence: Synthetic oligonucleotide
cuggcaucgaagccggggc

SEQ ID NO: 1592725 - RNA, 19 nt, Artificial Sequence
  Description of Artificial Sequence: Synthetic oligonucleotide
ugguagagcccgacaacca

SEQ ID NO: 1592726 - RNA, 19 nt, Artificial Sequence
  Description of Artificial Sequence: Synthetic oligonucleotide
agcacccucacgugugcgg

SEQ ID NO: 1592727 - RNA, 19 nt, Artificial Sequence
  Description of Artificial Sequence: Synthetic oligonucleotide
ugugacagcgggccacaug

SEQ ID NO: 1592728 - RNA, 19 nt, Artificial Sequence
  Description of Artificial Sequence: Synthetic oligonucleotide
uccugaccaauuuccuuca

SEQ ID NO: 1592729 - RNA, 19 nt, Artificial Sequence
  Description of Artificial Sequence: Synthetic oligonucleotide
ugagguggugcagauuaca

SEQ ID NO: 1592730 - RNA, 19 nt, Artificial Sequence
  Description of Artificial Sequence: Synthetic oligonucleotide
caaccaauagcagccugcc

SEQ ID NO: 1592731 - RNA, 19 nt, Artificial Sequence
  Description of Artificial Sequence: Synthetic oligonucleotide
cugagucagccacagagca

SEQ ID NO: 1592732 - RNA, 19 nt, Artificial Sequence
  Description of Artificial Sequence: Synthetic oligonucleotide
ucguccucugccuuacgga

SEQ ID NO: 1592733 - RNA, 19 nt, Artificial Sequence
  Description of Artificial Sequence: Synthetic oligonucleotide
cucaccaccacagguucgg

SEQ ID NO: 1592734 - RNA, 19 nt, Artificial Sequence
  Description of Artificial Sequence: Synthetic oligonucleotide
auaaaguccagcacagcau

SEQ ID NO: 1592735 - RNA, 19 nt, Artificial Sequence
  Description of Artificial Sequence: Synthetic oligonucleotide
cacgucgauggccagugag

SEQ ID NO: 1592736 - RNA, 19 nt, Artificial Sequence
  Description of Artificial Sequence: Synthetic oligonucleotide
cagugagcgcagauguugc

SEQ ID NO: 1592737 - RNA, 19 nt, Artificial Sequence
  Description of Artificial Sequence: Synthetic oligonucleotide
ucgaugguagagcccgaca

SEQ ID NO: 1592738 - RNA, 19 nt, Artificial Sequence
  Description of Artificial Sequence: Synthetic oligonucleotide
ggccauaaaguccagcaca

SEQ ID NO: 1592739 - RNA, 19 nt, Artificial Sequence
  Description of Artificial Sequence: Synthetic oligonucleotide
accauaggauggugugaac

SEQ ID NO: 1592740 - RNA, 19 nt, Artificial Sequence
  Description of Artificial Sequence: Synthetic oligonucleotide
acuccggaggagugccugc

SEQ ID NO: 1592741 - RNA, 19 nt, Artificial Sequence
  Description of Artificial Sequence: Synthetic oligonucleotide
aaccaauagcagccugcca

SEQ ID NO: 1592742 - RNA, 19 nt, Artificial Sequence
  Description of Artificial Sequence: Synthetic oligonucleotide
aggccaaugcucacuaguc

SEQ ID NO: 1592743 - RNA, 19 nt, Artificial Sequence
  Description of Artificial Sequence: Synthetic oligonucleotide
cccaccaugaguuggccgg

SEQ ID NO: 1592744 - RNA, 19 nt, Artificial Sequence
  Description of Artificial Sequence: Synthetic oligonucleotide
gaggugagguggcagccug

SEQ ID NO: 1592745 - RNA, 19 nt, Artificial Sequence
  Description of Artificial Sequence: Synthetic oligonucleotide
aggacucuaccagugucuc

SEQ ID NO: 1592746 - RNA, 19 nt, Artificial Sequence
  Description of Artificial Sequence: Synthetic oligonucleotide
uugcagugcuucagcaugu

SEQ ID NO: 1592747 - RNA, 19 nt, Artificial Sequence
  Description of Artificial Sequence: Synthetic oligonucleotide
agcguggccuugcacucac

SEQ ID NO: 1592748 - RNA, 19 nt, Artificial Sequence
  Description of Artificial Sequence: Synthetic oligonucleotide
caggccuaggugcugaguc

SEQ ID NO: 1592749 - RNA, 19 nt, Artificial Sequence
  Description of Artificial Sequence: Synthetic oligonucleotide
uggaucuccugaccaauuu

SEQ ID NO: 1592750 - RNA, 19 nt, Artificial Sequence
  Description of Artificial Sequence: Synthetic oligonucleotide
acagcgggccacaugcucg

SEQ ID NO: 1592751 - RNA, 19 nt, Artificial Sequence
  Description of Artificial Sequence: Synthetic oligonucleotide
gagaggacagcacccucac

SEQ ID NO: 1592752 - RNA, 19 nt, Artificial Sequence
  Description of Artificial Sequence: Synthetic oligonucleotide
ucacgugugcgguccagga

SEQ ID NO: 1592753 - RNA, 19 nt, Artificial Sequence
  Description of Artificial Sequence: Synthetic oligonucleotide
ugacgacauucaaggcggg

SEQ ID NO: 1592754 - RNA, 19 nt, Artificial Sequence
  Description of Artificial Sequence: Synthetic oligonucleotide
uagacagccucagggaggu

SEQ ID NO: 1592755 - RNA, 19 nt, Artificial Sequence
  Description of Artificial Sequence: Synthetic oligonucleotide
agccugucagcaugccugg

SEQ ID NO: 1592756 - RNA, 19 nt, Artificial Sequence
  Description of Artificial Sequence: Synthetic oligonucleotide
ugugcgguccaggaucuca

SEQ ID NO: 1592757 - RNA, 19 nt, Artificial Sequence
  Description of Artificial Sequence: Synthetic oligonucleotide
uagagcccgacaaccaaua

SEQ ID NO: 1592758 - RNA, 19 nt, Artificial Sequence
  Description of Artificial Sequence: Synthetic oligonucleotide
agcgagagggaacgcaggu

SEQ ID NO: 1592759 - RNA, 19 nt, Artificial Sequence
  Description of Artificial Sequence: Synthetic oligonucleotide
ggugaugagggauucucca

SEQ ID NO: 1592760 - RNA, 19 nt, Artificial Sequence
  Description of Artificial Sequence: Synthetic oligonucleotide
cagccuggaaacuccggag

SEQ ID NO: 1592761 - RNA, 19 nt, Artificial Sequence
  Description of Artificial Sequence: Synthetic oligonucleotide
gcagauuacagcaggacuc

SEQ ID NO: 1592762 - RNA, 19 nt, Artificial Sequence
  Description of Artificial Sequence: Synthetic oligonucleotide
ggauucuccagugaacaug

SEQ ID NO: 1592763 - RNA, 19 nt, Artificial Sequence
  Description of Artificial Sequence: Synthetic oligonucleotide
aacuccggaggagugccug

SEQ ID NO: 1592764 - RNA, 19 nt, Artificial Sequence
  Description of Artificial Sequence: Synthetic oligonucleotide
gacagcacccucacgugug

SEQ ID NO: 1592765 - RNA, 19 nt, Artificial Sequence
  Description of Artificial Sequence: Synthetic oligonucleotide
agagcccgacaaccaauag

SEQ ID NO: 1592766 - RNA, 19 nt, Artificial Sequence
  Description of Artificial Sequence: Synthetic oligonucleotide
cccgacaaccaauagcagc

SEQ ID NO: 1592767 - RNA, 19 nt, Artificial Sequence
  Description of Artificial Sequence: Synthetic oligonucleotide
acgacaacuugcaggcaac

SEQ ID NO: 1592768 - RNA, 19 nt, Artificial Sequence
  Description of Artificial Sequence: Synthetic oligonucleotide
cugcagagaugaacacugg

SEQ ID NO: 1592769 - RNA, 19 nt, Artificial Sequence
  Description of Artificial Sequence: Synthetic oligonucleotide
cucucaccaccacagguuc

SEQ ID NO: 1592770 - RNA, 19 nt, Artificial Sequence
  Description of Artificial Sequence: Synthetic oligonucleotide
agggcugaaagcaccuuag

SEQ ID NO: 1592771 - RNA, 19 nt, Artificial Sequence
  Description of Artificial Sequence: Synthetic oligonucleotide
caccaggccugugacagcg

SEQ ID NO: 1592772 - RNA, 19 nt, Artificial Sequence
  Description of Artificial Sequence: Synthetic oligonucleotide
aggcgcugcagagaugaac

SEQ ID NO: 1592773 - RNA, 19 nt, Artificial Sequence
  Description of Artificial Sequence: Synthetic oligonucleotide
uucgguggcuccucagcca

SEQ ID NO: 1592774 - RNA, 19 nt, Artificial Sequence
  Description of Artificial Sequence: Synthetic oligonucleotide
accauggggacaucucgga

SEQ ID NO: 1592775 - RNA, 19 nt, Artificial Sequence
  Description of Artificial Sequence: Synthetic oligonucleotide
uuggccggagaggacagca

SEQ ID NO: 1592776 - RNA, 19 nt, Artificial Sequence
  Description of Artificial Sequence: Synthetic oligonucleotide
agcagacaggcagcgagag

SEQ ID NO: 1592777 - RNA, 19 nt, Artificial Sequence
  Description of Artificial Sequence: Synthetic oligonucleotide
gagguuaaggcuggcccug

SEQ ID NO: 1592778 - RNA, 19 nt, Artificial Sequence
  Description of Artificial Sequence: Synthetic oligonucleotide
aucucggaugacaucuguc

SEQ ID NO: 1592779 - RNA, 19 nt, Artificial Sequence
  Description of Artificial Sequence: Synthetic oligonucleotide
acgacagagacugcagcug

SEQ ID NO: 1592780 - RNA, 19 nt, Artificial Sequence
  Description of Artificial Sequence: Synthetic oligonucleotide
ggcaacgggccauaaaguc

SEQ ID NO: 1592781 - RNA, 19 nt, Artificial Sequence
  Description of Artificial Sequence: Synthetic oligonucleotide
cgagagggaacgcaggugg

SEQ ID NO: 1592782 - RNA, 19 nt, Artificial Sequence
  Description of Artificial Sequence: Synthetic oligonucleotide
acuugcaggcaacgggcca

SEQ ID NO: 1592783 - RNA, 19 nt, Artificial Sequence
  Description of Artificial Sequence: Synthetic oligonucleotide
gugagcgcagauguugcag

SEQ ID NO: 1592784 - RNA, 19 nt, Artificial Sequence
  Description of Artificial Sequence: Synthetic oligonucleotide
agcccucucaccaccacag

SEQ ID NO: 1592785 - RNA, 19 nt, Artificial Sequence
  Description of Artificial Sequence: Synthetic oligonucleotide
ggcauguacaccaccuucc

SEQ ID NO: 1592786 - RNA, 19 nt, Artificial Sequence
  Description of Artificial Sequence: Synthetic oligonucleotide
cucagggaggugagguggc

SEQ ID NO: 1592787 - RNA, 19 nt, Artificial Sequence
  Description of Artificial Sequence: Synthetic oligonucleotide
augagggauucuccaguga

SEQ ID NO: 1592788 - RNA, 19 nt, Artificial Sequence
  Description of Artificial Sequence: Synthetic oligonucleotide
gaguuggccggagaggaca

SEQ ID NO: 1592789 - RNA, 19 nt, Artificial Sequence
  Description of Artificial Sequence: Synthetic oligonucleotide
cucacgucgauggccagug

SEQ ID NO: 1592790 - RNA, 19 nt, Artificial Sequence
  Description of Artificial Sequence: Synthetic oligonucleotide
augucguccucugccuuac

SEQ ID NO: 1592791 - RNA, 19 nt, Artificial Sequence
  Description of Artificial Sequence: Synthetic oligonucleotide
cagcaggacucuaccagug

SEQ ID NO: 1592792 - RNA, 19 nt, Artificial Sequence
  Description of Artificial Sequence: Synthetic oligonucleotide
aaggcgggccucucagccu

SEQ ID NO: 1592793 - RNA, 19 nt, Artificial Sequence
  Description of Artificial Sequence: Synthetic oligonucleotide
agcaugucagcaagagcag

SEQ ID NO: 1592794 - RNA, 19 nt, Artificial Sequence
  Description of Artificial Sequence: Synthetic oligonucleotide
gacagcgggccacaugcuc

SEQ ID NO: 1592795 - RNA, 19 nt, Artificial Sequence
  Description of Artificial Sequence: Synthetic oligonucleotide
cagcgagagggaacgcagg

SEQ ID NO: 1592796 - RNA, 19 nt, Artificial Sequence
  Description of Artificial Sequence: Synthetic oligonucleotide
gagggauucuccagugaac

SEQ ID NO: 1592797 - RNA, 19 nt, Artificial Sequence
  Description of Artificial Sequence: Synthetic oligonucleotide
agccacggggcacugcaug

SEQ ID NO: 1592798 - RNA, 19 nt, Artificial Sequence
  Description of Artificial Sequence: Synthetic oligonucleotide
auucaaggcgggccucuca

SEQ ID NO: 1592799 - RNA, 19 nt, Artificial Sequence
  Description of Artificial Sequence: Synthetic oligonucleotide
ugaguuggccggagaggac

SEQ ID NO: 1592800 - RNA, 19 nt, Artificial Sequence
  Description of Artificial Sequence: Synthetic oligonucleotide
gacgacauucaaggcgggc

SEQ ID NO: 1592801 - RNA, 19 nt, Artificial Sequence
  Description of Artificial Sequence: Synthetic oligonucleotide
uaaggcuggcccugguaau

SEQ ID NO: 1592802 - RNA, 19 nt, Artificial Sequence
  Description of Artificial Sequence: Synthetic oligonucleotide
cuucagcagagaccagaac

SEQ ID NO: 1592803 - RNA, 19 nt, Artificial Sequence
  Description of Artificial Sequence: Synthetic oligonucleotide
uggcaucgaagccggggcu

SEQ ID NO: 1592804 - RNA, 19 nt, Artificial Sequence
  Description of Artificial Sequence: Synthetic oligonucleotide
gcaacgggccauaaagucc

SEQ ID NO: 1592805 - RNA, 19 nt, Artificial Sequence
  Description of Artificial Sequence: Synthetic oligonucleotide
agugaacaugugacacacg

SEQ ID NO: 1592806 - RNA, 19 nt, Artificial Sequence
  Description of Artificial Sequence: Synthetic oligonucleotide
ucaugggcugguaggccuc

SEQ ID NO: 1592807 - RNA, 19 nt, Artificial Sequence
  Description of Artificial Sequence: Synthetic oligonucleotide
caugugacacacgacaacu

SEQ ID NO: 1592808 - RNA, 19 nt, Artificial Sequence
  Description of Artificial Sequence: Synthetic oligonucleotide
gucugaaccccaacugcgc

SEQ ID NO: 1592809 - RNA, 19 nt, Artificial Sequence
  Description of Artificial Sequence: Synthetic oligonucleotide
cucagcguggccuugcacu

SEQ ID NO: 1592810 - RNA, 19 nt, Artificial Sequence
  Description of Artificial Sequence: Synthetic oligonucleotide
aggccuaggugcugaguca

SEQ ID NO: 1592811 - RNA, 19 nt, Artificial Sequence
  Description of Artificial Sequence: Synthetic oligonucleotide
ugucguccucugccuuacg

SEQ ID NO: 1592812 - RNA, 19 nt, Artificial Sequence
  Description of Artificial Sequence: Synthetic oligonucleotide
guaggccaaugcucacuag

SEQ ID NO: 1592813 - RNA, 19 nt, Artificial Sequence
  Description of Artificial Sequence: Synthetic oligonucleotide
gugcagauuacagcaggac

SEQ ID NO: 1592814 - RNA, 19 nt, Artificial Sequence
  Description of Artificial Sequence: Synthetic oligonucleotide
ccuuacggagcaacgaguc

SEQ ID NO: 1592815 - RNA, 19 nt, Artificial Sequence
  Description of Artificial Sequence: Synthetic oligonucleotide
agccucagggaggugaggu

SEQ ID NO: 1592816 - RNA, 19 nt, Artificial Sequence
  Description of Artificial Sequence: Synthetic oligonucleotide
ugggcagcugagagauuga

SEQ ID NO: 1592817 - RNA, 19 nt, Artificial Sequence
  Description of Artificial Sequence: Synthetic oligonucleotide
cugcaugcauggccggcgg

SEQ ID NO: 1592818 - RNA, 19 nt, Artificial Sequence
  Description of Artificial Sequence: Synthetic oligonucleotide
ccaauagcagccugccaag

SEQ ID NO: 1592819 - RNA, 19 nt, Artificial Sequence
  Description of Artificial Sequence: Synthetic oligonucleotide
gggcacugcaugcauggcc

SEQ ID NO: 1592820 - RNA, 19 nt, Artificial Sequence
  Description of Artificial Sequence: Synthetic oligonucleotide
caauuuccuucaccagcug

SEQ ID NO: 1592821 - RNA, 19 nt, Artificial Sequence
  Description of Artificial Sequence: Synthetic oligonucleotide
cagcgucugcuugagcucc

SEQ ID NO: 1592822 - RNA, 19 nt, Artificial Sequence
  Description of Artificial Sequence: Synthetic oligonucleotide
ccaacgacagagacugcag

SEQ ID NO: 1592823 - RNA, 19 nt, Artificial Sequence
  Description of Artificial Sequence: Synthetic oligonucleotide
acaccauaggaugguguga

SEQ ID NO: 1592824 - RNA, 19 nt, Artificial Sequence
  Description of Artificial Sequence: Synthetic oligonucleotide
ccugucagcaugccugggg

SEQ ID NO: 1592825 - RNA, 19 nt, Artificial Sequence
  Description of Artificial Sequence: Synthetic oligonucleotide
cucacgugugcgguccagg

SEQ ID NO: 1592826 - RNA, 19 nt, Artificial Sequence
  Description of Artificial Sequence: Synthetic oligonucleotide
accaugaguuggccggaga

SEQ ID NO: 1592827 - RNA, 19 nt, Artificial Sequence
  Description of Artificial Sequence: Synthetic oligonucleotide
uccggaggagugccugcug

SEQ ID NO: 1592828 - RNA, 19 nt, Artificial Sequence
  Description of Artificial Sequence: Synthetic oligonucleotide
cagccugccaaguucagcu

SEQ ID NO: 1592829 - RNA, 19 nt, Artificial Sequence
  Description of Artificial Sequence: Synthetic oligonucleotide
ccaacugcgcaccuucuug

SEQ ID NO: 1592830 - RNA, 19 nt, Artificial Sequence
  Description of Artificial Sequence: Synthetic oligonucleotide
agccugccaaguucagcug

SEQ ID NO: 1592831 - RNA, 19 nt, Artificial Sequence
  Description of Artificial Sequence: Synthetic oligonucleotide
agguucgguggcuccucag

SEQ ID NO: 1592832 - RNA, 19 nt, Artificial Sequence
  Description of Artificial Sequence: Synthetic oligonucleotide
ggaaacuccggaggagugc

SEQ ID NO: 1592833 - RNA, 19 nt, Artificial Sequence
  Description of Artificial Sequence: Synthetic oligonucleotide
agguuaaggcuggcccugg

SEQ ID NO: 1592834 - RNA, 19 nt, Artificial Sequence
  Description of Artificial Sequence: Synthetic oligonucleotide
cugucaggcccucguggag

SEQ ID NO: 1592835 - RNA, 19 nt, Artificial Sequence
  Description of Artificial Sequence: Synthetic oligonucleotide
ggccggagaggacagcacc

SEQ ID NO: 1592836 - RNA, 19 nt, Artificial Sequence
  Description of Artificial Sequence: Synthetic oligonucleotide
cacucacugcucagcuggc

SEQ ID NO: 1592837 - RNA, 19 nt, Artificial Sequence
  Description of Artificial Sequence: Synthetic oligonucleotide
cagccugacagguucaccu

SEQ ID NO: 1592838 - RNA, 19 nt, Artificial Sequence
  Description of Artificial Sequence: Synthetic oligonucleotide
aggugcaccauggggacau

SEQ ID NO: 1592839 - RNA, 19 nt, Artificial Sequence
  Description of Artificial Sequence: Synthetic oligonucleotide
acauucaaggcgggccucu

SEQ ID NO: 1592840 - RNA, 19 nt, Artificial Sequence
  Description of Artificial Sequence: Synthetic oligonucleotide
aguuggccggagaggacag

SEQ ID NO: 1592841 - RNA, 19 nt, Artificial Sequence
  Description of Artificial Sequence: Synthetic oligonucleotide
guaauggggcacguugcuc

SEQ ID NO: 1592842 - RNA, 19 nt, Artificial Sequence
  Description of Artificial Sequence: Synthetic oligonucleotide
ugacagcgggccacaugcu

SEQ ID NO: 1592843 - RNA, 19 nt, Artificial Sequence
  Description of Artificial Sequence: Synthetic oligonucleotide
cugacagguucaccuucac

SEQ ID NO: 1592844 - RNA, 19 nt, Artificial Sequence
  Description of Artificial Sequence: Synthetic oligonucleotide
agauguugcagggcugaaa

SEQ ID NO: 1592845 - RNA, 19 nt, Artificial Sequence
  Description of Artificial Sequence: Synthetic oligonucleotide
agcaacgagucugcagaca

SEQ ID NO: 1592846 - RNA, 19 nt, Artificial Sequence
  Description of Artificial Sequence: Synthetic oligonucleotide
aaagcaccuuagacagccu

SEQ ID NO: 1592847 - RNA, 19 nt, Artificial Sequence
  Description of Artificial Sequence: Synthetic oligonucleotide
uacucggcucagcguggcc

SEQ ID NO: 1592848 - RNA, 19 nt, Artificial Sequence
  Description of Artificial Sequence: Synthetic oligonucleotide
ccagugagcgcagauguug

SEQ ID NO: 1592849 - RNA, 19 nt, Artificial Sequence
  Description of Artificial Sequence: Synthetic oligonucleotide
guuaaggcuggcccuggua

SEQ ID NO: 1592850 - RNA, 19 nt, Artificial Sequence
  Description of Artificial Sequence: Synthetic oligonucleotide
gcaccacaccauaggaugg

SEQ ID NO: 1592851 - RNA, 19 nt, Artificial Sequence
  Description of Artificial Sequence: Synthetic oligonucleotide
uggccggagaggacagcac

SEQ ID NO: 1592852 - RNA, 19 nt, Artificial Sequence
  Description of Artificial Sequence: Synthetic oligonucleotide
caccauaggauggugugaa

SEQ ID NO: 1592853 - RNA, 19 nt, Artificial Sequence
  Description of Artificial Sequence: Synthetic oligonucleotide
gggccauaaaguccagcac

SEQ ID NO: 1592854 - RNA, 19 nt, Artificial Sequence
  Description of Artificial Sequence: Synthetic oligonucleotide
ccuuagacagccucaggga

SEQ ID NO: 1592855 - RNA, 19 nt, Artificial Sequence
  Description of Artificial Sequence: Synthetic oligonucleotide
gguagagcccgacaaccaa

SEQ ID NO: 1592856 - RNA, 19 nt, Artificial Sequence
  Description of Artificial Sequence: Synthetic oligonucleotide
gccacucugcuuuuaaaua

SEQ ID NO: 1592857 - RNA, 19 nt, Artificial Sequence
  Description of Artificial Sequence: Synthetic oligonucleotide
cucgaugguagagcccgac

SEQ ID NO: 1592858 - RNA, 19 nt, Artificial Sequence
  Description of Artificial Sequence: Synthetic oligonucleotide
agucagccacagagcagac

SEQ ID NO: 1592859 - RNA, 19 nt, Artificial Sequence
  Description of Artificial Sequence: Synthetic oligonucleotide
cugacacuguaggccaaug

SEQ ID NO: 1592860 - RNA, 19 nt, Artificial Sequence
  Description of Artificial Sequence: Synthetic oligonucleotide
cgcggucaggccuaggugc

SEQ ID NO: 1592861 - RNA, 19 nt, Artificial Sequence
  Description of Artificial Sequence: Synthetic oligonucleotide
cacuaguccagagccuguc

SEQ ID NO: 1592862 - RNA, 19 nt, Artificial Sequence
  Description of Artificial Sequence: Synthetic oligonucleotide
agccugacagguucaccuu

SEQ ID NO: 1592863 - RNA, 19 nt, Artificial Sequence
  Description of Artificial Sequence: Synthetic oligonucleotide
gcucagcuggcuggcaucg

SEQ ID NO: 1592864 - RNA, 19 nt, Artificial Sequence
  Description of Artificial Sequence: Synthetic oligonucleotide
ucaggccuaggugcugagu

SEQ ID NO: 1592865 - RNA, 19 nt, Artificial Sequence
  Description of Artificial Sequence: Synthetic oligonucleotide
ugcgguccaggaucucaaa

SEQ ID NO: 1592866 - RNA, 19 nt, Artificial Sequence
  Description of Artificial Sequence: Synthetic oligonucleotide
cuucaccaggccugugaca

SEQ ID NO: 1592867 - RNA, 19 nt, Artificial Sequence
  Description of Artificial Sequence: Synthetic oligonucleotide
ucacgucgauggccaguga

SEQ ID NO: 1592868 - RNA, 19 nt, Artificial Sequence
  Description of Artificial Sequence: Synthetic oligonucleotide
gggaacgcagguggcagag

SEQ ID NO: 1592869 - RNA, 19 nt, Artificial Sequence
  Description of Artificial Sequence: Synthetic oligonucleotide
gucaggcccucguggagca

SEQ ID NO: 1592870 - RNA, 19 nt, Artificial Sequence
  Description of Artificial Sequence: Synthetic oligonucleotide
gguucaccuucaccaggcc

SEQ ID NO: 1592871 - RNA, 19 nt, Artificial Sequence
  Description of Artificial Sequence: Synthetic oligonucleotide
ggacucuaccagugucucc

SEQ ID NO: 1592872 - RNA, 19 nt, Artificial Sequence
  Description of Artificial Sequence: Synthetic oligonucleotide
ccaauuuccuucaccagcu

SEQ ID NO: 1592873 - RNA, 19 nt, Artificial Sequence
  Description of Artificial Sequence: Synthetic oligonucleotide
ccauaggauggugugaaca

SEQ ID NO: 1592874 - RNA, 19 nt, Artificial Sequence
  Description of Artificial Sequence: Synthetic oligonucleotide
caaaguagagcagcaacuu

SEQ ID NO: 1592875 - RNA, 19 nt, Artificial Sequence
  Description of Artificial Sequence: Synthetic oligonucleotide
cgucgauggccagugagcg

SEQ ID NO: 1592876 - RNA, 19 nt, Artificial Sequence
  Description of Artificial Sequence: Synthetic oligonucleotide
aaacuccggaggagugccu

SEQ ID NO: 1592877 - RNA, 19 nt, Artificial Sequence
  Description of Artificial Sequence: Synthetic oligonucleotide
ggcacguugcucuggccca

SEQ ID NO: 1592878 - RNA, 19 nt, Artificial Sequence
  Description of Artificial Sequence: Synthetic oligonucleotide
gcccaccaugaguuggccg

SEQ ID NO: 1592879 - RNA, 19 nt, Artificial Sequence
  Description of Artificial Sequence: Synthetic oligonucleotide
ggccagugagcgcagaugu

SEQ ID NO: 1592880 - RNA, 19 nt, Artificial Sequence
  Description of Artificial Sequence: Synthetic oligonucleotide
cgacagagacugcagcugc

SEQ ID NO: 1592881 - RNA, 19 nt, Artificial Sequence
  Description of Artificial Sequence: Synthetic oligonucleotide
ggugcagauuacagcagga

SEQ ID NO: 1592882 - RNA, 19 nt, Artificial Sequence
  Description of Artificial Sequence: Synthetic oligonucleotide
caaugcucacuaguccaga

SEQ ID NO: 1592883 - RNA, 19 nt, Artificial Sequence
  Description of Artificial Sequence: Synthetic oligonucleotide
ggggcucacgucgauggcc

SEQ ID NO: 1592884 - RNA, 19 nt, Artificial Sequence
  Description of Artificial Sequence: Synthetic oligonucleotide
cugccuuacggagcaacga

SEQ ID NO: 1592885 - RNA, 19 nt, Artificial Sequence
  Description of Artificial Sequence: Synthetic oligonucleotide
cuuacggagcaacgagucu

SEQ ID NO: 1592886 - RNA, 19 nt, Artificial Sequence
  Description of Artificial Sequence: Synthetic oligonucleotide
augugacacacgacaacuu

SEQ ID NO: 1592887 - RNA, 19 nt, Artificial Sequence
  Description of Artificial Sequence: Synthetic oligonucleotide
guacucggcucagcguggc

SEQ ID NO: 1592888 - RNA, 19 nt, Artificial Sequence
  Description of Artificial Sequence: Synthetic oligonucleotide
gccuggaaacuccggagga

SEQ ID NO: 1592889 - RNA, 19 nt, Artificial Sequence
  Description of Artificial Sequence: Synthetic oligonucleotide
ccagugaacaugugacaca

SEQ ID NO: 1592890 - RNA, 19 nt, Artificial Sequence
  Description of Artificial Sequence: Synthetic oligonucleotide
cugagagauugagguggug

SEQ ID NO: 1592891 - RNA, 19 nt, Artificial Sequence
  Description of Artificial Sequence: Synthetic oligonucleotide
cagauuacagcaggacucu

SEQ ID NO: 1592892 - RNA, 19 nt, Artificial Sequence
  Description of Artificial Sequence: Synthetic oligonucleotide
ccggaggagugccugcugc

SEQ ID NO: 1592893 - RNA, 19 nt, Artificial Sequence
  Description of Artificial Sequence: Synthetic oligonucleotide
ugcgcaccuucuugccaaa

SEQ ID NO: 1592894 - RNA, 19 nt, Artificial Sequence
  Description of Artificial Sequence: Synthetic oligonucleotide
cagcacccucacgugugcg

SEQ ID NO: 1592895 - RNA, 19 nt, Artificial Sequence
  Description of Artificial Sequence: Synthetic oligonucleotide
ggugagguggcagccugac

SEQ ID NO: 1592896 - RNA, 19 nt, Artificial Sequence
  Description of Artificial Sequence: Synthetic oligonucleotide
gagcaggcauguacaccac

SEQ ID NO: 1592897 - RNA, 19 nt, Artificial Sequence
  Description of Artificial Sequence: Synthetic oligonucleotide
gcgcuugcagugcuucagc

SEQ ID NO: 1592898 - RNA, 19 nt, Artificial Sequence
  Description of Artificial Sequence: Synthetic oligonucleotide
caccaugaguuggccggag

SEQ ID NO: 1592899 - RNA, 19 nt, Artificial Sequence
  Description of Artificial Sequence: Synthetic oligonucleotide
cauucaaggcgggccucuc

SEQ ID NO: 1592900 - RNA, 19 nt, Artificial Sequence
  Description of Artificial Sequence: Synthetic oligonucleotide
gccggagaggacagcaccc

SEQ ID NO: 1592901 - RNA, 19 nt, Artificial Sequence
  Description of Artificial Sequence: Synthetic oligonucleotide
gagucugcagacaggcaau

SEQ ID NO: 1592902 - RNA, 19 nt, Artificial Sequence
  Description of Artificial Sequence: Synthetic oligonucleotide
ucaccaccacagguucggu

SEQ ID NO: 1592903 - RNA, 19 nt, Artificial Sequence
  Description of Artificial Sequence: Synthetic oligonucleotide
aagccggggcucacgucga

SEQ ID NO: 1592904 - RNA, 19 nt, Artificial Sequence
  Description of Artificial Sequence: Synthetic oligonucleotide
caucucggaugacaucugu

SEQ ID NO: 1592905 - RNA, 19 nt, Artificial Sequence
  Description of Artificial Sequence: Synthetic oligonucleotide
gugagguggcagccugaca

SEQ ID NO: 1592906 - RNA, 19 nt, Artificial Sequence
  Description of Artificial Sequence: Synthetic oligonucleotide
gggcugaaagcaccuuaga

SEQ ID NO: 1592907 - RNA, 19 nt, Artificial Sequence
  Description of Artificial Sequence: Synthetic oligonucleotide
cagcccucucaccaccaca

SEQ ID NO: 1592908 - RNA, 19 nt, Artificial Sequence
  Description of Artificial Sequence: Synthetic oligonucleotide
cggagcaacgagucugcag

SEQ ID NO: 1592909 - RNA, 19 nt, Artificial Sequence
  Description of Artificial Sequence: Synthetic oligonucleotide
cuggcccaggaagggguug

SEQ ID NO: 1592910 - RNA, 19 nt, Artificial Sequence
  Description of Artificial Sequence: Synthetic oligonucleotide
guuggccggagaggacagc

SEQ ID NO: 1592911 - RNA, 19 nt, Artificial Sequence
  Description of Artificial Sequence: Synthetic oligonucleotide
cacguugcucuggcccacc

SEQ ID NO: 1592912 - RNA, 19 nt, Artificial Sequence
  Description of Artificial Sequence: Synthetic oligonucleotide
acggggcacugcaugcaug

SEQ ID NO: 1592913 - RNA, 19 nt, Artificial Sequence
  Description of Artificial Sequence: Synthetic oligonucleotide
gcccugguaauggggcacg

SEQ ID NO: 1592914 - RNA, 19 nt, Artificial Sequence
  Description of Artificial Sequence: Synthetic oligonucleotide
guagagcccgacaaccaau

SEQ ID NO: 1592915 - RNA, 19 nt, Artificial Sequence
  Description of Artificial Sequence: Synthetic oligonucleotide
acacgacaacuugcaggca

SEQ ID NO: 1592916 - RNA, 19 nt, Artificial Sequence
  Description of Artificial Sequence: Synthetic oligonucleotide
gccuugcacucacugcuca

SEQ ID NO: 1592917 - RNA, 19 nt, Artificial Sequence
  Description of Artificial Sequence: Synthetic oligonucleotide
ugcaggcaacgggccauaa

SEQ ID NO: 1592918 - RNA, 19 nt, Artificial Sequence
  Description of Artificial Sequence: Synthetic oligonucleotide
gcgagagggaacgcaggug

SEQ ID NO: 1592919 - RNA, 19 nt, Artificial Sequence
  Description of Artificial Sequence: Synthetic oligonucleotide
agagccgggccaggagcug

SEQ ID NO: 1592920 - RNA, 19 nt, Artificial Sequence
  Description of Artificial Sequence: Synthetic oligonucleotide
gcccucucaccaccacagg

SEQ ID NO: 1592921 - RNA, 19 nt, Artificial Sequence
  Description of Artificial Sequence: Synthetic oligonucleotide
ucggcucagcguggccuug

SEQ ID NO: 1592922 - RNA, 19 nt, Artificial Sequence
  Description of Artificial Sequence: Synthetic oligonucleotide
gcgcagauguugcagggcu

SEQ ID NO: 1592923 - RNA, 19 nt, Artificial Sequence
  Description of Artificial Sequence: Synthetic oligonucleotide
cgaugguagagcccgacaa

SEQ ID NO: 1592924 - RNA, 19 nt, Artificial Sequence
  Description of Artificial Sequence: Synthetic oligonucleotide
gcgcggucaggccuaggug

SEQ ID NO: 1592925 - RNA, 19 nt, Artificial Sequence
  Description of Artificial Sequence: Synthetic oligonucleotide
cagcgggccacaugcucga

SEQ ID NO: 1592926 - RNA, 19 nt, Artificial Sequence
  Description of Artificial Sequence: Synthetic oligonucleotide
cagguuggccaacgacaga

SEQ ID NO: 1592927 - RNA, 19 nt, Artificial Sequence
  Description of Artificial Sequence: Synthetic oligonucleotide
acggagcaacgagucugca

SEQ ID NO: 1592928 - RNA, 19 nt, Artificial Sequence
  Description of Artificial Sequence: Synthetic oligonucleotide
gcgggccacaugcucgaug

SEQ ID NO: 1592929 - RNA, 19 nt, Artificial Sequence
  Description of Artificial Sequence: Synthetic oligonucleotide
ggcaucgaagccggggcuc

SEQ ID NO: 1592930 - RNA, 19 nt, Artificial Sequence
  Description of Artificial Sequence: Synthetic oligonucleotide
gggcucacgucgauggcca

SEQ ID NO: 1592931 - RNA, 19 nt, Artificial Sequence
  Description of Artificial Sequence: Synthetic oligonucleotide
cgacaacuugcaggcaacg

SEQ ID NO: 1592932 - RNA, 19 nt, Artificial Sequence
  Description of Artificial Sequence: Synthetic oligonucleotide
aagccacggggcacugcau

SEQ ID NO: 1592933 - RNA, 19 nt, Artificial Sequence
  Description of Artificial Sequence: Synthetic oligonucleotide
cuugcaggcaacgggccau

SEQ ID NO: 1592934 - RNA, 19 nt, Artificial Sequence
  Description of Artificial Sequence: Synthetic oligonucleotide
cagguucgguggcuccuca

SEQ ID NO: 1592935 - RNA, 19 nt, Artificial Sequence
  Description of Artificial Sequence: Synthetic oligonucleotide
ccugaccaauuuccuucac

SEQ ID NO: 1592936 - RNA, 19 nt, Artificial Sequence
  Description of Artificial Sequence: Synthetic oligonucleotide
ggaacgcagguggcagagc

SEQ ID NO: 1592937 - RNA, 19 nt, Artificial Sequence
  Description of Artificial Sequence: Synthetic oligonucleotide
gccugugacagcgggccac

SEQ ID NO: 1592938 - RNA, 19 nt, Artificial Sequence
  Description of Artificial Sequence: Synthetic oligonucleotide
gaaccccaacugcgcaccu

SEQ ID NO: 1592939 - RNA, 19 nt, Artificial Sequence
  Description of Artificial Sequence: Synthetic oligonucleotide
ggcaggcgcgcggucaggc

SEQ ID NO: 1592940 - RNA, 19 nt, Artificial Sequence
  Description of Artificial Sequence: Synthetic oligonucleotide
guggcggcccaggccauca

SEQ ID NO: 1592941 - RNA, 19 nt, Artificial Sequence
  Description of Artificial Sequence: Synthetic oligonucleotide
ccucagguccuucagcgcu

SEQ ID NO: 1592942 - RNA, 19 nt, Artificial Sequence
  Description of Artificial Sequence: Synthetic oligonucleotide
gguuggccaacgacagaga

SEQ ID NO: 1592943 - RNA, 19 nt, Artificial Sequence
  Description of Artificial Sequence: Synthetic oligonucleotide
gcaggcgcgcggucaggcc

SEQ ID NO: 1592944 - RNA, 19 nt, Artificial Sequence
  Description of Artificial Sequence: Synthetic oligonucleotide
gcuugcagugcuucagcau

SEQ ID NO: 1592945 - RNA, 19 nt, Artificial Sequence
  Description of Artificial Sequence: Synthetic oligonucleotide
gggacaggucugaacccca

SEQ ID NO: 1592946 - RNA, 19 nt, Artificial Sequence
  Description of Artificial Sequence: Synthetic oligonucleotide
caauagcagccugccaagu

SEQ ID NO: 1592947 - RNA, 19 nt, Artificial Sequence
  Description of Artificial Sequence: Synthetic oligonucleotide
gcaggcaacgggccauaaa

SEQ ID NO: 1592948 - RNA, 19 nt, Artificial Sequence
  Description of Artificial Sequence: Synthetic oligonucleotide
gcccgacaaccaauagcag

SEQ ID NO: 1592949 - RNA, 19 nt, Artificial Sequence
  Description of Artificial Sequence: Synthetic oligonucleotide
gcagcccucucaccaccac

SEQ ID NO: 1592950 - RNA, 19 nt, Artificial Sequence
  Description of Artificial Sequence: Synthetic oligonucleotide
gggauucuccagugaacau

SEQ ID NO: 1592951 - RNA, 19 nt, Artificial Sequence
  Description of Artificial Sequence: Synthetic oligonucleotide
uggggacaucucggaugac

SEQ ID NO: 1592952 - RNA, 19 nt, Artificial Sequence
  Description of Artificial Sequence: Synthetic oligonucleotide
caggcgcgcggucaggccu

SEQ ID NO: 1592953 - RNA, 19 nt, Artificial Sequence
  Description of Artificial Sequence: Synthetic oligonucleotide
gcacagcagggcaccacac

SEQ ID NO: 1592954 - RNA, 19 nt, Artificial Sequence
  Description of Artificial Sequence: Synthetic oligonucleotide
ccacaugcucgaugguaga

SEQ ID NO: 1592955 - RNA, 19 nt, Artificial Sequence
  Description of Artificial Sequence: Synthetic oligonucleotide
gccuuacggagcaacgagu

SEQ ID NO: 1592956 - RNA, 19 nt, Artificial Sequence
  Description of Artificial Sequence: Synthetic oligonucleotide
agccggggcucacgucgau

SEQ ID NO: 1592957 - RNA, 19 nt, Artificial Sequence
  Description of Artificial Sequence: Synthetic oligonucleotide
gguuaaggcuggcccuggu

SEQ ID NO: 1592958 - RNA, 19 nt, Artificial Sequence
  Description of Artificial Sequence: Synthetic oligonucleotide
ccacaccauaggauggugu

SEQ ID NO: 1592959 - RNA, 19 nt, Artificial Sequence
  Description of Artificial Sequence: Synthetic oligonucleotide
cacgugugcgguccaggau

SEQ ID NO: 1592960 - RNA, 19 nt, Artificial Sequence
  Description of Artificial Sequence: Synthetic oligonucleotide
caggugcaccauggggaca

SEQ ID NO: 1592961 - RNA, 19 nt, Artificial Sequence
  Description of Artificial Sequence: Synthetic oligonucleotide
gcgcaccuucuugccaaag

SEQ ID NO: 1592962 - RNA, 19 nt, Artificial Sequence
  Description of Artificial Sequence: Synthetic oligonucleotide
cagcguggccuugcacuca

SEQ ID NO: 1592963 - RNA, 19 nt, Artificial Sequence
  Description of Artificial Sequence: Synthetic oligonucleotide
ccuguacucggcucagcgu

SEQ ID NO: 1592964 - RNA, 19 nt, Artificial Sequence
  Description of Artificial Sequence: Synthetic oligonucleotide
gcugagagauugagguggu

SEQ ID NO: 1592965 - RNA, 19 nt, Artificial Sequence
  Description of Artificial Sequence: Synthetic oligonucleotide
ccucacgugugcgguccag

SEQ ID NO: 1592966 - RNA, 19 nt, Artificial Sequence
  Description of Artificial Sequence: Synthetic oligonucleotide
gcacguugcucuggcccac

SEQ ID NO: 1592967 - RNA, 19 nt, Artificial Sequence
  Description of Artificial Sequence: Synthetic oligonucleotide
ggcccucguggagcagggg

SEQ ID NO: 1592968 - RNA, 19 nt, Artificial Sequence
  Description of Artificial Sequence: Synthetic oligonucleotide
cucggcucagcguggccuu

SEQ ID NO: 1592969 - RNA, 19 nt, Artificial Sequence
  Description of Artificial Sequence: Synthetic oligonucleotide
ggccugugacagcgggcca

SEQ ID NO: 1592970 - RNA, 19 nt, Artificial Sequence
  Description of Artificial Sequence: Synthetic oligonucleotide
ccacaggcgcugcagagau

SEQ ID NO: 1592971 - RNA, 19 nt, Artificial Sequence
  Description of Artificial Sequence: Synthetic oligonucleotide
cuccggaggagugccugcu

SEQ ID NO: 1592972 - RNA, 19 nt, Artificial Sequence
  Description of Artificial Sequence: Synthetic oligonucleotide
gguuggggacaggucugaa

SEQ ID NO: 1592973 - RNA, 19 nt, Artificial Sequence
  Description of Artificial Sequence: Synthetic oligonucleotide
gcuuggggccaggcagccc

SEQ ID NO: 1592974 - RNA, 19 nt, Artificial Sequence
  Description of Artificial Sequence: Synthetic oligonucleotide
gcucacuaguccagagccu

SEQ ID NO: 1592975 - RNA, 19 nt, Artificial Sequence
  Description of Artificial Sequence: Synthetic oligonucleotide
caggcgcugcagagaugaa

SEQ ID NO: 1592976 - RNA, 19 nt, Artificial Sequence
  Description of Artificial Sequence: Synthetic oligonucleotide
ccugugacagcgggccaca

SEQ ID NO: 1592977 - RNA, 19 nt, Artificial Sequence
  Description of Artificial Sequence: Synthetic oligonucleotide
gcacccucacgugugcggu

SEQ ID NO: 1592978 - RNA, 19 nt, Artificial Sequence
  Description of Artificial Sequence: Synthetic oligonucleotide
agcgggccacaugcucgau

SEQ ID NO: 1592979 - RNA, 19 nt, Artificial Sequence
  Description of Artificial Sequence: Synthetic oligonucleotide
aggcgcgcggucaggccua

SEQ ID NO: 1592980 - RNA, 19 nt, Artificial Sequence
  Description of Artificial Sequence: Synthetic oligonucleotide
gugugcgguccaggaucuc

SEQ ID NO: 1592981 - RNA, 19 nt, Artificial Sequence
  Description of Artificial Sequence: Synthetic oligonucleotide
ggccaacgacagagacugc

SEQ ID NO: 1592982 - RNA, 19 nt, Artificial Sequence
  Description of Artificial Sequence: Synthetic oligonucleotide
gcucacgucgauggccagu

SEQ ID NO: 1592983 - RNA, 19 nt, Artificial Sequence
  Description of Artificial Sequence: Synthetic oligonucleotide
gcugacacuguaggccaau

SEQ ID NO: 1592984 - RNA, 19 nt, Artificial Sequence
  Description of Artificial Sequence: Synthetic oligonucleotide
ggccggcggggcaggcgcg

SEQ ID NO: 1592985 - RNA, 19 nt, Artificial Sequence
  Description of Artificial Sequence: Synthetic oligonucleotide
ccaccaugaguuggccgga

SEQ ID NO: 1592986 - RNA, 19 nt, Artificial Sequence
  Description of Artificial Sequence: Synthetic oligonucleotide
gcggucaggccuaggugcu

SEQ ID NO: 1592987 - RNA, 19 nt, Artificial Sequence
  Description of Artificial Sequence: Synthetic oligonucleotide
cgugugcgguccaggaucu

SEQ ID NO: 1592988 - RNA, 19 nt, Artificial Sequence
  Description of Artificial Sequence: Synthetic oligonucleotide
gguggcggcccaggccauc

SEQ ID NO: 1592989 - RNA, 19 nt, Artificial Sequence
  Description of Artificial Sequence: Synthetic oligonucleotide
ccauggggacaucucggau

SEQ ID NO: 1592990 - RNA, 19 nt, Artificial Sequence
  Description of Artificial Sequence: Synthetic oligonucleotide
ggcgcgcggucaggccuag

SEQ ID NO: 1592991 - RNA, 19 nt, Artificial Sequence
  Description of Artificial Sequence: Synthetic oligonucleotide
gccggcggggcaggcgcgc

SEQ ID NO: 1592992 - RNA, 19 nt, Artificial Sequence
  Description of Artificial Sequence: Synthetic oligonucleotide
cgcgcggucaggccuaggu

SEQ ID NO: 1592993 - RNA, 19 nt, Artificial Sequence
  Description of Artificial Sequence: Synthetic oligonucleotide
ccggagaggacagcacccu

SEQ ID NO: 1592994 - RNA, 19 nt, Artificial Sequence
  Description of Artificial Sequence: Synthetic oligonucleotide
cugugacagcgggccacau

SEQ ID NO: 1592995 - RNA, 19 nt, Artificial Sequence
  Description of Artificial Sequence: Synthetic oligonucleotide
cccucacgugugcggucca

SEQ ID NO: 1592996 - RNA, 19 nt, Artificial Sequence
  Description of Artificial Sequence: Synthetic oligonucleotide
gcggggcaggcgcgcgguc

SEQ ID NO: 1592997 - RNA, 19 nt, Artificial Sequence
  Description of Artificial Sequence: Synthetic oligonucleotide
gcgcgcggucaggccuagg

SEQ ID NO: 1592998 - RNA, 19 nt, Artificial Sequence
  Description of Artificial Sequence: Synthetic oligonucleotide
ccugguaauggggcacguu

SEQ ID NO: 1592999 - RNA, 19 nt, Artificial Sequence
  Description of Artificial Sequence: Synthetic oligonucleotide
cggggcaggcgcgcgguca

SEQ ID NO: 1593000 - RNA, 19 nt, Artificial Sequence
  Description of Artificial Sequence: Synthetic oligonucleotide
gcguggccuugcacucacu

SEQ ID NO: 1593001 - RNA, 19 nt, Artificial Sequence
  Description of Artificial Sequence: Synthetic oligonucleotide
ugaaauauaauucugguca

SEQ ID NO: 1593002 - RNA, 19 nt, Artificial Sequence
  Description of Artificial Sequence: Synthetic oligonucleotide
aauucaaugaaauauaauu

SEQ ID NO: 1593003 - RNA, 19 nt, Artificial Sequence
  Description of Artificial Sequence: Synthetic oligonucleotide
aauuugucaauuuaaaccu

SEQ ID NO: 1593004 - RNA, 19 nt, Artificial Sequence
  Description of Artificial Sequence: Synthetic oligonucleotide
aaagaaucauuacagcucg

SEQ ID NO: 1593005 - RNA, 19 nt, Artificial Sequence
  Description of Artificial Sequence: Synthetic oligonucleotide
ucuauggcuaauaagaugc

SEQ ID NO: 1593006 - RNA, 19 nt, Artificial Sequence
  Description of Artificial Sequence: Synthetic oligonucleotide
uugcauauuaaucaaaugc

SEQ ID NO: 1593007 - RNA, 19 nt, Artificial Sequence
  Description of Artificial Sequence: Synthetic oligonucleotide
uuaaauagcacacuuugcc

SEQ ID NO: 1593008 - RNA, 19 nt, Artificial Sequence
  Description of Artificial Sequence: Synthetic oligonucleotide
aaagucuucugguaugucc

SEQ ID NO: 1593009 - RNA, 19 nt, Artificial Sequence
  Description of Artificial Sequence: Synthetic oligonucleotide
aacuuaauaauaaauagug

SEQ ID NO: 1593010 - RNA, 19 nt, Artificial Sequence
  Description of Artificial Sequence: Synthetic oligonucleotide
aagaugaagaaauacugag

SEQ ID NO: 1593011 - RNA, 19 nt, Artificial Sequence
  Description of Artificial Sequence: Synthetic oligonucleotide
aauugcuuucuuuccaugc

SEQ ID NO: 1593012 - RNA, 19 nt, Artificial Sequence
  Description of Artificial Sequence: Synthetic oligonucleotide
ugaacaguaaagaugaaga

SEQ ID NO: 1593013 - RNA, 19 nt, Artificial Sequence
  Description of Artificial Sequence: Synthetic oligonucleotide
aaugcuuagucuuaaauaa

SEQ ID NO: 1593014 - RNA, 19 nt, Artificial Sequence
  Description of Artificial Sequence: Synthetic oligonucleotide
uuaacaacgccaaagaauc

SEQ ID NO: 1593015 - RNA, 19 nt, Artificial Sequence
  Description of Artificial Sequence: Synthetic oligonucleotide
aaugaaauauaauucuggu

SEQ ID NO: 1593016 - RNA, 19 nt, Artificial Sequence
  Description of Artificial Sequence: Synthetic oligonucleotide
uauaauucuggucaaagaa

SEQ ID NO: 1593017 - RNA, 19 nt, Artificial Sequence
  Description of Artificial Sequence: Synthetic oligonucleotide
auuaaucaaaugcuuaguc

SEQ ID NO: 1593018 - RNA, 19 nt, Artificial Sequence
  Description of Artificial Sequence: Synthetic oligonucleotide
uuucauaugaacccugugc

SEQ ID NO: 1593019 - RNA, 19 nt, Artificial Sequence
  Description of Artificial Sequence: Synthetic oligonucleotide
aacuacgccacuuucaucu

SEQ ID NO: 1593020 - RNA, 19 nt, Artificial Sequence
  Description of Artificial Sequence: Synthetic oligonucleotide
uucaaugaaauauaauucu

SEQ ID NO: 1593021 - RNA, 19 nt, Artificial Sequence
  Description of Artificial Sequence: Synthetic oligonucleotide
auauuaaucaaaugcuuag

SEQ ID NO: 1593022 - RNA, 19 nt, Artificial Sequence
  Description of Artificial Sequence: Synthetic oligonucleotide
uuuacaaggucucaccaag

SEQ ID NO: 1593023 - RNA, 19 nt, Artificial Sequence
  Description of Artificial Sequence: Synthetic oligonucleotide
aauauaauucuggucaaag

SEQ ID NO: 1593024 - RNA, 19 nt, Artificial Sequence
  Description of Artificial Sequence: Synthetic oligonucleotide
uuucuauugaaauacuugu

SEQ ID NO: 1593025 - RNA, 19 nt, Artificial Sequence
  Description of Artificial Sequence: Synthetic oligonucleotide
uuuaacaacgccaaagaau

SEQ ID NO: 1593026 - RNA, 19 nt, Artificial Sequence
  Description of Artificial Sequence: Synthetic oligonucleotide
gaagaauuuaaagagcugc

SEQ ID NO: 1593027 - RNA, 19 nt, Artificial Sequence
  Description of Artificial Sequence: Synthetic oligonucleotide
uuugccuuuaacaacgcca

SEQ ID NO: 1593028 - RNA, 19 nt, Artificial Sequence
  Description of Artificial Sequence: Synthetic oligonucleotide
uguuauagcaugugugugg

SEQ ID NO: 1593029 - RNA, 19 nt, Artificial Sequence
  Description of Artificial Sequence: Synthetic oligonucleotide
auuucuauggcuaauaaga

SEQ ID NO: 1593030 - RNA, 19 nt, Artificial Sequence
  Description of Artificial Sequence: Synthetic oligonucleotide
aacaacaacaacaacaaaa

SEQ ID NO: 1593031 - RNA, 19 nt, Artificial Sequence
  Description of Artificial Sequence: Synthetic oligonucleotide
uaauucuggucaaagaaga

SEQ ID NO: 1593032 - RNA, 19 nt, Artificial Sequence
  Description of Artificial Sequence: Synthetic oligonucleotide
gauacagucaaacaggcaa

SEQ ID NO: 1593033 - RNA, 19 nt, Artificial Sequence
  Description of Artificial Sequence: Synthetic oligonucleotide
aaaggagguaauuuugugu

SEQ ID NO: 1593034 - RNA, 19 nt, Artificial Sequence
  Description of Artificial Sequence: Synthetic oligonucleotide
uuaaucaaaugcuuagucu

SEQ ID NO: 1593035 - RNA, 19 nt, Artificial Sequence
  Description of Artificial Sequence: Synthetic oligonucleotide
ugcagagaaagauucaagc

SEQ ID NO: 1593036 - RNA, 19 nt, Artificial Sequence
  Description of Artificial Sequence: Synthetic oligonucleotide
aaccaaacuaggcuuguuc

SEQ ID NO: 1593037 - RNA, 19 nt, Artificial Sequence
  Description of Artificial Sequence: Synthetic oligonucleotide
augaaauauaauucugguc

SEQ ID NO: 1593038 - RNA, 19 nt, Artificial Sequence
  Description of Artificial Sequence: Synthetic oligonucleotide
uauagcauguguguggagg

SEQ ID NO: 1593039 - RNA, 19 nt, Artificial Sequence
  Description of Artificial Sequence: Synthetic oligonucleotide
aacgccaaagaaucauuac

SEQ ID NO: 1593040 - RNA, 19 nt, Artificial Sequence
  Description of Artificial Sequence: Synthetic oligonucleotide
ucugguauguccuguaaag

SEQ ID NO: 1593041 - RNA, 19 nt, Artificial Sequence
  Description of Artificial Sequence: Synthetic oligonucleotide
uuuaaauagcacacuuugc

SEQ ID NO: 1593042 - RNA, 19 nt, Artificial Sequence
  Description of Artificial Sequence: Synthetic oligonucleotide
uccuagaauaacuuaauaa

SEQ ID NO: 1593043 - RNA, 19 nt, Artificial Sequence
  Description of Artificial Sequence: Synthetic oligonucleotide
guagaucuugcucuggucg

SEQ ID NO: 1593044 - RNA, 19 nt, Artificial Sequence
  Description of Artificial Sequence: Synthetic oligonucleotide
ugaaaaugugucacacugg

SEQ ID NO: 1593045 - RNA, 19 nt, Artificial Sequence
  Description of Artificial Sequence: Synthetic oligonucleotide
acuggauccauuuucauau

SEQ ID NO: 1593046 - RNA, 19 nt, Artificial Sequence
  Description of Artificial Sequence: Synthetic oligonucleotide
cuuaauaauaaauaguggu

SEQ ID NO: 1593047 - RNA, 19 nt, Artificial Sequence
  Description of Artificial Sequence: Synthetic oligonucleotide
cacuuugccuuuaacaacg

SEQ ID NO: 1593048 - RNA, 19 nt, Artificial Sequence
  Description of Artificial Sequence: Synthetic oligonucleotide
caauaggaaacaugaaugc

SEQ ID NO: 1593049 - RNA, 19 nt, Artificial Sequence
  Description of Artificial Sequence: Synthetic oligonucleotide
ucccaggcaacauagaagc

SEQ ID NO: 1593050 - RNA, 19 nt, Artificial Sequence
  Description of Artificial Sequence: Synthetic oligonucleotide
aaaguucuacagauugucc

SEQ ID NO: 1593051 - RNA, 19 nt, Artificial Sequence
  Description of Artificial Sequence: Synthetic oligonucleotide
aaagaaguagcaaucuuug

SEQ ID NO: 1593052 - RNA, 19 nt, Artificial Sequence
  Description of Artificial Sequence: Synthetic oligonucleotide
aggagauuaauguuaggag

SEQ ID NO: 1593053 - RNA, 19 nt, Artificial Sequence
  Description of Artificial Sequence: Synthetic oligonucleotide
uuaaaccuuaguaauuuuc

SEQ ID NO: 1593054 - RNA, 19 nt, Artificial Sequence
  Description of Artificial Sequence: Synthetic oligonucleotide
aaaaucccaggcaacauag

SEQ ID NO: 1593055 - RNA, 19 nt, Artificial Sequence
  Description of Artificial Sequence: Synthetic oligonucleotide
gacucaaagaaguugguuc

SEQ ID NO: 1593056 - RNA, 19 nt, Artificial Sequence
  Description of Artificial Sequence: Synthetic oligonucleotide
ucauccuagaauaacuuaa

SEQ ID NO: 1593057 - RNA, 19 nt, Artificial Sequence
  Description of Artificial Sequence: Synthetic oligonucleotide
uccucaaguauucuuaggu

SEQ ID NO: 1593058 - RNA, 19 nt, Artificial Sequence
  Description of Artificial Sequence: Synthetic oligonucleotide
auucuaaucauccuagaau

SEQ ID NO: 1593059 - RNA, 19 nt, Artificial Sequence
  Description of Artificial Sequence: Synthetic oligonucleotide
ugaacucaggucaugaauc

SEQ ID NO: 1593060 - RNA, 19 nt, Artificial Sequence
  Description of Artificial Sequence: Synthetic oligonucleotide
uaauguuaggagacaauca

SEQ ID NO: 1593061 - RNA, 19 nt, Artificial Sequence
  Description of Artificial Sequence: Synthetic oligonucleotide
ugguauguccuguaaagcc

SEQ ID NO: 1593062 - RNA, 19 nt, Artificial Sequence
  Description of Artificial Sequence: Synthetic oligonucleotide
uugaaguucaaguuguuau

SEQ ID NO: 1593063 - RNA, 19 nt, Artificial Sequence
  Description of Artificial Sequence: Synthetic oligonucleotide
uguaccuguaaccaaacua

SEQ ID NO: 1593064 - RNA, 19 nt, Artificial Sequence
  Description of Artificial Sequence: Synthetic oligonucleotide
aacauagaagcuaugacau

SEQ ID NO: 1593065 - RNA, 19 nt, Artificial Sequence
  Description of Artificial Sequence: Synthetic oligonucleotide
aaaacggaggcgauuuggc

SEQ ID NO: 1593066 - RNA, 19 nt, Artificial Sequence
  Description of Artificial Sequence: Synthetic oligonucleotide
aggucaugaaucuuggcag

SEQ ID NO: 1593067 - RNA, 19 nt, Artificial Sequence
  Description of Artificial Sequence: Synthetic oligonucleotide
aaaaguuacuacaaacacu

SEQ ID NO: 1593068 - RNA, 19 nt, Artificial Sequence
  Description of Artificial Sequence: Synthetic oligonucleotide
uaggcuuguucuaaguucc

SEQ ID NO: 1593069 - RNA, 19 nt, Artificial Sequence
  Description of Artificial Sequence: Synthetic oligonucleotide
agucaaacaggcaaggagg

SEQ ID NO: 1593070 - RNA, 19 nt, Artificial Sequence
  Description of Artificial Sequence: Synthetic oligonucleotide
uacagauugucccauuucu

SEQ ID NO: 1593071 - RNA, 19 nt, Artificial Sequence
  Description of Artificial Sequence: Synthetic oligonucleotide
uccaacaauucaaugaaau

SEQ ID NO: 1593072 - RNA, 19 nt, Artificial Sequence
  Description of Artificial Sequence: Synthetic oligonucleotide
accuuaguaauuuucaaau

SEQ ID NO: 1593073 - RNA, 19 nt, Artificial Sequence
  Description of Artificial Sequence: Synthetic oligonucleotide
aaguagcaaucuuugaagu

SEQ ID NO: 1593074 - RNA, 19 nt, Artificial Sequence
  Description of Artificial Sequence: Synthetic oligonucleotide
ucuuaggugauaauuuaaa

SEQ ID NO: 1593075 - RNA, 19 nt, Artificial Sequence
  Description of Artificial Sequence: Synthetic oligonucleotide
acuuaauaauaaauagugg

SEQ ID NO: 1593076 - RNA, 19 nt, Artificial Sequence
  Description of Artificial Sequence: Synthetic oligonucleotide
uaauaauaaauagugguuu

SEQ ID NO: 1593077 - RNA, 19 nt, Artificial Sequence
  Description of Artificial Sequence: Synthetic oligonucleotide
uccauuaucuccccgcccc

SEQ ID NO: 1593078 - RNA, 19 nt, Artificial Sequence
  Description of Artificial Sequence: Synthetic oligonucleotide
uccauuuccagaaagucuu

SEQ ID NO: 1593079 - RNA, 19 nt, Artificial Sequence
  Description of Artificial Sequence: Synthetic oligonucleotide
aaagaugaagaaauacuga

SEQ ID NO: 1593080 - RNA, 19 nt, Artificial Sequence
  Description of Artificial Sequence: Synthetic oligonucleotide
aaauagcacacuuugccuu

SEQ ID NO: 1593081 - RNA, 19 nt, Artificial Sequence
  Description of Artificial Sequence: Synthetic oligonucleotide
aaccuuaguaauuuucaaa

SEQ ID NO: 1593082 - RNA, 19 nt, Artificial Sequence
  Description of Artificial Sequence: Synthetic oligonucleotide
guaccuguaaccaaacuag

SEQ ID NO: 1593083 - RNA, 19 nt, Artificial Sequence
  Description of Artificial Sequence: Synthetic oligonucleotide
ucagaagccauaauuuguc

SEQ ID NO: 1593084 - RNA, 19 nt, Artificial Sequence
  Description of Artificial Sequence: Synthetic oligonucleotide
aaacccacuggaaauguuc

SEQ ID NO: 1593085 - RNA, 19 nt, Artificial Sequence
  Description of Artificial Sequence: Synthetic oligonucleotide
ugaguugucuugaacagua

SEQ ID NO: 1593086 - RNA, 19 nt, Artificial Sequence
  Description of Artificial Sequence: Synthetic oligonucleotide
gggagauacagucaaacag

SEQ ID NO: 1593087 - RNA, 19 nt, Artificial Sequence
  Description of Artificial Sequence: Synthetic oligonucleotide
aaaagaaguagcaaucuuu

SEQ ID NO: 1593088 - RNA, 19 nt, Artificial Sequence
  Description of Artificial Sequence: Synthetic oligonucleotide
aacccacuggaaauguucc

SEQ ID NO: 1593089 - RNA, 19 nt, Artificial Sequence
  Description of Artificial Sequence: Synthetic oligonucleotide
auaauucuggucaaagaag

SEQ ID NO: 1593090 - RNA, 19 nt, Artificial Sequence
  Description of Artificial Sequence: Synthetic oligonucleotide
uacauguuauagcaugugu

SEQ ID NO: 1593091 - RNA, 19 nt, Artificial Sequence
  Description of Artificial Sequence: Synthetic oligonucleotide
gaaucauuacagcucgggc

SEQ ID NO: 1593092 - RNA, 19 nt, Artificial Sequence
  Description of Artificial Sequence: Synthetic oligonucleotide
ugucaggagauuaauguua

SEQ ID NO: 1593093 - RNA, 19 nt, Artificial Sequence
  Description of Artificial Sequence: Synthetic oligonucleotide
caacauagaagcuaugaca

SEQ ID NO: 1593094 - RNA, 19 nt, Artificial Sequence
  Description of Artificial Sequence: Synthetic oligonucleotide
uuuccaugcaauacugaga

SEQ ID NO: 1593095 - RNA, 19 nt, Artificial Sequence
  Description of Artificial Sequence: Synthetic oligonucleotide
uacugagcagcaagcaccg

SEQ ID NO: 1593096 - RNA, 19 nt, Artificial Sequence
  Description of Artificial Sequence: Synthetic oligonucleotide
cauuucuauggcuaauaag

SEQ ID NO: 1593097 - RNA, 19 nt, Artificial Sequence
  Description of Artificial Sequence: Synthetic oligonucleotide
uguaaagccuuccugugau

SEQ ID NO: 1593098 - RNA, 19 nt, Artificial Sequence
  Description of Artificial Sequence: Synthetic oligonucleotide
ugugauggcugucugucug

SEQ ID NO: 1593099 - RNA, 19 nt, Artificial Sequence
  Description of Artificial Sequence: Synthetic oligonucleotide
acucaaagaaguugguucu

SEQ ID NO: 1593100 - RNA, 19 nt, Artificial Sequence
  Description of Artificial Sequence: Synthetic oligonucleotide
agaaucauuacagcucggg

SEQ ID NO: 1593101 - RNA, 19 nt, Artificial Sequence
  Description of Artificial Sequence: Synthetic oligonucleotide
gaaucuuggcagcaaacac

SEQ ID NO: 1593102 - RNA, 19 nt, Artificial Sequence
  Description of Artificial Sequence: Synthetic oligonucleotide
aaaccuuaguaauuuucaa

SEQ ID NO: 1593103 - RNA, 19 nt, Artificial Sequence
  Description of Artificial Sequence: Synthetic oligonucleotide
aauugaacucaggucauga

SEQ ID NO: 1593104 - RNA, 19 nt, Artificial Sequence
  Description of Artificial Sequence: Synthetic oligonucleotide
gaggugacgaacuacgcca

SEQ ID NO: 1593105 - RNA, 19 nt, Artificial Sequence
  Description of Artificial Sequence: Synthetic oligonucleotide
uaccuguaaccaaacuagg

SEQ ID NO: 1593106 - RNA, 19 nt, Artificial Sequence
  Description of Artificial Sequence: Synthetic oligonucleotide
aggcgaggcacacagcagc

SEQ ID NO: 1593107 - RNA, 19 nt, Artificial Sequence
  Description of Artificial Sequence: Synthetic oligonucleotide
aagauucaagcuugugugu

SEQ ID NO: 1593108 - RNA, 19 nt, Artificial Sequence
  Description of Artificial Sequence: Synthetic oligonucleotide
ggagauacagucaaacagg

SEQ ID NO: 1593109 - RNA, 19 nt, Artificial Sequence
  Description of Artificial Sequence: Synthetic oligonucleotide
uugaacucaggucaugaau

SEQ ID NO: 1593110 - RNA, 19 nt, Artificial Sequence
  Description of Artificial Sequence: Synthetic oligonucleotide
ugucugucuguuuucaccu

SEQ ID NO: 1593111 - RNA, 19 nt, Artificial Sequence
  Description of Artificial Sequence: Synthetic oligonucleotide
ugcuuagucuuaaauaauu

SEQ ID NO: 1593112 - RNA, 19 nt, Artificial Sequence
  Description of Artificial Sequence: Synthetic oligonucleotide
aaacuaggcuuguucuaag

SEQ ID NO: 1593113 - RNA, 19 nt, Artificial Sequence
  Description of Artificial Sequence: Synthetic oligonucleotide
agucuuaaauaauugcuuu

SEQ ID NO: 1593114 - RNA, 19 nt, Artificial Sequence
  Description of Artificial Sequence: Synthetic oligonucleotide
aagaauuuaaagagcugca

SEQ ID NO: 1593115 - RNA, 19 nt, Artificial Sequence
  Description of Artificial Sequence: Synthetic oligonucleotide
ugaaucuuggcagcaaaca

SEQ ID NO: 1593116 - RNA, 19 nt, Artificial Sequence
  Description of Artificial Sequence: Synthetic oligonucleotide
ugugcucacauuucccaag

SEQ ID NO: 1593117 - RNA, 19 nt, Artificial Sequence
  Description of Artificial Sequence: Synthetic oligonucleotide
uuugaucauucuaaucauc

SEQ ID NO: 1593118 - RNA, 19 nt, Artificial Sequence
  Description of Artificial Sequence: Synthetic oligonucleotide
uauuaaucaaaugcuuagu

SEQ ID NO: 1593119 - RNA, 19 nt, Artificial Sequence
  Description of Artificial Sequence: Synthetic oligonucleotide
auucaagcuuguguguacc

SEQ ID NO: 1593120 - RNA, 19 nt, Artificial Sequence
  Description of Artificial Sequence: Synthetic oligonucleotide
uggguucuaagaauugaac

SEQ ID NO: 1593121 - RNA, 19 nt, Artificial Sequence
  Description of Artificial Sequence: Synthetic oligonucleotide
aguucuacagauuguccca

SEQ ID NO: 1593122 - RNA, 19 nt, Artificial Sequence
  Description of Artificial Sequence: Synthetic oligonucleotide
aacggaggcgauuuggcau

SEQ ID NO: 1593123 - RNA, 19 nt, Artificial Sequence
  Description of Artificial Sequence: Synthetic oligonucleotide
acgccaaagaaucauuaca

SEQ ID NO: 1593124 - RNA, 19 nt, Artificial Sequence
  Description of Artificial Sequence: Synthetic oligonucleotide
uuuuacaaggucucaccaa

SEQ ID NO: 1593125 - RNA, 19 nt, Artificial Sequence
  Description of Artificial Sequence: Synthetic oligonucleotide
uucuuaggugauaauuuaa

SEQ ID NO: 1593126 - RNA, 19 nt, Artificial Sequence
  Description of Artificial Sequence: Synthetic oligonucleotide
uacuacaaacacuuauuuc

SEQ ID NO: 1593127 - RNA, 19 nt, Artificial Sequence
  Description of Artificial Sequence: Synthetic oligonucleotide
uaggaaacaugaaugcaau

SEQ ID NO: 1593128 - RNA, 19 nt, Artificial Sequence
  Description of Artificial Sequence: Synthetic oligonucleotide
uugccuuuaacaacgccaa

SEQ ID NO: 1593129 - RNA, 19 nt, Artificial Sequence
  Description of Artificial Sequence: Synthetic oligonucleotide
aaguauucuuaggugauaa

SEQ ID NO: 1593130 - RNA, 19 nt, Artificial Sequence
  Description of Artificial Sequence: Synthetic oligonucleotide
gagauacagucaaacaggc

SEQ ID NO: 1593131 - RNA, 19 nt, Artificial Sequence
  Description of Artificial Sequence: Synthetic oligonucleotide
uacagucaaacaggcaagg

SEQ ID NO: 1593132 - RNA, 19 nt, Artificial Sequence
  Description of Artificial Sequence: Synthetic oligonucleotide
acauguuauagcaugugug

SEQ ID NO: 1593133 - RNA, 19 nt, Artificial Sequence
  Description of Artificial Sequence: Synthetic oligonucleotide
caaucuuugaaguucaagu

SEQ ID NO: 1593134 - RNA, 19 nt, Artificial Sequence
  Description of Artificial Sequence: Synthetic oligonucleotide
accuguaaccaaacuaggc

SEQ ID NO: 1593135 - RNA, 19 nt, Artificial Sequence
  Description of Artificial Sequence: Synthetic oligonucleotide
agaagauccucaaguauuc

SEQ ID NO: 1593136 - RNA, 19 nt, Artificial Sequence
  Description of Artificial Sequence: Synthetic oligonucleotide
ggagauuaauguuaggaga

SEQ ID NO: 1593137 - RNA, 19 nt, Artificial Sequence
  Description of Artificial Sequence: Synthetic oligonucleotide
ucacucacccuccccaaag

SEQ ID NO: 1593138 - RNA, 19 nt, Artificial Sequence
  Description of Artificial Sequence: Synthetic oligonucleotide
aagauccucaaguauucuu

SEQ ID NO: 1593139 - RNA, 19 nt, Artificial Sequence
  Description of Artificial Sequence: Synthetic oligonucleotide
uuguguguaccuguaacca

SEQ ID NO: 1593140 - RNA, 19 nt, Artificial Sequence
  Description of Artificial Sequence: Synthetic oligonucleotide
aaacggaggcgauuuggca

SEQ ID NO: 1593141 - RNA, 19 nt, Artificial Sequence
  Description of Artificial Sequence: Synthetic oligonucleotide
guuuucaccugaaugagga

SEQ ID NO: 1593142 - RNA, 19 nt, Artificial Sequence
  Description of Artificial Sequence: Synthetic oligonucleotide
aacuaggcuuguucuaagu

SEQ ID NO: 1593143 - RNA, 19 nt, Artificial Sequence
  Description of Artificial Sequence: Synthetic oligonucleotide
aauagugguuuaaaauuaa

SEQ ID NO: 1593144 - RNA, 19 nt, Artificial Sequence
  Description of Artificial Sequence: Synthetic oligonucleotide
cacacuuugccuuuaacaa

SEQ ID NO: 1593145 - RNA, 19 nt, Artificial Sequence
  Description of Artificial Sequence: Synthetic oligonucleotide
auaugaacccugugcucac

SEQ ID NO: 1593146 - RNA, 19 nt, Artificial Sequence
  Description of Artificial Sequence: Synthetic oligonucleotide
aaaacucagaagccauaau

SEQ ID NO: 1593147 - RNA, 19 nt, Artificial Sequence
  Description of Artificial Sequence: Synthetic oligonucleotide
uucaucuuaagugcagaga

SEQ ID NO: 1593148 - RNA, 19 nt, Artificial Sequence
  Description of Artificial Sequence: Synthetic oligonucleotide
aaacaugaaugcaauuuaa

SEQ ID NO: 1593149 - RNA, 19 nt, Artificial Sequence
  Description of Artificial Sequence: Synthetic oligonucleotide
auaggaaacaugaaugcaa

SEQ ID NO: 1593150 - RNA, 19 nt, Artificial Sequence
  Description of Artificial Sequence: Synthetic oligonucleotide
cucuggucgaccaguaggc

SEQ ID NO: 1593151 - RNA, 19 nt, Artificial Sequence
  Description of Artificial Sequence: Synthetic oligonucleotide
acacuuauuucuugaauua

SEQ ID NO: 1593152 - RNA, 19 nt, Artificial Sequence
  Description of Artificial Sequence: Synthetic oligonucleotide
auucuuaggugauaauuua

SEQ ID NO: 1593153 - RNA, 19 nt, Artificial Sequence
  Description of Artificial Sequence: Synthetic oligonucleotide
auccauuaucuccccgccc

SEQ ID NO: 1593154 - RNA, 19 nt, Artificial Sequence
  Description of Artificial Sequence: Synthetic oligonucleotide
uauggcuaauaagaugcug

SEQ ID NO: 1593155 - RNA, 19 nt, Artificial Sequence
  Description of Artificial Sequence: Synthetic oligonucleotide
gguaauuuuguguauauau

SEQ ID NO: 1593156 - RNA, 19 nt, Artificial Sequence
  Description of Artificial Sequence: Synthetic oligonucleotide
aaagguagccggaggugac

SEQ ID NO: 1593157 - RNA, 19 nt, Artificial Sequence
  Description of Artificial Sequence: Synthetic oligonucleotide
uggucgaccaguaggccug

SEQ ID NO: 1593158 - RNA, 19 nt, Artificial Sequence
  Description of Artificial Sequence: Synthetic oligonucleotide
auggcuaauaagaugcugu

SEQ ID NO: 1593159 - RNA, 19 nt, Artificial Sequence
  Description of Artificial Sequence: Synthetic oligonucleotide
uguccuguaaagccuuccu

SEQ ID NO: 1593160 - RNA, 19 nt, Artificial Sequence
  Description of Artificial Sequence: Synthetic oligonucleotide
aguugucuugaacaguaaa

SEQ ID NO: 1593161 - RNA, 19 nt, Artificial Sequence
  Description of Artificial Sequence: Synthetic oligonucleotide
uuacagcucgggcugucag

SEQ ID NO: 1593162 - RNA, 19 nt, Artificial Sequence
  Description of Artificial Sequence: Synthetic oligonucleotide
caggucaugaaucuuggca

SEQ ID NO: 1593163 - RNA, 19 nt, Artificial Sequence
  Description of Artificial Sequence: Synthetic oligonucleotide
cccaacaacaacaacaaca

SEQ ID NO: 1593164 - RNA, 19 nt, Artificial Sequence
  Description of Artificial Sequence: Synthetic oligonucleotide
gauuaauguuaggagacaa

SEQ ID NO: 1593165 - RNA, 19 nt, Artificial Sequence
  Description of Artificial Sequence: Synthetic oligonucleotide
cuuaggugauaauuuaaaa

SEQ ID NO: 1593166 - RNA, 19 nt, Artificial Sequence
  Description of Artificial Sequence: Synthetic oligonucleotide
agcacacuuugccuuuaac

SEQ ID NO: 1593167 - RNA, 19 nt, Artificial Sequence
  Description of Artificial Sequence: Synthetic oligonucleotide
uucugguauguccuguaaa

SEQ ID NO: 1593168 - RNA, 19 nt, Artificial Sequence
  Description of Artificial Sequence: Synthetic oligonucleotide
gucaggagauuaauguuag

SEQ ID NO: 1593169 - RNA, 19 nt, Artificial Sequence
  Description of Artificial Sequence: Synthetic oligonucleotide
aaauauaauucuggucaaa

SEQ ID NO: 1593170 - RNA, 19 nt, Artificial Sequence
  Description of Artificial Sequence: Synthetic oligonucleotide
cagaaagucuucugguaug

SEQ ID NO: 1593171 - RNA, 19 nt, Artificial Sequence
  Description of Artificial Sequence: Synthetic oligonucleotide
cagucggggagauacaguc

SEQ ID NO: 1593172 - RNA, 19 nt, Artificial Sequence
  Description of Artificial Sequence: Synthetic oligonucleotide
acggaggcgauuuggcauc

SEQ ID NO: 1593173 - RNA, 19 nt, Artificial Sequence
  Description of Artificial Sequence: Synthetic oligonucleotide
caggagauuaauguuagga

SEQ ID NO: 1593174 - RNA, 19 nt, Artificial Sequence
  Description of Artificial Sequence: Synthetic oligonucleotide
ugguucucuuucuaccaug

SEQ ID NO: 1593175 - RNA, 19 nt, Artificial Sequence
  Description of Artificial Sequence: Synthetic oligonucleotide
aguagcaaucuuugaaguu

SEQ ID NO: 1593176 - RNA, 19 nt, Artificial Sequence
  Description of Artificial Sequence: Synthetic oligonucleotide
ucaagcuuguguguaccug

SEQ ID NO: 1593177 - RNA, 19 nt, Artificial Sequence
  Description of Artificial Sequence: Synthetic oligonucleotide
acucaggucaugaaucuug

SEQ ID NO: 1593178 - RNA, 19 nt, Artificial Sequence
  Description of Artificial Sequence: Synthetic oligonucleotide
uccccgccccuuuaaauag

SEQ ID NO: 1593179 - RNA, 19 nt, Artificial Sequence
  Description of Artificial Sequence: Synthetic oligonucleotide
gcuaauaagaugcuguaua

SEQ ID NO: 1593180 - RNA, 19 nt, Artificial Sequence
  Description of Artificial Sequence: Synthetic oligonucleotide
cauccauuaucuccccgcc

SEQ ID NO: 1593181 - RNA, 19 nt, Artificial Sequence
  Description of Artificial Sequence: Synthetic oligonucleotide
agcagcaagcaccggccac

SEQ ID NO: 1593182 - RNA, 19 nt, Artificial Sequence
  Description of Artificial Sequence: Synthetic oligonucleotide
uacgccacuuucaucuuaa

SEQ ID NO: 1593183 - RNA, 19 nt, Artificial Sequence
  Description of Artificial Sequence: Synthetic oligonucleotide
aucauccuagaauaacuua

SEQ ID NO: 1593184 - RNA, 19 nt, Artificial Sequence
  Description of Artificial Sequence: Synthetic oligonucleotide
gcucuggucgaccaguagg

SEQ ID NO: 1593185 - RNA, 19 nt, Artificial Sequence
  Description of Artificial Sequence: Synthetic oligonucleotide
cauguuauagcaugugugu

SEQ ID NO: 1593186 - RNA, 19 nt, Artificial Sequence
  Description of Artificial Sequence: Synthetic oligonucleotide
ugcauacauguuauagcau

SEQ ID NO: 1593187 - RNA, 19 nt, Artificial Sequence
  Description of Artificial Sequence: Synthetic oligonucleotide
uugaaauacuuguggugau

SEQ ID NO: 1593188 - RNA, 19 nt, Artificial Sequence
  Description of Artificial Sequence: Synthetic oligonucleotide
auguuauagcaugugugug

SEQ ID NO: 1593189 - RNA, 19 nt, Artificial Sequence
  Description of Artificial Sequence: Synthetic oligonucleotide
uccagaaagucuucuggua

SEQ ID NO: 1593190 - RNA, 19 nt, Artificial Sequence
  Description of Artificial Sequence: Synthetic oligonucleotide
acuaggcuuguucuaaguu

SEQ ID NO: 1593191 - RNA, 19 nt, Artificial Sequence
  Description of Artificial Sequence: Synthetic oligonucleotide
cuuugccuuuaacaacgcc

SEQ ID NO: 1593192 - RNA, 19 nt, Artificial Sequence
  Description of Artificial Sequence: Synthetic oligonucleotide
gaagccauaauuugucaau

SEQ ID NO: 1593193 - RNA, 19 nt, Artificial Sequence
  Description of Artificial Sequence: Synthetic oligonucleotide
guuauagcaugugugugga

SEQ ID NO: 1593194 - RNA, 19 nt, Artificial Sequence
  Description of Artificial Sequence: Synthetic oligonucleotide
uuauagcauguguguggag

SEQ ID NO: 1593195 - RNA, 19 nt, Artificial Sequence
  Description of Artificial Sequence: Synthetic oligonucleotide
aagaaucauuacagcucgg

SEQ ID NO: 1593196 - RNA, 19 nt, Artificial Sequence
  Description of Artificial Sequence: Synthetic oligonucleotide
accgacaugccugcugcgc

SEQ ID NO: 1593197 - RNA, 19 nt, Artificial Sequence
  Description of Artificial Sequence: Synthetic oligonucleotide
agaaagauucaagcuugug

SEQ ID NO: 1593198 - RNA, 19 nt, Artificial Sequence
  Description of Artificial Sequence: Synthetic oligonucleotide
uggcuaauaagaugcugua

SEQ ID NO: 1593199 - RNA, 19 nt, Artificial Sequence
  Description of Artificial Sequence: Synthetic oligonucleotide
ucaccggcccuucuuuuga

SEQ ID NO: 1593200 - RNA, 19 nt, Artificial Sequence
  Description of Artificial Sequence: Synthetic oligonucleotide
gccuuuaacaacgccaaag

SEQ ID NO: 1593201 - RNA, 19 nt, Artificial Sequence
  Description of Artificial Sequence: Synthetic oligonucleotide
auccuagaauaacuuaaua

SEQ ID NO: 1593202 - RNA, 19 nt, Artificial Sequence
  Description of Artificial Sequence: Synthetic oligonucleotide
gacgaacuacgccacuuuc

SEQ ID NO: 1593203 - RNA, 19 nt, Artificial Sequence
  Description of Artificial Sequence: Synthetic oligonucleotide
acuuauuucuugaauuaua

SEQ ID NO: 1593204 - RNA, 19 nt, Artificial Sequence
  Description of Artificial Sequence: Synthetic oligonucleotide
acaggcaaggaggcagccc

SEQ ID NO: 1593205 - RNA, 19 nt, Artificial Sequence
  Description of Artificial Sequence: Synthetic oligonucleotide
cacccagucggggagauac

SEQ ID NO: 1593206 - RNA, 19 nt, Artificial Sequence
  Description of Artificial Sequence: Synthetic oligonucleotide
ggaggugacgaacuacgcc

SEQ ID NO: 1593207 - RNA, 19 nt, Artificial Sequence
  Description of Artificial Sequence: Synthetic oligonucleotide
cacacuggauccauuuuca

SEQ ID NO: 1593208 - RNA, 19 nt, Artificial Sequence
  Description of Artificial Sequence: Synthetic oligonucleotide
gcauccauuaucuccccgc

SEQ ID NO: 1593209 - RNA, 19 nt, Artificial Sequence
  Description of Artificial Sequence: Synthetic oligonucleotide
ucgaccaguaggccugcca

SEQ ID NO: 1593210 - RNA, 19 nt, Artificial Sequence
  Description of Artificial Sequence: Synthetic oligonucleotide
ccugaguugucuugaacag

SEQ ID NO: 1593211 - RNA, 19 nt, Artificial Sequence
  Description of Artificial Sequence: Synthetic oligonucleotide
cgccaaagaaucauuacag

SEQ ID NO: 1593212 - RNA, 19 nt, Artificial Sequence
  Description of Artificial Sequence: Synthetic oligonucleotide
gcaccggccacccagucgg

SEQ ID NO: 1593213 - RNA, 19 nt, Artificial Sequence
  Description of Artificial Sequence: Synthetic oligonucleotide
gaauugaacucaggucaug

SEQ ID NO: 1593214 - RNA, 19 nt, Artificial Sequence
  Description of Artificial Sequence: Synthetic oligonucleotide
ccaacaacaacaacaacaa

SEQ ID NO: 1593215 - RNA, 19 nt, Artificial Sequence
  Description of Artificial Sequence: Synthetic oligonucleotide
ccuagaauaacuuaauaau

SEQ ID NO: 1593216 - RNA, 19 nt, Artificial Sequence
  Description of Artificial Sequence: Synthetic oligonucleotide
aaagcucucugaagaauuu

SEQ ID NO: 1593217 - RNA, 19 nt, Artificial Sequence
  Description of Artificial Sequence: Synthetic oligonucleotide
augccugcugcgcaggagu

SEQ ID NO: 1593218 - RNA, 19 nt, Artificial Sequence
  Description of Artificial Sequence: Synthetic oligonucleotide
cuuaagugcagagaaagau

SEQ ID NO: 1593219 - RNA, 19 nt, Artificial Sequence
  Description of Artificial Sequence: Synthetic oligonucleotide
agcaccggccacccagucg

SEQ ID NO: 1593220 - RNA, 19 nt, Artificial Sequence
  Description of Artificial Sequence: Synthetic oligonucleotide
agauccucaaguauucuua

SEQ ID NO: 1593221 - RNA, 19 nt, Artificial Sequence
  Description of Artificial Sequence: Synthetic oligonucleotide
gugauggcuggccauaaaa

SEQ ID NO: 1593222 - RNA, 19 nt, Artificial Sequence
  Description of Artificial Sequence: Synthetic oligonucleotide
acuuguggugauggcuggc

SEQ ID NO: 1593223 - RNA, 19 nt, Artificial Sequence
  Description of Artificial Sequence: Synthetic oligonucleotide
uagccggaggugacgaacu

SEQ ID NO: 1593224 - RNA, 19 nt, Artificial Sequence
  Description of Artificial Sequence: Synthetic oligonucleotide
aaggucucaccaaggcgag

SEQ ID NO: 1593225 - RNA, 19 nt, Artificial Sequence
  Description of Artificial Sequence: Synthetic oligonucleotide
ggucaugaaucuuggcagc

SEQ ID NO: 1593226 - RNA, 19 nt, Artificial Sequence
  Description of Artificial Sequence: Synthetic oligonucleotide
gugcagagaaagauucaag

SEQ ID NO: 1593227 - RNA, 19 nt, Artificial Sequence
  Description of Artificial Sequence: Synthetic oligonucleotide
gcuuguguguaccuguaac

SEQ ID NO: 1593228 - RNA, 19 nt, Artificial Sequence
  Description of Artificial Sequence: Synthetic oligonucleotide
ugcucuggucgaccaguag

SEQ ID NO: 1593229 - RNA, 19 nt, Artificial Sequence
  Description of Artificial Sequence: Synthetic oligonucleotide
ugacgaacuacgccacuuu

SEQ ID NO: 1593230 - RNA, 19 nt, Artificial Sequence
  Description of Artificial Sequence: Synthetic oligonucleotide
ugacucaaagaaguugguu

SEQ ID NO: 1593231 - RNA, 19 nt, Artificial Sequence
  Description of Artificial Sequence: Synthetic oligonucleotide
cacuggaaauguuccaaca

SEQ ID NO: 1593232 - RNA, 19 nt, Artificial Sequence
  Description of Artificial Sequence: Synthetic oligonucleotide
gaaguugguucucuuucua

SEQ ID NO: 1593233 - RNA, 19 nt, Artificial Sequence
  Description of Artificial Sequence: Synthetic oligonucleotide
ccggaggugacgaacuacg

SEQ ID NO: 1593234 - RNA, 19 nt, Artificial Sequence
  Description of Artificial Sequence: Synthetic oligonucleotide
agauucaagcuugugugua

SEQ ID NO: 1593235 - RNA, 19 nt, Artificial Sequence
  Description of Artificial Sequence: Synthetic oligonucleotide
gcaauacugagaaaacuca

SEQ ID NO: 1593236 - RNA, 19 nt, Artificial Sequence
  Description of Artificial Sequence: Synthetic oligonucleotide
auagugguuuaaaauuaaa

SEQ ID NO: 1593237 - RNA, 19 nt, Artificial Sequence
  Description of Artificial Sequence: Synthetic oligonucleotide
ggguucuaagaauugaacu

SEQ ID NO: 1593238 - RNA, 19 nt, Artificial Sequence
  Description of Artificial Sequence: Synthetic oligonucleotide
guagaaggcccugcuguag

SEQ ID NO: 1593239 - RNA, 19 nt, Artificial Sequence
  Description of Artificial Sequence: Synthetic oligonucleotide
ccucaaguauucuuaggug

SEQ ID NO: 1593240 - RNA, 19 nt, Artificial Sequence
  Description of Artificial Sequence: Synthetic oligonucleotide
gcaaucuuugaaguucaag

SEQ ID NO: 1593241 - RNA, 19 nt, Artificial Sequence
  Description of Artificial Sequence: Synthetic oligonucleotide
gucggggagauacagucaa

SEQ ID NO: 1593242 - RNA, 19 nt, Artificial Sequence
  Description of Artificial Sequence: Synthetic oligonucleotide
cauacauguuauagcaugu

SEQ ID NO: 1593243 - RNA, 19 nt, Artificial Sequence
  Description of Artificial Sequence: Synthetic oligonucleotide
ggcgauuuggcauccauua

SEQ ID NO: 1593244 - RNA, 19 nt, Artificial Sequence
  Description of Artificial Sequence: Synthetic oligonucleotide
guauucuuaggugauaauu

SEQ ID NO: 1593245 - RNA, 19 nt, Artificial Sequence
  Description of Artificial Sequence: Synthetic oligonucleotide
ggucucaccaaggcgaggc

SEQ ID NO: 1593246 - RNA, 19 nt, Artificial Sequence
  Description of Artificial Sequence: Synthetic oligonucleotide
caaacuaggcuuguucuaa

SEQ ID NO: 1593247 - RNA, 19 nt, Artificial Sequence
  Description of Artificial Sequence: Synthetic oligonucleotide
gcucacauuucccaagauc

SEQ ID NO: 1593248 - RNA, 19 nt, Artificial Sequence
  Description of Artificial Sequence: Synthetic oligonucleotide
aggugacgaacuacgccac

SEQ ID NO: 1593249 - RNA, 19 nt, Artificial Sequence
  Description of Artificial Sequence: Synthetic oligonucleotide
gaacuacgccacuuucauc

SEQ ID NO: 1593250 - RNA, 19 nt, Artificial Sequence
  Description of Artificial Sequence: Synthetic oligonucleotide
cucaccggcccuucuuuug

SEQ ID NO: 1593251 - RNA, 19 nt, Artificial Sequence
  Description of Artificial Sequence: Synthetic oligonucleotide
accggcccuucuuuugauc

SEQ ID NO: 1593252 - RNA, 19 nt, Artificial Sequence
  Description of Artificial Sequence: Synthetic oligonucleotide
aaaucccaggcaacauaga

SEQ ID NO: 1593253 - RNA, 19 nt, Artificial Sequence
  Description of Artificial Sequence: Synthetic oligonucleotide
acagucaaacaggcaagga

SEQ ID NO: 1593254 - RNA, 19 nt, Artificial Sequence
  Description of Artificial Sequence: Synthetic oligonucleotide
gcagagaaagauucaagcu

SEQ ID NO: 1593255 - RNA, 19 nt, Artificial Sequence
  Description of Artificial Sequence: Synthetic oligonucleotide
acgaacuacgccacuuuca

SEQ ID NO: 1593256 - RNA, 19 nt, Artificial Sequence
  Description of Artificial Sequence: Synthetic oligonucleotide
cuguaaagccuuccuguga

SEQ ID NO: 1593257 - RNA, 19 nt, Artificial Sequence
  Description of Artificial Sequence: Synthetic oligonucleotide
cuggauccauuuucauaug

SEQ ID NO: 1593258 - RNA, 19 nt, Artificial Sequence
  Description of Artificial Sequence: Synthetic oligonucleotide
gacaugccugcugcgcagg

SEQ ID NO: 1593259 - RNA, 19 nt, Artificial Sequence
  Description of Artificial Sequence: Synthetic oligonucleotide
guaggccugccaagggugg

SEQ ID NO: 1593260 - RNA, 19 nt, Artificial Sequence
  Description of Artificial Sequence: Synthetic oligonucleotide
aggcuuguucuaaguuccc

SEQ ID NO: 1593261 - RNA, 19 nt, Artificial Sequence
  Description of Artificial Sequence: Synthetic oligonucleotide
guagccggaggugacgaac

SEQ ID NO: 1593262 - RNA, 19 nt, Artificial Sequence
  Description of Artificial Sequence: Synthetic oligonucleotide
caacgccaaagaaucauua

SEQ ID NO: 1593263 - RNA, 19 nt, Artificial Sequence
  Description of Artificial Sequence: Synthetic oligonucleotide
aaaacccacuggaaauguu

SEQ ID NO: 1593264 - RNA, 19 nt, Artificial Sequence
  Description of Artificial Sequence: Synthetic oligonucleotide
auuugucaauuuaaaccuu

SEQ ID NO: 1593265 - RNA, 19 nt, Artificial Sequence
  Description of Artificial Sequence: Synthetic oligonucleotide
agauacagucaaacaggca

SEQ ID NO: 1593266 - RNA, 19 nt, Artificial Sequence
  Description of Artificial Sequence: Synthetic oligonucleotide
aacucaggucaugaaucuu

SEQ ID NO: 1593267 - RNA, 19 nt, Artificial Sequence
  Description of Artificial Sequence: Synthetic oligonucleotide
caugaaaaugugucacacu

SEQ ID NO: 1593268 - RNA, 19 nt, Artificial Sequence
  Description of Artificial Sequence: Synthetic oligonucleotide
ggggagauacagucaaaca

SEQ ID NO: 1593269 - RNA, 19 nt, Artificial Sequence
  Description of Artificial Sequence: Synthetic oligonucleotide
gaaagucuucugguauguc

SEQ ID NO: 1593270 - RNA, 19 nt, Artificial Sequence
  Description of Artificial Sequence: Synthetic oligonucleotide
cagauugucccauuucuau

SEQ ID NO: 1593271 - RNA, 19 nt, Artificial Sequence
  Description of Artificial Sequence: Synthetic oligonucleotide
ugccuuuaacaacgccaaa

SEQ ID NO: 1593272 - RNA, 19 nt, Artificial Sequence
  Description of Artificial Sequence: Synthetic oligonucleotide
ggucaaagaagauccucaa

SEQ ID NO: 1593273 - RNA, 19 nt, Artificial Sequence
  Description of Artificial Sequence: Synthetic oligonucleotide
augcuuagucuuaaauaau

SEQ ID NO: 1593274 - RNA, 19 nt, Artificial Sequence
  Description of Artificial Sequence: Synthetic oligonucleotide
aggucagaggaugacucaa

SEQ ID NO: 1593275 - RNA, 19 nt, Artificial Sequence
  Description of Artificial Sequence: Synthetic oligonucleotide
agaaaacucagaagccaua

SEQ ID NO: 1593276 - RNA, 19 nt, Artificial Sequence
  Description of Artificial Sequence: Synthetic oligonucleotide
auuacagcucgggcuguca

SEQ ID NO: 1593277 - RNA, 19 nt, Artificial Sequence
  Description of Artificial Sequence: Synthetic oligonucleotide
uagcacacuuugccuuuaa

SEQ ID NO: 1593278 - RNA, 19 nt, Artificial Sequence
  Description of Artificial Sequence: Synthetic oligonucleotide
cagccaccgacaugccugc

SEQ ID NO: 1593279 - RNA, 19 nt, Artificial Sequence
  Description of Artificial Sequence: Synthetic oligonucleotide
cauccuagaauaacuuaau

SEQ ID NO: 1593280 - RNA, 19 nt, Artificial Sequence
  Description of Artificial Sequence: Synthetic oligonucleotide
agguaauuuuguguauaua

SEQ ID NO: 1593281 - RNA, 19 nt, Artificial Sequence
  Description of Artificial Sequence: Synthetic oligonucleotide
cugccaagggugguccugc

SEQ ID NO: 1593282 - RNA, 19 nt, Artificial Sequence
  Description of Artificial Sequence: Synthetic oligonucleotide
ucauuacagcucgggcugu

SEQ ID NO: 1593283 - RNA, 19 nt, Artificial Sequence
  Description of Artificial Sequence: Synthetic oligonucleotide
caggcaacauagaagcuau

SEQ ID NO: 1593284 - RNA, 19 nt, Artificial Sequence
  Description of Artificial Sequence: Synthetic oligonucleotide
ccuguaaccaaacuaggcu

SEQ ID NO: 1593285 - RNA, 19 nt, Artificial Sequence
  Description of Artificial Sequence: Synthetic oligonucleotide
ucggggagauacagucaaa

SEQ ID NO: 1593286 - RNA, 19 nt, Artificial Sequence
  Description of Artificial Sequence: Synthetic oligonucleotide
uugcucuggucgaccagua

SEQ ID NO: 1593287 - RNA, 19 nt, Artificial Sequence
  Description of Artificial Sequence: Synthetic oligonucleotide
ucgggcugucaggagauua

SEQ ID NO: 1593288 - RNA, 19 nt, Artificial Sequence
  Description of Artificial Sequence: Synthetic oligonucleotide
acgccacuuucaucuuaag

SEQ ID NO: 1593289 - RNA, 19 nt, Artificial Sequence
  Description of Artificial Sequence: Synthetic oligonucleotide
acaacgccaaagaaucauu

SEQ ID NO: 1593290 - RNA, 19 nt, Artificial Sequence
  Description of Artificial Sequence: Synthetic oligonucleotide
gugugugggugcauacaug

SEQ ID NO: 1593291 - RNA, 19 nt, Artificial Sequence
  Description of Artificial Sequence: Synthetic oligonucleotide
acauuucccaagauccauu

SEQ ID NO: 1593292 - RNA, 19 nt, Artificial Sequence
  Description of Artificial Sequence: Synthetic oligonucleotide
ggcuuguucuaaguucccc

SEQ ID NO: 1593293 - RNA, 19 nt, Artificial Sequence
  Description of Artificial Sequence: Synthetic oligonucleotide
gucccauuucuauggcuaa

SEQ ID NO: 1593294 - RNA, 19 nt, Artificial Sequence
  Description of Artificial Sequence: Synthetic oligonucleotide
ggauccauuuucauaugaa

SEQ ID NO: 1593295 - RNA, 19 nt, Artificial Sequence
  Description of Artificial Sequence: Synthetic oligonucleotide
cuucugguauguccuguaa

SEQ ID NO: 1593296 - RNA, 19 nt, Artificial Sequence
  Description of Artificial Sequence: Synthetic oligonucleotide
agguagccggaggugacga

SEQ ID NO: 1593297 - RNA, 19 nt, Artificial Sequence
  Description of Artificial Sequence: Synthetic oligonucleotide
augugucacacuggaucca

SEQ ID NO: 1593298 - RNA, 19 nt, Artificial Sequence
  Description of Artificial Sequence: Synthetic oligonucleotide
caacaacaacaacaacaaa

SEQ ID NO: 1593299 - RNA, 19 nt, Artificial Sequence
  Description of Artificial Sequence: Synthetic oligonucleotide
ucucaccggcccuucuuuu

SEQ ID NO: 1593300 - RNA, 19 nt, Artificial Sequence
  Description of Artificial Sequence: Synthetic oligonucleotide
uaaccaaacuaggcuuguu

SEQ ID NO: 1593301 - RNA, 19 nt, Artificial Sequence
  Description of Artificial Sequence: Synthetic oligonucleotide
acaugccugcugcgcagga

SEQ ID NO: 1593302 - RNA, 19 nt, Artificial Sequence
  Description of Artificial Sequence: Synthetic oligonucleotide
ggagguaauuuuguguaua

SEQ ID NO: 1593303 - RNA, 19 nt, Artificial Sequence
  Description of Artificial Sequence: Synthetic oligonucleotide
cuccccgccccuuuaaaua

SEQ ID NO: 1593304 - RNA, 19 nt, Artificial Sequence
  Description of Artificial Sequence: Synthetic oligonucleotide
guucaaguuguuauauguu

SEQ ID NO: 1593305 - RNA, 19 nt, Artificial Sequence
  Description of Artificial Sequence: Synthetic oligonucleotide
cuauggcuaauaagaugcu

SEQ ID NO: 1593306 - RNA, 19 nt, Artificial Sequence
  Description of Artificial Sequence: Synthetic oligonucleotide
ugccugcugcgcaggagua

SEQ ID NO: 1593307 - RNA, 19 nt, Artificial Sequence
  Description of Artificial Sequence: Synthetic oligonucleotide
cugucaggagauuaauguu

SEQ ID NO: 1593308 - RNA, 19 nt, Artificial Sequence
  Description of Artificial Sequence: Synthetic oligonucleotide
cuggucgaccaguaggccu

SEQ ID NO: 1593309 - RNA, 19 nt, Artificial Sequence
  Description of Artificial Sequence: Synthetic oligonucleotide
aucuccccgccccuuuaaa

SEQ ID NO: 1593310 - RNA, 19 nt, Artificial Sequence
  Description of Artificial Sequence: Synthetic oligonucleotide
gaggcgauuuggcauccau

SEQ ID NO: 1593311 - RNA, 19 nt, Artificial Sequence
  Description of Artificial Sequence: Synthetic oligonucleotide
aggucucaccaaggcgagg

SEQ ID NO: 1593312 - RNA, 19 nt, Artificial Sequence
  Description of Artificial Sequence: Synthetic oligonucleotide
cauuacagcucgggcuguc

SEQ ID NO: 1593313 - RNA, 19 nt, Artificial Sequence
  Description of Artificial Sequence: Synthetic oligonucleotide
caaguauucuuaggugaua

SEQ ID NO: 1593314 - RNA, 19 nt, Artificial Sequence
  Description of Artificial Sequence: Synthetic oligonucleotide
guaaccaaacuaggcuugu

SEQ ID NO: 1593315 - RNA, 19 nt, Artificial Sequence
  Description of Artificial Sequence: Synthetic oligonucleotide
gccaccgacaugccugcug

SEQ ID NO: 1593316 - RNA, 19 nt, Artificial Sequence
  Description of Artificial Sequence: Synthetic oligonucleotide
cacuuauuucuugaauuau

SEQ ID NO: 1593317 - RNA, 19 nt, Artificial Sequence
  Description of Artificial Sequence: Synthetic oligonucleotide
cgccccuuuaaauagcaca

SEQ ID NO: 1593318 - RNA, 19 nt, Artificial Sequence
  Description of Artificial Sequence: Synthetic oligonucleotide
ggcccugcuguagaucuug

SEQ ID NO: 1593319 - RNA, 19 nt, Artificial Sequence
  Description of Artificial Sequence: Synthetic oligonucleotide
gucacucacccuccccaaa

SEQ ID NO: 1593320 - RNA, 19 nt, Artificial Sequence
  Description of Artificial Sequence: Synthetic oligonucleotide
aggcgauuuggcauccauu

SEQ ID NO: 1593321 - RNA, 19 nt, Artificial Sequence
  Description of Artificial Sequence: Synthetic oligonucleotide
cuacgccacuuucaucuua

SEQ ID NO: 1593322 - RNA, 19 nt, Artificial Sequence
  Description of Artificial Sequence: Synthetic oligonucleotide
aggcaacauagaagcuaug

SEQ ID NO: 1593323 - RNA, 19 nt, Artificial Sequence
  Description of Artificial Sequence: Synthetic oligonucleotide
guauguccuguaaagccuu

SEQ ID NO: 1593324 - RNA, 19 nt, Artificial Sequence
  Description of Artificial Sequence: Synthetic oligonucleotide
caguaggccugccaagggu

SEQ ID NO: 1593325 - RNA, 19 nt, Artificial Sequence
  Description of Artificial Sequence: Synthetic oligonucleotide
ggagacaaucaaagcucuc

SEQ ID NO: 1593326 - RNA, 19 nt, Artificial Sequence
  Description of Artificial Sequence: Synthetic oligonucleotide
agccggaggugacgaacua

SEQ ID NO: 1593327 - RNA, 19 nt, Artificial Sequence
  Description of Artificial Sequence: Synthetic oligonucleotide
guucuacagauugucccau

SEQ ID NO: 1593328 - RNA, 19 nt, Artificial Sequence
  Description of Artificial Sequence: Synthetic oligonucleotide
agcaagcaccggccaccca

SEQ ID NO: 1593329 - RNA, 19 nt, Artificial Sequence
  Description of Artificial Sequence: Synthetic oligonucleotide
cugaguugucuugaacagu

SEQ ID NO: 1593330 - RNA, 19 nt, Artificial Sequence
  Description of Artificial Sequence: Synthetic oligonucleotide
gcgcaggaguagaaggccc

SEQ ID NO: 1593331 - RNA, 19 nt, Artificial Sequence
  Description of Artificial Sequence: Synthetic oligonucleotide
ccaaacuaggcuuguucua

SEQ ID NO: 1593332 - RNA, 19 nt, Artificial Sequence
  Description of Artificial Sequence: Synthetic oligonucleotide
ccaggcaacauagaagcua

SEQ ID NO: 1593333 - RNA, 19 nt, Artificial Sequence
  Description of Artificial Sequence: Synthetic oligonucleotide
ccuuuaaauagcacacuuu

SEQ ID NO: 1593334 - RNA, 19 nt, Artificial Sequence
  Description of Artificial Sequence: Synthetic oligonucleotide
gauggcugucugucuguuu

SEQ ID NO: 1593335 - RNA, 19 nt, Artificial Sequence
  Description of Artificial Sequence: Synthetic oligonucleotide
guggugauggcuggccaua

SEQ ID NO: 1593336 - RNA, 19 nt, Artificial Sequence
  Description of Artificial Sequence: Synthetic oligonucleotide
cggaggugacgaacuacgc

SEQ ID NO: 1593337 - RNA, 19 nt, Artificial Sequence
  Description of Artificial Sequence: Synthetic oligonucleotide
cugugauggcugucugucu

SEQ ID NO: 1593338 - RNA, 19 nt, Artificial Sequence
  Description of Artificial Sequence: Synthetic oligonucleotide
caccggccacccagucggg

SEQ ID NO: 1593339 - RNA, 19 nt, Artificial Sequence
  Description of Artificial Sequence: Synthetic oligonucleotide
gugacgaacuacgccacuu

SEQ ID NO: 1593340 - RNA, 19 nt, Artificial Sequence
  Description of Artificial Sequence: Synthetic oligonucleotide
ccaaggcgaggcacacagc

SEQ ID NO: 1593341 - RNA, 19 nt, Artificial Sequence
  Description of Artificial Sequence: Synthetic oligonucleotide
gccggaggugacgaacuac

SEQ ID NO: 1593342 - RNA, 19 nt, Artificial Sequence
  Description of Artificial Sequence: Synthetic oligonucleotide
ggcuaauaagaugcuguau

SEQ ID NO: 1593343 - RNA, 19 nt, Artificial Sequence
  Description of Artificial Sequence: Synthetic oligonucleotide
cccuuuaaauagcacacuu

SEQ ID NO: 1593344 - RNA, 19 nt, Artificial Sequence
  Description of Artificial Sequence: Synthetic oligonucleotide
caagcaccggccacccagu

SEQ ID NO: 1593345 - RNA, 19 nt, Artificial Sequence
  Description of Artificial Sequence: Synthetic oligonucleotide
cacucacccuccccaaagu

SEQ ID NO: 1593346 - RNA, 19 nt, Artificial Sequence
  Description of Artificial Sequence: Synthetic oligonucleotide
cccgccccuuuaaauagca

SEQ ID NO: 1593347 - RNA, 19 nt, Artificial Sequence
  Description of Artificial Sequence: Synthetic oligonucleotide
ccccgccccuuuaaauagc

SEQ ID NO: 1593348 - RNA, 19 nt, Artificial Sequence
  Description of Artificial Sequence: Synthetic oligonucleotide
cugcugcgcaggaguagaa

SEQ ID NO: 1593349 - RNA, 19 nt, Artificial Sequence
  Description of Artificial Sequence: Synthetic oligonucleotide
ccgacaugccugcugcgca

SEQ ID NO: 1593350 - RNA, 19 nt, Artificial Sequence
  Description of Artificial Sequence: Synthetic oligonucleotide
ccugccaagggugguccug

SEQ ID NO: 1593351 - RNA, 19 nt, Artificial Sequence
  Description of Artificial Sequence: Synthetic oligonucleotide
ccugcugcgcaggaguaga

SEQ ID NO: 1593352 - RNA, 19 nt, Artificial Sequence
  Description of Artificial Sequence: Synthetic oligonucleotide
cccauuucuauggcuaaua

SEQ ID NO: 1593353 - RNA, 19 nt, Artificial Sequence
  Description of Artificial Sequence: Synthetic oligonucleotide
gucgaccaguaggccugcc

SEQ ID NO: 1593354 - RNA, 19 nt, Artificial Sequence
  Description of Artificial Sequence: Synthetic oligonucleotide
caucucaccggcccuucuu

SEQ ID NO: 1593355 - RNA, 19 nt, Artificial Sequence
  Description of Artificial Sequence: Synthetic oligonucleotide
gguagccggaggugacgaa

SEQ ID NO: 1593356 - RNA, 19 nt, Artificial Sequence
  Description of Artificial Sequence: Synthetic oligonucleotide
ggucgaccaguaggccugc

SEQ ID NO: 1593357 - RNA, 19 nt, Artificial Sequence
  Description of Artificial Sequence: Synthetic oligonucleotide
gcgauuuggcauccauuau

SEQ ID NO: 1593358 - RNA, 19 nt, Artificial Sequence
  Description of Artificial Sequence: Synthetic oligonucleotide
ccgccccuuuaaauagcac

SEQ ID NO: 1593359 - RNA, 19 nt, Artificial Sequence
  Description of Artificial Sequence: Synthetic oligonucleotide
cgaacuacgccacuuucau

SEQ ID NO: 1593360 - RNA, 19 nt, Artificial Sequence
  Description of Artificial Sequence: Synthetic oligonucleotide
gcugcagaaaggagguaau

SEQ ID NO: 1593361 - RNA, 19 nt, Artificial Sequence
  Description of Artificial Sequence: Synthetic oligonucleotide
ccggccacccagucgggga

SEQ ID NO: 1593362 - RNA, 19 nt, Artificial Sequence
  Description of Artificial Sequence: Synthetic oligonucleotide
cgggcugucaggagauuaa

SEQ ID NO: 1593363 - RNA, 19 nt, Artificial Sequence
  Description of Artificial Sequence: Synthetic oligonucleotide
gcgaggcacacagcagcca

SEQ ID NO: 1593364 - RNA, 19 nt, Artificial Sequence
  Description of Artificial Sequence: Synthetic oligonucleotide
cgccacuuucaucuuaagu

SEQ ID NO: 1593365 - RNA, 19 nt, Artificial Sequence
  Description of Artificial Sequence: Synthetic oligonucleotide
ccagucggggagauacagu

SEQ ID NO: 1593366 - RNA, 19 nt, Artificial Sequence
  Description of Artificial Sequence: Synthetic oligonucleotide
ggaggcgauuuggcaucca

SEQ ID NO: 1593367 - RNA, 19 nt, Artificial Sequence
  Description of Artificial Sequence: Synthetic oligonucleotide
cggaggcgauuuggcaucc

SEQ ID NO: 1593368 - RNA, 19 nt, Artificial Sequence
  Description of Artificial Sequence: Synthetic oligonucleotide
caccggcccuucuuuugau

SEQ ID NO: 1593369 - RNA, 19 nt, Artificial Sequence
  Description of Artificial Sequence: Synthetic oligonucleotide
ggcccuucuuuugaucauu

SEQ ID NO: 1593370 - RNA, 19 nt, Artificial Sequence
  Description of Artificial Sequence: Synthetic oligonucleotide
ccccuuuaaauagcacacu

SEQ ID NO: 1593371 - RNA, 19 nt, Artificial Sequence
  Description of Artificial Sequence: Synthetic oligonucleotide
ccauuaucuccccgccccu

SEQ ID NO: 1593372 - RNA, 19 nt, Artificial Sequence
  Description of Artificial Sequence: Synthetic oligonucleotide
gccugccaagggugguccu

SEQ ID NO: 1593373 - RNA, 19 nt, Artificial Sequence
  Description of Artificial Sequence: Synthetic oligonucleotide
gccacccagucggggagau

SEQ ID NO: 1593374 - RNA, 19 nt, Artificial Sequence
  Description of Artificial Sequence: Synthetic oligonucleotide
cucgggcugucaggagauu

SEQ ID NO: 1593375 - RNA, 19 nt, Artificial Sequence
  Description of Artificial Sequence: Synthetic oligonucleotide
ccacccagucggggagaua

SEQ ID NO: 1593376 - RNA, 19 nt, Artificial Sequence
  Description of Artificial Sequence: Synthetic oligonucleotide
uauucaagagaccagaugg

SEQ ID NO: 1593377 - RNA, 19 nt, Artificial Sequence
  Description of Artificial Sequence: Synthetic oligonucleotide
aauacgccuaaucugcucc

SEQ ID NO: 1593378 - RNA, 19 nt, Artificial Sequence
  Description of Artificial Sequence: Synthetic oligonucleotide
uauuugaucuuauaggcca

SEQ ID NO: 1593379 - RNA, 19 nt, Artificial Sequence
  Description of Artificial Sequence: Synthetic oligonucleotide
aagagucucauccacgcuc

SEQ ID NO: 1593380 - RNA, 19 nt, Artificial Sequence
  Description of Artificial Sequence: Synthetic oligonucleotide
cuugccacgauccacauag

SEQ ID NO: 1593381 - RNA, 19 nt, Artificial Sequence
  Description of Artificial Sequence: Synthetic oligonucleotide
aauaauccaucaucugggg

SEQ ID NO: 1593382 - RNA, 19 nt, Artificial Sequence
  Description of Artificial Sequence: Synthetic oligonucleotide
uugaccuuuauucaagaga

SEQ ID NO: 1593383 - RNA, 19 nt, Artificial Sequence
  Description of Artificial Sequence: Synthetic oligonucleotide
uaauccaucaucuggggca

SEQ ID NO: 1593384 - RNA, 19 nt, Artificial Sequence
  Description of Artificial Sequence: Synthetic oligonucleotide
ucucuugcauucaucauag

SEQ ID NO: 1593385 - RNA, 19 nt, Artificial Sequence
  Description of Artificial Sequence: Synthetic oligonucleotide
aggguauuugaucuuauag

SEQ ID NO: 1593386 - RNA, 19 nt, Artificial Sequence
  Description of Artificial Sequence: Synthetic oligonucleotide
acaguuugauauuguaucg

SEQ ID NO: 1593387 - RNA, 19 nt, Artificial Sequence
  Description of Artificial Sequence: Synthetic oligonucleotide
gguauuugaucuuauaggc

SEQ ID NO: 1593388 - RNA, 19 nt, Artificial Sequence
  Description of Artificial Sequence: Synthetic oligonucleotide
accauauucaaacagccgu

SEQ ID NO: 1593389 - RNA, 19 nt, Artificial Sequence
  Description of Artificial Sequence: Synthetic oligonucleotide
uggauugcaagucuggaga

SEQ ID NO: 1593390 - RNA, 19 nt, Artificial Sequence
  Description of Artificial Sequence: Synthetic oligonucleotide
uuucuguacaaauaaucca

SEQ ID NO: 1593391 - RNA, 19 nt, Artificial Sequence
  Description of Artificial Sequence: Synthetic oligonucleotide
aguuugauauuguaucguc

SEQ ID NO: 1593392 - RNA, 19 nt, Artificial Sequence
  Description of Artificial Sequence: Synthetic oligonucleotide
uauuguaucgucucuugca

SEQ ID NO: 1593393 - RNA, 19 nt, Artificial Sequence
  Description of Artificial Sequence: Synthetic oligonucleotide
uuugauauuguaucgucuc

SEQ ID NO: 1593394 - RNA, 19 nt, Artificial Sequence
  Description of Artificial Sequence: Synthetic oligonucleotide
auauuguaucgucucuugc

SEQ ID NO: 1593395 - RNA, 19 nt, Artificial Sequence
  Description of Artificial Sequence: Synthetic oligonucleotide
ucuugcauucaucauagaa

SEQ ID NO: 1593396 - RNA, 19 nt, Artificial Sequence
  Description of Artificial Sequence: Synthetic oligonucleotide
acauaagagucucauccac

SEQ ID NO: 1593397 - RNA, 19 nt, Artificial Sequence
  Description of Artificial Sequence: Synthetic oligonucleotide
uuauucaagagaccagaug

SEQ ID NO: 1593398 - RNA, 19 nt, Artificial Sequence
  Description of Artificial Sequence: Synthetic oligonucleotide
auagaagccauagaugcgg

SEQ ID NO: 1593399 - RNA, 19 nt, Artificial Sequence
  Description of Artificial Sequence: Synthetic oligonucleotide
aagacugcuugccacgauc

SEQ ID NO: 1593400 - RNA, 19 nt, Artificial Sequence
  Description of Artificial Sequence: Synthetic oligonucleotide
caggauuccacuugaagcc

SEQ ID NO: 1593401 - RNA, 19 nt, Artificial Sequence
  Description of Artificial Sequence: Synthetic oligonucleotide
uuugaggcacaaaccacgg

SEQ ID NO: 1593402 - RNA, 19 nt, Artificial Sequence
  Description of Artificial Sequence: Synthetic oligonucleotide
agaagaauaggcuggcuca

SEQ ID NO: 1593403 - RNA, 19 nt, Artificial Sequence
  Description of Artificial Sequence: Synthetic oligonucleotide
aucucccgggauuugaggc

SEQ ID NO: 1593404 - RNA, 19 nt, Artificial Sequence
  Description of Artificial Sequence: Synthetic oligonucleotide
uccacuugaagccaccaca

SEQ ID NO: 1593405 - RNA, 19 nt, Artificial Sequence
  Description of Artificial Sequence: Synthetic oligonucleotide
gcacauaagagucucaucc

SEQ ID NO: 1593406 - RNA, 19 nt, Artificial Sequence
  Description of Artificial Sequence: Synthetic oligonucleotide
auucucaggguauuugauc

SEQ ID NO: 1593407 - RNA, 19 nt, Artificial Sequence
  Description of Artificial Sequence: Synthetic oligonucleotide
uguacaaauaauccaucau

SEQ ID NO: 1593408 - RNA, 19 nt, Artificial Sequence
  Description of Artificial Sequence: Synthetic oligonucleotide
gauauuguaucgucucuug

SEQ ID NO: 1593409 - RNA, 19 nt, Artificial Sequence
  Description of Artificial Sequence: Synthetic oligonucleotide
ucagugaaagucuuccaca

SEQ ID NO: 1593410 - RNA, 19 nt, Artificial Sequence
  Description of Artificial Sequence: Synthetic oligonucleotide
agcacauggagacuacuuc

SEQ ID NO: 1593411 - RNA, 19 nt, Artificial Sequence
  Description of Artificial Sequence: Synthetic oligonucleotide
agaccagauggguugcucc

SEQ ID NO: 1593412 - RNA, 19 nt, Artificial Sequence
  Description of Artificial Sequence: Synthetic oligonucleotide
agacacuuaacgcugugug

SEQ ID NO: 1593413 - RNA, 19 nt, Artificial Sequence
  Description of Artificial Sequence: Synthetic oligonucleotide
uucuacaaccugaugcgcc

SEQ ID NO: 1593414 - RNA, 19 nt, Artificial Sequence
  Description of Artificial Sequence: Synthetic oligonucleotide
ugcuauugauucauuaaaa

SEQ ID NO: 1593415 - RNA, 19 nt, Artificial Sequence
  Description of Artificial Sequence: Synthetic oligonucleotide
uuugaccuuuauucaagag

SEQ ID NO: 1593416 - RNA, 19 nt, Artificial Sequence
  Description of Artificial Sequence: Synthetic oligonucleotide
uguaucgucucuugcauuc

SEQ ID NO: 1593417 - RNA, 19 nt, Artificial Sequence
  Description of Artificial Sequence: Synthetic oligonucleotide
ugaucuuauaggccagcag

SEQ ID NO: 1593418 - RNA, 19 nt, Artificial Sequence
  Description of Artificial Sequence: Synthetic oligonucleotide
aaaucaugcuuguguagga

SEQ ID NO: 1593419 - RNA, 19 nt, Artificial Sequence
  Description of Artificial Sequence: Synthetic oligonucleotide
cuugagaggugccucaagc

SEQ ID NO: 1593420 - RNA, 19 nt, Artificial Sequence
  Description of Artificial Sequence: Synthetic oligonucleotide
cuuguguaggaacuuggcc

SEQ ID NO: 1593421 - RNA, 19 nt, Artificial Sequence
  Description of Artificial Sequence: Synthetic oligonucleotide
ucaggaauaucucccggga

SEQ ID NO: 1593422 - RNA, 19 nt, Artificial Sequence
  Description of Artificial Sequence: Synthetic oligonucleotide
ucuacaaccugaugcgccc

SEQ ID NO: 1593423 - RNA, 19 nt, Artificial Sequence
  Description of Artificial Sequence: Synthetic oligonucleotide
cuugaagccaccacaggug

SEQ ID NO: 1593424 - RNA, 19 nt, Artificial Sequence
  Description of Artificial Sequence: Synthetic oligonucleotide
agaaagaaauucucagggu

SEQ ID NO: 1593425 - RNA, 19 nt, Artificial Sequence
  Description of Artificial Sequence: Synthetic oligonucleotide
gaagccauagaugcgguug

SEQ ID NO: 1593426 - RNA, 19 nt, Artificial Sequence
  Description of Artificial Sequence: Synthetic oligonucleotide
augcgguugaugcuggcac

SEQ ID NO: 1593427 - RNA, 19 nt, Artificial Sequence
  Description of Artificial Sequence: Synthetic oligonucleotide
acgaagcagaaagaaauuc

SEQ ID NO: 1593428 - RNA, 19 nt, Artificial Sequence
  Description of Artificial Sequence: Synthetic oligonucleotide
uguguaggaacuuggccac

SEQ ID NO: 1593429 - RNA, 19 nt, Artificial Sequence
  Description of Artificial Sequence: Synthetic oligonucleotide
uuuauucaagagaccagau

SEQ ID NO: 1593430 - RNA, 19 nt, Artificial Sequence
  Description of Artificial Sequence: Synthetic oligonucleotide
cucaggaauaucucccggg

SEQ ID NO: 1593431 - RNA, 19 nt, Artificial Sequence
  Description of Artificial Sequence: Synthetic oligonucleotide
gauggguugcuccaggauc

SEQ ID NO: 1593432 - RNA, 19 nt, Artificial Sequence
  Description of Artificial Sequence: Synthetic oligonucleotide
gcagaaagaaauucucagg

SEQ ID NO: 1593433 - RNA, 19 nt, Artificial Sequence
  Description of Artificial Sequence: Synthetic oligonucleotide
aggcagauggucuccaaag

SEQ ID NO: 1593434 - RNA, 19 nt, Artificial Sequence
  Description of Artificial Sequence: Synthetic oligonucleotide
uuccccuuguucuugucag

SEQ ID NO: 1593435 - RNA, 19 nt, Artificial Sequence
  Description of Artificial Sequence: Synthetic oligonucleotide
ucugugggccgcauaauac

SEQ ID NO: 1593436 - RNA, 19 nt, Artificial Sequence
  Description of Artificial Sequence: Synthetic oligonucleotide
uaaaggagacgccacgguc

SEQ ID NO: 1593437 - RNA, 19 nt, Artificial Sequence
  Description of Artificial Sequence: Synthetic oligonucleotide
gacgccacggucauucucg

SEQ ID NO: 1593438 - RNA, 19 nt, Artificial Sequence
  Description of Artificial Sequence: Synthetic oligonucleotide
auagaugcgguugaugcug

SEQ ID NO: 1593439 - RNA, 19 nt, Artificial Sequence
  Description of Artificial Sequence: Synthetic oligonucleotide
aagagaccagauggguugc

SEQ ID NO: 1593440 - RNA, 19 nt, Artificial Sequence
  Description of Artificial Sequence: Synthetic oligonucleotide
acacaguaggcccugguca

SEQ ID NO: 1593441 - RNA, 19 nt, Artificial Sequence
  Description of Artificial Sequence: Synthetic oligonucleotide
cagugaaagucuuccacag

SEQ ID NO: 1593442 - RNA, 19 nt, Artificial Sequence
  Description of Artificial Sequence: Synthetic oligonucleotide
ugugggccgcauaauacgc

SEQ ID NO: 1593443 - RNA, 19 nt, Artificial Sequence
  Description of Artificial Sequence: Synthetic oligonucleotide
uccauggauugcaagucug

SEQ ID NO: 1593444 - RNA, 19 nt, Artificial Sequence
  Description of Artificial Sequence: Synthetic oligonucleotide
ugagaggugccucaagcuc

SEQ ID NO: 1593445 - RNA, 19 nt, Artificial Sequence
  Description of Artificial Sequence: Synthetic oligonucleotide
aaaggagacgccacgguca

SEQ ID NO: 1593446 - RNA, 19 nt, Artificial Sequence
  Description of Artificial Sequence: Synthetic oligonucleotide
ccaggauuccacuugaagc

SEQ ID NO: 1593447 - RNA, 19 nt, Artificial Sequence
  Description of Artificial Sequence: Synthetic oligonucleotide
ccauagaugcgguugaugc

SEQ ID NO: 1593448 - RNA, 19 nt, Artificial Sequence
  Description of Artificial Sequence: Synthetic oligonucleotide
acuuaacgcuguguguucc

SEQ ID NO: 1593449 - RNA, 19 nt, Artificial Sequence
  Description of Artificial Sequence: Synthetic oligonucleotide
cuugucagcgggcuugagg

SEQ ID NO: 1593450 - RNA, 19 nt, Artificial Sequence
  Description of Artificial Sequence: Synthetic oligonucleotide
gucagugaaagucuuccac

SEQ ID NO: 1593451 - RNA, 19 nt, Artificial Sequence
  Description of Artificial Sequence: Synthetic oligonucleotide
agcacauaagagucucauc

SEQ ID NO: 1593452 - RNA, 19 nt, Artificial Sequence
  Description of Artificial Sequence: Synthetic oligonucleotide
cugugggccgcauaauacg

SEQ ID NO: 1593453 - RNA, 19 nt, Artificial Sequence
  Description of Artificial Sequence: Synthetic oligonucleotide
ggauuugaggcacaaacca

SEQ ID NO: 1593454 - RNA, 19 nt, Artificial Sequence
  Description of Artificial Sequence: Synthetic oligonucleotide
ccaaagguaaaggagacgc

SEQ ID NO: 1593455 - RNA, 19 nt, Artificial Sequence
  Description of Artificial Sequence: Synthetic oligonucleotide
aagcagaaagaaauucuca

SEQ ID NO: 1593456 - RNA, 19 nt, Artificial Sequence
  Description of Artificial Sequence: Synthetic oligonucleotide
agaauaggcuggcucagga

SEQ ID NO: 1593457 - RNA, 19 nt, Artificial Sequence
  Description of Artificial Sequence: Synthetic oligonucleotide
uuagacgcugcuauugauu

SEQ ID NO: 1593458 - RNA, 19 nt, Artificial Sequence
  Description of Artificial Sequence: Synthetic oligonucleotide
auucaagagaccagauggg

SEQ ID NO: 1593459 - RNA, 19 nt, Artificial Sequence
  Description of Artificial Sequence: Synthetic oligonucleotide
cuuuauucaagagaccaga

SEQ ID NO: 1593460 - RNA, 19 nt, Artificial Sequence
  Description of Artificial Sequence: Synthetic oligonucleotide
cagaagaauaggcuggcuc

SEQ ID NO: 1593461 - RNA, 19 nt, Artificial Sequence
  Description of Artificial Sequence: Synthetic oligonucleotide
caaagguaaaggagacgcc

SEQ ID NO: 1593462 - RNA, 19 nt, Artificial Sequence
  Description of Artificial Sequence: Synthetic oligonucleotide
uugagaggugccucaagcu

SEQ ID NO: 1593463 - RNA, 19 nt, Artificial Sequence
  Description of Artificial Sequence: Synthetic oligonucleotide
gauuagacgcugcuauuga

SEQ ID NO: 1593464 - RNA, 19 nt, Artificial Sequence
  Description of Artificial Sequence: Synthetic oligonucleotide
agcccuggaggauuagacg

SEQ ID NO: 1593465 - RNA, 19 nt, Artificial Sequence
  Description of Artificial Sequence: Synthetic oligonucleotide
cagucagugaaagucuucc

SEQ ID NO: 1593466 - RNA, 19 nt, Artificial Sequence
  Description of Artificial Sequence: Synthetic oligonucleotide
uacaauggcugcgaugggc

SEQ ID NO: 1593467 - RNA, 19 nt, Artificial Sequence
  Description of Artificial Sequence: Synthetic oligonucleotide
cugaggggcagugugaccc

SEQ ID NO: 1593468 - RNA, 19 nt, Artificial Sequence
  Description of Artificial Sequence: Synthetic oligonucleotide
aggagaucacacaguaggc

SEQ ID NO: 1593469 - RNA, 19 nt, Artificial Sequence
  Description of Artificial Sequence: Synthetic oligonucleotide
uagaugcgguugaugcugg

SEQ ID NO: 1593470 - RNA, 19 nt, Artificial Sequence
  Description of Artificial Sequence: Synthetic oligonucleotide
gauuugaggcacaaaccac

SEQ ID NO: 1593471 - RNA, 19 nt, Artificial Sequence
  Description of Artificial Sequence: Synthetic oligonucleotide
aaccugaugcgcccugcag

SEQ ID NO: 1593472 - RNA, 19 nt, Artificial Sequence
  Description of Artificial Sequence: Synthetic oligonucleotide
ucucguucucuguuaguug

SEQ ID NO: 1593473 - RNA, 19 nt, Artificial Sequence
  Description of Artificial Sequence: Synthetic oligonucleotide
ucaucuacaauggcugcga

SEQ ID NO: 1593474 - RNA, 19 nt, Artificial Sequence
  Description of Artificial Sequence: Synthetic oligonucleotide
uucaagagaccagaugggu

SEQ ID NO: 1593475 - RNA, 19 nt, Artificial Sequence
  Description of Artificial Sequence: Synthetic oligonucleotide
aggaauaucucccgggauu

SEQ ID NO: 1593476 - RNA, 19 nt, Artificial Sequence
  Description of Artificial Sequence: Synthetic oligonucleotide
gaagaauaggcuggcucag

SEQ ID NO: 1593477 - RNA, 19 nt, Artificial Sequence
  Description of Artificial Sequence: Synthetic oligonucleotide
uggagacccacaaucuggu

SEQ ID NO: 1593478 - RNA, 19 nt, Artificial Sequence
  Description of Artificial Sequence: Synthetic oligonucleotide
ccacgauccacauaguccc

SEQ ID NO: 1593479 - RNA, 19 nt, Artificial Sequence
  Description of Artificial Sequence: Synthetic oligonucleotide
acaucugugggccgcauaa

SEQ ID NO: 1593480 - RNA, 19 nt, Artificial Sequence
  Description of Artificial Sequence: Synthetic oligonucleotide
acauggagacuacuucuug

SEQ ID NO: 1593481 - RNA, 19 nt, Artificial Sequence
  Description of Artificial Sequence: Synthetic oligonucleotide
ggcagcaugauuucuguac

SEQ ID NO: 1593482 - RNA, 19 nt, Artificial Sequence
  Description of Artificial Sequence: Synthetic oligonucleotide
cuuguucuugucagcgggc

SEQ ID NO: 1593483 - RNA, 19 nt, Artificial Sequence
  Description of Artificial Sequence: Synthetic oligonucleotide
uggaggauuagacgcugcu

SEQ ID NO: 1593484 - RNA, 19 nt, Artificial Sequence
  Description of Artificial Sequence: Synthetic oligonucleotide
uuugaucuuauaggccagc

SEQ ID NO: 1593485 - RNA, 19 nt, Artificial Sequence
  Description of Artificial Sequence: Synthetic oligonucleotide
cucaucuacaauggcugcg

SEQ ID NO: 1593486 - RNA, 19 nt, Artificial Sequence
  Description of Artificial Sequence: Synthetic oligonucleotide
aagacacuuaacgcugugu

SEQ ID NO: 1593487 - RNA, 19 nt, Artificial Sequence
  Description of Artificial Sequence: Synthetic oligonucleotide
aucuacaauggcugcgaug

SEQ ID NO: 1593488 - RNA, 19 nt, Artificial Sequence
  Description of Artificial Sequence: Synthetic oligonucleotide
cuuuggcagaguugcgggg

SEQ ID NO: 1593489 - RNA, 19 nt, Artificial Sequence
  Description of Artificial Sequence: Synthetic oligonucleotide
aauucucaggguauuugau

SEQ ID NO: 1593490 - RNA, 19 nt, Artificial Sequence
  Description of Artificial Sequence: Synthetic oligonucleotide
gcacaaaccacggaucucg

SEQ ID NO: 1593491 - RNA, 19 nt, Artificial Sequence
  Description of Artificial Sequence: Synthetic oligonucleotide
ugccauugcccugagcugc

SEQ ID NO: 1593492 - RNA, 19 nt, Artificial Sequence
  Description of Artificial Sequence: Synthetic oligonucleotide
caaacagccguagaagguc

SEQ ID NO: 1593493 - RNA, 19 nt, Artificial Sequence
  Description of Artificial Sequence: Synthetic oligonucleotide
cucguagccaucuucuaca

SEQ ID NO: 1593494 - RNA, 19 nt, Artificial Sequence
  Description of Artificial Sequence: Synthetic oligonucleotide
cuuaacgcuguguguuccc

SEQ ID NO: 1593495 - RNA, 19 nt, Artificial Sequence
  Description of Artificial Sequence: Synthetic oligonucleotide
aggcacaaaccacggaucu

SEQ ID NO: 1593496 - RNA, 19 nt, Artificial Sequence
  Description of Artificial Sequence: Synthetic oligonucleotide
acugaacugcccauacuuc

SEQ ID NO: 1593497 - RNA, 19 nt, Artificial Sequence
  Description of Artificial Sequence: Synthetic oligonucleotide
uaagagucucauccacgcu

SEQ ID NO: 1593498 - RNA, 19 nt, Artificial Sequence
  Description of Artificial Sequence: Synthetic oligonucleotide
uguaggaacuuggccacca

SEQ ID NO: 1593499 - RNA, 19 nt, Artificial Sequence
  Description of Artificial Sequence: Synthetic oligonucleotide
ugauauuguaucgucucuu

SEQ ID NO: 1593500 - RNA, 19 nt, Artificial Sequence
  Description of Artificial Sequence: Synthetic oligonucleotide
gaggauuagacgcugcuau

SEQ ID NO: 1593501 - RNA, 19 nt, Artificial Sequence
  Description of Artificial Sequence: Synthetic oligonucleotide
gguaaaggagacgccacgg

SEQ ID NO: 1593502 - RNA, 19 nt, Artificial Sequence
  Description of Artificial Sequence: Synthetic oligonucleotide
gacauggcggcuccgccgc

SEQ ID NO: 1593503 - RNA, 19 nt, Artificial Sequence
  Description of Artificial Sequence: Synthetic oligonucleotide
agaguugcgggguggggug

SEQ ID NO: 1593504 - RNA, 19 nt, Artificial Sequence
  Description of Artificial Sequence: Synthetic oligonucleotide
ucgugguucccacgaagca

SEQ ID NO: 1593505 - RNA, 19 nt, Artificial Sequence
  Description of Artificial Sequence: Synthetic oligonucleotide
uaauacgccuaaucugcuc

SEQ ID NO: 1593506 - RNA, 19 nt, Artificial Sequence
  Description of Artificial Sequence: Synthetic oligonucleotide
auuagacgcugcuauugau

SEQ ID NO: 1593507 - RNA, 19 nt, Artificial Sequence
  Description of Artificial Sequence: Synthetic oligonucleotide
ucagcgggcuugaggaucu

SEQ ID NO: 1593508 - RNA, 19 nt, Artificial Sequence
  Description of Artificial Sequence: Synthetic oligonucleotide
acaaucuggucugccauug

SEQ ID NO: 1593509 - RNA, 19 nt, Artificial Sequence
  Description of Artificial Sequence: Synthetic oligonucleotide
uugcaagucuggagacagg

SEQ ID NO: 1593510 - RNA, 19 nt, Artificial Sequence
  Description of Artificial Sequence: Synthetic oligonucleotide
cugcuauugauucauuaaa

SEQ ID NO: 1593511 - RNA, 19 nt, Artificial Sequence
  Description of Artificial Sequence: Synthetic oligonucleotide
ucuguuaguugcacauuuu

SEQ ID NO: 1593512 - RNA, 19 nt, Artificial Sequence
  Description of Artificial Sequence: Synthetic oligonucleotide
ugccacgauccacauaguc

SEQ ID NO: 1593513 - RNA, 19 nt, Artificial Sequence
  Description of Artificial Sequence: Synthetic oligonucleotide
uuccacuugaagccaccac

SEQ ID NO: 1593514 - RNA, 19 nt, Artificial Sequence
  Description of Artificial Sequence: Synthetic oligonucleotide
uccagcuuugaccuuuauu

SEQ ID NO: 1593515 - RNA, 19 nt, Artificial Sequence
  Description of Artificial Sequence: Synthetic oligonucleotide
acacucgugguucccacga

SEQ ID NO: 1593516 - RNA, 19 nt, Artificial Sequence
  Description of Artificial Sequence: Synthetic oligonucleotide
auuugaucuuauaggccag

SEQ ID NO: 1593517 - RNA, 19 nt, Artificial Sequence
  Description of Artificial Sequence: Synthetic oligonucleotide
aucuuauaggccagcagca

SEQ ID NO: 1593518 - RNA, 19 nt, Artificial Sequence
  Description of Artificial Sequence: Synthetic oligonucleotide
ucucccgggauuugaggca

SEQ ID NO: 1593519 - RNA, 19 nt, Artificial Sequence
  Description of Artificial Sequence: Synthetic oligonucleotide
aaacagccguagaagguca

SEQ ID NO: 1593520 - RNA, 19 nt, Artificial Sequence
  Description of Artificial Sequence: Synthetic oligonucleotide
agucagugaaagucuucca

SEQ ID NO: 1593521 - RNA, 19 nt, Artificial Sequence
  Description of Artificial Sequence: Synthetic oligonucleotide
aaccacggaucucguucuc

SEQ ID NO: 1593522 - RNA, 19 nt, Artificial Sequence
  Description of Artificial Sequence: Synthetic oligonucleotide
aaggagacgccacggucau

SEQ ID NO: 1593523 - RNA, 19 nt, Artificial Sequence
  Description of Artificial Sequence: Synthetic oligonucleotide
cacauaagagucucaucca

SEQ ID NO: 1593524 - RNA, 19 nt, Artificial Sequence
  Description of Artificial Sequence: Synthetic oligonucleotide
ugggccgcauaauacgccu

SEQ ID NO: 1593525 - RNA, 19 nt, Artificial Sequence
  Description of Artificial Sequence: Synthetic oligonucleotide
ugcgcccugcagaugaggu

SEQ ID NO: 1593526 - RNA, 19 nt, Artificial Sequence
  Description of Artificial Sequence: Synthetic oligonucleotide
acaaccugaugcgcccugc

SEQ ID NO: 1593527 - RNA, 19 nt, Artificial Sequence
  Description of Artificial Sequence: Synthetic oligonucleotide
aacugcccauacuuccccu

SEQ ID NO: 1593528 - RNA, 19 nt, Artificial Sequence
  Description of Artificial Sequence: Synthetic oligonucleotide
uacaaccugaugcgcccug

SEQ ID NO: 1593529 - RNA, 19 nt, Artificial Sequence
  Description of Artificial Sequence: Synthetic oligonucleotide
agaugcgguugaugcuggc

SEQ ID NO: 1593530 - RNA, 19 nt, Artificial Sequence
  Description of Artificial Sequence: Synthetic oligonucleotide
ggauuagacgcugcuauug

SEQ ID NO: 1593531 - RNA, 19 nt, Artificial Sequence
  Description of Artificial Sequence: Synthetic oligonucleotide
gggcuugaggaucuggaag

SEQ ID NO: 1593532 - RNA, 19 nt, Artificial Sequence
  Description of Artificial Sequence: Synthetic oligonucleotide
agacgccacggucauucuc

SEQ ID NO: 1593533 - RNA, 19 nt, Artificial Sequence
  Description of Artificial Sequence: Synthetic oligonucleotide
ucccacgaagcagaaagaa

SEQ ID NO: 1593534 - RNA, 19 nt, Artificial Sequence
  Description of Artificial Sequence: Synthetic oligonucleotide
ucaggguauuugaucuuau

SEQ ID NO: 1593535 - RNA, 19 nt, Artificial Sequence
  Description of Artificial Sequence: Synthetic oligonucleotide
gugaaagucuuccacaguu

SEQ ID NO: 1593536 - RNA, 19 nt, Artificial Sequence
  Description of Artificial Sequence: Synthetic oligonucleotide
ugucggacauggcggcucc

SEQ ID NO: 1593537 - RNA, 19 nt, Artificial Sequence
  Description of Artificial Sequence: Synthetic oligonucleotide
ucucgccccagccuugaac

SEQ ID NO: 1593538 - RNA, 19 nt, Artificial Sequence
  Description of Artificial Sequence: Synthetic oligonucleotide
uaucgucucuugcauucau

SEQ ID NO: 1593539 - RNA, 19 nt, Artificial Sequence
  Description of Artificial Sequence: Synthetic oligonucleotide
ccuuuauucaagagaccag

SEQ ID NO: 1593540 - RNA, 19 nt, Artificial Sequence
  Description of Artificial Sequence: Synthetic oligonucleotide
gauuccacuugaagccacc

SEQ ID NO: 1593541 - RNA, 19 nt, Artificial Sequence
  Description of Artificial Sequence: Synthetic oligonucleotide
guagaaggucauaguacug

SEQ ID NO: 1593542 - RNA, 19 nt, Artificial Sequence
  Description of Artificial Sequence: Synthetic oligonucleotide
aucucguucucuguuaguu

SEQ ID NO: 1593543 - RNA, 19 nt, Artificial Sequence
  Description of Artificial Sequence: Synthetic oligonucleotide
gggauuugaggcacaaacc

SEQ ID NO: 1593544 - RNA, 19 nt, Artificial Sequence
  Description of Artificial Sequence: Synthetic oligonucleotide
cuugaggaucuggaaggag

SEQ ID NO: 1593545 - RNA, 19 nt, Artificial Sequence
  Description of Artificial Sequence: Synthetic oligonucleotide
uaacgcuguguguucccca

SEQ ID NO: 1593546 - RNA, 19 nt, Artificial Sequence
  Description of Artificial Sequence: Synthetic oligonucleotide
cacacaguaggcccugguc

SEQ ID NO: 1593547 - RNA, 19 nt, Artificial Sequence
  Description of Artificial Sequence: Synthetic oligonucleotide
ugcgguugaugcuggcaca

SEQ ID NO: 1593548 - RNA, 19 nt, Artificial Sequence
  Description of Artificial Sequence: Synthetic oligonucleotide
aucugugggccgcauaaua

SEQ ID NO: 1593549 - RNA, 19 nt, Artificial Sequence
  Description of Artificial Sequence: Synthetic oligonucleotide
gacacuuaacgcugugugu

SEQ ID NO: 1593550 - RNA, 19 nt, Artificial Sequence
  Description of Artificial Sequence: Synthetic oligonucleotide
ccguagaaggucauaguac

SEQ ID NO: 1593551 - RNA, 19 nt, Artificial Sequence
  Description of Artificial Sequence: Synthetic oligonucleotide
gcugcuauugauucauuaa

SEQ ID NO: 1593552 - RNA, 19 nt, Artificial Sequence
  Description of Artificial Sequence: Synthetic oligonucleotide
cgggauuugaggcacaaac

SEQ ID NO: 1593553 - RNA, 19 nt, Artificial Sequence
  Description of Artificial Sequence: Synthetic oligonucleotide
aagccaccacaggugcugg

SEQ ID NO: 1593554 - RNA, 19 nt, Artificial Sequence
  Description of Artificial Sequence: Synthetic oligonucleotide
agauggguugcuccaggau

SEQ ID NO: 1593555 - RNA, 19 nt, Artificial Sequence
  Description of Artificial Sequence: Synthetic oligonucleotide
ccauggauugcaagucugg

SEQ ID NO: 1593556 - RNA, 19 nt, Artificial Sequence
  Description of Artificial Sequence: Synthetic oligonucleotide
gauugcaagucuggagaca

SEQ ID NO: 1593557 - RNA, 19 nt, Artificial Sequence
  Description of Artificial Sequence: Synthetic oligonucleotide
cacuuaacgcuguguguuc

SEQ ID NO: 1593558 - RNA, 19 nt, Artificial Sequence
  Description of Artificial Sequence: Synthetic oligonucleotide
ggauugcaagucuggagac

SEQ ID NO: 1593559 - RNA, 19 nt, Artificial Sequence
  Description of Artificial Sequence: Synthetic oligonucleotide
aagaacucguagccaucuu

SEQ ID NO: 1593560 - RNA, 19 nt, Artificial Sequence
  Description of Artificial Sequence: Synthetic oligonucleotide
cuuggccccaggauuccac

SEQ ID NO: 1593561 - RNA, 19 nt, Artificial Sequence
  Description of Artificial Sequence: Synthetic oligonucleotide
cuggaggauuagacgcugc

SEQ ID NO: 1593562 - RNA, 19 nt, Artificial Sequence
  Description of Artificial Sequence: Synthetic oligonucleotide
guaggcccuggucaggcac

SEQ ID NO: 1593563 - RNA, 19 nt, Artificial Sequence
  Description of Artificial Sequence: Synthetic oligonucleotide
ccacuugaagccaccacag

SEQ ID NO: 1593564 - RNA, 19 nt, Artificial Sequence
  Description of Artificial Sequence: Synthetic oligonucleotide
gaggcacaaaccacggauc

SEQ ID NO: 1593565 - RNA, 19 nt, Artificial Sequence
  Description of Artificial Sequence: Synthetic oligonucleotide
auaauacgccuaaucugcu

SEQ ID NO: 1593566 - RNA, 19 nt, Artificial Sequence
  Description of Artificial Sequence: Synthetic oligonucleotide
aucgucucuugcauucauc

SEQ ID NO: 1593567 - RNA, 19 nt, Artificial Sequence
  Description of Artificial Sequence: Synthetic oligonucleotide
ggacauggcggcuccgccg

SEQ ID NO: 1593568 - RNA, 19 nt, Artificial Sequence
  Description of Artificial Sequence: Synthetic oligonucleotide
ucuuggcaaagaacucgua

SEQ ID NO: 1593569 - RNA, 19 nt, Artificial Sequence
  Description of Artificial Sequence: Synthetic oligonucleotide
ucguagccaucuucuacaa

SEQ ID NO: 1593570 - RNA, 19 nt, Artificial Sequence
  Description of Artificial Sequence: Synthetic oligonucleotide
gcucaggaauaucucccgg

SEQ ID NO: 1593571 - RNA, 19 nt, Artificial Sequence
  Description of Artificial Sequence: Synthetic oligonucleotide
cagauggucuccaaagacu

SEQ ID NO: 1593572 - RNA, 19 nt, Artificial Sequence
  Description of Artificial Sequence: Synthetic oligonucleotide
agcuucucgcugucggaca

SEQ ID NO: 1593573 - RNA, 19 nt, Artificial Sequence
  Description of Artificial Sequence: Synthetic oligonucleotide
uccccuuguucuugucagc

SEQ ID NO: 1593574 - RNA, 19 nt, Artificial Sequence
  Description of Artificial Sequence: Synthetic oligonucleotide
gagcuucucgcugucggac

SEQ ID NO: 1593575 - RNA, 19 nt, Artificial Sequence
  Description of Artificial Sequence: Synthetic oligonucleotide
gcagcaugauuucuguaca

SEQ ID NO: 1593576 - RNA, 19 nt, Artificial Sequence
  Description of Artificial Sequence: Synthetic oligonucleotide
agacgcugcuauugauuca

SEQ ID NO: 1593577 - RNA, 19 nt, Artificial Sequence
  Description of Artificial Sequence: Synthetic oligonucleotide
cugcuccauggauugcaag

SEQ ID NO: 1593578 - RNA, 19 nt, Artificial Sequence
  Description of Artificial Sequence: Synthetic oligonucleotide
ggagacgccacggucauuc

SEQ ID NO: 1593579 - RNA, 19 nt, Artificial Sequence
  Description of Artificial Sequence: Synthetic oligonucleotide
cgccuaaucugcuccaugg

SEQ ID NO: 1593580 - RNA, 19 nt, Artificial Sequence
  Description of Artificial Sequence: Synthetic oligonucleotide
aggauuagacgcugcuauu

SEQ ID NO: 1593581 - RNA, 19 nt, Artificial Sequence
  Description of Artificial Sequence: Synthetic oligonucleotide
cacgauccacauagucccc

SEQ ID NO: 1593582 - RNA, 19 nt, Artificial Sequence
  Description of Artificial Sequence: Synthetic oligonucleotide
cauggauugcaagucugga

SEQ ID NO: 1593583 - RNA, 19 nt, Artificial Sequence
  Description of Artificial Sequence: Synthetic oligonucleotide
uggcagaguugcggggugg

SEQ ID NO: 1593584 - RNA, 19 nt, Artificial Sequence
  Description of Artificial Sequence: Synthetic oligonucleotide
cagaagaucuucucaucua

SEQ ID NO: 1593585 - RNA, 19 nt, Artificial Sequence
  Description of Artificial Sequence: Synthetic oligonucleotide
gaagggcagcacauggaga

SEQ ID NO: 1593586 - RNA, 19 nt, Artificial Sequence
  Description of Artificial Sequence: Synthetic oligonucleotide
ucggacauggcggcuccgc

SEQ ID NO: 1593587 - RNA, 19 nt, Artificial Sequence
  Description of Artificial Sequence: Synthetic oligonucleotide
aggugccucaagcuccaga

SEQ ID NO: 1593588 - RNA, 19 nt, Artificial Sequence
  Description of Artificial Sequence: Synthetic oligonucleotide
gugccucaagcuccagaag

SEQ ID NO: 1593589 - RNA, 19 nt, Artificial Sequence
  Description of Artificial Sequence: Synthetic oligonucleotide
guugcuccaggauccagcu

SEQ ID NO: 1593590 - RNA, 19 nt, Artificial Sequence
  Description of Artificial Sequence: Synthetic oligonucleotide
caguaggcccuggucaggc

SEQ ID NO: 1593591 - RNA, 19 nt, Artificial Sequence
  Description of Artificial Sequence: Synthetic oligonucleotide
gugagcccugcacuuccag

SEQ ID NO: 1593592 - RNA, 19 nt, Artificial Sequence
  Description of Artificial Sequence: Synthetic oligonucleotide
guaaaggagacgccacggu

SEQ ID NO: 1593593 - RNA, 19 nt, Artificial Sequence
  Description of Artificial Sequence: Synthetic oligonucleotide
acaaaccacggaucucguu

SEQ ID NO: 1593594 - RNA, 19 nt, Artificial Sequence
  Description of Artificial Sequence: Synthetic oligonucleotide
agaagccauagaugcgguu

SEQ ID NO: 1593595 - RNA, 19 nt, Artificial Sequence
  Description of Artificial Sequence: Synthetic oligonucleotide
acgcucaucauggcaccag

SEQ ID NO: 1593596 - RNA, 19 nt, Artificial Sequence
  Description of Artificial Sequence: Synthetic oligonucleotide
ucucuguuaguugcacauu

SEQ ID NO: 1593597 - RNA, 19 nt, Artificial Sequence
  Description of Artificial Sequence: Synthetic oligonucleotide
gagaccagauggguugcuc

SEQ ID NO: 1593598 - RNA, 19 nt, Artificial Sequence
  Description of Artificial Sequence: Synthetic oligonucleotide
gacgcugcuauugauucau

SEQ ID NO: 1593599 - RNA, 19 nt, Artificial Sequence
  Description of Artificial Sequence: Synthetic oligonucleotide
agcgggcuugaggaucugg

SEQ ID NO: 1593600 - RNA, 19 nt, Artificial Sequence
  Description of Artificial Sequence: Synthetic oligonucleotide
ccacgaagcagaaagaaau

SEQ ID NO: 1593601 - RNA, 19 nt, Artificial Sequence
  Description of Artificial Sequence: Synthetic oligonucleotide
gccccaaagguaaaggaga

SEQ ID NO: 1593602 - RNA, 19 nt, Artificial Sequence
  Description of Artificial Sequence: Synthetic oligonucleotide
aguaggcccuggucaggca

SEQ ID NO: 1593603 - RNA, 19 nt, Artificial Sequence
  Description of Artificial Sequence: Synthetic oligonucleotide
gagcacauaagagucucau

SEQ ID NO: 1593604 - RNA, 19 nt, Artificial Sequence
  Description of Artificial Sequence: Synthetic oligonucleotide
gucagcgggcuugaggauc

SEQ ID NO: 1593605 - RNA, 19 nt, Artificial Sequence
  Description of Artificial Sequence: Synthetic oligonucleotide
gcacauggagacuacuucu

SEQ ID NO: 1593606 - RNA, 19 nt, Artificial Sequence
  Description of Artificial Sequence: Synthetic oligonucleotide
ccagauggguugcuccagg

SEQ ID NO: 1593607 - RNA, 19 nt, Artificial Sequence
  Description of Artificial Sequence: Synthetic oligonucleotide
ccgcauaauacgccuaauc

SEQ ID NO: 1593608 - RNA, 19 nt, Artificial Sequence
  Description of Artificial Sequence: Synthetic oligonucleotide
ugguucccacgaagcagaa

SEQ ID NO: 1593609 - RNA, 19 nt, Artificial Sequence
  Description of Artificial Sequence: Synthetic oligonucleotide
gugggccgcauaauacgcc

SEQ ID NO: 1593610 - RNA, 19 nt, Artificial Sequence
  Description of Artificial Sequence: Synthetic oligonucleotide
accacggaucucguucucu

SEQ ID NO: 1593611 - RNA, 19 nt, Artificial Sequence
  Description of Artificial Sequence: Synthetic oligonucleotide
gaugcgcccugcagaugag

SEQ ID NO: 1593612 - RNA, 19 nt, Artificial Sequence
  Description of Artificial Sequence: Synthetic oligonucleotide
ugcgaugggcaggcaguug

SEQ ID NO: 1593613 - RNA, 19 nt, Artificial Sequence
  Description of Artificial Sequence: Synthetic oligonucleotide
cagaugagguccaaaucau

SEQ ID NO: 1593614 - RNA, 19 nt, Artificial Sequence
  Description of Artificial Sequence: Synthetic oligonucleotide
ugucagcgggcuugaggau

SEQ ID NO: 1593615 - RNA, 19 nt, Artificial Sequence
  Description of Artificial Sequence: Synthetic oligonucleotide
ggccccaggauuccacuug

SEQ ID NO: 1593616 - RNA, 19 nt, Artificial Sequence
  Description of Artificial Sequence: Synthetic oligonucleotide
augcgcccugcagaugagg

SEQ ID NO: 1593617 - RNA, 19 nt, Artificial Sequence
  Description of Artificial Sequence: Synthetic oligonucleotide
cagcaugauuucuguacaa

SEQ ID NO: 1593618 - RNA, 19 nt, Artificial Sequence
  Description of Artificial Sequence: Synthetic oligonucleotide
uugccacgauccacauagu

SEQ ID NO: 1593619 - RNA, 19 nt, Artificial Sequence
  Description of Artificial Sequence: Synthetic oligonucleotide
cucaggguauuugaucuua

SEQ ID NO: 1593620 - RNA, 19 nt, Artificial Sequence
  Description of Artificial Sequence: Synthetic oligonucleotide
caugaugggugggccugag

SEQ ID NO: 1593621 - RNA, 19 nt, Artificial Sequence
  Description of Artificial Sequence: Synthetic oligonucleotide
ggcaaagaacucguagcca

SEQ ID NO: 1593622 - RNA, 19 nt, Artificial Sequence
  Description of Artificial Sequence: Synthetic oligonucleotide
caggguauuugaucuuaua

SEQ ID NO: 1593623 - RNA, 19 nt, Artificial Sequence
  Description of Artificial Sequence: Synthetic oligonucleotide
agaggugccucaagcucca

SEQ ID NO: 1593624 - RNA, 19 nt, Artificial Sequence
  Description of Artificial Sequence: Synthetic oligonucleotide
gaucucguucucuguuagu

SEQ ID NO: 1593625 - RNA, 19 nt, Artificial Sequence
  Description of Artificial Sequence: Synthetic oligonucleotide
cagccaugcaaggcuggag

SEQ ID NO: 1593626 - RNA, 19 nt, Artificial Sequence
  Description of Artificial Sequence: Synthetic oligonucleotide
cugucggacauggcggcuc

SEQ ID NO: 1593627 - RNA, 19 nt, Artificial Sequence
  Description of Artificial Sequence: Synthetic oligonucleotide
ccacggaucucguucucug

SEQ ID NO: 1593628 - RNA, 19 nt, Artificial Sequence
  Description of Artificial Sequence: Synthetic oligonucleotide
acgcuguguguuccccaug

SEQ ID NO: 1593629 - RNA, 19 nt, Artificial Sequence
  Description of Artificial Sequence: Synthetic oligonucleotide
cuccggcccagcagcuccg

SEQ ID NO: 1593630 - RNA, 19 nt, Artificial Sequence
  Description of Artificial Sequence: Synthetic oligonucleotide
ccauauucaaacagccgua

SEQ ID NO: 1593631 - RNA, 19 nt, Artificial Sequence
  Description of Artificial Sequence: Synthetic oligonucleotide
cgcauaauacgccuaaucu

SEQ ID NO: 1593632 - RNA, 19 nt, Artificial Sequence
  Description of Artificial Sequence: Synthetic oligonucleotide
gccauagaugcgguugaug

SEQ ID NO: 1593633 - RNA, 19 nt, Artificial Sequence
  Description of Artificial Sequence: Synthetic oligonucleotide
guguaggaacuuggccacc

SEQ ID NO: 1593634 - RNA, 19 nt, Artificial Sequence
  Description of Artificial Sequence: Synthetic oligonucleotide
agagaccagauggguugcu

SEQ ID NO: 1593635 - RNA, 19 nt, Artificial Sequence
  Description of Artificial Sequence: Synthetic oligonucleotide
ucccgggauuugaggcaca

SEQ ID NO: 1593636 - RNA, 19 nt, Artificial Sequence
  Description of Artificial Sequence: Synthetic oligonucleotide
cgcccugcagaugaggucc

SEQ ID NO: 1593637 - RNA, 19 nt, Artificial Sequence
  Description of Artificial Sequence: Synthetic oligonucleotide
caaccugaugcgcccugca

SEQ ID NO: 1593638 - RNA, 19 nt, Artificial Sequence
  Description of Artificial Sequence: Synthetic oligonucleotide
cgugguucccacgaagcag

SEQ ID NO: 1593639 - RNA, 19 nt, Artificial Sequence
  Description of Artificial Sequence: Synthetic oligonucleotide
ggguggggugaugggacgg

SEQ ID NO: 1593640 - RNA, 19 nt, Artificial Sequence
  Description of Artificial Sequence: Synthetic oligonucleotide
gugacccauggcagcauga

SEQ ID NO: 1593641 - RNA, 19 nt, Artificial Sequence
  Description of Artificial Sequence: Synthetic oligonucleotide
uccggcccagcagcuccgg

SEQ ID NO: 1593642 - RNA, 19 nt, Artificial Sequence
  Description of Artificial Sequence: Synthetic oligonucleotide
ggccgcauaauacgccuaa

SEQ ID NO: 1593643 - RNA, 19 nt, Artificial Sequence
  Description of Artificial Sequence: Synthetic oligonucleotide
ccgugagcccugcacuucc

SEQ ID NO: 1593644 - RNA, 19 nt, Artificial Sequence
  Description of Artificial Sequence: Synthetic oligonucleotide
cucuugcauucaucauaga

SEQ ID NO: 1593645 - RNA, 19 nt, Artificial Sequence
  Description of Artificial Sequence: Synthetic oligonucleotide
cccaugaugggugggccug

SEQ ID NO: 1593646 - RNA, 19 nt, Artificial Sequence
  Description of Artificial Sequence: Synthetic oligonucleotide
agccauagaugcgguugau

SEQ ID NO: 1593647 - RNA, 19 nt, Artificial Sequence
  Description of Artificial Sequence: Synthetic oligonucleotide
ggaggauuagacgcugcua

SEQ ID NO: 1593648 - RNA, 19 nt, Artificial Sequence
  Description of Artificial Sequence: Synthetic oligonucleotide
ggaauaucucccgggauuu

SEQ ID NO: 1593649 - RNA, 19 nt, Artificial Sequence
  Description of Artificial Sequence: Synthetic oligonucleotide
ccugaggggcagugugacc

SEQ ID NO: 1593650 - RNA, 19 nt, Artificial Sequence
  Description of Artificial Sequence: Synthetic oligonucleotide
gcuugaggaucuggaagga

SEQ ID NO: 1593651 - RNA, 19 nt, Artificial Sequence
  Description of Artificial Sequence: Synthetic oligonucleotide
gucggacauggcggcuccg

SEQ ID NO: 1593652 - RNA, 19 nt, Artificial Sequence
  Description of Artificial Sequence: Synthetic oligonucleotide
ggcacaaaccacggaucuc

SEQ ID NO: 1593653 - RNA, 19 nt, Artificial Sequence
  Description of Artificial Sequence: Synthetic oligonucleotide
gcgguugaugcuggcacac

SEQ ID NO: 1593654 - RNA, 19 nt, Artificial Sequence
  Description of Artificial Sequence: Synthetic oligonucleotide
gaguugcggggugggguga

SEQ ID NO: 1593655 - RNA, 19 nt, Artificial Sequence
  Description of Artificial Sequence: Synthetic oligonucleotide
caggaauaucucccgggau

SEQ ID NO: 1593656 - RNA, 19 nt, Artificial Sequence
  Description of Artificial Sequence: Synthetic oligonucleotide
gcagucagugaaagucuuc

SEQ ID NO: 1593657 - RNA, 19 nt, Artificial Sequence
  Description of Artificial Sequence: Synthetic oligonucleotide
cugaugcgcccugcagaug

SEQ ID NO: 1593658 - RNA, 19 nt, Artificial Sequence
  Description of Artificial Sequence: Synthetic oligonucleotide
gccccaggauuccacuuga

SEQ ID NO: 1593659 - RNA, 19 nt, Artificial Sequence
  Description of Artificial Sequence: Synthetic oligonucleotide
cacggaucucguucucugu

SEQ ID NO: 1593660 - RNA, 19 nt, Artificial Sequence
  Description of Artificial Sequence: Synthetic oligonucleotide
gcgggcuugaggaucugga

SEQ ID NO: 1593661 - RNA, 19 nt, Artificial Sequence
  Description of Artificial Sequence: Synthetic oligonucleotide
acauggcggcuccgccgcu

SEQ ID NO: 1593662 - RNA, 19 nt, Artificial Sequence
  Description of Artificial Sequence: Synthetic oligonucleotide
guugcgggguggggugaug

SEQ ID NO: 1593663 - RNA, 19 nt, Artificial Sequence
  Description of Artificial Sequence: Synthetic oligonucleotide
gagacgccacggucauucu

SEQ ID NO: 1593664 - RNA, 19 nt, Artificial Sequence
  Description of Artificial Sequence: Synthetic oligonucleotide
ggcagcacauggagacuac

SEQ ID NO: 1593665 - RNA, 19 nt, Artificial Sequence
  Description of Artificial Sequence: Synthetic oligonucleotide
caugcuuguguaggaacuu

SEQ ID NO: 1593666 - RNA, 19 nt, Artificial Sequence
  Description of Artificial Sequence: Synthetic oligonucleotide
cacaucugugggccgcaua

SEQ ID NO: 1593667 - RNA, 19 nt, Artificial Sequence
  Description of Artificial Sequence: Synthetic oligonucleotide
cacgcucaucauggcacca

SEQ ID NO: 1593668 - RNA, 19 nt, Artificial Sequence
  Description of Artificial Sequence: Synthetic oligonucleotide
gggcagcacauggagacua

SEQ ID NO: 1593669 - RNA, 19 nt, Artificial Sequence
  Description of Artificial Sequence: Synthetic oligonucleotide
cacucgugguucccacgaa

SEQ ID NO: 1593670 - RNA, 19 nt, Artificial Sequence
  Description of Artificial Sequence: Synthetic oligonucleotide
cguagccaucuucuacaac

SEQ ID NO: 1593671 - RNA, 19 nt, Artificial Sequence
  Description of Artificial Sequence: Synthetic oligonucleotide
caucuacaauggcugcgau

SEQ ID NO: 1593672 - RNA, 19 nt, Artificial Sequence
  Description of Artificial Sequence: Synthetic oligonucleotide
cacggucauucucgcccca

SEQ ID NO: 1593673 - RNA, 19 nt, Artificial Sequence
  Description of Artificial Sequence: Synthetic oligonucleotide
agggagcccuggaggauua

SEQ ID NO: 1593674 - RNA, 19 nt, Artificial Sequence
  Description of Artificial Sequence: Synthetic oligonucleotide
cggacauggcggcuccgcc

SEQ ID NO: 1593675 - RNA, 19 nt, Artificial Sequence
  Description of Artificial Sequence: Synthetic oligonucleotide
cgcugcuauugauucauua

SEQ ID NO: 1593676 - RNA, 19 nt, Artificial Sequence
  Description of Artificial Sequence: Synthetic oligonucleotide
cuacaaccugaugcgcccu

SEQ ID NO: 1593677 - RNA, 19 nt, Artificial Sequence
  Description of Artificial Sequence: Synthetic oligonucleotide
cauccuugucagggucaga

SEQ ID NO: 1593678 - RNA, 19 nt, Artificial Sequence
  Description of Artificial Sequence: Synthetic oligonucleotide
ccaccucagccccaaaggu

SEQ ID NO: 1593679 - RNA, 19 nt, Artificial Sequence
  Description of Artificial Sequence: Synthetic oligonucleotide
gcuucucgcugucggacau

SEQ ID NO: 1593680 - RNA, 19 nt, Artificial Sequence
  Description of Artificial Sequence: Synthetic oligonucleotide
ggcacaucugugggccgca

SEQ ID NO: 1593681 - RNA, 19 nt, Artificial Sequence
  Description of Artificial Sequence: Synthetic oligonucleotide
gccauugcccugagcugca

SEQ ID NO: 1593682 - RNA, 19 nt, Artificial Sequence
  Description of Artificial Sequence: Synthetic oligonucleotide
gcuugccacgauccacaua

SEQ ID NO: 1593683 - RNA, 19 nt, Artificial Sequence
  Description of Artificial Sequence: Synthetic oligonucleotide
gggagcccuggaggauuag

SEQ ID NO: 1593684 - RNA, 19 nt, Artificial Sequence
  Description of Artificial Sequence: Synthetic oligonucleotide
gccgugagcccugcacuuc

SEQ ID NO: 1593685 - RNA, 19 nt, Artificial Sequence
  Description of Artificial Sequence: Synthetic oligonucleotide
ggccacugaacugcccaua

SEQ ID NO: 1593686 - RNA, 19 nt, Artificial Sequence
  Description of Artificial Sequence: Synthetic oligonucleotide
ccagccaugcaaggcugga

SEQ ID NO: 1593687 - RNA, 19 nt, Artificial Sequence
  Description of Artificial Sequence: Synthetic oligonucleotide
cggaucucguucucuguua

SEQ ID NO: 1593688 - RNA, 19 nt, Artificial Sequence
  Description of Artificial Sequence: Synthetic oligonucleotide
cgccacggucauucucgcc

SEQ ID NO: 1593689 - RNA, 19 nt, Artificial Sequence
  Description of Artificial Sequence: Synthetic oligonucleotide
aggagacgccacggucauu

SEQ ID NO: 1593690 - RNA, 19 nt, Artificial Sequence
  Description of Artificial Sequence: Synthetic oligonucleotide
cugcgaugggcaggcaguu

SEQ ID NO: 1593691 - RNA, 19 nt, Artificial Sequence
  Description of Artificial Sequence: Synthetic oligonucleotide
ccucagccccaaagguaaa

SEQ ID NO: 1593692 - RNA, 19 nt, Artificial Sequence
  Description of Artificial Sequence: Synthetic oligonucleotide
gggccgcauaauacgccua

SEQ ID NO: 1593693 - RNA, 19 nt, Artificial Sequence
  Description of Artificial Sequence: Synthetic oligonucleotide
cgugagcccugcacuucca

SEQ ID NO: 1593694 - RNA, 19 nt, Artificial Sequence
  Description of Artificial Sequence: Synthetic oligonucleotide
ggagggagcccuggaggau

SEQ ID NO: 1593695 - RNA, 19 nt, Artificial Sequence
  Description of Artificial Sequence: Synthetic oligonucleotide
cccgggauuugaggcacaa

SEQ ID NO: 1593696 - RNA, 19 nt, Artificial Sequence
  Description of Artificial Sequence: Synthetic oligonucleotide
ccccaggauuccacuugaa

SEQ ID NO: 1593697 - RNA, 19 nt, Artificial Sequence
  Description of Artificial Sequence: Synthetic oligonucleotide
ccccaugaugggugggccu

SEQ ID NO: 1593698 - RNA, 19 nt, Artificial Sequence
  Description of Artificial Sequence: Synthetic oligonucleotide
cgucucuugcauucaucau

SEQ ID NO: 1593699 - RNA, 19 nt, Artificial Sequence
  Description of Artificial Sequence: Synthetic oligonucleotide
gccgcauaauacgccuaau

SEQ ID NO: 1593700 - RNA, 19 nt, Artificial Sequence
  Description of Artificial Sequence: Synthetic oligonucleotide
ccgggauuugaggcacaaa

SEQ ID NO: 1593701 - RNA, 19 nt, Artificial Sequence
  Description of Artificial Sequence: Synthetic oligonucleotide
cggcuccgccgcuccggcc

SEQ ID NO: 1593702 - RNA, 19 nt, Artificial Sequence
  Description of Artificial Sequence: Synthetic oligonucleotide
ggugggccugaggggcagu

SEQ ID NO: 1593703 - RNA, 19 nt, Artificial Sequence
  Description of Artificial Sequence: Synthetic oligonucleotide
uauagaaaggcaagcacgg

SEQ ID NO: 1593704 - RNA, 19 nt, Artificial Sequence
  Description of Artificial Sequence: Synthetic oligonucleotide
aacguucucaaguucaagg

SEQ ID NO: 1593705 - RNA, 19 nt, Artificial Sequence
  Description of Artificial Sequence: Synthetic oligonucleotide
aauaccaauguuugguaag

SEQ ID NO: 1593706 - RNA, 19 nt, Artificial Sequence
  Description of Artificial Sequence: Synthetic oligonucleotide
aacuugaguagccugcuuc

SEQ ID NO: 1593707 - RNA, 19 nt, Artificial Sequence
  Description of Artificial Sequence: Synthetic oligonucleotide
uagaacaagguacuguucc

SEQ ID NO: 1593708 - RNA, 19 nt, Artificial Sequence
  Description of Artificial Sequence: Synthetic oligonucleotide
aaugcauagagaccccagg

SEQ ID NO: 1593709 - RNA, 19 nt, Artificial Sequence
  Description of Artificial Sequence: Synthetic oligonucleotide
ucaaucgaggucaggagcg

SEQ ID NO: 1593710 - RNA, 19 nt, Artificial Sequence
  Description of Artificial Sequence: Synthetic oligonucleotide
ugucacaucaucucagagg

SEQ ID NO: 1593711 - RNA, 19 nt, Artificial Sequence
  Description of Artificial Sequence: Synthetic oligonucleotide
gaugacuuucccuggagcg

SEQ ID NO: 1593712 - RNA, 19 nt, Artificial Sequence
  Description of Artificial Sequence: Synthetic oligonucleotide
uuuguuuguacuauuaguu

SEQ ID NO: 1593713 - RNA, 19 nt, Artificial Sequence
  Description of Artificial Sequence: Synthetic oligonucleotide
agggauauggcgucaaucg

SEQ ID NO: 1593714 - RNA, 19 nt, Artificial Sequence
  Description of Artificial Sequence: Synthetic oligonucleotide
ugaccaaaccacaaugucc

SEQ ID NO: 1593715 - RNA, 19 nt, Artificial Sequence
  Description of Artificial Sequence: Synthetic oligonucleotide
guauagaaaggcaagcacg

SEQ ID NO: 1593716 - RNA, 19 nt, Artificial Sequence
  Description of Artificial Sequence: Synthetic oligonucleotide
aacaagguacuguuccggg

SEQ ID NO: 1593717 - RNA, 19 nt, Artificial Sequence
  Description of Artificial Sequence: Synthetic oligonucleotide
uuguuaaucgacuccaggu

SEQ ID NO: 1593718 - RNA, 19 nt, Artificial Sequence
  Description of Artificial Sequence: Synthetic oligonucleotide
cucaagaaaguuugugucg

SEQ ID NO: 1593719 - RNA, 19 nt, Artificial Sequence
  Description of Artificial Sequence: Synthetic oligonucleotide
augcauagagaccccaggc

SEQ ID NO: 1593720 - RNA, 19 nt, Artificial Sequence
  Description of Artificial Sequence: Synthetic oligonucleotide
uaaguugaggcucacuuuc

SEQ ID NO: 1593721 - RNA, 19 nt, Artificial Sequence
  Description of Artificial Sequence: Synthetic oligonucleotide
uuuuaggagggugaugccg

SEQ ID NO: 1593722 - RNA, 19 nt, Artificial Sequence
  Description of Artificial Sequence: Synthetic oligonucleotide
cuugguguuagugagcagg

SEQ ID NO: 1593723 - RNA, 19 nt, Artificial Sequence
  Description of Artificial Sequence: Synthetic oligonucleotide
agaaaguuugugucgagca

SEQ ID NO: 1593724 - RNA, 19 nt, Artificial Sequence
  Description of Artificial Sequence: Synthetic oligonucleotide
uuagugagcaggauuugca

SEQ ID NO: 1593725 - RNA, 19 nt, Artificial Sequence
  Description of Artificial Sequence: Synthetic oligonucleotide
agacacaccgaguaggcag

SEQ ID NO: 1593726 - RNA, 19 nt, Artificial Sequence
  Description of Artificial Sequence: Synthetic oligonucleotide
guuaaucgacuccaggucc

SEQ ID NO: 1593727 - RNA, 19 nt, Artificial Sequence
  Description of Artificial Sequence: Synthetic oligonucleotide
uguuaaucgacuccagguc

SEQ ID NO: 1593728 - RNA, 19 nt, Artificial Sequence
  Description of Artificial Sequence: Synthetic oligonucleotide
uagagguauagaaaggcaa

SEQ ID NO: 1593729 - RNA, 19 nt, Artificial Sequence
  Description of Artificial Sequence: Synthetic oligonucleotide
uucaaggccacugccaggg

SEQ ID NO: 1593730 - RNA, 19 nt, Artificial Sequence
  Description of Artificial Sequence: Synthetic oligonucleotide
ucgaacagggucaucuaag

SEQ ID NO: 1593731 - RNA, 19 nt, Artificial Sequence
  Description of Artificial Sequence: Synthetic oligonucleotide
gaaaguuugugucgagcag

SEQ ID NO: 1593732 - RNA, 19 nt, Artificial Sequence
  Description of Artificial Sequence: Synthetic oligonucleotide
ugugucgagcagcugaagc

SEQ ID NO: 1593733 - RNA, 19 nt, Artificial Sequence
  Description of Artificial Sequence: Synthetic oligonucleotide
ugcucaagaaaguuugugu

SEQ ID NO: 1593734 - RNA, 19 nt, Artificial Sequence
  Description of Artificial Sequence: Synthetic oligonucleotide
uguuuguacuauuaguuuu

SEQ ID NO: 1593735 - RNA, 19 nt, Artificial Sequence
  Description of Artificial Sequence: Synthetic oligonucleotide
cuuguuaaucgacuccagg

SEQ ID NO: 1593736 - RNA, 19 nt, Artificial Sequence
  Description of Artificial Sequence: Synthetic oligonucleotide
gauauggcgucaaucgagg

SEQ ID NO: 1593737 - RNA, 19 nt, Artificial Sequence
  Description of Artificial Sequence: Synthetic oligonucleotide
ucuagaccugguuuuagga

SEQ ID NO: 1593738 - RNA, 19 nt, Artificial Sequence
  Description of Artificial Sequence: Synthetic oligonucleotide
uuugguaaguugaggcuca

SEQ ID NO: 1593739 - RNA, 19 nt, Artificial Sequence
  Description of Artificial Sequence: Synthetic oligonucleotide
uggucgaagcaguagaaac

SEQ ID NO: 1593740 - RNA, 19 nt, Artificial Sequence
  Description of Artificial Sequence: Synthetic oligonucleotide
ucaagaaaguuugugucga

SEQ ID NO: 1593741 - RNA, 19 nt, Artificial Sequence
  Description of Artificial Sequence: Synthetic oligonucleotide
uguuugguaaguugaggcu

SEQ ID NO: 1593742 - RNA, 19 nt, Artificial Sequence
  Description of Artificial Sequence: Synthetic oligonucleotide
agcguugucuacuccagag

SEQ ID NO: 1593743 - RNA, 19 nt, Artificial Sequence
  Description of Artificial Sequence: Synthetic oligonucleotide
gguuuuaggagggugaugc

SEQ ID NO: 1593744 - RNA, 19 nt, Artificial Sequence
  Description of Artificial Sequence: Synthetic oligonucleotide
uuagaggcuucuuggcagg

SEQ ID NO: 1593745 - RNA, 19 nt, Artificial Sequence
  Description of Artificial Sequence: Synthetic oligonucleotide
uaauaccaauguuugguaa

SEQ ID NO: 1593746 - RNA, 19 nt, Artificial Sequence
  Description of Artificial Sequence: Synthetic oligonucleotide
acaagguacuguuccgggg

SEQ ID NO: 1593747 - RNA, 19 nt, Artificial Sequence
  Description of Artificial Sequence: Synthetic oligonucleotide
accugcuuaauaccaaugu

SEQ ID NO: 1593748 - RNA, 19 nt, Artificial Sequence
  Description of Artificial Sequence: Synthetic oligonucleotide
acagggucaucuaaggagg

SEQ ID NO: 1593749 - RNA, 19 nt, Artificial Sequence
  Description of Artificial Sequence: Synthetic oligonucleotide
uuaaucgacuccagguccu

SEQ ID NO: 1593750 - RNA, 19 nt, Artificial Sequence
  Description of Artificial Sequence: Synthetic oligonucleotide
ugcuaugaaguccgugugc

SEQ ID NO: 1593751 - RNA, 19 nt, Artificial Sequence
  Description of Artificial Sequence: Synthetic oligonucleotide
gaccaaaccacaaugucca

SEQ ID NO: 1593752 - RNA, 19 nt, Artificial Sequence
  Description of Artificial Sequence: Synthetic oligonucleotide
ucccacaccugcuuaauac

SEQ ID NO: 1593753 - RNA, 19 nt, Artificial Sequence
  Description of Artificial Sequence: Synthetic oligonucleotide
gucaaucgaggucaggagc

SEQ ID NO: 1593754 - RNA, 19 nt, Artificial Sequence
  Description of Artificial Sequence: Synthetic oligonucleotide
uaggcccacuuguuaaucg

SEQ ID NO: 1593755 - RNA, 19 nt, Artificial Sequence
  Description of Artificial Sequence: Synthetic oligonucleotide
acuuuggcucgcucuagac

SEQ ID NO: 1593756 - RNA, 19 nt, Artificial Sequence
  Description of Artificial Sequence: Synthetic oligonucleotide
uugcuaugaaguccgugug

SEQ ID NO: 1593757 - RNA, 19 nt, Artificial Sequence
  Description of Artificial Sequence: Synthetic oligonucleotide
uugggauuucugccgaggc

SEQ ID NO: 1593758 - RNA, 19 nt, Artificial Sequence
  Description of Artificial Sequence: Synthetic oligonucleotide
ucauaggcccacuuguuaa

SEQ ID NO: 1593759 - RNA, 19 nt, Artificial Sequence
  Description of Artificial Sequence: Synthetic oligonucleotide
uugaguagccugcuucuga

SEQ ID NO: 1593760 - RNA, 19 nt, Artificial Sequence
  Description of Artificial Sequence: Synthetic oligonucleotide
agagguauagaaaggcaag

SEQ ID NO: 1593761 - RNA, 19 nt, Artificial Sequence
  Description of Artificial Sequence: Synthetic oligonucleotide
agaaacguucucaaguuca

SEQ ID NO: 1593762 - RNA, 19 nt, Artificial Sequence
  Description of Artificial Sequence: Synthetic oligonucleotide
uuguuuguacuauuaguuu

SEQ ID NO: 1593763 - RNA, 19 nt, Artificial Sequence
  Description of Artificial Sequence: Synthetic oligonucleotide
gacucauugucacaucauc

SEQ ID NO: 1593764 - RNA, 19 nt, Artificial Sequence
  Description of Artificial Sequence: Synthetic oligonucleotide
accacaauguccaggcucg

SEQ ID NO: 1593765 - RNA, 19 nt, Artificial Sequence
  Description of Artificial Sequence: Synthetic oligonucleotide
cucucucccucauaggccc

SEQ ID NO: 1593766 - RNA, 19 nt, Artificial Sequence
  Description of Artificial Sequence: Synthetic oligonucleotide
auagaaaggcaagcacggc

SEQ ID NO: 1593767 - RNA, 19 nt, Artificial Sequence
  Description of Artificial Sequence: Synthetic oligonucleotide
accagacacaccgaguagg

SEQ ID NO: 1593768 - RNA, 19 nt, Artificial Sequence
  Description of Artificial Sequence: Synthetic oligonucleotide
cucuagaccugguuuuagg

SEQ ID NO: 1593769 - RNA, 19 nt, Artificial Sequence
  Description of Artificial Sequence: Synthetic oligonucleotide
uugguguuagugagcagga

SEQ ID NO: 1593770 - RNA, 19 nt, Artificial Sequence
  Description of Artificial Sequence: Synthetic oligonucleotide
auuucugccgaggccagcg

SEQ ID NO: 1593771 - RNA, 19 nt, Artificial Sequence
  Description of Artificial Sequence: Synthetic oligonucleotide
cacucucucucccucauag

SEQ ID NO: 1593772 - RNA, 19 nt, Artificial Sequence
  Description of Artificial Sequence: Synthetic oligonucleotide
aaucgacuccagguccucc

SEQ ID NO: 1593773 - RNA, 19 nt, Artificial Sequence
  Description of Artificial Sequence: Synthetic oligonucleotide
gugucgagcagcugaagcc

SEQ ID NO: 1593774 - RNA, 19 nt, Artificial Sequence
  Description of Artificial Sequence: Synthetic oligonucleotide
uccgaugcuggucucccag

SEQ ID NO: 1593775 - RNA, 19 nt, Artificial Sequence
  Description of Artificial Sequence: Synthetic oligonucleotide
uugaggcucacuuucccgu

SEQ ID NO: 1593776 - RNA, 19 nt, Artificial Sequence
  Description of Artificial Sequence: Synthetic oligonucleotide
cuuuggcucgcucuagacc

SEQ ID NO: 1593777 - RNA, 19 nt, Artificial Sequence
  Description of Artificial Sequence: Synthetic oligonucleotide
gguagagguauagaaaggc

SEQ ID NO: 1593778 - RNA, 19 nt, Artificial Sequence
  Description of Artificial Sequence: Synthetic oligonucleotide
ugggauuucugccgaggcc

SEQ ID NO: 1593779 - RNA, 19 nt, Artificial Sequence
  Description of Artificial Sequence: Synthetic oligonucleotide
ucuccuagcacacgcucac

SEQ ID NO: 1593780 - RNA, 19 nt, Artificial Sequence
  Description of Artificial Sequence: Synthetic oligonucleotide
uuugugucgagcagcugaa

SEQ ID NO: 1593781 - RNA, 19 nt, Artificial Sequence
  Description of Artificial Sequence: Synthetic oligonucleotide
caucucuccuagcacacgc

SEQ ID NO: 1593782 - RNA, 19 nt, Artificial Sequence
  Description of Artificial Sequence: Synthetic oligonucleotide
ugaguagccugcuucugac

SEQ ID NO: 1593783 - RNA, 19 nt, Artificial Sequence
  Description of Artificial Sequence: Synthetic oligonucleotide
uagaaacguucucaaguuc

SEQ ID NO: 1593784 - RNA, 19 nt, Artificial Sequence
  Description of Artificial Sequence: Synthetic oligonucleotide
acaauguccaggcucggaa

SEQ ID NO: 1593785 - RNA, 19 nt, Artificial Sequence
  Description of Artificial Sequence: Synthetic oligonucleotide
cugacgccagccacgaggg

SEQ ID NO: 1593786 - RNA, 19 nt, Artificial Sequence
  Description of Artificial Sequence: Synthetic oligonucleotide
uggcaguucugaccaaacc

SEQ ID NO: 1593787 - RNA, 19 nt, Artificial Sequence
  Description of Artificial Sequence: Synthetic oligonucleotide
ugucgagcagcugaagccc

SEQ ID NO: 1593788 - RNA, 19 nt, Artificial Sequence
  Description of Artificial Sequence: Synthetic oligonucleotide
gagggguucccauggauca

SEQ ID NO: 1593789 - RNA, 19 nt, Artificial Sequence
  Description of Artificial Sequence: Synthetic oligonucleotide
aggcucacuuucccguugc

SEQ ID NO: 1593790 - RNA, 19 nt, Artificial Sequence
  Description of Artificial Sequence: Synthetic oligonucleotide
augacuuucccuggagcgg

SEQ ID NO: 1593791 - RNA, 19 nt, Artificial Sequence
  Description of Artificial Sequence: Synthetic oligonucleotide
cugaccaaaccacaauguc

SEQ ID NO: 1593792 - RNA, 19 nt, Artificial Sequence
  Description of Artificial Sequence: Synthetic oligonucleotide
ggucgaagcaguagaaacg

SEQ ID NO: 1593793 - RNA, 19 nt, Artificial Sequence
  Description of Artificial Sequence: Synthetic oligonucleotide
guuagugagcaggauuugc

SEQ ID NO: 1593794 - RNA, 19 nt, Artificial Sequence
  Description of Artificial Sequence: Synthetic oligonucleotide
guuugguaaguugaggcuc

SEQ ID NO: 1593795 - RNA, 19 nt, Artificial Sequence
  Description of Artificial Sequence: Synthetic oligonucleotide
ugccggaccaucaccuugc

SEQ ID NO: 1593796 - RNA, 19 nt, Artificial Sequence
  Description of Artificial Sequence: Synthetic oligonucleotide
cuugcuaugaaguccgugu

SEQ ID NO: 1593797 - RNA, 19 nt, Artificial Sequence
  Description of Artificial Sequence: Synthetic oligonucleotide
agggaacuugaguagccug

SEQ ID NO: 1593798 - RNA, 19 nt, Artificial Sequence
  Description of Artificial Sequence: Synthetic oligonucleotide
cuaugaaguccgugugccg

SEQ ID NO: 1593799 - RNA, 19 nt, Artificial Sequence
  Description of Artificial Sequence: Synthetic oligonucleotide
agguaggccugccaccuuc

SEQ ID NO: 1593800 - RNA, 19 nt, Artificial Sequence
  Description of Artificial Sequence: Synthetic oligonucleotide
gaguagccugcuucugacg

SEQ ID NO: 1593801 - RNA, 19 nt, Artificial Sequence
  Description of Artificial Sequence: Synthetic oligonucleotide
auaccaauguuugguaagu

SEQ ID NO: 1593802 - RNA, 19 nt, Artificial Sequence
  Description of Artificial Sequence: Synthetic oligonucleotide
cuagaacaagguacuguuc

SEQ ID NO: 1593803 - RNA, 19 nt, Artificial Sequence
  Description of Artificial Sequence: Synthetic oligonucleotide
aggaugacuuucccuggag

SEQ ID NO: 1593804 - RNA, 19 nt, Artificial Sequence
  Description of Artificial Sequence: Synthetic oligonucleotide
ucccucauaggcccacuug

SEQ ID NO: 1593805 - RNA, 19 nt, Artificial Sequence
  Description of Artificial Sequence: Synthetic oligonucleotide
gcucaagaaaguuuguguc

SEQ ID NO: 1593806 - RNA, 19 nt, Artificial Sequence
  Description of Artificial Sequence: Synthetic oligonucleotide
ugugccgcugugauccggc

SEQ ID NO: 1593807 - RNA, 19 nt, Artificial Sequence
  Description of Artificial Sequence: Synthetic oligonucleotide
ggcuacaucccacaccugc

SEQ ID NO: 1593808 - RNA, 19 nt, Artificial Sequence
  Description of Artificial Sequence: Synthetic oligonucleotide
guugucuacuccagagggg

SEQ ID NO: 1593809 - RNA, 19 nt, Artificial Sequence
  Description of Artificial Sequence: Synthetic oligonucleotide
agguagagguauagaaagg

SEQ ID NO: 1593810 - RNA, 19 nt, Artificial Sequence
  Description of Artificial Sequence: Synthetic oligonucleotide
uccaggcucggaaguaccc

SEQ ID NO: 1593811 - RNA, 19 nt, Artificial Sequence
  Description of Artificial Sequence: Synthetic oligonucleotide
ggauauggcgucaaucgag

SEQ ID NO: 1593812 - RNA, 19 nt, Artificial Sequence
  Description of Artificial Sequence: Synthetic oligonucleotide
cuugggauuucugccgagg

SEQ ID NO: 1593813 - RNA, 19 nt, Artificial Sequence
  Description of Artificial Sequence: Synthetic oligonucleotide
gugccgauaccgcagcugc

SEQ ID NO: 1593814 - RNA, 19 nt, Artificial Sequence
  Description of Artificial Sequence: Synthetic oligonucleotide
cauggaggaugacuuuccc

SEQ ID NO: 1593815 - RNA, 19 nt, Artificial Sequence
  Description of Artificial Sequence: Synthetic oligonucleotide
aaguacccucugcuuccgg

SEQ ID NO: 1593816 - RNA, 19 nt, Artificial Sequence
  Description of Artificial Sequence: Synthetic oligonucleotide
gauuggugauauucucaca

SEQ ID NO: 1593817 - RNA, 19 nt, Artificial Sequence
  Description of Artificial Sequence: Synthetic oligonucleotide
gauuugcagggccgggagc

SEQ ID NO: 1593818 - RNA, 19 nt, Artificial Sequence
  Description of Artificial Sequence: Synthetic oligonucleotide
ccaauguuugguaaguuga

SEQ ID NO: 1593819 - RNA, 19 nt, Artificial Sequence
  Description of Artificial Sequence: Synthetic oligonucleotide
ugacuuucccuggagcgga

SEQ ID NO: 1593820 - RNA, 19 nt, Artificial Sequence
  Description of Artificial Sequence: Synthetic oligonucleotide
auaggcccacuuguuaauc

SEQ ID NO: 1593821 - RNA, 19 nt, Artificial Sequence
  Description of Artificial Sequence: Synthetic oligonucleotide
agcucuucuagaacaaggu

SEQ ID NO: 1593822 - RNA, 19 nt, Artificial Sequence
  Description of Artificial Sequence: Synthetic oligonucleotide
ggugaugccgcagccaccg

SEQ ID NO: 1593823 - RNA, 19 nt, Artificial Sequence
  Description of Artificial Sequence: Synthetic oligonucleotide
guuuuaggagggugaugcc

SEQ ID NO: 1593824 - RNA, 19 nt, Artificial Sequence
  Description of Artificial Sequence: Synthetic oligonucleotide
accugcgccugucagcuug

SEQ ID NO: 1593825 - RNA, 19 nt, Artificial Sequence
  Description of Artificial Sequence: Synthetic oligonucleotide
cacacuccagggauauggc

SEQ ID NO: 1593826 - RNA, 19 nt, Artificial Sequence
  Description of Artificial Sequence: Synthetic oligonucleotide
agcaggauuugcagggccg

SEQ ID NO: 1593827 - RNA, 19 nt, Artificial Sequence
  Description of Artificial Sequence: Synthetic oligonucleotide
aggcccucggugccgacac

SEQ ID NO: 1593828 - RNA, 19 nt, Artificial Sequence
  Description of Artificial Sequence: Synthetic oligonucleotide
gcuaugaaguccgugugcc

SEQ ID NO: 1593829 - RNA, 19 nt, Artificial Sequence
  Description of Artificial Sequence: Synthetic oligonucleotide
agcggggucacaaucucag

SEQ ID NO: 1593830 - RNA, 19 nt, Artificial Sequence
  Description of Artificial Sequence: Synthetic oligonucleotide
gacacaccgaguaggcagc

SEQ ID NO: 1593831 - RNA, 19 nt, Artificial Sequence
  Description of Artificial Sequence: Synthetic oligonucleotide
cauggacuacagcauguuc

SEQ ID NO: 1593832 - RNA, 19 nt, Artificial Sequence
  Description of Artificial Sequence: Synthetic oligonucleotide
gucaucuaaggaggcagcc

SEQ ID NO: 1593833 - RNA, 19 nt, Artificial Sequence
  Description of Artificial Sequence: Synthetic oligonucleotide
ugugccgauaccgcagcug

SEQ ID NO: 1593834 - RNA, 19 nt, Artificial Sequence
  Description of Artificial Sequence: Synthetic oligonucleotide
uacaucccacaccugcuua

SEQ ID NO: 1593835 - RNA, 19 nt, Artificial Sequence
  Description of Artificial Sequence: Synthetic oligonucleotide
caccugcuuaauaccaaug

SEQ ID NO: 1593836 - RNA, 19 nt, Artificial Sequence
  Description of Artificial Sequence: Synthetic oligonucleotide
cuucugacaacauggcucu

SEQ ID NO: 1593837 - RNA, 19 nt, Artificial Sequence
  Description of Artificial Sequence: Synthetic oligonucleotide
ggagcggauaccagcaggg

SEQ ID NO: 1593838 - RNA, 19 nt, Artificial Sequence
  Description of Artificial Sequence: Synthetic oligonucleotide
cugacagcguugucuacuc

SEQ ID NO: 1593839 - RNA, 19 nt, Artificial Sequence
  Description of Artificial Sequence: Synthetic oligonucleotide
agccucuucaaggaugaca

SEQ ID NO: 1593840 - RNA, 19 nt, Artificial Sequence
  Description of Artificial Sequence: Synthetic oligonucleotide
ggaugacuuucccuggagc

SEQ ID NO: 1593841 - RNA, 19 nt, Artificial Sequence
  Description of Artificial Sequence: Synthetic oligonucleotide
uacuccgugggaccuuggu

SEQ ID NO: 1593842 - RNA, 19 nt, Artificial Sequence
  Description of Artificial Sequence: Synthetic oligonucleotide
guagaaacguucucaaguu

SEQ ID NO: 1593843 - RNA, 19 nt, Artificial Sequence
  Description of Artificial Sequence: Synthetic oligonucleotide
gguaucgcagggcuccucc

SEQ ID NO: 1593844 - RNA, 19 nt, Artificial Sequence
  Description of Artificial Sequence: Synthetic oligonucleotide
ugacagcguugucuacucc

SEQ ID NO: 1593845 - RNA, 19 nt, Artificial Sequence
  Description of Artificial Sequence: Synthetic oligonucleotide
auauggcgucaaucgaggu

SEQ ID NO: 1593846 - RNA, 19 nt, Artificial Sequence
  Description of Artificial Sequence: Synthetic oligonucleotide
uugaggggauuggugauau

SEQ ID NO: 1593847 - RNA, 19 nt, Artificial Sequence
  Description of Artificial Sequence: Synthetic oligonucleotide
augaaguccgugugccgcu

SEQ ID NO: 1593848 - RNA, 19 nt, Artificial Sequence
  Description of Artificial Sequence: Synthetic oligonucleotide
uguccuugaggggauuggu

SEQ ID NO: 1593849 - RNA, 19 nt, Artificial Sequence
  Description of Artificial Sequence: Synthetic oligonucleotide
uuaggagggugaugccgca

SEQ ID NO: 1593850 - RNA, 19 nt, Artificial Sequence
  Description of Artificial Sequence: Synthetic oligonucleotide
gaggaugacuuucccugga

SEQ ID NO: 1593851 - RNA, 19 nt, Artificial Sequence
  Description of Artificial Sequence: Synthetic oligonucleotide
ugcuuagcguccuccacuu

SEQ ID NO: 1593852 - RNA, 19 nt, Artificial Sequence
  Description of Artificial Sequence: Synthetic oligonucleotide
cuuucccguugcucugugg

SEQ ID NO: 1593853 - RNA, 19 nt, Artificial Sequence
  Description of Artificial Sequence: Synthetic oligonucleotide
acuuguuaaucgacuccag

SEQ ID NO: 1593854 - RNA, 19 nt, Artificial Sequence
  Description of Artificial Sequence: Synthetic oligonucleotide
ucgcucuagaccugguuuu

SEQ ID NO: 1593855 - RNA, 19 nt, Artificial Sequence
  Description of Artificial Sequence: Synthetic oligonucleotide
agcguccuccacuuuggcu

SEQ ID NO: 1593856 - RNA, 19 nt, Artificial Sequence
  Description of Artificial Sequence: Synthetic oligonucleotide
aagcccggcuacaucccac

SEQ ID NO: 1593857 - RNA, 19 nt, Artificial Sequence
  Description of Artificial Sequence: Synthetic oligonucleotide
caccgaguaggcagcacug

SEQ ID NO: 1593858 - RNA, 19 nt, Artificial Sequence
  Description of Artificial Sequence: Synthetic oligonucleotide
gggcuugucgaacaggguc

SEQ ID NO: 1593859 - RNA, 19 nt, Artificial Sequence
  Description of Artificial Sequence: Synthetic oligonucleotide
gaaacguucucaaguucaa

SEQ ID NO: 1593860 - RNA, 19 nt, Artificial Sequence
  Description of Artificial Sequence: Synthetic oligonucleotide
cugugauccggcagagcug

SEQ ID NO: 1593861 - RNA, 19 nt, Artificial Sequence
  Description of Artificial Sequence: Synthetic oligonucleotide
gcguugucuacuccagagg

SEQ ID NO: 1593862 - RNA, 19 nt, Artificial Sequence
  Description of Artificial Sequence: Synthetic oligonucleotide
acaucccacaccugcuuaa

SEQ ID NO: 1593863 - RNA, 19 nt, Artificial Sequence
  Description of Artificial Sequence: Synthetic oligonucleotide
ucggaaguacccucugcuu

SEQ ID NO: 1593864 - RNA, 19 nt, Artificial Sequence
  Description of Artificial Sequence: Synthetic oligonucleotide
gguaaguugaggcucacuu

SEQ ID NO: 1593865 - RNA, 19 nt, Artificial Sequence
  Description of Artificial Sequence: Synthetic oligonucleotide
cagggauauggcgucaauc

SEQ ID NO: 1593866 - RNA, 19 nt, Artificial Sequence
  Description of Artificial Sequence: Synthetic oligonucleotide
ggugauauucucacaggca

SEQ ID NO: 1593867 - RNA, 19 nt, Artificial Sequence
  Description of Artificial Sequence: Synthetic oligonucleotide
ugucgaacagggucaucua

SEQ ID NO: 1593868 - RNA, 19 nt, Artificial Sequence
  Description of Artificial Sequence: Synthetic oligonucleotide
ccgugugccgcugugaucc

SEQ ID NO: 1593869 - RNA, 19 nt, Artificial Sequence
  Description of Artificial Sequence: Synthetic oligonucleotide
uugguacuccgugggaccu

SEQ ID NO: 1593870 - RNA, 19 nt, Artificial Sequence
  Description of Artificial Sequence: Synthetic oligonucleotide
caaucgaggucaggagcgg

SEQ ID NO: 1593871 - RNA, 19 nt, Artificial Sequence
  Description of Artificial Sequence: Synthetic oligonucleotide
gggauuucugccgaggcca

SEQ ID NO: 1593872 - RNA, 19 nt, Artificial Sequence
  Description of Artificial Sequence: Synthetic oligonucleotide
caccagacacaccgaguag

SEQ ID NO: 1593873 - RNA, 19 nt, Artificial Sequence
  Description of Artificial Sequence: Synthetic oligonucleotide
ucggugccgacaccguccu

SEQ ID NO: 1593874 - RNA, 19 nt, Artificial Sequence
  Description of Artificial Sequence: Synthetic oligonucleotide
cuugaguagccugcuucug

SEQ ID NO: 1593875 - RNA, 19 nt, Artificial Sequence
  Description of Artificial Sequence: Synthetic oligonucleotide
gugccggaccaucaccuug

SEQ ID NO: 1593876 - RNA, 19 nt, Artificial Sequence
  Description of Artificial Sequence: Synthetic oligonucleotide
aucgcagggcuccucccca

SEQ ID NO: 1593877 - RNA, 19 nt, Artificial Sequence
  Description of Artificial Sequence: Synthetic oligonucleotide
uagcguccuccacuuuggc

SEQ ID NO: 1593878 - RNA, 19 nt, Artificial Sequence
  Description of Artificial Sequence: Synthetic oligonucleotide
gucgaagcaguagaaacgu

SEQ ID NO: 1593879 - RNA, 19 nt, Artificial Sequence
  Description of Artificial Sequence: Synthetic oligonucleotide
caggcucggaaguacccuc

SEQ ID NO: 1593880 - RNA, 19 nt, Artificial Sequence
  Description of Artificial Sequence: Synthetic oligonucleotide
ucccuggagcggauaccag

SEQ ID NO: 1593881 - RNA, 19 nt, Artificial Sequence
  Description of Artificial Sequence: Synthetic oligonucleotide
gucgagcagcugaagcccg

SEQ ID NO: 1593882 - RNA, 19 nt, Artificial Sequence
  Description of Artificial Sequence: Synthetic oligonucleotide
uuucugccgaggccagcgu

SEQ ID NO: 1593883 - RNA, 19 nt, Artificial Sequence
  Description of Artificial Sequence: Synthetic oligonucleotide
uuggcucgcucuagaccug

SEQ ID NO: 1593884 - RNA, 19 nt, Artificial Sequence
  Description of Artificial Sequence: Synthetic oligonucleotide
cacuccagggauauggcgu

SEQ ID NO: 1593885 - RNA, 19 nt, Artificial Sequence
  Description of Artificial Sequence: Synthetic oligonucleotide
uucccguugcucugugguc

SEQ ID NO: 1593886 - RNA, 19 nt, Artificial Sequence
  Description of Artificial Sequence: Synthetic oligonucleotide
ucgaagcaguagaaacguu

SEQ ID NO: 1593887 - RNA, 19 nt, Artificial Sequence
  Description of Artificial Sequence: Synthetic oligonucleotide
uugugucgagcagcugaag

SEQ ID NO: 1593888 - RNA, 19 nt, Artificial Sequence
  Description of Artificial Sequence: Synthetic oligonucleotide
aggauuugcagggccggga

SEQ ID NO: 1593889 - RNA, 19 nt, Artificial Sequence
  Description of Artificial Sequence: Synthetic oligonucleotide
ucgaggucaggagcggggu

SEQ ID NO: 1593890 - RNA, 19 nt, Artificial Sequence
  Description of Artificial Sequence: Synthetic oligonucleotide
gaagcccggcuacauccca

SEQ ID NO: 1593891 - RNA, 19 nt, Artificial Sequence
  Description of Artificial Sequence: Synthetic oligonucleotide
ugccgauaccgcagcugca

SEQ ID NO: 1593892 - RNA, 19 nt, Artificial Sequence
  Description of Artificial Sequence: Synthetic oligonucleotide
cucauaggcccacuuguua

SEQ ID NO: 1593893 - RNA, 19 nt, Artificial Sequence
  Description of Artificial Sequence: Synthetic oligonucleotide
agucaaacccacagccggu

SEQ ID NO: 1593894 - RNA, 19 nt, Artificial Sequence
  Description of Artificial Sequence: Synthetic oligonucleotide
ugguaaguugaggcucacu

SEQ ID NO: 1593895 - RNA, 19 nt, Artificial Sequence
  Description of Artificial Sequence: Synthetic oligonucleotide
cucggaaguacccucugcu

SEQ ID NO: 1593896 - RNA, 19 nt, Artificial Sequence
  Description of Artificial Sequence: Synthetic oligonucleotide
ugccgacaccguccucagg

SEQ ID NO: 1593897 - RNA, 19 nt, Artificial Sequence
  Description of Artificial Sequence: Synthetic oligonucleotide
cuggagcccaagccugccc

SEQ ID NO: 1593898 - RNA, 19 nt, Artificial Sequence
  Description of Artificial Sequence: Synthetic oligonucleotide
ugucuacuccagagggguu

SEQ ID NO: 1593899 - RNA, 19 nt, Artificial Sequence
  Description of Artificial Sequence: Synthetic oligonucleotide
gugcugacagcguugucua

SEQ ID NO: 1593900 - RNA, 19 nt, Artificial Sequence
  Description of Artificial Sequence: Synthetic oligonucleotide
ccaggugugccgauaccgc

SEQ ID NO: 1593901 - RNA, 19 nt, Artificial Sequence
  Description of Artificial Sequence: Synthetic oligonucleotide
uaccaauguuugguaaguu

SEQ ID NO: 1593902 - RNA, 19 nt, Artificial Sequence
  Description of Artificial Sequence: Synthetic oligonucleotide
cacaccugcuuaauaccaa

SEQ ID NO: 1593903 - RNA, 19 nt, Artificial Sequence
  Description of Artificial Sequence: Synthetic oligonucleotide
cacgcucacacuccaggga

SEQ ID NO: 1593904 - RNA, 19 nt, Artificial Sequence
  Description of Artificial Sequence: Synthetic oligonucleotide
cccuggagcggauaccagc

SEQ ID NO: 1593905 - RNA, 19 nt, Artificial Sequence
  Description of Artificial Sequence: Synthetic oligonucleotide
caggugugccgauaccgca

SEQ ID NO: 1593906 - RNA, 19 nt, Artificial Sequence
  Description of Artificial Sequence: Synthetic oligonucleotide
gcgucaaucgaggucagga

SEQ ID NO: 1593907 - RNA, 19 nt, Artificial Sequence
  Description of Artificial Sequence: Synthetic oligonucleotide
ggucaucuaaggaggcagc

SEQ ID NO: 1593908 - RNA, 19 nt, Artificial Sequence
  Description of Artificial Sequence: Synthetic oligonucleotide
gucaaacccacagccgguc

SEQ ID NO: 1593909 - RNA, 19 nt, Artificial Sequence
  Description of Artificial Sequence: Synthetic oligonucleotide
uaaucgacuccagguccuc

SEQ ID NO: 1593910 - RNA, 19 nt, Artificial Sequence
  Description of Artificial Sequence: Synthetic oligonucleotide
ugcugacagcguugucuac

SEQ ID NO: 1593911 - RNA, 19 nt, Artificial Sequence
  Description of Artificial Sequence: Synthetic oligonucleotide
ggcuugucgaacaggguca

SEQ ID NO: 1593912 - RNA, 19 nt, Artificial Sequence
  Description of Artificial Sequence: Synthetic oligonucleotide
agccacgagggccuuggua

SEQ ID NO: 1593913 - RNA, 19 nt, Artificial Sequence
  Description of Artificial Sequence: Synthetic oligonucleotide
uccagggauauggcgucaa

SEQ ID NO: 1593914 - RNA, 19 nt, Artificial Sequence
  Description of Artificial Sequence: Synthetic oligonucleotide
uugguaaguugaggcucac

SEQ ID NO: 1593915 - RNA, 19 nt, Artificial Sequence
  Description of Artificial Sequence: Synthetic oligonucleotide
gaccaucaccuugcucaag

SEQ ID NO: 1593916 - RNA, 19 nt, Artificial Sequence
  Description of Artificial Sequence: Synthetic oligonucleotide
cgucaaucgaggucaggag

SEQ ID NO: 1593917 - RNA, 19 nt, Artificial Sequence
  Description of Artificial Sequence: Synthetic oligonucleotide
aguuugugucgagcagcug

SEQ ID NO: 1593918 - RNA, 19 nt, Artificial Sequence
  Description of Artificial Sequence: Synthetic oligonucleotide
aucucuccuagcacacgcu

SEQ ID NO: 1593919 - RNA, 19 nt, Artificial Sequence
  Description of Artificial Sequence: Synthetic oligonucleotide
cacuuuggcucgcucuaga

SEQ ID NO: 1593920 - RNA, 19 nt, Artificial Sequence
  Description of Artificial Sequence: Synthetic oligonucleotide
ccuggagcggauaccagca

SEQ ID NO: 1593921 - RNA, 19 nt, Artificial Sequence
  Description of Artificial Sequence: Synthetic oligonucleotide
ugcgccugucagcuugcua

SEQ ID NO: 1593922 - RNA, 19 nt, Artificial Sequence
  Description of Artificial Sequence: Synthetic oligonucleotide
ggucacaaucucagggaac

SEQ ID NO: 1593923 - RNA, 19 nt, Artificial Sequence
  Description of Artificial Sequence: Synthetic oligonucleotide
aggcgcuccgaugcugguc

SEQ ID NO: 1593924 - RNA, 19 nt, Artificial Sequence
  Description of Artificial Sequence: Synthetic oligonucleotide
uccgugggaccuugguguu

SEQ ID NO: 1593925 - RNA, 19 nt, Artificial Sequence
  Description of Artificial Sequence: Synthetic oligonucleotide
gcuugcuaugaaguccgug

SEQ ID NO: 1593926 - RNA, 19 nt, Artificial Sequence
  Description of Artificial Sequence: Synthetic oligonucleotide
ggagcggggucacaaucuc

SEQ ID NO: 1593927 - RNA, 19 nt, Artificial Sequence
  Description of Artificial Sequence: Synthetic oligonucleotide
gguacuccgugggaccuug

SEQ ID NO: 1593928 - RNA, 19 nt, Artificial Sequence
  Description of Artificial Sequence: Synthetic oligonucleotide
aguccgugugccgcuguga

SEQ ID NO: 1593929 - RNA, 19 nt, Artificial Sequence
  Description of Artificial Sequence: Synthetic oligonucleotide
cggaaguacccucugcuuc

SEQ ID NO: 1593930 - RNA, 19 nt, Artificial Sequence
  Description of Artificial Sequence: Synthetic oligonucleotide
gggcuucugacaacauggc

SEQ ID NO: 1593931 - RNA, 19 nt, Artificial Sequence
  Description of Artificial Sequence: Synthetic oligonucleotide
gcggggucacaaucucagg

SEQ ID NO: 1593932 - RNA, 19 nt, Artificial Sequence
  Description of Artificial Sequence: Synthetic oligonucleotide
gugugccgcugugauccgg

SEQ ID NO: 1593933 - RNA, 19 nt, Artificial Sequence
  Description of Artificial Sequence: Synthetic oligonucleotide
gagcggggucacaaucuca

SEQ ID NO: 1593934 - RNA, 19 nt, Artificial Sequence
  Description of Artificial Sequence: Synthetic oligonucleotide
ccugcuuagcguccuccac

SEQ ID NO: 1593935 - RNA, 19 nt, Artificial Sequence
  Description of Artificial Sequence: Synthetic oligonucleotide
aggcucggaaguacccucu

SEQ ID NO: 1593936 - RNA, 19 nt, Artificial Sequence
  Description of Artificial Sequence: Synthetic oligonucleotide
cauaggcccacuuguuaau

SEQ ID NO: 1593937 - RNA, 19 nt, Artificial Sequence
  Description of Artificial Sequence: Synthetic oligonucleotide
ccaccagacacaccgagua

SEQ ID NO: 1593938 - RNA, 19 nt, Artificial Sequence
  Description of Artificial Sequence: Synthetic oligonucleotide
acacaccgaguaggcagca

SEQ ID NO: 1593939 - RNA, 19 nt, Artificial Sequence
  Description of Artificial Sequence: Synthetic oligonucleotide
ugaggggauuggugauauu

SEQ ID NO: 1593940 - RNA, 19 nt, Artificial Sequence
  Description of Artificial Sequence: Synthetic oligonucleotide
ggcccacuuguuaaucgac

SEQ ID NO: 1593941 - RNA, 19 nt, Artificial Sequence
  Description of Artificial Sequence: Synthetic oligonucleotide
ccggcuacaucccacaccu

SEQ ID NO: 1593942 - RNA, 19 nt, Artificial Sequence
  Description of Artificial Sequence: Synthetic oligonucleotide
agggcuugucgaacagggu

SEQ ID NO: 1593943 - RNA, 19 nt, Artificial Sequence
  Description of Artificial Sequence: Synthetic oligonucleotide
cacgagggccuugguacuc

SEQ ID NO: 1593944 - RNA, 19 nt, Artificial Sequence
  Description of Artificial Sequence: Synthetic oligonucleotide
gggagguguggcccacacc

SEQ ID NO: 1593945 - RNA, 19 nt, Artificial Sequence
  Description of Artificial Sequence: Synthetic oligonucleotide
gcuccgaugcuggucuccc

SEQ ID NO: 1593946 - RNA, 19 nt, Artificial Sequence
  Description of Artificial Sequence: Synthetic oligonucleotide
aggccagcguccaggugug

SEQ ID NO: 1593947 - RNA, 19 nt, Artificial Sequence
  Description of Artificial Sequence: Synthetic oligonucleotide
guacuccgugggaccuugg

SEQ ID NO: 1593948 - RNA, 19 nt, Artificial Sequence
  Description of Artificial Sequence: Synthetic oligonucleotide
cagcguugucuacuccaga

SEQ ID NO: 1593949 - RNA, 19 nt, Artificial Sequence
  Description of Artificial Sequence: Synthetic oligonucleotide
gccagcguccaggugugcc

SEQ ID NO: 1593950 - RNA, 19 nt, Artificial Sequence
  Description of Artificial Sequence: Synthetic oligonucleotide
ugguaucgcagggcuccuc

SEQ ID NO: 1593951 - RNA, 19 nt, Artificial Sequence
  Description of Artificial Sequence: Synthetic oligonucleotide
gcugacagcguugucuacu

SEQ ID NO: 1593952 - RNA, 19 nt, Artificial Sequence
  Description of Artificial Sequence: Synthetic oligonucleotide
ggcgucaaucgaggucagg

SEQ ID NO: 1593953 - RNA, 19 nt, Artificial Sequence
  Description of Artificial Sequence: Synthetic oligonucleotide
guccgugugccgcugugau

SEQ ID NO: 1593954 - RNA, 19 nt, Artificial Sequence
  Description of Artificial Sequence: Synthetic oligonucleotide
cguccaggugugccgauac

SEQ ID NO: 1593955 - RNA, 19 nt, Artificial Sequence
  Description of Artificial Sequence: Synthetic oligonucleotide
cugguuuuaggagggugau

SEQ ID NO: 1593956 - RNA, 19 nt, Artificial Sequence
  Description of Artificial Sequence: Synthetic oligonucleotide
cuacaucccacaccugcuu

SEQ ID NO: 1593957 - RNA, 19 nt, Artificial Sequence
  Description of Artificial Sequence: Synthetic oligonucleotide
cccagggcuugucgaacag

SEQ ID NO: 1593958 - RNA, 19 nt, Artificial Sequence
  Description of Artificial Sequence: Synthetic oligonucleotide
caccguccucagguaggcc

SEQ ID NO: 1593959 - RNA, 19 nt, Artificial Sequence
  Description of Artificial Sequence: Synthetic oligonucleotide
agcguccaggugugccgau

SEQ ID NO: 1593960 - RNA, 19 nt, Artificial Sequence
  Description of Artificial Sequence: Synthetic oligonucleotide
ggcuaccuugccauggacu

SEQ ID NO: 1593961 - RNA, 19 nt, Artificial Sequence
  Description of Artificial Sequence: Synthetic oligonucleotide
ugguacuccgugggaccuu

SEQ ID NO: 1593962 - RNA, 19 nt, Artificial Sequence
  Description of Artificial Sequence: Synthetic oligonucleotide
gugccgcugugauccggca

SEQ ID NO: 1593963 - RNA, 19 nt, Artificial Sequence
  Description of Artificial Sequence: Synthetic oligonucleotide
cuccuagcacacgcucaca

SEQ ID NO: 1593964 - RNA, 19 nt, Artificial Sequence
  Description of Artificial Sequence: Synthetic oligonucleotide
ccagggcuaccuugccaug

SEQ ID NO: 1593965 - RNA, 19 nt, Artificial Sequence
  Description of Artificial Sequence: Synthetic oligonucleotide
gguucccauggaucacucu

SEQ ID NO: 1593966 - RNA, 19 nt, Artificial Sequence
  Description of Artificial Sequence: Synthetic oligonucleotide
gcggauaccagcagggcuu

SEQ ID NO: 1593967 - RNA, 19 nt, Artificial Sequence
  Description of Artificial Sequence: Synthetic oligonucleotide
ccuagcacacgcucacacu

SEQ ID NO: 1593968 - RNA, 19 nt, Artificial Sequence
  Description of Artificial Sequence: Synthetic oligonucleotide
ggacucauugucacaucau

SEQ ID NO: 1593969 - RNA, 19 nt, Artificial Sequence
  Description of Artificial Sequence: Synthetic oligonucleotide
cggcagauggccagguaga

SEQ ID NO: 1593970 - RNA, 19 nt, Artificial Sequence
  Description of Artificial Sequence: Synthetic oligonucleotide
ccucagaccaccugcugau

SEQ ID NO: 1593971 - RNA, 19 nt, Artificial Sequence
  Description of Artificial Sequence: Synthetic oligonucleotide
gcccggcuacaucccacac

SEQ ID NO: 1593972 - RNA, 19 nt, Artificial Sequence
  Description of Artificial Sequence: Synthetic oligonucleotide
gugugccgauaccgcagcu

SEQ ID NO: 1593973 - RNA, 19 nt, Artificial Sequence
  Description of Artificial Sequence: Synthetic oligonucleotide
cccagcagucaaacccaca

SEQ ID NO: 1593974 - RNA, 19 nt, Artificial Sequence
  Description of Artificial Sequence: Synthetic oligonucleotide
cagggccgggagccucuuc

SEQ ID NO: 1593975 - RNA, 19 nt, Artificial Sequence
  Description of Artificial Sequence: Synthetic oligonucleotide
ccccagguggcaguucuga

SEQ ID NO: 1593976 - RNA, 19 nt, Artificial Sequence
  Description of Artificial Sequence: Synthetic oligonucleotide
ccaccugcgccugucagcu

SEQ ID NO: 1593977 - RNA, 19 nt, Artificial Sequence
  Description of Artificial Sequence: Synthetic oligonucleotide
gacuuucccuggagcggau

SEQ ID NO: 1593978 - RNA, 19 nt, Artificial Sequence
  Description of Artificial Sequence: Synthetic oligonucleotide
cucccucauaggcccacuu

SEQ ID NO: 1593979 - RNA, 19 nt, Artificial Sequence
  Description of Artificial Sequence: Synthetic oligonucleotide
cccguugcucuguggucga

SEQ ID NO: 1593980 - RNA, 19 nt, Artificial Sequence
  Description of Artificial Sequence: Synthetic oligonucleotide
gccaccagacacaccgagu

SEQ ID NO: 1593981 - RNA, 19 nt, Artificial Sequence
  Description of Artificial Sequence: Synthetic oligonucleotide
cgauaccgcagcugcagcu

SEQ ID NO: 1593982 - RNA, 19 nt, Artificial Sequence
  Description of Artificial Sequence: Synthetic oligonucleotide
cccauggaucacucucucu

SEQ ID NO: 1593983 - RNA, 19 nt, Artificial Sequence
  Description of Artificial Sequence: Synthetic oligonucleotide
ggugccggaccaucaccuu

SEQ ID NO: 1593984 - RNA, 19 nt, Artificial Sequence
  Description of Artificial Sequence: Synthetic oligonucleotide
cggauaccagcagggcuuc

SEQ ID NO: 1593985 - RNA, 19 nt, Artificial Sequence
  Description of Artificial Sequence: Synthetic oligonucleotide
gccccagguggcaguucug

SEQ ID NO: 1593986 - RNA, 19 nt, Artificial Sequence
  Description of Artificial Sequence: Synthetic oligonucleotide
cugguaucgcagggcuccu

SEQ ID NO: 1593987 - RNA, 19 nt, Artificial Sequence
  Description of Artificial Sequence: Synthetic oligonucleotide
ggucaggagcggggucaca

SEQ ID NO: 1593988 - RNA, 19 nt, Artificial Sequence
  Description of Artificial Sequence: Synthetic oligonucleotide
gccggaccaucaccuugcu

SEQ ID NO: 1593989 - RNA, 19 nt, Artificial Sequence
  Description of Artificial Sequence: Synthetic oligonucleotide
gcguccaggugugccgaua

SEQ ID NO: 1593990 - RNA, 19 nt, Artificial Sequence
  Description of Artificial Sequence: Synthetic oligonucleotide
ggauaccagcagggcuucu

SEQ ID NO: 1593991 - RNA, 19 nt, Artificial Sequence
  Description of Artificial Sequence: Synthetic oligonucleotide
ggcucgcucuagaccuggu

SEQ ID NO: 1593992 - RNA, 19 nt, Artificial Sequence
  Description of Artificial Sequence: Synthetic oligonucleotide
cccucggugccgacaccgu

SEQ ID NO: 1593993 - RNA, 19 nt, Artificial Sequence
  Description of Artificial Sequence: Synthetic oligonucleotide
ccgugggaccuugguguua

SEQ ID NO: 1593994 - RNA, 19 nt, Artificial Sequence
  Description of Artificial Sequence: Synthetic oligonucleotide
caccugcgccugucagcuu

SEQ ID NO: 1593995 - RNA, 19 nt, Artificial Sequence
  Description of Artificial Sequence: Synthetic oligonucleotide
ccguugcucuguggucgaa

SEQ ID NO: 1593996 - RNA, 19 nt, Artificial Sequence
  Description of Artificial Sequence: Synthetic oligonucleotide
cggugccgacaccguccuc

SEQ ID NO: 1593997 - RNA, 19 nt, Artificial Sequence
  Description of Artificial Sequence: Synthetic oligonucleotide
aauagcacucuucucaccc

SEQ ID NO: 1593998 - RNA, 19 nt, Artificial Sequence
  Description of Artificial Sequence: Synthetic oligonucleotide
aaacaucagacauuacccc

SEQ ID NO: 1593999 - RNA, 19 nt, Artificial Sequence
  Description of Artificial Sequence: Synthetic oligonucleotide
ucugacauuaccaggaaag

SEQ ID NO: 1594000 - RNA, 19 nt, Artificial Sequence
  Description of Artificial Sequence: Synthetic oligonucleotide
uaaacaguauugcucaggg

SEQ ID NO: 1594001 - RNA, 19 nt, Artificial Sequence
  Description of Artificial Sequence: Synthetic oligonucleotide
aggaauaccauggagaugg

SEQ ID NO: 1594002 - RNA, 19 nt, Artificial Sequence
  Description of Artificial Sequence: Synthetic oligonucleotide
uaaaucacauacaacucag

SEQ ID NO: 1594003 - RNA, 19 nt, Artificial Sequence
  Description of Artificial Sequence: Synthetic oligonucleotide
aacucagggcaucaggccc

SEQ ID NO: 1594004 - RNA, 19 nt, Artificial Sequence
  Description of Artificial Sequence: Synthetic oligonucleotide
ucuaggaggaggcagguag

SEQ ID NO: 1594005 - RNA, 19 nt, Artificial Sequence
  Description of Artificial Sequence: Synthetic oligonucleotide
uaggaaguaggaaucaaag

SEQ ID NO: 1594006 - RNA, 19 nt, Artificial Sequence
  Description of Artificial Sequence: Synthetic oligonucleotide
ucagacauuaccccaagga

SEQ ID NO: 1594007 - RNA, 19 nt, Artificial Sequence
  Description of Artificial Sequence: Synthetic oligonucleotide
aaagugacgaagauagggg

SEQ ID NO: 1594008 - RNA, 19 nt, Artificial Sequence
  Description of Artificial Sequence: Synthetic oligonucleotide
uccucuuagaucauauucc

SEQ ID NO: 1594009 - RNA, 19 nt, Artificial Sequence
  Description of Artificial Sequence: Synthetic oligonucleotide
aggagaaugacagcuaccc

SEQ ID NO: 1594010 - RNA, 19 nt, Artificial Sequence
  Description of Artificial Sequence: Synthetic oligonucleotide
gagaaugacagcuacccug

SEQ ID NO: 1594011 - RNA, 19 nt, Artificial Sequence
  Description of Artificial Sequence: Synthetic oligonucleotide
ugggauuguaggaaguagg

SEQ ID NO: 1594012 - RNA, 19 nt, Artificial Sequence
  Description of Artificial Sequence: Synthetic oligonucleotide
uagagagagacgaccagcg

SEQ ID NO: 1594013 - RNA, 19 nt, Artificial Sequence
  Description of Artificial Sequence: Synthetic oligonucleotide
gauagggguauccagcugc

SEQ ID NO: 1594014 - RNA, 19 nt, Artificial Sequence
  Description of Artificial Sequence: Synthetic oligonucleotide
gauacauugugggucaggg

SEQ ID NO: 1594015 - RNA, 19 nt, Artificial Sequence
  Description of Artificial Sequence: Synthetic oligonucleotide
acccuuaagguccagguuc

SEQ ID NO: 1594016 - RNA, 19 nt, Artificial Sequence
  Description of Artificial Sequence: Synthetic oligonucleotide
ucuuuuaugacagggacaa

SEQ ID NO: 1594017 - RNA, 19 nt, Artificial Sequence
  Description of Artificial Sequence: Synthetic oligonucleotide
ugugccugauacauugugg

SEQ ID NO: 1594018 - RNA, 19 nt, Artificial Sequence
  Description of Artificial Sequence: Synthetic oligonucleotide
uuagaucauauuccaagga

SEQ ID NO: 1594019 - RNA, 19 nt, Artificial Sequence
  Description of Artificial Sequence: Synthetic oligonucleotide
gaagcucacaccccaauag

SEQ ID NO: 1594020 - RNA, 19 nt, Artificial Sequence
  Description of Artificial Sequence: Synthetic oligonucleotide
agcaccaucagguugcuug

SEQ ID NO: 1594021 - RNA, 19 nt, Artificial Sequence
  Description of Artificial Sequence: Synthetic oligonucleotide
uggcaaaagccgaagaggc

SEQ ID NO: 1594022 - RNA, 19 nt, Artificial Sequence
  Description of Artificial Sequence: Synthetic oligonucleotide
gauguaaacaguauugcuc

SEQ ID NO: 1594023 - RNA, 19 nt, Artificial Sequence
  Description of Artificial Sequence: Synthetic oligonucleotide
agugcugaggcccuugcac

SEQ ID NO: 1594024 - RNA, 19 nt, Artificial Sequence
  Description of Artificial Sequence: Synthetic oligonucleotide
uuuuaugacagggacaaaa

SEQ ID NO: 1594025 - RNA, 19 nt, Artificial Sequence
  Description of Artificial Sequence: Synthetic oligonucleotide
gauauggagguagacaggc

SEQ ID NO: 1594026 - RNA, 19 nt, Artificial Sequence
  Description of Artificial Sequence: Synthetic oligonucleotide
ugguagugggaucacaacc

SEQ ID NO: 1594027 - RNA, 19 nt, Artificial Sequence
  Description of Artificial Sequence: Synthetic oligonucleotide
aggauguaaacaguauugc

SEQ ID NO: 1594028 - RNA, 19 nt, Artificial Sequence
  Description of Artificial Sequence: Synthetic oligonucleotide
uacaacucagggcaucagg

SEQ ID NO: 1594029 - RNA, 19 nt, Artificial Sequence
  Description of Artificial Sequence: Synthetic oligonucleotide
ucauguugaaggcuuugag

SEQ ID NO: 1594030 - RNA, 19 nt, Artificial Sequence
  Description of Artificial Sequence: Synthetic oligonucleotide
aaauuuacguuggaguccu

SEQ ID NO: 1594031 - RNA, 19 nt, Artificial Sequence
  Description of Artificial Sequence: Synthetic oligonucleotide
ugaagaagcucacacccca

SEQ ID NO: 1594032 - RNA, 19 nt, Artificial Sequence
  Description of Artificial Sequence: Synthetic oligonucleotide
gugaauuugaucugcaguc

SEQ ID NO: 1594033 - RNA, 19 nt, Artificial Sequence
  Description of Artificial Sequence: Synthetic oligonucleotide
aagauagggguauccagcu

SEQ ID NO: 1594034 - RNA, 19 nt, Artificial Sequence
  Description of Artificial Sequence: Synthetic oligonucleotide
agaaacggcuuguuccugc

SEQ ID NO: 1594035 - RNA, 19 nt, Artificial Sequence
  Description of Artificial Sequence: Synthetic oligonucleotide
caauccagccccuuaaggc

SEQ ID NO: 1594036 - RNA, 19 nt, Artificial Sequence
  Description of Artificial Sequence: Synthetic oligonucleotide
uucagugcuguguaggccc

SEQ ID NO: 1594037 - RNA, 19 nt, Artificial Sequence
  Description of Artificial Sequence: Synthetic oligonucleotide
gaagacuaccgacaguggc

SEQ ID NO: 1594038 - RNA, 19 nt, Artificial Sequence
  Description of Artificial Sequence: Synthetic oligonucleotide
cuacccugagguuaggagg

SEQ ID NO: 1594039 - RNA, 19 nt, Artificial Sequence
  Description of Artificial Sequence: Synthetic oligonucleotide
ucuaaaggcccaagagagg

SEQ ID NO: 1594040 - RNA, 19 nt, Artificial Sequence
  Description of Artificial Sequence: Synthetic oligonucleotide
aguggcagcacgcugcggg

SEQ ID NO: 1594041 - RNA, 19 nt, Artificial Sequence
  Description of Artificial Sequence: Synthetic oligonucleotide
aagugacgaagauaggggu

SEQ ID NO: 1594042 - RNA, 19 nt, Artificial Sequence
  Description of Artificial Sequence: Synthetic oligonucleotide
caucuuuuaugacagggac

SEQ ID NO: 1594043 - RNA, 19 nt, Artificial Sequence
  Description of Artificial Sequence: Synthetic oligonucleotide
aacuucauuagaaccuggg

SEQ ID NO: 1594044 - RNA, 19 nt, Artificial Sequence
  Description of Artificial Sequence: Synthetic oligonucleotide
ugaucugcaguccugucac

SEQ ID NO: 1594045 - RNA, 19 nt, Artificial Sequence
  Description of Artificial Sequence: Synthetic oligonucleotide
acaacucagggcaucaggc

SEQ ID NO: 1594046 - RNA, 19 nt, Artificial Sequence
  Description of Artificial Sequence: Synthetic oligonucleotide
cucuucauaguagagcacg

SEQ ID NO: 1594047 - RNA, 19 nt, Artificial Sequence
  Description of Artificial Sequence: Synthetic oligonucleotide
uucauuagaaccugggauu

SEQ ID NO: 1594048 - RNA, 19 nt, Artificial Sequence
  Description of Artificial Sequence: Synthetic oligonucleotide
ugauauggagguagacagg

SEQ ID NO: 1594049 - RNA, 19 nt, Artificial Sequence
  Description of Artificial Sequence: Synthetic oligonucleotide
ugaggaauaccauggagau

SEQ ID NO: 1594050 - RNA, 19 nt, Artificial Sequence
  Description of Artificial Sequence: Synthetic oligonucleotide
gaagauagggguauccagc

SEQ ID NO: 1594051 - RNA, 19 nt, Artificial Sequence
  Description of Artificial Sequence: Synthetic oligonucleotide
accaucagguugcuugucc

SEQ ID NO: 1594052 - RNA, 19 nt, Artificial Sequence
  Description of Artificial Sequence: Synthetic oligonucleotide
gacaggucaugguaguggg

SEQ ID NO: 1594053 - RNA, 19 nt, Artificial Sequence
  Description of Artificial Sequence: Synthetic oligonucleotide
ucaacgguggccagggcag

SEQ ID NO: 1594054 - RNA, 19 nt, Artificial Sequence
  Description of Artificial Sequence: Synthetic oligonucleotide
gaagaggccacccagcguc

SEQ ID NO: 1594055 - RNA, 19 nt, Artificial Sequence
  Description of Artificial Sequence: Synthetic oligonucleotide
aaagccgaagaggccaccc

SEQ ID NO: 1594056 - RNA, 19 nt, Artificial Sequence
  Description of Artificial Sequence: Synthetic oligonucleotide
ggaguccucauguugaagg

SEQ ID NO: 1594057 - RNA, 19 nt, Artificial Sequence
  Description of Artificial Sequence: Synthetic oligonucleotide
ugguagaaagugacgaaga

SEQ ID NO: 1594058 - RNA, 19 nt, Artificial Sequence
  Description of Artificial Sequence: Synthetic oligonucleotide
uguccccaaauuuacguug

SEQ ID NO: 1594059 - RNA, 19 nt, Artificial Sequence
  Description of Artificial Sequence: Synthetic oligonucleotide
agccccuuaaggcugcagc

SEQ ID NO: 1594060 - RNA, 19 nt, Artificial Sequence
  Description of Artificial Sequence: Synthetic oligonucleotide
uuaccaggaaagacccugg

SEQ ID NO: 1594061 - RNA, 19 nt, Artificial Sequence
  Description of Artificial Sequence: Synthetic oligonucleotide
ugacaggucaugguagugg

SEQ ID NO: 1594062 - RNA, 19 nt, Artificial Sequence
  Description of Artificial Sequence: Synthetic oligonucleotide
uugaucugcaguccuguca

SEQ ID NO: 1594063 - RNA, 19 nt, Artificial Sequence
  Description of Artificial Sequence: Synthetic oligonucleotide
auaccauggagauggaggu

SEQ ID NO: 1594064 - RNA, 19 nt, Artificial Sequence
  Description of Artificial Sequence: Synthetic oligonucleotide
auuaccaggaaagacccug

SEQ ID NO: 1594065 - RNA, 19 nt, Artificial Sequence
  Description of Artificial Sequence: Synthetic oligonucleotide
ugaagacuaccgacagugg

SEQ ID NO: 1594066 - RNA, 19 nt, Artificial Sequence
  Description of Artificial Sequence: Synthetic oligonucleotide
caaauuuacguuggagucc

SEQ ID NO: 1594067 - RNA, 19 nt, Artificial Sequence
  Description of Artificial Sequence: Synthetic oligonucleotide
caaaguucaaggagggcac

SEQ ID NO: 1594068 - RNA, 19 nt, Artificial Sequence
  Description of Artificial Sequence: Synthetic oligonucleotide
ugacccaguagagagagac

SEQ ID NO: 1594069 - RNA, 19 nt, Artificial Sequence
  Description of Artificial Sequence: Synthetic oligonucleotide
accagcgcgaucugcagcg

SEQ ID NO: 1594070 - RNA, 19 nt, Artificial Sequence
  Description of Artificial Sequence: Synthetic oligonucleotide
gggaucacaacccaucucc

SEQ ID NO: 1594071 - RNA, 19 nt, Artificial Sequence
  Description of Artificial Sequence: Synthetic oligonucleotide
aaugaagacuaccgacagu

SEQ ID NO: 1594072 - RNA, 19 nt, Artificial Sequence
  Description of Artificial Sequence: Synthetic oligonucleotide
ucauuagaaccugggauug

SEQ ID NO: 1594073 - RNA, 19 nt, Artificial Sequence
  Description of Artificial Sequence: Synthetic oligonucleotide
guuuucccaaaacaagaug

SEQ ID NO: 1594074 - RNA, 19 nt, Artificial Sequence
  Description of Artificial Sequence: Synthetic oligonucleotide
guaaacaguauugcucagg

SEQ ID NO: 1594075 - RNA, 19 nt, Artificial Sequence
  Description of Artificial Sequence: Synthetic oligonucleotide
acugucugcgcacaggccu

SEQ ID NO: 1594076 - RNA, 19 nt, Artificial Sequence
  Description of Artificial Sequence: Synthetic oligonucleotide
ugcgcaggauccuggaccg

SEQ ID NO: 1594077 - RNA, 19 nt, Artificial Sequence
  Description of Artificial Sequence: Synthetic oligonucleotide
agagagagacgaccagcgc

SEQ ID NO: 1594078 - RNA, 19 nt, Artificial Sequence
  Description of Artificial Sequence: Synthetic oligonucleotide
acuucauuagaaccuggga

SEQ ID NO: 1594079 - RNA, 19 nt, Artificial Sequence
  Description of Artificial Sequence: Synthetic oligonucleotide
augguagugggaucacaac

SEQ ID NO: 1594080 - RNA, 19 nt, Artificial Sequence
  Description of Artificial Sequence: Synthetic oligonucleotide
uucuguccccaaauuuacg

SEQ ID NO: 1594081 - RNA, 19 nt, Artificial Sequence
  Description of Artificial Sequence: Synthetic oligonucleotide
uucucacccucuuuggagc

SEQ ID NO: 1594082 - RNA, 19 nt, Artificial Sequence
  Description of Artificial Sequence: Synthetic oligonucleotide
cuaggagaaugacagcuac

SEQ ID NO: 1594083 - RNA, 19 nt, Artificial Sequence
  Description of Artificial Sequence: Synthetic oligonucleotide
aguagagagagacgaccag

SEQ ID NO: 1594084 - RNA, 19 nt, Artificial Sequence
  Description of Artificial Sequence: Synthetic oligonucleotide
guaggggugccauuccugg

SEQ ID NO: 1594085 - RNA, 19 nt, Artificial Sequence
  Description of Artificial Sequence: Synthetic oligonucleotide
ucccuuguguagaagacau

SEQ ID NO: 1594086 - RNA, 19 nt, Artificial Sequence
  Description of Artificial Sequence: Synthetic oligonucleotide
guaggguuuucccaaaaca

SEQ ID NO: 1594087 - RNA, 19 nt, Artificial Sequence
  Description of Artificial Sequence: Synthetic oligonucleotide
cuguguaggccccacuugg

SEQ ID NO: 1594088 - RNA, 19 nt, Artificial Sequence
  Description of Artificial Sequence: Synthetic oligonucleotide
uuacguuggaguccucaug

SEQ ID NO: 1594089 - RNA, 19 nt, Artificial Sequence
  Description of Artificial Sequence: Synthetic oligonucleotide
aggaaucaaaggcuggaca

SEQ ID NO: 1594090 - RNA, 19 nt, Artificial Sequence
  Description of Artificial Sequence: Synthetic oligonucleotide
cccagcgucaucaugagcc

SEQ ID NO: 1594091 - RNA, 19 nt, Artificial Sequence
  Description of Artificial Sequence: Synthetic oligonucleotide
agcgccaugcgcaggaucc

SEQ ID NO: 1594092 - RNA, 19 nt, Artificial Sequence
  Description of Artificial Sequence: Synthetic oligonucleotide
aagacuaccgacaguggca

SEQ ID NO: 1594093 - RNA, 19 nt, Artificial Sequence
  Description of Artificial Sequence: Synthetic oligonucleotide
auacauugugggucagggg

SEQ ID NO: 1594094 - RNA, 19 nt, Artificial Sequence
  Description of Artificial Sequence: Synthetic oligonucleotide
cuucuguccccaaauuuac

SEQ ID NO: 1594095 - RNA, 19 nt, Artificial Sequence
  Description of Artificial Sequence: Synthetic oligonucleotide
agugggaucacaacccauc

SEQ ID NO: 1594096 - RNA, 19 nt, Artificial Sequence
  Description of Artificial Sequence: Synthetic oligonucleotide
aauuugaucugcaguccug

SEQ ID NO: 1594097 - RNA, 19 nt, Artificial Sequence
  Description of Artificial Sequence: Synthetic oligonucleotide
uggugaauuugaucugcag

SEQ ID NO: 1594098 - RNA, 19 nt, Artificial Sequence
  Description of Artificial Sequence: Synthetic oligonucleotide
aaaggcccaagagaggaga

SEQ ID NO: 1594099 - RNA, 19 nt, Artificial Sequence
  Description of Artificial Sequence: Synthetic oligonucleotide
agaugauauggagguagac

SEQ ID NO: 1594100 - RNA, 19 nt, Artificial Sequence
  Description of Artificial Sequence: Synthetic oligonucleotide
gauggaggugacccaguag

SEQ ID NO: 1594101 - RNA, 19 nt, Artificial Sequence
  Description of Artificial Sequence: Synthetic oligonucleotide
uuugagguugacaggucau

SEQ ID NO: 1594102 - RNA, 19 nt, Artificial Sequence
  Description of Artificial Sequence: Synthetic oligonucleotide
uugcuugucccaccacagg

SEQ ID NO: 1594103 - RNA, 19 nt, Artificial Sequence
  Description of Artificial Sequence: Synthetic oligonucleotide
uaaaggcccaagagaggag

SEQ ID NO: 1594104 - RNA, 19 nt, Artificial Sequence
  Description of Artificial Sequence: Synthetic oligonucleotide
uccaugggaagccuucagu

SEQ ID NO: 1594105 - RNA, 19 nt, Artificial Sequence
  Description of Artificial Sequence: Synthetic oligonucleotide
aucagacauuaccccaagg

SEQ ID NO: 1594106 - RNA, 19 nt, Artificial Sequence
  Description of Artificial Sequence: Synthetic oligonucleotide
ccaaauuuacguuggaguc

SEQ ID NO: 1594107 - RNA, 19 nt, Artificial Sequence
  Description of Artificial Sequence: Synthetic oligonucleotide
auugguagaaagugacgaa

SEQ ID NO: 1594108 - RNA, 19 nt, Artificial Sequence
  Description of Artificial Sequence: Synthetic oligonucleotide
gucugagugcuucuguccc

SEQ ID NO: 1594109 - RNA, 19 nt, Artificial Sequence
  Description of Artificial Sequence: Synthetic oligonucleotide
aggguuuucccaaaacaag

SEQ ID NO: 1594110 - RNA, 19 nt, Artificial Sequence
  Description of Artificial Sequence: Synthetic oligonucleotide
uuuacguuggaguccucau

SEQ ID NO: 1594111 - RNA, 19 nt, Artificial Sequence
  Description of Artificial Sequence: Synthetic oligonucleotide
guguagaagacaucacuuc

SEQ ID NO: 1594112 - RNA, 19 nt, Artificial Sequence
  Description of Artificial Sequence: Synthetic oligonucleotide
gaaguaggaaucaaaggcu

SEQ ID NO: 1594113 - RNA, 19 nt, Artificial Sequence
  Description of Artificial Sequence: Synthetic oligonucleotide
aucaauccagccccuuaag

SEQ ID NO: 1594114 - RNA, 19 nt, Artificial Sequence
  Description of Artificial Sequence: Synthetic oligonucleotide
guagagagagacgaccagc

SEQ ID NO: 1594115 - RNA, 19 nt, Artificial Sequence
  Description of Artificial Sequence: Synthetic oligonucleotide
cagaugagcaaaguucaag

SEQ ID NO: 1594116 - RNA, 19 nt, Artificial Sequence
  Description of Artificial Sequence: Synthetic oligonucleotide
cuaaaggcccaagagagga

SEQ ID NO: 1594117 - RNA, 19 nt, Artificial Sequence
  Description of Artificial Sequence: Synthetic oligonucleotide
uauaggcugaggagccacc

SEQ ID NO: 1594118 - RNA, 19 nt, Artificial Sequence
  Description of Artificial Sequence: Synthetic oligonucleotide
ugcgcacaggccuuggcug

SEQ ID NO: 1594119 - RNA, 19 nt, Artificial Sequence
  Description of Artificial Sequence: Synthetic oligonucleotide
gcuuucugacauuaccagg

SEQ ID NO: 1594120 - RNA, 19 nt, Artificial Sequence
  Description of Artificial Sequence: Synthetic oligonucleotide
uuucugacauuaccaggaa

SEQ ID NO: 1594121 - RNA, 19 nt, Artificial Sequence
  Description of Artificial Sequence: Synthetic oligonucleotide
gguagugggaucacaaccc

SEQ ID NO: 1594122 - RNA, 19 nt, Artificial Sequence
  Description of Artificial Sequence: Synthetic oligonucleotide
ugucccaccacaggaagcu

SEQ ID NO: 1594123 - RNA, 19 nt, Artificial Sequence
  Description of Artificial Sequence: Synthetic oligonucleotide
gcagcuuucugacauuacc

SEQ ID NO: 1594124 - RNA, 19 nt, Artificial Sequence
  Description of Artificial Sequence: Synthetic oligonucleotide
agacauuaccccaaggaaa

SEQ ID NO: 1594125 - RNA, 19 nt, Artificial Sequence
  Description of Artificial Sequence: Synthetic oligonucleotide
gacgaagauagggguaucc

SEQ ID NO: 1594126 - RNA, 19 nt, Artificial Sequence
  Description of Artificial Sequence: Synthetic oligonucleotide
aacccaucucccuugugua

SEQ ID NO: 1594127 - RNA, 19 nt, Artificial Sequence
  Description of Artificial Sequence: Synthetic oligonucleotide
cugucacauagccaauggc

SEQ ID NO: 1594128 - RNA, 19 nt, Artificial Sequence
  Description of Artificial Sequence: Synthetic oligonucleotide
ugcuucuguccccaaauuu

SEQ ID NO: 1594129 - RNA, 19 nt, Artificial Sequence
  Description of Artificial Sequence: Synthetic oligonucleotide
gaauaccauggagauggag

SEQ ID NO: 1594130 - RNA, 19 nt, Artificial Sequence
  Description of Artificial Sequence: Synthetic oligonucleotide
agcaaaguucaaggagggc

SEQ ID NO: 1594131 - RNA, 19 nt, Artificial Sequence
  Description of Artificial Sequence: Synthetic oligonucleotide
uaguagagcacggccagca

SEQ ID NO: 1594132 - RNA, 19 nt, Artificial Sequence
  Description of Artificial Sequence: Synthetic oligonucleotide
uccagucagcgccaugcgc

SEQ ID NO: 1594133 - RNA, 19 nt, Artificial Sequence
  Description of Artificial Sequence: Synthetic oligonucleotide
acggccagcacugucugcg

SEQ ID NO: 1594134 - RNA, 19 nt, Artificial Sequence
  Description of Artificial Sequence: Synthetic oligonucleotide
aggagacuaggagaaugac

SEQ ID NO: 1594135 - RNA, 19 nt, Artificial Sequence
  Description of Artificial Sequence: Synthetic oligonucleotide
auuuacguuggaguccuca

SEQ ID NO: 1594136 - RNA, 19 nt, Artificial Sequence
  Description of Artificial Sequence: Synthetic oligonucleotide
acauacaacucagggcauc

SEQ ID NO: 1594137 - RNA, 19 nt, Artificial Sequence
  Description of Artificial Sequence: Synthetic oligonucleotide
ucugagugcuucugucccc

SEQ ID NO: 1594138 - RNA, 19 nt, Artificial Sequence
  Description of Artificial Sequence: Synthetic oligonucleotide
ucaucaauccagccccuua

SEQ ID NO: 1594139 - RNA, 19 nt, Artificial Sequence
  Description of Artificial Sequence: Synthetic oligonucleotide
cuucauuagaaccugggau

SEQ ID NO: 1594140 - RNA, 19 nt, Artificial Sequence
  Description of Artificial Sequence: Synthetic oligonucleotide
guugcuugucccaccacag

SEQ ID NO: 1594141 - RNA, 19 nt, Artificial Sequence
  Description of Artificial Sequence: Synthetic oligonucleotide
acuaccgacaguggcagca

SEQ ID NO: 1594142 - RNA, 19 nt, Artificial Sequence
  Description of Artificial Sequence: Synthetic oligonucleotide
agacuaccgacaguggcag

SEQ ID NO: 1594143 - RNA, 19 nt, Artificial Sequence
  Description of Artificial Sequence: Synthetic oligonucleotide
aaggcccaagagaggagac

SEQ ID NO: 1594144 - RNA, 19 nt, Artificial Sequence
  Description of Artificial Sequence: Synthetic oligonucleotide
uugagguugacaggucaug

SEQ ID NO: 1594145 - RNA, 19 nt, Artificial Sequence
  Description of Artificial Sequence: Synthetic oligonucleotide
gccaaugaagacuaccgac

SEQ ID NO: 1594146 - RNA, 19 nt, Artificial Sequence
  Description of Artificial Sequence: Synthetic oligonucleotide
guacuuguugaggaauacc

SEQ ID NO: 1594147 - RNA, 19 nt, Artificial Sequence
  Description of Artificial Sequence: Synthetic oligonucleotide
gcaaaguucaaggagggca

SEQ ID NO: 1594148 - RNA, 19 nt, Artificial Sequence
  Description of Artificial Sequence: Synthetic oligonucleotide
aggcuuugagguugacagg

SEQ ID NO: 1594149 - RNA, 19 nt, Artificial Sequence
  Description of Artificial Sequence: Synthetic oligonucleotide
auaguagagcacggccagc

SEQ ID NO: 1594150 - RNA, 19 nt, Artificial Sequence
  Description of Artificial Sequence: Synthetic oligonucleotide
gaauuugaucugcaguccu

SEQ ID NO: 1594151 - RNA, 19 nt, Artificial Sequence
  Description of Artificial Sequence: Synthetic oligonucleotide
ucacaccccaauagcacuc

SEQ ID NO: 1594152 - RNA, 19 nt, Artificial Sequence
  Description of Artificial Sequence: Synthetic oligonucleotide
caauagcacucuucucacc

SEQ ID NO: 1594153 - RNA, 19 nt, Artificial Sequence
  Description of Artificial Sequence: Synthetic oligonucleotide
uugaaggcuuugagguuga

SEQ ID NO: 1594154 - RNA, 19 nt, Artificial Sequence
  Description of Artificial Sequence: Synthetic oligonucleotide
cugggauuguaggaaguag

SEQ ID NO: 1594155 - RNA, 19 nt, Artificial Sequence
  Description of Artificial Sequence: Synthetic oligonucleotide
guccccaaauuuacguugg

SEQ ID NO: 1594156 - RNA, 19 nt, Artificial Sequence
  Description of Artificial Sequence: Synthetic oligonucleotide
cagacauuaccccaaggaa

SEQ ID NO: 1594157 - RNA, 19 nt, Artificial Sequence
  Description of Artificial Sequence: Synthetic oligonucleotide
ggugacccaguagagagag

SEQ ID NO: 1594158 - RNA, 19 nt, Artificial Sequence
  Description of Artificial Sequence: Synthetic oligonucleotide
agacccuggcuccucuuag

SEQ ID NO: 1594159 - RNA, 19 nt, Artificial Sequence
  Description of Artificial Sequence: Synthetic oligonucleotide
ugcuguguaggccccacuu

SEQ ID NO: 1594160 - RNA, 19 nt, Artificial Sequence
  Description of Artificial Sequence: Synthetic oligonucleotide
uaggaaucaaaggcuggac

SEQ ID NO: 1594161 - RNA, 19 nt, Artificial Sequence
  Description of Artificial Sequence: Synthetic oligonucleotide
aagccgaagaggccaccca

SEQ ID NO: 1594162 - RNA, 19 nt, Artificial Sequence
  Description of Artificial Sequence: Synthetic oligonucleotide
cucuuuggagcuggggucc

SEQ ID NO: 1594163 - RNA, 19 nt, Artificial Sequence
  Description of Artificial Sequence: Synthetic oligonucleotide
uauugcucagggccacacu

SEQ ID NO: 1594164 - RNA, 19 nt, Artificial Sequence
  Description of Artificial Sequence: Synthetic oligonucleotide
ugccauuccugguaggguu

SEQ ID NO: 1594165 - RNA, 19 nt, Artificial Sequence
  Description of Artificial Sequence: Synthetic oligonucleotide
gucaacgguggccagggca

SEQ ID NO: 1594166 - RNA, 19 nt, Artificial Sequence
  Description of Artificial Sequence: Synthetic oligonucleotide
cauauuccaaggaggaugu

SEQ ID NO: 1594167 - RNA, 19 nt, Artificial Sequence
  Description of Artificial Sequence: Synthetic oligonucleotide
accgacaguggcagcacgc

SEQ ID NO: 1594168 - RNA, 19 nt, Artificial Sequence
  Description of Artificial Sequence: Synthetic oligonucleotide
gcuacccugagguuaggag

SEQ ID NO: 1594169 - RNA, 19 nt, Artificial Sequence
  Description of Artificial Sequence: Synthetic oligonucleotide
auagcacucuucucacccu

SEQ ID NO: 1594170 - RNA, 19 nt, Artificial Sequence
  Description of Artificial Sequence: Synthetic oligonucleotide
uccugucacauagccaaug

SEQ ID NO: 1594171 - RNA, 19 nt, Artificial Sequence
  Description of Artificial Sequence: Synthetic oligonucleotide
ugccugauacauugugggu

SEQ ID NO: 1594172 - RNA, 19 nt, Artificial Sequence
  Description of Artificial Sequence: Synthetic oligonucleotide
caguagagagagacgacca

SEQ ID NO: 1594173 - RNA, 19 nt, Artificial Sequence
  Description of Artificial Sequence: Synthetic oligonucleotide
caucagacauuaccccaag

SEQ ID NO: 1594174 - RNA, 19 nt, Artificial Sequence
  Description of Artificial Sequence: Synthetic oligonucleotide
ggcauugguagaaagugac

SEQ ID NO: 1594175 - RNA, 19 nt, Artificial Sequence
  Description of Artificial Sequence: Synthetic oligonucleotide
acagcuacccugagguuag

SEQ ID NO: 1594176 - RNA, 19 nt, Artificial Sequence
  Description of Artificial Sequence: Synthetic oligonucleotide
gcaguccugucacauagcc

SEQ ID NO: 1594177 - RNA, 19 nt, Artificial Sequence
  Description of Artificial Sequence: Synthetic oligonucleotide
agaagcucacaccccaaua

SEQ ID NO: 1594178 - RNA, 19 nt, Artificial Sequence
  Description of Artificial Sequence: Synthetic oligonucleotide
gacccaguagagagagacg

SEQ ID NO: 1594179 - RNA, 19 nt, Artificial Sequence
  Description of Artificial Sequence: Synthetic oligonucleotide
agagagacgaccagcgcga

SEQ ID NO: 1594180 - RNA, 19 nt, Artificial Sequence
  Description of Artificial Sequence: Synthetic oligonucleotide
ugggaucacaacccaucuc

SEQ ID NO: 1594181 - RNA, 19 nt, Artificial Sequence
  Description of Artificial Sequence: Synthetic oligonucleotide
auuagaaccugggauugua

SEQ ID NO: 1594182 - RNA, 19 nt, Artificial Sequence
  Description of Artificial Sequence: Synthetic oligonucleotide
uguaggccccacuuggguu

SEQ ID NO: 1594183 - RNA, 19 nt, Artificial Sequence
  Description of Artificial Sequence: Synthetic oligonucleotide
ggugccauuccugguaggg

SEQ ID NO: 1594184 - RNA, 19 nt, Artificial Sequence
  Description of Artificial Sequence: Synthetic oligonucleotide
gacauuaccccaaggaaau

SEQ ID NO: 1594185 - RNA, 19 nt, Artificial Sequence
  Description of Artificial Sequence: Synthetic oligonucleotide
acccagcgucaucaugagc

SEQ ID NO: 1594186 - RNA, 19 nt, Artificial Sequence
  Description of Artificial Sequence: Synthetic oligonucleotide
ucucacccucuuuggagcu

SEQ ID NO: 1594187 - RNA, 19 nt, Artificial Sequence
  Description of Artificial Sequence: Synthetic oligonucleotide
acgaagauagggguaucca

SEQ ID NO: 1594188 - RNA, 19 nt, Artificial Sequence
  Description of Artificial Sequence: Synthetic oligonucleotide
ccaugggaagccuucagug

SEQ ID NO: 1594189 - RNA, 19 nt, Artificial Sequence
  Description of Artificial Sequence: Synthetic oligonucleotide
gguauccagcugcagggag

SEQ ID NO: 1594190 - RNA, 19 nt, Artificial Sequence
  Description of Artificial Sequence: Synthetic oligonucleotide
gacagcuacccugagguua

SEQ ID NO: 1594191 - RNA, 19 nt, Artificial Sequence
  Description of Artificial Sequence: Synthetic oligonucleotide
guaggccccacuuggguuc

SEQ ID NO: 1594192 - RNA, 19 nt, Artificial Sequence
  Description of Artificial Sequence: Synthetic oligonucleotide
agagacgaccagcgcgauc

SEQ ID NO: 1594193 - RNA, 19 nt, Artificial Sequence
  Description of Artificial Sequence: Synthetic oligonucleotide
ucugcgcacaggccuuggc

SEQ ID NO: 1594194 - RNA, 19 nt, Artificial Sequence
  Description of Artificial Sequence: Synthetic oligonucleotide
ccaaugaagacuaccgaca

SEQ ID NO: 1594195 - RNA, 19 nt, Artificial Sequence
  Description of Artificial Sequence: Synthetic oligonucleotide
gagaggucaccaggcauug

SEQ ID NO: 1594196 - RNA, 19 nt, Artificial Sequence
  Description of Artificial Sequence: Synthetic oligonucleotide
aaacaagauggggcagaca

SEQ ID NO: 1594197 - RNA, 19 nt, Artificial Sequence
  Description of Artificial Sequence: Synthetic oligonucleotide
guaggaaguaggaaucaaa

SEQ ID NO: 1594198 - RNA, 19 nt, Artificial Sequence
  Description of Artificial Sequence: Synthetic oligonucleotide
gaggaauaccauggagaug

SEQ ID NO: 1594199 - RNA, 19 nt, Artificial Sequence
  Description of Artificial Sequence: Synthetic oligonucleotide
gcaaaagccgaagaggcca

SEQ ID NO: 1594200 - RNA, 19 nt, Artificial Sequence
  Description of Artificial Sequence: Synthetic oligonucleotide
auuuggcagcuuucugaca

SEQ ID NO: 1594201 - RNA, 19 nt, Artificial Sequence
  Description of Artificial Sequence: Synthetic oligonucleotide
ccaguagagagagacgacc

SEQ ID NO: 1594202 - RNA, 19 nt, Artificial Sequence
  Description of Artificial Sequence: Synthetic oligonucleotide
agcuccaugggaagccuuc

SEQ ID NO: 1594203 - RNA, 19 nt, Artificial Sequence
  Description of Artificial Sequence: Synthetic oligonucleotide
uggaguccucauguugaag

SEQ ID NO: 1594204 - RNA, 19 nt, Artificial Sequence
  Description of Artificial Sequence: Synthetic oligonucleotide
ugcggggccgacccuuaag

SEQ ID NO: 1594205 - RNA, 19 nt, Artificial Sequence
  Description of Artificial Sequence: Synthetic oligonucleotide
uccccaaauuuacguugga

SEQ ID NO: 1594206 - RNA, 19 nt, Artificial Sequence
  Description of Artificial Sequence: Synthetic oligonucleotide
uuggaguccucauguugaa

SEQ ID NO: 1594207 - RNA, 19 nt, Artificial Sequence
  Description of Artificial Sequence: Synthetic oligonucleotide
gagaugauauggagguaga

SEQ ID NO: 1594208 - RNA, 19 nt, Artificial Sequence
  Description of Artificial Sequence: Synthetic oligonucleotide
guauaggcugaggagccac

SEQ ID NO: 1594209 - RNA, 19 nt, Artificial Sequence
  Description of Artificial Sequence: Synthetic oligonucleotide
gguugcuugucccaccaca

SEQ ID NO: 1594210 - RNA, 19 nt, Artificial Sequence
  Description of Artificial Sequence: Synthetic oligonucleotide
caucaauccagccccuuaa

SEQ ID NO: 1594211 - RNA, 19 nt, Artificial Sequence
  Description of Artificial Sequence: Synthetic oligonucleotide
gcauugguagaaagugacg

SEQ ID NO: 1594212 - RNA, 19 nt, Artificial Sequence
  Description of Artificial Sequence: Synthetic oligonucleotide
aguucaaggagggcacgga

SEQ ID NO: 1594213 - RNA, 19 nt, Artificial Sequence
  Description of Artificial Sequence: Synthetic oligonucleotide
cauacaacucagggcauca

SEQ ID NO: 1594214 - RNA, 19 nt, Artificial Sequence
  Description of Artificial Sequence: Synthetic oligonucleotide
gaucacaacccaucucccu

SEQ ID NO: 1594215 - RNA, 19 nt, Artificial Sequence
  Description of Artificial Sequence: Synthetic oligonucleotide
agauggaggugacccagua

SEQ ID NO: 1594216 - RNA, 19 nt, Artificial Sequence
  Description of Artificial Sequence: Synthetic oligonucleotide
ggauguaaacaguauugcu

SEQ ID NO: 1594217 - RNA, 19 nt, Artificial Sequence
  Description of Artificial Sequence: Synthetic oligonucleotide
auacaacucagggcaucag

SEQ ID NO: 1594218 - RNA, 19 nt, Artificial Sequence
  Description of Artificial Sequence: Synthetic oligonucleotide
uggggcagacaggagauuu

SEQ ID NO: 1594219 - RNA, 19 nt, Artificial Sequence
  Description of Artificial Sequence: Synthetic oligonucleotide
aagauggggcagacaggag

SEQ ID NO: 1594220 - RNA, 19 nt, Artificial Sequence
  Description of Artificial Sequence: Synthetic oligonucleotide
caggggacuggugaauuug

SEQ ID NO: 1594221 - RNA, 19 nt, Artificial Sequence
  Description of Artificial Sequence: Synthetic oligonucleotide
aaagacccuggcuccucuu

SEQ ID NO: 1594222 - RNA, 19 nt, Artificial Sequence
  Description of Artificial Sequence: Synthetic oligonucleotide
cuuaaggcugcagcugguc

SEQ ID NO: 1594223 - RNA, 19 nt, Artificial Sequence
  Description of Artificial Sequence: Synthetic oligonucleotide
ccagagaugauauggaggu

SEQ ID NO: 1594224 - RNA, 19 nt, Artificial Sequence
  Description of Artificial Sequence: Synthetic oligonucleotide
aggggugccauuccuggua

SEQ ID NO: 1594225 - RNA, 19 nt, Artificial Sequence
  Description of Artificial Sequence: Synthetic oligonucleotide
aucauauuccaaggaggau

SEQ ID NO: 1594226 - RNA, 19 nt, Artificial Sequence
  Description of Artificial Sequence: Synthetic oligonucleotide
cccugacccagguauaggc

SEQ ID NO: 1594227 - RNA, 19 nt, Artificial Sequence
  Description of Artificial Sequence: Synthetic oligonucleotide
cuccagucagcgccaugcg

SEQ ID NO: 1594228 - RNA, 19 nt, Artificial Sequence
  Description of Artificial Sequence: Synthetic oligonucleotide
cacuggcuagcuccauggg

SEQ ID NO: 1594229 - RNA, 19 nt, Artificial Sequence
  Description of Artificial Sequence: Synthetic oligonucleotide
gcacggaucaugccaauga

SEQ ID NO: 1594230 - RNA, 19 nt, Artificial Sequence
  Description of Artificial Sequence: Synthetic oligonucleotide
ccaucagguugcuuguccc

SEQ ID NO: 1594231 - RNA, 19 nt, Artificial Sequence
  Description of Artificial Sequence: Synthetic oligonucleotide
ggagacuaggagaaugaca

SEQ ID NO: 1594232 - RNA, 19 nt, Artificial Sequence
  Description of Artificial Sequence: Synthetic oligonucleotide
gggccgacccuuaaggucc

SEQ ID NO: 1594233 - RNA, 19 nt, Artificial Sequence
  Description of Artificial Sequence: Synthetic oligonucleotide
cuggugaauuugaucugca

SEQ ID NO: 1594234 - RNA, 19 nt, Artificial Sequence
  Description of Artificial Sequence: Synthetic oligonucleotide
guugacaggucaugguagu

SEQ ID NO: 1594235 - RNA, 19 nt, Artificial Sequence
  Description of Artificial Sequence: Synthetic oligonucleotide
gccuucagugcuguguagg

SEQ ID NO: 1594236 - RNA, 19 nt, Artificial Sequence
  Description of Artificial Sequence: Synthetic oligonucleotide
cucuuagaucauauuccaa

SEQ ID NO: 1594237 - RNA, 19 nt, Artificial Sequence
  Description of Artificial Sequence: Synthetic oligonucleotide
aauuuacguuggaguccuc

SEQ ID NO: 1594238 - RNA, 19 nt, Artificial Sequence
  Description of Artificial Sequence: Synthetic oligonucleotide
gcggggccgacccuuaagg

SEQ ID NO: 1594239 - RNA, 19 nt, Artificial Sequence
  Description of Artificial Sequence: Synthetic oligonucleotide
gagguugacaggucauggu

SEQ ID NO: 1594240 - RNA, 19 nt, Artificial Sequence
  Description of Artificial Sequence: Synthetic oligonucleotide
ucaggggacuggugaauuu

SEQ ID NO: 1594241 - RNA, 19 nt, Artificial Sequence
  Description of Artificial Sequence: Synthetic oligonucleotide
cugagguuaggagggugug

SEQ ID NO: 1594242 - RNA, 19 nt, Artificial Sequence
  Description of Artificial Sequence: Synthetic oligonucleotide
agugacgaagauaggggua

SEQ ID NO: 1594243 - RNA, 19 nt, Artificial Sequence
  Description of Artificial Sequence: Synthetic oligonucleotide
guggagccuccagucagcg

SEQ ID NO: 1594244 - RNA, 19 nt, Artificial Sequence
  Description of Artificial Sequence: Synthetic oligonucleotide
caugcgcaggauccuggac

SEQ ID NO: 1594245 - RNA, 19 nt, Artificial Sequence
  Description of Artificial Sequence: Synthetic oligonucleotide
cagcagaaacggcuuguuc

SEQ ID NO: 1594246 - RNA, 19 nt, Artificial Sequence
  Description of Artificial Sequence: Synthetic oligonucleotide
caacccaucucccuugugu

SEQ ID NO: 1594247 - RNA, 19 nt, Artificial Sequence
  Description of Artificial Sequence: Synthetic oligonucleotide
caucagguugcuuguccca

SEQ ID NO: 1594248 - RNA, 19 nt, Artificial Sequence
  Description of Artificial Sequence: Synthetic oligonucleotide
gggauuguaggaaguagga

SEQ ID NO: 1594249 - RNA, 19 nt, Artificial Sequence
  Description of Artificial Sequence: Synthetic oligonucleotide
gguacuuguugaggaauac

SEQ ID NO: 1594250 - RNA, 19 nt, Artificial Sequence
  Description of Artificial Sequence: Synthetic oligonucleotide
cacccagcgucaucaugag

SEQ ID NO: 1594251 - RNA, 19 nt, Artificial Sequence
  Description of Artificial Sequence: Synthetic oligonucleotide
ccugauacauuguggguca

SEQ ID NO: 1594252 - RNA, 19 nt, Artificial Sequence
  Description of Artificial Sequence: Synthetic oligonucleotide
cccaaauuuacguuggagu

SEQ ID NO: 1594253 - RNA, 19 nt, Artificial Sequence
  Description of Artificial Sequence: Synthetic oligonucleotide
guagagcacggccagcacu

SEQ ID NO: 1594254 - RNA, 19 nt, Artificial Sequence
  Description of Artificial Sequence: Synthetic oligonucleotide
uccucauguugaaggcuuu

SEQ ID NO: 1594255 - RNA, 19 nt, Artificial Sequence
  Description of Artificial Sequence: Synthetic oligonucleotide
ccgaagaggccacccagcg

SEQ ID NO: 1594256 - RNA, 19 nt, Artificial Sequence
  Description of Artificial Sequence: Synthetic oligonucleotide
acaacccaucucccuugug

SEQ ID NO: 1594257 - RNA, 19 nt, Artificial Sequence
  Description of Artificial Sequence: Synthetic oligonucleotide
gaaacggcuuguuccugcu

SEQ ID NO: 1594258 - RNA, 19 nt, Artificial Sequence
  Description of Artificial Sequence: Synthetic oligonucleotide
gacgaccagcgcgaucugc

SEQ ID NO: 1594259 - RNA, 19 nt, Artificial Sequence
  Description of Artificial Sequence: Synthetic oligonucleotide
uggcagcuuucugacauua

SEQ ID NO: 1594260 - RNA, 19 nt, Artificial Sequence
  Description of Artificial Sequence: Synthetic oligonucleotide
ccaucuuuuaugacaggga

SEQ ID NO: 1594261 - RNA, 19 nt, Artificial Sequence
  Description of Artificial Sequence: Synthetic oligonucleotide
auugugggucaggggacug

SEQ ID NO: 1594262 - RNA, 19 nt, Artificial Sequence
  Description of Artificial Sequence: Synthetic oligonucleotide
cucacaccccaauagcacu

SEQ ID NO: 1594263 - RNA, 19 nt, Artificial Sequence
  Description of Artificial Sequence: Synthetic oligonucleotide
uagggguauccagcugcag

SEQ ID NO: 1594264 - RNA, 19 nt, Artificial Sequence
  Description of Artificial Sequence: Synthetic oligonucleotide
auagggguauccagcugca

SEQ ID NO: 1594265 - RNA, 19 nt, Artificial Sequence
  Description of Artificial Sequence: Synthetic oligonucleotide
gacccuggcuccucuuaga

SEQ ID NO: 1594266 - RNA, 19 nt, Artificial Sequence
  Description of Artificial Sequence: Synthetic oligonucleotide
accccagagaugauaugga

SEQ ID NO: 1594267 - RNA, 19 nt, Artificial Sequence
  Description of Artificial Sequence: Synthetic oligonucleotide
aggcccuugcacagcagag

SEQ ID NO: 1594268 - RNA, 19 nt, Artificial Sequence
  Description of Artificial Sequence: Synthetic oligonucleotide
ggcaaaagccgaagaggcc

SEQ ID NO: 1594269 - RNA, 19 nt, Artificial Sequence
  Description of Artificial Sequence: Synthetic oligonucleotide
gacuaccgacaguggcagc

SEQ ID NO: 1594270 - RNA, 19 nt, Artificial Sequence
  Description of Artificial Sequence: Synthetic oligonucleotide
gccccacaaacuucauuag

SEQ ID NO: 1594271 - RNA, 19 nt, Artificial Sequence
  Description of Artificial Sequence: Synthetic oligonucleotide
caguauugcucagggccac

SEQ ID NO: 1594272 - RNA, 19 nt, Artificial Sequence
  Description of Artificial Sequence: Synthetic oligonucleotide
cagguugcuugucccacca

SEQ ID NO: 1594273 - RNA, 19 nt, Artificial Sequence
  Description of Artificial Sequence: Synthetic oligonucleotide
gggcacuguacagaugagc

SEQ ID NO: 1594274 - RNA, 19 nt, Artificial Sequence
  Description of Artificial Sequence: Synthetic oligonucleotide
gagugcuucuguccccaaa

SEQ ID NO: 1594275 - RNA, 19 nt, Artificial Sequence
  Description of Artificial Sequence: Synthetic oligonucleotide
cuugcacagcagagagguc

SEQ ID NO: 1594276 - RNA, 19 nt, Artificial Sequence
  Description of Artificial Sequence: Synthetic oligonucleotide
gguaggggugccauuccug

SEQ ID NO: 1594277 - RNA, 19 nt, Artificial Sequence
  Description of Artificial Sequence: Synthetic oligonucleotide
cuucugcaucucccagccc

SEQ ID NO: 1594278 - RNA, 19 nt, Artificial Sequence
  Description of Artificial Sequence: Synthetic oligonucleotide
ccaauggcaaaagccgaag

SEQ ID NO: 1594279 - RNA, 19 nt, Artificial Sequence
  Description of Artificial Sequence: Synthetic oligonucleotide
cucccuuguguagaagaca

SEQ ID NO: 1594280 - RNA, 19 nt, Artificial Sequence
  Description of Artificial Sequence: Synthetic oligonucleotide
cagcgcgaucugcagcgcc

SEQ ID NO: 1594281 - RNA, 19 nt, Artificial Sequence
  Description of Artificial Sequence: Synthetic oligonucleotide
cacaggccuuggcugugcc

SEQ ID NO: 1594282 - RNA, 19 nt, Artificial Sequence
  Description of Artificial Sequence: Synthetic oligonucleotide
ggggccgacccuuaagguc

SEQ ID NO: 1594283 - RNA, 19 nt, Artificial Sequence
  Description of Artificial Sequence: Synthetic oligonucleotide
ucuuuggagcugggguccu

SEQ ID NO: 1594284 - RNA, 19 nt, Artificial Sequence
  Description of Artificial Sequence: Synthetic oligonucleotide
uggagguagacaggcucua

SEQ ID NO: 1594285 - RNA, 19 nt, Artificial Sequence
  Description of Artificial Sequence: Synthetic oligonucleotide
cccagguauaggcugagga

SEQ ID NO: 1594286 - RNA, 19 nt, Artificial Sequence
  Description of Artificial Sequence: Synthetic oligonucleotide
cuaccgacaguggcagcac

SEQ ID NO: 1594287 - RNA, 19 nt, Artificial Sequence
  Description of Artificial Sequence: Synthetic oligonucleotide
gccacccagcaccaucagg

SEQ ID NO: 1594288 - RNA, 19 nt, Artificial Sequence
  Description of Artificial Sequence: Synthetic oligonucleotide
ggcuuugagguugacaggu

SEQ ID NO: 1594289 - RNA, 19 nt, Artificial Sequence
  Description of Artificial Sequence: Synthetic oligonucleotide
aguauugcucagggccaca

SEQ ID NO: 1594290 - RNA, 19 nt, Artificial Sequence
  Description of Artificial Sequence: Synthetic oligonucleotide
ccaagagaggagacuagga

SEQ ID NO: 1594291 - RNA, 19 nt, Artificial Sequence
  Description of Artificial Sequence: Synthetic oligonucleotide
aagaggccacccagcguca

SEQ ID NO: 1594292 - RNA, 19 nt, Artificial Sequence
  Description of Artificial Sequence: Synthetic oligonucleotide
gcucacaccccaauagcac

SEQ ID NO: 1594293 - RNA, 19 nt, Artificial Sequence
  Description of Artificial Sequence: Synthetic oligonucleotide
cugauacauugugggucag

SEQ ID NO: 1594294 - RNA, 19 nt, Artificial Sequence
  Description of Artificial Sequence: Synthetic oligonucleotide
ggauuguaggaaguaggaa

SEQ ID NO: 1594295 - RNA, 19 nt, Artificial Sequence
  Description of Artificial Sequence: Synthetic oligonucleotide
ugacgaagauagggguauc

SEQ ID NO: 1594296 - RNA, 19 nt, Artificial Sequence
  Description of Artificial Sequence: Synthetic oligonucleotide
agcuacccugagguuagga

SEQ ID NO: 1594297 - RNA, 19 nt, Artificial Sequence
  Description of Artificial Sequence: Synthetic oligonucleotide
ugucugcgcacaggccuug

SEQ ID NO: 1594298 - RNA, 19 nt, Artificial Sequence
  Description of Artificial Sequence: Synthetic oligonucleotide
gcagguaggggugccauuc

SEQ ID NO: 1594299 - RNA, 19 nt, Artificial Sequence
  Description of Artificial Sequence: Synthetic oligonucleotide
gcagaaacggcuuguuccu

SEQ ID NO: 1594300 - RNA, 19 nt, Artificial Sequence
  Description of Artificial Sequence: Synthetic oligonucleotide
accugggauuguaggaagu

SEQ ID NO: 1594301 - RNA, 19 nt, Artificial Sequence
  Description of Artificial Sequence: Synthetic oligonucleotide
agggcacggaucaugccaa

SEQ ID NO: 1594302 - RNA, 19 nt, Artificial Sequence
  Description of Artificial Sequence: Synthetic oligonucleotide
agucagcgccaugcgcagg

SEQ ID NO: 1594303 - RNA, 19 nt, Artificial Sequence
  Description of Artificial Sequence: Synthetic oligonucleotide
uagcuccaugggaagccuu

SEQ ID NO: 1594304 - RNA, 19 nt, Artificial Sequence
  Description of Artificial Sequence: Synthetic oligonucleotide
cagcgucaucaugagccag

SEQ ID NO: 1594305 - RNA, 19 nt, Artificial Sequence
  Description of Artificial Sequence: Synthetic oligonucleotide
agcacucuucucacccucu

SEQ ID NO: 1594306 - RNA, 19 nt, Artificial Sequence
  Description of Artificial Sequence: Synthetic oligonucleotide
acguuggaguccucauguu

SEQ ID NO: 1594307 - RNA, 19 nt, Artificial Sequence
  Description of Artificial Sequence: Synthetic oligonucleotide
ugagugcuucuguccccaa

SEQ ID NO: 1594308 - RNA, 19 nt, Artificial Sequence
  Description of Artificial Sequence: Synthetic oligonucleotide
cacuuggguucagucccag

SEQ ID NO: 1594309 - RNA, 19 nt, Artificial Sequence
  Description of Artificial Sequence: Synthetic oligonucleotide
agacgaccagcgcgaucug

SEQ ID NO: 1594310 - RNA, 19 nt, Artificial Sequence
  Description of Artificial Sequence: Synthetic oligonucleotide
guguaggccccacuugggu

SEQ ID NO: 1594311 - RNA, 19 nt, Artificial Sequence
  Description of Artificial Sequence: Synthetic oligonucleotide
ggagggcacggaucaugcc

SEQ ID NO: 1594312 - RNA, 19 nt, Artificial Sequence
  Description of Artificial Sequence: Synthetic oligonucleotide
uggcugugccugauacauu

SEQ ID NO: 1594313 - RNA, 19 nt, Artificial Sequence
  Description of Artificial Sequence: Synthetic oligonucleotide
ggcagacaggagauuuggc

SEQ ID NO: 1594314 - RNA, 19 nt, Artificial Sequence
  Description of Artificial Sequence: Synthetic oligonucleotide
cuggucccaaccccagaga

SEQ ID NO: 1594315 - RNA, 19 nt, Artificial Sequence
  Description of Artificial Sequence: Synthetic oligonucleotide
gguuuucccaaaacaagau

SEQ ID NO: 1594316 - RNA, 19 nt, Artificial Sequence
  Description of Artificial Sequence: Synthetic oligonucleotide
cccaguagagagagacgac

SEQ ID NO: 1594317 - RNA, 19 nt, Artificial Sequence
  Description of Artificial Sequence: Synthetic oligonucleotide
cugguaggguuuucccaaa

SEQ ID NO: 1594318 - RNA, 19 nt, Artificial Sequence
  Description of Artificial Sequence: Synthetic oligonucleotide
gcaguggagccuccaguca

SEQ ID NO: 1594319 - RNA, 19 nt, Artificial Sequence
  Description of Artificial Sequence: Synthetic oligonucleotide
ggcccaagagaggagacua

SEQ ID NO: 1594320 - RNA, 19 nt, Artificial Sequence
  Description of Artificial Sequence: Synthetic oligonucleotide
cagccccugacccagguau

SEQ ID NO: 1594321 - RNA, 19 nt, Artificial Sequence
  Description of Artificial Sequence: Synthetic oligonucleotide
cccuuaagguccagguuca

SEQ ID NO: 1594322 - RNA, 19 nt, Artificial Sequence
  Description of Artificial Sequence: Synthetic oligonucleotide
ggagaaugacagcuacccu

SEQ ID NO: 1594323 - RNA, 19 nt, Artificial Sequence
  Description of Artificial Sequence: Synthetic oligonucleotide
caacgguggccagggcagc

SEQ ID NO: 1594324 - RNA, 19 nt, Artificial Sequence
  Description of Artificial Sequence: Synthetic oligonucleotide
guccucauguugaaggcuu

SEQ ID NO: 1594325 - RNA, 19 nt, Artificial Sequence
  Description of Artificial Sequence: Synthetic oligonucleotide
uggcuccucuuagaucaua

SEQ ID NO: 1594326 - RNA, 19 nt, Artificial Sequence
  Description of Artificial Sequence: Synthetic oligonucleotide
cauuaccaggaaagacccu

SEQ ID NO: 1594327 - RNA, 19 nt, Artificial Sequence
  Description of Artificial Sequence: Synthetic oligonucleotide
ggguucagucccagguccc

SEQ ID NO: 1594328 - RNA, 19 nt, Artificial Sequence
  Description of Artificial Sequence: Synthetic oligonucleotide
ggguuauggucugagugcu

SEQ ID NO: 1594329 - RNA, 19 nt, Artificial Sequence
  Description of Artificial Sequence: Synthetic oligonucleotide
cugcgcacaggccuuggcu

SEQ ID NO: 1594330 - RNA, 19 nt, Artificial Sequence
  Description of Artificial Sequence: Synthetic oligonucleotide
ccccacaaacuucauuaga

SEQ ID NO: 1594331 - RNA, 19 nt, Artificial Sequence
  Description of Artificial Sequence: Synthetic oligonucleotide
ccucauguugaaggcuuug

SEQ ID NO: 1594332 - RNA, 19 nt, Artificial Sequence
  Description of Artificial Sequence: Synthetic oligonucleotide
gcccaagagaggagacuag

SEQ ID NO: 1594333 - RNA, 19 nt, Artificial Sequence
  Description of Artificial Sequence: Synthetic oligonucleotide
gguauaggcugaggagcca

SEQ ID NO: 1594334 - RNA, 19 nt, Artificial Sequence
  Description of Artificial Sequence: Synthetic oligonucleotide
gccccacuuggguucaguc

SEQ ID NO: 1594335 - RNA, 19 nt, Artificial Sequence
  Description of Artificial Sequence: Synthetic oligonucleotide
gagauggaggugacccagu

SEQ ID NO: 1594336 - RNA, 19 nt, Artificial Sequence
  Description of Artificial Sequence: Synthetic oligonucleotide
cuuuuaugacagggacaaa

SEQ ID NO: 1594337 - RNA, 19 nt, Artificial Sequence
  Description of Artificial Sequence: Synthetic oligonucleotide
ccgacccuuaagguccagg

SEQ ID NO: 1594338 - RNA, 19 nt, Artificial Sequence
  Description of Artificial Sequence: Synthetic oligonucleotide
cacauacaacucagggcau

SEQ ID NO: 1594339 - RNA, 19 nt, Artificial Sequence
  Description of Artificial Sequence: Synthetic oligonucleotide
ccccuuaaggcugcagcug

SEQ ID NO: 1594340 - RNA, 19 nt, Artificial Sequence
  Description of Artificial Sequence: Synthetic oligonucleotide
gccccuuaaggcugcagcu

SEQ ID NO: 1594341 - RNA, 19 nt, Artificial Sequence
  Description of Artificial Sequence: Synthetic oligonucleotide
cauuagaaccugggauugu

SEQ ID NO: 1594342 - RNA, 19 nt, Artificial Sequence
  Description of Artificial Sequence: Synthetic oligonucleotide
gcuuugagguugacagguc

SEQ ID NO: 1594343 - RNA, 19 nt, Artificial Sequence
  Description of Artificial Sequence: Synthetic oligonucleotide
ccccaauagcacucuucuc

SEQ ID NO: 1594344 - RNA, 19 nt, Artificial Sequence
  Description of Artificial Sequence: Synthetic oligonucleotide
cagccccuuaaggcugcag

SEQ ID NO: 1594345 - RNA, 19 nt, Artificial Sequence
  Description of Artificial Sequence: Synthetic oligonucleotide
agcacgcugcggggccgac

SEQ ID NO: 1594346 - RNA, 19 nt, Artificial Sequence
  Description of Artificial Sequence: Synthetic oligonucleotide
cauugugggucaggggacu

SEQ ID NO: 1594347 - RNA, 19 nt, Artificial Sequence
  Description of Artificial Sequence: Synthetic oligonucleotide
gcaccaucagguugcuugu

SEQ ID NO: 1594348 - RNA, 19 nt, Artificial Sequence
  Description of Artificial Sequence: Synthetic oligonucleotide
cagcuacccugagguuagg

SEQ ID NO: 1594349 - RNA, 19 nt, Artificial Sequence
  Description of Artificial Sequence: Synthetic oligonucleotide
cccuggcuccucuuagauc

SEQ ID NO: 1594350 - RNA, 19 nt, Artificial Sequence
  Description of Artificial Sequence: Synthetic oligonucleotide
acaggagauuuggcagcuu

SEQ ID NO: 1594351 - RNA, 19 nt, Artificial Sequence
  Description of Artificial Sequence: Synthetic oligonucleotide
caggcucuaggaggaggca

SEQ ID NO: 1594352 - RNA, 19 nt, Artificial Sequence
  Description of Artificial Sequence: Synthetic oligonucleotide
gugccauuccugguagggu

SEQ ID NO: 1594353 - RNA, 19 nt, Artificial Sequence
  Description of Artificial Sequence: Synthetic oligonucleotide
cagagaugauauggaggua

SEQ ID NO: 1594354 - RNA, 19 nt, Artificial Sequence
  Description of Artificial Sequence: Synthetic oligonucleotide
cuagcuccaugggaagccu

SEQ ID NO: 1594355 - RNA, 19 nt, Artificial Sequence
  Description of Artificial Sequence: Synthetic oligonucleotide
ggucaacgguggccagggc

SEQ ID NO: 1594356 - RNA, 19 nt, Artificial Sequence
  Description of Artificial Sequence: Synthetic oligonucleotide
gucaggggacuggugaauu

SEQ ID NO: 1594357 - RNA, 19 nt, Artificial Sequence
  Description of Artificial Sequence: Synthetic oligonucleotide
ccccugacccagguauagg

SEQ ID NO: 1594358 - RNA, 19 nt, Artificial Sequence
  Description of Artificial Sequence: Synthetic oligonucleotide
ccugacccagguauaggcu

SEQ ID NO: 1594359 - RNA, 19 nt, Artificial Sequence
  Description of Artificial Sequence: Synthetic oligonucleotide
ccaugcgcaggauccugga

SEQ ID NO: 1594360 - RNA, 19 nt, Artificial Sequence
  Description of Artificial Sequence: Synthetic oligonucleotide
cgacaguggcagcacgcug

SEQ ID NO: 1594361 - RNA, 19 nt, Artificial Sequence
  Description of Artificial Sequence: Synthetic oligonucleotide
cacaccccaauagcacucu

SEQ ID NO: 1594362 - RNA, 19 nt, Artificial Sequence
  Description of Artificial Sequence: Synthetic oligonucleotide
gcccgcagcagaaacggcu

SEQ ID NO: 1594363 - RNA, 19 nt, Artificial Sequence
  Description of Artificial Sequence: Synthetic oligonucleotide
cugucugcgcacaggccuu

SEQ ID NO: 1594364 - RNA, 19 nt, Artificial Sequence
  Description of Artificial Sequence: Synthetic oligonucleotide
ucagggcaucaggccccac

SEQ ID NO: 1594365 - RNA, 19 nt, Artificial Sequence
  Description of Artificial Sequence: Synthetic oligonucleotide
ugggguccucuugggucuu

SEQ ID NO: 1594366 - RNA, 19 nt, Artificial Sequence
  Description of Artificial Sequence: Synthetic oligonucleotide
agccccugacccagguaua

SEQ ID NO: 1594367 - RNA, 19 nt, Artificial Sequence
  Description of Artificial Sequence: Synthetic oligonucleotide
acgcugcggggccgacccu

SEQ ID NO: 1594368 - RNA, 19 nt, Artificial Sequence
  Description of Artificial Sequence: Synthetic oligonucleotide
aggagccacccagcaccau

SEQ ID NO: 1594369 - RNA, 19 nt, Artificial Sequence
  Description of Artificial Sequence: Synthetic oligonucleotide
gagagacgaccagcgcgau

SEQ ID NO: 1594370 - RNA, 19 nt, Artificial Sequence
  Description of Artificial Sequence: Synthetic oligonucleotide
gcgcacaggccuuggcugu

SEQ ID NO: 1594371 - RNA, 19 nt, Artificial Sequence
  Description of Artificial Sequence: Synthetic oligonucleotide
ccuuaaggcugcagcuggu

SEQ ID NO: 1594372 - RNA, 19 nt, Artificial Sequence
  Description of Artificial Sequence: Synthetic oligonucleotide
ggucaggggacuggugaau

SEQ ID NO: 1594373 - RNA, 19 nt, Artificial Sequence
  Description of Artificial Sequence: Synthetic oligonucleotide
ccagcgcgaucugcagcgc

SEQ ID NO: 1594374 - RNA, 19 nt, Artificial Sequence
  Description of Artificial Sequence: Synthetic oligonucleotide
gcagcagaaacggcuuguu

SEQ ID NO: 1594375 - RNA, 19 nt, Artificial Sequence
  Description of Artificial Sequence: Synthetic oligonucleotide
cugcggggccgacccuuaa

SEQ ID NO: 1594376 - RNA, 19 nt, Artificial Sequence
  Description of Artificial Sequence: Synthetic oligonucleotide
cgcccgcagcagaaacggc

SEQ ID NO: 1594377 - RNA, 19 nt, Artificial Sequence
  Description of Artificial Sequence: Synthetic oligonucleotide
cagcacgcugcggggccga

SEQ ID NO: 1594378 - RNA, 19 nt, Artificial Sequence
  Description of Artificial Sequence: Synthetic oligonucleotide
gccagagugcugaggcccu

SEQ ID NO: 1594379 - RNA, 19 nt, Artificial Sequence
  Description of Artificial Sequence: Synthetic oligonucleotide
cgccaugcgcaggauccug

SEQ ID NO: 1594380 - RNA, 19 nt, Artificial Sequence
  Description of Artificial Sequence: Synthetic oligonucleotide
ggccgacccuuaaggucca

SEQ ID NO: 1594381 - RNA, 19 nt, Artificial Sequence
  Description of Artificial Sequence: Synthetic oligonucleotide
gguuauggucugagugcuu

SEQ ID NO: 1594382 - RNA, 19 nt, Artificial Sequence
  Description of Artificial Sequence: Synthetic oligonucleotide
gccgacccuuaagguccag

SEQ ID NO: 1594383 - RNA, 19 nt, Artificial Sequence
  Description of Artificial Sequence: Synthetic oligonucleotide
ccgacaguggcagcacgcu

SEQ ID NO: 1594384 - RNA, 19 nt, Artificial Sequence
  Description of Artificial Sequence: Synthetic oligonucleotide
cgcacaggccuuggcugug

SEQ ID NO: 1594385 - RNA, 19 nt, Artificial Sequence
  Description of Artificial Sequence: Synthetic oligonucleotide
cccaccacaggaagcucuu

SEQ ID NO: 1594386 - RNA, 19 nt, Artificial Sequence
  Description of Artificial Sequence: Synthetic oligonucleotide
gggcacggaucaugccaau

SEQ ID NO: 1594387 - RNA, 19 nt, Artificial Sequence
  Description of Artificial Sequence: Synthetic oligonucleotide
gcugcggggccgacccuua

SEQ ID NO: 1594388 - RNA, 19 nt, Artificial Sequence
  Description of Artificial Sequence: Synthetic oligonucleotide
gcaggauccuggaccgcuu

SEQ ID NO: 1594389 - RNA, 19 nt, Artificial Sequence
  Description of Artificial Sequence: Synthetic oligonucleotide
cggggccgacccuuaaggu

SEQ ID NO: 1594390 - RNA, 19 nt, Artificial Sequence
  Description of Artificial Sequence: Synthetic oligonucleotide
gcgccaugcgcaggauccu

SEQ ID NO: 1594391 - RNA, 19 nt, Artificial Sequence
  Description of Artificial Sequence: Synthetic oligonucleotide
ccagccccuuaaggcugca

SEQ ID NO: 1594392 - RNA, 19 nt, Artificial Sequence
  Description of Artificial Sequence: Synthetic oligonucleotide
cagcaccaucagguugcuu

SEQ ID NO: 1594393 - RNA, 19 nt, Artificial Sequence
  Description of Artificial Sequence: Synthetic oligonucleotide
cgcugcggggccgacccuu

SEQ ID NO: 1594394 - RNA, 19 nt, Artificial Sequence
  Description of Artificial Sequence: Synthetic oligonucleotide
aaugcuaucauucugcaag

SEQ ID NO: 1594395 - RNA, 19 nt, Artificial Sequence
  Description of Artificial Sequence: Synthetic oligonucleotide
ucuccuuaaagaaagaugc

SEQ ID NO: 1594396 - RNA, 19 nt, Artificial Sequence
  Description of Artificial Sequence: Synthetic oligonucleotide
acugguuuagcuuuccagc

SEQ ID NO: 1594397 - RNA, 19 nt, Artificial Sequence
  Description of Artificial Sequence: Synthetic oligonucleotide
acagaugcagcccacaaac

SEQ ID NO: 1594398 - RNA, 19 nt, Artificial Sequence
  Description of Artificial Sequence: Synthetic oligonucleotide
aguuugcucccacagaugc

SEQ ID NO: 1594399 - RNA, 19 nt, Artificial Sequence
  Description of Artificial Sequence: Synthetic oligonucleotide
aaacuuuucuaaugcuccc

SEQ ID NO: 1594400 - RNA, 19 nt, Artificial Sequence
  Description of Artificial Sequence: Synthetic oligonucleotide
augucuuacgagcucaugc

SEQ ID NO: 1594401 - RNA, 19 nt, Artificial Sequence
  Description of Artificial Sequence: Synthetic oligonucleotide
uuugacuccauacuggaga

SEQ ID NO: 1594402 - RNA, 19 nt, Artificial Sequence
  Description of Artificial Sequence: Synthetic oligonucleotide
auaccauuuggccagcagc

SEQ ID NO: 1594403 - RNA, 19 nt, Artificial Sequence
  Description of Artificial Sequence: Synthetic oligonucleotide
caaacuuuucuaaugcucc

SEQ ID NO: 1594404 - RNA, 19 nt, Artificial Sequence
  Description of Artificial Sequence: Synthetic oligonucleotide
uucuaaugcucccagcagg

SEQ ID NO: 1594405 - RNA, 19 nt, Artificial Sequence
  Description of Artificial Sequence: Synthetic oligonucleotide
aaggcugaccucuccacgc

SEQ ID NO: 1594406 - RNA, 19 nt, Artificial Sequence
  Description of Artificial Sequence: Synthetic oligonucleotide
aaagaugcuggcuugucgu

SEQ ID NO: 1594407 - RNA, 19 nt, Artificial Sequence
  Description of Artificial Sequence: Synthetic oligonucleotide
ugugagugacuaaagggag

SEQ ID NO: 1594408 - RNA, 19 nt, Artificial Sequence
  Description of Artificial Sequence: Synthetic oligonucleotide
ucaugcaaacacuugaagu

SEQ ID NO: 1594409 - RNA, 19 nt, Artificial Sequence
  Description of Artificial Sequence: Synthetic oligonucleotide
uaucacacagacuagggaa

SEQ ID NO: 1594410 - RNA, 19 nt, Artificial Sequence
  Description of Artificial Sequence: Synthetic oligonucleotide
auagcaaguacacugccug

SEQ ID NO: 1594411 - RNA, 19 nt, Artificial Sequence
  Description of Artificial Sequence: Synthetic oligonucleotide
auagcaauggcaggcaggc

SEQ ID NO: 1594412 - RNA, 19 nt, Artificial Sequence
  Description of Artificial Sequence: Synthetic oligonucleotide
aacgcgugguacugcaugc

SEQ ID NO: 1594413 - RNA, 19 nt, Artificial Sequence
  Description of Artificial Sequence: Synthetic oligonucleotide
cugaaugcuaucauucugc

SEQ ID NO: 1594414 - RNA, 19 nt, Artificial Sequence
  Description of Artificial Sequence: Synthetic oligonucleotide
uucacaaucugaaugcuau

SEQ ID NO: 1594415 - RNA, 19 nt, Artificial Sequence
  Description of Artificial Sequence: Synthetic oligonucleotide
cuaaagggagcacaguccg

SEQ ID NO: 1594416 - RNA, 19 nt, Artificial Sequence
  Description of Artificial Sequence: Synthetic oligonucleotide
gucguagacagucacagcc

SEQ ID NO: 1594417 - RNA, 19 nt, Artificial Sequence
  Description of Artificial Sequence: Synthetic oligonucleotide
ugaaguucacagcacacac

SEQ ID NO: 1594418 - RNA, 19 nt, Artificial Sequence
  Description of Artificial Sequence: Synthetic oligonucleotide
cagcauauagcaauggcag

SEQ ID NO: 1594419 - RNA, 19 nt, Artificial Sequence
  Description of Artificial Sequence: Synthetic oligonucleotide
cuuaaagaaagaugcuggc

SEQ ID NO: 1594420 - RNA, 19 nt, Artificial Sequence
  Description of Artificial Sequence: Synthetic oligonucleotide
aaugacaacgcgugguacu

SEQ ID NO: 1594421 - RNA, 19 nt, Artificial Sequence
  Description of Artificial Sequence: Synthetic oligonucleotide
cauguguagacagacaccc

SEQ ID NO: 1594422 - RNA, 19 nt, Artificial Sequence
  Description of Artificial Sequence: Synthetic oligonucleotide
ucugaaugcuaucauucug

SEQ ID NO: 1594423 - RNA, 19 nt, Artificial Sequence
  Description of Artificial Sequence: Synthetic oligonucleotide
accagcauauagcaauggc

SEQ ID NO: 1594424 - RNA, 19 nt, Artificial Sequence
  Description of Artificial Sequence: Synthetic oligonucleotide
acuaaagggagcacagucc

SEQ ID NO: 1594425 - RNA, 19 nt, Artificial Sequence
  Description of Artificial Sequence: Synthetic oligonucleotide
uuucuaaugcucccagcag

SEQ ID NO: 1594426 - RNA, 19 nt, Artificial Sequence
  Description of Artificial Sequence: Synthetic oligonucleotide
uccuuaaagaaagaugcug

SEQ ID NO: 1594427 - RNA, 19 nt, Artificial Sequence
  Description of Artificial Sequence: Synthetic oligonucleotide
agauguaggcugcaggguc

SEQ ID NO: 1594428 - RNA, 19 nt, Artificial Sequence
  Description of Artificial Sequence: Synthetic oligonucleotide
uuaucacacagacuaggga

SEQ ID NO: 1594429 - RNA, 19 nt, Artificial Sequence
  Description of Artificial Sequence: Synthetic oligonucleotide
agugucaccgagaagccgc

SEQ ID NO: 1594430 - RNA, 19 nt, Artificial Sequence
  Description of Artificial Sequence: Synthetic oligonucleotide
uccauagcaaguacacugc

SEQ ID NO: 1594431 - RNA, 19 nt, Artificial Sequence
  Description of Artificial Sequence: Synthetic oligonucleotide
uugucguagacagucacag

SEQ ID NO: 1594432 - RNA, 19 nt, Artificial Sequence
  Description of Artificial Sequence: Synthetic oligonucleotide
uccacugagugucaguugu

SEQ ID NO: 1594433 - RNA, 19 nt, Artificial Sequence
  Description of Artificial Sequence: Synthetic oligonucleotide
uccauacuggagaacucgg

SEQ ID NO: 1594434 - RNA, 19 nt, Artificial Sequence
  Description of Artificial Sequence: Synthetic oligonucleotide
auagccauaguugugccag

SEQ ID NO: 1594435 - RNA, 19 nt, Artificial Sequence
  Description of Artificial Sequence: Synthetic oligonucleotide
agaggacauguguagacag

SEQ ID NO: 1594436 - RNA, 19 nt, Artificial Sequence
  Description of Artificial Sequence: Synthetic oligonucleotide
gacuaaagggagcacaguc

SEQ ID NO: 1594437 - RNA, 19 nt, Artificial Sequence
  Description of Artificial Sequence: Synthetic oligonucleotide
aguugugccagucgaugac

SEQ ID NO: 1594438 - RNA, 19 nt, Artificial Sequence
  Description of Artificial Sequence: Synthetic oligonucleotide
agcacaaucggaugccggg

SEQ ID NO: 1594439 - RNA, 19 nt, Artificial Sequence
  Description of Artificial Sequence: Synthetic oligonucleotide
accacuagaggacaugugu

SEQ ID NO: 1594440 - RNA, 19 nt, Artificial Sequence
  Description of Artificial Sequence: Synthetic oligonucleotide
ugacccuagaagcagugga

SEQ ID NO: 1594441 - RNA, 19 nt, Artificial Sequence
  Description of Artificial Sequence: Synthetic oligonucleotide
uacgagcucaugcaaacac

SEQ ID NO: 1594442 - RNA, 19 nt, Artificial Sequence
  Description of Artificial Sequence: Synthetic oligonucleotide
aggaaacuuugagaaaagc

SEQ ID NO: 1594443 - RNA, 19 nt, Artificial Sequence
  Description of Artificial Sequence: Synthetic oligonucleotide
ucguccucuguccagcuag

SEQ ID NO: 1594444 - RNA, 19 nt, Artificial Sequence
  Description of Artificial Sequence: Synthetic oligonucleotide
aggacauguguagacagac

SEQ ID NO: 1594445 - RNA, 19 nt, Artificial Sequence
  Description of Artificial Sequence: Synthetic oligonucleotide
uuguagaaccccagcagug

SEQ ID NO: 1594446 - RNA, 19 nt, Artificial Sequence
  Description of Artificial Sequence: Synthetic oligonucleotide
agcauauagcaauggcagg

SEQ ID NO: 1594447 - RNA, 19 nt, Artificial Sequence
  Description of Artificial Sequence: Synthetic oligonucleotide
ugagugacuaaagggagca

SEQ ID NO: 1594448 - RNA, 19 nt, Artificial Sequence
  Description of Artificial Sequence: Synthetic oligonucleotide
gauaugccaguucucugcc

SEQ ID NO: 1594449 - RNA, 19 nt, Artificial Sequence
  Description of Artificial Sequence: Synthetic oligonucleotide
acuugaaguucacagcaca

SEQ ID NO: 1594450 - RNA, 19 nt, Artificial Sequence
  Description of Artificial Sequence: Synthetic oligonucleotide
cuuacgagcucaugcaaac

SEQ ID NO: 1594451 - RNA, 19 nt, Artificial Sequence
  Description of Artificial Sequence: Synthetic oligonucleotide
cugacaguccuucucagug

SEQ ID NO: 1594452 - RNA, 19 nt, Artificial Sequence
  Description of Artificial Sequence: Synthetic oligonucleotide
ugccugaaauacaacuuug

SEQ ID NO: 1594453 - RNA, 19 nt, Artificial Sequence
  Description of Artificial Sequence: Synthetic oligonucleotide
accgcaguugcuccgacuc

SEQ ID NO: 1594454 - RNA, 19 nt, Artificial Sequence
  Description of Artificial Sequence: Synthetic oligonucleotide
agggucaggaaacuuugag

SEQ ID NO: 1594455 - RNA, 19 nt, Artificial Sequence
  Description of Artificial Sequence: Synthetic oligonucleotide
ucacaagcagugccggccg

SEQ ID NO: 1594456 - RNA, 19 nt, Artificial Sequence
  Description of Artificial Sequence: Synthetic oligonucleotide
cuagaggacauguguagac

SEQ ID NO: 1594457 - RNA, 19 nt, Artificial Sequence
  Description of Artificial Sequence: Synthetic oligonucleotide
ugcugcaaguccaggggcg

SEQ ID NO: 1594458 - RNA, 19 nt, Artificial Sequence
  Description of Artificial Sequence: Synthetic oligonucleotide
gaagucuucguccucuguc

SEQ ID NO: 1594459 - RNA, 19 nt, Artificial Sequence
  Description of Artificial Sequence: Synthetic oligonucleotide
ucagugaaggcugaccucu

SEQ ID NO: 1594460 - RNA, 19 nt, Artificial Sequence
  Description of Artificial Sequence: Synthetic oligonucleotide
aaguacacugccugaaaua

SEQ ID NO: 1594461 - RNA, 19 nt, Artificial Sequence
  Description of Artificial Sequence: Synthetic oligonucleotide
uggaauagccauaguugug

SEQ ID NO: 1594462 - RNA, 19 nt, Artificial Sequence
  Description of Artificial Sequence: Synthetic oligonucleotide
acuuugacuccauacugga

SEQ ID NO: 1594463 - RNA, 19 nt, Artificial Sequence
  Description of Artificial Sequence: Synthetic oligonucleotide
cacuagaggacauguguag

SEQ ID NO: 1594464 - RNA, 19 nt, Artificial Sequence
  Description of Artificial Sequence: Synthetic oligonucleotide
agguucaggugggagaggc

SEQ ID NO: 1594465 - RNA, 19 nt, Artificial Sequence
  Description of Artificial Sequence: Synthetic oligonucleotide
ucuuacgagcucaugcaaa

SEQ ID NO: 1594466 - RNA, 19 nt, Artificial Sequence
  Description of Artificial Sequence: Synthetic oligonucleotide
ucguagacagucacagccc

SEQ ID NO: 1594467 - RNA, 19 nt, Artificial Sequence
  Description of Artificial Sequence: Synthetic oligonucleotide
uccuccgcguccuugaaga

SEQ ID NO: 1594468 - RNA, 19 nt, Artificial Sequence
  Description of Artificial Sequence: Synthetic oligonucleotide
uggaggucauuugugagug

SEQ ID NO: 1594469 - RNA, 19 nt, Artificial Sequence
  Description of Artificial Sequence: Synthetic oligonucleotide
gguuuagcuuuccagcagg

SEQ ID NO: 1594470 - RNA, 19 nt, Artificial Sequence
  Description of Artificial Sequence: Synthetic oligonucleotide
caguggauaguccucggcc

SEQ ID NO: 1594471 - RNA, 19 nt, Artificial Sequence
  Description of Artificial Sequence: Synthetic oligonucleotide
gaguuguagaaccccagca

SEQ ID NO: 1594472 - RNA, 19 nt, Artificial Sequence
  Description of Artificial Sequence: Synthetic oligonucleotide
cugaaauacaacuuugacu

SEQ ID NO: 1594473 - RNA, 19 nt, Artificial Sequence
  Description of Artificial Sequence: Synthetic oligonucleotide
ucgcccagcaccacgacga

SEQ ID NO: 1594474 - RNA, 19 nt, Artificial Sequence
  Description of Artificial Sequence: Synthetic oligonucleotide
uugaaguucacagcacaca

SEQ ID NO: 1594475 - RNA, 19 nt, Artificial Sequence
  Description of Artificial Sequence: Synthetic oligonucleotide
ugggccaaugacaacgcgu

SEQ ID NO: 1594476 - RNA, 19 nt, Artificial Sequence
  Description of Artificial Sequence: Synthetic oligonucleotide
acgacgaccacgugcgggg

SEQ ID NO: 1594477 - RNA, 19 nt, Artificial Sequence
  Description of Artificial Sequence: Synthetic oligonucleotide
aguggauaguccucggccu

SEQ ID NO: 1594478 - RNA, 19 nt, Artificial Sequence
  Description of Artificial Sequence: Synthetic oligonucleotide
agugacuaaagggagcaca

SEQ ID NO: 1594479 - RNA, 19 nt, Artificial Sequence
  Description of Artificial Sequence: Synthetic oligonucleotide
accacgacgaccacgugcg

SEQ ID NO: 1594480 - RNA, 19 nt, Artificial Sequence
  Description of Artificial Sequence: Synthetic oligonucleotide
gaaaggggaguacgugcgg

SEQ ID NO: 1594481 - RNA, 19 nt, Artificial Sequence
  Description of Artificial Sequence: Synthetic oligonucleotide
agcagcacaaucggaugcc

SEQ ID NO: 1594482 - RNA, 19 nt, Artificial Sequence
  Description of Artificial Sequence: Synthetic oligonucleotide
cuccauacuggagaacucg

SEQ ID NO: 1594483 - RNA, 19 nt, Artificial Sequence
  Description of Artificial Sequence: Synthetic oligonucleotide
cuuuucuaaugcucccagc

SEQ ID NO: 1594484 - RNA, 19 nt, Artificial Sequence
  Description of Artificial Sequence: Synthetic oligonucleotide
agccauggggugcagaacu

SEQ ID NO: 1594485 - RNA, 19 nt, Artificial Sequence
  Description of Artificial Sequence: Synthetic oligonucleotide
augcagacuccucaccauc

SEQ ID NO: 1594486 - RNA, 19 nt, Artificial Sequence
  Description of Artificial Sequence: Synthetic oligonucleotide
agguuuggaguuguagaac

SEQ ID NO: 1594487 - RNA, 19 nt, Artificial Sequence
  Description of Artificial Sequence: Synthetic oligonucleotide
guccgcugacccuagaagc

SEQ ID NO: 1594488 - RNA, 19 nt, Artificial Sequence
  Description of Artificial Sequence: Synthetic oligonucleotide
caccaucccgcucugacag

SEQ ID NO: 1594489 - RNA, 19 nt, Artificial Sequence
  Description of Artificial Sequence: Synthetic oligonucleotide
agcccaugauggaauagcc

SEQ ID NO: 1594490 - RNA, 19 nt, Artificial Sequence
  Description of Artificial Sequence: Synthetic oligonucleotide
ucgagguuuggaguuguag

SEQ ID NO: 1594491 - RNA, 19 nt, Artificial Sequence
  Description of Artificial Sequence: Synthetic oligonucleotide
uaguugugccagucgauga

SEQ ID NO: 1594492 - RNA, 19 nt, Artificial Sequence
  Description of Artificial Sequence: Synthetic oligonucleotide
agacuccucaccaucccgc

SEQ ID NO: 1594493 - RNA, 19 nt, Artificial Sequence
  Description of Artificial Sequence: Synthetic oligonucleotide
uugacuccauacuggagaa

SEQ ID NO: 1594494 - RNA, 19 nt, Artificial Sequence
  Description of Artificial Sequence: Synthetic oligonucleotide
aggggcgucuccuuaaaga

SEQ ID NO: 1594495 - RNA, 19 nt, Artificial Sequence
  Description of Artificial Sequence: Synthetic oligonucleotide
uuccggaacugguuuagcu

SEQ ID NO: 1594496 - RNA, 19 nt, Artificial Sequence
  Description of Artificial Sequence: Synthetic oligonucleotide
ggaaacuuugagaaaagca

SEQ ID NO: 1594497 - RNA, 19 nt, Artificial Sequence
  Description of Artificial Sequence: Synthetic oligonucleotide
guacgugcggcucagcuuc

SEQ ID NO: 1594498 - RNA, 19 nt, Artificial Sequence
  Description of Artificial Sequence: Synthetic oligonucleotide
uccaugucuuacgagcuca

SEQ ID NO: 1594499 - RNA, 19 nt, Artificial Sequence
  Description of Artificial Sequence: Synthetic oligonucleotide
guugcuccgacucccggag

SEQ ID NO: 1594500 - RNA, 19 nt, Artificial Sequence
  Description of Artificial Sequence: Synthetic oligonucleotide
agcucccagacucggcagc

SEQ ID NO: 1594501 - RNA, 19 nt, Artificial Sequence
  Description of Artificial Sequence: Synthetic oligonucleotide
cuuugacuccauacuggag

SEQ ID NO: 1594502 - RNA, 19 nt, Artificial Sequence
  Description of Artificial Sequence: Synthetic oligonucleotide
cucuggaaaggggaguacg

SEQ ID NO: 1594503 - RNA, 19 nt, Artificial Sequence
  Description of Artificial Sequence: Synthetic oligonucleotide
uguagaaccccagcagugu

SEQ ID NO: 1594504 - RNA, 19 nt, Artificial Sequence
  Description of Artificial Sequence: Synthetic oligonucleotide
agaaccccagcagugucac

SEQ ID NO: 1594505 - RNA, 19 nt, Artificial Sequence
  Description of Artificial Sequence: Synthetic oligonucleotide
uucucagugaaggcugacc

SEQ ID NO: 1594506 - RNA, 19 nt, Artificial Sequence
  Description of Artificial Sequence: Synthetic oligonucleotide
gcuaucauucugcaagagc

SEQ ID NO: 1594507 - RNA, 19 nt, Artificial Sequence
  Description of Artificial Sequence: Synthetic oligonucleotide
uggcuugucguagacaguc

SEQ ID NO: 1594508 - RNA, 19 nt, Artificial Sequence
  Description of Artificial Sequence: Synthetic oligonucleotide
gguccagaccacuagagga

SEQ ID NO: 1594509 - RNA, 19 nt, Artificial Sequence
  Description of Artificial Sequence: Synthetic oligonucleotide
uagaggacauguguagaca

SEQ ID NO: 1594510 - RNA, 19 nt, Artificial Sequence
  Description of Artificial Sequence: Synthetic oligonucleotide
cagacuagggaaggaaggc

SEQ ID NO: 1594511 - RNA, 19 nt, Artificial Sequence
  Description of Artificial Sequence: Synthetic oligonucleotide
aaggggaguacgugcggcu

SEQ ID NO: 1594512 - RNA, 19 nt, Artificial Sequence
  Description of Artificial Sequence: Synthetic oligonucleotide
cauaccauuuggccagcag

SEQ ID NO: 1594513 - RNA, 19 nt, Artificial Sequence
  Description of Artificial Sequence: Synthetic oligonucleotide
caccacgacgaccacgugc

SEQ ID NO: 1594514 - RNA, 19 nt, Artificial Sequence
  Description of Artificial Sequence: Synthetic oligonucleotide
caccaacuuccauagcaag

SEQ ID NO: 1594515 - RNA, 19 nt, Artificial Sequence
  Description of Artificial Sequence: Synthetic oligonucleotide
cagguccagaccacuagag

SEQ ID NO: 1594516 - RNA, 19 nt, Artificial Sequence
  Description of Artificial Sequence: Synthetic oligonucleotide
guuuagcuuuccagcaggg

SEQ ID NO: 1594517 - RNA, 19 nt, Artificial Sequence
  Description of Artificial Sequence: Synthetic oligonucleotide
cucugucaacuucacaauc

SEQ ID NO: 1594518 - RNA, 19 nt, Artificial Sequence
  Description of Artificial Sequence: Synthetic oligonucleotide
cugguuuagcuuuccagca

SEQ ID NO: 1594519 - RNA, 19 nt, Artificial Sequence
  Description of Artificial Sequence: Synthetic oligonucleotide
uucaggugggagaggcgcc

SEQ ID NO: 1594520 - RNA, 19 nt, Artificial Sequence
  Description of Artificial Sequence: Synthetic oligonucleotide
aauacaacuuugacuccau

SEQ ID NO: 1594521 - RNA, 19 nt, Artificial Sequence
  Description of Artificial Sequence: Synthetic oligonucleotide
ccugaaauacaacuuugac

SEQ ID NO: 1594522 - RNA, 19 nt, Artificial Sequence
  Description of Artificial Sequence: Synthetic oligonucleotide
gagcacaguccguugccag

SEQ ID NO: 1594523 - RNA, 19 nt, Artificial Sequence
  Description of Artificial Sequence: Synthetic oligonucleotide
ugucguagacagucacagc

SEQ ID NO: 1594524 - RNA, 19 nt, Artificial Sequence
  Description of Artificial Sequence: Synthetic oligonucleotide
uccggaacugguuuagcuu

SEQ ID NO: 1594525 - RNA, 19 nt, Artificial Sequence
  Description of Artificial Sequence: Synthetic oligonucleotide
agacucggcagcucuguca

SEQ ID NO: 1594526 - RNA, 19 nt, Artificial Sequence
  Description of Artificial Sequence: Synthetic oligonucleotide
uuuagcuuuccagcagggu

SEQ ID NO: 1594527 - RNA, 19 nt, Artificial Sequence
  Description of Artificial Sequence: Synthetic oligonucleotide
gacaacgcgugguacugca

SEQ ID NO: 1594528 - RNA, 19 nt, Artificial Sequence
  Description of Artificial Sequence: Synthetic oligonucleotide
ucucaucccaccgcaguug

SEQ ID NO: 1594529 - RNA, 19 nt, Artificial Sequence
  Description of Artificial Sequence: Synthetic oligonucleotide
gcaagagcucaucucgagg

SEQ ID NO: 1594530 - RNA, 19 nt, Artificial Sequence
  Description of Artificial Sequence: Synthetic oligonucleotide
caacgcgugguacugcaug

SEQ ID NO: 1594531 - RNA, 19 nt, Artificial Sequence
  Description of Artificial Sequence: Synthetic oligonucleotide
ugcuaucauucugcaagag

SEQ ID NO: 1594532 - RNA, 19 nt, Artificial Sequence
  Description of Artificial Sequence: Synthetic oligonucleotide
acuagaggacauguguaga

SEQ ID NO: 1594533 - RNA, 19 nt, Artificial Sequence
  Description of Artificial Sequence: Synthetic oligonucleotide
cacuugaaguucacagcac

SEQ ID NO: 1594534 - RNA, 19 nt, Artificial Sequence
  Description of Artificial Sequence: Synthetic oligonucleotide
agcaguggauaguccucgg

SEQ ID NO: 1594535 - RNA, 19 nt, Artificial Sequence
  Description of Artificial Sequence: Synthetic oligonucleotide
uaaagggagcacaguccgu

SEQ ID NO: 1594536 - RNA, 19 nt, Artificial Sequence
  Description of Artificial Sequence: Synthetic oligonucleotide
gacuccauacuggagaacu

SEQ ID NO: 1594537 - RNA, 19 nt, Artificial Sequence
  Description of Artificial Sequence: Synthetic oligonucleotide
acaagcagugccggccgcc

SEQ ID NO: 1594538 - RNA, 19 nt, Artificial Sequence
  Description of Artificial Sequence: Synthetic oligonucleotide
cagacuccucaccaucccg

SEQ ID NO: 1594539 - RNA, 19 nt, Artificial Sequence
  Description of Artificial Sequence: Synthetic oligonucleotide
gaugcuggcuugucguaga

SEQ ID NO: 1594540 - RNA, 19 nt, Artificial Sequence
  Description of Artificial Sequence: Synthetic oligonucleotide
augacaacgcgugguacug

SEQ ID NO: 1594541 - RNA, 19 nt, Artificial Sequence
  Description of Artificial Sequence: Synthetic oligonucleotide
uagcaaguacacugccuga

SEQ ID NO: 1594542 - RNA, 19 nt, Artificial Sequence
  Description of Artificial Sequence: Synthetic oligonucleotide
aguugcuccgacucccgga

SEQ ID NO: 1594543 - RNA, 19 nt, Artificial Sequence
  Description of Artificial Sequence: Synthetic oligonucleotide
cagcacaaucggaugccgg

SEQ ID NO: 1594544 - RNA, 19 nt, Artificial Sequence
  Description of Artificial Sequence: Synthetic oligonucleotide
guuuggaguuguagaaccc

SEQ ID NO: 1594545 - RNA, 19 nt, Artificial Sequence
  Description of Artificial Sequence: Synthetic oligonucleotide
uuccuuccggaacugguuu

SEQ ID NO: 1594546 - RNA, 19 nt, Artificial Sequence
  Description of Artificial Sequence: Synthetic oligonucleotide
agaccacuagaggacaugu

SEQ ID NO: 1594547 - RNA, 19 nt, Artificial Sequence
  Description of Artificial Sequence: Synthetic oligonucleotide
caagagcucaucucgaggu

SEQ ID NO: 1594548 - RNA, 19 nt, Artificial Sequence
  Description of Artificial Sequence: Synthetic oligonucleotide
cacagcccugauaugccag

SEQ ID NO: 1594549 - RNA, 19 nt, Artificial Sequence
  Description of Artificial Sequence: Synthetic oligonucleotide
caacuuccauagcaaguac

SEQ ID NO: 1594550 - RNA, 19 nt, Artificial Sequence
  Description of Artificial Sequence: Synthetic oligonucleotide
agacuagggaaggaaggcu

SEQ ID NO: 1594551 - RNA, 19 nt, Artificial Sequence
  Description of Artificial Sequence: Synthetic oligonucleotide
ugaccaguuugcucccaca

SEQ ID NO: 1594552 - RNA, 19 nt, Artificial Sequence
  Description of Artificial Sequence: Synthetic oligonucleotide
accaacuuccauagcaagu

SEQ ID NO: 1594553 - RNA, 19 nt, Artificial Sequence
  Description of Artificial Sequence: Synthetic oligonucleotide
cucugacaguccuucucag

SEQ ID NO: 1594554 - RNA, 19 nt, Artificial Sequence
  Description of Artificial Sequence: Synthetic oligonucleotide
agcaccacgacgaccacgu

SEQ ID NO: 1594555 - RNA, 19 nt, Artificial Sequence
  Description of Artificial Sequence: Synthetic oligonucleotide
uuccacgcgcccagcagca

SEQ ID NO: 1594556 - RNA, 19 nt, Artificial Sequence
  Description of Artificial Sequence: Synthetic oligonucleotide
gugagugacuaaagggagc

SEQ ID NO: 1594557 - RNA, 19 nt, Artificial Sequence
  Description of Artificial Sequence: Synthetic oligonucleotide
ugugcacaccaacuuccau

SEQ ID NO: 1594558 - RNA, 19 nt, Artificial Sequence
  Description of Artificial Sequence: Synthetic oligonucleotide
uuacgagcucaugcaaaca

SEQ ID NO: 1594559 - RNA, 19 nt, Artificial Sequence
  Description of Artificial Sequence: Synthetic oligonucleotide
agcuagugcugcucacaag

SEQ ID NO: 1594560 - RNA, 19 nt, Artificial Sequence
  Description of Artificial Sequence: Synthetic oligonucleotide
gguccgcugacccuagaag

SEQ ID NO: 1594561 - RNA, 19 nt, Artificial Sequence
  Description of Artificial Sequence: Synthetic oligonucleotide
uggauaguccucggccucc

SEQ ID NO: 1594562 - RNA, 19 nt, Artificial Sequence
  Description of Artificial Sequence: Synthetic oligonucleotide
cuugaagaccaggccauuc

SEQ ID NO: 1594563 - RNA, 19 nt, Artificial Sequence
  Description of Artificial Sequence: Synthetic oligonucleotide
agucuucguccucugucca

SEQ ID NO: 1594564 - RNA, 19 nt, Artificial Sequence
  Description of Artificial Sequence: Synthetic oligonucleotide
gccauaguugugccagucg

SEQ ID NO: 1594565 - RNA, 19 nt, Artificial Sequence
  Description of Artificial Sequence: Synthetic oligonucleotide
guagaaccccagcaguguc

SEQ ID NO: 1594566 - RNA, 19 nt, Artificial Sequence
  Description of Artificial Sequence: Synthetic oligonucleotide
gucgcccagcaccacgacg

SEQ ID NO: 1594567 - RNA, 19 nt, Artificial Sequence
  Description of Artificial Sequence: Synthetic oligonucleotide
guagacagacacccagguc

SEQ ID NO: 1594568 - RNA, 19 nt, Artificial Sequence
  Description of Artificial Sequence: Synthetic oligonucleotide
ugacuaaagggagcacagu

SEQ ID NO: 1594569 - RNA, 19 nt, Artificial Sequence
  Description of Artificial Sequence: Synthetic oligonucleotide
uaccaagcccaugauggaa

SEQ ID NO: 1594570 - RNA, 19 nt, Artificial Sequence
  Description of Artificial Sequence: Synthetic oligonucleotide
acuccauacuggagaacuc

SEQ ID NO: 1594571 - RNA, 19 nt, Artificial Sequence
  Description of Artificial Sequence: Synthetic oligonucleotide
cacgacgaccacgugcggg

SEQ ID NO: 1594572 - RNA, 19 nt, Artificial Sequence
  Description of Artificial Sequence: Synthetic oligonucleotide
acaguccguugccagcucu

SEQ ID NO: 1594573 - RNA, 19 nt, Artificial Sequence
  Description of Artificial Sequence: Synthetic oligonucleotide
gagcucaucucgagguuug

SEQ ID NO: 1594574 - RNA, 19 nt, Artificial Sequence
  Description of Artificial Sequence: Synthetic oligonucleotide
caguuugcucccacagaug

SEQ ID NO: 1594575 - RNA, 19 nt, Artificial Sequence
  Description of Artificial Sequence: Synthetic oligonucleotide
guccagaccacuagaggac

SEQ ID NO: 1594576 - RNA, 19 nt, Artificial Sequence
  Description of Artificial Sequence: Synthetic oligonucleotide
ugcuccgacucccggaguu

SEQ ID NO: 1594577 - RNA, 19 nt, Artificial Sequence
  Description of Artificial Sequence: Synthetic oligonucleotide
auaugccaguucucugcca

SEQ ID NO: 1594578 - RNA, 19 nt, Artificial Sequence
  Description of Artificial Sequence: Synthetic oligonucleotide
ggcagguccagaccacuag

SEQ ID NO: 1594579 - RNA, 19 nt, Artificial Sequence
  Description of Artificial Sequence: Synthetic oligonucleotide
agcagcacccaaacauguc

SEQ ID NO: 1594580 - RNA, 19 nt, Artificial Sequence
  Description of Artificial Sequence: Synthetic oligonucleotide
ucccaccgcaguugcuccg

SEQ ID NO: 1594581 - RNA, 19 nt, Artificial Sequence
  Description of Artificial Sequence: Synthetic oligonucleotide
cccuagaagcaguggauag

SEQ ID NO: 1594582 - RNA, 19 nt, Artificial Sequence
  Description of Artificial Sequence: Synthetic oligonucleotide
gauaguccucggccuccag

SEQ ID NO: 1594583 - RNA, 19 nt, Artificial Sequence
  Description of Artificial Sequence: Synthetic oligonucleotide
uugcucccacagaugcagc

SEQ ID NO: 1594584 - RNA, 19 nt, Artificial Sequence
  Description of Artificial Sequence: Synthetic oligonucleotide
acuagggaaggaaggcugu

SEQ ID NO: 1594585 - RNA, 19 nt, Artificial Sequence
  Description of Artificial Sequence: Synthetic oligonucleotide
gggccaaugacaacgcgug

SEQ ID NO: 1594586 - RNA, 19 nt, Artificial Sequence
  Description of Artificial Sequence: Synthetic oligonucleotide
gaccacuagaggacaugug

SEQ ID NO: 1594587 - RNA, 19 nt, Artificial Sequence
  Description of Artificial Sequence: Synthetic oligonucleotide
cuccgcguccuugaagacc

SEQ ID NO: 1594588 - RNA, 19 nt, Artificial Sequence
  Description of Artificial Sequence: Synthetic oligonucleotide
ucucgagguuuggaguugu

SEQ ID NO: 1594589 - RNA, 19 nt, Artificial Sequence
  Description of Artificial Sequence: Synthetic oligonucleotide
caagcccaugauggaauag

SEQ ID NO: 1594590 - RNA, 19 nt, Artificial Sequence
  Description of Artificial Sequence: Synthetic oligonucleotide
uccagcuagugcugcucac

SEQ ID NO: 1594591 - RNA, 19 nt, Artificial Sequence
  Description of Artificial Sequence: Synthetic oligonucleotide
ucccggaguuccuuccgga

SEQ ID NO: 1594592 - RNA, 19 nt, Artificial Sequence
  Description of Artificial Sequence: Synthetic oligonucleotide
guggcgguagugcucccug

SEQ ID NO: 1594593 - RNA, 19 nt, Artificial Sequence
  Description of Artificial Sequence: Synthetic oligonucleotide
gaguacgugcggcucagcu

SEQ ID NO: 1594594 - RNA, 19 nt, Artificial Sequence
  Description of Artificial Sequence: Synthetic oligonucleotide
gucuuacgagcucaugcaa

SEQ ID NO: 1594595 - RNA, 19 nt, Artificial Sequence
  Description of Artificial Sequence: Synthetic oligonucleotide
agcagggucaggaaacuuu

SEQ ID NO: 1594596 - RNA, 19 nt, Artificial Sequence
  Description of Artificial Sequence: Synthetic oligonucleotide
gaggacauguguagacaga

SEQ ID NO: 1594597 - RNA, 19 nt, Artificial Sequence
  Description of Artificial Sequence: Synthetic oligonucleotide
ggucauuugugagugacua

SEQ ID NO: 1594598 - RNA, 19 nt, Artificial Sequence
  Description of Artificial Sequence: Synthetic oligonucleotide
guaggcugcagggucugug

SEQ ID NO: 1594599 - RNA, 19 nt, Artificial Sequence
  Description of Artificial Sequence: Synthetic oligonucleotide
guaccaagcccaugaugga

SEQ ID NO: 1594600 - RNA, 19 nt, Artificial Sequence
  Description of Artificial Sequence: Synthetic oligonucleotide
cagugucaccgagaagccg

SEQ ID NO: 1594601 - RNA, 19 nt, Artificial Sequence
  Description of Artificial Sequence: Synthetic oligonucleotide
ugacaacgcgugguacugc

SEQ ID NO: 1594602 - RNA, 19 nt, Artificial Sequence
  Description of Artificial Sequence: Synthetic oligonucleotide
gacgaccacgugcggggcc

SEQ ID NO: 1594603 - RNA, 19 nt, Artificial Sequence
  Description of Artificial Sequence: Synthetic oligonucleotide
cagacacccagguccgcug

SEQ ID NO: 1594604 - RNA, 19 nt, Artificial Sequence
  Description of Artificial Sequence: Synthetic oligonucleotide
gcucugacaguccuucuca

SEQ ID NO: 1594605 - RNA, 19 nt, Artificial Sequence
  Description of Artificial Sequence: Synthetic oligonucleotide
guggauaguccucggccuc

SEQ ID NO: 1594606 - RNA, 19 nt, Artificial Sequence
  Description of Artificial Sequence: Synthetic oligonucleotide
acgagcucaugcaaacacu

SEQ ID NO: 1594607 - RNA, 19 nt, Artificial Sequence
  Description of Artificial Sequence: Synthetic oligonucleotide
auacaacuuugacuccaua

SEQ ID NO: 1594608 - RNA, 19 nt, Artificial Sequence
  Description of Artificial Sequence: Synthetic oligonucleotide
ccauagcaaguacacugcc

SEQ ID NO: 1594609 - RNA, 19 nt, Artificial Sequence
  Description of Artificial Sequence: Synthetic oligonucleotide
agacacccagguccgcuga

SEQ ID NO: 1594610 - RNA, 19 nt, Artificial Sequence
  Description of Artificial Sequence: Synthetic oligonucleotide
acagacacccagguccgcu

SEQ ID NO: 1594611 - RNA, 19 nt, Artificial Sequence
  Description of Artificial Sequence: Synthetic oligonucleotide
caugucuuacgagcucaug

SEQ ID NO: 1594612 - RNA, 19 nt, Artificial Sequence
  Description of Artificial Sequence: Synthetic oligonucleotide
caucccgcucugacagucc

SEQ ID NO: 1594613 - RNA, 19 nt, Artificial Sequence
  Description of Artificial Sequence: Synthetic oligonucleotide
agagcucaucucgagguuu

SEQ ID NO: 1594614 - RNA, 19 nt, Artificial Sequence
  Description of Artificial Sequence: Synthetic oligonucleotide
agguccgcugacccuagaa

SEQ ID NO: 1594615 - RNA, 19 nt, Artificial Sequence
  Description of Artificial Sequence: Synthetic oligonucleotide
cgugguacugcaugcgggg

SEQ ID NO: 1594616 - RNA, 19 nt, Artificial Sequence
  Description of Artificial Sequence: Synthetic oligonucleotide
aucucgagguuuggaguug

SEQ ID NO: 1594617 - RNA, 19 nt, Artificial Sequence
  Description of Artificial Sequence: Synthetic oligonucleotide
gugggagaggcgcccgaag

SEQ ID NO: 1594618 - RNA, 19 nt, Artificial Sequence
  Description of Artificial Sequence: Synthetic oligonucleotide
gagaagccgcucugggcca

SEQ ID NO: 1594619 - RNA, 19 nt, Artificial Sequence
  Description of Artificial Sequence: Synthetic oligonucleotide
accaagcccaugauggaau

SEQ ID NO: 1594620 - RNA, 19 nt, Artificial Sequence
  Description of Artificial Sequence: Synthetic oligonucleotide
ggucacacacagguucagg

SEQ ID NO: 1594621 - RNA, 19 nt, Artificial Sequence
  Description of Artificial Sequence: Synthetic oligonucleotide
cuggaggucauuugugagu

SEQ ID NO: 1594622 - RNA, 19 nt, Artificial Sequence
  Description of Artificial Sequence: Synthetic oligonucleotide
cagaccacuagaggacaug

SEQ ID NO: 1594623 - RNA, 19 nt, Artificial Sequence
  Description of Artificial Sequence: Synthetic oligonucleotide
ggggcgucuccuuaaagaa

SEQ ID NO: 1594624 - RNA, 19 nt, Artificial Sequence
  Description of Artificial Sequence: Synthetic oligonucleotide
ucauaccauuuggccagca

SEQ ID NO: 1594625 - RNA, 19 nt, Artificial Sequence
  Description of Artificial Sequence: Synthetic oligonucleotide
acucggcagcucugucaac

SEQ ID NO: 1594626 - RNA, 19 nt, Artificial Sequence
  Description of Artificial Sequence: Synthetic oligonucleotide
cugcaagagcucaucucga

SEQ ID NO: 1594627 - RNA, 19 nt, Artificial Sequence
  Description of Artificial Sequence: Synthetic oligonucleotide
ucaucccaccgcaguugcu

SEQ ID NO: 1594628 - RNA, 19 nt, Artificial Sequence
  Description of Artificial Sequence: Synthetic oligonucleotide
cccaaacauguccaccacc

SEQ ID NO: 1594629 - RNA, 19 nt, Artificial Sequence
  Description of Artificial Sequence: Synthetic oligonucleotide
gggagcacaguccguugcc

SEQ ID NO: 1594630 - RNA, 19 nt, Artificial Sequence
  Description of Artificial Sequence: Synthetic oligonucleotide
gcaguggauaguccucggc

SEQ ID NO: 1594631 - RNA, 19 nt, Artificial Sequence
  Description of Artificial Sequence: Synthetic oligonucleotide
ccguugccagcucucaucc

SEQ ID NO: 1594632 - RNA, 19 nt, Artificial Sequence
  Description of Artificial Sequence: Synthetic oligonucleotide
cuccgacucccggaguucc

SEQ ID NO: 1594633 - RNA, 19 nt, Artificial Sequence
  Description of Artificial Sequence: Synthetic oligonucleotide
ccauaguugugccagucga

SEQ ID NO: 1594634 - RNA, 19 nt, Artificial Sequence
  Description of Artificial Sequence: Synthetic oligonucleotide
uagccauaguugugccagu

SEQ ID NO: 1594635 - RNA, 19 nt, Artificial Sequence
  Description of Artificial Sequence: Synthetic oligonucleotide
ggccaaugacaacgcgugg

SEQ ID NO: 1594636 - RNA, 19 nt, Artificial Sequence
  Description of Artificial Sequence: Synthetic oligonucleotide
gcacaaucggaugccgggg

SEQ ID NO: 1594637 - RNA, 19 nt, Artificial Sequence
  Description of Artificial Sequence: Synthetic oligonucleotide
cuagggaaggaaggcuguc

SEQ ID NO: 1594638 - RNA, 19 nt, Artificial Sequence
  Description of Artificial Sequence: Synthetic oligonucleotide
gacacccagguccgcugac

SEQ ID NO: 1594639 - RNA, 19 nt, Artificial Sequence
  Description of Artificial Sequence: Synthetic oligonucleotide
acccuagaagcaguggaua

SEQ ID NO: 1594640 - RNA, 19 nt, Artificial Sequence
  Description of Artificial Sequence: Synthetic oligonucleotide
gucaccgagaagccgcucu

SEQ ID NO: 1594641 - RNA, 19 nt, Artificial Sequence
  Description of Artificial Sequence: Synthetic oligonucleotide
gagugacuaaagggagcac

SEQ ID NO: 1594642 - RNA, 19 nt, Artificial Sequence
  Description of Artificial Sequence: Synthetic oligonucleotide
cacaagcagugccggccgc

SEQ ID NO: 1594643 - RNA, 19 nt, Artificial Sequence
  Description of Artificial Sequence: Synthetic oligonucleotide
ugggcagguccagaccacu

SEQ ID NO: 1594644 - RNA, 19 nt, Artificial Sequence
  Description of Artificial Sequence: Synthetic oligonucleotide
aggccugguggguucugga

SEQ ID NO: 1594645 - RNA, 19 nt, Artificial Sequence
  Description of Artificial Sequence: Synthetic oligonucleotide
gcgugguacugcaugcggg

SEQ ID NO: 1594646 - RNA, 19 nt, Artificial Sequence
  Description of Artificial Sequence: Synthetic oligonucleotide
cuucucagugaaggcugac

SEQ ID NO: 1594647 - RNA, 19 nt, Artificial Sequence
  Description of Artificial Sequence: Synthetic oligonucleotide
cucauaccauuuggccagc

SEQ ID NO: 1594648 - RNA, 19 nt, Artificial Sequence
  Description of Artificial Sequence: Synthetic oligonucleotide
gggccauguaccaagccca

SEQ ID NO: 1594649 - RNA, 19 nt, Artificial Sequence
  Description of Artificial Sequence: Synthetic oligonucleotide
gcagcacaaucggaugccg

SEQ ID NO: 1594650 - RNA, 19 nt, Artificial Sequence
  Description of Artificial Sequence: Synthetic oligonucleotide
agcccacaaaccagcauau

SEQ ID NO: 1594651 - RNA, 19 nt, Artificial Sequence
  Description of Artificial Sequence: Synthetic oligonucleotide
cagcucucaucccaccgca

SEQ ID NO: 1594652 - RNA, 19 nt, Artificial Sequence
  Description of Artificial Sequence: Synthetic oligonucleotide
gaggcgcccgaagaacuuc

SEQ ID NO: 1594653 - RNA, 19 nt, Artificial Sequence
  Description of Artificial Sequence: Synthetic oligonucleotide
agccgcccucgcuuccacg

SEQ ID NO: 1594654 - RNA, 19 nt, Artificial Sequence
  Description of Artificial Sequence: Synthetic oligonucleotide
caucucgagguuuggaguu

SEQ ID NO: 1594655 - RNA, 19 nt, Artificial Sequence
  Description of Artificial Sequence: Synthetic oligonucleotide
caggccugguggguucugg

SEQ ID NO: 1594656 - RNA, 19 nt, Artificial Sequence
  Description of Artificial Sequence: Synthetic oligonucleotide
gcagguccagaccacuaga

SEQ ID NO: 1594657 - RNA, 19 nt, Artificial Sequence
  Description of Artificial Sequence: Synthetic oligonucleotide
ccgagaagccgcucugggc

SEQ ID NO: 1594658 - RNA, 19 nt, Artificial Sequence
  Description of Artificial Sequence: Synthetic oligonucleotide
uugcuccgacucccggagu

SEQ ID NO: 1594659 - RNA, 19 nt, Artificial Sequence
  Description of Artificial Sequence: Synthetic oligonucleotide
gccgcccucgcuuccacgc

SEQ ID NO: 1594660 - RNA, 19 nt, Artificial Sequence
  Description of Artificial Sequence: Synthetic oligonucleotide
ggagaacucgggguccagc

SEQ ID NO: 1594661 - RNA, 19 nt, Artificial Sequence
  Description of Artificial Sequence: Synthetic oligonucleotide
aagccgcucugggccaaug

SEQ ID NO: 1594662 - RNA, 19 nt, Artificial Sequence
  Description of Artificial Sequence: Synthetic oligonucleotide
gacagacacccagguccgc

SEQ ID NO: 1594663 - RNA, 19 nt, Artificial Sequence
  Description of Artificial Sequence: Synthetic oligonucleotide
ccauggggugcagaacugg

SEQ ID NO: 1594664 - RNA, 19 nt, Artificial Sequence
  Description of Artificial Sequence: Synthetic oligonucleotide
gacccuagaagcaguggau

SEQ ID NO: 1594665 - RNA, 19 nt, Artificial Sequence
  Description of Artificial Sequence: Synthetic oligonucleotide
cagguucaggugggagagg

SEQ ID NO: 1594666 - RNA, 19 nt, Artificial Sequence
  Description of Artificial Sequence: Synthetic oligonucleotide
cccaugcagacuccucacc

SEQ ID NO: 1594667 - RNA, 19 nt, Artificial Sequence
  Description of Artificial Sequence: Synthetic oligonucleotide
accaucccgcucugacagu

SEQ ID NO: 1594668 - RNA, 19 nt, Artificial Sequence
  Description of Artificial Sequence: Synthetic oligonucleotide
gcaaacacuugaaguucac

SEQ ID NO: 1594669 - RNA, 19 nt, Artificial Sequence
  Description of Artificial Sequence: Synthetic oligonucleotide
cagacucggcagcucuguc

SEQ ID NO: 1594670 - RNA, 19 nt, Artificial Sequence
  Description of Artificial Sequence: Synthetic oligonucleotide
cucggccuccagccauggg

SEQ ID NO: 1594671 - RNA, 19 nt, Artificial Sequence
  Description of Artificial Sequence: Synthetic oligonucleotide
cucggcagcucugucaacu

SEQ ID NO: 1594672 - RNA, 19 nt, Artificial Sequence
  Description of Artificial Sequence: Synthetic oligonucleotide
agaggccccuucccuguua

SEQ ID NO: 1594673 - RNA, 19 nt, Artificial Sequence
  Description of Artificial Sequence: Synthetic oligonucleotide
gcccaugcagacuccucac

SEQ ID NO: 1594674 - RNA, 19 nt, Artificial Sequence
  Description of Artificial Sequence: Synthetic oligonucleotide
ugcucccugagaggccccu

SEQ ID NO: 1594675 - RNA, 19 nt, Artificial Sequence
  Description of Artificial Sequence: Synthetic oligonucleotide
ccacuagaggacaugugua

SEQ ID NO: 1594676 - RNA, 19 nt, Artificial Sequence
  Description of Artificial Sequence: Synthetic oligonucleotide
cagccauggggugcagaac

SEQ ID NO: 1594677 - RNA, 19 nt, Artificial Sequence
  Description of Artificial Sequence: Synthetic oligonucleotide
cuucaugggcagguccaga

SEQ ID NO: 1594678 - RNA, 19 nt, Artificial Sequence
  Description of Artificial Sequence: Synthetic oligonucleotide
gaccacgugcggggccgcg

SEQ ID NO: 1594679 - RNA, 19 nt, Artificial Sequence
  Description of Artificial Sequence: Synthetic oligonucleotide
ccaguuugcucccacagau

SEQ ID NO: 1594680 - RNA, 19 nt, Artificial Sequence
  Description of Artificial Sequence: Synthetic oligonucleotide
ggggaguacgugcggcuca

SEQ ID NO: 1594681 - RNA, 19 nt, Artificial Sequence
  Description of Artificial Sequence: Synthetic oligonucleotide
aggcgcccgaagaacuucu

SEQ ID NO: 1594682 - RNA, 19 nt, Artificial Sequence
  Description of Artificial Sequence: Synthetic oligonucleotide
cgcgugguacugcaugcgg

SEQ ID NO: 1594683 - RNA, 19 nt, Artificial Sequence
  Description of Artificial Sequence: Synthetic oligonucleotide
cagugccggccgcccaugc

SEQ ID NO: 1594684 - RNA, 19 nt, Artificial Sequence
  Description of Artificial Sequence: Synthetic oligonucleotide
gccaaugacaacgcguggu

SEQ ID NO: 1594685 - RNA, 19 nt, Artificial Sequence
  Description of Artificial Sequence: Synthetic oligonucleotide
ggccgcgaccgccagccgc

SEQ ID NO: 1594686 - RNA, 19 nt, Artificial Sequence
  Description of Artificial Sequence: Synthetic oligonucleotide
ucccgcucugacaguccuu

SEQ ID NO: 1594687 - RNA, 19 nt, Artificial Sequence
  Description of Artificial Sequence: Synthetic oligonucleotide
cauguaccaagcccaugau

SEQ ID NO: 1594688 - RNA, 19 nt, Artificial Sequence
  Description of Artificial Sequence: Synthetic oligonucleotide
ugucaccgagaagccgcuc

SEQ ID NO: 1594689 - RNA, 19 nt, Artificial Sequence
  Description of Artificial Sequence: Synthetic oligonucleotide
ggagcacaguccguugcca

SEQ ID NO: 1594690 - RNA, 19 nt, Artificial Sequence
  Description of Artificial Sequence: Synthetic oligonucleotide
gaggccccuucccuguuau

SEQ ID NO: 1594691 - RNA, 19 nt, Artificial Sequence
  Description of Artificial Sequence: Synthetic oligonucleotide
cugcaaguccaggggcguc

SEQ ID NO: 1594692 - RNA, 19 nt, Artificial Sequence
  Description of Artificial Sequence: Synthetic oligonucleotide
gcgcccgaagaacuucuca

SEQ ID NO: 1594693 - RNA, 19 nt, Artificial Sequence
  Description of Artificial Sequence: Synthetic oligonucleotide
cauuggucacacacagguu

SEQ ID NO: 1594694 - RNA, 19 nt, Artificial Sequence
  Description of Artificial Sequence: Synthetic oligonucleotide
ccacgcgcccagcagcagc

SEQ ID NO: 1594695 - RNA, 19 nt, Artificial Sequence
  Description of Artificial Sequence: Synthetic oligonucleotide
cccgcucugacaguccuuc

SEQ ID NO: 1594696 - RNA, 19 nt, Artificial Sequence
  Description of Artificial Sequence: Synthetic oligonucleotide
gggguccaggggcucugag

SEQ ID NO: 1594697 - RNA, 19 nt, Artificial Sequence
  Description of Artificial Sequence: Synthetic oligonucleotide
acaacgcgugguacugcau

SEQ ID NO: 1594698 - RNA, 19 nt, Artificial Sequence
  Description of Artificial Sequence: Synthetic oligonucleotide
gcacaccaacuuccauagc

SEQ ID NO: 1594699 - RNA, 19 nt, Artificial Sequence
  Description of Artificial Sequence: Synthetic oligonucleotide
ugggguccaggggcucuga

SEQ ID NO: 1594700 - RNA, 19 nt, Artificial Sequence
  Description of Artificial Sequence: Synthetic oligonucleotide
gcucucaucccaccgcagu

SEQ ID NO: 1594701 - RNA, 19 nt, Artificial Sequence
  Description of Artificial Sequence: Synthetic oligonucleotide
gggucugugcacaccaacu

SEQ ID NO: 1594702 - RNA, 19 nt, Artificial Sequence
  Description of Artificial Sequence: Synthetic oligonucleotide
ccgcucugggccaaugaca

SEQ ID NO: 1594703 - RNA, 19 nt, Artificial Sequence
  Description of Artificial Sequence: Synthetic oligonucleotide
gccauggggugcagaacug

SEQ ID NO: 1594704 - RNA, 19 nt, Artificial Sequence
  Description of Artificial Sequence: Synthetic oligonucleotide
ccgcugacccuagaagcag

SEQ ID NO: 1594705 - RNA, 19 nt, Artificial Sequence
  Description of Artificial Sequence: Synthetic oligonucleotide
gccagcagcacaaucggau

SEQ ID NO: 1594706 - RNA, 19 nt, Artificial Sequence
  Description of Artificial Sequence: Synthetic oligonucleotide
acgcgcccagcagcagcac

SEQ ID NO: 1594707 - RNA, 19 nt, Artificial Sequence
  Description of Artificial Sequence: Synthetic oligonucleotide
agaagccgcucugggccaa

SEQ ID NO: 1594708 - RNA, 19 nt, Artificial Sequence
  Description of Artificial Sequence: Synthetic oligonucleotide
accacgugcggggccgcga

SEQ ID NO: 1594709 - RNA, 19 nt, Artificial Sequence
  Description of Artificial Sequence: Synthetic oligonucleotide
cacacagguucagguggga

SEQ ID NO: 1594710 - RNA, 19 nt, Artificial Sequence
  Description of Artificial Sequence: Synthetic oligonucleotide
gcucuggaaaggggaguac

SEQ ID NO: 1594711 - RNA, 19 nt, Artificial Sequence
  Description of Artificial Sequence: Synthetic oligonucleotide
ggcuugucguagacaguca

SEQ ID NO: 1594712 - RNA, 19 nt, Artificial Sequence
  Description of Artificial Sequence: Synthetic oligonucleotide
cucgagguuuggaguugua

SEQ ID NO: 1594713 - RNA, 19 nt, Artificial Sequence
  Description of Artificial Sequence: Synthetic oligonucleotide
ggauaguccucggccucca

SEQ ID NO: 1594714 - RNA, 19 nt, Artificial Sequence
  Description of Artificial Sequence: Synthetic oligonucleotide
ccagcuagugcugcucaca

SEQ ID NO: 1594715 - RNA, 19 nt, Artificial Sequence
  Description of Artificial Sequence: Synthetic oligonucleotide
ccggaacugguuuagcuuu

SEQ ID NO: 1594716 - RNA, 19 nt, Artificial Sequence
  Description of Artificial Sequence: Synthetic oligonucleotide
ccagguccgcugacccuag

SEQ ID NO: 1594717 - RNA, 19 nt, Artificial Sequence
  Description of Artificial Sequence: Synthetic oligonucleotide
cagccgcccucgcuuccac

SEQ ID NO: 1594718 - RNA, 19 nt, Artificial Sequence
  Description of Artificial Sequence: Synthetic oligonucleotide
gcgaccgccagccgcccuc

SEQ ID NO: 1594719 - RNA, 19 nt, Artificial Sequence
  Description of Artificial Sequence: Synthetic oligonucleotide
ccuccgcguccuugaagac

SEQ ID NO: 1594720 - RNA, 19 nt, Artificial Sequence
  Description of Artificial Sequence: Synthetic oligonucleotide
ccaagcccaugauggaaua

SEQ ID NO: 1594721 - RNA, 19 nt, Artificial Sequence
  Description of Artificial Sequence: Synthetic oligonucleotide
ggaguacgugcggcucagc

SEQ ID NO: 1594722 - RNA, 19 nt, Artificial Sequence
  Description of Artificial Sequence: Synthetic oligonucleotide
ccgcccucgcuuccacgcg

SEQ ID NO: 1594723 - RNA, 19 nt, Artificial Sequence
  Description of Artificial Sequence: Synthetic oligonucleotide
ccacgugcggggccgcgac

SEQ ID NO: 1594724 - RNA, 19 nt, Artificial Sequence
  Description of Artificial Sequence: Synthetic oligonucleotide
gcccagcaccacgacgacc

SEQ ID NO: 1594725 - RNA, 19 nt, Artificial Sequence
  Description of Artificial Sequence: Synthetic oligonucleotide
gugucaccgagaagccgcu

SEQ ID NO: 1594726 - RNA, 19 nt, Artificial Sequence
  Description of Artificial Sequence: Synthetic oligonucleotide
ggugggagaggcgcccgaa

SEQ ID NO: 1594727 - RNA, 19 nt, Artificial Sequence
  Description of Artificial Sequence: Synthetic oligonucleotide
gcgucuccuuaaagaaaga

SEQ ID NO: 1594728 - RNA, 19 nt, Artificial Sequence
  Description of Artificial Sequence: Synthetic oligonucleotide
ccacgacgaccacgugcgg

SEQ ID NO: 1594729 - RNA, 19 nt, Artificial Sequence
  Description of Artificial Sequence: Synthetic oligonucleotide
caccgcaguugcuccgacu

SEQ ID NO: 1594730 - RNA, 19 nt, Artificial Sequence
  Description of Artificial Sequence: Synthetic oligonucleotide
cgugcggcucagcuucaug

SEQ ID NO: 1594731 - RNA, 19 nt, Artificial Sequence
  Description of Artificial Sequence: Synthetic oligonucleotide
ggucuucccgcauggcauu

SEQ ID NO: 1594732 - RNA, 19 nt, Artificial Sequence
  Description of Artificial Sequence: Synthetic oligonucleotide
gcuccgacucccggaguuc

SEQ ID NO: 1594733 - RNA, 19 nt, Artificial Sequence
  Description of Artificial Sequence: Synthetic oligonucleotide
cgcccucgcuuccacgcgc

SEQ ID NO: 1594734 - RNA, 19 nt, Artificial Sequence
  Description of Artificial Sequence: Synthetic oligonucleotide
ccgcccaugcagacuccuc

SEQ ID NO: 1594735 - RNA, 19 nt, Artificial Sequence
  Description of Artificial Sequence: Synthetic oligonucleotide
cccuguuaucacacagacu

SEQ ID NO: 1594736 - RNA, 19 nt, Artificial Sequence
  Description of Artificial Sequence: Synthetic oligonucleotide
gccggccgcccaugcagac

SEQ ID NO: 1594737 - RNA, 19 nt, Artificial Sequence
  Description of Artificial Sequence: Synthetic oligonucleotide
gcugcaaguccaggggcgu

SEQ ID NO: 1594738 - RNA, 19 nt, Artificial Sequence
  Description of Artificial Sequence: Synthetic oligonucleotide
cagguccgcugacccuaga

SEQ ID NO: 1594739 - RNA, 19 nt, Artificial Sequence
  Description of Artificial Sequence: Synthetic oligonucleotide
cccucgcuuccacgcgccc

SEQ ID NO: 1594740 - RNA, 19 nt, Artificial Sequence
  Description of Artificial Sequence: Synthetic oligonucleotide
cccagguccgcugacccua

SEQ ID NO: 1594741 - RNA, 19 nt, Artificial Sequence
  Description of Artificial Sequence: Synthetic oligonucleotide
gggccgcgaccgccagccg

SEQ ID NO: 1594742 - RNA, 19 nt, Artificial Sequence
  Description of Artificial Sequence: Synthetic oligonucleotide
ccgcauggcauuggucaca

SEQ ID NO: 1594743 - RNA, 19 nt, Artificial Sequence
  Description of Artificial Sequence: Synthetic oligonucleotide
ccucgcuuccacgcgccca

SEQ ID NO: 1594744 - RNA, 19 nt, Artificial Sequence
  Description of Artificial Sequence: Synthetic oligonucleotide
ccaggggcgucuccuuaaa

SEQ ID NO: 1594745 - RNA, 19 nt, Artificial Sequence
  Description of Artificial Sequence: Synthetic oligonucleotide
gaagccgcucugggccaau

SEQ ID NO: 1594746 - RNA, 19 nt, Artificial Sequence
  Description of Artificial Sequence: Synthetic oligonucleotide
ccaugucuuacgagcucau

SEQ ID NO: 1594747 - RNA, 19 nt, Artificial Sequence
  Description of Artificial Sequence: Synthetic oligonucleotide
cccaccgcaguugcuccga

SEQ ID NO: 1594748 - RNA, 19 nt, Artificial Sequence
  Description of Artificial Sequence: Synthetic oligonucleotide
ccagacucggcagcucugu

SEQ ID NO: 1594749 - RNA, 19 nt, Artificial Sequence
  Description of Artificial Sequence: Synthetic oligonucleotide
gcccacaaaccagcauaua

SEQ ID NO: 1594750 - RNA, 19 nt, Artificial Sequence
  Description of Artificial Sequence: Synthetic oligonucleotide
ggccgcccaugcagacucc

SEQ ID NO: 1594751 - RNA, 19 nt, Artificial Sequence
  Description of Artificial Sequence: Synthetic oligonucleotide
ccgcguccuugaagaccag

SEQ ID NO: 1594752 - RNA, 19 nt, Artificial Sequence
  Description of Artificial Sequence: Synthetic oligonucleotide
cgacgaccacgugcggggc

SEQ ID NO: 1594753 - RNA, 19 nt, Artificial Sequence
  Description of Artificial Sequence: Synthetic oligonucleotide
cgaccgccagccgcccucg

SEQ ID NO: 1594754 - RNA, 19 nt, Artificial Sequence
  Description of Artificial Sequence: Synthetic oligonucleotide
ggacaugcuggaggugcuu

SEQ ID NO: 1594755 - RNA, 19 nt, Artificial Sequence
  Description of Artificial Sequence: Synthetic oligonucleotide
gccgcccaugcagacuccu

SEQ ID NO: 1594756 - RNA, 19 nt, Artificial Sequence
  Description of Artificial Sequence: Synthetic oligonucleotide
ccucaccaucccgcucuga

SEQ ID NO: 1594757 - RNA, 19 nt, Artificial Sequence
  Description of Artificial Sequence: Synthetic oligonucleotide
ccgcgaccgccagccgccc

SEQ ID NO: 1594758 - RNA, 19 nt, Artificial Sequence
  Description of Artificial Sequence: Synthetic oligonucleotide
cgaccacgugcggggccgc

SEQ ID NO: 1594759 - RNA, 19 nt, Artificial Sequence
  Description of Artificial Sequence: Synthetic oligonucleotide
cggggccgcgaccgccagc

SEQ ID NO: 1594760 - RNA, 19 nt, Artificial Sequence
  Description of Artificial Sequence: Synthetic oligonucleotide
ccuugaagaccaggccauu

SEQ ID NO: 1594761 - RNA, 19 nt, Artificial Sequence
  Description of Artificial Sequence: Synthetic oligonucleotide
ccggccgcccaugcagacu

SEQ ID NO: 1594762 - RNA, 19 nt, Artificial Sequence
  Description of Artificial Sequence: Synthetic oligonucleotide
cgcgaccgccagccgcccu

SEQ ID NO: 1594763 - RNA, 19 nt, Artificial Sequence
  Description of Artificial Sequence: Synthetic oligonucleotide
aauugauggagcuaauagc

SEQ ID NO: 1594764 - RNA, 19 nt, Artificial Sequence
  Description of Artificial Sequence: Synthetic oligonucleotide
auuugugcaggcuagaggc

SEQ ID NO: 1594765 - RNA, 19 nt, Artificial Sequence
  Description of Artificial Sequence: Synthetic oligonucleotide
uuuaauacgaacucuuagg

SEQ ID NO: 1594766 - RNA, 19 nt, Artificial Sequence
  Description of Artificial Sequence: Synthetic oligonucleotide
aaauugauggagcuaauag

SEQ ID NO: 1594767 - RNA, 19 nt, Artificial Sequence
  Description of Artificial Sequence: Synthetic oligonucleotide
aguaacuaacuauacaggg

SEQ ID NO: 1594768 - RNA, 19 nt, Artificial Sequence
  Description of Artificial Sequence: Synthetic oligonucleotide
aacauucucacagagugcc

SEQ ID NO: 1594769 - RNA, 19 nt, Artificial Sequence
  Description of Artificial Sequence: Synthetic oligonucleotide
auuaguuuguaauuucugg

SEQ ID NO: 1594770 - RNA, 19 nt, Artificial Sequence
  Description of Artificial Sequence: Synthetic oligonucleotide
aauacgaacucuuaggcaa

SEQ ID NO: 1594771 - RNA, 19 nt, Artificial Sequence
  Description of Artificial Sequence: Synthetic oligonucleotide
aacuauacaggguagcaag

SEQ ID NO: 1594772 - RNA, 19 nt, Artificial Sequence
  Description of Artificial Sequence: Synthetic oligonucleotide
aaggcauuagaccucacuc

SEQ ID NO: 1594773 - RNA, 19 nt, Artificial Sequence
  Description of Artificial Sequence: Synthetic oligonucleotide
acaacauucucacagagug

SEQ ID NO: 1594774 - RNA, 19 nt, Artificial Sequence
  Description of Artificial Sequence: Synthetic oligonucleotide
uuaauacgaacucuuaggc

SEQ ID NO: 1594775 - RNA, 19 nt, Artificial Sequence
  Description of Artificial Sequence: Synthetic oligonucleotide
agcaacaucggccuggacc

SEQ ID NO: 1594776 - RNA, 19 nt, Artificial Sequence
  Description of Artificial Sequence: Synthetic oligonucleotide
uguuuguaagacuuugucg

SEQ ID NO: 1594777 - RNA, 19 nt, Artificial Sequence
  Description of Artificial Sequence: Synthetic oligonucleotide
ucuuaggcaaaacaaaaca

SEQ ID NO: 1594778 - RNA, 19 nt, Artificial Sequence
  Description of Artificial Sequence: Synthetic oligonucleotide
uuagaccucacucauagac

SEQ ID NO: 1594779 - RNA, 19 nt, Artificial Sequence
  Description of Artificial Sequence: Synthetic oligonucleotide
ggugccuagaaauugaugg

SEQ ID NO: 1594780 - RNA, 19 nt, Artificial Sequence
  Description of Artificial Sequence: Synthetic oligonucleotide
gagauuaccaucuagauau

SEQ ID NO: 1594781 - RNA, 19 nt, Artificial Sequence
  Description of Artificial Sequence: Synthetic oligonucleotide
accuaaguaucacugaggg

SEQ ID NO: 1594782 - RNA, 19 nt, Artificial Sequence
  Description of Artificial Sequence: Synthetic oligonucleotide
gaagccucaacauuuacac

SEQ ID NO: 1594783 - RNA, 19 nt, Artificial Sequence
  Description of Artificial Sequence: Synthetic oligonucleotide
auaggaagagauuaccauc

SEQ ID NO: 1594784 - RNA, 19 nt, Artificial Sequence
  Description of Artificial Sequence: Synthetic oligonucleotide
uauugcucaaucaacuucu

SEQ ID NO: 1594785 - RNA, 19 nt, Artificial Sequence
  Description of Artificial Sequence: Synthetic oligonucleotide
uaagacuuugucgauaugc

SEQ ID NO: 1594786 - RNA, 19 nt, Artificial Sequence
  Description of Artificial Sequence: Synthetic oligonucleotide
cuagauauugcccugggug

SEQ ID NO: 1594787 - RNA, 19 nt, Artificial Sequence
  Description of Artificial Sequence: Synthetic oligonucleotide
guuuguaagacuuugucga

SEQ ID NO: 1594788 - RNA, 19 nt, Artificial Sequence
  Description of Artificial Sequence: Synthetic oligonucleotide
auauugcucaaucaacuuc

SEQ ID NO: 1594789 - RNA, 19 nt, Artificial Sequence
  Description of Artificial Sequence: Synthetic oligonucleotide
augagaauuagugguagcc

SEQ ID NO: 1594790 - RNA, 19 nt, Artificial Sequence
  Description of Artificial Sequence: Synthetic oligonucleotide
aagaggcuccuucacacac

SEQ ID NO: 1594791 - RNA, 19 nt, Artificial Sequence
  Description of Artificial Sequence: Synthetic oligonucleotide
agaucuugguccuaaaaug

SEQ ID NO: 1594792 - RNA, 19 nt, Artificial Sequence
  Description of Artificial Sequence: Synthetic oligonucleotide
aaaaccuuaggagacccuc

SEQ ID NO: 1594793 - RNA, 19 nt, Artificial Sequence
  Description of Artificial Sequence: Synthetic oligonucleotide
auuaccaucuagauauugc

SEQ ID NO: 1594794 - RNA, 19 nt, Artificial Sequence
  Description of Artificial Sequence: Synthetic oligonucleotide
uaacuaacuauacagggua

SEQ ID NO: 1594795 - RNA, 19 nt, Artificial Sequence
  Description of Artificial Sequence: Synthetic oligonucleotide
uuaguuuguaauuucuggu

SEQ ID NO: 1594796 - RNA, 19 nt, Artificial Sequence
  Description of Artificial Sequence: Synthetic oligonucleotide
agccucaacauuuacacug

SEQ ID NO: 1594797 - RNA, 19 nt, Artificial Sequence
  Description of Artificial Sequence: Synthetic oligonucleotide
gaauacuaugauuuccaag

SEQ ID NO: 1594798 - RNA, 19 nt, Artificial Sequence
  Description of Artificial Sequence: Synthetic oligonucleotide
uggacacuaagccuuaccc

SEQ ID NO: 1594799 - RNA, 19 nt, Artificial Sequence
  Description of Artificial Sequence: Synthetic oligonucleotide
agcuaacaauccuauaaac

SEQ ID NO: 1594800 - RNA, 19 nt, Artificial Sequence
  Description of Artificial Sequence: Synthetic oligonucleotide
cauuagaccucacucauag

SEQ ID NO: 1594801 - RNA, 19 nt, Artificial Sequence
  Description of Artificial Sequence: Synthetic oligonucleotide
aaacccauaggcaaguuug

SEQ ID NO: 1594802 - RNA, 19 nt, Artificial Sequence
  Description of Artificial Sequence: Synthetic oligonucleotide
cuuuaauacgaacucuuag

SEQ ID NO: 1594803 - RNA, 19 nt, Artificial Sequence
  Description of Artificial Sequence: Synthetic oligonucleotide
agugguagugcccaacacg

SEQ ID NO: 1594804 - RNA, 19 nt, Artificial Sequence
  Description of Artificial Sequence: Synthetic oligonucleotide
auacaugaagcucucaacu

SEQ ID NO: 1594805 - RNA, 19 nt, Artificial Sequence
  Description of Artificial Sequence: Synthetic oligonucleotide
uuccauauucucuuggcgc

SEQ ID NO: 1594806 - RNA, 19 nt, Artificial Sequence
  Description of Artificial Sequence: Synthetic oligonucleotide
uaagccuuacccacugugg

SEQ ID NO: 1594807 - RNA, 19 nt, Artificial Sequence
  Description of Artificial Sequence: Synthetic oligonucleotide
gauugucccaaauggggcg

SEQ ID NO: 1594808 - RNA, 19 nt, Artificial Sequence
  Description of Artificial Sequence: Synthetic oligonucleotide
uggaaaacaaagugcuggg

SEQ ID NO: 1594809 - RNA, 19 nt, Artificial Sequence
  Description of Artificial Sequence: Synthetic oligonucleotide
ugucgauaugcucuucacg

SEQ ID NO: 1594810 - RNA, 19 nt, Artificial Sequence
  Description of Artificial Sequence: Synthetic oligonucleotide
uggcaaagaagccucaaca

SEQ ID NO: 1594811 - RNA, 19 nt, Artificial Sequence
  Description of Artificial Sequence: Synthetic oligonucleotide
ggacauaacauacaugaag

SEQ ID NO: 1594812 - RNA, 19 nt, Artificial Sequence
  Description of Artificial Sequence: Synthetic oligonucleotide
gacacuaagccuuacccac

SEQ ID NO: 1594813 - RNA, 19 nt, Artificial Sequence
  Description of Artificial Sequence: Synthetic oligonucleotide
uucacgaagcucauauugc

SEQ ID NO: 1594814 - RNA, 19 nt, Artificial Sequence
  Description of Artificial Sequence: Synthetic oligonucleotide
aagagauuaccaucuagau

SEQ ID NO: 1594815 - RNA, 19 nt, Artificial Sequence
  Description of Artificial Sequence: Synthetic oligonucleotide
aagagauaggaagagauua

SEQ ID NO: 1594816 - RNA, 19 nt, Artificial Sequence
  Description of Artificial Sequence: Synthetic oligonucleotide
aaagaauccuuugggugac

SEQ ID NO: 1594817 - RNA, 19 nt, Artificial Sequence
  Description of Artificial Sequence: Synthetic oligonucleotide
uagaaauugauggagcuaa

SEQ ID NO: 1594818 - RNA, 19 nt, Artificial Sequence
  Description of Artificial Sequence: Synthetic oligonucleotide
acuaacuauacaggguagc

SEQ ID NO: 1594819 - RNA, 19 nt, Artificial Sequence
  Description of Artificial Sequence: Synthetic oligonucleotide
accucacucauagacaggc

SEQ ID NO: 1594820 - RNA, 19 nt, Artificial Sequence
  Description of Artificial Sequence: Synthetic oligonucleotide
uuauguuuguaagacuuug

SEQ ID NO: 1594821 - RNA, 19 nt, Artificial Sequence
  Description of Artificial Sequence: Synthetic oligonucleotide
auuagugguagccucccag

SEQ ID NO: 1594822 - RNA, 19 nt, Artificial Sequence
  Description of Artificial Sequence: Synthetic oligonucleotide
acuaugauuuccaagagaa

SEQ ID NO: 1594823 - RNA, 19 nt, Artificial Sequence
  Description of Artificial Sequence: Synthetic oligonucleotide
aaggguuaaauaaccaucu

SEQ ID NO: 1594824 - RNA, 19 nt, Artificial Sequence
  Description of Artificial Sequence: Synthetic oligonucleotide
uaggagacccuccacagga

SEQ ID NO: 1594825 - RNA, 19 nt, Artificial Sequence
  Description of Artificial Sequence: Synthetic oligonucleotide
agagaagcaacaucggccu

SEQ ID NO: 1594826 - RNA, 19 nt, Artificial Sequence
  Description of Artificial Sequence: Synthetic oligonucleotide
ggggacauaacauacauga

SEQ ID NO: 1594827 - RNA, 19 nt, Artificial Sequence
  Description of Artificial Sequence: Synthetic oligonucleotide
uuugucgauaugcucuuca

SEQ ID NO: 1594828 - RNA, 19 nt, Artificial Sequence
  Description of Artificial Sequence: Synthetic oligonucleotide
accaucuagauauugcccu

SEQ ID NO: 1594829 - RNA, 19 nt, Artificial Sequence
  Description of Artificial Sequence: Synthetic oligonucleotide
uaauacgaacucuuaggca

SEQ ID NO: 1594830 - RNA, 19 nt, Artificial Sequence
  Description of Artificial Sequence: Synthetic oligonucleotide
ugguccuaaaaugagguca

SEQ ID NO: 1594831 - RNA, 19 nt, Artificial Sequence
  Description of Artificial Sequence: Synthetic oligonucleotide
aagugguagugcccaacac

SEQ ID NO: 1594832 - RNA, 19 nt, Artificial Sequence
  Description of Artificial Sequence: Synthetic oligonucleotide
guaauuucuggucuugaac

SEQ ID NO: 1594833 - RNA, 19 nt, Artificial Sequence
  Description of Artificial Sequence: Synthetic oligonucleotide
aaaccaacacagaucuugg

SEQ ID NO: 1594834 - RNA, 19 nt, Artificial Sequence
  Description of Artificial Sequence: Synthetic oligonucleotide
gaagagauuaccaucuaga

SEQ ID NO: 1594835 - RNA, 19 nt, Artificial Sequence
  Description of Artificial Sequence: Synthetic oligonucleotide
aaaccuuaggagacccucc

SEQ ID NO: 1594836 - RNA, 19 nt, Artificial Sequence
  Description of Artificial Sequence: Synthetic oligonucleotide
aaucauuugugcaggcuag

SEQ ID NO: 1594837 - RNA, 19 nt, Artificial Sequence
  Description of Artificial Sequence: Synthetic oligonucleotide
uacuaugauuuccaagaga

SEQ ID NO: 1594838 - RNA, 19 nt, Artificial Sequence
  Description of Artificial Sequence: Synthetic oligonucleotide
cugcccaugguccaaaacc

SEQ ID NO: 1594839 - RNA, 19 nt, Artificial Sequence
  Description of Artificial Sequence: Synthetic oligonucleotide
agauccuagcuggagaugg

SEQ ID NO: 1594840 - RNA, 19 nt, Artificial Sequence
  Description of Artificial Sequence: Synthetic oligonucleotide
gucgauaugcucuucacga

SEQ ID NO: 1594841 - RNA, 19 nt, Artificial Sequence
  Description of Artificial Sequence: Synthetic oligonucleotide
agaauuagugguagccucc

SEQ ID NO: 1594842 - RNA, 19 nt, Artificial Sequence
  Description of Artificial Sequence: Synthetic oligonucleotide
cauuaguuuguaauuucug

SEQ ID NO: 1594843 - RNA, 19 nt, Artificial Sequence
  Description of Artificial Sequence: Synthetic oligonucleotide
gaaggguuaaauaaccauc

SEQ ID NO: 1594844 - RNA, 19 nt, Artificial Sequence
  Description of Artificial Sequence: Synthetic oligonucleotide
auugcuaguguauccccuc

SEQ ID NO: 1594845 - RNA, 19 nt, Artificial Sequence
  Description of Artificial Sequence: Synthetic oligonucleotide
auacuaugauuuccaagag

SEQ ID NO: 1594846 - RNA, 19 nt, Artificial Sequence
  Description of Artificial Sequence: Synthetic oligonucleotide
cuuaggagacccuccacag

SEQ ID NO: 1594847 - RNA, 19 nt, Artificial Sequence
  Description of Artificial Sequence: Synthetic oligonucleotide
agguccuuauguuuguaag

SEQ ID NO: 1594848 - RNA, 19 nt, Artificial Sequence
  Description of Artificial Sequence: Synthetic oligonucleotide
aggauugucccaaaugggg

SEQ ID NO: 1594849 - RNA, 19 nt, Artificial Sequence
  Description of Artificial Sequence: Synthetic oligonucleotide
uguagugacuucagauuug

SEQ ID NO: 1594850 - RNA, 19 nt, Artificial Sequence
  Description of Artificial Sequence: Synthetic oligonucleotide
gacauuaguuuguaauuuc

SEQ ID NO: 1594851 - RNA, 19 nt, Artificial Sequence
  Description of Artificial Sequence: Synthetic oligonucleotide
uuaggagacccuccacagg

SEQ ID NO: 1594852 - RNA, 19 nt, Artificial Sequence
  Description of Artificial Sequence: Synthetic oligonucleotide
cauuugugcaggcuagagg

SEQ ID NO: 1594853 - RNA, 19 nt, Artificial Sequence
  Description of Artificial Sequence: Synthetic oligonucleotide
gauaugcucuucacgaagc

SEQ ID NO: 1594854 - RNA, 19 nt, Artificial Sequence
  Description of Artificial Sequence: Synthetic oligonucleotide
uuaggaaagcagagcagcu

SEQ ID NO: 1594855 - RNA, 19 nt, Artificial Sequence
  Description of Artificial Sequence: Synthetic oligonucleotide
gugguagugcccaacacgg

SEQ ID NO: 1594856 - RNA, 19 nt, Artificial Sequence
  Description of Artificial Sequence: Synthetic oligonucleotide
auaaccaucuuuaaagaaa

SEQ ID NO: 1594857 - RNA, 19 nt, Artificial Sequence
  Description of Artificial Sequence: Synthetic oligonucleotide
ugccuagaaauugauggag

SEQ ID NO: 1594858 - RNA, 19 nt, Artificial Sequence
  Description of Artificial Sequence: Synthetic oligonucleotide
uagaccucacucauagaca

SEQ ID NO: 1594859 - RNA, 19 nt, Artificial Sequence
  Description of Artificial Sequence: Synthetic oligonucleotide
uggaguuucgcucguuaug

SEQ ID NO: 1594860 - RNA, 19 nt, Artificial Sequence
  Description of Artificial Sequence: Synthetic oligonucleotide
agaagagauaggaagagau

SEQ ID NO: 1594861 - RNA, 19 nt, Artificial Sequence
  Description of Artificial Sequence: Synthetic oligonucleotide
gaugagaauuagugguagc

SEQ ID NO: 1594862 - RNA, 19 nt, Artificial Sequence
  Description of Artificial Sequence: Synthetic oligonucleotide
caauccuauaaaccaacac

SEQ ID NO: 1594863 - RNA, 19 nt, Artificial Sequence
  Description of Artificial Sequence: Synthetic oligonucleotide
ucuuuaauacgaacucuua

SEQ ID NO: 1594864 - RNA, 19 nt, Artificial Sequence
  Description of Artificial Sequence: Synthetic oligonucleotide
agauauugcccugggugcc

SEQ ID NO: 1594865 - RNA, 19 nt, Artificial Sequence
  Description of Artificial Sequence: Synthetic oligonucleotide
aagacuuugucgauaugcu

SEQ ID NO: 1594866 - RNA, 19 nt, Artificial Sequence
  Description of Artificial Sequence: Synthetic oligonucleotide
uccuauaaaccaacacaga

SEQ ID NO: 1594867 - RNA, 19 nt, Artificial Sequence
  Description of Artificial Sequence: Synthetic oligonucleotide
acgaucuuuaauacgaacu

SEQ ID NO: 1594868 - RNA, 19 nt, Artificial Sequence
  Description of Artificial Sequence: Synthetic oligonucleotide
uaaguaucacugagggugu

SEQ ID NO: 1594869 - RNA, 19 nt, Artificial Sequence
  Description of Artificial Sequence: Synthetic oligonucleotide
cacaugauccagcaauggc

SEQ ID NO: 1594870 - RNA, 19 nt, Artificial Sequence
  Description of Artificial Sequence: Synthetic oligonucleotide
agaugagaauuagugguag

SEQ ID NO: 1594871 - RNA, 19 nt, Artificial Sequence
  Description of Artificial Sequence: Synthetic oligonucleotide
ugaggucauaugcauggac

SEQ ID NO: 1594872 - RNA, 19 nt, Artificial Sequence
  Description of Artificial Sequence: Synthetic oligonucleotide
ucacucauagacaggccac

SEQ ID NO: 1594873 - RNA, 19 nt, Artificial Sequence
  Description of Artificial Sequence: Synthetic oligonucleotide
aaguuuguggcaaggccag

SEQ ID NO: 1594874 - RNA, 19 nt, Artificial Sequence
  Description of Artificial Sequence: Synthetic oligonucleotide
aaccuuaggagacccucca

SEQ ID NO: 1594875 - RNA, 19 nt, Artificial Sequence
  Description of Artificial Sequence: Synthetic oligonucleotide
gacgaucuuuaauacgaac

SEQ ID NO: 1594876 - RNA, 19 nt, Artificial Sequence
  Description of Artificial Sequence: Synthetic oligonucleotide
aacucuuaggcaaaacaaa

SEQ ID NO: 1594877 - RNA, 19 nt, Artificial Sequence
  Description of Artificial Sequence: Synthetic oligonucleotide
gcuaacaauccuauaaacc

SEQ ID NO: 1594878 - RNA, 19 nt, Artificial Sequence
  Description of Artificial Sequence: Synthetic oligonucleotide
aucuagauauugcccuggg

SEQ ID NO: 1594879 - RNA, 19 nt, Artificial Sequence
  Description of Artificial Sequence: Synthetic oligonucleotide
ugugaauguaaggcuacug

SEQ ID NO: 1594880 - RNA, 19 nt, Artificial Sequence
  Description of Artificial Sequence: Synthetic oligonucleotide
aacacaugauccagcaaug

SEQ ID NO: 1594881 - RNA, 19 nt, Artificial Sequence
  Description of Artificial Sequence: Synthetic oligonucleotide
aacuaacuauacaggguag

SEQ ID NO: 1594882 - RNA, 19 nt, Artificial Sequence
  Description of Artificial Sequence: Synthetic oligonucleotide
agagauuaccaucuagaua

SEQ ID NO: 1594883 - RNA, 19 nt, Artificial Sequence
  Description of Artificial Sequence: Synthetic oligonucleotide
gaccuaaguaucacugagg

SEQ ID NO: 1594884 - RNA, 19 nt, Artificial Sequence
  Description of Artificial Sequence: Synthetic oligonucleotide
gaacucuuaggcaaaacaa

SEQ ID NO: 1594885 - RNA, 19 nt, Artificial Sequence
  Description of Artificial Sequence: Synthetic oligonucleotide
cuaguguauccccucuucc

SEQ ID NO: 1594886 - RNA, 19 nt, Artificial Sequence
  Description of Artificial Sequence: Synthetic oligonucleotide
ucgcucguuaugcugcucc

SEQ ID NO: 1594887 - RNA, 19 nt, Artificial Sequence
  Description of Artificial Sequence: Synthetic oligonucleotide
gauuaccaucuagauauug

SEQ ID NO: 1594888 - RNA, 19 nt, Artificial Sequence
  Description of Artificial Sequence: Synthetic oligonucleotide
gauaggaagagauuaccau

SEQ ID NO: 1594889 - RNA, 19 nt, Artificial Sequence
  Description of Artificial Sequence: Synthetic oligonucleotide
auugucccaaauggggcgc

SEQ ID NO: 1594890 - RNA, 19 nt, Artificial Sequence
  Description of Artificial Sequence: Synthetic oligonucleotide
ucauuugugcaggcuagag

SEQ ID NO: 1594891 - RNA, 19 nt, Artificial Sequence
  Description of Artificial Sequence: Synthetic oligonucleotide
aggcauuagaccucacuca

SEQ ID NO: 1594892 - RNA, 19 nt, Artificial Sequence
  Description of Artificial Sequence: Synthetic oligonucleotide
gaggcuccuucacacacag

SEQ ID NO: 1594893 - RNA, 19 nt, Artificial Sequence
  Description of Artificial Sequence: Synthetic oligonucleotide
ucuagauauugcccugggu

SEQ ID NO: 1594894 - RNA, 19 nt, Artificial Sequence
  Description of Artificial Sequence: Synthetic oligonucleotide
agaauccuuugggugaccg

SEQ ID NO: 1594895 - RNA, 19 nt, Artificial Sequence
  Description of Artificial Sequence: Synthetic oligonucleotide
agcucauauugcucaauca

SEQ ID NO: 1594896 - RNA, 19 nt, Artificial Sequence
  Description of Artificial Sequence: Synthetic oligonucleotide
ggaccuaaguaucacugag

SEQ ID NO: 1594897 - RNA, 19 nt, Artificial Sequence
  Description of Artificial Sequence: Synthetic oligonucleotide
ggagaugagaauuaguggu

SEQ ID NO: 1594898 - RNA, 19 nt, Artificial Sequence
  Description of Artificial Sequence: Synthetic oligonucleotide
guccuuauguuuguaagac

SEQ ID NO: 1594899 - RNA, 19 nt, Artificial Sequence
  Description of Artificial Sequence: Synthetic oligonucleotide
aaaggacccugacaggauu

SEQ ID NO: 1594900 - RNA, 19 nt, Artificial Sequence
  Description of Artificial Sequence: Synthetic oligonucleotide
uccuaaaaugaggucauau

SEQ ID NO: 1594901 - RNA, 19 nt, Artificial Sequence
  Description of Artificial Sequence: Synthetic oligonucleotide
uuuguaagacuuugucgau

SEQ ID NO: 1594902 - RNA, 19 nt, Artificial Sequence
  Description of Artificial Sequence: Synthetic oligonucleotide
acagauccuagcuggagau

SEQ ID NO: 1594903 - RNA, 19 nt, Artificial Sequence
  Description of Artificial Sequence: Synthetic oligonucleotide
aguauccuuucucuuaaua

SEQ ID NO: 1594904 - RNA, 19 nt, Artificial Sequence
  Description of Artificial Sequence: Synthetic oligonucleotide
gaagugguagugcccaaca

SEQ ID NO: 1594905 - RNA, 19 nt, Artificial Sequence
  Description of Artificial Sequence: Synthetic oligonucleotide
uugauggagcuaauagcuc

SEQ ID NO: 1594906 - RNA, 19 nt, Artificial Sequence
  Description of Artificial Sequence: Synthetic oligonucleotide
gaauuagugguagccuccc

SEQ ID NO: 1594907 - RNA, 19 nt, Artificial Sequence
  Description of Artificial Sequence: Synthetic oligonucleotide
aucuucccaaacaggacac

SEQ ID NO: 1594908 - RNA, 19 nt, Artificial Sequence
  Description of Artificial Sequence: Synthetic oligonucleotide
agaauacuaugauuuccaa

SEQ ID NO: 1594909 - RNA, 19 nt, Artificial Sequence
  Description of Artificial Sequence: Synthetic oligonucleotide
aaccaacacagaucuuggu

SEQ ID NO: 1594910 - RNA, 19 nt, Artificial Sequence
  Description of Artificial Sequence: Synthetic oligonucleotide
uccuuauguuuguaagacu

SEQ ID NO: 1594911 - RNA, 19 nt, Artificial Sequence
  Description of Artificial Sequence: Synthetic oligonucleotide
agauaggaagagauuacca

SEQ ID NO: 1594912 - RNA, 19 nt, Artificial Sequence
  Description of Artificial Sequence: Synthetic oligonucleotide
uaacauacaugaagcucuc

SEQ ID NO: 1594913 - RNA, 19 nt, Artificial Sequence
  Description of Artificial Sequence: Synthetic oligonucleotide
uuuguggcaaggccaguau

SEQ ID NO: 1594914 - RNA, 19 nt, Artificial Sequence
  Description of Artificial Sequence: Synthetic oligonucleotide
uggacucacccaagugagg

SEQ ID NO: 1594915 - RNA, 19 nt, Artificial Sequence
  Description of Artificial Sequence: Synthetic oligonucleotide
auggacucacccaagugag

SEQ ID NO: 1594916 - RNA, 19 nt, Artificial Sequence
  Description of Artificial Sequence: Synthetic oligonucleotide
cucacccaagugaggaagg

SEQ ID NO: 1594917 - RNA, 19 nt, Artificial Sequence
  Description of Artificial Sequence: Synthetic oligonucleotide
uugucgauaugcucuucac

SEQ ID NO: 1594918 - RNA, 19 nt, Artificial Sequence
  Description of Artificial Sequence: Synthetic oligonucleotide
accucccuacagcuggccc

SEQ ID NO: 1594919 - RNA, 19 nt, Artificial Sequence
  Description of Artificial Sequence: Synthetic oligonucleotide
gcaaguuuguggcaaggcc

SEQ ID NO: 1594920 - RNA, 19 nt, Artificial Sequence
  Description of Artificial Sequence: Synthetic oligonucleotide
uugggugaccgucugucaa

SEQ ID NO: 1594921 - RNA, 19 nt, Artificial Sequence
  Description of Artificial Sequence: Synthetic oligonucleotide
cucacucauagacaggcca

SEQ ID NO: 1594922 - RNA, 19 nt, Artificial Sequence
  Description of Artificial Sequence: Synthetic oligonucleotide
cuugguccuaaaaugaggu

SEQ ID NO: 1594923 - RNA, 19 nt, Artificial Sequence
  Description of Artificial Sequence: Synthetic oligonucleotide
caucuagauauugcccugg

SEQ ID NO: 1594924 - RNA, 19 nt, Artificial Sequence
  Description of Artificial Sequence: Synthetic oligonucleotide
acccugaguaacuaacuau

SEQ ID NO: 1594925 - RNA, 19 nt, Artificial Sequence
  Description of Artificial Sequence: Synthetic oligonucleotide
ugguagugcccaacacggg

SEQ ID NO: 1594926 - RNA, 19 nt, Artificial Sequence
  Description of Artificial Sequence: Synthetic oligonucleotide
agcuaauagcuccaagguu

SEQ ID NO: 1594927 - RNA, 19 nt, Artificial Sequence
  Description of Artificial Sequence: Synthetic oligonucleotide
cauucucacagagugccug

SEQ ID NO: 1594928 - RNA, 19 nt, Artificial Sequence
  Description of Artificial Sequence: Synthetic oligonucleotide
agaagccucaacauuuaca

SEQ ID NO: 1594929 - RNA, 19 nt, Artificial Sequence
  Description of Artificial Sequence: Synthetic oligonucleotide
cuaacuauacaggguagca

SEQ ID NO: 1594930 - RNA, 19 nt, Artificial Sequence
  Description of Artificial Sequence: Synthetic oligonucleotide
ugacgaucuuuaauacgaa

SEQ ID NO: 1594931 - RNA, 19 nt, Artificial Sequence
  Description of Artificial Sequence: Synthetic oligonucleotide
accuuaggagacccuccac

SEQ ID NO: 1594932 - RNA, 19 nt, Artificial Sequence
  Description of Artificial Sequence: Synthetic oligonucleotide
caggguagcaaguucuuga

SEQ ID NO: 1594933 - RNA, 19 nt, Artificial Sequence
  Description of Artificial Sequence: Synthetic oligonucleotide
cuggacacuaagccuuacc

SEQ ID NO: 1594934 - RNA, 19 nt, Artificial Sequence
  Description of Artificial Sequence: Synthetic oligonucleotide
agugcuggggacauaacau

SEQ ID NO: 1594935 - RNA, 19 nt, Artificial Sequence
  Description of Artificial Sequence: Synthetic oligonucleotide
ugugguccucuagagaaaa

SEQ ID NO: 1594936 - RNA, 19 nt, Artificial Sequence
  Description of Artificial Sequence: Synthetic oligonucleotide
auaggcaaguuuguggcaa

SEQ ID NO: 1594937 - RNA, 19 nt, Artificial Sequence
  Description of Artificial Sequence: Synthetic oligonucleotide
ucgauaugcucuucacgaa

SEQ ID NO: 1594938 - RNA, 19 nt, Artificial Sequence
  Description of Artificial Sequence: Synthetic oligonucleotide
agauuuggucaguggagaa

SEQ ID NO: 1594939 - RNA, 19 nt, Artificial Sequence
  Description of Artificial Sequence: Synthetic oligonucleotide
uuggaguuucgcucguuau

SEQ ID NO: 1594940 - RNA, 19 nt, Artificial Sequence
  Description of Artificial Sequence: Synthetic oligonucleotide
agcucucaacuggacaagg

SEQ ID NO: 1594941 - RNA, 19 nt, Artificial Sequence
  Description of Artificial Sequence: Synthetic oligonucleotide
gacaaggaccuaaguauca

SEQ ID NO: 1594942 - RNA, 19 nt, Artificial Sequence
  Description of Artificial Sequence: Synthetic oligonucleotide
acuggacaaggaccuaagu

SEQ ID NO: 1594943 - RNA, 19 nt, Artificial Sequence
  Description of Artificial Sequence: Synthetic oligonucleotide
gaaauugauggagcuaaua

SEQ ID NO: 1594944 - RNA, 19 nt, Artificial Sequence
  Description of Artificial Sequence: Synthetic oligonucleotide
gaucuuuaauacgaacucu

SEQ ID NO: 1594945 - RNA, 19 nt, Artificial Sequence
  Description of Artificial Sequence: Synthetic oligonucleotide
ugaccgucugucaaucauu

SEQ ID NO: 1594946 - RNA, 19 nt, Artificial Sequence
  Description of Artificial Sequence: Synthetic oligonucleotide
aaagaagccucaacauuua

SEQ ID NO: 1594947 - RNA, 19 nt, Artificial Sequence
  Description of Artificial Sequence: Synthetic oligonucleotide
auauucucuuggcgcagcu

SEQ ID NO: 1594948 - RNA, 19 nt, Artificial Sequence
  Description of Artificial Sequence: Synthetic oligonucleotide
aagggacauuaguuuguaa

SEQ ID NO: 1594949 - RNA, 19 nt, Artificial Sequence
  Description of Artificial Sequence: Synthetic oligonucleotide
aggguagcaaguucuugaa

SEQ ID NO: 1594950 - RNA, 19 nt, Artificial Sequence
  Description of Artificial Sequence: Synthetic oligonucleotide
gcucauauugcucaaucaa

SEQ ID NO: 1594951 - RNA, 19 nt, Artificial Sequence
  Description of Artificial Sequence: Synthetic oligonucleotide
acgaacucuuaggcaaaac

SEQ ID NO: 1594952 - RNA, 19 nt, Artificial Sequence
  Description of Artificial Sequence: Synthetic oligonucleotide
ccuuugacgaucuuuaaua

SEQ ID NO: 1594953 - RNA, 19 nt, Artificial Sequence
  Description of Artificial Sequence: Synthetic oligonucleotide
ggauugucccaaauggggc

SEQ ID NO: 1594954 - RNA, 19 nt, Artificial Sequence
  Description of Artificial Sequence: Synthetic oligonucleotide
gaggucauaugcauggacu

SEQ ID NO: 1594955 - RNA, 19 nt, Artificial Sequence
  Description of Artificial Sequence: Synthetic oligonucleotide
guaacuaacuauacagggu

SEQ ID NO: 1594956 - RNA, 19 nt, Artificial Sequence
  Description of Artificial Sequence: Synthetic oligonucleotide
auuagaccucacucauaga

SEQ ID NO: 1594957 - RNA, 19 nt, Artificial Sequence
  Description of Artificial Sequence: Synthetic oligonucleotide
acuauacaggguagcaagu

SEQ ID NO: 1594958 - RNA, 19 nt, Artificial Sequence
  Description of Artificial Sequence: Synthetic oligonucleotide
gguccuuauguuuguaaga

SEQ ID NO: 1594959 - RNA, 19 nt, Artificial Sequence
  Description of Artificial Sequence: Synthetic oligonucleotide
aacccauaggcaaguuugu

SEQ ID NO: 1594960 - RNA, 19 nt, Artificial Sequence
  Description of Artificial Sequence: Synthetic oligonucleotide
gguagugcccaacacggga

SEQ ID NO: 1594961 - RNA, 19 nt, Artificial Sequence
  Description of Artificial Sequence: Synthetic oligonucleotide
acaauccuauaaaccaaca

SEQ ID NO: 1594962 - RNA, 19 nt, Artificial Sequence
  Description of Artificial Sequence: Synthetic oligonucleotide
uagacaggccaccucccua

SEQ ID NO: 1594963 - RNA, 19 nt, Artificial Sequence
  Description of Artificial Sequence: Synthetic oligonucleotide
ugggugccuagaaauugau

SEQ ID NO: 1594964 - RNA, 19 nt, Artificial Sequence
  Description of Artificial Sequence: Synthetic oligonucleotide
gagaugagaauuaguggua

SEQ ID NO: 1594965 - RNA, 19 nt, Artificial Sequence
  Description of Artificial Sequence: Synthetic oligonucleotide
ccaacacgggaaaagggac

SEQ ID NO: 1594966 - RNA, 19 nt, Artificial Sequence
  Description of Artificial Sequence: Synthetic oligonucleotide
uuucgcucguuaugcugcu

SEQ ID NO: 1594967 - RNA, 19 nt, Artificial Sequence
  Description of Artificial Sequence: Synthetic oligonucleotide
cucauagacaggccaccuc

SEQ ID NO: 1594968 - RNA, 19 nt, Artificial Sequence
  Description of Artificial Sequence: Synthetic oligonucleotide
cuggaccuggcacuaccag

SEQ ID NO: 1594969 - RNA, 19 nt, Artificial Sequence
  Description of Artificial Sequence: Synthetic oligonucleotide
cgaucuuuaauacgaacuc

SEQ ID NO: 1594970 - RNA, 19 nt, Artificial Sequence
  Description of Artificial Sequence: Synthetic oligonucleotide
caacacgggaaaagggaca

SEQ ID NO: 1594971 - RNA, 19 nt, Artificial Sequence
  Description of Artificial Sequence: Synthetic oligonucleotide
aggcaaguuuguggcaagg

SEQ ID NO: 1594972 - RNA, 19 nt, Artificial Sequence
  Description of Artificial Sequence: Synthetic oligonucleotide
guaagacuuugucgauaug

SEQ ID NO: 1594973 - RNA, 19 nt, Artificial Sequence
  Description of Artificial Sequence: Synthetic oligonucleotide
ggacacuaagccuuaccca

SEQ ID NO: 1594974 - RNA, 19 nt, Artificial Sequence
  Description of Artificial Sequence: Synthetic oligonucleotide
uagugcccaacacgggaaa

SEQ ID NO: 1594975 - RNA, 19 nt, Artificial Sequence
  Description of Artificial Sequence: Synthetic oligonucleotide
cagaucuugguccuaaaau

SEQ ID NO: 1594976 - RNA, 19 nt, Artificial Sequence
  Description of Artificial Sequence: Synthetic oligonucleotide
cuaugauuuccaagagaaa

SEQ ID NO: 1594977 - RNA, 19 nt, Artificial Sequence
  Description of Artificial Sequence: Synthetic oligonucleotide
aggcuagaggcaccuguga

SEQ ID NO: 1594978 - RNA, 19 nt, Artificial Sequence
  Description of Artificial Sequence: Synthetic oligonucleotide
acucauagacaggccaccu

SEQ ID NO: 1594979 - RNA, 19 nt, Artificial Sequence
  Description of Artificial Sequence: Synthetic oligonucleotide
cugggugccuagaaauuga

SEQ ID NO: 1594980 - RNA, 19 nt, Artificial Sequence
  Description of Artificial Sequence: Synthetic oligonucleotide
ugggugaccgucugucaau

SEQ ID NO: 1594981 - RNA, 19 nt, Artificial Sequence
  Description of Artificial Sequence: Synthetic oligonucleotide
acuaagccuuacccacugu

SEQ ID NO: 1594982 - RNA, 19 nt, Artificial Sequence
  Description of Artificial Sequence: Synthetic oligonucleotide
ccugugaauguaaggcuac

SEQ ID NO: 1594983 - RNA, 19 nt, Artificial Sequence
  Description of Artificial Sequence: Synthetic oligonucleotide
ccuggcacuaccagagggc

SEQ ID NO: 1594984 - RNA, 19 nt, Artificial Sequence
  Description of Artificial Sequence: Synthetic oligonucleotide
ugcuaguguauccccucuu

SEQ ID NO: 1594985 - RNA, 19 nt, Artificial Sequence
  Description of Artificial Sequence: Synthetic oligonucleotide
ggguagcaaguucuugaag

SEQ ID NO: 1594986 - RNA, 19 nt, Artificial Sequence
  Description of Artificial Sequence: Synthetic oligonucleotide
ggcuacauggagauggaga

SEQ ID NO: 1594987 - RNA, 19 nt, Artificial Sequence
  Description of Artificial Sequence: Synthetic oligonucleotide
uggcuacauggagauggag

SEQ ID NO: 1594988 - RNA, 19 nt, Artificial Sequence
  Description of Artificial Sequence: Synthetic oligonucleotide
gcaacaucggccuggaccu

SEQ ID NO: 1594989 - RNA, 19 nt, Artificial Sequence
  Description of Artificial Sequence: Synthetic oligonucleotide
accgucugucaaucauuug

SEQ ID NO: 1594990 - RNA, 19 nt, Artificial Sequence
  Description of Artificial Sequence: Synthetic oligonucleotide
acgggaaaagggacauuag

SEQ ID NO: 1594991 - RNA, 19 nt, Artificial Sequence
  Description of Artificial Sequence: Synthetic oligonucleotide
gccuagaaauugauggagc

SEQ ID NO: 1594992 - RNA, 19 nt, Artificial Sequence
  Description of Artificial Sequence: Synthetic oligonucleotide
gaaacccauaggcaaguuu

SEQ ID NO: 1594993 - RNA, 19 nt, Artificial Sequence
  Description of Artificial Sequence: Synthetic oligonucleotide
gcuaguguauccccucuuc

SEQ ID NO: 1594994 - RNA, 19 nt, Artificial Sequence
  Description of Artificial Sequence: Synthetic oligonucleotide
cuguagugacuucagauuu

SEQ ID NO: 1594995 - RNA, 19 nt, Artificial Sequence
  Description of Artificial Sequence: Synthetic oligonucleotide
uacgaacucuuaggcaaaa

SEQ ID NO: 1594996 - RNA, 19 nt, Artificial Sequence
  Description of Artificial Sequence: Synthetic oligonucleotide
cuagaaauugauggagcua

SEQ ID NO: 1594997 - RNA, 19 nt, Artificial Sequence
  Description of Artificial Sequence: Synthetic oligonucleotide
aucauuugugcaggcuaga

SEQ ID NO: 1594998 - RNA, 19 nt, Artificial Sequence
  Description of Artificial Sequence: Synthetic oligonucleotide
cgauaugcucuucacgaag

SEQ ID NO: 1594999 - RNA, 19 nt, Artificial Sequence
  Description of Artificial Sequence: Synthetic oligonucleotide
caaucaacuucuugagccu

SEQ ID NO: 1595000 - RNA, 19 nt, Artificial Sequence
  Description of Artificial Sequence: Synthetic oligonucleotide
ccuauaaaccaacacagau

SEQ ID NO: 1595001 - RNA, 19 nt, Artificial Sequence
  Description of Artificial Sequence: Synthetic oligonucleotide
ggacucacccaagugagga

SEQ ID NO: 1595002 - RNA, 19 nt, Artificial Sequence
  Description of Artificial Sequence: Synthetic oligonucleotide
gcauggacucacccaagug

SEQ ID NO: 1595003 - RNA, 19 nt, Artificial Sequence
  Description of Artificial Sequence: Synthetic oligonucleotide
cuuggaguuucgcucguua

SEQ ID NO: 1595004 - RNA, 19 nt, Artificial Sequence
  Description of Artificial Sequence: Synthetic oligonucleotide
ggguuaaauaaccaucuuu

SEQ ID NO: 1595005 - RNA, 19 nt, Artificial Sequence
  Description of Artificial Sequence: Synthetic oligonucleotide
cccaacacgggaaaaggga

SEQ ID NO: 1595006 - RNA, 19 nt, Artificial Sequence
  Description of Artificial Sequence: Synthetic oligonucleotide
cucccuacagcuggcccag

SEQ ID NO: 1595007 - RNA, 19 nt, Artificial Sequence
  Description of Artificial Sequence: Synthetic oligonucleotide
gacucacccaagugaggaa

SEQ ID NO: 1595008 - RNA, 19 nt, Artificial Sequence
  Description of Artificial Sequence: Synthetic oligonucleotide
guuuguggcaaggccagua

SEQ ID NO: 1595009 - RNA, 19 nt, Artificial Sequence
  Description of Artificial Sequence: Synthetic oligonucleotide
ggcaaagaagccucaacau

SEQ ID NO: 1595010 - RNA, 19 nt, Artificial Sequence
  Description of Artificial Sequence: Synthetic oligonucleotide
gaauccuuugggugaccgu

SEQ ID NO: 1595011 - RNA, 19 nt, Artificial Sequence
  Description of Artificial Sequence: Synthetic oligonucleotide
agaaauugauggagcuaau

SEQ ID NO: 1595012 - RNA, 19 nt, Artificial Sequence
  Description of Artificial Sequence: Synthetic oligonucleotide
gcccaacacgggaaaaggg

SEQ ID NO: 1595013 - RNA, 19 nt, Artificial Sequence
  Description of Artificial Sequence: Synthetic oligonucleotide
gggacauuaguuuguaauu

SEQ ID NO: 1595014 - RNA, 19 nt, Artificial Sequence
  Description of Artificial Sequence: Synthetic oligonucleotide
guagugcccaacacgggaa

SEQ ID NO: 1595015 - RNA, 19 nt, Artificial Sequence
  Description of Artificial Sequence: Synthetic oligonucleotide
ggucauaugcauggacuca

SEQ ID NO: 1595016 - RNA, 19 nt, Artificial Sequence
  Description of Artificial Sequence: Synthetic oligonucleotide
cacccugaguaacuaacua

SEQ ID NO: 1595017 - RNA, 19 nt, Artificial Sequence
  Description of Artificial Sequence: Synthetic oligonucleotide
ggaccauugcuaguguauc

SEQ ID NO: 1595018 - RNA, 19 nt, Artificial Sequence
  Description of Artificial Sequence: Synthetic oligonucleotide
cccugaguaacuaacuaua

SEQ ID NO: 1595019 - RNA, 19 nt, Artificial Sequence
  Description of Artificial Sequence: Synthetic oligonucleotide
ugucccaaauggggcgcug

SEQ ID NO: 1595020 - RNA, 19 nt, Artificial Sequence
  Description of Artificial Sequence: Synthetic oligonucleotide
ccuagaaauugauggagcu

SEQ ID NO: 1595021 - RNA, 19 nt, Artificial Sequence
  Description of Artificial Sequence: Synthetic oligonucleotide
ccugggugccuagaaauug

SEQ ID NO: 1595022 - RNA, 19 nt, Artificial Sequence
  Description of Artificial Sequence: Synthetic oligonucleotide
ggcauuagaccucacucau

SEQ ID NO: 1595023 - RNA, 19 nt, Artificial Sequence
  Description of Artificial Sequence: Synthetic oligonucleotide
gacccuccacaggacaaca

SEQ ID NO: 1595024 - RNA, 19 nt, Artificial Sequence
  Description of Artificial Sequence: Synthetic oligonucleotide
caacuggacaaggaccuaa

SEQ ID NO: 1595025 - RNA, 19 nt, Artificial Sequence
  Description of Artificial Sequence: Synthetic oligonucleotide
ucaacuggacaaggaccua

SEQ ID NO: 1595026 - RNA, 19 nt, Artificial Sequence
  Description of Artificial Sequence: Synthetic oligonucleotide
caacacagaucuugguccu

SEQ ID NO: 1595027 - RNA, 19 nt, Artificial Sequence
  Description of Artificial Sequence: Synthetic oligonucleotide
aaguaucacugagggugua

SEQ ID NO: 1595028 - RNA, 19 nt, Artificial Sequence
  Description of Artificial Sequence: Synthetic oligonucleotide
cagauccuagcuggagaug

SEQ ID NO: 1595029 - RNA, 19 nt, Artificial Sequence
  Description of Artificial Sequence: Synthetic oligonucleotide
gaggcaccugugaauguaa

SEQ ID NO: 1595030 - RNA, 19 nt, Artificial Sequence
  Description of Artificial Sequence: Synthetic oligonucleotide
augcauggacucacccaag

SEQ ID NO: 1595031 - RNA, 19 nt, Artificial Sequence
  Description of Artificial Sequence: Synthetic oligonucleotide
cacagagugccugagcgcu

SEQ ID NO: 1595032 - RNA, 19 nt, Artificial Sequence
  Description of Artificial Sequence: Synthetic oligonucleotide
gcuguagugacuucagauu

SEQ ID NO: 1595033 - RNA, 19 nt, Artificial Sequence
  Description of Artificial Sequence: Synthetic oligonucleotide
uugucccaaauggggcgcu

SEQ ID NO: 1595034 - RNA, 19 nt, Artificial Sequence
  Description of Artificial Sequence: Synthetic oligonucleotide
ggcuagaggcaccugugaa

SEQ ID NO: 1595035 - RNA, 19 nt, Artificial Sequence
  Description of Artificial Sequence: Synthetic oligonucleotide
ccucacucauagacaggcc

SEQ ID NO: 1595036 - RNA, 19 nt, Artificial Sequence
  Description of Artificial Sequence: Synthetic oligonucleotide
ugggcacccugaguaacua

SEQ ID NO: 1595037 - RNA, 19 nt, Artificial Sequence
  Description of Artificial Sequence: Synthetic oligonucleotide
ccaugguccaaaacccuca

SEQ ID NO: 1595038 - RNA, 19 nt, Artificial Sequence
  Description of Artificial Sequence: Synthetic oligonucleotide
agacuccugggcugacuua

SEQ ID NO: 1595039 - RNA, 19 nt, Artificial Sequence
  Description of Artificial Sequence: Synthetic oligonucleotide
gggugccuagaaauugaug

SEQ ID NO: 1595040 - RNA, 19 nt, Artificial Sequence
  Description of Artificial Sequence: Synthetic oligonucleotide
caauggcuacauggagaug

SEQ ID NO: 1595041 - RNA, 19 nt, Artificial Sequence
  Description of Artificial Sequence: Synthetic oligonucleotide
aguuuguggcaaggccagu

SEQ ID NO: 1595042 - RNA, 19 nt, Artificial Sequence
  Description of Artificial Sequence: Synthetic oligonucleotide
cacuaccagagggcaggag

SEQ ID NO: 1595043 - RNA, 19 nt, Artificial Sequence
  Description of Artificial Sequence: Synthetic oligonucleotide
gguguagccaagggcccug

SEQ ID NO: 1595044 - RNA, 19 nt, Artificial Sequence
  Description of Artificial Sequence: Synthetic oligonucleotide
gaccgucugucaaucauuu

SEQ ID NO: 1595045 - RNA, 19 nt, Artificial Sequence
  Description of Artificial Sequence: Synthetic oligonucleotide
cugaaacccauaggcaagu

SEQ ID NO: 1595046 - RNA, 19 nt, Artificial Sequence
  Description of Artificial Sequence: Synthetic oligonucleotide
gcuagaggcaccugugaau

SEQ ID NO: 1595047 - RNA, 19 nt, Artificial Sequence
  Description of Artificial Sequence: Synthetic oligonucleotide
caccucccuacagcuggcc

SEQ ID NO: 1595048 - RNA, 19 nt, Artificial Sequence
  Description of Artificial Sequence: Synthetic oligonucleotide
agauuaccaucuagauauu

SEQ ID NO: 1595049 - RNA, 19 nt, Artificial Sequence
  Description of Artificial Sequence: Synthetic oligonucleotide
cuuacccacugugguccuc

SEQ ID NO: 1595050 - RNA, 19 nt, Artificial Sequence
  Description of Artificial Sequence: Synthetic oligonucleotide
ccgccaguuccauauucuc

SEQ ID NO: 1595051 - RNA, 19 nt, Artificial Sequence
  Description of Artificial Sequence: Synthetic oligonucleotide
uucgcucguuaugcugcuc

SEQ ID NO: 1595052 - RNA, 19 nt, Artificial Sequence
  Description of Artificial Sequence: Synthetic oligonucleotide
ccucccuacagcuggccca

SEQ ID NO: 1595053 - RNA, 19 nt, Artificial Sequence
  Description of Artificial Sequence: Synthetic oligonucleotide
gcucucaacuggacaagga

SEQ ID NO: 1595054 - RNA, 19 nt, Artificial Sequence
  Description of Artificial Sequence: Synthetic oligonucleotide
ccugacaggauugucccaa

SEQ ID NO: 1595055 - RNA, 19 nt, Artificial Sequence
  Description of Artificial Sequence: Synthetic oligonucleotide
gcugggcacccugaguaac

SEQ ID NO: 1595056 - RNA, 19 nt, Artificial Sequence
  Description of Artificial Sequence: Synthetic oligonucleotide
gggugaccgucugucaauc

SEQ ID NO: 1595057 - RNA, 19 nt, Artificial Sequence
  Description of Artificial Sequence: Synthetic oligonucleotide
gcccugggugccuagaaau

SEQ ID NO: 1595058 - RNA, 19 nt, Artificial Sequence
  Description of Artificial Sequence: Synthetic oligonucleotide
caacaucggccuggaccug

SEQ ID NO: 1595059 - RNA, 19 nt, Artificial Sequence
  Description of Artificial Sequence: Synthetic oligonucleotide
gggaccauugcuaguguau

SEQ ID NO: 1595060 - RNA, 19 nt, Artificial Sequence
  Description of Artificial Sequence: Synthetic oligonucleotide
guauccccucuuccuuccu

SEQ ID NO: 1595061 - RNA, 19 nt, Artificial Sequence
  Description of Artificial Sequence: Synthetic oligonucleotide
gcauuagaccucacucaua

SEQ ID NO: 1595062 - RNA, 19 nt, Artificial Sequence
  Description of Artificial Sequence: Synthetic oligonucleotide
gcacccugaguaacuaacu

SEQ ID NO: 1595063 - RNA, 19 nt, Artificial Sequence
  Description of Artificial Sequence: Synthetic oligonucleotide
gggcacccugaguaacuaa

SEQ ID NO: 1595064 - RNA, 19 nt, Artificial Sequence
  Description of Artificial Sequence: Synthetic oligonucleotide
ccuggacacuaagccuuac

SEQ ID NO: 1595065 - RNA, 19 nt, Artificial Sequence
  Description of Artificial Sequence: Synthetic oligonucleotide
ggaaggcauuagaccucac

SEQ ID NO: 1595066 - RNA, 19 nt, Artificial Sequence
  Description of Artificial Sequence: Synthetic oligonucleotide
aggcuccuucacacacaga

SEQ ID NO: 1595067 - RNA, 19 nt, Artificial Sequence
  Description of Artificial Sequence: Synthetic oligonucleotide
auggggcgcuggaggccag

SEQ ID NO: 1595068 - RNA, 19 nt, Artificial Sequence
  Description of Artificial Sequence: Synthetic oligonucleotide
gcacuaccagagggcagga

SEQ ID NO: 1595069 - RNA, 19 nt, Artificial Sequence
  Description of Artificial Sequence: Synthetic oligonucleotide
gguagccucccaggcugaa

SEQ ID NO: 1595070 - RNA, 19 nt, Artificial Sequence
  Description of Artificial Sequence: Synthetic oligonucleotide
cgcucguuaugcugcucca

SEQ ID NO: 1595071 - RNA, 19 nt, Artificial Sequence
  Description of Artificial Sequence: Synthetic oligonucleotide
cccaagugaggaaggcauu

SEQ ID NO: 1595072 - RNA, 19 nt, Artificial Sequence
  Description of Artificial Sequence: Synthetic oligonucleotide
ccuuugggugaccgucugu

SEQ ID NO: 1595073 - RNA, 19 nt, Artificial Sequence
  Description of Artificial Sequence: Synthetic oligonucleotide
cccagacuccugggcugac

SEQ ID NO: 1595074 - RNA, 19 nt, Artificial Sequence
  Description of Artificial Sequence: Synthetic oligonucleotide
gcgcugcccaugguccaaa

SEQ ID NO: 1595075 - RNA, 19 nt, Artificial Sequence
  Description of Artificial Sequence: Synthetic oligonucleotide
aauugcugcagacacaggc

SEQ ID NO: 1595076 - RNA, 19 nt, Artificial Sequence
  Description of Artificial Sequence: Synthetic oligonucleotide
aaagcuaggguuuagucug

SEQ ID NO: 1595077 - RNA, 19 nt, Artificial Sequence
  Description of Artificial Sequence: Synthetic oligonucleotide
aguuuuaacagccauggag

SEQ ID NO: 1595078 - RNA, 19 nt, Artificial Sequence
  Description of Artificial Sequence: Synthetic oligonucleotide
aaucuuguagaagauaggg

SEQ ID NO: 1595079 - RNA, 19 nt, Artificial Sequence
  Description of Artificial Sequence: Synthetic oligonucleotide
gaucagauggcucagcgcg

SEQ ID NO: 1595080 - RNA, 19 nt, Artificial Sequence
  Description of Artificial Sequence: Synthetic oligonucleotide
accgccaagaaauugcugc

SEQ ID NO: 1595081 - RNA, 19 nt, Artificial Sequence
  Description of Artificial Sequence: Synthetic oligonucleotide
cauaggaucaggaacaauc

SEQ ID NO: 1595082 - RNA, 19 nt, Artificial Sequence
  Description of Artificial Sequence: Synthetic oligonucleotide
ucguggugggaucagaugg

SEQ ID NO: 1595083 - RNA, 19 nt, Artificial Sequence
  Description of Artificial Sequence: Synthetic oligonucleotide
aaagcugcagcucucguga

SEQ ID NO: 1595084 - RNA, 19 nt, Artificial Sequence
  Description of Artificial Sequence: Synthetic oligonucleotide
uguuaaccagacccgaggg

SEQ ID NO: 1595085 - RNA, 19 nt, Artificial Sequence
  Description of Artificial Sequence: Synthetic oligonucleotide
ugaguguuaaccagacccg

SEQ ID NO: 1595086 - RNA, 19 nt, Artificial Sequence
  Description of Artificial Sequence: Synthetic oligonucleotide
uacgccaccaccuguacgg

SEQ ID NO: 1595087 - RNA, 19 nt, Artificial Sequence
  Description of Artificial Sequence: Synthetic oligonucleotide
guuuuaacagccauggagc

SEQ ID NO: 1595088 - RNA, 19 nt, Artificial Sequence
  Description of Artificial Sequence: Synthetic oligonucleotide
uagagccccaccuaaagag

SEQ ID NO: 1595089 - RNA, 19 nt, Artificial Sequence
  Description of Artificial Sequence: Synthetic oligonucleotide
uuuagucugucuacauagg

SEQ ID NO: 1595090 - RNA, 19 nt, Artificial Sequence
  Description of Artificial Sequence: Synthetic oligonucleotide
aggucagguuacuaggugc

SEQ ID NO: 1595091 - RNA, 19 nt, Artificial Sequence
  Description of Artificial Sequence: Synthetic oligonucleotide
uuguaggugagcacaaagc

SEQ ID NO: 1595092 - RNA, 19 nt, Artificial Sequence
  Description of Artificial Sequence: Synthetic oligonucleotide
guuacuaggugccaggcug

SEQ ID NO: 1595093 - RNA, 19 nt, Artificial Sequence
  Description of Artificial Sequence: Synthetic oligonucleotide
acugugcugaguguuaacc

SEQ ID NO: 1595094 - RNA, 19 nt, Artificial Sequence
  Description of Artificial Sequence: Synthetic oligonucleotide
agccauggagcauacaauc

SEQ ID NO: 1595095 - RNA, 19 nt, Artificial Sequence
  Description of Artificial Sequence: Synthetic oligonucleotide
uuagucugucuacauagga

SEQ ID NO: 1595096 - RNA, 19 nt, Artificial Sequence
  Description of Artificial Sequence: Synthetic oligonucleotide
agaccgugaucccaaaacg

SEQ ID NO: 1595097 - RNA, 19 nt, Artificial Sequence
  Description of Artificial Sequence: Synthetic oligonucleotide
auuguaccaggauccagac

SEQ ID NO: 1595098 - RNA, 19 nt, Artificial Sequence
  Description of Artificial Sequence: Synthetic oligonucleotide
uggucccgcaguaaaauag

SEQ ID NO: 1595099 - RNA, 19 nt, Artificial Sequence
  Description of Artificial Sequence: Synthetic oligonucleotide
aaagaggagccagcaaugg

SEQ ID NO: 1595100 - RNA, 19 nt, Artificial Sequence
  Description of Artificial Sequence: Synthetic oligonucleotide
ugcucacccagcuuguagg

SEQ ID NO: 1595101 - RNA, 19 nt, Artificial Sequence
  Description of Artificial Sequence: Synthetic oligonucleotide
uuuuaacagccauggagca

SEQ ID NO: 1595102 - RNA, 19 nt, Artificial Sequence
  Description of Artificial Sequence: Synthetic oligonucleotide
ugucugaccagcgugcggg

SEQ ID NO: 1595103 - RNA, 19 nt, Artificial Sequence
  Description of Artificial Sequence: Synthetic oligonucleotide
cucaggucagguuacuagg

SEQ ID NO: 1595104 - RNA, 19 nt, Artificial Sequence
  Description of Artificial Sequence: Synthetic oligonucleotide
agaagauaggggugugugg

SEQ ID NO: 1595105 - RNA, 19 nt, Artificial Sequence
  Description of Artificial Sequence: Synthetic oligonucleotide
caaucccuuggucagaccc

SEQ ID NO: 1595106 - RNA, 19 nt, Artificial Sequence
  Description of Artificial Sequence: Synthetic oligonucleotide
cagccaacaaaucuuguag

SEQ ID NO: 1595107 - RNA, 19 nt, Artificial Sequence
  Description of Artificial Sequence: Synthetic oligonucleotide
aagauaggggugugugggg

SEQ ID NO: 1595108 - RNA, 19 nt, Artificial Sequence
  Description of Artificial Sequence: Synthetic oligonucleotide
uuaaccagacccgagggga

SEQ ID NO: 1595109 - RNA, 19 nt, Artificial Sequence
  Description of Artificial Sequence: Synthetic oligonucleotide
ugcacaagauagaggcugg

SEQ ID NO: 1595110 - RNA, 19 nt, Artificial Sequence
  Description of Artificial Sequence: Synthetic oligonucleotide
ugcaugaccaguucguggu

SEQ ID NO: 1595111 - RNA, 19 nt, Artificial Sequence
  Description of Artificial Sequence: Synthetic oligonucleotide
cacaccgccaagaaauugc

SEQ ID NO: 1595112 - RNA, 19 nt, Artificial Sequence
  Description of Artificial Sequence: Synthetic oligonucleotide
ucgugauuguaccaggauc

SEQ ID NO: 1595113 - RNA, 19 nt, Artificial Sequence
  Description of Artificial Sequence: Synthetic oligonucleotide
acacgcgucagggagagac

SEQ ID NO: 1595114 - RNA, 19 nt, Artificial Sequence
  Description of Artificial Sequence: Synthetic oligonucleotide
uuggacagcgaguguaucc

SEQ ID NO: 1595115 - RNA, 19 nt, Artificial Sequence
  Description of Artificial Sequence: Synthetic oligonucleotide
agcacaaagccugcugucc

SEQ ID NO: 1595116 - RNA, 19 nt, Artificial Sequence
  Description of Artificial Sequence: Synthetic oligonucleotide
uagaagauaggggugugug

SEQ ID NO: 1595117 - RNA, 19 nt, Artificial Sequence
  Description of Artificial Sequence: Synthetic oligonucleotide
accucaauagggaaagagg

SEQ ID NO: 1595118 - RNA, 19 nt, Artificial Sequence
  Description of Artificial Sequence: Synthetic oligonucleotide
ugucuacauaggaucagga

SEQ ID NO: 1595119 - RNA, 19 nt, Artificial Sequence
  Description of Artificial Sequence: Synthetic oligonucleotide
agggacacugugcugagug

SEQ ID NO: 1595120 - RNA, 19 nt, Artificial Sequence
  Description of Artificial Sequence: Synthetic oligonucleotide
guuaaccagacccgagggg

SEQ ID NO: 1595121 - RNA, 19 nt, Artificial Sequence
  Description of Artificial Sequence: Synthetic oligonucleotide
gaccucaauagggaaagag

SEQ ID NO: 1595122 - RNA, 19 nt, Artificial Sequence
  Description of Artificial Sequence: Synthetic oligonucleotide
cuccauagacccaagucug

SEQ ID NO: 1595123 - RNA, 19 nt, Artificial Sequence
  Description of Artificial Sequence: Synthetic oligonucleotide
gaaagcuaggguuuagucu

SEQ ID NO: 1595124 - RNA, 19 nt, Artificial Sequence
  Description of Artificial Sequence: Synthetic oligonucleotide
agggagagaccaugguccc

SEQ ID NO: 1595125 - RNA, 19 nt, Artificial Sequence
  Description of Artificial Sequence: Synthetic oligonucleotide
gauuguaccaggauccaga

SEQ ID NO: 1595126 - RNA, 19 nt, Artificial Sequence
  Description of Artificial Sequence: Synthetic oligonucleotide
uggggacucgauaucccgg

SEQ ID NO: 1595127 - RNA, 19 nt, Artificial Sequence
  Description of Artificial Sequence: Synthetic oligonucleotide
uccagaaugggcagaccug

SEQ ID NO: 1595128 - RNA, 19 nt, Artificial Sequence
  Description of Artificial Sequence: Synthetic oligonucleotide
agcauacaaucccuugguc

SEQ ID NO: 1595129 - RNA, 19 nt, Artificial Sequence
  Description of Artificial Sequence: Synthetic oligonucleotide
agagccacgucuugcacug

SEQ ID NO: 1595130 - RNA, 19 nt, Artificial Sequence
  Description of Artificial Sequence: Synthetic oligonucleotide
gagaugugggcccaggcca

SEQ ID NO: 1595131 - RNA, 19 nt, Artificial Sequence
  Description of Artificial Sequence: Synthetic oligonucleotide
caauagggaaagaggcugc

SEQ ID NO: 1595132 - RNA, 19 nt, Artificial Sequence
  Description of Artificial Sequence: Synthetic oligonucleotide
ucaggucagguuacuaggu

SEQ ID NO: 1595133 - RNA, 19 nt, Artificial Sequence
  Description of Artificial Sequence: Synthetic oligonucleotide
aaaacgcacacuggggacu

SEQ ID NO: 1595134 - RNA, 19 nt, Artificial Sequence
  Description of Artificial Sequence: Synthetic oligonucleotide
cagaccgugaucccaaaac

SEQ ID NO: 1595135 - RNA, 19 nt, Artificial Sequence
  Description of Artificial Sequence: Synthetic oligonucleotide
ggcaguggugaccacaccg

SEQ ID NO: 1595136 - RNA, 19 nt, Artificial Sequence
  Description of Artificial Sequence: Synthetic oligonucleotide
uggagcauacaaucccuug

SEQ ID NO: 1595137 - RNA, 19 nt, Artificial Sequence
  Description of Artificial Sequence: Synthetic oligonucleotide
cccgcaguaaaauaggcag

SEQ ID NO: 1595138 - RNA, 19 nt, Artificial Sequence
  Description of Artificial Sequence: Synthetic oligonucleotide
gaggcuguaaugcguggcc

SEQ ID NO: 1595139 - RNA, 19 nt, Artificial Sequence
  Description of Artificial Sequence: Synthetic oligonucleotide
uguacgguguucccggguc

SEQ ID NO: 1595140 - RNA, 19 nt, Artificial Sequence
  Description of Artificial Sequence: Synthetic oligonucleotide
auaggcagcaagccggacu

SEQ ID NO: 1595141 - RNA, 19 nt, Artificial Sequence
  Description of Artificial Sequence: Synthetic oligonucleotide
ucccgcaguaaaauaggca

SEQ ID NO: 1595142 - RNA, 19 nt, Artificial Sequence
  Description of Artificial Sequence: Synthetic oligonucleotide
cagguuacagcgcccaagc

SEQ ID NO: 1595143 - RNA, 19 nt, Artificial Sequence
  Description of Artificial Sequence: Synthetic oligonucleotide
ucagguuacuaggugccag

SEQ ID NO: 1595144 - RNA, 19 nt, Artificial Sequence
  Description of Artificial Sequence: Synthetic oligonucleotide
cgugauuguaccaggaucc

SEQ ID NO: 1595145 - RNA, 19 nt, Artificial Sequence
  Description of Artificial Sequence: Synthetic oligonucleotide
cugcacaagauagaggcug

SEQ ID NO: 1595146 - RNA, 19 nt, Artificial Sequence
  Description of Artificial Sequence: Synthetic oligonucleotide
ucucgugauuguaccagga

SEQ ID NO: 1595147 - RNA, 19 nt, Artificial Sequence
  Description of Artificial Sequence: Synthetic oligonucleotide
gacugcaguccauagggca

SEQ ID NO: 1595148 - RNA, 19 nt, Artificial Sequence
  Description of Artificial Sequence: Synthetic oligonucleotide
guuacagcgcccaagccac

SEQ ID NO: 1595149 - RNA, 19 nt, Artificial Sequence
  Description of Artificial Sequence: Synthetic oligonucleotide
auaggaucaggaacaauca

SEQ ID NO: 1595150 - RNA, 19 nt, Artificial Sequence
  Description of Artificial Sequence: Synthetic oligonucleotide
ucugucuacauaggaucag

SEQ ID NO: 1595151 - RNA, 19 nt, Artificial Sequence
  Description of Artificial Sequence: Synthetic oligonucleotide
agagcagucuggcaugcca

SEQ ID NO: 1595152 - RNA, 19 nt, Artificial Sequence
  Description of Artificial Sequence: Synthetic oligonucleotide
agguuacagcgcccaagcc

SEQ ID NO: 1595153 - RNA, 19 nt, Artificial Sequence
  Description of Artificial Sequence: Synthetic oligonucleotide
gacccugcacaagauagag

SEQ ID NO: 1595154 - RNA, 19 nt, Artificial Sequence
  Description of Artificial Sequence: Synthetic oligonucleotide
caaaacgcacacuggggac

SEQ ID NO: 1595155 - RNA, 19 nt, Artificial Sequence
  Description of Artificial Sequence: Synthetic oligonucleotide
aaacgcacacuggggacuc

SEQ ID NO: 1595156 - RNA, 19 nt, Artificial Sequence
  Description of Artificial Sequence: Synthetic oligonucleotide
gaacaggcugcucgcaccc

SEQ ID NO: 1595157 - RNA, 19 nt, Artificial Sequence
  Description of Artificial Sequence: Synthetic oligonucleotide
cagucuggcaugccaaacc

SEQ ID NO: 1595158 - RNA, 19 nt, Artificial Sequence
  Description of Artificial Sequence: Synthetic oligonucleotide
ggaucaggaacaaucagac

SEQ ID NO: 1595159 - RNA, 19 nt, Artificial Sequence
  Description of Artificial Sequence: Synthetic oligonucleotide
gaccgugaucccaaaacgc

SEQ ID NO: 1595160 - RNA, 19 nt, Artificial Sequence
  Description of Artificial Sequence: Synthetic oligonucleotide
uucguggugggaucagaug

SEQ ID NO: 1595161 - RNA, 19 nt, Artificial Sequence
  Description of Artificial Sequence: Synthetic oligonucleotide
augaccaguucgugguggg

SEQ ID NO: 1595162 - RNA, 19 nt, Artificial Sequence
  Description of Artificial Sequence: Synthetic oligonucleotide
uggacagcgaguguaucca

SEQ ID NO: 1595163 - RNA, 19 nt, Artificial Sequence
  Description of Artificial Sequence: Synthetic oligonucleotide
gguacugagguagaagagc

SEQ ID NO: 1595164 - RNA, 19 nt, Artificial Sequence
  Description of Artificial Sequence: Synthetic oligonucleotide
uggucagacccacacgcgu

SEQ ID NO: 1595165 - RNA, 19 nt, Artificial Sequence
  Description of Artificial Sequence: Synthetic oligonucleotide
cucucgugauuguaccagg

SEQ ID NO: 1595166 - RNA, 19 nt, Artificial Sequence
  Description of Artificial Sequence: Synthetic oligonucleotide
uccauagacccaagucuga

SEQ ID NO: 1595167 - RNA, 19 nt, Artificial Sequence
  Description of Artificial Sequence: Synthetic oligonucleotide
ugccaacuggcuacagugc

SEQ ID NO: 1595168 - RNA, 19 nt, Artificial Sequence
  Description of Artificial Sequence: Synthetic oligonucleotide
uggcuacagugcaucauca

SEQ ID NO: 1595169 - RNA, 19 nt, Artificial Sequence
  Description of Artificial Sequence: Synthetic oligonucleotide
gaacaaucagaccgugauc

SEQ ID NO: 1595170 - RNA, 19 nt, Artificial Sequence
  Description of Artificial Sequence: Synthetic oligonucleotide
cugaucccagcuuguacgc

SEQ ID NO: 1595171 - RNA, 19 nt, Artificial Sequence
  Description of Artificial Sequence: Synthetic oligonucleotide
accaguucguggugggauc

SEQ ID NO: 1595172 - RNA, 19 nt, Artificial Sequence
  Description of Artificial Sequence: Synthetic oligonucleotide
gaucccagcuuguacgcca

SEQ ID NO: 1595173 - RNA, 19 nt, Artificial Sequence
  Description of Artificial Sequence: Synthetic oligonucleotide
gcauacaaucccuugguca

SEQ ID NO: 1595174 - RNA, 19 nt, Artificial Sequence
  Description of Artificial Sequence: Synthetic oligonucleotide
ugcccaacaguuccagagu

SEQ ID NO: 1595175 - RNA, 19 nt, Artificial Sequence
  Description of Artificial Sequence: Synthetic oligonucleotide
cacaagauagaggcuggcc

SEQ ID NO: 1595176 - RNA, 19 nt, Artificial Sequence
  Description of Artificial Sequence: Synthetic oligonucleotide
ugggguacugagguagaag

SEQ ID NO: 1595177 - RNA, 19 nt, Artificial Sequence
  Description of Artificial Sequence: Synthetic oligonucleotide
gguuacagcgcccaagcca

SEQ ID NO: 1595178 - RNA, 19 nt, Artificial Sequence
  Description of Artificial Sequence: Synthetic oligonucleotide
cagcaauggagcagguuac

SEQ ID NO: 1595179 - RNA, 19 nt, Artificial Sequence
  Description of Artificial Sequence: Synthetic oligonucleotide
gauccagacuggccccugg

SEQ ID NO: 1595180 - RNA, 19 nt, Artificial Sequence
  Description of Artificial Sequence: Synthetic oligonucleotide
uacaaucccuuggucagac

SEQ ID NO: 1595181 - RNA, 19 nt, Artificial Sequence
  Description of Artificial Sequence: Synthetic oligonucleotide
aguauaaggaaggcagcaa

SEQ ID NO: 1595182 - RNA, 19 nt, Artificial Sequence
  Description of Artificial Sequence: Synthetic oligonucleotide
caagaaauugcugcagaca

SEQ ID NO: 1595183 - RNA, 19 nt, Artificial Sequence
  Description of Artificial Sequence: Synthetic oligonucleotide
cagaagaagcgggaacagg

SEQ ID NO: 1595184 - RNA, 19 nt, Artificial Sequence
  Description of Artificial Sequence: Synthetic oligonucleotide
cuaggguuuagucugucua

SEQ ID NO: 1595185 - RNA, 19 nt, Artificial Sequence
  Description of Artificial Sequence: Synthetic oligonucleotide
gucuacauaggaucaggaa

SEQ ID NO: 1595186 - RNA, 19 nt, Artificial Sequence
  Description of Artificial Sequence: Synthetic oligonucleotide
accauggucccgcaguaaa

SEQ ID NO: 1595187 - RNA, 19 nt, Artificial Sequence
  Description of Artificial Sequence: Synthetic oligonucleotide
agagccccaccuaaagagg

SEQ ID NO: 1595188 - RNA, 19 nt, Artificial Sequence
  Description of Artificial Sequence: Synthetic oligonucleotide
aaucccuuggucagaccca

SEQ ID NO: 1595189 - RNA, 19 nt, Artificial Sequence
  Description of Artificial Sequence: Synthetic oligonucleotide
cggacugcaguccauaggg

SEQ ID NO: 1595190 - RNA, 19 nt, Artificial Sequence
  Description of Artificial Sequence: Synthetic oligonucleotide
gcuacagugcaucaucaca

SEQ ID NO: 1595191 - RNA, 19 nt, Artificial Sequence
  Description of Artificial Sequence: Synthetic oligonucleotide
cacaaagccugcuguccag

SEQ ID NO: 1595192 - RNA, 19 nt, Artificial Sequence
  Description of Artificial Sequence: Synthetic oligonucleotide
aggggagccccgccugucc

SEQ ID NO: 1595193 - RNA, 19 nt, Artificial Sequence
  Description of Artificial Sequence: Synthetic oligonucleotide
cucagcgcggaaagcuagg

SEQ ID NO: 1595194 - RNA, 19 nt, Artificial Sequence
  Description of Artificial Sequence: Synthetic oligonucleotide
uuguaccaggauccagacu

SEQ ID NO: 1595195 - RNA, 19 nt, Artificial Sequence
  Description of Artificial Sequence: Synthetic oligonucleotide
gggguuaugcucugagacc

SEQ ID NO: 1595196 - RNA, 19 nt, Artificial Sequence
  Description of Artificial Sequence: Synthetic oligonucleotide
accgugaucccaaaacgca

SEQ ID NO: 1595197 - RNA, 19 nt, Artificial Sequence
  Description of Artificial Sequence: Synthetic oligonucleotide
uagcagcuugcccaacagu

SEQ ID NO: 1595198 - RNA, 19 nt, Artificial Sequence
  Description of Artificial Sequence: Synthetic oligonucleotide
ucagaccgugaucccaaaa

SEQ ID NO: 1595199 - RNA, 19 nt, Artificial Sequence
  Description of Artificial Sequence: Synthetic oligonucleotide
guagagccccaccuaaaga

SEQ ID NO: 1595200 - RNA, 19 nt, Artificial Sequence
  Description of Artificial Sequence: Synthetic oligonucleotide
gugaucccaaaacgcacac

SEQ ID NO: 1595201 - RNA, 19 nt, Artificial Sequence
  Description of Artificial Sequence: Synthetic oligonucleotide
aagcaccaugguccagcag

SEQ ID NO: 1595202 - RNA, 19 nt, Artificial Sequence
  Description of Artificial Sequence: Synthetic oligonucleotide
ucagauggcucagcgcgga

SEQ ID NO: 1595203 - RNA, 19 nt, Artificial Sequence
  Description of Artificial Sequence: Synthetic oligonucleotide
aggguuuagucugucuaca

SEQ ID NO: 1595204 - RNA, 19 nt, Artificial Sequence
  Description of Artificial Sequence: Synthetic oligonucleotide
ggaacaaucagaccgugau

SEQ ID NO: 1595205 - RNA, 19 nt, Artificial Sequence
  Description of Artificial Sequence: Synthetic oligonucleotide
gaagcaccaugguccagca

SEQ ID NO: 1595206 - RNA, 19 nt, Artificial Sequence
  Description of Artificial Sequence: Synthetic oligonucleotide
caugcaugaccaguucgug

SEQ ID NO: 1595207 - RNA, 19 nt, Artificial Sequence
  Description of Artificial Sequence: Synthetic oligonucleotide
ggucccgcaguaaaauagg

SEQ ID NO: 1595208 - RNA, 19 nt, Artificial Sequence
  Description of Artificial Sequence: Synthetic oligonucleotide
gaguguuaaccagacccga

SEQ ID NO: 1595209 - RNA, 19 nt, Artificial Sequence
  Description of Artificial Sequence: Synthetic oligonucleotide
ucgcacccugcucacccag

SEQ ID NO: 1595210 - RNA, 19 nt, Artificial Sequence
  Description of Artificial Sequence: Synthetic oligonucleotide
gaguuggacagcgagugua

SEQ ID NO: 1595211 - RNA, 19 nt, Artificial Sequence
  Description of Artificial Sequence: Synthetic oligonucleotide
ccaacaguuccagaguggc

SEQ ID NO: 1595212 - RNA, 19 nt, Artificial Sequence
  Description of Artificial Sequence: Synthetic oligonucleotide
acugaccucaauagggaaa

SEQ ID NO: 1595213 - RNA, 19 nt, Artificial Sequence
  Description of Artificial Sequence: Synthetic oligonucleotide
cucaauagggaaagaggcu

SEQ ID NO: 1595214 - RNA, 19 nt, Artificial Sequence
  Description of Artificial Sequence: Synthetic oligonucleotide
caacuggcuacagugcauc

SEQ ID NO: 1595215 - RNA, 19 nt, Artificial Sequence
  Description of Artificial Sequence: Synthetic oligonucleotide
ggagagaccauggucccgc

SEQ ID NO: 1595216 - RNA, 19 nt, Artificial Sequence
  Description of Artificial Sequence: Synthetic oligonucleotide
caccuguacgguguucccg

SEQ ID NO: 1595217 - RNA, 19 nt, Artificial Sequence
  Description of Artificial Sequence: Synthetic oligonucleotide
gcugcagcucucgugauug

SEQ ID NO: 1595218 - RNA, 19 nt, Artificial Sequence
  Description of Artificial Sequence: Synthetic oligonucleotide
auagggaaagaggcugcca

SEQ ID NO: 1595219 - RNA, 19 nt, Artificial Sequence
  Description of Artificial Sequence: Synthetic oligonucleotide
uacuaggugccaggcugag

SEQ ID NO: 1595220 - RNA, 19 nt, Artificial Sequence
  Description of Artificial Sequence: Synthetic oligonucleotide
guacgguguucccgggucc

SEQ ID NO: 1595221 - RNA, 19 nt, Artificial Sequence
  Description of Artificial Sequence: Synthetic oligonucleotide
uaccugguagcagcuugcc

SEQ ID NO: 1595222 - RNA, 19 nt, Artificial Sequence
  Description of Artificial Sequence: Synthetic oligonucleotide
uccaggaguuggacagcga

SEQ ID NO: 1595223 - RNA, 19 nt, Artificial Sequence
  Description of Artificial Sequence: Synthetic oligonucleotide
gcucucgugauuguaccag

SEQ ID NO: 1595224 - RNA, 19 nt, Artificial Sequence
  Description of Artificial Sequence: Synthetic oligonucleotide
gucccgcaguaaaauaggc

SEQ ID NO: 1595225 - RNA, 19 nt, Artificial Sequence
  Description of Artificial Sequence: Synthetic oligonucleotide
gacagcgaguguauccaga

SEQ ID NO: 1595226 - RNA, 19 nt, Artificial Sequence
  Description of Artificial Sequence: Synthetic oligonucleotide
cacgcgucagggagagacc

SEQ ID NO: 1595227 - RNA, 19 nt, Artificial Sequence
  Description of Artificial Sequence: Synthetic oligonucleotide
acccugcacaagauagagg

SEQ ID NO: 1595228 - RNA, 19 nt, Artificial Sequence
  Description of Artificial Sequence: Synthetic oligonucleotide
auggucccgcaguaaaaua

SEQ ID NO: 1595229 - RNA, 19 nt, Artificial Sequence
  Description of Artificial Sequence: Synthetic oligonucleotide
agaccauggucccgcagua

SEQ ID NO: 1595230 - RNA, 19 nt, Artificial Sequence
  Description of Artificial Sequence: Synthetic oligonucleotide
gucugaccagcgugcgggg

SEQ ID NO: 1595231 - RNA, 19 nt, Artificial Sequence
  Description of Artificial Sequence: Synthetic oligonucleotide
gguuuagucugucuacaua

SEQ ID NO: 1595232 - RNA, 19 nt, Artificial Sequence
  Description of Artificial Sequence: Synthetic oligonucleotide
aacgcacacuggggacucg

SEQ ID NO: 1595233 - RNA, 19 nt, Artificial Sequence
  Description of Artificial Sequence: Synthetic oligonucleotide
ccagcaauggagcagguua

SEQ ID NO: 1595234 - RNA, 19 nt, Artificial Sequence
  Description of Artificial Sequence: Synthetic oligonucleotide
ccaagccacuccauagacc

SEQ ID NO: 1595235 - RNA, 19 nt, Artificial Sequence
  Description of Artificial Sequence: Synthetic oligonucleotide
ucaugauggugggcagccc

SEQ ID NO: 1595236 - RNA, 19 nt, Artificial Sequence
  Description of Artificial Sequence: Synthetic oligonucleotide
agcuaggguuuagucuguc

SEQ ID NO: 1595237 - RNA, 19 nt, Artificial Sequence
  Description of Artificial Sequence: Synthetic oligonucleotide
ccgcaguaaaauaggcagc

SEQ ID NO: 1595238 - RNA, 19 nt, Artificial Sequence
  Description of Artificial Sequence: Synthetic oligonucleotide
acgcgucagggagagacca

SEQ ID NO: 1595239 - RNA, 19 nt, Artificial Sequence
  Description of Artificial Sequence: Synthetic oligonucleotide
acaccgccaagaaauugcu

SEQ ID NO: 1595240 - RNA, 19 nt, Artificial Sequence
  Description of Artificial Sequence: Synthetic oligonucleotide
auacaaucccuuggucaga

SEQ ID NO: 1595241 - RNA, 19 nt, Artificial Sequence
  Description of Artificial Sequence: Synthetic oligonucleotide
gcucgcacccugcucaccc

SEQ ID NO: 1595242 - RNA, 19 nt, Artificial Sequence
  Description of Artificial Sequence: Synthetic oligonucleotide
gcuuguacgccaccaccug

SEQ ID NO: 1595243 - RNA, 19 nt, Artificial Sequence
  Description of Artificial Sequence: Synthetic oligonucleotide
caccgccaagaaauugcug

SEQ ID NO: 1595244 - RNA, 19 nt, Artificial Sequence
  Description of Artificial Sequence: Synthetic oligonucleotide
uguucccgggucccagcuc

SEQ ID NO: 1595245 - RNA, 19 nt, Artificial Sequence
  Description of Artificial Sequence: Synthetic oligonucleotide
gugggaucagauggcucag

SEQ ID NO: 1595246 - RNA, 19 nt, Artificial Sequence
  Description of Artificial Sequence: Synthetic oligonucleotide
aguucguggugggaucaga

SEQ ID NO: 1595247 - RNA, 19 nt, Artificial Sequence
  Description of Artificial Sequence: Synthetic oligonucleotide
ccacgucuugcacugcugc

SEQ ID NO: 1595248 - RNA, 19 nt, Artificial Sequence
  Description of Artificial Sequence: Synthetic oligonucleotide
gucuggccaguagagcccc

SEQ ID NO: 1595249 - RNA, 19 nt, Artificial Sequence
  Description of Artificial Sequence: Synthetic oligonucleotide
ugaccaguucgugguggga

SEQ ID NO: 1595250 - RNA, 19 nt, Artificial Sequence
  Description of Artificial Sequence: Synthetic oligonucleotide
ccaguggcgcccaugccag

SEQ ID NO: 1595251 - RNA, 19 nt, Artificial Sequence
  Description of Artificial Sequence: Synthetic oligonucleotide
uacagcgcccaagccacuc

SEQ ID NO: 1595252 - RNA, 19 nt, Artificial Sequence
  Description of Artificial Sequence: Synthetic oligonucleotide
agauggcucagcgcggaaa

SEQ ID NO: 1595253 - RNA, 19 nt, Artificial Sequence
  Description of Artificial Sequence: Synthetic oligonucleotide
ggcuacagugcaucaucac

SEQ ID NO: 1595254 - RNA, 19 nt, Artificial Sequence
  Description of Artificial Sequence: Synthetic oligonucleotide
cacugaccucaauagggaa

SEQ ID NO: 1595255 - RNA, 19 nt, Artificial Sequence
  Description of Artificial Sequence: Synthetic oligonucleotide
gcugaguguuaaccagacc

SEQ ID NO: 1595256 - RNA, 19 nt, Artificial Sequence
  Description of Artificial Sequence: Synthetic oligonucleotide
ccgugaucccaaaacgcac

SEQ ID NO: 1595257 - RNA, 19 nt, Artificial Sequence
  Description of Artificial Sequence: Synthetic oligonucleotide
gcuguaaugcguggccugc

SEQ ID NO: 1595258 - RNA, 19 nt, Artificial Sequence
  Description of Artificial Sequence: Synthetic oligonucleotide
ggacagcgaguguauccag

SEQ ID NO: 1595259 - RNA, 19 nt, Artificial Sequence
  Description of Artificial Sequence: Synthetic oligonucleotide
ccccaccuaaagaggagcc

SEQ ID NO: 1595260 - RNA, 19 nt, Artificial Sequence
  Description of Artificial Sequence: Synthetic oligonucleotide
ccauagacccaagucugag

SEQ ID NO: 1595261 - RNA, 19 nt, Artificial Sequence
  Description of Artificial Sequence: Synthetic oligonucleotide
cccaagccacuccauagac

SEQ ID NO: 1595262 - RNA, 19 nt, Artificial Sequence
  Description of Artificial Sequence: Synthetic oligonucleotide
gggaacaggcugcucgcac

SEQ ID NO: 1595263 - RNA, 19 nt, Artificial Sequence
  Description of Artificial Sequence: Synthetic oligonucleotide
acauaggaucaggaacaau

SEQ ID NO: 1595264 - RNA, 19 nt, Artificial Sequence
  Description of Artificial Sequence: Synthetic oligonucleotide
cuugcccaacaguuccaga

SEQ ID NO: 1595265 - RNA, 19 nt, Artificial Sequence
  Description of Artificial Sequence: Synthetic oligonucleotide
gcccugucugaccagcgug

SEQ ID NO: 1595266 - RNA, 19 nt, Artificial Sequence
  Description of Artificial Sequence: Synthetic oligonucleotide
cccugggguacugagguag

SEQ ID NO: 1595267 - RNA, 19 nt, Artificial Sequence
  Description of Artificial Sequence: Synthetic oligonucleotide
gcgccaucaugaugguggg

SEQ ID NO: 1595268 - RNA, 19 nt, Artificial Sequence
  Description of Artificial Sequence: Synthetic oligonucleotide
aucagaccgugaucccaaa

SEQ ID NO: 1595269 - RNA, 19 nt, Artificial Sequence
  Description of Artificial Sequence: Synthetic oligonucleotide
ucccuuggucagacccaca

SEQ ID NO: 1595270 - RNA, 19 nt, Artificial Sequence
  Description of Artificial Sequence: Synthetic oligonucleotide
ccggacugcaguccauagg

SEQ ID NO: 1595271 - RNA, 19 nt, Artificial Sequence
  Description of Artificial Sequence: Synthetic oligonucleotide
gcucugagaccugagggca

SEQ ID NO: 1595272 - RNA, 19 nt, Artificial Sequence
  Description of Artificial Sequence: Synthetic oligonucleotide
ucuggccaguagagcccca

SEQ ID NO: 1595273 - RNA, 19 nt, Artificial Sequence
  Description of Artificial Sequence: Synthetic oligonucleotide
agcugcagcucucgugauu

SEQ ID NO: 1595274 - RNA, 19 nt, Artificial Sequence
  Description of Artificial Sequence: Synthetic oligonucleotide
gcucagcgcggaaagcuag

SEQ ID NO: 1595275 - RNA, 19 nt, Artificial Sequence
  Description of Artificial Sequence: Synthetic oligonucleotide
aagccacuccauagaccca

SEQ ID NO: 1595276 - RNA, 19 nt, Artificial Sequence
  Description of Artificial Sequence: Synthetic oligonucleotide
aggcgaagcugcagcacug

SEQ ID NO: 1595277 - RNA, 19 nt, Artificial Sequence
  Description of Artificial Sequence: Synthetic oligonucleotide
augccaguuuuaacagcca

SEQ ID NO: 1595278 - RNA, 19 nt, Artificial Sequence
  Description of Artificial Sequence: Synthetic oligonucleotide
gguguucccgggucccagc

SEQ ID NO: 1595279 - RNA, 19 nt, Artificial Sequence
  Description of Artificial Sequence: Synthetic oligonucleotide
uggcgcccaugccaguuuu

SEQ ID NO: 1595280 - RNA, 19 nt, Artificial Sequence
  Description of Artificial Sequence: Synthetic oligonucleotide
gucagguuacuaggugcca

SEQ ID NO: 1595281 - RNA, 19 nt, Artificial Sequence
  Description of Artificial Sequence: Synthetic oligonucleotide
uguccaccaguggcgccca

SEQ ID NO: 1595282 - RNA, 19 nt, Artificial Sequence
  Description of Artificial Sequence: Synthetic oligonucleotide
gccggacugcaguccauag

SEQ ID NO: 1595283 - RNA, 19 nt, Artificial Sequence
  Description of Artificial Sequence: Synthetic oligonucleotide
cagagccacgucuugcacu

SEQ ID NO: 1595284 - RNA, 19 nt, Artificial Sequence
  Description of Artificial Sequence: Synthetic oligonucleotide
ugcuguccagaagguucca

SEQ ID NO: 1595285 - RNA, 19 nt, Artificial Sequence
  Description of Artificial Sequence: Synthetic oligonucleotide
guagaagauaggggugugu

SEQ ID NO: 1595286 - RNA, 19 nt, Artificial Sequence
  Description of Artificial Sequence: Synthetic oligonucleotide
auggagcauacaaucccuu

SEQ ID NO: 1595287 - RNA, 19 nt, Artificial Sequence
  Description of Artificial Sequence: Synthetic oligonucleotide
aguggcgcccaugccaguu

SEQ ID NO: 1595288 - RNA, 19 nt, Artificial Sequence
  Description of Artificial Sequence: Synthetic oligonucleotide
cugcucgcacccugcucac

SEQ ID NO: 1595289 - RNA, 19 nt, Artificial Sequence
  Description of Artificial Sequence: Synthetic oligonucleotide
cgucuugcacugcugcacc

SEQ ID NO: 1595290 - RNA, 19 nt, Artificial Sequence
  Description of Artificial Sequence: Synthetic oligonucleotide
gggagagaccauggucccg

SEQ ID NO: 1595291 - RNA, 19 nt, Artificial Sequence
  Description of Artificial Sequence: Synthetic oligonucleotide
caguucguggugggaucag

SEQ ID NO: 1595292 - RNA, 19 nt, Artificial Sequence
  Description of Artificial Sequence: Synthetic oligonucleotide
gcgucagggagagaccaug

SEQ ID NO: 1595293 - RNA, 19 nt, Artificial Sequence
  Description of Artificial Sequence: Synthetic oligonucleotide
acgcacacuggggacucga

SEQ ID NO: 1595294 - RNA, 19 nt, Artificial Sequence
  Description of Artificial Sequence: Synthetic oligonucleotide
gccccaccuaaagaggagc

SEQ ID NO: 1595295 - RNA, 19 nt, Artificial Sequence
  Description of Artificial Sequence: Synthetic oligonucleotide
gcaagccggacugcagucc

SEQ ID NO: 1595296 - RNA, 19 nt, Artificial Sequence
  Description of Artificial Sequence: Synthetic oligonucleotide
ggacugcaguccauagggc

SEQ ID NO: 1595297 - RNA, 19 nt, Artificial Sequence
  Description of Artificial Sequence: Synthetic oligonucleotide
gaagcgggaacaggcugcu

SEQ ID NO: 1595298 - RNA, 19 nt, Artificial Sequence
  Description of Artificial Sequence: Synthetic oligonucleotide
ccagaaugggcagaccuga

SEQ ID NO: 1595299 - RNA, 19 nt, Artificial Sequence
  Description of Artificial Sequence: Synthetic oligonucleotide
cagagcagucuggcaugcc

SEQ ID NO: 1595300 - RNA, 19 nt, Artificial Sequence
  Description of Artificial Sequence: Synthetic oligonucleotide
cgcaguaaaauaggcagca

SEQ ID NO: 1595301 - RNA, 19 nt, Artificial Sequence
  Description of Artificial Sequence: Synthetic oligonucleotide
agacccgaggggagccccg

SEQ ID NO: 1595302 - RNA, 19 nt, Artificial Sequence
  Description of Artificial Sequence: Synthetic oligonucleotide
ggccaagagagggugggga

SEQ ID NO: 1595303 - RNA, 19 nt, Artificial Sequence
  Description of Artificial Sequence: Synthetic oligonucleotide
cucgugauuguaccaggau

SEQ ID NO: 1595304 - RNA, 19 nt, Artificial Sequence
  Description of Artificial Sequence: Synthetic oligonucleotide
gcccaagccacuccauaga

SEQ ID NO: 1595305 - RNA, 19 nt, Artificial Sequence
  Description of Artificial Sequence: Synthetic oligonucleotide
ugcucgcacccugcucacc

SEQ ID NO: 1595306 - RNA, 19 nt, Artificial Sequence
  Description of Artificial Sequence: Synthetic oligonucleotide
guauccagagccacgucuu

SEQ ID NO: 1595307 - RNA, 19 nt, Artificial Sequence
  Description of Artificial Sequence: Synthetic oligonucleotide
gacccgaggggagccccgc

SEQ ID NO: 1595308 - RNA, 19 nt, Artificial Sequence
  Description of Artificial Sequence: Synthetic oligonucleotide
gcacaagauagaggcuggc

SEQ ID NO: 1595309 - RNA, 19 nt, Artificial Sequence
  Description of Artificial Sequence: Synthetic oligonucleotide
ggagcagguuacagcgccc

SEQ ID NO: 1595310 - RNA, 19 nt, Artificial Sequence
  Description of Artificial Sequence: Synthetic oligonucleotide
ggaaagaggcugccagugu

SEQ ID NO: 1595311 - RNA, 19 nt, Artificial Sequence
  Description of Artificial Sequence: Synthetic oligonucleotide
gcagucuggcaugccaaac

SEQ ID NO: 1595312 - RNA, 19 nt, Artificial Sequence
  Description of Artificial Sequence: Synthetic oligonucleotide
ggccaguagagccccaccu

SEQ ID NO: 1595313 - RNA, 19 nt, Artificial Sequence
  Description of Artificial Sequence: Synthetic oligonucleotide
ccaaggcgaagcugcagca

SEQ ID NO: 1595314 - RNA, 19 nt, Artificial Sequence
  Description of Artificial Sequence: Synthetic oligonucleotide
ccaugcaugaccaguucgu

SEQ ID NO: 1595315 - RNA, 19 nt, Artificial Sequence
  Description of Artificial Sequence: Synthetic oligonucleotide
ccgccaagaaauugcugca
